United States Patent Application Publication US 2008/0256662 A1 - sequence listing, part 2

SEQ ID NO: 8907 - DNA, 266 bp, Glycine max
  unsure (1)..(266): unsure at all n locations; Clone ID: 701149083H1
aatcaatatgtaatgaaatgtattatngagggttcttgctgttgcggatatcntctattngatgttggacgagtttgcggtngaanggggttggggctctctttctttgcntgaaggtttgcaganaatcccaaaaaatccccacattcaancnactatctctttgagtcagtagccattcttgttaggcgggcttntgagggggactcaactcttgtatctgtttntgaagcaagcctttttcctaggctngaagtaaatattga

SEQ ID NO: 8908 - DNA, 250 bp, Glycine max
  unsure (1)..(250): unsure at all n locations; Clone ID: 701149084H1
gagtgaaagaaaggcagcgatggaagaagacttcgacatccccgggcggcgaggaaatggatctcggcgaaagaccaggtcggcgaaggagagggaagatcgggtctggcggcctcaagaagangctcctcaaggaaggtcaaggctgggaaaccccngaagtcggtgaccgaagtccaagtttcatnacacggggactttgctcgacgggactaagttcgattcgagccgcgacagggattctcccttc

SEQ ID NO: 8909 - DNA, 251 bp, Glycine max
  unsure (1)..(251): unsure at all n locations; Clone ID: 701149086H1
tctaggcntcccaaaattcacnaaaggctgaatcctgaaaggtccaaaaaattncccataggatttttccttgggtggtgaaattaactaacnanccaacttaattaatgccgggaaancatggctggaaaccctggtccagttggccnaagccggganaccctttcttaagnagccaggagncattaactnaaggcnnaggttcttncangtaaccgggaaaaaggggaattgggtncntaccatggttt

SEQ ID NO: 8910 - DNA, 251 bp, Glycine max
  unsure (1)..(251): unsure at all n locations; Clone ID: 701149087H1
gagcagcaaaanaacactggcaatcattcagtaatgncagaagatcaatgtgganaataggttcccgtactnagaangcatggaaagtacccattaaaatgaatttatgntccatacaaacttgtacaaatacactagcatggtaataaacttttaaaaagaatcggttaacttctctcgacacagtttctaattttgaagaacatacatgattagatactaacaacttttttntncttatgtcttaaaat

SEQ ID NO: 8911 - DNA, 246 bp, Glycine max
  unsure (1)..(246): unsure at all n locations; Clone ID: 701149088H1
gactgattataatnttaaattttgaaagtananataatgcgtgacttacactaatattttcataaaactgtggcacaaactttgatgtagacttgaattcttntatgtcaaactcgtatggcaatttcatccattactattatggaaggatgctttctaatagggagtcagccagacgctcaagaaggagaaagcaggctcatttaactgagctgggagacacaggtctcccaattacgaggtgaa

SEQ ID NO: 8912 - DNA, 245 bp, Glycine max
  unsure (1)..(245): unsure at all n locations; Clone ID: 701149089H1
gcttcttctctgttctcttctcatctcctcagatcgatcaagcatcagggggctttgaggggtgattctctggtgtggtagcattcagcacaatagaaaatgttttttgacggatatggatatcatggggcatcatttgagcagatatatcgatgctacccagcttcctttattgaaaagccccaaattgaaagtggtgacaaaattatcatgcctccatcagcccttgaccgtctagnntctgg

SEQ ID NO: 8913 - DNA, 253 bp, Glycine max
  unsure (1)..(253): unsure at all n locations; Clone ID: 701149090H1
ggtggcagttgtgtgacnnagaaattaagctagagcttcatagtncttctnctgtgtctcacctttccttctctcccnntcagacaaagggccaaaaaatcnnnnnnnnnnnnnnnnnnnnnnnatncccaaaaccatggcccacagntcatctaagtttcgcctttgggantnctaggtaacattgcctccttngtgngctttntggcaccactaaccaacattttatagagttggtaagaagaantcancc

SEQ ID NO: 8914 - DNA, 252 bp, Glycine max
  unsure (1)..(252): unsure at all n locations; Clone ID: 701149091H1
ggcacaagtgagtttgttgatcgagataactagaaacagtgtgatgaaaatgaaggtccttgttttcttcggtngcnacnaatttgggtaaccatggcaatgccnatgcgtacgataatgttccctcctccgaatgaacactggctatggcgcccgtactccggaggtgaaatgcgcaagttggaggcttgctgtggaagcacacaacatctttggctttgagaccatcctgaagagtgcgttgaagcaaca

SEQ ID NO: 8915 - DNA, 244 bp, Glycine max
  unsure (1)..(244): unsure at all n locations; Clone ID: 701149092H1
gagagaaccgacaggcaaacgaaaagtaaatcaatcaatcgttggaatcnctcaacttatcgcttcttcctgtttagattgggggttccgttcaatggncgacggcgagctnggnttcntcgaaccatgaaagtgctttcgantcggacnatgggggagcttcgagnagcggttcaatggacagtttcttcgangagcttctcaaggacacgcacgcgtgcacccanacccacangtgcaaccc

SEQ ID NO: 8916 - DNA, 241 bp, Glycine max
  unsure (1)..(241): unsure at all n locations; Clone ID: 701149093H1
acagacangtctcaaataaatgtaaatgtgctactactttgtacagcctacctgtgactcnntccccattaattaatccngctctgggaatgaccatagncgagnagcatatctnctttggacaaccccatacattnaattcaggcncngtgaacttgggtacagcttacaaacgttggnatttgggatgggattttgatactctcaggacttaaatcatgaggtatgagaaaaggnccga

SEQ ID NO: 8917 - DNA, 273 bp, Glycine max
  unsure (1)..(273): unsure at all n locations; Clone ID: 701149094H1
gggggagaaaacacatgagatcatatggatttgagagctcatcnctttcttgtaaatgaccacagaactctgcagagttgnatagcgaaagnaaaagcacccagaggaganagaaaggccagaaagangggttcatangagggagagagagaanggggggagcnccaccaaatgggttnccaaggagcgaaagnggggcggcatgncatgggnaaggngcaanttcttgggttnnatnnnaacnctncnnnngaanatccccgggnttttncc

SEQ ID NO: 8918 - DNA, 268 bp, Glycine max
  unsure (1)..(268): unsure at all n locations; Clone ID: 701149095H1
gaagcaanaaatggaaacccaaagtgcttctctcctctgtcttttttctctctcttgctatccttttngctagtggcactgctgcaagtgtaactccaagaagcgcngtgccnaagcccaccaagnnttcaacattcnancagaagcctttttccttccacttttccccttnggaattggtcctgccggcttaaccaggcagaaggagcagcaantntagntgggaagaggnnccagnnnttnggganaccttacactangnanggct

SEQ ID NO: 8919 - DNA, 299 bp, Glycine max
  Clone ID: 701149101H1
ggtgatttctgcgaaacagaggattgacaatacctccaatggtgtcattacggatgcaggattgtaaaactatgccttcatgctgtaatggttttaatgtttcggactggtatagctagctgttgttgtttaatgtatcaccattgcacacatgtgcaaattttgtgctcagcctaatgtatgtatgtacagtatcaagccttgagaatttacttaaattggtagcatctgttctctccccaatttttgggttctctttgactccaccacaatctattgttttgatcagggtgtttttg

SEQ ID NO: 8920 - DNA, 294 bp, Glycine max
  unsure (1)..(294): unsure at all n locations; Clone ID: 701149102H1
ggcacaagtgagtttgttgatcgagataactagaaacagtgtgatgaaaatgaaggtccttgttttcttcgttgctacaattttggtagcatggcaatgccatgcgtacgatatgttccctctccgaatgaacactggctatggtgcccgtactccggaggtgagatgcgcaagttggaggcttgctgtggaagcacacaacatctttggctttgagaccattcctgaagagtgcnccgaagcaacaaaggaatacatccatggcgaacaatatagatcagactccaaaacagt

SEQ ID NO: 8921 - DNA, 290 bp, Glycine max
  unsure (1)..(290): unsure at all n locations; Clone ID: 701149103H1
gaaacgaaaagaaaaaatanatnnatcaaagaacacaaacaaagaagaagcgcaaaatgaagagtgcgatttgtgggagaatcctctcttcccaaccacgtcttcaaaccaggggacacacattcaatttgtaaaggaccatactccaatctttgtgtacccatggctgtattggcaacaggacctggtaaaggaggcggggtgctggaaaagcccgttattgaaaaagtcaccctggccgtgagtctgaatttgnnttgaagtaancnggagtttngactattgacntc

SEQ ID NO: 8922 - DNA, 282 bp, Glycine max
  unsure (1)..(282): unsure at all n locations; Clone ID: 701149104H1
gacagcagcagagcaaaaganaganagaaagaaagtgcaacttccctctgttttgctcccctgtttaagccttatcataagcttagaatggcacacaaggaattttccattgccctagtgactctcattgttctctttgtcaacacganccttcnaaggtgcccanggctgactatggtggtgnttggcagagtgccnangccatttcctanggtgggggngatgcttctgncacaatgggtggancatgtgggtatggactttctanagccagggatatgc

SEQ ID NO: 8923 - DNA, 291 bp, Glycine max
  unsure (1)..(291): unsure at all n locations; Clone ID: 701149106H1
ggnagnanataatacgtgcatacatagctatctatntatctatagcaagtgcgtcangagacacgnggtaccctagctagagtgccattctgtggnntctntcttnctntctttctgcatcacatcacantttgcattgcctcgtgnncctttnncttctttgctctccaaaaatntcacacanacaggtatctagcaaatgggttctccaccannaagaaccatggntatncgganaatggganancaagggttttgaccaaggagangaggcaggncgttctgcacaca

SEQ ID NO: 8924 - DNA, 287 bp, Glycine max
  unsure (1)..(287): unsure at all n locations; Clone ID: 701149107H1
ggctgccgctctctgagaaaaacagatagtgtgggagagagaagagcggaagagaaaatgacgaccaggttcaagaagaacaggaagaagagaggtcacgttcagcgccggacacggccgtatcggaaagcaccgcaagcattcccggaggttcgcggtaacgccggtggcatggcattcaccaccgtattcctctttcgacaagtaccattcctggtttcttcgggaaggtaggcatgcgctatttccacaaatttcgcaacaantcttacaatccgatcatcaac

SEQ ID NO: 8925 - DNA, 132 bp, Glycine max
  unsure (1)..(132): unsure at all n locations; Clone ID: 701149108H1
ggaaggtaccnccaaaaaaaaaggaaaanngtcaagttgngaagggcnactcgcttggtagatttcttgcattttattattttgaaatttgangctgaaggcnccattttgagncagacacaacacagtnct

SEQ ID NO: 8926 - DNA, 231 bp, Glycine max
  unsure (1)..(231): unsure at all n locations; Clone ID: 701149109H1
gacaagcctcagtctcaacacagaagcagaaggaggagaagcagaaagaggagacgaagcaatggcgccgaagaagccccganccacgtcgaggaaccctgatttggtcaggggaattggcaaatattcgaggtcgcagatgtaccacaagangggcatctgggcnatcaggccaaaaacgncgtgnttgccctcncnagatcccaatnccanaccgaggcngggccnana

SEQ ID NO: 8927 - DNA, 271 bp, Glycine max
  Clone ID: 701149110H1
ggagctgaaaccgagaagaagaagatggagatgtatcagatctggagcaggagaatagcgttgggagcgttcgcgtttgttctgcttttcctatcggcctcagcagacgacgtcgttgtgctctctgaagataacttcgagaaggaagttggtcaggacagaggagctctcgttgagttctatgctccttggtgtggacactgcaaaaagcttgctccagaatatgaaaagctggtagcagcttcaagaaagccaaatctgttttaatcgg

SEQ ID NO: 8928 - DNA, 276 bp, Glycine max
  Clone ID: 701149111H1
ggcacaagtgagtttgttgatcgagataactagaaacagtgtgatgaaaatgaaggtccttgttttcttcgttgctacaattttggtagcatggcaatgccatgcgtacgatatgttccctctccgaatgaacactggctatggtgcccgtactccggaggtgaaatgcgcaagttggaggcttgctgtggaagcacacaacatctttggcttgagaccattcctgaagagtgcgttgaagcaacaaaggaatacatccatggcgaacaatataga

SEQ ID NO: 8929 - DNA, 275 bp, Glycine max
  unsure (1)..(275): unsure at all n locations; Clone ID: 701149112H1
tgggtgattagttttgacttatgactaagtttgactcggttgtctatccatgatatagggttttgtttcacctttttaaaataatcagaagttaaaaaaatctaattaaaatcaaaatttgttaattttaattagtttatcataaaatcaactttaaaaaaaattgtagatgtaaacaaacataaagtaggctgtacgtactttctacaaaataaaatanncnccgaattgataaggtaaaatatactatcatctaattataaatattatttata

SEQ ID NO: 8930 - DNA, 282 bp, Glycine max
  Clone ID: 701149114H1
gactgcgaaccagtagggactcccattccgactcttagccgccgatctctcaggggcttgcatcttctcaggtaagctgtgaagatgtacacatcaaggaagaaaatccacaaggataaggatgctgaaccaactgaatttgaagagtcagttggacaggcattgtttgatctggaaaataccaatcaggagcttaaaagtgatctgaaggatttatacataaactcagccgtgcaagttgatgtttctggaaaccgcaaggctgttgttattcatgtccct

SEQ ID NO: 8931 - DNA, 234 bp, Glycine max
  unsure (1)..(234): unsure at all n locations; Clone ID: 701149116H1
gaattnaacaagtnttcattgcncaaaaaatggggttcnacncaaggccaaataggagtgacatccaccttctcagcagaggaagaagccaccatagaggcaaagaccagagactnctttgatggggttgcaccacaacgccacacaaagctcaacgaagtgagtattcagctcaatatgtggatgtttctncaatgtncatcantcttnttttttcttnnatagagattnatg

SEQ ID NO: 8932 - DNA, 271 bp, Glycine max
  Clone ID: 701149117H1
ggaagagtgaagagaatgggctcccaagggtttaacctttctggctgtgttaatatgcgtttcagcactgtcactgagtccttctgttgcgggggaagggcaaaataatggccttgttatgaacttctacaaggaatcatgccctcaggctgaagacatcatcacagaacaagtcaagcttctctacaagcgccacaagaacactgctttctcctggctcaggaacatcttccatgactgtgctgttcagagttgtgatgcttcatgttgc

SEQ ID NO: 8933 - DNA, 247 bp, Glycine max
  unsure (1)..(247): unsure at all n locations; Clone ID: 701149118H1
gacanttacaanngcaacaaaaacgcgcactctctcttttctctcttaacacaaaaaccctatcgttcttcgcggtttcgccgattctcgccatgccgaaagccaaatccgacgccaaagccgccgatagccggttgaagcgcaagggcgctggtgctggaaggaagcaatcgaagaaagctgctaaggatcctaacaagccaaagagacctccaagcgtttcttcgttttcatgtccgagttcaga

SEQ ID NO: 8934 - DNA, 276 bp, Glycine max
  Clone ID: 701149119H1
taaggaaactaggaacaccactgtgactggggtggaaatgtttcagaagattttggatgaggctttggctggggacaatgtggggttgttgcttaggggtattcagaagactgatattcagagagggatggttttggctaagcctggaaccattacccctcacaccaagttttccgcaattgtatatgttttgaagaaggaagagggtggcaggcactctccgttctttgccgggtaccgcctcagttctacatgaggactaccgatgttactggc

SEQ ID NO: 8935 - DNA, 279 bp, Glycine max
  unsure (1)..(279): unsure at all n locations; Clone ID: 701149120H1
ggaagttcaaagtgtaggacgagaaagtagacacagccatgtccactactggtactgttctggcttccactccaacacaaaggctattaggcaaagtggcattggttactggtggagcgtctggaattggagaaagcantgtgcgcctcttccatatccatggtggtaaaatatgtatagctgatgtgcaagacaacntggaaagcangtctgtcagtnncttggtgatgaagcaactgntgtttttgtccntgtgatgttacagtagaggatgatgtt

SEQ ID NO: 8936 - DNA, 252 bp, Glycine max
  Clone ID: 701149122H1
tctagtttatctccaccacgaaaggcatattatccacagagacttaaaaccttctaatttgttaataaatcatattggtgaagtaaagatcactgactttggtgtgagtgcaattatggaaagtacatctggtcaagcaaatactttcattggaacctgcaactatatgtctccagagagatcaatggaagccaggaaggctacaacttcaaaagtgatatatggagtttgggactaatattacttgagtgg

SEQ ID NO: 8937 - DNA, 279 bp, Glycine max
  Clone ID: 701149124H1
gggctcaagctttatttcacgtagctgactttaccgtcagctcaattggaatagtttttcgctatgttcgcaggcaagtgagacgatccatcaatgcccttatctgcttcgaaagaaccggtgtcatccaaacatggtgaagaggtggcaactggatcaataatagctgaaacttctactgtacagggttcggcttgcccaactgtccaagcttgagatctattttagaatatgcttaacacaatacatgcaattcgaacgttgttttctcggaaagat

SEQ ID NO: 8938 - DNA, 262 bp, Glycine max
  Clone ID: 701149125H1
gtcccattattagagaagaaagagaaggctttgaagaccaaaactccaagtctatttccacttattttatatcctcttttattaacttcataataatgatttgtttggtgatggttttcatctttgtactttctctctctcacacccacacctacacctacgtgcgcaacaatatgatattttcttgatctaaaatgttatgttgacaatgtaccgtgcattaatgcaaatttacaatattgctttcatgcagaaaagttat

SEQ ID NO: 8939 - DNA, 276 bp, Glycine max
  unsure (1)..(276): unsure at all n locations; Clone ID: 701149126H1
gactcacacactttctatagctaccctcaatctatagctagctagcaatattctctcaatatgatgcatcgtcagattgagatggagaattctgagctcttccaattcctcacaaacaccaacgnatgctttcttcaacactgcatcatatggcctccctgcggcacctgcagcatcaaccatgcagcacagcttctctgggctccttatcttattaccntttggaagcatctcatgatcatcatgccccttctcatgaagacaaagcccttgctg

SEQ ID NO: 8940 - DNA, 289 bp, Glycine max
  Clone ID: 701149128H1
gggagggagggagccgtagcaggcggaagctctagcttgggtagcgaatcacaatgggcgagaggattaaagaagcatctgaagaggcttaatgccccaaagcattggatgcttgacaaactgggtggtgcatttgctcctaagccctcatctggaccacacaaatcgagggaatgcctgccactcatactcattttgcgaaaccggctgaagtatgctctaacataccgtgaagtcattgctattctgatgcagcgacatgtccttgttgatggcaaagtcaggactg

SEQ ID NO: 8941 - DNA, 274 bp, Glycine max
  unsure (1)..(274): unsure at all n locations; Clone ID: 701149130H1
gagtgaganananagaaggcaagatgtcnaanagaggncgcggtgnttcggcggggaacaagttccggatgtcgctgggtctgccggtggcggcgacngtnaactgcgccgacaatacgggggcgaagaacctctacatcatatcggtgaaagggatcaaagggcgtttgaaccgtctcccctcggcttgcgttggcgacatggtgatggccaccgtgaagaaggggaaacncgatctgaggaagaaggttttgccagctgtcattgttcgcca

SEQ ID NO: 8942 - DNA, 276 bp, Glycine max
  unsure (1)..(276): unsure at all n locations; Clone ID: 701149132H1
gacactaattaacacacatcaaaacaaccttctttctttcaggttcttgatcagtgtcaaaaccgaaagggtggttgcaaattgcaatggctaagcatgatgttgagggtggttccttcgctgcaaaggactaccatgatcctcctccagcaccattgattgatgctgaggaactcacacagtggtccttctacagggctttgattgctgagttcattgccacaatgtcctccttacatcacagtggtcatgtgatgggtacaagagccagatgnt

SEQ ID NO: 8943 - DNA, 288 bp, Glycine max
  unsure (1)..(288): unsure at all n locations; Clone ID: 701149133H1
gactgttgttctcaagggattcgattctctctgcactcacttctagggttttctctgcgctataagcaatcatggcggatgaaacaccaaatgagatgaaggaggaggttccagaaattgttccttttgatcctaccnnnnnnnnnnnnnnnnnnnnnnttacaattgtagatcctgctgatgaacctgtggagaaattggctgagaagacagaaaacctctcagtttccgagggggttgagactgcatttactggtttgaaaaagaagaagaggaagcctgttgaaa

SEQ ID NO: 8944 - DNA, 256 bp, Glycine max
  unsure (1)..(256): unsure at all n locations; Clone ID: 701149135H1
gggggagtgttctttgnntttgctaantttgttggttttgttaatttgttagttgtgttaatttgttaatgttgttagttttgtcggattttcagtttaatattttgggtcaattttgtgtgcacgtacgactttgcatgtttttctttgaattataggatatgttcaagaaatgggtaattgttttgaaaataaaagttctgacattttgtgacttgaaatccttgattcttcctacatgtcatgatagttttga

SEQ ID NO: 8945 - DNA, 276 bp, Glycine max
  unsure (1)..(276): unsure at all n locations; Clone ID: 701149136H1
ccctccgtacaaaaactactcaaatatcagaaactgatagagaagggaagaagcaaatctgagagaacaaatatgcttagagtgaaatgtacttactcctgaataaatgattctccaaacttcctttttgcatgaactcataaaccagaagccgtttttaccttccaggcatagcccaataggtttcnccaantttncatgctgaagctgtccaagatattcacttctngctgccagcaaaaagatagtaaaatcagtcatcagtagcaagaaagc

SEQ ID NO: 8946 - DNA, 278 bp, Glycine max
  unsure (1)..(278): unsure at all n locations; Clone ID: 701149137H1
ccacaaacatacatcacatccacgtacgaaacatgggcgccatcaagtacatgaccacggatgaattaaagctcctaagcatcccgtcagaaatacttaaattctttaaccactctattttcccacataagggacatccgacaaggtcactgcaccccccccatgaacatacacaacatgcacatctcaatgcatttccaacatcatcaacattccatttcaatgtcattctcaacntaancatcatcttatttccatgacatcaccaataaccataa

SEQ ID NO: 8947 - DNA, 282 bp, Glycine max
  Clone ID: 701149138H1
ggagagaagttattagggtttttgagtgcggcggtccaaacactcttctctgcagcttttgcctacaactcccttcaccatggctgaacaaaccgagaaagcttttctgaagcaaccaaaagtgtttctcagcacaaagaagactgggaagggaaagagacctggaaaaggtgggaaccgcttttggaagtccattgggcttggatttaagactcccagggaagccatcgaaggaacctatagtgacaagaagtgcccttcactggcatgtttccatccgtg

SEQ ID NO: 8948 - DNA, 254 bp, Glycine max
  Clone ID: 701149139H1
actgctacaaaaacattgaaagaaatagaaaaagcaaaactggtttctcgcatttcctccgaaacaaaccgtttcgctcgtttctcggatctgcaatggaagccccacccaaaggcgctgctggaagaagaggtgacaggaagaagtccgtttccaaatccatcaaagctggcctccaattccccgtcagccgcgtcgccagtacttgaagaaaggccgttactctcgccgcttggcaccggcgctcccattat

SEQ ID NO: 8949 - DNA, 276 bp, Glycine max
  unsure (1)..(276): unsure at all n locations; Clone ID: 701149140H1
ggcacacagttatacagctctagagaattatcataccctttaagatgaaaccgtacctacgtccaatattcctattattccttatccttctcgaccaatccacttcggcgagtgcttctaatagtaggtttatagaattcttttcaaaattaaagaattctttaatcctaagtctgaagaactaaaatcaaaagatataaagaannttcccgagcgtcgaatttttgaagaagaaacatgacggagttaaggacttctctcaagaagctatcctga

SEQ ID NO: 8950 - DNA, 265 bp, Glycine max
  unsure (1)..(265): unsure at all n locations; Clone ID: 701149141H1
tgcattcaagaggtttcctttcaccgtgacataaagccggacaattttctaatgggtctaggacgaaaggcaaatcaagtgtatgccattgactatggccttgcaaaaaaatatagggatcttcagactcataggcacataccatacagggaaaacaagaaccttacaggcacagcacgctacgcaatgtcaacactcatcttggattgaccaagcngaagggngntcnggatccctgggtagggcccngttttntnaaaagggc

SEQ ID NO: 8951 - DNA, 267 bp, Glycine max
  unsure (1)..(267): unsure at all n locations; Clone ID: 701149143H1
ganaagaganaaggggttagaccgttaagaggttagattgtgatgcatgattgtctacatctatgtgtattttatatancatacatccncacaagtgagatcactagtttattatgactttgaaggatgagangngtgaatccacaattngatctnatgtgantggttacgattanagacttgntttgcatgtgtgtgtgcatggaattatgattnagttagttgtnaanaatctcttacaagttccatccattgcatcagcaaaca

SEQ ID NO: 8952 - DNA, 272 bp, Glycine max
  unsure (1)..(272): unsure at all n locations; Clone ID: 701149145H1
ggcacaagtttgttgagatagctagaagcaataagatgaaaatgaaagtgcttgttttgtttgttgctacagttttggtagcatatgaatgccatggctcagactaccagaagttccctctccaaatgaaaactgggtttggtgggcaatacngcaatgaggtggcatgtgccagttggaggattggcgtggaagcaannnncgtnttcaagtggcaaactgttcctgcagcttgcggagagtacatagctgactacgttctaggagaccaa

SEQ ID NO: 8953 - DNA, 263 bp, Glycine max
  unsure (1)..(263): unsure at all n locations; Clone ID: 701149146H1
ggtgggacatttgtgtatttgagcttaggaatagaagtagagggaactagtgangagtaaagaagacggaggcggtttggagtatgacttcttgcacctcttttgcatccttctcattctctcttcattccttcattgtgcttcgcgcaaacccactcaatcacatgtaaacaacgcttcccattcctctgtaaaggaagaagaaagttctcaactttatcatttcatccaccaaaaggctcgttacaagagccgctgagtac

SEQ ID NO: 8954 - DNA, 215 bp, Glycine max
  unsure (1)..(215): unsure at all n locations; Clone ID: 701149150H1
gagaagtgtgaacgataagataagccactgatcactgatgacngaganaagagaaccgttggcgttgggtgcatcgtgcatgtgacaaacaaaccatcaaataanaaaaaaggtgatgggttaagcaagagcgttgaatccggtagctttatccaaaattgtaggtactgaggangaaagaccaagactttatccgtgtgctcacttagctcaag

SEQ ID NO: 8955 - DNA, 273 bp, Glycine max
  unsure (1)..(273): unsure at all n locations; Clone ID: 701149151H1
ggataatagtgatacaaaattacaaattgtgttttactaatatttgcatcaaatgaatggttgggttgcagctgaaaacttgggcctacctacttctccaccttatctctccctagtatctaaggtnnnnnnnnnnnnnnnnnnnnnngtatctttcttgggtggtgttaattttgcctccggaggtgctggaatatttaatgcctcagataaaggatttaggcatcaatactttgccaaagcagtggactcntactcacagtgcatgaacaa

SEQ ID NO: 8956 - DNA, 274 bp, Glycine max
  unsure (1)..(274): unsure at all n locations; Clone ID: 701149152H1
ttttaaatgattgtaccaatttttcaatggtctantgccccctccctaaaaaaaaaggctttttttttcaccttttgcatttgggttgcattgtagtgtatgtcatttgccgtgattgcaaaattttgcctttgatgttcatttgtgagacatgcaatcaaagtattaatcttttttctgatatgaaagtgggtatgttagattttatcggtttaaattgtctctgggtatngttgatcgatatnnttnagtctatgtnctgttattaagtgag

SEQ ID NO: 8957 - DNA, 272 bp, Glycine max
  unsure (1)..(272): unsure at all n locations; Clone ID: 701149154H1
ggccgcgaaaacagaacagggactcactctggcagcggcactctcggtggctataatctttctgtggtgagttgtcaagatgtacacatcaaggaagaaaatccacaaggataaggatgctgagccaactgaatttgaggaatcagtcggacaggcattgtttgatctggaaaataccaacaatgagctgaaaagtgatctgaaagatttatacataaactcagctgtccaaattgatgtttctgggaaccgcaaggctgtggtnatccnnt

SEQ ID NO: 8958 - DNA, 274 bp, Glycine max
  Clone ID: 701149156H1
ggcgctcacatcgtgttctctgcggcgcgagctagctagggtttagaaccttcgcagttacagaaaacatggcgactgtggtgccaacctccgaagaagacgctgcactctccgtcgttcgattcgcctctgaacttgcctgggccgatgccggtcccgaggttgctgagccccaagttagcagactctgcgtggaggctgaagaattcattgttatgggaaagtggttggagctagcatcattgatgattacctctgctgaattgattttctc

SEQ ID NO: 8959 - DNA, 279 bp, Glycine max
  unsure (1)..(279): unsure at all n locations; Clone ID: 701149157H1
gacacttgattagctgaggaggaagagagaaaaaccatggcaataacactcaacaatggcttcaagatgcctatcattggattgggcgtgtggcgcatggaaggaaacgaaatcagggacctaattctcaattccatcaaaattggttatcgccattttgattgtgctgctgactacaaaaacgaagcagaagttggagatgcgcttaaggaggctttgatagtggccttgtgaagagagaggatctcttcattaccaccaagctttggantctgatca

SEQ ID NO: 8960 - DNA, 270 bp, Glycine max
  unsure (1)..(270): unsure at all n locations; Clone ID: 701149158H1
ggaagacacaganagcatagtaatactttactgagtgcttgcagttgctgcgtcgcaaggtaccggcggcgacggagagctatcttctcaatttccgatcactgcattggttctgttgacgagggttttgttctacttgacttgcatacttgatggcgtcaaagttgcagaagttgcagtccgcagcatgtcaagcatctcaatttgtatccagttcgtggaactaactactacaggcaattgctggaacagaacaagcaacacttcagg

SEQ ID NO: 8961 - DNA, 268 bp, Glycine max
  unsure (1)..(268): unsure at all n locations; Clone ID: 701149159H1
gaatagattgatgttttgttggatctgcctgtaatggcctctagaggaactggaacgctgattttggtttgtctcttatggcttttcnntcctatgcgccaccatagctttcttgcaactcaacttcgtagacaaaggaaccaccaacaacaacccttcctctcgcagtagtaacttcatcgcaactcaacagcatagcgctgataccccttggaacaggattggagggtgtcacccacaaggtgtatttgatatcagatccatggca

SEQ ID NO: 8962 - DNA, 274 bp, Glycine max
  unsure (1)..(274): unsure at all n locations; Clone ID: 701149160H1
atctccaataaaagataagtaaagaggggcaactgtcataccttaatttcgtccggggacaattgtttgtcaacatgcgaattttcattggccaagttgagctacttaacatcaatcactacgcaatccgtagggtttcgtgacgtnacgaaaaganatgagcaagatactcagaatgggggcaatttttgtcaacatagggattttttccagccgagttaagctgcttaacggcgatcactatgctatccgtaggtttcgcgacgtttcgaaa

SEQ ID NO: 8963 - DNA, 277 bp, Glycine max
  unsure (1)..(277): unsure at all n locations; Clone ID: 701149161H1
gggttgaaggaagaagggtaaactagggagtaggaggngaagaagggttgaaggaagaanaaaagaagaacacagaaatggagggtgggaacaacagcagcagtaacaacaaccctgatgagttggcggtggggtgcttgctttcgattcaggattnacgttgggcgacgaattcgaaggccaggtccgtcaccttcgatcgcccctcccaacattctcgtactccaggagccttccaaacctagccctcgtcgaatcttaggttgctcaaagccaa

SEQ ID NO: 8964 - DNA, 287 bp, Glycine max
  unsure (1)..(287): unsure at all n locations; Clone ID: 701149162H1
ggagccagttgaatctgatgagaaggttgattttnaggaggcaaatgatccagaggaagcaatggaagaangaagtagaatatgangaagtagaagaagangaggaagtggaagagatagaagaggaggtggaagaggtggnagaagaggangaagtggaggtggaagnagatgaagaggaggangaggnncaggaagaagaggttgaagnagtggaagaagatgatgccatgcncgnatcatagnntgatgaaacaaaggtggaagatgaggatgagaagcaaaaa

SEQ ID NO: 8965 - DNA, 231 bp, Glycine max
  unsure (1)..(231): unsure at all n locations; Clone ID: 701149163H1
gggggtctggccaagagtggcccttttgcgttttcgttccagtgatgtattcacaatggatttaagtgaggaagaaccttgttggagatgtgtaacggggagcggcatgcttggtgcggaaatcctgggggcacagctcctcctcctagacttgatcatgttgctgttagtctncccggtgggagaattctaatatngggtgggctgttgcnggnctcactcgcctnaanc

SEQ ID NO: 8966 - DNA, 294 bp, Glycine max
  Clone ID: 701149165H1
ggaactccaaaacacaaacaaaaacttcccgttttctctctctgtttttccatggccatctgatcaaacttttcttgattctctctctcagtttttgctattctgagtgatgggtatgccctgccgctgttcccacacctcccacatcactgaaatcatcatcaccagcctcttccgccacaagtcttaaattacaacaatttccctcaattattcaccaaccaaccaccttaatagccttttccaatggttccttaaagatccaattggtcggagtaaacatggcggctagtg

SEQ ID NO: 8967 - DNA, 276 bp, Glycine max
  unsure (1)..(276): unsure at all n locations; Clone ID: 701149166H1
cctcccatattgggcacgcacccatcctttttggtanactaacaagnattataatttcgttgtgttacataaattgttataattatgattcttttgtattacaaattcaccctggaacagnatcacaantttcattgtatgttattctgntgtganggtatncggntaatactncaaggtctagtttnagnanggatcnnntcgnntaaagttgtaagnnnctatcgnattcccataccncgaagattatgnatgnaatgntgtatnnacaagtaa

SEQ ID NO: 8968 - DNA, 234 bp, Glycine max
  unsure (1)..(234): unsure at all n locations; Clone ID: 701149167H1
ggggcgaggtagccagagagtgatacaatacanagtgcgttgttgctccttcgccacaactccctgccaacatgggtatctccagagattctatgcacaagaggcgtgccactggtggcaagaagaaggcatggaggaataagagaaagtatgancttggtcgncagcctgntaacactatnctgttcaggcgacangacagtnnggaaggtncgtgtnatntttgangtgtac

SEQ ID NO: 8969 - DNA, 270 bp, Glycine max
  Clone ID: 701149168H1
gacatcacaagaagcacaatttctctctttctttttgtgtccaaaatggctcctagttctactcacgatactgggttctatgtgcttatgctagttgggatagtgattagcactatggttgctacctgtgctggtagcttctaccaagactttgatctaacatggggtggtgaccgtgctaagatattcaatggtggccagcttctatctctttcccttgacaaagtctctagctctggcttcaaatcaaagaaagatacctatttgggg

SEQ ID NO: 8970 - DNA, 271 bp, Glycine max
  unsure (1)..(271): unsure at all n locations; Clone ID: 701149169H1
gacaccaacaccaaaacaaacccactaagatggcttcctttgtatccttcctagtgctgcttcttgcagcccttatcctcatgcctcaagggcttgctacttactacaaaccaattaagaagccaccagtgtacaagcctccagtgtacaagccaccagtgtacaaaccaccggtttatnagccaaaaccaccggtttacaagccgaaaccaccgntttacagccaccatataagnagccaccatannaganaccaccttnnggagagtcc

SEQ ID NO: 8971 - DNA, 228 bp, Glycine max
  unsure (1)..(228): unsure at all n locations; Clone ID: 701149170H1
gantgttagtgttcctcangccaccgtaccgtgttgcanctctgcaatctacagccaaaatgcctttcaagaggtacgttgagatcgggagggttgcccaaatcanctacggcaaggaatatggcaggctcgtcgtcattgtcgacgtcattgatcagnacagagctcttgtcgatgcccctgatatggtgaggtccnaagtcaatttcanaagggtttccctancng

SEQ ID NO: 8972 - DNA, 267 bp, Glycine max
  unsure (1)..(267): unsure at all n locations; Clone ID: 701149171H1
ggcacaagtgagtttgttgatcgagataactagaaacagtgtgatgaaaatgaaggtccttgttttcttcgttgctacaattttggtagcatggcaatgccatgcgtacgatatgttccctctccgaatgaacactggctatggtgcccgtancccggaggtgaaatgcgcaagttggaggctgctgtggaagcacacaacatctttggctttgagaccattcctgaagagtgcgttgaagcaacaaaggaatacatccatgggcga

SEQ ID NO: 8973 - DNA, 271 bp, Glycine max
  unsure (1)..(271): unsure at all n locations; Clone ID: 701149172H1
gattgacatgnatgangtttcaaatttctgttctggaaagtgcaaaattcccgagggacagtgcccnnctggaacnggacctggangnatntgctncttggcttncaagancatcaccanaacacggtgggatgancctccatacaaaattaatgcctcaggacnaaaagctcctattggcttcacaacaatagccactagtgccataccactataacggcgtcttggagtangatgctcacagtctttatgggttctctcaatccgtngc

SEQ ID NO: 8974 - DNA, 267 bp, Glycine max
  unsure (1)..(267): unsure at all n locations; Clone ID: 701149173H1
agtcaacnctgtgtccttcaccgnnncataaagccggacgtnttctaatgngtctaggacgnaannctaatcaagtgtntgncattgactacggccttgnaataaaatntagggatcttcagactcataggcacatcnccatananggcnnacaagaaccttncaggnacagcacgctacgcaagtgtcaanactcatcttggnatngagcaaancngangggatgatctngnatctcttggntatgngctcatgtntttcntagaa

SEQ ID NO: 8975 - DNA, 267 bp, Glycine max
  unsure (1)..(267): unsure at all n locations; Clone ID: 701149174H1
ggactgtagctaaaatggggncgctcngtctacgtatacattcagaaatttgtgcagtttgcagctaactgtaaatgttgttgctttgatcgtcaatttctcttctgcttgtttgactggaaatgctcccctcactgcggttcaacttctatgggtcaacatgattatggacactcttggagcacttgcactagccactgaacctcctaacgaggagttgatgannagaccacctgttggtaggaaaggaaatttatcagtaatgtg

SEQ ID NO: 8976 - DNA, 271 bp, Glycine max
  unsure (1)..(271): unsure at all n locations; Clone ID: 701149177H1
ggctgaaagggaaccatttatgagagttttctntgaagctgatnttagtcgtagttctcttctattctaactgctggagaaangtgtnaataccataccancttttctgatcttttgtcnccccaggaaagcctcagggttcnaaggttttagnnaanggttctggancattncctcagtgttctgatgccttttttttgtcaacacttcntgatcaactaacaccgttgatgattgaatgcttcttgtttctttgtagtcttatttgttt

SEQ ID NO: 8977 - DNA, 219 bp, Glycine max
  unsure (1)..(219): unsure at all n locations; Clone ID: 701149178H1
gggatccatatggctcttgananctctcaagantttagaagctcagctaagcacaatanagagtttaattagggccattaanatatcntatgggtgtgactaagcctcatgtgcttatgctgntgatcatcanggttgtcncaattgcagngngcaccatccgttctagcangnagggctcttccttgcatatcnngtcaaggtnctcgagnttttgca

SEQ ID NO: 8978 - DNA, 254 bp, Glycine max
  unsure (1)..(254): unsure at all n locations; Clone ID: 701149179H1
gagatctttgatgngatgttcctaggcttaagttgcagctgcttaatatgcccatggaggnaatcttgaaacatanattgagtcccttgaaggtgtgtntgcccantgnagtagtggaatttcttagacaggcaaaggcngntcaacttttcanggcatcagagtcattgttttcgatgatatgcttgagcctgatctttccaggcttttggcgggatggatagacntgacagtnnttnncantgatccagtnt

SEQ ID NO: 8979 - DNA, 268 bp, Glycine max
  unsure (1)..(268): unsure at all n locations; Clone ID: 701149183H1
gacggcactcgttttcgttctcgttctggtttatagatctttgcgaaggaggtttacagcgctcaaccaaagatgcagaacgaggaaggacagatcactgagctttacattcctaggaagtgctccgccacaaacagattgattaccgctaaggaccatgcttcggttcagatcaacattgggcatgtggatgagaatggcgtctacaanggccatttctccacttttgccctctgcggattcatccgtgctcagggtgatgctgaca

SEQ ID NO: 8980 - DNA, 160 bp, Glycine max
  unsure (1)..(160): unsure at all n locations; Clone ID: 701149185H1
gataccaaaancaaaacaagccaagtgaaaganagaagnanagttcanagacantgtcagggatcattcacnagattgaggagacccttcatgtgggaggcccaagaaggangangngcacaagggtgagcagcaccatngtggagantacaanggggac

SEQ ID NO: 8981 - DNA, 268 bp, Glycine max
  unsure (1)..(268): unsure at all n locations; Clone ID: 701149186H1
gcccgcaaatatttgtggcaacagacaagcatccagcgcagattccaccacgtccgcaaaaatcacacaccgttccctgtcccctcccctctctcacatccatttcacatcactctacactaacagaaaaacagtcctccgctgccgccaatcctagagttccggtgacaatgctcccctatggttccattccggangccgcggcggcgctggggcggaaacttaacttcggggaaaccctctggttcaactactcggcttccagtnt

SEQ ID NO: 8982 - DNA, 265 bp, Glycine max
  unsure (1)..(265): unsure at all n locations; Clone ID: 701149187H1
gagggtttgtcattagcacttcttcttttcacactgccgctgcaacaatggcttcagagaagaaactttcgaacccaatgagggagatnaaagtgcagaagctcgttctcaatatctctgttggcgagagtggagatcgtctcaccagggatncnaaggtgttggaacaacttagtggccaaaccccagtgttttccaaagcaaggtacactgttcgttccttgggattagangaaatgagaagattgcatgctatgtcatgtca

SEQ ID NO: 8983 - DNA, 268 bp, Glycine max
  Clone ID: 701149188H1
atccataaccatggcgtctaactctgcttccgctctttacttccttttatgcctatcgcccatcactttgcttctttctgcgtttcgtgctcaagctcaatctcatgctccagctcccactttcaagtactgtgaaaagaatgcagactatgctgtgaaggtgagtggagtggaaatattgcctgaccccgtggagagaggagtgccattcacctttaagatcccagcttatactcctgaaccaattcaaagcggggacttgttatat

SEQ ID NO: 8984 - DNA, 100 bp, Glycine max
  unsure (1)..(100): unsure at all n locations; Clone ID: 701149189H1
ggggatcagtaactgcaattcccaatgcaanttttcatcgggacnccaangatgcactantgtgcntctntgnatgttgnctgngcntntngtggtaaca

SEQ ID NO: 8985 - DNA, 269 bp, Glycine max
  unsure (1)..(269): unsure at all n locations; Clone ID: 701149190H1
agnttgtngatcgagataactannaacagtgtgatgaaaatgnaggtccntnttttcttacgttgctacaattntggtagcatggcaatgccatgcgtacgatatgttccctctccgaatgaacactggctatggtgcccgtactccggaggtgaaatgcgcaagttggaggcttgctgtggaagcacacaacatctttggctttgagaccattcctgaanagtgcgttgaagcaacaaaggaatacatccatggcgaacaatatagat

SEQ ID NO: 8986 - DNA, 191 bp, Glycine max
  unsure (1)..(191): unsure at all n locations; Clone ID: 701149191H1
attgtntgttatgntggatctgcctgtaatggcctctagaggaactggaacgctgattttggtttgtctcttatggcttttctccctatgcgccaccatagctttcttgcaactcaacttcgtagacaaaggnaccaccaacaacaacccttcctctcgcagtagtaacttcatcgcaactcaacagcata

SEQ ID NO: 8987 - DNA, 261 bp, Glycine max
  Clone ID: 701149192H1
gcgaataccatggatgtgggaaggtctgtgttggttcagactgagccccggacgaggttggatgctggcacgtgggggaccatgggggttggtcttggttactgcattgctgctgcggttgctgagcccgggcggctcgtggttgcagttgaaggagattctggattgggtttagtgctatggaattgagaaaatggtaacgtaccagctgcctgtggtctgatgttttcaacaatggtggctatatggtggtgaccgtaa

SEQ ID NO: 8988 - DNA, 270 bp, Glycine max
  unsure (1)..(270): unsure at all n locations; Clone ID: 701149194H1
gggtccatctgtaaggaggctctatgtccaagggnaaagagataaatggtgctggaattaatgcaagttttgcagtccaccaggatgtagatggcagggctactgatgttgctttgggatggtccgttgcccttggttctccattcacttttgccactacattagagcaggagtacaggagtgatatctttggggagagaggaattttacttggtgctgttcatgnncnnctggaatcctgtttaggagatacactgataatggaatgaa

SEQ ID NO: 8989 - DNA, 160 bp, Glycine max
  unsure (1)..(160): unsure at all n locations; Clone ID: 701149202H1
ccaccattagatttgtcaaattttaatccatgtatgattttnttttccttttcttcttgactttcccgatttatccctctgggcttattcatcatcattgtcgttaaaaaaatcacctctggggcaacattncatttttttcngcngggcttcnccattg

SEQ ID NO: 8990 - DNA, 294 bp, Glycine max
  unsure (1)..(294): unsure at all n locations; Clone ID: 701149203H1
gacacattgtgagtatcaacaagaatactcataatataggtagcatatagagctatagttatattgatattgctatttgttaagctcttatttcctcggccatggctaataatgaacgngatctcttctcggcggagattgtgaatcgtggaattgaaccgtcgggacccaacgctggctcgttgacattctctgtgagggtgaggaggcgcttaccggattttctgcaatcggtgaaccttaagtacgtgaaattgggttaccattatctcataaaccatggcatatacttgt

SEQ ID NO: 8991 - DNA, 281 bp, Glycine max
  unsure (1)..(281): unsure at all n locations; Clone ID: 701149204H1
gatgaaggatttgttgacgataggcatgcatatgagcagcaacgcccttgccattgtaacagatttagctgacactgttaatgattggaatatcacaaaatcatttgggcgtcgcctccttcaagattctgagcttccgtcatgggttgatcaacatagactccttaatgaaaatgcaagtccattaaaacgcaagcctaatgttactgtagccatagatggtagtggagatttcaaaacctccatgaggcttgaagcaatgcctgaggaaaaccggnagc

SEQ ID NO: 8992 - DNA, 288 bp, Glycine max
  Clone ID: 701149209H1
gatcgtaaatcaattcaaacaatagggagaagaagggactagcggcgaactcaaacggcgtcgtatcgactcgttgttcatccatttgagaggcatctggtagcggaagatggataagggtaagatccaagaggtgatcgagaaccaagtcctgacggtggcgcaagccgttcgaggacaagatcgacgatgagatcgccgccctggaacgcctcgatgccgacgacatcgaagccctccgcgagcgccgcctccagcagatgaagaagatggcggagaagcgctccc

SEQ ID NO: 8993 - DNA, 282 bp, Glycine max
  Clone ID: 701149211H1
ctgtctatgcaaggtactgtgttccttttaccaatttttatattcactgaattttgggacattattttaaaaatctagtttagcttcaattaattctttgaacagcaagcaagtaagctggcgtactagagcgttagtagtttcagactggacaagacgttttatttttggaagggactcaagtagcatctgattccagagtcttttgcattggcaatgtggcagagctccttgatcctaattcacacataggaaaaattgtttcgattccattattctttg

SEQ ID NO: 8994 - DNA, 272 bp, Glycine max
  unsure (1)..(272): unsure at all n locations; Clone ID: 701149212H1
aaggattttggtgtgtgcctagagaaggtcatttctagcaattcaggtaatgttggcatgatcaagtgttcaccagtgcnnnnnnnnnnnnnnnnnnnnnnnnnnntggtagaggaagaggtgantantgagnagtgnttntgaggttganaagggnacctnangttanggatcccagttccccnancccaggtttgnaatgacccagaagggagngaggtgtatatngcagcagaacagcagatntgtnatcaccactcctaagttggngg

SEQ ID NO: 8995 - DNA, 280 bp, Glycine max
  unsure (1)..(280): unsure at all n locations; Clone ID: 701149213H1
ggagagtgctgtgagcttcagcaaaatgcgcgccctagcagctcagttctctaattatttatgcagaagaaaagttggggtcaatctgcgatctcgtaatttttcatcatataacagtaaagatgagctaaccatcgaggaagaagctgagagaaaagttggatggctattgaagacgatattttttgtcactgcaggggtagcaggataccattctttccttatatgggagagaatttgatgcaacagtctgtttcgctttgcggtcagganccctgtc

SEQ ID NO: 8996 - DNA, 235 bp, Glycine max
  unsure (1)..(235): unsure at all n locations; Clone ID: 701149214H1
caccattgccatggatccttacaagctccggccatccagcgccttcaattctcccttctggactacaaattctggtgctcctgtttggaacaacaactcctctttaaccgttggagctagaggtccaattctgcttgaggattatcatcttgtggagaagcttgcaaactttgacagggaacgtatcccagaacgtgttgtccatgccangggagctagtgcaaaggggttcttt

SEQ ID NO: 8997 - DNA, 228 bp, Glycine max
  unsure (1)..(228): unsure at all n locations; Clone ID: 701149215H1
gtatgctncannaccaattggtctggttggtcggaccgganncaggccatgcaaccagacccagnctgatattnttagatcagttangtactnnaaccaatggtaattgtaataanataataataanataatttcangtcatggatttnacacaagtaattcgtggtaacggctaaaaattaagggngaaaaactttggagaccaagatcggccaatttttttattaa

SEQ ID NO: 8998 - DNA, 116 bp, Glycine max
  unsure (1)..(116): unsure at all n locations; Clone ID: 701149216H1
ggtgagcggtgaatgcaaatttcagttctcaactacgcactgaaccgaagaaagtgcgtattatcaccgtgacctaacaatggcggagacgaaccatcatatggacatcgncanng

SEQ ID NO: 8999 - DNA, 284 bp, Glycine max
  unsure (1)..(284): unsure at all n locations; Clone ID: 701149217H1
cagctggaactgagtcccactatgagcaacttcctcctccttcgctatccatggagctggacgagtccccggagagcagaatccaacggttgatatcggagcacccggtcatcatcttcacccgatcctcctgctgcatgtgccacgtcatgaagaagctcctcgccaccatcggcgtccaccccaccgtcatcgaattggacgaccaggagatcgccgccctccccgacaccagcgcnccctcggcctttataggggnactgatcggtngaccnnatcattgg

SEQ ID NO: 9000 - DNA, 280 bp, Glycine max
  unsure (1)..(280): unsure at all n locations; Clone ID: 701149219H1
gacaccaacaccaaaacaaacccactaagatgggcttcctttgtatccttcctagtgctgcttcttgcagcccttatcctcatgcctcaagggcttgctacttactacaaaccaattaagaagccaccagtgtacaagcctccagtgtacaagccaccagtgtacaaaccaccggtttataagccaaaaccaccggtttacaagccgaaaccaccggtttacaagccaccatataagaagccaccatacnagaaaccacttatggaaagtacctcnattt

SEQ ID NO: 9001 - DNA, 287 bp, Glycine max
  unsure (1)..(287): unsure at all n locations; Clone ID: 701149221H1
ggacgacagtgccttcagctgtcattaagttctcgcacgngcacagagagaaagagatggattcttctccttcaccagacatatacatcccagagcaatggtcagaggttgcagagtccattgcacacagttcaatgcctcctattgctcttatatgtggtgccaagaattgtgggaagacaaccttctcccgctatctcctaaatgtcctcttgcacaaatacaccaaagtagcttatctggatactgatgttggccaanctgaantactnccccagcttttcntt

SEQ ID NO: 9002 - DNA, 283 bp, Glycine max
  Clone ID: 701149222H1
ggcatcaattcaaaatatatcatcaattataagcatgggtttgtggaacacaacgaatgcagtgtcttgccgctttcacaagtttggtgatgaccaaaagaatctggtcttccaaggtgatgccacgtcttcttccaggggcatagaactcacaaagttagacggtggaggaaaaccagtgggtggcagtgtggggagagtgttatactcttctccagtgcacctttgggaaagctctacagtggtcgcaagctttgaaaccgacttcaccttttccatctca

SEQ ID NO: 9003 - DNA, 266 bp, Glycine max
  Clone ID: 701149225H1
aaacttcttctcatcaaaatccaagggctcgttcttgaaaccctaattcgatatcctcctcctcagaagaagaaggatcgatgtgggcagcttcttgcctggcgtcatgctgcgcggcctgcgcatgcgacgcctgcaggaccgtcgtatcgggaatcagccgccgttccgccaggatcgcctactgcggcctcttcgccttctccctcgtcgtcgcctggatcctccgtgaggtcgccgctcccctcatggaatcccttccctgg

SEQ ID NO: 9004 - DNA, 259 bp, Glycine max
  unsure (1)..(259): unsure at all n locations; Clone ID: 701149227H1
ggcatggacantcatttatanacttcacatcaacatgacaacatgcaaatgggaactctttcttcattctgcgttcacntactcatcatataacaactagacttcagtttcctactgatgcactgaacaagcaatatgctatgtcgtcgtaaggccggtgtcgaaaagtttgtacagaaggatcaaccgggtagtagcagagctcttgtggctggagcttgtatggcttattgattggtgggcaggagttaaggtccaa

SEQ ID NO: 9005 - DNA, 276 bp, Glycine max
  unsure (1)..(276): unsure at all n locations; Clone ID: 701149229H1
ggaactgatgcttatgctcatgctaagaaggctggtcgatataagcagataaagcgtactgaaggggtttccagcactgatattgttggtcgcatgcttctctgtgtaagagaaaggtctattactgaaaaaaatcataatcattcttctttacaangccattcngnnatnggccaatngnccgaatttgaagctggtngcatctgctgcaactgcaagtggaactcgtatatctcattttttgcctacatctcgtagaattgttcagttctccaa

SEQ ID NO: 9006 - DNA, 276 bp, Glycine max
  unsure (1)..(276): unsure at all n locations; Clone ID: 701149230H1
tgccagtttaatatataaggaatgccaggatattattcctaaacattatgggaaatgttagcatttttaatcttttccccactctagacattgatttatgcacatttatgtcaggatataatttctgaacatcaagtaattttgttaattatattacccttaagaccatgccaataaaactttcattgaaatcnnnatnctgatggtaactatcgataaaccttctattactcttttgttgccaattatcctaattctctaacatgtattatatta

SEQ ID NO: 9007 - DNA, 286 bp, Glycine max
  unsure (1)..(286): unsure at all n locations; Clone ID: 701149231H1
gttggtcctattgttgaacagcctgagtataacctcttgtccaggcacaaggttgagtctgagtttcttcctctgtacaccaactatggcacaggcctcactacatggagtcctcttgctctggagtgctcactgggaaatataagaaaggagttataccaccggatagcagattcgctttggaaaattacaaaaatctggcgtcaaggacgcttgttgatgatgtgcttaggaagttgatggattgaagccgttgccgatgagcttggtgtgccatgtctcancc

SEQ ID NO: 9008 - DNA, 296 bp, Glycine max
  unsure (1)..(296): unsure at all n locations; Clone ID: 701149232H1
tcccttagataaacttaattgtcgatgtcatgttccatccttttatcaaataattgtactttgtccaatgttttttgtatgtgcttgtcctcggaagcttgttttttttatgggtagttattaagttcaaagtatgataaccttataaaattttagatctttgatatgattgtgcattgtatgcataatattttttcagaggagagatccatcaacttatttgatgagtaactcttataatactttttattntttacttgtttgtcttccttgggagcnngagtcgggagtcnggc

SEQ ID NO: 9009 - DNA, 280 bp, Glycine max
  unsure (1)..(280): unsure at all n locations; Clone ID: 701149233H1
ggaagaagcaacacaagcaccagtgtgaataccctaaatcggagtttcagtttcacccctcttttctcatctctaacatcatagtcctcagaggctagtcttcctattntcacaaacaatgtctgacagtcagaatctgacaagaacattgagatatggaagatcaagaaattgatcaaggctctggaagctgctcgaggtaatggtaccacnngattctctgataatgctccacgcgatcaaatttcccgggtcataagatgttgggagatgattggac

SEQ ID NO: 9010 - DNA, 145 bp, Glycine max
  unsure (1)..(145): unsure at all n locations; Clone ID: 701149234H1
gatgaaaaagggagtgcctgataacccataaccgaccgcaccaccgttttcctttgctttgcgttctacaatgtcgaaaacctcagagattattacatgcaaagctgctatttgctggggaataggaaancctgtgactgnggag

SEQ ID NO: 9011 - DNA, 281 bp, Glycine max
  Clone ID: 701149235H1
gatccttgaatagatcacataacatgggcatcattgggcatgcaacacgtttattgttagcagcacgttaagatcagttgttactcgtgcggaaccacctaaacctggtcctcttttcgatcttagttcattcaatcgccacagctttccggcaggcttcactttcggggcatcatcttccgcgtaccagtttgaaggtgcggcaaaagaatatggtagaggaccaagtatatgggatactttcatcaatcaacatccagtaagatagcagatggaacgaa

SEQ ID NO: 9012 - DNA, 280 bp, Glycine max
  Clone ID: 701149236H1
ggttctagtgtgtgattgtttgttgttgtaactcgttcttcttcttttgttgttctgtgtttgtgtttgttttttctctcacctgaaaatgtcttgctgcggtggtaactgtggttgcggaagctcctgcaagtgcggcaacggctgcggaggctgcaagatgtacccagacttgagctacactgagtcaaccaccaccgagaccttgcttcatgggagtggcacctgttaaggctcaatttgagggtgctgaaatgggtgtgcccgctgagaacgatgg

SEQ ID NO: 9013 - DNA, 281 bp, Glycine max
  Clone ID: 701149237H1
gcttctccttcttcatttcgttgatgctgatcaatcggcacatgcacaaacgcaggggtctcttcttcagcagatagattgtaacggagcatgtgctgcgaggtgccgtttatcatctcgtccacgcctctgccaaagagcttgtggaattgttgtagacgctgtaactgcgtgccacctggcactgctggaaaccaagaagtgtgtccctgctatgcaagtttgactactcatggtggcaaacgcaagtgcccttagacttaattggaccactatcctat

SEQ ID NO: 9014 - DNA, 285 bp, Glycine max
  unsure (1)..(285): unsure at all n locations; Clone ID: 701149238H1
agtacatccattttctagctcaattggttaaatagagtgtgcgaattattataaatctctcagtatctgagttcgattcttactgataaaaaaaatagatgttatggctgaggagttcttaccatttttaatttctctgactttgtattcgtggaatgttttagggtccttagagtatcccaaaggatcaaaagcaccaccagggtatttcttcttttcagggtcnagngcaatgctcnnanggtgctncnacgaaggaaatagcaaggaattccaatggccaga

SEQ ID NO: 9015 - DNA, 159 bp, Glycine max
  unsure (1)..(159): unsure at all n locations; Clone ID: 701149239H1
ttcgcaaaccctaatttcggaaagatcggcgatggctgcctccaaggatcgcgagaacttcgtctacatcgccaagctcgccgaacaggccgagcgatacgaagagatggtggatcaatgaagaacngttgcgaatctcgacgttgaactgactgtgga

SEQ ID NO: 9016 - DNA, 301 bp, Glycine max
  unsure (1)..(301): unsure at all n locations; Clone ID: 701149240H1
tatctgttccatcccattccttcttgttccatcctctttttatatatccaaacaaaggaatttaatcccattccattcaatctcatttgaccaatccaaatgtgcacaaactcacatctaggatggttgaaatnnacaataggnatttgggtananccctnannncgggagtnntgngaatatnaatgggngagtgggtntgcntcaaangngatttnggttataacattagcaatagcatgtcaacatgtacttganaaactgagaacncgaagtaaacaaagagcntaacttcctattt

SEQ ID NO: 9017 - DNA, 281 bp, Glycine max
  unsure (1)..(281): unsure at all n locations; Clone ID: 701149241H1
tcctcttcttatcacacttcttctttctgtcgccattcgtgttcatggttattcctaatcgnnnnnnnnnnnnnnnnnnnnnnngtgccgttgtaattcttcttctttgtctatgttttttttttgttgaataattttttttncaatttttcttcgnctangttnatttttttncaaaatttttttatttgncaattattatttaaattgtttcatagngtaatgtnatttngtaatgttagtgaaattttataattttttctgatatatatgttaaatat

SEQ ID NO: 9018 - DNA, 280 bp, Glycine max
  unsure (1)..(280): unsure at all n locations; Clone ID: 701149242H1
ggcacaagtgagtntgttgatcgagataactagaaacagtgtgatgaaaatgaaggtccttgttttcttcgttgctacaattttggtagcatggcaatgccatgcgtacgatatgttccctctccgaatgaacactggctatggtgcccgtactccggaggtgaaatgcgcaagttggaggcttgctgtggaagcacacaacanctttggctggcaaaccattcctgaagagtgcgttgaagcaacaaaggaatacatccatggcgaacaatatagatca

SEQ ID NO: 9019 - DNA, 282 bp, Glycine max
  unsure (1)..(282): unsure at all n locations; Clone ID: 701149244H1
gatcctgaaacggttcgcagagaggcagcaaaacgctaaagccctaaacccccatattgagctttctccctctctctccgtcttcgatggcaacatctcttctgaaaactccgctcatgtgttcaanagccacancannnnggnggantnttcttcaattgnannanntcaagaagcagtgctnccaatttcgccaanggggagatcgcgtccattccccgtagtgtcaatggcatccacacgggttcaaacttctctcgaaaaaatgaatttngtcnaaag

SEQ ID NO: 9020 - DNA, 287 bp, Glycine max
  Clone ID: 701149245H1
gtgcaagcaacttgttaggcaccaccttgattcagttacttgtccatactcacaggtctgctactttaatgactcttatagcaaagtccttgagttgagtgatactagttcagcttcccatgatgcaaggagggatcaggaaaatatacctccagaaaaaaatgcacaagaaactacaccaggtaaagcagcagaaaccagagatgttttgagagaaagccacataactatccctgagaccccatctccagatcagccaggtgatgcagcatatggggtggttaaaa

SEQ ID NO: 9021 - DNA, 283 bp, Glycine max
  Clone ID: 701149246H1
gaattaacagaagtggagccctccaaagtgatgggacgtcctgcagctcctaatcgaacccaacaggaacaactgcagcattggcagaaaaatcgacgaatgcttgcctattctacagttggaacacctgattatattgctccagaagttcttctgaagaaaggatatggcgtggaatgtgattggtggtctcttggagctataatgtatgaaatgcttgtggggtatccaccctttatcagatgaaccatgttgacttgtagaagatagtacttggagaact

SEQ ID NO: 9022 - DNA, 283 bp, Glycine max
  unsure (1)..(283): unsure at all n locations; Clone ID: 701149247H1
gagtcggtntgcagcagggagctntnccggnctncancgagancaggangtcagaanacgaancctcgaaccgaacgtttttgagggtcaggctctccttcttcattcacataatcgcttcttattttctctcagctttcaattgggatctcaaattatgtagctccacggnatttatcttgttttactcgtatantcccttnnncttaatttctgtggcaacaangntgatagancacgntggttcagtacnatttaagaagntaccgtggtgncaaatggg

SEQ ID NO: 9023 - DNA, 169 bp, Glycine max
  unsure (1)..(169): unsure at all n locations; Clone ID: 701149248H1
acttttttgttaatgaagaatttaaaaacttatatattgacaatacaaacttattaagttctaattgtaatgggaaaatactctatatacatttattctttctcttatgtnttattttcattctattttgtntttgactggtatgtagtgacatntcngnacccccctg

SEQ ID NO: 9024 - DNA, 289 bp, Glycine max
  Clone ID: 701149249H1
ggagagtcagattcgctcgccttgcttcgccacacaacagcaactgcagcaatggctcccaaacgaggtggaaaggctccggctcttgccgctaagaagaagcctgagaaggtttcgaatccgttgttcgagaagcgtccaaagcagttcggaatcggaggggcgttgcctccgaagagagacttgactcggttcgtgaagtggccaaagaatgttcaaattcagaggaagaagaggattctgaagcagaggttgaaggttcctccagctttgaaccagttcaccaaaa

SEQ ID NO: 9025 - DNA, 292 bp, Glycine max
  unsure (1)..(292): unsure at all n locations; Clone ID: 701149250H1
gagagtggtggagtgtgcagaagagcgtcgcagtcgcaacccctaatcagaagaagcgcacttcaagcgagtgacagccaccagccatgggtcgtatgcacagccgcggtaagggnatatcctcttctgctttgccctacaaaaggacacctcctagctggattcaagatctcttcgcaagatgtcgaagaaaatatctgcaagtttgcgaagaaaggtttgaccccgtctcagatggtgtcattctcagagattctcacggtattgctcaggtcaatagcgtcactggcag

SEQ ID NO: 9026 - DNA, 287 bp, Glycine max
  unsure (1)..(287): unsure at all n locations; Clone ID: 701149251H1
ggaacaaaataatacgtgcatacatagctatctagctagcaagtgggacaagagatatatatacgtggtaccctagagtgccattctgtagtttatttctgctcaccaaggcttatnacttcacaatttggccnttgcctcgtgtccttntncttctttgcttgccaaaaatcttacacacacaggtatctancaaatgggttctcaccagcaagaaccatggctattggagaatgggaaaccgagggtgttgaccaaggagataggcatggccgttctgcacacag

SEQ ID NO: 9027 - DNA, 281 bp, Glycine max
  unsure (1)..(281): unsure at all n locations; Clone ID: 701149252H1
gaactctatgcggactatgatccaaagatgctgctaccttttctccgtagcagtcaacactactcccttgagaaggcttacgaaatttgcattaaaagagacctattgagggagcaagtcttcatcctaggaaggatgggaaactcgaaannagccctagctgttattataaacaaattgggggatatagaggaggccgtagagtttgttcaccatgcagcatgatgatgaactttgggaagaattaatcaagcaatgccttcacaaactggaatggtggg

SEQ ID NO: 9028 - DNA, 286 bp, Glycine max
  unsure (1)..(286): unsure at all n locations; Clone ID: 701149253H1
ggcatcaattcaaaatatatcatcaatttataagcatgggtttgtggaacacaacgaatgcagtgtcttgccgctttcacaagtttggtgatgaccaaaagaatctggtcttccaaggtgatgccacgtcttcttccaggggcatagaactcacaaagttagacggtggaggaaaaccagtgggtggcagtgtggggagagtgttatactcttctccagtgcacctttgggnnagctctacagtggtcgcaagctttgaaaccgacttcaccttttccatctcatc

SEQ ID NO: 9029 - DNA, 258 bp, Glycine max
  unsure (1)..(258): unsure at all n locations; Clone ID: 701149254H1
gtggacagatctgcngctgtggatttcactggccgtgaattcaacaggaatcgtttaattgccttaatggcagctattgttcttgaggaacatcctggaacaactattgtcacagacagtgtgacttctgatgggcttaccacgtttattgagaagaaacttggtggcagacaccatcggttcaaaagaggctacaaagatgtgattnatgaagctattcgtttgaattctattggtgaggagtcacatttggcaatt

SEQ ID NO: 9030 - DNA, 271 bp, Glycine max
  unsure (1)..(271): unsure at all n locations; Clone ID: 701149255H1
ggagttcaacnnagatgggagcaaataaancacagaatagttgaagtgaatggcataaaaatgcatgttgcagagaaaggagagggtccagtggtgttgttcctccacggnttccctgagctctggtactcatggcgccaccagattctctctctcagctccctcggctaccgcgccgtcgctcccgatctccgtggctacggtgacaccgaggcaccaccttcaatcagcagctacaactgttccacatagtgggtgatctcgttgcgtt

SEQ ID NO: 9031 - DNA, 280 bp, Glycine max
  Clone ID: 701149257H1
ggagggtgtgaattctaaaaggaaagaacagctgagctggtcagaaaatcaatggcatcatccttgggttttgagttcctgacgaagaagccttacagtcctccatcctgggcatcccatctccaccctttaccttcccacttcttctctcttgcccatcttcccactccaattcacagatggaaccttcccaatctgcccaccaataccgagctgtggatcaagcgagacgacctttccggaatgcagctgagtggtaacaaagtgaggaaattggagt

SEQ ID NO: 9032 - DNA, 279 bp, Glycine max
  unsure (1)..(279): unsure at all n locations; Clone ID: 701149258H1
gacggcactcgttttcgttctcgttctggtttatagatctttggcgaaggaggtttacagcgctcaaccaaagatgcagaacgaggaaggacagatcactgagctttacattcctaggaagtgctccgccacaaacagattgattaccgctaaggaccatgcttcggttcagatcaacattgggcatgtggatgagaatggnncctacaatggccattctccacttttgccctctatnaattcatccgtgctcagggtgatgctgacatgctctagacc

SEQ ID NO: 9033 - DNA, 282 bp, Glycine max
  unsure (1)..(282): unsure at all n locations; Clone ID: 701149261H1
ggtggctttgcagggaagaagagtgtcagtagaaaataaatgtcctctttccncanggacatctctattttcacagatctatatctaagtgtcggtgatccctttctcctnccttctctgagggacaatgccannncagtgggcgcnttnccnttnngggaagcnggaatactacaccanaagcggngtggtggtaggttacgcagtatgctccagcctctggccatcataaacaattaggcnatcncaaattcaactacccaggctcttaaccgcgctcca

SEQ ID NO: 9034 - DNA, 284 bp, Glycine max
  unsure (1)..(284): unsure at all n locations; Clone ID: 701149262H1
ttactgactagatgtccttgtattcattatagtgggcgtgtttggttcacttctgattcccattggatgtcctaatgctttatgctttcttttttcaaccaatgaatatctcctttgaggtatatgataatatgaatagttgactcgagaagaagatttttttttgttcttttctgggagaattataaataagaaacactgttaaaaatattttccgtaaaagaaaaaaacattgaggtggttatttgtgttgaaatatataagnttaacaaccccttgaccat

SEQ ID NO: 9035 - DNA, 186 bp, Glycine max
  unsure (1)..(186): unsure at all n locations; Clone ID: 701149263H1
gatgtttaaaggaaatgagaaactaaaaggttattgtgatgatgaggatgtggaagttgtggagggaaattggttactataaaaattctcctcagaaagtggaganagaaggtagaagntcnagatattcacattctcgtgatagatatagaagtcgtcaagatcaactggtcngctacggacaag

SEQ ID NO: 9036 - DNA, 236 bp, Glycine max
  Clone ID: 701149264H1
gtacttccagttggaacttccttgactgttgttggtgaggctgctaaagatgatgttggcgctattcgaattcagcgaccccacaaagggccattttatgtctctcccaaaacaattgatcaactaattgcaaatctggggaaatgggcaaggtggtataagtatgcttctgtgggcttgacggtgtttggtgcttatctgatagccaagcatgctattcggtacatattggaaag

SEQ ID NO: 9037 - DNA, 276 bp, Glycine max
  unsure (1)..(276): unsure at all n locations; Clone ID: 701149265H1
ggcatcaattcaaaatatatcatcaattatnagcatgggtttgtggaacacaacgaatgcagtgtcttgccgctttcacaagtttggtgatgaccaaaagaatctggtcttccaaggtgatgccacgtcttcttccaggggcatagaactcacaaagttagacggtggatganaaccagtgggtggcagtgttgggagantgnnatactcntntccagtgcactttngganactctncatggtcgcnagcttcnanacgattcacnnttcctctna

SEQ ID NO: 9038 - DNA, 285 bp, Glycine max
  unsure (1)..(285): unsure at all n locations; Clone ID: 701149267H1
gtaggattgaattactaccactcaaatcccgagttaccaacaattgatgcactcganaatgggtctcggttcanaggtcataatgtatgtantcannctanttttaanaaattttngtcccgtgnaattntatgcntctntctaaacnctttactcgttccaatcncnatttcttctngaaactatgcttttatcctanntcctttgnttgttatcatcggnttcatancgagnttgaatgattngattattataaaaactnttactntnnaaaacnctnttttt

SEQ ID NO: 9039 - DNA, 280 bp, Glycine max
  unsure (1)..(280): unsure at all n locations; Clone ID: 701149268H1
ggcattattacaataatcaaatgcactataccacactcccatcacccccatatataccccctctcctctcacactaattaacacactcatcaaaaaacccttctttctttcaggttcattacttgatcagtgtcaaaagggtagttgcaaattgcaatggctaagcatgatgttgagggtggttccttctcagcaaaggactaccanatnncatcctccagcacctttgattgatgctgaggaactcacacagtggtccttctacaggctttgatgctga

SEQ ID NO: 9040 - DNA, 279 bp, Glycine max
  Clone ID: 701149269H1
ggcagcaacagcagcattcactgaaagcactcagtagggtttgcggtttcagagtttgtgacgcacgcatccatggccaccaccaccaacgccgccgcagccccgccgcgccagctctcccagaaggaagccgacatccagatgatgttagccgccgacgtccacctcggcaccaaaaactgcgacttccaaatggaacgttacatcttcaagcgccgcaacgacgggatttacattattaaccttgggaagacatgggagaagcttcagttagcagta

SEQ ID NO: 9041 - DNA, 278 bp, Glycine max
  unsure (1)..(278): unsure at all n locations; Clone ID: 701149270H1
gagtcaagttttatgtctggattagacgatcaaattcctactgccttcgatccttttgctgatgcaaatgctgatgactcgggtgctgggtcaaaggagtatgtgcatattcgcgttcagcagcgaaatggtaggaaaagcctgacaaccgttcagggattgaaaaaagaattcagctataacaagatacttaaagacgttaagaaagagttctgttgcaatggatnagttgttcangacccagaactaggacagttatccaacttcaaggtgatcag

SEQ ID NO: 9042 - DNA, 96 bp, Glycine max
  unsure (1)..(96): unsure at all n locations; Clone ID: 701149271H1
gaatgtaactgagaagttctggatccttcgcgagaaaggaaaacgnttaaattctcatctttttcttaatttttccattattgctttctctgctct

SEQ ID NO: 9043 - DNA, 283 bp, Glycine max
  unsure (1)..(283): unsure at all n locations; Clone ID: 701149272H1
gatgcagaatcaaagtacctagcagggccttgggagtttctcgtcagcggccaagccatagttgatgggctaagagacagtgttctagcattttctggtaatgtgcctggaacatcatcaaaggatatcatggacatggttctcatgactcaatattttgacacaatgaaggagattggtgcatcctccaaatccaatgctgttttcattccacatggacctggtgctgtgatgatgttnnntcacaagtnaggatggtcttctccnaggaatgcaacaacag

SEQ ID NO: 9044 - DNA, 279 bp, Glycine max
  unsure (1)..(279): unsure at all n locations; Clone ID: 701149273H1
gggcatgaatcctttggggtcttgctatctgcttcctcgtngtncttcattgagagagacatggacactgtactaagtactacgctgctactcatgttggcatgctccatcgtgcatgttcttcgttcactacaagcaagaatgagangaaaatcaaactacaatcttccaccaggaccctctcttctcaccatcattagaaactctaaacaactctataaaaagccacagcagacaatggccaagcttgccaaaacctatggccccataatgcgtttc

SEQ ID NO: 9045 - DNA, 190 bp, Glycine max
  Clone ID: 701149274H1
gtgggtgtgggtggaggtgagggttggttcatttgatctggcgactgagagaagagaagagaattgtgatggggggaggacagggtcacggcacaacctacaaaggtgttaccattcatcagccaaagcgctggcacactatcaccggcaagggtttgtgcgcggtcatgtggttttgggtattctacag

SEQ ID NO: 9046 - DNA, 277 bp, Glycine max
  unsure (1)..(277): unsure at all n locations; Clone ID: 701149275H1
gacacagaaacattcgcaaaaacaaaatcccagtatcaaaattcttctcngttttcatatttcgcaaagacatggatttcagagtgatgggtttgtagtctccactgttccacacgctgcaacacatgatggacatgtcagangacggtgcaggagacaacaagacacacaatgctccaacatggtcatacgttcgagacgcgaaagcaatggctgcaacacctgcggatgtgaaggagtatccgaattcttacgtgttcgagatcgacatgccggg

SEQ ID NO: 9047 - DNA, 280 bp, Glycine max
  Clone ID: 701149276H1
ggcagcgcttgagaccaagccccactcaaccaccacaccactctctctgctcttcttctacctttcaagtttttaaagtattaagatggcagagacattcctatttacctcagagtcagtgaacgagggacaccctgacaagctctgcgaccaaatctccgatgctgtcctcgacgcttgccttgaacaggacccagacagcaaggttgcctgcgaaacatgcaccaagaccaattggtcatgggcttcggagagtcaccaccaagggcaacgttgacta

SEQ ID NO: 9048 - DNA, 287 bp, Glycine max
  unsure (1)..(287): unsure at all n locations; Clone ID: 701149277H1
gatgacctttttttccatgtttgatgttcctgtcttttggcctatattactctgttactgggttgttctctttgtccttacaatgaggcgtcaagttgcacacatgatgaaatacaaatatatccccttcaacttggggaagcagaagtatagtggaagnaatccttctgcaagtagcagtggctctcgtgcagactgaaacttggttcttatgatttganagatctactaagttaggtttgtgaacattcaggctagttaattttcccccttttttaatgaaagaa

SEQ ID NO: 9049 - DNA, 281 bp, Glycine max
  unsure (1)..(281): unsure at all n locations; Clone ID: 701149278H1
gagcaacacaatagaagagnagcactcttttgtgttgtctctctacctgctctctctctctactctctanagtctattctctctcaatttctatncacatttcaaccanaatgagtggcttgagtttcaagggttcacatacatgtncctcatngcattnccaatttgggctanaantttggnggctggattggnaagangaggaangcactggaggnaaagcagggntgtccccgcttccttgtacaaggagntaggcaaaactatagcaatgctcacaa

SEQ ID NO: 9050 - DNA, 277 bp, Glycine max
  unsure (1)..(277): unsure at all n locations; Clone ID: 701149279H1
cacagagttcagccacaaaaggttgaacaacnacactggtgctggtggcttgacaacctcaggagatcagggataaagttcgtggcactccctgatggcttagggccagaagatgatagaagtgaccagaagaaagttggtctctcaatcaaaaccaacatgccctctatgcttcccaagctcgnacaagatgncaatgcttcagatgttagcnataaggtcncttggatgttgncacttgggnntnattggggctnaaaatgggcaaaatttnggg

SEQ ID NO: 9051 - DNA, 278 bp, Glycine max
  unsure (1)..(278): unsure at all n locations; Clone ID: 701149281H1
ggggtttgtgaggactgtggacaatgcttccgtttttgcttttgcggttgagtttcgttgtgcaaaagtcaaacagttttaagggcaagataaaaagtctctcaagccttccattccaatccaaaccaccctccaccctcagatccttctannnnnnnnnnnnnnnnnnnnnnnnnnnnnnagcaatataatattaatcaagaaattaagcatgcttcgagcaaagaaggggtccacacgtntggagttttagtaattnatctaccacnattggggtg

SEQ ID NO: 9052 - DNA, 276 bp, Glycine max
  unsure (1)..(276): unsure at all n locations; Clone ID: 701149282H1
tctccatttacaggacccatatgtccatttctttaacatatcgcccatgttgctcttctcaagttgatcatatctctatattcctcctctacatacgangccatgctctcttttcaggtcaaatacagattaagcgcctctcgttaattgtatttgtagtcaacaaangctatantatgngaatcaggctttatattaatggatgctaataaatgttttctacattattgcataactaatccaccatgcctggcccttaccttancttaagngagg

SEQ ID NO: 9053 - DNA, 274 bp, Glycine max
  unsure (1)..(274): unsure at all n locations; Clone ID: 701149283H1
gatcgaagcaaaaaatgaaaacccaaagtgcttctctcctctgtctttttctctctcttgctatccttttggctagtggcactgctgcgagtgcaactccaagaagcgcagtgccaagccaccatgtntcaacattcaacagaagcctttttccttccacttttctctttggaattggttcttctgcttaccaggcagaaggagcagcaagtgtagatgggagtggaccaagcatatgggacacctacactaganagcatntgaaaagattggg

SEQ ID NO: 9054 - DNA, 281 bp, Glycine max
  unsure (1)..(281): unsure at all n locations; Clone ID: 701149284H1
ttgactggtccccaggacgacccacggagagatcaatctctacactcccaaacagacaagttatcagacttccatcaatcctattgaagaagcaggatatcaaagcacaagagacaactccaaatcccagcataagctcgagtatacaccatttcaacaaccctaaaacgaatcattaaaaaagtgaccctattctatatctatgttaanttacaatcaaacccccaatttgacattcaaaatgtaaaggttactgaatttgaaatacccatatcaatggg

SEQ ID NO: 9055 - DNA, 218 bp, Glycine max
  Clone ID: 701149285H1
attttggcgttttaaagcagtgggctgagcaaaaaaagagggttactgatgctgacctcagagcattggtatcagatgaagtttttcaagcagagcctgtctggaaacttggtgatttgcaggtgacttgtggaactcttggcctttctacagcaactgtcaaacttttgagtagtgatggtagcacacatgttgcttgttctgttggtacaggacca

SEQ ID NO: 9056 - DNA, 278 bp, Glycine max
  unsure (1)..(278): unsure at all n locations; Clone ID: 701149286H1
ggaggacaccatggccaacaacaacgaagaggaagaggaagcagtgggcgccaatggtgaagttgggttcttacggtggtgaggttcggtcggtggttggtggggaggaatccgctgcggaggagaccatgctgctttggggtattcagcagcccacactttccaaacccaatgccttcgtctctcaagcttccttgcaactctccctcgactcttgtggccattntctctccattcttcaatccccttcctcattgggaacgcctggagtaactgga

SEQ ID NO: 9057 - DNA, 274 bp, Glycine max
  unsure (1)..(274): unsure at all n locations; Clone ID: 701149288H1
cagttagatacgggcatgatatgcttttagttattgggagatatcaaattgacttgttgtctagaattaaatagtataacataggataggacaattctaaattaattacaaattatgataagctatagtagtttgtctatttttgtatgttatgaaacacaaacgcaatatatatttggttttgttcacagggaggctttcagtgaatatgcaaggagattggctcattggtgnnaaggcttctaggtttgttatcatanggctggaatagaag

SEQ ID NO: 9058 - DNA, 285 bp, Glycine max
  unsure (1)..(285): unsure at all n locations; Clone ID: 701149289H1
gggtgccagttggtgacatttcatggctagcaatccttcccctcacgggcacatgcatcagcatcagtttgcgttacagggcacagagtcaaagccttgtgacgcagaatcactggtgccggcgacccttttgattaagcacttgccagaagccattcctgacgtcaccctctctcggatcttggccaatttcggcgcttcctcagttcgcccttgctntactggcaggttgagaaattgtgcttttacggatttcaaaaatgagattgtggcatctcaagcaca

SEQ ID NO: 9059 - DNA, 277 bp, Glycine max
  unsure (1)..(277): unsure at all n locations; Clone ID: 701149291H1
gacagctattcctcttaagcttgctactgagtttccacactgcataccttaggtcttccgaattcgaagttaatttgcaagatggctaaggaaanggctcagatctacattgtggtggttggtcatgtggaccctgaggaggcaaccaccattaacgagctgaagaagcctgttntggagaaagaagctccagggcatgccatatgagggcatgcacgtacggcctcggaggggaaccagaaaattatgttaacaaaaataatctgggnaccctant

SEQ ID NO: 9060 - DNA, 275 bp, Glycine max
  Clone ID: 701149292H1
gacagcagagccaccaaatacttgtgttgtgtcgattctctggccatccatgatccatcacttacaaactagtactacttgctttcaataaaaacaaaaacacactctttggtgaccacaacaacaataacaatggctgcctcactacaagctgcagctaccttcatgcaacccaccaaggttggcatagcctctcgcaacctcaaatctacacaatgcatttctaaggcttttggcttggaactgtgcagctaaactcacttgctcccttcagc

SEQ ID NO: 9061 - DNA, 103 bp, Glycine max
  unsure (1)..(103): unsure at all n locations; Clone ID: 701149293H1
taccaaatttgcattcaattatcactgcatctgatggggcaatggttgccagaggagatcttggcgctgagctccctattgaagaggttccacttttgcnggg

SEQ ID NO: 9062 - DNA, 276 bp, Glycine max
  Clone ID: 701149294H1
aactggtggacaggatttttaactgtgaagacgtgctcttaaattatttgtatgcaaatgcaagttcatcatcaaggactgttgattatgtgaaaccagcttgggcaattgacacttcaaagttttctggtgcagcgattagccgaaacacgaaagtacattatcagttgagaagccagtgcctgatgaaattttcagagatgtatggaagtttagctggtcgtaaatggggattgacagtagaaaagatggttgggatgtatagtagggagtttt

SEQ ID NO: 9063 - DNA, 281 bp, Glycine max
  unsure (1)..(281): unsure at all n locations; Clone ID: 701149296H1
gacaacacaagagaaaaagcgcactgcttcgnttcgtgttctgtntctctctgtttctccgttctctggtttttttttcagatctcgaaaaatgcagagcgcggctttcactttctctccctctctccctctccgcaacccttcccctaactnttggaggagaccctctctttctctccgtctccacgcnnnnnnnnnnnnnnnnnnnnnnnnnnnnnnnnnnnnngaaggcgttaatccaatggcgtctcttccattccttcactcgccgatcttggatt

SEQ ID NO: 9064 - DNA, 193 bp, Glycine max
  unsure (1)..(193): unsure at all n locations; Clone ID: 701149301H1
ggcgtcgttgtttgttgtctcccttcatctattttttcttcgcccccttttgtgtttctntttttggttgtttgttctttcttctcgttcgtcgctttgtgatctctctctgcaaccatgtccgccgagaaagagagagagacccaggtttacttggccaagcttgccgancaggccgagagatacgaagaat

SEQ ID NO: 9065 - DNA, 152 bp, Glycine max
  Clone ID: 701149302H1
gatgagttcttgatcattgggtgtgatgggatttgggatgtaatgtctagccaagttgcagttagtcttgttcgccgaggattaagaaggcatgatgacccacagcaatgtgccggagagctagtcaaggaagcatgcgcctaaatacatca

SEQ ID NO: 9066 - DNA, 234 bp, Glycine max
  Clone ID: 701149304H1
gggtgccactctctcttactcctctgttttttctccatggctagggttttgatgctactagtaagcacgaatggtacaactactgtctagtcatctcgcatgaaacaggtgttaatcaacatttatttggggtgatcatatatttttttcctaaaataaatttagagagagcaacaaaatgtggaggctgaagatagcagatggtggaaaagatccatacattttcagcacaaa

SEQ ID NO: 9067 - DNA, 242 bp, Glycine max
  Clone ID: 701149305H1
ggacgaaaccaaacgtatcaataacacaacattgctgaagaagttgaaaggtcgcatccttccttcattcgtttcgttgagttgaaaactctttttccacattcttttatttcttgtctcacccgcaccatgcaagtgtgccaactactgtgattggtatggcgacacgtgtcccttttgttttgtgcgcagcaccacttctcccaaccactgccttaaatactgcgtggtggcaccgtcac

SEQ ID NO: 9068 - DNA, 240 bp, Glycine max
  unsure (1)..(240): unsure at all n locations; Clone ID: 701149306H1
cattcaaatgacaacattattttgattatcaatcggattcggaaaagtaatccaatcacactcgcagcagaaaatcgaaagaaaatgcaagtattctatggagtattgttgcaatattttgctgttttggcaaataaggaacctcttaatgttgagctactcaatatncgcgtgaaaccgttgatagagatgagtatggaaatcccatactttgctgcaatatgtgctcgtcgcagaata

SEQ ID NO: 9069 - DNA, 238 bp, Glycine max
  Clone ID: 701149307H1
atcagcggtgccccccaggataacaacataatgctgtggaatgctgtcatatttggtcctgatgatactccatgggatggaggcacgttcaagttgactctccagtttactgaggattatccaaataaaccaccaactgtgcgatttgtgtctcgcatgtttcatccaaatatttatgctgatggaagtatttgtttggatatactacaaaatcagtggagtcctatatatgatgtgg

SEQ ID NO: 9070 - DNA, 240 bp, Glycine max
  unsure (1)..(240): unsure at all n locations; Clone ID: 701149308H1
gaccgaagaaataaatagagagttggttaaaagtaggaaatgaaagtgagggagagagaatggaggaagaggcagggatctaccgtctagcggaggacagcctccggcagatattctgcaggctgccactgagggaaataatgatatgccgctcagtgtcaaaattcttcctgcagctgctctcaacaccttcgttcctcnnngnggactccagctcccatcctacccctccagctcctg

SEQ ID NO: 9071 - DNA, 158 bp, Glycine max
  Clone ID: 701149309H1
cagtgccaagccaccatgtttcaacattcaacagaagcctttttccttccacttttctctttggaattggttcttctgcttaccaggcagaaggagcagcaagtgtagatgggagaggaccaagcatatgggacacctacactagacagcatactgaa

SEQ ID NO: 9072 - DNA, 236 bp, Glycine max
  Clone ID: 701149310H1
gatgtcgaagaaaatatctgcaagtttgcgaagaaaggtttgaccccgtctcagattggtgtcattctcagagattctcacggtattgctcaggtcaatagcgtcactggcagcaaaatccttcgcatcctcaaagctcacggacttgcgcctgaaattccagaggacctgtaccatttgattaagaaggcagtttcaattaggaagcatcttgagaggaacaggaaggacaagga

SEQ ID NO: 9073 - DNA, 238 bp, Glycine max
  unsure (1)..(238): unsure at all n locations; Clone ID: 701149311H1
ggtgtgtcattncctttaccatctcagtctcaactctctccaacaaccacaatggctctcttgggcgccgcctcctcctccgctcgcatcattccctccgtctcactctcttcctcttctcgctccttcttctcactctcatcctcttcttccaaactccaatgcttgcgctcctctcctcgtatttcgcacctctttctcaatcagcgaagagcggaggttcgcgtttcgagtggag

SEQ ID NO: 9074 - DNA, 212 bp, Glycine max
  unsure (1)..(212): unsure at all n locations; Clone ID: 701149312H1
gacgataaaangtttttgttttgtttcctacgggtgctgcatgcactttcactcgaagaaccttgaagcgagtctgggccacagcaaccagcgacaacaactcaatcagctagggttgctttgcttgctatcttgttggaggattttctgcttgttttagttcaagagaagatggtaactagattgtggatcttcgttcagacacattncaa

SEQ ID NO: 9075 - DNA, 238 bp, Glycine max
  Clone ID: 701149313H1
gacttcgtactataggtgtcgttggacccaatgctgatgctaccgttacaatgattgggaactatgctggtgtggcatgtggttataccactcctttgcaaggaattgcgaggtatgtgaagacggctcatcaagtggggtgtaggggtgtggcttgtaggggaaatgaactatttggggctgcagagaccatagctaggcaagctgatgcgattgttttggtaatgggccttgacca

SEQ ID NO: 9076 - DNA, 237 bp, Glycine max
  unsure (1)..(237): unsure at all n locations; Clone ID: 701149314H1
gacaccgtttgttctattcttagctcaacttctgctacccactctcttcttccaagtccaaccacgcttttctctacagtcatgggcaaggtcaagatcggaatcaacggatttggaagaattggccgtttggttgccagagtcgctctgcaaagagacgatgtggagctcgttgccgtnaacgaccctttcattaccaccgattacatgacatacatgtttaaatacggcntgtcc

SEQ ID NO: 9077 - DNA, 183 bp, Glycine max
  unsure (1)..(183): unsure at all n locations; Clone ID: 701149315H1
atcatgttctcttttattgtttaaaatgtaacaaaaattatgaatgaangtttataaagtaagtagttgaactcaatttttttgtaatttttaataaattttagtataaaanatgtattaanaaatatattgcattaaaagttatattgtnagnattttatagaanaanattgtctggtaaag

SEQ ID NO: 9078 - DNA, 243 bp, Glycine max
  unsure (1)..(243): unsure at all n locations; Clone ID: 701149316H1
gaacacgcggcttccgccggaggtgaaccgcgtgctgtacgttcggaaccttcccttcaacatcaccagcgaggagatgtacgacatctttggcaaatacggcgccattcgccaganccgcatcggcaccaacaaggacactcgcggaaccgctttcgtgcnctacgaggacatctacgacgccaaaaccgccgtcgaccacctctccggcttcaacgtcgccaaccgtacctcatcgttctc

SEQ ID NO: 9079 - DNA, 250 bp, Glycine max
  Clone ID: 701149317H1
gacggacgagggtttcgtttcgggtttgacgttgttcacaatcactttctgcgcttcactcactcccttcgtgcggttttctttctttgtcgaactcgtgcgaaaatgcgtgagattcttcacatacagggagggcaatgcggaaaccagatcggagcgaagttctgggaggtggtgtgcgcggacacggggatcgattccacggggaggtaccagggggacaacgattgcaactcgagcgagtcaacgt

SEQ ID NO: 9080 - DNA, 243 bp, Glycine max
  Clone ID: 701149318H1
ggaccaatagcaggaccctgtatcaactcaaatagaagactagtcaaattgttctggaccagcccataacaaaattgggatggactgtgtctacatggttcatcttcaaacatgcttcttagtgtggaattctcgaatacacaacttagctcaactataatcatgtttgtggctcatcctcaattaatgtcatgtaaatactaaataagatgcccacaactatcttaagtatgtaagtcttcc

SEQ ID NO: 9081 - DNA, 248 bp, Glycine max
  Clone ID: 701149319H1
gcagccagagtctctaacaaccacaatgaggggggggcttatacattcgaggatctaacaaatccaagtctgttctgttgggtgggctgaaggatcacctcaaaacaattaggcgaagtagaaggatacttttcattggttgtggtacaagttataatgctgctttggcagctagacccatcttggaagaactttctggtgttcctgttactatggaaattgctagtgatctattggatcgggaggga

SEQ ID NO: 9082 - DNA, 240 bp, Glycine max
  unsure (1)..(240): unsure at all n locations; Clone ID: 701149321H1
gacagaaaagaaaaaagaaaccctagctggataggtcaaacatcattcatgtcggacgaagagcaccatttcgagtccaaggcagacgccggtgcctccaaaacctaccctcagcaagccggtaccattcgcaagaacggctacatcgtcatcaaaggacgcccctgcangttgtggaagtttcgacttccaaaactggaaagcacggtcacgccaagtgccactttgttggaattgata

SEQ ID NO: 9083 - DNA, 195 bp, Glycine max
  Clone ID: 701149322H1
ggcagtgaaacatgggggactcaacttgtctcatgcaacaaccattctgttatgcttcagggatttccaatgaagccagtgaggctcaccttgaaaaaaactgtgaaacttgtgcgtttcagaacaacccaattcatgcacttgagcagtcaatttcgtttgggagattcatgtcagagtccctggcatgggaga

SEQ ID NO: 9084 - DNA, 233 bp, Glycine max
  Clone ID: 701149323H1
tcatcaatatatttaattaggtttttcttttaaaaatacttttatgcttaaaattaactaattcaaacatataaatttagcattagaaaacgaagggaacaaattttacgtgcattcgttgtcctaaatcaaagtgtacatgtgtagttgaaggcaagcaatcatctaaaccgattacaaattaagcaaaagattaggctacccaatcgtaaaagaaaatcaaaaccttattt

SEQ ID NO: 9085 - DNA, 237 bp, Glycine max
  Clone ID: 701149324H1
taaaccaaacaatgggataaaatacaaattgcggaaggaagggaagcaaagagtgataattggaaatcctaataatcaaagccaaactcactcacacactcattggaaatcaactcaggcaaggcaaaggaagaagaaaccctaaaatattagtattgagaataagaagatgcggctgaatttgtgccacgtttcgcttggtttcgttctgaaattcctgaattttcttcaatgctt

SEQ ID NO: 9086 - DNA, 234 bp, Glycine max
  Clone ID: 701149325H1
tattcattagacactagtcactacgaacatctcaaaatgggtcattcaggttaaaagcctaataacaaataattattgttattgacttgtttaattttccaaataacaaattgcagcaagtaacaactaccacctgccacagttcttcaaaactatgttgtcaatcgtggccgtcgcggccgctattgcggcgaagtggagcggcgcgtcccccatccgcgactgggatggaca

SEQ ID NO: 9087 - DNA, 232 bp, Glycine max
  unsure (1)..(232): unsure at all n locations; Clone ID: 701149326H1
gatgtaanagctgtgatgaaagactctggaactgctatgcttggtgtgggtgtttcctccagtaaaaaccgtgcagaagaagctgcagaacaggccactttgactccnttaattggctcatctattcagtcagctactggggtagtgtataacattactggaggaanagacataactctacaggaagtgaacagagtgtctcaggttgtgactagtttagccgacccttctg

SEQ ID NO: 9088 - DNA, 234 bp, Glycine max
  Clone ID: 701149327H1
gagcgaagaagatattagggtttttgagtgcggtgcggcgatcctagcactctcttctgcagctttcgccgacagcttcattcaccatggctgagcaaaccgagaaggcttttttgaaacaaccaaaagtgtttctcagctcgaagaaaactgggaagggaaagagacccggaaagggtgggaaccgcttttggaaatccattgggcttggatttaagactcccagggaagcca

SEQ ID NO: 9089 - DNA, 237 bp, Glycine max
  unsure (1)..(237): unsure at all n locations; Clone ID: 701149329H1
ggagacctccgaaatggtagttttgtgaatggtgatttgggggagctcgggtacattgcgccagagtatcctagtacacttgttgcttcgttnaaaggggatgtgtatgggttggtattttgcttttggagttggtgactgggcgaaaacctcttgatgtaagcaatggggaggtagattcaagggtagcttggtggattgggtaaatatgcttctnttctggccgaatcaaggatt

SEQ ID NO: 9090 - DNA, 242 bp, Glycine max
  Clone ID: 701149332H1
ggaagagaaaaatgggggtgttagggtgttgattctctgcgacgctcttcgcattgcggtaccctgcaccttcctcgcggtattgcgcgcctgtcccactcccattccgtttttccgctcccctctctgtgttgcgaaaataagggttcattggtttggggctaattcttcttccgatttcgagccgagtgaaatcgttaagagagaaaatgtacgctgatcgtatggagggtggagccagg

SEQ ID NO: 9091 - DNA, 199 bp, Glycine max
  unsure (1)..(199): unsure at all n locations; Clone ID: 701149333H1
tcctgtctcttttggttatgtttacattctccttgcagttgattatgtttcaaaacgggtggaagccaagcccactagaactaatgatgctaaagttgtcgcagactttgtcaggtctaatctattttgcaggtttggagtacctaaagcaattgttagtgatcaaggaanccatttttgcaacaggacaatgcatgcc

SEQ ID NO: 9092 - DNA, 242 bp, Glycine max
  Clone ID: 701149334H1
gattgatcttccggtaaagtggaccggagatgccggttgccgcttccgccatttacttcctcaacctccgcggcgacgttctcatcaaccgcctctatcgcgacgatgtcgggggaaatatggtggatgcttttaggacgcatattatgcaaacgaaggagcttggtacttgcccagtgaggcagattggtggatgctcttcttttacatgaggatcagtaatgtctacattgtcatgttgt

SEQ ID NO: 9093 - DNA, 237 bp, Glycine max
  unsure (1)..(237): unsure at all n locations; Clone ID: 701149335H1
atagcagaaaataataatagtgttgcttttttcctattttcattgttcaccccgtgacgcaccattcagcaacggcaaccattgntactattacatggaataaattcaccctaaagtcggcgacgtatttgaaatttttggtaatgctaaatcacacattatacctcttctcgtaaaatacacgcaactaagtttgatagtagttgatactacttttatcagcatttgacaacgagt

SEQ ID NO: 9094 - DNA, 237 bp, Glycine max
  unsure (1)..(237): unsure at all n locations; Clone ID: 701149336H1
atagcagaaaataataatagtgttgcttttttcctatttncattgttcaccccgtgacgcaccattcagcaacggcaaccattgttactattacatggaataaattcaccctaaagtcggcgacgtatttgaaattnttggtaatgctaaatcacacattatacctcttctcgtaaaatacacgcaactaagtttgatagtagttgatactacttttatcagcatttgacaacgagt

SEQ ID NO: 9095 - DNA, 244 bp, Glycine max
  Clone ID: 701149337H1
ggtgacgataggagtggaaacgacgtgtcgcttcaatttgaagggaagtgcaatggaacgtgcgaaaaaagtgcatcaatctggtagttcttctgggtagggcttctgaaagagtcttacagagaagagtgagtgtgtgtgataataattgggatcaactaatcaatcaatttgaatggcatcatccaattcggctcagctagaagggaacaaacccgcaaagagaaaacccgtgttcaccaaa

SEQ ID NO: 9096 - DNA, 193 bp, Glycine max
  Clone ID: 701149338H1
aatcatcaccagtggttcttttccttctgagaagatcgaattgtgttttgcaaaaatgggagttccagagaaagaccctctttcccaattgagtttgcctcctggttttcggttttaccccaccgacgaggagcttctcgttcagtatctgtgccgcaagtcgctggccaccattctctcttccaatcattgc

SEQ ID NO: 9097 - DNA, 233 bp, Glycine max
  Clone ID: 701149339H1
ggaagagtgaagagaatggctcccaagggtttaacctttctggctgtgttaatatgcgtttcagcactgtcactgagtccttctgttgcgggggaagggcaaaataatggccttgttatgaacttctacaaggaatcatgccctcaggctgaagacatcatcacagaacaagtcaagcttctctacaagcgccacaagaacactgctttctcctggctcaggaacatcttcca

SEQ ID NO: 9098 - DNA, 232 bp, Glycine max
  Clone ID: 701149341H1
ggccagtaaaaatggccaagttgttggctctgtttacaaagacatgaaaggccccctttttccaaccattgctgttcacagtcaaaacgaagaggtgcatgtcaactttgggcagaaaccatttacttttgacctaaaggaatttgaagcacaagaaagaatgaagcagcaactgaaaatagaagaaatttctgtgccaccaaatgtcagttatggaattgtccgctcctac

SEQ ID NO: 9099 - DNA, 232 bp, Glycine max
  Clone ID: 701149342H1
gataccaaaaacaaaacaagccaagtgaaagagagaagaaaagtcaaagacaatgtcagggatcattcacaagattgaggagacccttcatgtgggaggccacaagaaggaggaggagcacaagggtgagcagcaccatggtggagaatacaaaggggagcatcatggtgaacacagtactgaatacaaaggagagcatcatgttggtgagcacaagccggagcaccatgga

SEQ ID NO: 9100 - DNA, 232 bp, Glycine max
  Clone ID: 701149343H1
ggacctatacccgatgaatttggaaatttaactcgactagaaatacttgatctcacttggaataatttcaatggctcaattccaaaaagccttggacgcctctcatcagttgtcaatctgtcacttttgggaaatcgacttactggttcaattccctcagaaattggtgacatggctagtctgcaagaactgaatttggaagataatcaacttgagggacctcttccccaga

SEQ ID NO: 9101 - DNA, 189 bp, Glycine max
  unsure (1)..(189): unsure at all n locations; Clone ID: 701149344H1
tatctgtcattaatatttctctttcttagagtaattgtttgttaatatattcttttttttaattagtaacatttctactctaaaactaattaatgtaataaacattatatattgaattttataaagagaaataaatacaattttnaatttaggtatnataaatgagaacggaggaaatatttattattt

SEQ ID NO: 9102 - DNA, 212 bp, Glycine max
  unsure (1)..(212): unsure at all n locations; Clone ID: 701149345H1
gaaagagacccggaaagggtgggaaccgctttnngaaatccattgggcttggatttaagactcccagggaagccatcgaaggaacctacattgacaagaagtgccccttcactggcaatgtttccatccgtggccgtatcttggctggaacatgtcacagtgctaagatgaacaggactattattgttaggaggattatctccattttatca

SEQ ID NO: 9103 - DNA, 233 bp, Glycine max
  Clone ID: 701149346H1
ccttattatgatcaaaaagaataaaacaaaccgaggaacaaaaaagacagtgattacgtattgtatttgaaatgaaattaggtatatatgttggttttcttgcttttgtttgctaatatcagggcatcataaagaccaaacaaattaaggtgttggttggttagcaagccagcaaggatcgcatcagtgaaatgcactcaaactgggaaattcatccacacttcacaaactag

SEQ ID NO: 9104 - DNA, 241 bp, Glycine max
  unsure (1)..(241): unsure at all n locations; Clone ID: 701149347H1
ggcacaagtgagtttgttgatcgagataactagaaacagtgtgatgaaaatgaaggtccttgttttcttcgttgctacaattttggtagcatagcaatgccatgcgtacgatatgttccctctccgaatgaacactggctatggtgcccgtactccggaggtgaaatgcgcaagttggaggcttgctgtggaagcacacaacatctttggctttgagaccattcctgaagagtgcgttnaa

SEQ ID NO: 9105 - DNA, 225 bp, Glycine max
  unsure (1)..(225): unsure at all n locations; Clone ID: 701149349H1
caacccaaattggttctgtanactgagagtattgaagctancaggatgtccaaaaaagctggatggggtgtcatggccagtcacagaagtggagagactgaggataccttcattgctgacctttctgttggtttggctacgggtcaaattaagactggagctccatgcaggtctgagcgtctgctaaatataaccagctctgagaattgaggaggagcttggtgt

SEQ ID NO: 9106 - DNA, 164 bp, Glycine max
  unsure (1)..(164): unsure at all n locations; Clone ID: 701149350H1
ccaagtcatttccaactactccctccgtgcctttttataagacattgttttgaaattttttttgtcccttttataagactcttttttacttgtccattagattaattatcttttactaaaatactgttagttaatttaggtaataaataatagacgctatgnct

SEQ ID NO: 9107 - DNA, 234 bp, Glycine max
  Clone ID: 701149351H1
ggcacaagtgagtttgttgatcgagataactagaaacagtgtgatgaaaatgaaggtccttgttttcttcgttgctacaattttggtagcatggcaatgccatgcgtacgatatgttccctctccgaatgaacactggctatggtgcccgtactccggaggtgaaatgcgcaagttggaggcttgctgtggaagcacacaacatctttggcttgagaccattcctgaagagtgg

SEQ ID NO: 9108 - DNA, 234 bp, Glycine max
  Clone ID: 701149352H1
ctcccactcttcctatttgattttactctatttcagttgagagaaaaagtgtcaaaaataaattctatgatgtcatgaagtcctgtttgcttaatctgtatataattatatatgatgttctccttcacgagataactttgtaaaggttctttaacctttcttctgttatgaaagcaattgaatctcctgaaatttatgttaattgcaactcatttttagggatgatgatcatct

SEQ ID NO: 9109 - DNA, 233 bp, Glycine max
  unsure (1)..(233): unsure at all n locations; Clone ID: 701149353H1
ggaagaaaaaaggaagggtaagtaaattgggaatggtggtggtagtgccaggtgtctgtctgaggagaaaatagaataaaaagctatgaaattttggcacaaggtctgattgtagaattgaagaagatgactggggggggtatcactatgcaatcgacgccgggnagctcaggatacttggatttgtatccagagcggaagatgtccttttcaaaaatcctacatctcggact

SEQ ID NO: 9110 - DNA, 228 bp, Glycine max
  Clone ID: 701149358H1
gcatcacaacatcatagtaagcactatagtaaaaaaaggacattcattcatctatggctacccttattgctcccagcaaccactctccccaagaagatgctgaagctctcagaaaggcttttgaaggatggggaactgatgagaacactgtcatagtaattttgggtcatagaactgtgtatcagaggcagcaaatcagaagagtttatgaggaaatttaccaggagg

SEQ ID NO: 9111 - DNA, 131 bp, Glycine max
  unsure (1)..(131): unsure at all n locations; Clone ID: 701149359H1
tcccacccaccatccancacctccacttgagaataatggtgatcgattaataacggttaaatangagtnatttttataataaaaatatattaaaatatttatttaaaagttatttttgtattaaatgataa

SEQ ID NO: 9112 - DNA, 227 bp, Glycine max
  Clone ID: 701149360H1
gggtggtggcaatgggtagcgaagaagagagggttcttgagaatcaactggaacttcaattgcaagagcaaaggggttctctctctgctatcggtcaagctcttctctctgatccaactaaccctgaacttctggcggttcatgaggagcttgttcaggcaattaaggatgcagaagaaggacttcttcacctaaaacgtgcacgattgttacaggaagcagattca

SEQ ID NO: 9113 - DNA, 246 bp, Glycine max
  unsure (1)..(246): unsure at all n locations; Clone ID: 701149362H1
gctcgagcttttcagctttttagtcatttacntttgagggcttcaancctatctgccaaaccaacnccatgttgtttaatgacaaattttgtaagagtgtacataaatcaaattgcctaaatcacgtcaaattttcggggtaccgaaatttcgatctgtaagaatttttctaaaccccggaaaagaattatttattatatgccatggccagaaaagctcttntgaaacctacaagtgcctgntaac

SEQ ID NO: 9114 - DNA, 219 bp, Glycine max
  unsure (1)..(219): unsure at all n locations; Clone ID: 701149363H1
acacactaaacaagttaaacagaagagcatcactgaactaacaaagcaaccctatgtcgaaggtggtttgtgtcaccggagccagcggcgccatcggatcatgggtggtcctactcctcctccagcgtggttacaccgtccatgccaccgtccaagatatcaaggatgaaaatgagacgaaactttggaggaaatggaaggagcaaagatnntctcntt

SEQ ID NO: 9115 - DNA, 236 bp, Glycine max
  Clone ID: 701149364H1
gatgctgaggctctttcaaccctgagttctatttctcatggagatcttcgtcgggcaatcacatacttgcagtctgcagctcgcttatttggatcttcaatttcttcagagaatctgatttctgtgtctggggttgttccggcaaaggttgtggaggaacttcttaaagcttgcaaaagtggtaattttgatttggcaaacaaggaagtcaacaatttcattgcagagggatatcc

SEQ ID NO: 9116 - DNA, 237 bp, Glycine max
  unsure (1)..(237): unsure at all n locations; Clone ID: 701149365H1
gattcaataagcacatagttcttaagtgaaaggacagtaacttaaggcaaggattaatttcatcatgcattttttttcatgctatgtgctgttataagctgttttgtcgataaacaggcttgtgtgaatggcgtggaatcaagaacaagagtatgctatgcaagacaaggattgtggatgagaaaagcatatatcaactaagatcagtgagaacaccatgctccagaagntatttgt

SEQ ID NO: 9117 - DNA, 234 bp, Glycine max
  Clone ID: 701149366H1
ccataccatacaattaatatactttacacccactaccattaacctgaaaatttggctccaccacacattattggagtctctgaaacataaaagcaatgtaggacaacaatataattatgcattcgaatttgtcaaactaaccgtgctaacaaaactaattttgataatgatgctcatgatttaaacttgattttgttaaaactgtacatatagccctatataagggggatgata

SEQ ID NO: 9118 - DNA, 236 bp, Glycine max
  Clone ID: 701149367H1
ggatcaccagtggatgtggctaagttgtatatgcgcacacgccctccatgggcatcaccttccatagaccatactaaacctcaaacaccatctggaattcagctatttaaagaagaaacaccatatctatttggcaacaattctacaccaccctccaagttgaaaagggattctgctgctactggttcatggagtattcaggatgaaatacgaagagtaagatccagggcaacaga

SEQ ID NO: 9119 - DNA, 231 bp, Glycine max
  Clone ID: 701149368H1
ggcagtggagagagagtgttagcaccaaaaatgtcgaagttaatcttcgtgttccttgcactaattcctcttctctgcacctccttctcgccagagaaaccctcagatcggcgcatcctcgttttgctcgatgacttcgccatcaaatcctctcactctcacttcttcaactccctcaaatctcgcggcttcgatctccaattccacctcgccgacgaccccaaaattgcg

SEQ ID NO: 9120 - DNA, 209 bp, Glycine max
  unsure (1)..(209): unsure at all n locations; Clone ID: 701149369H1
ggatgcataagaacaagcataaggtctgattcnngtttccttacatcaacttgtggtctaaaaatgggaaggatgccatgctgtgagaaggtagggttgaacaaaggaccatggaaaaccgaagaagatgagaagctcgtggcttatgttgaaaggcatggccctggaaactggcgttcagtgcctgccaaagcgggtcttcaaagatg

SEQ ID NO: 9121 - DNA, 229 bp, Glycine max
  unsure (1)..(229): unsure at all n locations; Clone ID: 701149370H1
aagttgttttaactgtgttgggagttataaagtggtttggtagttggagggagagtgatatcaagattttggatttaaatctcccagtcccattaacataatatatttactactaatatttgtggataaaaaaaagttgcttaagtattattatttatcattgctcagtcaattatgtttctccttttttnntaatcttagttatttatttttctataattaaaaaaaa

SEQ ID NO: 9122 - DNA, 201 bp, Glycine max
  Clone ID: 701149372H1
ggaaagaggatgtgctgccagaaattttggatggacacaatgtgtatgatttcattgatcctgatattctgcatagggttgaagagttggaaagagaagaagggatgagacaggaagaagctgaggatggtgattttgagattgatggaactgaattgacgcccgagcagcaagcagctttagctgagattaggaaaaaga

SEQ ID NO: 9123 - DNA, 237 bp, Glycine max
  unsure (1)..(237): unsure at all n locations; Clone ID: 701149373H1
acagcaagaggatataaacagcgtaactttactcacagtgcacaaatgctacagatacgactcctttttccacaaggtaaaatatgtataactaattaactgccgacgttacagttacactccttaatctattcnatagcagtacctaaattgtagtgtatattaatataatataatgttaggatgagcttataaaggtgtaaatatattctaaaatttaaatgacaaaaagattat

SEQ ID NO: 9124 - DNA, 232 bp, Glycine max
  Clone ID: 701149374H1
gacactaaacaggttaaaagaagagcatcactgaactaacaaagcaaccctatgtcgaaggtggtttgtgtcaccggagccagcggcgccatcggatcatgggtggtcctactcctcctccagcgtggttacaccgtccatgccaccgtccaagatatcaaggatgaaaatgagacgaaacatttggaggaaatggaaggagcaaagagtcatctccatttttttgaaatgg

SEQ ID NO: 9125 - DNA, 223 bp, Glycine max
  Clone ID: 701149375H1
gcacgtactgcagaagcccttgcggcgtttgtgaacattgaagcaggtacaaatgtgaagatagcttctgttccatccagtgtggtagttctctctccagataactttgatgaggttgtcttggatgaaacaaaagatgttctggtggaattctatgcaccatggtgcggtcattgcaaggccctgcccctatttatgagaagttgctgcagcatttaacctg

SEQ ID NO: 9126 - DNA, 224 bp, Glycine max
  Clone ID: 701149376H1
aaagagacccggaaagggtgggaaccgcttttggaaatccattgggcttggatttaagactcccagggaagccatcgaaggaacctacattgacaagaagtgccccttcactggcaatgtttccatccgtggccgtatcttggctggaacatgtcacagtgctaagatgaacaggactattattgttaggaggaattatctccattttatcaagaagtaccaga

SEQ ID NO: 9127 - DNA, 226 bp, Glycine max
  unsure (1)..(226): unsure at all n locations; Clone ID: 701149377H1
tggagatcggtgactgaggaatacagcgacaaagtaatgggtctagcttgcaagctcatggaggtgttgtccgaagcaatggggttagagaaagagggtttaagcaaagcatgtgttgacatggaccagaaggtggtggttaattactaccccaaatgccctcaacctgacctcactcttggcctgaaagcgccacacggatccgggcactatcacttgctnttcg

SEQ ID NO: 9128 - DNA, 234 bp, Glycine max
  Clone ID: 701149378H1
ggcacaagtgagtttgttgatcgagataactagaaacagtgtgatgaaaatgaaggtccttgttttcttcgttgctacaattttggtagcatggcaatgccatgcgtacgatatgttccctctccgaatgaacactggctatggtgcccgtactccggaggtgaaatgcgcaagttggaggcttgctgtggaagcacacaacatctttggctttgagaccattcctgaagagtg

SEQ ID NO: 9129 - DNA, 170 bp, Glycine max
  Clone ID: 701149379H1
gagggacaggaagaaagaatacgcgcagagtggactttgacctcagcgccgtttgggtccgaaccaagacgcacacaggacggtgcgttcaccaaacctaccttggtgggccccacttttcccccgaaccgtagcttcagagtgatccctttcgcaccctctatataata

SEQ ID NO: 9130 - DNA, 237 bp, Glycine max
  Clone ID: 701149380H1
ggaggagaaaagaaaagattgggaagggagaagcatgaaaatcggagacaggaagaagaagaagagcatccccagcgacgaatgaatgggcaattgcggaagcagagaggaatctgccgtagtttccaaggctcaagttgttcagcagcttcacagtgcgacgtcgttgggcgccatgccaggaccgacaagaagcacgctcacaggcacaatctcagcgatgcgcttcggatctca

SEQ ID NO: 9131 - DNA, 151 bp, Glycine max
  Clone ID: 701149381H1
gattgcgtaggttaggtgttacggtaccggaacacgtcacctctgccagccattttccttttttcttttttcttttttttgggaacgtgagcgccaagatcggacacttgctcccatttccttcattatcacagtttcatctaaccatttc

SEQ ID NO: 9132 - DNA, 228 bp, Glycine max
  Clone ID: 701149383H1
gttgtagcaaatggtatttcagatttacaagctcatactgataacggtgatcatgtctccttttggaatcctttgctatcagggttatcaaaactaacttctgatccaagatcagctatcagaaagagttctttggagatgctttttaacattttgaaggatcatggtcatctattctcccacacattttggaatagcattttctgttctgttattttccctgtatat

SEQ ID NO: 9133 - DNA, 227 bp, Glycine max
  Clone ID: 701149384H1
gagagacaatgcctagtgaattagctatgaacaatgatgagctacatgtggttatgttcccattccttgcatttggccacattagtccatttgttcagctctccaacaagttgttctctcatggtgttcatgtcactttcttgtcagctgcatccaacattcccagaatcagatcaactcttaatctcaatccagccatcaatgttatctcataaagttcccaaatg

SEQ ID NO: 9134 - DNA, 225 bp, Glycine max
  unsure (1)..(225): unsure at all n locations; Clone ID: 701149386H1
gaccacactcttattgttttcttcatatcttccttgtcactgcccgtgtgtcgccgccatggccaccgtcaccacccaagcctccgccgcaattttccggccatgtacctcgaaatcgaggtttttgaccggctcttccggtaaacttaaccgggaagtgactatgcggccaatggggtgccctnntnctgcctctttcaaggttgaagccaagaagggagagtg

SEQ ID NO: 9135 - DNA, 224 bp, Glycine max
  unsure (1)..(224): unsure at all n locations; Clone ID: 701149387H1
ggagaatagttatactttaatatttcttttcccatatgatgagtgtggtgatgggtgggtgagtccgaattgtgaaagtaagcaaagatggctttcacggaatcgtctctcctccttccttcggtttcaggaaccaacaagaacaagaacaaggttccagaagacaaatggtatttagcctacattgtgtatttnaccctgggtctcggttaccttctcccatg

SEQ ID NO: 9136 - DNA, 230 bp, Glycine max
  Clone ID: 701149388H1
tgccattacaatgtcactatttaagcctccaattaaacccaactgtgaaacaacttcaggaacacaagatttcttcattgcagattattctacttcagccaaatagtcatcaatttcagctggtgtcaataccctgcaacatcattaacatgctattgctaagtcacccagttaaacaatctaaatatgaaaggatggctttgaagtttgaagtctagattgatttagaa

SEQ ID NO: 9137 - DNA, 235 bp, Glycine max
  Clone ID: 701149389H1
atcttacaagtgttaaggcattgccaactagcaactctccccaatatattggttaaatttgaagtattagaattatagttcaattttcatgctctcggtgtaaagatttttacactaggaccttttaagtatgttagtacaaaagtcaacaatcgtagtcagtgtaaaaaacttttacactattagtgcatttaaattaaattctcgacttaaagtttagccctgctttacattg

SEQ ID NO: 9138 - DNA, 152 bp, Glycine max
  unsure (1)..(152): unsure at all n locations; Clone ID: 701149390H1
catacccctcggatatctgtacagcagacaacacctgatctgttgagcccagtatgtacattgttagncanagactgnataagttanagttntatatatactttgtnatgcatggtagnactaagtagacaatcacgatgagtataacacna

SEQ ID NO: 9139 - DNA, 223 bp, Glycine max
  Clone ID: 701149392H1
ggcgctagttctgagtattctgatcgctccctgagagagctcgtcgcggcggttgcagaagaagattgcaagatgaagttcaacatcgcgaatcccaccactggatgccagaagaagctcgagatcgacgacgatctgaaactgcgagcattttgggacaagaggatctcacaggaggtcatcggagatgcactcggtgaggaatttaagggctatgtcttca

SEQ ID NO: 9140 - DNA, 70 bp, Glycine max
  unsure (1)..(70): unsure at all n locations; Clone ID: 701149393H1
ataaatgacgaatatgatattaatattatgtcagataattcagccattagaaataaaacgannggtcact

SEQ ID NO: 9141 - DNA, 227 bp, Glycine max
  Clone ID: 701149394H1
ctccccttcatcacagatcaggggatcagttccaccttcagttgttttcccaggtttcttcatcaagcaacataaaacaaaagtcctctgcataattttttgagtataatcagcatttatttgatgcaattcacacaaataaaagaacaaggaaattcagactaatttatacagaagaaattgacagtctttgatgaacactgatgatgaattttgagagtgcttag

SEQ ID NO: 9142 - DNA, 213 bp, Glycine max
  unsure (1)..(213): unsure at all n locations; Clone ID: 701149395H1
gacntagtgagcggtccacagcccaccgcggtgagagacgcccaggcccacatgaccaacacctcctccacgcttttcgggctcctgatgatggccgacgacccattgaccgtgggccccgagcccgggtccaaactcgtgggaaaggcccaaggaatttacggatttgcgtcccaggaagatatgggtttattgatgatcatgaattcgcgt

SEQ ID NO: 9143 - DNA, 231 bp, Glycine max
  Clone ID: 701149396H1
gattggagttgtgaaagatgcagaaatgggagttccttgcagcccaaagcttcaaggatgaaattcttcctgcggttttggactgaagggagctcctacttcttcactttcccatatttttttgtctttgctttttatcgaaccaaaggcttcaaacttttcttgtaattagctattgattccttgaagtttggtgatctcgttatgcacttctgctgcagtaagtataga

SEQ ID NO: 9144 - DNA, 245 bp, Glycine max
  Clone ID: 701149401H1
ttcaacaagccaattactttgggtcgctgacccaggcatcagctatcagagtggggtctttccaaggggaagaaatatatgctccattcaagagcctgcttccaatggtgaaccctgatgatgttgtgtttgggggatgggatatcagtaacttgaacctggctgatgccatggccagggccaaggtgtttgatatcgacctgcagaaacagttgaggccgtacatggaatccaggttccactcc

SEQ ID NO: 9145 - DNA, 235 bp, Glycine max
  unsure (1)..(235): unsure at all n locations; Clone ID: 701149403H1
gacgtactcaaattccaaatgcaaattggtttctttttcgtggctccaaagtcattttatgttatttgtgaactcctttggctacaaccccttataaacatatacatacattatanataatatatgaggttagcataaatcatattttgattttaaagggagagaaaaaaggggaccttggtgggaganagcncngnccacagggnnnggtctcaaaatttgttgcaaagtgnat

SEQ ID NO: 9146 - DNA, 233 bp, Glycine max
  Clone ID: 701149404H1
gttgcattgaattcctttccatttgcagcaatctccattgttctcatcctcattccatgtagacagcatgccagcatcatccaaaacgccttccttgaacttgaggagtgcttgtctttctctctctatgcacttaacttctgcaagtttacctggccagttgaatcccagagtagattctgaggtatgcaataaaaccagtagtagtacattaaattttttgagaaaatagg

SEQ ID NO: 9147 - DNA, 234 bp, Glycine max
  Clone ID: 701149405H1
ggatgtctccattcgaaatctcgtccatatatggattgtggtgttgtgcggtgctcttcctgtttcttctctctatcctttcctttatttcatggtgaaggattttaatattgcagaaggggaggaggatatcagtgcctatgctggctatattgggtctgcattcatgcttggtagatgtttgacatctatgttgtggggaatgatagctgatcgctatggtagaaaacctgt

SEQ ID NO: 9148 - DNA, 198 bp, Glycine max
  unsure (1)..(198): unsure at all n locations; Clone ID: 701149406H1
agtacaagaattagcaacanagctcagggagaagattcttgatgctgagccagaactggagccagaggagcaggagatgattggagatgttatggaactaatggaagaaatggtatcgcttgattccaccgatgaagctgccgctcctgctcctgcccctgttgctgcggaagcataaatttgcaaataacctcaaaa

SEQ ID NO: 9149 - DNA, 220 bp, Glycine max
  unsure (1)..(220): unsure at all n locations; Clone ID: 701149407H1
aagacgacagaaggggatcataaggtgccttcattgagatcnactctatccgccaagaatttgtttgcggggaggcctattctgaatcanatcacggaattcgcaatganttgaagaaattagcaataagagctaaggagagagagantgctgaaaatttgagcccaaaagagagtgaagaggttgtggagaagaccccttgttctgttcaagctttggc

SEQ ID NO: 9150 - DNA, 235 bp, Glycine max
  Clone ID: 701149408H1
gggtggtggaggtgtaaaggaatagcctttttgttgccacctttacttttatttaaacacttggtttctccgtctttcttggagacacacaacacactctctctcatgactccaaccaacttacccaccaactaatctttttaattccaaaccaaaccatgcctctttttttcacttcacaactttcatttcagtttgagttctccaatgggcagttcctgcaccattctctctt

SEQ ID NO: 9151 - DNA, 235 bp, Glycine max
  unsure (1)..(235): unsure at all n locations; Clone ID: 701149409H1
ggatcatatattaatgccattgttattatgactttgagcttcgagagctgtgctaagacattgtcttgttgtctcttatatattttatanatanatatacttccttagtttttccataaacacaacaaggaaggaagaggtcaggtttcttgctcggcttttgtgtttcctccattcccactatccttctaagtttgagcataaattcaggatcttgttctttctttcttgatac

SEQ ID NO: 9152 - DNA, 227 bp, Glycine max
  Clone ID: 701149410H1
gaggttgtcttggatgaagccaaagatgtcttggttgagttttatgcaccatggtgtggacattgcaaaagtcttgctcctacttacgagaaagttgccacaacatttaaattggaggaagatgtagtaattgcaaatctggatgctgataaatatagggatctgggctgaaaagtacgacgtgagtggatttcctaccttgaagttcttcccaaagggcaacaaag

SEQ ID NO: 9153 - DNA, 241 bp, Glycine max
  unsure (1)..(241): unsure at all n locations; Clone ID: 701149411H1
ggccgcagcnactcttgttgtttcttcagtttggtataaccttagccgaggtcacgaggagcactagctagtttcncaatttccaaatggctaggggattgaagaagcatcttcaagaggctcaatgctcctaagcattggatgcttgacaaactgggtggtgcatttgcgcccaaaccctcatctgggaccacacaaatctagggagtgccttcccctcatactcatcctacgaaaccgg

SEQ ID NO: 9154 - DNA, 235 bp, Glycine max
  Clone ID: 701149412H1
ggatgaatttgaaatgactgatataggcagaatagcttatttcctaggtatagaatttgtgacaactaagagtgtcatattccttcaccaaaagaaatatgcaattgatatattgaaaaggttcaacatgcttgattgcaattctgctactactccttgtgaaccaggaataaaactgtctactggtgaagacacaaacttggttgattcaacactatataggcaactcattggc

SEQ ID NO: 9155 - DNA, 236 bp, Glycine max
  Clone ID: 701149414H1
acacgtgatcgctcaagaagcttatcaaactcttcaatgagagatttgtaatttactgattgcatttccatgttgttattgcgtgtttctatctggacataagaaaagttattaagaccaaacaaagtaagaatccagtgctttgaaagaactcctacacctgaaattatatcacctagaaaagcaaatagaactgaaatagtgaaatctcattaagcagaaagcaacttcgacag

SEQ ID NO: 9156 - DNA, 240 bp, Glycine max
  Clone ID: 701149415H1
ggaggcaaatggcagcatcgtcaccatcgccgccgctgaaggcggtgcaggaccgcgtccaagcagccgccgaacgctctggccgtaatgtgcaagagattcgtgtagtggctgcgagcaagacgaagccagtttctgctctccgtgaggtatacgacgccggccttagatgcttcggcgagaactacgttcaagaactccttcaaaaggcaccacagcttcccgacgatatccagtggc

SEQ ID NO: 9157 - DNA, 232 bp, Glycine max
  Clone ID: 701149417H1
ggatctggaagaagaaatgagtgaagcgcagaagcacgtttgggaaggggcaattcctctccagattcacctccacgaatccgaagtcaccactctccctcctcctccacccgctctcgtgttggcacctcggctaggttatttgcctttgctgatttcgctattgaagcctcagttcagcagcacgcttccacctggagtcgacaccatttggtttgagtacaaaggcctc

SEQ ID NO: 9158 - DNA, 209 bp, Glycine max
  unsure (1)..(209): unsure at all n locations; Clone ID: 701149418H1
gtagagaaagagagagaaagatgtcgaagcgtngtccgtggtggttcggcggggaacaagttccgcatgtcgctgggtcttccagtggcggcgacggtgaactgtgccgacaacacgggggcgaagaacctctacatcatttcggtgaaagggatcaaaggccgtttgaaccgtcttccctcggcctgcgttggcgacatggtgatggc

SEQ ID NO: 9159 - DNA, 240 bp, Glycine max
  Clone ID: 701149419H1
ggagactaccattgctacgccccaaaagcacttttcctccctctgacttttgctacaactactaccagtacaagcatatagttggaatggctcgattttcattggatgagatatcagacactggtgcctttgtgagatctgcttcaacattcagaaattggatttcgagggacccgaattcgctgtttccaccggaatcagggaggtatcatctctatgtatcatatgcttgtccttggg

SEQ ID NO: 9160 - DNA, 231 bp, Glycine max
  unsure (1)..(231): unsure at all n locations; Clone ID: 701149421H1
ggaagatttccttcttcctattctaggtttttacgcaccacgtatccctgagaaaagagaggaaccacactctctannnnnnnnnnnnnnnnnnnnnnnnnnnnatggttaaagacacaaagcctttagcctatgctgccaataatggataccaacaaaagggttcttcttttgattttgatcctagcgctcctccaccgtttaagattgcagaaatcagagcttcaatac

SEQ ID NO: 9161 - DNA, 233 bp, Glycine max
  unsure (1)..(233): unsure at all n locations; Clone ID: 701149422H1
ggnagggaatgtgggagaacattcttggaaagcatcagcagtngctganatccctattcctccgaagcaagccttcttccnccaacgccgacgcngccgatgactatgccaattccccaaacccatccctgagctctctcctctcgncaactccgtcgtctctcgcngttcnaagatccttggaatgtcgacacaggaattgcaacactgcttcgattcggaactccccatgg

SEQ ID NO: 9162 - DNA, 202 bp, Glycine max
  unsure (1)..(202): unsure at all n locations; Clone ID: 701149423H1
agggtggttttgatttggagtgcagctatgcgattgtacagagagccaagcagcagttattgtataagcttcgtagatttgagaaactggcggagttggatccagtggaacttgagaaaagaatgcaggatcaagaagaggacgatgatgacacatttatggaagaggaagatggtcnntgngaagannaaccaagcatcat

SEQ ID NO: 9163 - DNA, 239 bp, Glycine max
  unsure (1)..(239): unsure at all n locations; Clone ID: 701149424H1
gacactaaacaagttaaaagaagagcatcactgaactaacaaagcaaccctatgtcgnaggtggtttgtgtcaccggagccagcggcgccatcggattcatgggtggtcctactcctcntccagcgtggttacaccgtccatgccaccgtccangatatcaaggatganaatgncacganacatttggaggaatggaaggagcaaagagtcatctccatttttntnaatggntctcgtg

SEQ ID NO: 9164 - DNA, 220 bp, Glycine max
  unsure (1)..(220): unsure at all n locations; Clone ID: 701149425H1
ggtgacattatgagattgctaanttaatctggtggaggaaaacttttggaaatgtagtgcttatcatgtattgcaatgggccggtggaacgaactgcccttgaatggaggttgctctatgggaggatattcagatctgttgttattttgtcagaaaagaaggatgtagatcttgttgtagaggagggtcatttggactacgcatacaggtacttgcccaa

SEQ ID NO: 9165 - DNA, 247 bp, Glycine max
  Clone ID: 701149426H1
gggactagttcatacaataccaattacctggaagattcaaaatgtcgttacgttaatggcgtggagtgaccactagcttgctctttttattatataaagcaccctacactttacttttacaacaagcaccaaacacttgctctataagagaaaccaaaagcaaccatggcaatgcgttccctttgcttcttagtgtttctagctgcagcaatgcaaggaacacttgcagttgattacactgtcacca

SEQ ID NO: 9166 - DNA, 239 bp, Glycine max
  Clone ID: 701149427H1
ggtggcaggtgtgggttcttcaattcattctagttctggattccgactagccgcgttgactcggttccgtttttcattctcgcggatctaatattaaggaatagcttaagggcacattacaagaaggcattgattctggttgggggatttggaacaaggctgaggccactgacactcagtttccctaagcctcttgttgattttgctaacaagcctatgattttgcatcagatagaagc

SEQ ID NO: 9167 - DNA, 243 bp, Glycine max
  Clone ID: 701149430H1
gaaagagaaaatattgattgcagttgagttctaatgagtaacgaatacgattacctgttcaagcctctcctaatcggagactcttccgttggaaaatcctgcttgcttctcagattcgctgatgatcctatgtcgacagctacataagtaccattggagttgatttcaaaatcagaacggtggagctggaagggaaaaccgtcaagctgcagatttgggatacagctggacaggagcgattca

SEQ ID NO: 9168 - DNA, 245 bp, Glycine max
  unsure (1)..(245): unsure at all n locations; Clone ID: 701149431H1
gactatttacctaaaacttattatagctcaaatttacaactcctcaatcaacaccactacatcatattctgttactgcaatattacttcaatgctttagaaaagggtcattcataaactactttacaatgagccaccacatctttccacaatgtttttcgaaattcaaaatggtatttggtacaattgaaggcaaatttctgccaaattaatattccacatttacaattaggngcatcaagccct

SEQ ID NO: 9169 - DNA, 228 bp, Glycine max
  Clone ID: 701149434H1
ggcacaagtgagtttgttgatcgagataactagaaacagtgtgatgaaaatgaaggtccttgttttcttcgttgctacaattttggtagcatggcaatgccatgcgtacgatatgttccctctccgaatgaacactggctatggtgcccgtactccggaggtgaaatgcgcaagttggaggcttgctgtggaagcacacaacatctttggctttgagaccattcctga

SEQ ID NO: 9170 - DNA, 226 bp, Glycine max
  Clone ID: 701149435H1
ggagcgaagaagatattagggtttttgagtgcggtgcggcgatcctagcactctcttctgcagctttcgccgacagcttcattcaccatggctgagcaaaccgagaaggcttttttgaaacaaccaaaagtgtttctcagctcgaagaaaactgggaagggaaagagacccggaaagggtgggaaccgcttttggaaatccattgggcttggatttaagactccca

SEQ ID NO: 9171 - DNA, 225 bp, Glycine max
  Clone ID: 701149436H1
ggagaatgaaatgattctcctgacaaaaactgttaaacttagtgagtactgagtagggagttgccagccatgtccgttgaactcaagctctctcgttccaatcgtatcatcgcccttcggaagctctggaaggcaaaatcattgtcaaaactcagtcttcaatttccactatggaattcgccttactgtcaaaggatccgttaacttgcaggttcgtggaggatc

SEQ ID NO: 9172 - DNA, 227 bp, Glycine max
  Clone ID: 701149437H1
ttcctttttgtataaactccactttaagaatatattaactataatcctcatatgccgaaaataattaatgaaattaagccagttaacgagatttacaaatataatttatcaaaaaaattacatgattctcttgttggtcttgttcgtttttttaataacttgacaagttaatgaattactaacgtaattattaagttacagtttaatgttaacattattaatttgac

SEQ ID NO: 9173 - DNA, 219 bp, Glycine max
  Clone ID: 701149438H1
atcccactaatccaatcttatcatggaataggacatattggattaagcacttttatcatggtaaacttacttgtggttagaaaagtatttgtacctttcatggtggtatgaatgactttctttagcgcaaagcttatcaattttaaaacacataatgcttgactttacttgcaatagtaccattttaagattacatactgttggatatggccaacgtct

SEQ ID NO: 9174 - DNA, 227 bp, Glycine max
  Clone ID: 701149439H1
tggagatcggtgactgaggaatacagcgacaaagtaatgggtctagcttgcaagctcatggaggtgttgtccgaagcaatggggttagagaaagagggtttaagcaaagctgtgttgacatggaccagaaggtggtggttaattactaccccaaatgccctcaacctgacctcactcttggcctgaagcgccacacggatccgggcactatcaccttgctgcttcag

SEQ ID NO: 9175 - DNA, 247 bp, Glycine max
  Clone ID: 701149442H1
ggagtggagactatttcaagatcaccatcactcctctcattttgcgggaaaggtttcgttcaagagaagatggtaactagaatgtggatcttcgttcagacacagttacaaagccaactgaagcaatgagagctgctatggcaagtgctgaagttgatgaccatgttctagggctatgatccaactgcttttcgcttagaaacagagatggcaaagacaaatggggcaaagaagctgcttctttttt

SEQ ID NO: 9176 - DNA, 230 bp, Glycine max
  Clone ID: 701149443H1
ggatgcacaagtttgttgagatagctagaagcaataagatgaaaatgaaagtgcttgttttgtttgttgctacagttttggtagcatatgaatgccatggctcagactaccagaagttccctctccaaatgaaaactgggtttggtggacaatacagcaatgaggtggcatgtgccagttggaggcttggcgtggaagcaaacaacgtagtcaagtggcaaactgttcct

SEQ ID NO: 9177 - DNA, 228 bp, Glycine max
  Clone ID: 701149445H1
accttcatggtatgttactatgttaattattcttgactttcattcatttgtttttcttaccaaaccaaaccaaacagtgagcttgaatttggattcataatgatgattccagtgttgatgtaaaacatgttttatttttttcgtattgattaggctctttcgaatgggagatacaagagttgcttgcatagggcagtggtgaatagccagacaacaagaaaatctctt

SEQ ID NO: 9178 - DNA, 242 bp, Glycine max
  Clone ID: 701149446H1
ggagggtggaggcgagggttggttcatttgatccgcgagtggagaagagaatcgtgatgggaggaggacacggtcacggcaccacctacaaaggagttaccgttcatcacccaaagcgctggcacactatcaccggcaagggtttgtgcgcggtcatgtggttttgggtattctacagggcaaagcaagacggtcctgttgtattgggctggaggcatccttgggagggtcatcacgatgat

SEQ ID NO: 9179 - DNA, 231 bp, Glycine max
  unsure (1)..(231): unsure at all n locations; Clone ID: 701149447H1
ggtgcagccaaattttgaggagagagaaatgtgagaggagcaaaggctctacantgcatttttcattttgagcacttggatgcaaaggatttggagtgaattatttcagctacgagtacttcagttaacaaatccacatcttaccatccacaaacatccacaaactgatggtcaaaatgaagtggcgaacaagtgtttggaaacttaccttcactgcatgtgttttaggaa

SEQ ID NO: 9180 - DNA, 228 bp, Glycine max
  Clone ID: 701149449H1
gaatacaatttccattgctcatcatcattattattcgtgcagaaatttcccgaaggaggaggaggttctgatcttctttcttttttgtctggttccctttcttccttcaacaatttcgagatccgaaaccggcatcagatccgatccgaaatgtacggattcgaagctctcaccttcaacatccacggcggcttcctagaggccatcgtccgcggccaccgcgccggc

SEQ ID NO: 9181 - DNA, 224 bp, Glycine max
  Clone ID: 701149450H1
gggtgaaacaggcaaagtctccagagctaacttccatgatcgacttgggaggactgtgcttattatgaggccagggatgcagaacacaacatcggctgaagataatatcaggcatttagtctatctgttggaaaatgctatcctaaatctttctgaaggtcaagaacaaatgtcatggttgatagacttcacaggattatcacttagtacaaatatgtctgtta

SEQ ID NO: 9182 - DNA, 223 bp, Glycine max
  Clone ID: 701149451H1
gacacaagaagtggtgctgccttaggtttgtgctgcaaaaatgggactcctcagaaactttgtcgttgttactgtgattgcactctcagagtttctgagtataggagtggggaaaccaattcctcatcacaaacatgtgattttcaagccatattcaactttggtgactctaattcagatactggatgcatgtcagcagcattttacccagcggctttgccct

SEQ ID NO: 9183 - DNA, 202 bp, Glycine max
  unsure (1)..(202): unsure at all n locations; Clone ID: 701149452H1
ggcagcgtcccaanttccaggtttcagcgagcantctacaatggctactataccagttaatcccaagcctttcttgaacaatttgactgggaagcctgtaattgtgaaactgaagtggggaatggagtacaagggctatctcgtttccgttgattcctatatgaacttgcagctggccaacaccgaggagtacattgaggga

SEQ ID NO: 9184 - DNA, 222 bp, Glycine max
  Clone ID: 701149453H1
gtacgagctttatggaaaggattgacaccttttgccacacatttgaccttgaagtatgcacttcgaatgggttcaaatgctgtacttcaatcagcgtttaaggacctgagactggcaagcttagtggttatggacggatcctttctggctttggtgctggggtgcttgaggctattattattgtcactccatttgaggtggtgaagataagattgcagcagc

SEQ ID NO: 9185 - DNA, 226 bp, Glycine max
  unsure (1)..(226): unsure at all n locations; Clone ID: 701149454H1
aaacgtatagacaccaagcaccagtgcaacaatcttacaagtaaggaaccccgttataaatgcatgtagttttaaaagtaacaggaaattcaagcacggaatacagataacacagttttattaacacaagaaaaaatgccttccatacctgatttaaaaaaagagtaaaatttctgaaaatattgaaaacantttgtcatttaaataanaatctaattgacgtaac

SEQ ID NO: 9186 - DNA, 224 bp, Glycine max
  unsure (1)..(224): unsure at all n locations; Clone ID: 701149455H1
gacatcacaagaagcacaatttctctctttctttttgtgtccaaaatggctcctagttctactcacgatactgggttctatgtgcttatgctagttgggatagtgatnagcactatggttgctacctgtgctggtagcttctaccaagactttgatctaacatggggtggtgaccgtgctaagatattcaatggtggccagcttctatctctttcccttgacaa

SEQ ID NO: 9187 - DNA, 201 bp, Glycine max
  unsure (1)..(201): unsure at all n locations; Clone ID: 701149457H1
gatagttaaatttttagaaattaaattnagaatcaaagtagattggtgagaataattggagagttgctagttcatccatgtgatcaacctcgcacggccatgttgatgttaccaatgcaatgtgcttcgctgttcatctctcccatcacgattgacaaaccctaaccctaaccctaatcacccgaccagcatggtgaagaa

SEQ ID NO: 9188 - DNA, 232 bp, Glycine max
  Clone ID: 701149458H1
caagatgaagatttggaagatgctcttccttccccttctcacgttgacggaagtaaatcttggtggagactttggtctaaaaagcctgttattgaggatcaggttgcatctgttacacctatagaagttgttggcgtagttcgtggaagtgagaagccaagcatatttgtcccggcgaatgaccctgggtcttcccagtggttctatgttgatgttcctggcatagctcgtg

SEQ ID NO: 9189 - DNA, 227 bp, Glycine max; identical to SEQ ID NO: 8030
  Clone ID: 701149459H1

SEQ ID NO: 9190 - DNA, 227 bp, Glycine max
  unsure (1)..(227): unsure at all n locations; Clone ID: 701149461H1
gggagtttattagcctcaacgttctctttcgtcgtctccctcttactgacactaaacaataaaaacaacaantctataagcgtatttcactttgttctcaacttttcacacttatcctaagaatatnttccttctctctttctctctctatagcacaagccacaaacgcacaaagttgcatcaagatcaagatcacttatnattatnactatctattactattactt

SEQ ID NO: 9191 - DNA, 229 bp, Glycine max
  Clone ID: 701149462H1
gcagcaacaccacacaacagccaaggtagggccagtttgaatatttgctcaacacaagcgtttactagggttttttccgctgaaaagtacgtgtcccattcttgtcaacaaacgtggcgcgcttcttaacataagcacttgcaatggcggattcagagcgaatccaaaattcgtggatggcttcggatcaaactgcaattgaaatgagcggcgagggcacaggttccag

SEQ ID NO: 9192 - DNA, 131 bp, Glycine max
  unsure (1)..(131): unsure at all n locations; Clone ID: 701149465H1
atatgatctttgttttggtgcactatgtgatttgactttggcccttcatgattcagtgtngctatgtaatttgggaacaaaagatagtcatagggcatagattctacataaactggcctagggaaagcaaa

SEQ ID NO: 9193 - DNA, 222 bp, Glycine max
  Clone ID: 701149467H1
ggttgagaaattaaacgtctgcggaaagcaacaatgtcaggacctgagtgttgctcaaacccaccagttctgaaccccaatgcaggagctggccatgttgaaaaactcgctggtctcaattcctatctctccggttcccctaattccattgccattcttctcatctccgacatttatggctatgaagcaccaaatttgaggaatattgcagacaaggttgca

SEQ ID NO: 9194 - DNA, 222 bp, Glycine max
  unsure (1)..(222): unsure at all n locations; Clone ID: 701149468H1
gaacgaagagaaatagtgaaagattgcaacgacgcacganaatggcgaccatttggaagacaaacgcagcgagaaacgcagtgcgtagtttgacgcagtccttgccttcactgcccgcacaccttcgatcccctctcatttctcctccgtccgttacctccgcaccggtcgcgatcccagctcaagaacatatgagattattccgccggtgaattgggggtt

SEQ ID NO: 9195 - DNA, 266 bp, Glycine max
  unsure (1)..(266): unsure at all n locations; Clone ID: 701149469H1
cggatttatgcactgatattctgaccacttttttttaagaagatgaatggagaaccaaatattgttaatagaagtgcattaaaatttttgtttaagcttttaatgtgtcttttaaaattacatggagggaaataaagagaataggcnnnnnnnnnnnnnnnnnnnntgatattctacatcgatcatgtaattaancaatgtagaaagtgactatacaacatcagttatagaaaaaaatcaataaaatcaatgtagaaaacacactt

SEQ ID NO: 9196 - DNA, 228 bp, Glycine max
  Clone ID: 701149470H1
tacgatatgaaattatacagacaagctttagcttaatactatcaaatagcaacggtgaggtaggccaacgccaagtcctggctcatattttattattaatattattggaatttacgctgcatgtgtatcttcgggttcaatattaactaaaaacaatgaattattagtataaagggattaaaaattataacaactacataattttttatttatcagtgaacaatatac

SEQ ID NO: 9197 - DNA, 227 bp, Glycine max
  Clone ID: 701149472H1
tataattaggagaaaatggaatttaaaaagagaaagaaagggtggaaattgtaggtgtggtgtgtttcacatttgaagtaacactgaaaagaaaggaaagtgaagttgagagtttaagaagaacaagaaatgggggttggttcccaggatgccatcaagcagttccagacattcattgaccaagttgaggagcctttgcgaacaacgtttcagaatgttcatcaagg

SEQ ID NO: 9198 - DNA, 227 bp, Glycine max
  unsure (1)..(227): unsure at all n locations; Clone ID: 701149473H1
gtatcctgtatgaaaggccatttgcagaattaccctcctcttaaaagccaagtttgccaaattattgttgaaattnatgtgtgtggactccaactatgtatggccaggtatggaggcttcaaaagtaggacttgggttgctcaaatttgagagacaaagtgttgtnccgcaagacgacgcaaaatctttccggtggcagtcttgggcaaagaatcagtaatgaagac

SEQ ID NO: 9199 - DNA, 234 bp, Glycine max
  Clone ID: 701149474H1
gaatcacaaactagttttctctaaccaaccatacagtactcctcactagctataccctggttaatccatggagaaagaagctgttggccttgaaatcactactgagctaaggttgggccttcccggtggggaattacctgacaagaacgagaagataaagaagagggtgttctccgagattcaagctcatgatgatgatgaaaacagttcctccgaacaagaccgcaaaatcca

SEQ ID NO: 9200 - DNA, 227 bp, Glycine max
  Clone ID: 701149475H1
ggagattttatgatgcaagattcgaagattcaccaaccccactttcttcaagcttgttctctttgcaagaagcgtctcggggataatagtgacatcttcatgtacaaagggacacgcctttttgcagcgaagagtgtagacaagagcaaatggagagagacgaagccaaggagaagaataataacctttcttcttcgatgaaggctttggagaaaaaaagagcaaag

SEQ ID NO: 9201 - DNA, 205 bp, Glycine max
  unsure (1)..(205): unsure at all n locations; Clone ID: 701149476H1
aacaaagaagagcgntgagacctacaagatctacatcttcaaggtgttgaagcaagtgcaccccgacatcgggatctccagcaaggcatggggatcatgaacagtttcataaacgacatcttcgagatgctcgcccaggagtcatcgcgtctcactaggtacaacaagaagcccaccattacttccagggagatccaaacggcgg

SEQ ID NO: 9202 - DNA, 233 bp, Glycine max
  Clone ID: 701149477H1
gactgcaaagttgagaagtgaatacacaagcaaaattaaattaattaattaagctgaaagcaagagaaaatgaagatggaaattgaggaagttggcaactgcgaacacttcccctgctttcactgaaccacgtgtcccttttgtgcagatcagtgtgggagtctatgaggttttatgaggatgtcttgggctttgttcccatcaaacgcccttcttctttcaagttcactggg

SEQ ID NO: 9203 - DNA, 227 bp, Glycine max
  Clone ID: 701149479H1
gacaaacagaaaaaacagttcattcattttcactttgtgtcagaaatgaaaatctgcaccaccttttgtgtgtcactggccacggttttggtgatgatgagcaacatcatcatggcagtggctgagactcacattcccaccaccctggatggcccatttgacccggtgacccgacggttcgacccgtcactgcgacggggcagtgatgacttgcctatgactcatcc

SEQ ID NO: 9204 - DNA, 228 bp, Glycine max
  Clone ID: 701149481H1
gcagtggacatctgacaatccgcccaagattcttgtaccaattgccaatggttcagaggaaatggaagctgttattatcattgatattctgcgaagagcaaaggcaaaggttgtggttgcatctgttgaagataaactagagattgtggcatcgcgcaaagttaaactggaggcagacatgctccttgatgaagcaaccaaactttcatatgaccttattgtgttacc

SEQ ID NO: 9205 - DNA, 219 bp, Glycine max
  Clone ID: 701149482H1
ggggaataatcatttagcttccaataaggtgcaagatatagccaagcctgttagactaaatggatcctcccatgagttgcggaatggcttagattcagcagtagtcatactcacagaattttagcaattttagaggcactattttcattgaagccatcttctgttggaaccccttggagttacagctcaaatgagatagttgcagctgctatggttgct

SEQ ID NO: 9206 - DNA, 231 bp, Glycine max
  unsure (1)..(231): unsure at all n locations; Clone ID: 701149483H1
gacggacgagggtttcgtttcnggtttgacgttgttcacaatcactttctgcgcttcactcactcccttcgtgcggttttctttnctttgtcgaactcgtgcgaaaatgcgtgagttctttcacatacagggagggcaatgcggaaaccanatcggagcgaagttctgggaggtggtgtgcgcggacacgggatcgattccacggggaggtaccagggggacaacgagttg

SEQ ID NO: 9207 - DNA, 220 bp, Glycine max
  unsure (1)..(220): unsure at all n locations; Clone ID: 701149484H1
gacgattactaccaagtgaaaaagcaattaactaaggcatatatagcgtgtaagacagtgagaaaaaaagtgttgtgtagagagaaatggctaggtggtgcatcttggtggttcttgcccttgtcgtggttgcaagtgccagaaacatgcccaatgacgcaggtttngaggaccagaagaacttcctcgggtatgggntctctggagttggnaacaatgg

SEQ ID NO: 9208 - DNA, 220 bp, Glycine max
  Clone ID: 701149485H1
ggtggtttttctttttctctgttgaggttgtcattgggagcactcaacctaaactattcaagttgtgaaagcacatcacaagaaaattcgcaagcgatggatccaagctaaaagaggtttctcagctcttcgatcgctttaaggcttcgtttatcaggaacgactttgatacctgttccaatctccttctcagctaaaggtgttacttacaggtttcaga

SEQ ID NO: 9209 - DNA, 219 bp, Glycine max
  unsure (1)..(219): unsure at all n locations; Clone ID: 701149486H1
ttcctacaagaatgacantgcttgggcttgagtnngatcctctgttacctggtgacccaaaattgagtggagaatacgtcatcacacacatgttaggcattgaattaaaccattccaagtggtgggacttagcagctctatttgtgattctcanatgttacagacttctcttctttactgtnctcaagttcaaggagagagcatccccattgtttcaga

SEQ ID NO: 9210 - DNA, 224 bp, Glycine max
  unsure (1)..(224): unsure at all n locations; Clone ID: 701149487H1
tatgcttagatctacacattatgttttcattgctctggaactaatcaattaacagagtttcttaatggctgttttaatgagtttaaccttgctcctcattattcncatganctactgtctactgcacttgaatgtggccacagaatgaccaagtttaacttttttgttgctgccaaattnangacatctgtatacatgancngcanggtaggcngatgttcnac

SEQ ID NO: 9211 - DNA, 55 bp, Glycine max
  Clone ID: 701149489H1
tgtggatccagtttatcatcaatttgaacattttgttcataacccggctcagaat

SEQ ID NO: 9212 - DNA, 226 bp, Glycine max
  Clone ID: 701149492H1
ggcacaaaaatacaatacaaaacaaaacagagcaaagagagagtgtgtgaaaagtgaaacaaaaaacagagcaacaatggcgacacttaaggttcctcagcctcttcccccgttgcagatgattgtgagcagctccgaaaagccttctcaggttggggaactaacgaggagctgattgtatcgatcttggctcataggaatgctgctcagaggaagcttatcagag

SEQ ID NO: 9213 - DNA, 222 bp, Glycine max
  Clone ID: 701149493H1
ggagcctctcggacatggacaacgtcctccagagctgggacccacgctcatctgtacttggttccacatcatctgcaaccaggacaatctagtcactcgagtttatcctttctctttctttgttctgtttatttttgttctttgcatacatactggaacatagtcctttgtctcataatcactgatgctggatatgagtgttgtcgtgtgttacgagatttt

SEQ ID NO: 9214 - DNA, 223 bp, Glycine max
  unsure (1)..(223): unsure at all n locations; Clone ID: 701149494H1
gtatggtacatgtttttgttctcattttttatgatagcacccgtatgttttttattacttataatctcgcaagagttgctctcacccgcgtcatgaaattatttanagattaataacaccctaaaatttagggtgcaatttttgcattcttaaaacttgttcattgattgccatacttatgaagaatttaattagaatatattgatagtatatttttttaata

SEQ ID NO: 9215 - DNA, 223 bp, Glycine max
  Clone ID: 701149495H1
ctggagttgttgttgcattttatttgtctaattcagataaatttcctcacaaccatgatgagatagacattgaactgcttggtcatgataagagaaatgactgggttattcaaacaaatatctatgccaatggaagtgtcagcacagggagagaagagaaattctatttctggttcgacccaacacagcagtaccattattacagcatcttgtggaacagtta

SEQ ID NO: 9216 - DNA, 236 bp, Glycine max
  unsure (1)..(236): unsure at all n locations; Clone ID: 701149496H1
ggaacaagtcgtttctttttcaataaaattanaataaagccaacgacaacaggtgtgcatatcagcnanacataaaaggactttcaatactgattacactatgtttggggaagtgagataggggagggggcgnagatgnancnttcattgtagtttcgtgcgggtngnnnncaganantataactccnngtggcaaaatggtgtggcggnattcatgttaggacgaantttcnant

SEQ ID NO: 9217 - DNA, 263 bp, Glycine max
  unsure (1)..(263): unsure at all n locations; Clone ID: 701149501H1
ggtggatgggtgtttgtttcaattcgatttcttctcttctctgcagaaaatcgaatcaatcgatggatgcttaatttcgtgtggttattgaggaaatttcatatccgcaagggcagagagtagaaggaagaagagagaaagagggaagctgctgctgaatcgtaatcgatcttatatctacactctaccatggacattgatgatgatttcacatnntgnnaggtccatgcacctgttgatgttgaaacaaaccaagcttgctt

SEQ ID NO: 9218 - DNA, 257 bp, Glycine max
  Clone ID: 701149502H1
ggcacagcaaaacaattttcaaactcaattaccattccataacctaaatctcctctttgtttccgagtcagagagcaatggcacgtaccaagcaaaccgctcgcaagtccaccggcggaaaggcgccgaggaggcaattggcgactaaagccgctcgcaagtcagctccggccaccggcggagtgaagaagccccaccgcttcaggcccggaacgtggctctgagggagatcagaaagtaccagaagagcatgaact

SEQ ID NO: 9219 - DNA, 259 bp, Glycine max
  unsure (1)..(259): unsure at all n locations; Clone ID: 701149503H1
ggaggtgtaaaagtaaaagagtgagagggcaagggtttgaatcgtaaaanaaataaggtcaaagagtgatacatcatnttattaggatttaggacaagtcttaaatcttaattaccgcgtaattttaaatttgatttatttcactactttttgtaacctgttattatagtatagagttttttttccctactagtggagtctgagttggaattcacttgccaattgctatgatcccatgattgattgctctaggtgggtg

SEQ ID NO: 9220 - DNA, 275 bp, Glycine max
  Clone ID: 701149504H1
agctttggagccggtttattttctgataatattctttccaaccaatctgcatcaggatggagtgtgtctgagctaccaggaccaactagaatattggtaatgccagtcatctggaaggacatgtacgcattgaagtagtaaggagcaaacataaccacagaatcacccggatcacagagagtaagaactagattcacaaatgcctgattggcacctgatgtaaccattactgaagatttgtgcaaattattttcatcacgcaactttttgactaa

SEQ ID NO: 9221 - DNA, 259 bp, Glycine max
  unsure (1)..(259): unsure at all n locations; Clone ID: 701149506H1
agtcgagactgaatatgaaacagtcaaaagacaaatagacgaattgagggagctgttgtcaaattagtagatactaatgatcaactgacaaaggatctngaagagagcgccccatctctaaacaggcagacttcagccgagttggaaaagagtagacacatcggnagaaaaagagtaaccgagcaggcgcgaaaaggttctgaacagataggaaggttgcagtttgaggtgcagaacatccaatacactttgctgaaat

SEQ ID NO: 9222 - DNA, 258 bp, Glycine max
  Clone ID: 701149507H1
ggcacaagtgagttcgttgatcgagataactagaaacagtgatgaaaatgaaggtccttgttttcttcgttgctacaattttggtagcatggcaatgccatgcgtacgatatgttccctctccgaatgaacactgggctatggtgcccgtactccggaggtgaaatggcgcaagttggaggcttgctgtggaagcacacaacatctttggctttgagaccattcctgaagagtgcgttgaagcaacaaaggaatacat

SEQ ID NO: 9223 - DNA, 120 bp, Glycine max
  unsure (1)..(120): unsure at all n locations; Clone ID: 701149508H1
ggcagcgcaacgacnatnggcaatggagaagctcgcttcttcttctantgcnactgttgttcccactcaacacttnctttgtnaanttcnccaacattcgctnntntnnttccncaaaac

SEQ ID NO: 9224 - DNA, 256 bp, Glycine max
  unsure (1)..(256): unsure at all n locations; Clone ID: 701149509H1
gggttttgttgttcctttaggttttggaattttgcgtttaaattttatctttaggttttgtnattttttattaatatgcacttattccccattgctcctttattccttggaatttagctacttattccatatttttccctaccttgtccttggccccatcataaccttaaaagncctttngatcctcatgtgcttgtgtttatgggttgattgtcaattttagaatcttgccaagtttatgtggtgttggtttcat

SEQ ID NO: 9225 - DNA, 251 bp, Glycine max
  unsure (1)..(251): unsure at all n locations; Clone ID: 701149510H1
ggaaaaaaaaaaaagttgtncgagatggcacgtacgaagcaaactgcncgtaagtccacaggaggaaaggcacctaggaagcagctcgcaaccanggctgcacgtaagtctgcaccaactactggtggtgtgaagaagccacatcgttatcgncctggtaccgtngctcttcgtgagattaggaaataccagaagagtaccgagcttnnnatcaggaagttccccttnccagaggntggttcgtgaattgc

SEQ ID NO: 9226 - DNA, 248 bp, Glycine max
  Clone ID: 701149511H1
gggtgctgtgagtgagacaccgatagatagagagcgcggcataacctaaacctatctttcttctctctctgtgtgtgcgcttcaacggcaaccagaagcagccatggccactgcaaggactgtgaaggatgtttcacctcatgagttcgttaaggcgtactcctctcacctcaagcgatccggcaagatggagctgccagagtggactgatattgtgaaaactgcaagatttaaggagttggctcctt

SEQ ID NO: 9227 - DNA, 228 bp, Glycine max
  unsure (1)..(228): unsure at all n locations; Clone ID: 701149512H1
ggaagccttcagatactttcccttctgagctttgantagtgtggcctagttgttgttttctcgatgagaaaggcttcttccactatgcattgcgcacttctgcgcttttgggttcccttgttgctgcttgctagcttcagctatgctccttctgtttcggccacaactgaaatttcagggaatgaagtgaacacagatgggaaggtgataaatgaagagttagcaaaa

SEQ ID NO: 9228 - DNA, 247 bp, Glycine max
  Clone ID: 701149513H1
ggaaaagagctatgaattgcctgacggacaggtcattacaataggttctgagagattccgttgcccagaagtactgttccagccttctctaattggtatggaagctactggaattcatgaaacgacgtacaactccatcatgaaatgtgatgttgatattagaaaggatctgtatggaaacatcgtgcttagtggagggtctactatgtttccgggaattgctgatcgtatgagcaaggaaattggt

SEQ ID NO: 9229 - DNA, 166 bp, Glycine max
  Clone ID: 701149514H1
tcatattcctaaaggtggatgtggacgaattaaagagtgtttctcaagattgggctattgaggctatgcccacttttgtgtttgtgaaagagggaacgcttctggacaaagtggtgggagcaaagaaggatgagctgcagcagaaaatacagaaacatgtggcttc

SEQ ID NO: 9230 - DNA, 250 bp, Glycine max
  Clone ID: 701149515H1
gcaattaattttttttaaataagtgttacataaaaattagttaggaccatatgtctagagttacctaataatttcccactcgcaacaatatatatgttttgatcgtttcattggtttttaaattttggcataaaaaagacgaaactgattattcagagtggcagaattcactacagaggagggtggtttgtcggaggaagttataaagaaggcgttcgaggcaacggaagatgagtttttgcgtgtagtg

SEQ ID NO: 9231 - DNA, 259 bp, Glycine max
  Clone ID: 701149516H1
gcttcatctacgggaatgtgacatagcctctcatctagaatcttcaccactttgtctttgctccaatttgtttgcaacttggtccattgaacaatatctagaccttcttcaccaaaattccccactggccttctccctgttagtagttctagcagcaccactccaaagctatagacatcacttttctcatcaactttcaatgtgtatgcatattctgttatatataaatcaaaatcactacaccataatagttgggctt

SEQ ID NO: 9232 - DNA, 254 bp, Glycine max
  Clone ID: 701149519H1
gattagttgttcttgtttgctatatctttaaacctcttgcttttgttttgcttcaaggtgtggtgtgtttcacatttgaagtaacactgaaaagaaaggaaagtgaagttgagagtttaagaagaacaagaaatgggggttggttcccaggatgccatcaagcagttccaggcattcattgaccaagttgaggagcctttgcgaacaacgtttcagaatgttcatcaaggatttgtcactgcaactttaatgcg

SEQ ID NO: 9233 - DNA, 254 bp, Glycine max
  Clone ID: 701149521H1
ccatacaaaattattatgtaccatcaatagaacaccaaatggtatactctttcaatccactatcactcctactcatgatgcaattttgtattacaataacacgccaaagtgggtttttaggttactccttcattataccaaatccaataagatttgacattcctcttaatggaattcatgaatcacggtgagacgagtgttctttcaataatcagggtcatactaagtattcagaaaatttaatcgaatatgaa

SEQ ID NO: 9234 - DNA, 253 bp, Glycine max
  unsure (1)..(253): unsure at all n locations; Clone ID: 701149522H1
gagtgcgtgaagaaaacaccaactgttttnagttttccaaccttaaaaagannnnnnnnnnnnnnnnnnnnnnnnnnnnnnnngaagcaaaanaanattagcatcaaaaccagagtggttctagtaatccggngctgctagaggatgggaactagtnaatggcatatcgagcgaagatctagcttcggcactgaatcccccttagcaagagaggcaggaaatgtgcctgaaactgggtcactctctattgttg

SEQ ID NO: 9235 - DNA, 264 bp, Glycine max
  unsure (1)..(264): unsure at all n locations; Clone ID: 701149524H1
caaaggcaatgttgttcatcaacttcactgccgaaggtggctgaacctttcaaatcaaaataccgtgaagctgctgagcaacataaacaacagggtgtaagctttttggtgggagatgttgagtctagtcaaggtgctttccagtattttggactgaaagaaggacaagtacctctaattatcattcaacacaatgacgggaanaagtnttttaaacccnatttggaagctgatcacattccaacttggttgaaggngtncaag

SEQ ID NO: 9236 - DNA, 251 bp, Glycine max
  unsure (1)..(251): unsure at all n locations; Clone ID: 701149525H1
ggctgncgctctctgagaaaaacagatagtgtnggagagagaagancggaagagnaaatgacgaccaggttcaagnagaacaggaagnaganaggtcacgtnanngccggacacggccgtatcggaaagcaccgcaagcatcccggaggtcgcggtaacgccggtggcatgcatcaccaccgtatcctcttcgncaagtnccatcctggtttcttcggnaangtaggcatgcgctacttccacnaacttcg

SEQ ID NO: 9237 - DNA, 246 bp, Glycine max
  Clone ID: 701149527H1
ggaagagagatggatccagacgcgttggcaaaggcattcgtggagcactactacagcaccttcgacaccaaccggaacggtttagcgaatctgtatcaggagggttccatgctgaccttcgaagggcagaagatccagggcgcttccagcatcgtcgctaagctcacttccctccctttccagcagtgccaccactccatctccaccgtcgactgccagccctccggtgtcaacgctggcatgctt

SEQ ID NO: 9238 - DNA, 244 bp, Glycine max
  Clone ID: 701149528H1
ggcacaagtttgttgagatagctagaagcaataagatgaaaatgaaagtgcttgttttgtttgttgctacagttttggtagcatatgaatgccatggctcagactaccagaagttccctctccaaatgaaaactgggtttggtgggcaatacagcaatgaggtggcatgtgccagttggaggcttggcgtggaagcaaacaacgtagtcaagtggcaaactgttcctgcagcttgcggagagta

SEQ ID NO: 9239 - DNA, 254 bp, Glycine max
  Clone ID: 701149530H1
ggggaaaatttctgtaaatccctggaagagatgacaatcatcaattgccctaaactcaacagttggtggaaaccggggacagaagccaggccgtcatttgaaaagatttcaaaactacacctccatcgctgtcctctccacactatgcctctctatcctcgtcttgaagagatggtcctccacagttgcaccttaaaactgctgcggtagaatactatgtccattccccttacggatcttcacattcaagattg

SEQ ID NO: 9240 - DNA, 248 bp, Glycine max
  Clone ID: 701149531H1
aaagagacccggaaagggtgggaaccgcttttggaaatccattgggcttggatttaagactcccagggaagccatcgaaggaacctacattgacaagaagtgccccttcactggcaatgtttccatccgtggccgtatcttggctggaacatgtcacagtgctaagatgaacaggactattattgttaggaggaattatctccattttatcaagaagtaccagaggtacgagaaaaggcactccaaca

SEQ ID NO: 9241 - DNA, 69 bp, Glycine max
  unsure (1)..(69): unsure at all n locations; Clone ID: 701149534H1
gatcggagcaaaaaatgatcaacnctnagtgncttcttcncatacngtcatatntctctctctnngcta

SEQ ID NO: 9242 - DNA, 253 bp, Glycine max
  unsure (1)..(253): unsure at all n locations; Clone ID: 701149535H1
ggcatcaattcaaaatatatcatcaattntaagcatnggtttgtggaacacnacgaatgcagtgtcttgccgctttcacnagtttggtgatgaccaaaagnatctggtcttccaaggtgatgccacgtcttcttccaggggcatagaactcacaaagttagacggtggaggaaaaccantgggtggcagtgtgnggagagtgttatactcttctccagtgcacctttgggaaagctctacagtggtcgcaagt

SEQ ID NO: 9243 - DNA, 253 bp, Glycine max
  unsure (1)..(253): unsure at all n locations; Clone ID: 701149537H1
cacaaaaggctggcttcaaagctgtaattgtctatgacaatgaagatggtggcatctnggttgcgatggcaggaaattctgctggtanaaaaatacacgctgtatttgtntctaaagcttcaggtgncatactaagccantatgctgggancnantaatgtggaaatatggctcattccaacttttgaaaactcagcgtggtctatcatggcaatttcatttatttccctgctagctatgtctgcggtgctgg

SEQ ID NO: 9244 - DNA, 252 bp, Glycine max
  unsure (1)..(252): unsure at all n locations; Clone ID: 701149539H1
gagntacaacaaaaacattgcgcanaaggaggagtagttctagcttgtntccatttcacgganngattnnataacanattnganggtaaaatnnatacgtantncaacatanttccanacctgnanantccttatctgccacatggncnaaatgntagatanaccatttatcagttttaacacctatgagggnannaaggataacgaagatgcnntccctagtagatncgacccttgacaccaacgattnat

SEQ ID NO: 9245 - DNA, 250 bp, Glycine max
  Clone ID: 701149540H1
gaacacgcggcttccgccggaggtgaaccgcgtgctgtacgttcggaaccttcccttcaacatcaccagcgaggagatgtacgacatctttggcaaatacggcgccattcgccagatccgcatcggcaccaacaaggacactcgcggaaccgctttcgtcgtctacgaggacatctacgacgccaaaaccgccgtcgaccacctctccggcttcaacgtcgccaaccgctacctcatcgttctctattat

SEQ ID NO: 9246 - DNA, 248 bp, Glycine max
  Clone ID: 701149541H1
ggttgacaaagggagcgtgttgtacaaggggcaattttttcaaaacctttttctctctcgcaacctcacctcttcctccttcaatctctttcggaatttcccaaaatccttagtgggaggaagagatggttctggctcagaagcttcacgaagccttcaaaggcaccgtcgagaggattactggcccccgaaccgtttccgccttcaaagaaaaaggagttctcagtgtctctgagttcgtcaccgct

SEQ ID NO: 9247 - DNA, 245 bp, Glycine max
  unsure (1)..(245): unsure at all n locations; Clone ID: 701149542H1
ggaaccggggggtaagaaattaataaagttaaaggttcaggaacgaacgaaaaggaaatccaaagatggcacattcctcgatcgtcgttactctgagccagaacttgtttaaaaggaacctcacctgtgtaaaaattcacgnnnnnnnnnnnnnnnnnnnnntcggatctcgttctctttctcttccttcctctccttctctcagagaacaacacctcttctctctcaccggctccttctcctct

SEQ ID NO: 9248 - DNA, 245 bp, Glycine max
  unsure (1)..(245): unsure at all n locations; Clone ID: 701149543H1
taactatgcgtttggatacgtgccaactagccacatctgttgtaaaattcacgtcaatttgacaaaactaacacggaagctagtacttgctgcttttgtattgacgtgaatttattggtggctaataggctgccaaacaaacactaaattcatcaacataaaagtataaaaaccttgcccatgtttggccaaaaatataggaactacaagcacatttttacctttttttttttnngnaccnactt

SEQ ID NO: 9249 - DNA, 249 bp, Glycine max
  Clone ID: 701149544H1
gggcaaagactcgtgggaaaccaagtaaggtataccatttgaaaatggcttcttgtgcgtcatccatgtcttctaccatcctcatcctaattgccatctgcacactgtcctcacttctgtcagctgcatctgcagcaacagaggagggacgaacaaggcccttcaaaagggtctatgcctttggagactctttcacagacactggcaacaccaaaaatgccgaagtccaagtggctttggtcatgtttc

SEQ ID NO: 9250 - DNA, 241 bp, Glycine max
  Clone ID: 701149545H1
gacatcacaagaagcacaatttctctctttctttttgtgtccaaaatggctcctagttctactcacaatactgggttctatgtgcttatgctagttgggatagtgattagcactatggttgctacctgtgctggtagcttctaccaagactttgatctaacatggggtggtgaccgtgctaagatattcaatggtggccagcttctatctctttcccttgacaaagtctctggctctggct

SEQ ID NO: 9251 - DNA, 253 bp, Glycine max
  unsure (1)..(253): unsure at all n locations; Clone ID: 701149547H1
aatgtcgttattaagtgttcgtcacgtgattgagcattttcctacatgatatgagaaaaatctaacaaaagcaaaatgggtgatgcgttatgcgtgagacaaaattttacttgcacataacataacatancacagatttaactgtgtacaaaccccacctatcctctctccaatgccaatcatccatttaccctactttatttgtgatactatgcaacatacattctaatttgtcacagcaccaaagaagctt

SEQ ID NO: 9252 - DNA, 226 bp, Glycine max
  unsure (1)..(226): unsure at all n locations; Clone ID: 701149548H1
gatcacaaatctancgctaacactcattaattgcaagaatggcacttcgttgcttggtgatgtccctttctgttctcttcactcttggtcttgcgagagaaagccatgccagagacgaagatctttggcatgctgtttggccaaacactcccattccaagttcattgcgagatcttctaaagcctggccctggcaagtgttgaaatcgatgatcaccctatgcaat

SEQ ID NO: 9253 - DNA, 181 bp, Glycine max
  unsure (1)..(181): unsure at all n locations; Clone ID: 701149549H1
gagggtttgtaactttgtcttttgcttgcgaatctgaatcgaataataatcaatcaatcatcatgtcgtcggcgaagaagatcacactgaagagttcggacggcgangctttcgaggtggacgaggcggtggcgctggagtctcagacgataaagcacatgatcgaggacgactgcgccga

SEQ ID NO: 9254 - DNA, 212 bp, Glycine max
  unsure (1)..(212): unsure at all n locations; Clone ID: 701149550H1
agggtggttttgatttggagtgcagctatgcgattgtacagagagccaagcagcagttattgtataagcttcgtagatttgagaaactggcggagttggatccagtggaacttgagaaaagaatgcaggatcaagaagaggacgaggatgacacatttatggaagaggnngnatggtcatgatgagaaaaaccaagcatcatgcaaagaaaa

SEQ ID NO: 9255 - DNA, 248 bp, Glycine max
  unsure (1)..(248): unsure at all n locations; Clone ID: 701149551H1
ggcattaagcagantcataatctttcatcacatgcatcagatggcgcttctacttgtcgctcncttggntctgttactacattaccatcggttactgtngnanaagtgctttcacccattctcgacgttgcnncacngaaccgaaccagtnttcccaagggcttcatttttnnggcaggatccgcntncgtatnagtangnagtggggcaaacgaaggtngcaaaggaccaantnnatgngatacctt

SEQ ID NO: 9256 - DNA, 248 bp, Glycine max
  unsure (1)..(248): unsure at all n locations; Clone ID: 701149552H1
cgtcgcagttgtaaccctaatcagaagaagcgcanttcaagcgagtgncanccaccagncatgggtcntatgcacagccgcggtaagggtatatcctcttctgctttgccctacaaaaggacacctcctagctggctcaagatcacgnacgcaagatgtcgaagaanatatctgcaagtttncgaagaaaggtttgaccccgtctcagattggtgtcattctcanagattctcacggtattgctcagg

SEQ ID NO: 9257 - DNA, 245 bp, Glycine max
  unsure (1)..(245): unsure at all n locations; Clone ID: 701149553H1
tcatctattgtacgaaagttgattcaatatttgatgagggagactctgccttcctggtttttatcagctaccatgttcgagcaagatggtggagantctggagttatggttgctaagctcaaaggttatgcactggcattttttgtttttcttagtgcagcatttgcctggggtattgacaattcgtattcaccaaaacaacgggcagaggttgtcggcttgcatttganatttcttgcaagcac

SEQ ID NO: 9258 - DNA, 233 bp, Glycine max
  Clone ID: 701149554H1
ggagcgagacggcagcacgcgcaaaaatggtgaagtttctgaaaccaaacaaagccgtcatcgtccttcagggacgctacgccggcaaaaaagccgtgatagtgcgaaccttcgatgaaggcacgcgcgagcgcccctacgggcactgcttggtggcagggataaagaagtaccctgcgaaggtgatcaagaaggattcggccaagaagacggccaagaagtcgcgtgtgaag

SEQ ID NO: 9259 - DNA, 247 bp, Glycine max
  unsure (1)..(247): unsure at all n locations; Clone ID: 701149556H1
caaagagaggctgatatgactaaggaacgtattgaaaaactgctgaaggctggagctaatgttattctgacaactaaaggaattgatgacatggctcttaagtactttgttgaggctggggcgattgctgtaagacgtgtgcggaaagaggacatgcgccatgttgccaaggctactggtgcaacattngtctcaacatttgctgatatggaangggangaaacatttgaaccatcttttcttggat

SEQ ID NO: 9260 - DNA, 240 bp, Glycine max
  Clone ID: 701149557H1
ggaacaccctgtgcttctcaccgaggcacctcttaatcctaaggctaatcgtgagaaaatgactcagatcatgtttgagaccttcaacacccctgctatgtatgtcgctatccaggccgtgctttccctttatgctagtggccgtacaactggtattgttctggactctggagatggtgtcagtcacacggttcctatctacgaaggttatgccctcccacatgcaatcctgcgtttgga

SEQ ID NO: 9261 - DNA, 231 bp, Glycine max
  Clone ID: 701149558H1
ggatgaagtaaagaacagaactaaacactaactggatcaaaactaaagggtattcttccggcgattgtattgtatattgacgctcacagatttctgggagcgacagttgcaacttcgattcgacttgaagagagggaggaaggtggaaattggcaaattataagaatacgctgaaatgtcagcgcttttcaatttccattcatttctaactgtgatacttctgggaatatg

SEQ ID NO: 9262 - DNA, 240 bp, Glycine max
  Clone ID: 701149559H1
gacacaccgtttgttctattcttaactcaacttctgctacccactctcttcttccaagtccaaccacgcttttctctacggtcatgggcaaggtcaagttcggaatcaacggatttggaagaattggccgtttggttgccagagtcgctctgcaaagagacgatgtggagctcgttgccgttaacgaccctttcattaccaccgattacatgacatacatgtttaaatacgacagtgttc

SEQ ID NO: 9263 - DNA, 240 bp, Glycine max
  Clone ID: 701149560H1
gaggggagagaaggataagagagagaaagcagggtgcgtgtttttagagagagagagaggaggaatcaggcgaattgtgtgtggtttggtttggggcatggaagggctgggcatgctgaagcagctcattggtcagcttcagcagctcttggacacttaccagtctcaatctcattcttcttctactctcattcttcaacctcctcacactctcctctttcaacaacaacaccccagatg

SEQ ID NO: 9264 - DNA, 252 bp, Glycine max
  Clone ID: 701149561H1
gggatgacatctattagaaatgaattgaaactaaaagatagaaggagagagaaatagagagtaagagaaagagagcattgcgtaaaatttgcggaagtgtgacatttaatttcattcccaaacatttttagttacattgtacattttatagagacctatgagagttgcatagcaaatttgtacaacttgcagactaagtttctaagacttgcagagcaagcttctaacagctagctgccagctctcacttga

SEQ ID NO: 9265 - DNA, 243 bp, Glycine max
  Clone ID: 701149563H1
ggcacaagtttgttgagatagctagaagcaataagatgaaaatgaaagtgcttgttttgtttgttgctacagttttggtagcatatgaatgccatggctcagactaccagaagttccctctccaaatgaaaactgggtttggtgggcaatacagcaatgaggtggcatgtgccagttggaggcttggcgtggaagcaaacaacgtagtcaagtggcaaactgttcctgcagcttgcggagagt

SEQ ID NO: 9266 - DNA, 246 bp, Glycine max
  Clone ID: 701149564H1
cacaaaaggctggcttcaaagctgtaattgtctatgacaatgaagatggtggcatcttggttgcgatggcaggaaattctgctggtataaaaatacacgctgtatttgtatctaaagcttcaggtgaaatactaagcaaatatgctgggttgactaatgtggaaatatggctcattccaacttttgaaaactcagcgtggtctatcatggcaatttcatttatttccctggctagctatgtctgcg

SEQ ID NO: 9267 - DNA, 205 bp, Glycine max
  unsure (1)..(205): unsure at all n locations; Clone ID: 701149565H1
gatcacttcatagtaagcactatagaaaaaacgacattcattcatctatggctacccttattgctcccagcaaccactctccccaagaagacgctgaggctctcagaagggcttttgaaggatgggggactgatgagaaaactgtcatagtaatattgggtcatggaactgtttatcagannnttnanaatcagaagagtctatg

SEQ ID NO: 9268 - DNA, 200 bp, Glycine max
  Clone ID: 701149566H1
ggctgaccaatttcaggagttggctcaagtactccttggcttgttcgtatttcaacaatggctaagaaatctgtgaagtactatgtggttgacgcattcactgattcagcgtttaagggaaaccctgcagcagtgtgtttcttagaagaggagagggatgaagagtggttgcaagctgttgccaccgagttcaatgtccc

SEQ ID NO: 9269 - DNA, 240 bp, Glycine max
  unsure (1)..(240): unsure at all n locations; Clone ID: 701149567H1
ctcgaaggtggagggatctggcagctcaagtagcgcccccaataacaganaaanagantatcacaatgatagtagacacattaccggtattctactatgaaaaatggtgggttacacacttcaagttttacaaattnagtcttcgccancgnnatgatcgaagtgggtctgaaaagangcaaatttantcatcctgcttgggacgactganaaaactggggcaaatgaagaggatgagat

SEQ ID NO: 9270 - DNA, 245 bp, Glycine max
  Clone ID: 701149568H1
gacatgcataagaacaagcacaaggtctgattcgtgtttccttacatcaacttgtggtctaaaaatgggaaggatgccatgctgtgagaaggtagggttgaacaaaggaccatggaaaaccgaagaagatgagaagctcgtggcttatgttgaaaggcatggccctggaaactggcgttcagtgcctgccaaagcgggtcttcaaagatgtggcaagagttgtagactgaggtggatcaactacc

SEQ ID NO: 9271 - DNA, 224 bp, Glycine max
  unsure (1)..(224): unsure at all n locations; Clone ID: 701149569H1
gggacacaaaaaattctctcttttctctgagtcgcagcttttacgttttcctaattctttgtccttagcatcaccatctccatggccaacaccanacacctcacatttactttcaccatcgttctcncgctcntcttctcattcgccacagcaaatccccaacggtttggntgtcnaganggagaagttcagccacttcacttcttcttccacgacatagtgag

SEQ ID NO: 9272 - DNA, 244 bp, Glycine max
  unsure (1)..(244): unsure at all n locations; Clone ID: 701149570H1
gggttcggaaacgaagaagggttctgttttcttttcgcgatgagggccaagtggaagaagaagcgtatgaggaggctgaagaggaagcgccgaaagatgagacagagatccaagtagtgcgttaaacctagtttgtttccgttgctgngnnnnattgcttatgttgtcaaataggacacccagttgttagtggcactggtctctcctttttgatgttttgatacattttgttggattttatttc

SEQ ID NO: 9273 - DNA, 185 bp, Glycine max
  unsure (1)..(185): unsure at all n locations; Clone ID: 701149572H1
aattcgcaaaccctaatttcggaaanatcggcgatggctgcctccaaggatcgcgagancttcgtctacatcgccaagctcgccgaacaggccgagcgatacgaagagatggtggaatcantgaagaacgttgngaatcncgacgttgaactgatgtggangancggattnatttctgttgggna

SEQ ID NO: 9274 - DNA, 219 bp, Glycine max
  unsure (1)..(219): unsure at all n locations; Clone ID: 701149573H1
gttttgtgagtcanaaaaccccttcttggcgggntaaatgtgaaacttgtttttgaaattcacatttgtaatctattttagtattttgttgaaattgtgtgtaatttattacatgacgtcagaaataaggttccaacaatccaaaaacacaccaccaccacacacgtgttatctcgtgagggttatgagttccttnntaangaagctcatggaggcaaa

SEQ ID NO: 9275 - DNA, 222 bp, Glycine max
  unsure (1)..(222): unsure at all n locations; Clone ID: 701149574H1
gatcgaagcaaaaaatgaaaacccaaagtncttctctcctctgtctttttctctctcttgctatccttttggctagtggcactgctgcaagtgcaactccaagaagcgcagtgccaagccaccatgtttcaacattcaacagaagcctttttccttccacttttctctttggaattggttcttctgcttaccaggcagaaggagcagcaagtgtagatggga

SEQ ID NO: 9276 - DNA, 239 bp, Glycine max
  Clone ID: 701149575H1
gataccaaaaacaaaacacaagccaagtgaaagtgagaaaaaataaaaatcaaagagcataatgtcagggatcattcacaagattggggagacccttcatgtgggagggcacaagaaggaggaggagcataagggtgagcaccatgctggagaatacaaaggggagcaccatggtgaacacagtagtgagtacaaaggagagcatcatggtgaacacaaagctggagagtaccatggtg

SEQ ID NO: 9277 - DNA, 237 bp, Glycine max
  Clone ID: 701149576H1
gtcttatttactgttttccagattcactagatggacctgtgtattgatggacgagctttcatatttttgctttggttcaattagtttacttcaagattttgtttgagaaatatgttttgcttaactgagacatgatttatggaagaagctagattggattattttctgttttactagaaatgagagttataatcctttttcaagggaactttgcatcttattagtatcctgagggta

SEQ ID NO: 9278 - DNA, 209 bp, Glycine max
  Clone ID: 701149577H1
gatatccaaaggaacaaaaatattattaagatgatcaacattattggagcacttgttctactctttgcatttctcttcctcagttgtgtgcatgcacaagacacaacaacccttgtgcctgcaatcataacttttggtgattctgctgtggatgtagggaacaatgactatcttcccacccttttcaaggctgattaccctccttatgg

SEQ ID NO: 9279 - DNA, 239 bp, Glycine max
  Clone ID: 701149578H1
gtgaagcaacttcgaaccatcttcctgaatatcttacagggtcaaagtccttggctgtcattcctctcatcatcattagatttgaacctttttcattctcaaatggtgaagtaactgcgttctcactggcactggcaagttggcatatattatttggtgcacgagatagatctgctgcaatagtctgttaatgaaataaatgagcacacattagataaactcattcatcataagaatat

SEQ ID NO: 9280 - DNA, 242 bp, Glycine max
  Clone ID: 701149580H1
ggcacaagtgagtttgttgatcgagataactagaaacagtgtgatgaaaatgaaggtccttgttttcttcgttgctacaattttggtagcatggcaatgccatgcgtacgatatgttccctctccgaatgaacactggctatggtgcccgtactccggaggtgaaatgcgcaagttggaggcttgctgtggaagcacacaacatctttggctttgagaccattcctgaagagtgcgttgaag

SEQ ID NO: 9281 - DNA, 245 bp, Glycine max
  Clone ID: 701149581H1
ggatgcaaccctaattgaatccaagcaagcaggggaagtgggggtattatttgatcagaagcacaaagctcttcaaaacccaaacaacagctccacggaccacccctactgctctgctctgcaatggccgacgaggaacctgttgatcagaagagatatcttgaagagtcttgcaaaccaaaatgtgtaaaaccattactggaataccaggcgtgcattaaaaggatacatggtgatgattctgg

SEQ ID NO: 9282 - DNA, 248 bp, Glycine max
  unsure (1)..(248): unsure at all n locations; Clone ID: 701149582H1
gaggcgcggcgggatcagcacaagattgcaaaatgaagttcaacattgcaaatcccaccactgggtgccanaagaagctggnaatcgatgacgacctgaagcttcgagcattttgggacaagaggatctcccangaggttcttggtgatgctctgggtgangagtttaaaggatatgttttcanaatcaccggtnggtgtnacaaacaaggattccctatgaagcagggagtgctgacccctggtcgt

SEQ ID NO: 9283 - DNA, 255 bp, Glycine max
  unsure (1)..(255): unsure at all n locations; Clone ID: 701149583H1
catgaaaattatttattacagccgaacatttttgtctataattggtggagttgttgctggaattttggggttcacaagcttnaaaggatttgtatntnncttccttctcatgatggttacttcacttgggcttgtagccanagccagattntcaatccactcctactttgactcctcgaatcgagttctacttgatggcntcctaggtggtctaatgtcatncgtgctgttctgggaaagtgcattcgncatngt

SEQ ID NO: 9284 - DNA, 242 bp, Glycine max
  unsure (1)..(242): unsure at all n locations; Clone ID: 701149585H1
gatcacaacatcatagtnagcactatagtaaaaaaaggacattcattcatctatggcnncccttantgctcccagcaaccattctccccaagaagatgntgcngctctcaganaggnttttgaaggntgggganctgatgngaanactgtcatagtnattttnggtcataganctgtgtatcanaggcagctaatcaggngagtttatgaggnnatttaccnngaggatcctttgnagcgcc

SEQ ID NO: 9285 - DNA, 240 bp, Glycine max
  unsure (1)..(240): unsure at all n locations; Clone ID: 701149586H1
ggaagcccaaagtgcaacgtactttgcaaaaaccctannccctctctttctctctccgcgantctgtactcatcaatggcnacgcaatcgttagacgaagacacaactangatagtcatncganaggtcgagttttatttcggcgacagataccttctcaccgatggtttcatgaggaagagtatcactgnnngcnaagatggcatgantagttnggcgctgatttgctcgtttatcgat

SEQ ID NO: 9286 - DNA, 239 bp, Glycine max
  unsure (1)..(239): unsure at all n locations; Clone ID: 701149587H1
ggcacaagtgagtntnttgatcganataactagaaacagtgtgatnnaaatgaangnccttgttntcntcgntgctacaattttggtagcatggcaatgccatgcgtacgatatgttccctntccgaatgancactggctatggtgcccgtactccggaagtgaaatgcgcaattgnaggcttgctgtggaagcacacaacatctntnggctttgagnccattcctgnagagtgcgttg

SEQ ID NO: 9287 - DNA, 249 bp, Glycine max
  Clone ID: 701149588H1
ggaaacatttttaagaaagctttagagaaaaatgatgctggagaccatttcccagtaattgccttcaacttaggtggaaacctcgtaataaggatcgtaagcgagcaaactgatattcttgaaccatttactgcgtcgagtttgccaagttcccttatattgtggaaggaagcaaatgctaaaggaagtctatttcaaagatttccttcagatttgttgacacagctgaagacagattgtctcgtcctg

SEQ ID NO: 9288 - DNA, 236 bp, Glycine max
  Clone ID: 701149589H1
gagccaagaaaagaaaatcctcacccattttcttcgtagccaaacactctgaaattctcagttatgtcgtggcaagcgtatgtggatgatcacctactgtgtgaaatcgaaggtaaccacctcactcacgccgctatcatcggccaagacggaagcgtttgggctcagagcaccaacttccctcagttcaaacctgaggaaataactgccatcaataatgactttaatgagcctgg

SEQ ID NO: 9289 - DNA, 235 bp, Glycine max
  unsure (1)..(235): unsure at all n locations; Clone ID: 701149590H1
atcctagctagttaacaagatttaagtgggggacaaaaaagatgacaaggaatgagaacaggaaatttaaattattaaattctttatacatattctaaatgttacaccataggtgaatcgtcagggtaagaagcatgtatactttcttaaccacttgcccaaccaaatttaggtgcttatatacagtaacaattttatgcacacaaactacgtttgtatggagattgaatttgnt

SEQ ID NO: 9290 - DNA, 221 bp, Glycine max
  Clone ID: 701149591H1
gatgcaacagtttgttgagatagctagaagcaataagatgaaaatgaaagtgcttgttttgtttgttgctacagttttggtagcatatgaatgccatggctcagactaccagaagttccctctccaaatgaaaactgggtttggtgggcaatacagcaatgaggtggcatgtgccagttggaggcttggcgtggaagcaaacaacgtagtcaagtggcaaa

SEQ ID NO: 9291 - DNA, 242 bp, Glycine max
  unsure (1)..(242): unsure at all n locations; Clone ID: 701149592H1
ctatctcattttttttttacaaaagtcatgtctatctcatctttaccaaacaactttagaatattattttcttctatttctcatctatttttcttaaaccaaacaacaaaatattttactttatttctctttgttagaattatctttttctattttcatttattatatttctatcttctaaatctaacacagacataaatttaaattaaagtaataaacatatcataatttcaggntttgtt

SEQ ID NO: 9292 - DNA, 248 bp, Glycine max
  Clone ID: 701149593H1
gggcgaggatggcaaacacaaacagcgacaccaaagaagaaagcaaaaaatggatgaaagagagacaatacctctcctcacctcatacaagatgggaaattttaatctatcccacaggattgtgttggcaccgttaacacgatcaaggtcttacaacttcgttcctcagccgcatgctgctctgtattattctcaaagaactactaagggtggcttcttgatcggggaagctactggtgtatctgata

SEQ ID NO: 9293 - DNA, 236 bp, Glycine max
  Clone ID: 701149594H1
acagggagtcgagtagggaccatgaacgtggtgatagtcgtgaacgagggcgagaccatgatcgtaggagcagagatcgtgataggcattatgatagagatcgtggatatgatcgcgaccgtgacagagactcagaccgcacccgctcctatgactcaagaagccgtcggaggtcacgctctagatcccaagagcgatctagagattatgatcgacataggcgtcatgatcgatac

SEQ ID NO: 9294 - DNA, 239 bp, Glycine max
  Clone ID: 701149595H1
ggcacaagtgagtttgttgatcgagataactagaaacagtgtgatgaaaatgaaggtccttgttttcttcgttgctacaattttggtagcatggcaatgccatgcgtacgatatgttccctctccgaatgaacactggctatggtgcccgtactccggaggtgaaatgcgcaagttggaggcttgctgtggaagcacacaacatctttggctttgagaccattcctgaagagtgcgttg

SEQ ID NO: 9295 - DNA, 243 bp, Glycine max
  Clone ID: 701149596H1
gaggaaatgagtattccactgaaggagttgatagagaggcactgtggaggtattcgaggaggatgggataatttacttgcagtgattccgggaggatcatctgttcctctgattccaaagcttgtatgtgatgatatctttatggattatgatgcattaaaggctgttgggacagggttggggactgcagctgtaattgtaatggataaatctacggatgttgtggatgctattgcaaggctt

SEQ ID NO: 9296 - DNA, 250 bp, Glycine max
  unsure (1)..(250): unsure at all n locations; Clone ID: 701149601H1
ggaatcggtggtgaagaaggagaaaaaggaacgaaggantgggcctttggcgaagaagcagggaacttcgttgccgctaagaaaatgaggttcnaaaacgcggaagctgatttttaacagagccaaacaattactccaanggatacgacgagcagcnaaanggactgattaaggtgnagcgtgaagnccagctttaagggaggtttatggttgaacccgaanctanncttttgtacaacntgggggngng

SEQ ID NO: 9297 - DNA, 197 bp, Glycine max
  unsure (1)..(197): unsure at all n locations; Clone ID: 701149603H1
aaaaacatataaataaaaaaagaaagcttaaaaatagttgcgtcaatgcatttgggtcaagagcttacttgaggatgtgtttggaagaacttacttaaactcanttttacangtactggtgtttgggagagcttatgatctgtncataagcgttttttcccccacttatttcaataaactctttaggatagtttata

SEQ ID NO: 9298 - DNA, 242 bp, Glycine max
  Clone ID: 701149604H1
ggtcgcgcgcaggtcgcaaggcatcgtagcggtagcgcgtgattccatggccactctccttctacccctcaactcctattctcccacaccaattcgaaaccctaatctatcttctcttaaaatcaaagtcaaccagcgtcactctcctttccaaacccgacgacttcatcgcaccccattcgttcgtgcactggaggaagattcgaaccctgaaacagtccaagatggcgaagtgaacagtt

SEQ ID NO: 9299 - DNA, 239 bp, Glycine max
  unsure (1)..(239): unsure at all n locations; Clone ID: 701149605H1
ggaaaagagctatgaattgcctgacggacaggtcattacaataggttctgagagattccgttgcccagaagtactgttccagccttctctaattggtatggaagctactggaattcatgaaacgacgtacaactccatcatgaaatgtgatgttgncattngaaaggatctgtatggaaacatcgtgcttagtggagggtctactatgtttccgggaattgctgatcgtatgagcaagg

SEQ ID NO: 9300 - DNA, 250 bp, Glycine max
  Clone ID: 701149606H1
gactgcgaaaccggcaggggctccaattcctacttcttagccgcagatctctcagggcttgcatcttctcagttgtgaagatgtacacatcaaggaagaaaatccacaaggataaggatgctgaaccaactgagtttgaagagtcagttggacaggcattgtttgatctggaactaccaaccaggagcttaaaagtgatctgaaggatttatacataaactcagctgtgcaagttgatgtttctgggaac

SEQ ID NO: 9301 - DNA, 239 bp, Glycine max
  Clone ID: 701149607H1
ggaaaaggttcacatcagtattgtggttattggccatgttgactctgggaagtcccactaccactggccacctgatctacaagcttggaggcattgacaagcgtgttattgagagatttgagaaggaagctgctgagatgaacaagaggtctttcaagtatgcctgggtgcttgataagcttaaggctgagcgtgaaagaggaatcacaattgatattgccttgtggaagtttgaaacc

SEQ ID NO: 9302 - DNA, 247 bp, Glycine max
  unsure (1)..(247): unsure at all n locations; Clone ID: 701149608H1
gaagaagaagaaggagcatggccatgagcatggccatgacagcnagcnagcagcagtgacagtgattaaactgctgcatcacctatatatttaaaaggtttatgggaccatagtagcgagggctgtgccttaantnnnnnnnnnnnnnnnnnnnnnnnnnnnnnnnnnnnnnnnnctttntccctatcntgtgatctatntatgagtgagaaaaacaaaagtgagaaattgtgcgtgtatntggttg

SEQ ID NO: 9303 - DNA, 238 bp, Glycine max
  Clone ID: 701149609H1
ggtctcactcacatcacacactctcatagctgtagcggcgacactaagatcggagaaagaatggcgaaaacgacgtcgttgctgctctttacactgctcctcttcggaaccctagctctcatccaggcgaagaaatcgaaggaggatttgaaggaggtgacccacaaggtttactttgatgttgagattaatggaaaagaagcaggtcgtattgtaatgggtctttatgggaaggctg

SEQ ID NO: 9304 - DNA, 217 bp, Glycine max
  unsure (1)..(217): unsure at all n locations; Clone ID: 701149610H1
ggaagcagtgagtncnggaataatgttgcggatangctcccaaattcttcaccacggttcctcttcggaccatttcacccttcgcatgtcgcttctcagtccgttccatcgctgactcttctcctttcaacaaaatccgcattcaaagggatgatactgcatttgatgcatatgtcgttggaaaaaacgacgctcctggaatcgttgtgcttcagga

SEQ ID NO: 9305 - DNA, 236 bp, Glycine max
  unsure (1)..(236): unsure at all n locations; Clone ID: 701149611H1
gggtgctgtgagtgagacaccgatagatagagancgcggcataacctaaaacctatctttcttctctctctgtgtgtgcgcttcaacggcaaccagaagcagccatggccactgcaaggactgtgaaggatgtttcacctcatgagttcgttaaggcgtactcctctcacctcaagcgatccggcaagatggagctgccagagtggatgatatggtgaaactgccaattttnnggg

SEQ ID NO: 9306 - DNA, 236 bp, Glycine max
  unsure (1)..(236): unsure at all n locations; Clone ID: 701149612H1
ggagcagagaggaggggcttgaagttttaaactggcagctagctgtggggcattcatcctcgatttggagaaaagaaaaagaaagaagacatttccttccgaattgaggaagggaaaggtgtcttggatggccaagtcatcttccttagctatcacgttgatctgcgccgccacggtattggtggcgatgagtcgtggccgacanncctgggcggcnggggaccaccatttngggg

SEQ ID NO: 9307 - DNA, 240 bp, Glycine max
  unsure (1)..(240): unsure at all n locations; Clone ID: 701149613H1
ggaagggttcttaaactcgtgcgggaatgatttccaagcacacacgcactccacaaagacatatgctagaaactgtataatttggttatggagttaacaagggataacaaagagcctaagtgccgtgcaaaaaaaaaaacaaagagcctaagatgctaaaacttgcatactcttttggacaaaactcaggtacaacaccataaatnctttngnngttttccaatcaaattggngttttat

SEQ ID NO: 9308 - DNA, 234 bp, Glycine max
  Clone ID: 701149614H1
cataactatggtggtattccggagacatcttcagcacatcaaattcaaatgattccaccactggaattgccaaaggaagaaaggccagtggaagaggctcctgttgttgagaagtcaaatggtggcactcgtaagaaaagacagggccccaaggtgcccaaatctcccaaggctaagaagcccaagagggggcctcgtgcgccaaaggatgagaatgctccctcagttcaacgt

SEQ ID NO: 9309 - DNA, 221 bp, Glycine max
  unsure (1)..(221): unsure at all n locations; Clone ID: 701149615H1
gacacatgggtttctctggctgcattanatttgcaatttaagacagtctggttcctggtatagtcccttggactaataaaagctaacaggtggtaggaagcaagctgagcttttgggattcaacggttacattcgtccatatgcaagggctagaggccgagatatncttagtggngncattanggcttctgaaattnccggaattnggananaaantgtcc

SEQ ID NO: 9310 - DNA, 249 bp, Glycine max
  Clone ID: 701149616H1
ggggtgccattgttgctgtcgtcatccgcagctgctgttattcgcaccgcaaacaaaacagtgagccatgggccgtcggaaagaacaagcgcatctccaaagggaaaaagggtggcaagaagaaggcagctgatcccttgccaagaaggattggtatgacattaaggccccttctctttttcaagtgaaaaatgttggcaaaaccctcgtctctcgtacgcagggtaccaaggattgcttctgaaggac

SEQ ID NO: 9311 - DNA, 239 bp, Glycine max
  Clone ID: 701149617H1
gactcgcagttgtattgttgaacaaggggttctctggctgcttccttcactttctctcgtttcaatcgaaaccaaaacaaaaacatgggcagaaaattcttcgtcggtggcaactggaaatgcaatgggaccactgaggaggtaaagaagattgttactactttgaatgaggctaaagtccgggagaagatgtcgtagaagttgttgtgagccctcctttgtgttccttcctgttgtaa

SEQ ID NO: 9312 - DNA, 238 bp, Glycine max
  Clone ID: 701149618H1
ggaagtagttatgtataccttggtaggctgaaagtggtagccatgtggcagttaaacgactaaaagatcaaggagggtcagaagcagactccgcatttttcaaggagattgaactattagctagacttcaccattgtcatttggttccttgcttggatactgctcggagttaaaaggaaaacatgttcagaggttactagccatttgactacatggcaaatggaaatttgagggactg

SEQ ID NO: 9313 - DNA, 240 bp, Glycine max
  unsure (1)..(240): unsure at all n locations; Clone ID: 701149619H1
ccttcaccaacaaattcatgtgaatatttaagacanttnttatagatcaattgttattaatatagctggtaattaagctgcgctgttttaagtgtcgtacgaaccttgggcttgttaactaaaggccctttaactatatttcttccacaaatatagaaagaaataaattcacaaattacgatgatatatttctttcacacttactcacaatattctctttgttcactggcagactttgag

SEQ ID NO: 9314 - DNA, 238 bp, Glycine max
  Clone ID: 701149620H1
caaagtagagaagttcttgttaatagtgctaacaggtagcttcgctctaggcaatctcagtgggatatgaccaacatcaaaatttttcatgtagtggctgcattccaggtcttctcgtacatatcctttccccgttgatgcaaaggtttcaatagcaaaaaattcaccctcttccatctttgtctgctccccacccttcacaatgggaaccgattttccagcatggatttggtagcga

SEQ ID NO: 9315 - DNA, 238 bp, Glycine max
  Clone ID: 701149621H1
aggtatcttatttgggaaagagagtgaaaataatatatatgatgtgatgtaatgtaaacttaaatttgtgaaacaagtcacattataatactagcgtaattacaataacatatctcttcttttataccttatatttttgggtatacttggcttatttgaatagatgaatattagtaaaattaccataaagtcccattatccttctgtccccatgggaagtgttcatttttctttattt

SEQ ID NO: 9316 - DNA, 237 bp, Glycine max
  unsure (1)..(237): unsure at all n locations; Clone ID: 701149623H1
ggaaaatgtaactaatgaaaattgggtctgatggcactccttttgcagagnttattctaatctcccgtttggttttgtcttgctttaaatttttaatgatttatttaatctttaattttcttttcagttcactatactgggacgttgcttgatggcactaagtttgattccagcagagataggggaactcctttcagtttcacgcttggacaagggcaagttattaaaggatgggat

SEQ ID NO: 9317 - DNA, 239 bp, Glycine max
  Clone ID: 701149624H1
ggcacaagtgagtttgttgatcgagataactagaaaacagtgtgatgaaaatgaaggtccttgttttcttcgttgctacaattttggtagcatggcaatgccatgcgtacgatatgttccctctccgaatgaacactggctatggtgcccgtactccggaggtgaaatgcgcaagttggaggcttgctgtggaagcacacaacatctttggctttgagaccattcctgaagagtgcgtt

SEQ ID NO: 9318 - DNA, 237 bp, Glycine max
  Clone ID: 701149625H1
gaggacacaagacgataacaaatgggcatcatctcagtcgaggaagagagttgacgccgtcgattctcgcgctgcttccgttctcgttcgcgccaaagatggcagtgcttttgctcgttgcgacgattgcaagaagaatgtgccggttgcactcatcgacatgcacagttgcagccttgaagctaaaattaaaatgaacctagacgctcaagttgtggaacaggctgctgaagctaa

SEQ ID NO: 9319 - DNA, 237 bp, Glycine max
  unsure (1)..(237): unsure at all n locations; Clone ID: 701149626H1
gaatgatcagtggtgtctcaactcctgggacgaggaaactgacgtagcttgtatcgacctttgtgaattgatggagattccattttcttcacgacaaactttcacaaaccttattaaacatcactttctcccttcccttccttcccttgtttcccagctttgatttagagaaagagagcgaaagatgttgcagtgcatatttctnctgtcagattcgggagaggtaatgctagagaa

SEQ ID NO: 9320 - DNA, 243 bp, Glycine max
  unsure (1)..(243): unsure at all n locations; Clone ID: 701149628H1
gagggcagcttcaaaaaggcgtgggattcagataacttctatttcgagggccaatcaagccctctgatttcgttgactttgacctcattcttgctatggacaaacagaacagagaggacatatttgaggcctttangagatggaaagatagacattctttaccggatggcgcacataaaaaggttaagttgatgtgctcgtactgtaagaagcatgatgaaagtgaagttccggatccttatt

SEQ ID NO: 9321 - DNA, 236 bp, Glycine max
  unsure (1)..(236): unsure at all n locations; Clone ID: 701149630H1
ggatggaagaaacaaagagaagggaaatattcaggaggtgcgagtaaccggagccaaacnnnnnnnnnnnnnnnnnnnnnnnnnnnnnagatgcagttccattcagaaactccaaactaaacatccctggcgacaaccttaggaatctcgatcgctgaaaaaacctatgcagccccgaacacactctctggcattccaacttgtttaagtcatgcctttcgattcacccttctctc

SEQ ID NO: 9322 - DNA, 238 bp, Glycine max
  unsure (1)..(238): unsure at all n locations; Clone ID: 701149631H1
gattctataaattggaatcactgctcctcataagattaatacaacctcaaaaagagttctttcaaaatgcaaacagccttaaccttcgctgcccccaacgttgtgccattggcacccacaaagagtgtctcccatattaccatctttcccaccaaattgaancccccgcgctcctcacctcgttactctccgattagggttgcaaccgtggagcccgacacttcaactgtcgactaca

SEQ ID NO: 9323 - DNA, 143 bp, Glycine max
  unsure (1)..(143): unsure at all n locations; Clone ID: 701149632H1
actttctcaagaatattagttatttttattcntcgaaaatactcttttaatgaaataacttcattagatattgcattcatttttatcttagataatttctcttcaattatttgtacggtgataaagtttttctaaaaccatgt

SEQ ID NO: 9324 - DNA, 238 bp, Glycine max
  unsure (1)..(238): unsure at all n locations; Clone ID: 701149633H1
gtggaactgaatgtaaacatgcactgtgagggcctgtgctgagcaactccagaggaagatactaccaatgagaggagttcaaacagcaatgacagagtttagcacagggagggtcttgtgacagggatcatggatgcaaaccaactagtagttttgtatataggacgcacccaaaagccagctaaggttgttcctcgccggncccgganccggaaaangaaggangagaacctgcgga

SEQ ID NO: 9325 - DNA, 252 bp, Glycine max
  unsure (1)..(252): unsure at all n locations; Clone ID: 701149634H1
gaaaaagtatggagtttatacttcagagttcttattccacaaatagtccaagccaaggagatgatggtaactctggatccagtgctgtttgtgatgtaatatgcttgcaggctctctcaaagagaattcattatggcaaatatgtagctgaggcaaantatcaagctagtccagattcatataaagatgccattatagcacaggacaaggacaagttnttggaattgctaacatatcctgaagttgaagagg

SEQ ID NO: 9326 - DNA, 249 bp, Glycine max
  Clone ID: 701149635H1
ggacacacaccgaacactcaaacacacacagtgtgcagcagcagcaagcaaaccaacaagagaagaagatggctctgcaactatgggagacattgaaggaggccatagttgcctacacggggctctccccgcccaccttcttcacccttctggtcctgatcctagccctatactacgtcgtttctgggctcttcccctcttccgaccaccgccacaacaccgcctcgcgcgacttggagccccagatgg

SEQ ID NO: 9327 - DNA, 239 bp, Glycine max
  Clone ID: 701149636H1
cgagactccgacgagtggaaatcctattgcttcagggggagaaaaaggttgctttcccagcagcagagattgataaaagaacagcggagcagaaggcaattgatgactggcttcccataacttcttcaaggaacgcaaaatggtggtactcagcttttcacaacgtcactgccatggttggagctggtgttctaagccttccttctgccatggcaagtcttggatggggtcctggggtg

SEQ ID NO: 9328 - DNA, 240 bp, Glycine max
  unsure (1)..(240): unsure at all n locations; Clone ID: 701149637H1
gacagctattcctcttaagcttgctactgagtttcccacactggcatanccttaggtcttccgaattcgaagttaatttgcaagatggctaaggaaaaggctcagatcaacattgtggtggttggtcatgtggaccctgaggaggcaaccaccattaacgagctgaagaagcctgttgtggagaaagaagctccagggcatgccatatgagggcatgcacgtacggcctcggaggggaac

SEQ ID NO: 9329 - DNA, 237 bp, Glycine max
  unsure (1)..(237): unsure at all n locations; Clone ID: 701149638H1
gacccaaaggtgcaaaaatattaagatgataaaacattggagccattgttgtactctttgcatttctcttcctcagttgtgcctatgcacaagacacaacaacccttgtgcctgcaatcataacttttggtgactcagccgtggatgtagggaataatgactatcttcccacccttttcaaggctgattaccctnnngntgggagggactttgctaaccaccaacctactgggaggt

SEQ ID NO: 9330 - DNA, 245 bp, Glycine max
  unsure (1)..(245): unsure at all n locations; Clone ID: 701149640H1
gatgcataagaacaagcacaaggtctgattcgtgtttcctttacatccaacnttgtggtctaaaaatgggaaggatgccatgctgtgagaaggtagggttgaacaaaggaccatggaaaaccgaagaagatgagaagctcgtggcttatgttgaaaggcatggccctggaaactggcgttcagtgcctgccaaagcgggtcttcaaagatgtggcaagagttgtagactgaggtggatcaactac

SEQ ID NO: 9331 - DNA, 218 bp, Glycine max
  unsure (1)..(218): unsure at all n locations; Clone ID: 701149641H1
gggaacgaataaactnaacccagtccccttgacttgncctttctggttcgattcgatgcgattctcggagatgaagaagggcttgatgcatagctatggcgttgctgtgattgtgttggctttgagtttgtgtttgggttcatcatcggagcaattaagttcacgagaatgcgagaatctcggtttcaccggactcgccttgtgctccgactgcaaca

SEQ ID NO: 9332 - DNA, 233 bp, Glycine max
  unsure (1)..(233): unsure at all n locations; Clone ID: 701149642H1
tagtaatcgattacaagtattgtgtaatcgattacagaagtttgaaatgatttgaaaatgttttatcacaagttttgactcttgaaatttgaaatctaacattttaaaacattggtaattgaacacatgattatggtaatcgattacaactttgtaaatcagtttgaaaagaatgttggccatgaaatgacttcatggcgaanaactagctcgcctgggcgagctcattactt

SEQ ID NO: 9333 - DNA, 241 bp, Glycine max
  unsure (1)..(241): unsure at all n locations; Clone ID: 701149643H1
attcctggttcgctttcattttcatgggctttcttcatttcccactttaaactttaagtgcttctcgttctcgctcctccggaataaaccctcccaatccctcacgttccgatgtaagtgtaactgctttccttcctttatctttttaattatcgcttctaattcactttagtctgtctgatttgaggtagaaggnaacggngagatgatangggatggaatggntaggactccaatttcc

SEQ ID NO: 9334 - DNA, 233 bp, Glycine max
  Clone ID: 701149644H1
ggccattgttgttgctattatcatccgcagctgcttttattcgcaccgcaaacagtgagccatggccgtcggaaagaacaagcgcatctccaaggggaagaagggtggcaagaagaaggcagctgatccctttgccaagaaggattggtatgacattaaggctccttctgtttttcaagtgaaaaatgttggcaaaaccctcgtctctcgtactcagggtaccaagattgctt

SEQ ID NO: 9335 - DNA, 230 bp, Glycine max
  Clone ID: 701149646H1
gggtcgtgtaacaggaattgacggaggcattcgaaatcggtgaagatggttgctatgaggtttcatcagtaccaggtggtgggaagggctcttcctaccgaatccgatgagcatcctaagatctaccgcatgaaactctgggcaactaacgaggtccgggccaaatccaagttctggtattttttgagaaaattgaagaaggttaagaaaagcaatgggcaagtgctagc

SEQ ID NO: 9336 - DNA, 214 bp, Glycine max
  unsure (1)..(214): unsure at all n locations; Clone ID: 701149647H1
gaagaaaggnagaaaacataccgaatgagagcatcaaactcttcttcttcggatttccattgcnaagcgctacnnnnnnnnnnnnnnnnnnnnnnnnnnncttcgctcttcgatcttcgtccggggactgctccgaataccaccaccaccactcgccgatggncacgatcggaggttaaangattccnagggtctaaaancngcgnnnaaaacc

SEQ ID NO: 9337 - DNA, 239 bp, Glycine max
  Clone ID: 701149648H1
ggcccgcagtttcatcttcttcttcactctcttgctctcagtctcagactatttttctgaaagcatttcaaatggttgatagcaatccttcctctggatcacccgaagaaacacaaaatcccaacccagatgggaatgcacctgttgaaagtgatcttgcattggagaatctagcccaaaaagttcaagaatctctctctctggaaaaaagacataaattttgggaaacccaacctgtt

SEQ ID NO: 9338 - DNA, 232 bp, Glycine max
  unsure (1)..(232): unsure at all n locations; Clone ID: 701149649H1
ggagtgaacacacacctacgaacaaaccccaaccccgaatggcacagaagcagcacctccttctggatctatcccaaatctcaatctccaaaccctagaacattcaactctcccccgttccctttcaaaaaccttccctttccactcttccgctgcgattcgnntccggggctgccttcctttccgcgatttcgatctgaaactcgaggttgcggaattcggaaattgacat

SEQ ID NO: 9339 - DNA, 239 bp, Glycine max
  unsure (1)..(239): unsure at all n locations; Clone ID: 701149650H1
gacaacaagaaagagatgagaacaaacaagaattcaagagaggagaggtgttactacgttagtctatgaacagtcaccccgagagactgaaatttccagaccctcaaatcaaactcttctattctctcnnnnnnnnnnnnnnnnngttccctctcggataggaatgggaatatatctcagcactccaaaaactgaaaagttttctgaagatggtgaaaatgactgtcttagatatggtt

SEQ ID NO: 9340 - DNA, 217 bp, Glycine max
  unsure (1)..(217): unsure at all n locations; Clone ID: 701149651H1
ggaagttctaaagggnccccttgagatcactttgagnaatggtgaaggctgtggcagttcttggcagcagcgagggtgtcactggaactattttcttcactcaggagggagatggtccaaccaccgtaactggatctcttgctggtcttaagcctggtctccatggcttccatgtccatgccttaggggacactaccaatggttgcctgtcaactgg

SEQ ID NO: 9341 - DNA, 236 bp, Glycine max
  Clone ID: 701149652H1
ggcatcaattcaaaatatatcatcaattataagcatggggtttgtggaacacaacgaatgcagtgtcttgccgctttcacaagtttggtgatgaccaaaagaatctggtcttccaaggtgatgccacgtcttcttccaggggcatagaactcacaaatctagacggtggaggaaaaccagtgggtggcagtgtggggagagtgttatactcttctccagtgcacctttgggaaagc

SEQ ID NO: 9342 - DNA, 235 bp, Glycine max
  Clone ID: 701149653H1
ggcatcaattcaaaatatatcatcaattataagcatgggtttgtggaacacaacgaatgcggtgtcttgccgctttcacaagtttggtgatgaccaaaagaatctggtcttccaaggtgatgccacgtcttcttccaggggcatagaactcacaaagcgagacggtggaggaaaaccagtgggtggcagtgtggggagagtgttatactcttctccagtgcacctttgggaaagc

SEQ ID NO: 9343 - DNA, 237 bp, Glycine max
  unsure (1)..(237): unsure at all n locations; Clone ID: 701149654H1
ggtgatgttccactactagtactggtactagtatatgaaacccgtgttggtgttggtcttcttccatctactcttggcatgacatgactctcagcgtttcaatcctgacctcatcatcttcgcgtgtgcgcagggaatggaggagcagacttttgtttccaaagcgagaaccgcctttcattccgcggcggcgaaagcggaggtngttctcttggatttcaaatccgatcgagatca

SEQ ID NO: 9344 - DNA, 235 bp, Glycine max
  unsure (1)..(235): unsure at all n locations; Clone ID: 701149655H1
gtatatggattcatagcaaaaattggggctggcttgtttttattgattccaagtgataattttacttgactttactcacacttggaatgatgcgtgggttgagaaagatgaacaaaaatggtatattgctttacttgctgtatcagtcggatgctncattgcagcatttacagtgtcaggaatccttttcatttggttcaacccttccggatatgattgtagcctcaatatcttc

SEQ ID NO: 9345 - DNA, 241 bp, Glycine max
  unsure (1)..(241): unsure at all n locations; Clone ID: 701149656H1
tggaagagggtgacgcaagttaaacggtatcttttcntttaggattttaccaaaagtagtcacatagtaactgaaaaaggctctggagtctggaagacttattggataaaatgtgagttattttaaattttttactactttcgtttaaggataaaanaatacattataatctttcattgatatacctcatttgtaagtaattatgggattaagtctatttgaagaaaatgtttgtattcag

SEQ ID NO: 9346 - DNA, 234 bp, Glycine max
  Clone ID: 701149657H1
aagatgagagggaacattctgagctacaacctcgggcggaatggggtgcagcgcggggatcattggtgtggacttggccaaggatattctccaggcgaaccctaataactacgcggtggtggtgagcacggagatggtggggtacaactggtaccaggggaaggacaggtctatgcttatcccgaatagcttcttccgcatggggtgttctgctgttctgctttccaaccgtcg

SEQ ID NO: 9347 - DNA, 234 bp, Glycine max
  Clone ID: 701149658H1
ggccttagtataaagtataaaccctagtaatcgtttttctcggagttagacagagagggttccctttccagtgacaggcaatagctgcaagcaactcaatctcagagcttaagcaatggcggcgaagaagcatgacgccggagacaccaaaaagagaaagcgactcaatactgaaactcacgaagctcccaaggcttcgaagctcgttgcctcaaagaagcacaaaccagactc

SEQ ID NO: 9348 - DNA, 231 bp, Glycine max
  unsure (1)..(231): unsure at all n locations; Clone ID: 701149661H1
gatacagtaattgttaaaaaacaagtgttcctcatagtattaaacttggtttggttgttcccatgncctgctggcctccgtatgggtgctttcacttcagaaaactccgtctcctctctaaatgagatggtgaaancaggaaacattgtgcagtatcgggaaaggttggacaacacccttgccttacctgatctgacaaatgaacagatactcaaaacgcttgtcaaaagt

SEQ ID NO: 9349 - DNA, 239 bp, Glycine max
  Clone ID: 701149662H1
gacagcaaagggagtgatttgggagtttgggagcgactgaactaatcattaattttgcactcgtgtttcagcttccatcaacccttccttttgcatcatttatatctcttgagaaatggcacaagaaacctttctattcacatctgaatctgtaaacgagggtcaccccgacaagctgtgcgaccagatctctgatgcagtacttgatgcgtgccttgaacaggaccctgacagcaagg

SEQ ID NO: 9350 - DNA, 238 bp, Glycine max
  Clone ID: 701149664H1
ctagacatctacaactctggaaattgaaaattaaagcttgctttactccaaaggaaaggatcatgacttcgttgaatggttcctgagttggccaattctttttctgccacttcatttccagtttttagaagtactgcaataaactccacgatctgaaataagttgcaaattggtcagagaatgaaaatgaattcaaaaatggcatcagcgctctatccttgctcaggaatatgaatgt

SEQ ID NO: 9351 - DNA, 241 bp, Glycine max
  unsure (1)..(241): unsure at all n locations; Clone ID: 701149665H1
gagtgaggaaagcataatcaaatcaacccatgggtaaccttattgcttcccatcacctttttcacctggtttagatgcagaagctcttagaaaagctttccaaggatgggggaccgatgagaaaaccgttattgcaatactgggtcatagaaatgntcatcagaggccacnaatcagaaggttatggnggaaatttaccaagaggnctcattaaaacgcctggagtctgagctctctggtg

SEQ ID NO: 9352 - DNA, 239 bp, Glycine max
  Clone ID: 701149667H1
ggagagtcagattcgcacgcattgcttcgccttcacaaacaagcagttgcagcagcaatggctcccaaacgaggtggaaaggctccggctcttgccgctaagaagaagcctgagaaggtcacgaatccgttgttcgagaagcgtccgaagcagttcggaatcggaggggcgttgcctccgaagagagacttgactaggttcgtgaagtggccaaagaatgttcaaattcagaggaagaa

SEQ ID NO: 9353 - DNA, 243 bp, Glycine max
  unsure (1)..(243): unsure at all n locations; Clone ID: 701149668H1
ggctgaacatgatgccagtgttgttgatcttgaaggtgttgctgtttcaatcacccagtggaaatgtgatgggagatctgggtgatgtttacagcacaatgctcacaagccttgatttgggtttggcttgtttctctgagaaagtttccaacttgagcaattttgtgatgcatgtggaaaccaaggnagtgtgnacttgaggccctnggaaaaagggggtccncntggtaananggntnngtt

SEQ ID NO: 9354 - DNA, 240 bp, Glycine max
  unsure (1)..(240): unsure at all n locations; Clone ID: 701149671H1
ggaggtttggtggtgtggtttagtgtcaaaatggcggcggagtagaaagcactttacctctgatgaagtacttgagagtgcgcgtggacgctcttccccgcaacactcccttgaccctcncttccaacatgttgattcgccgcttctccgaagaggttaggggttgttttctcgacaagtccgaggtcacagatcgcgtcatttcctgcgtcaaaaacttccagaaagtcgatccttcta

SEQ ID NO: 9355 - DNA, 238 bp, Glycine max
  Clone ID: 701149672H1
gactacaaatcagttttttacttgaattttctttccatcccttcctctgttcctccctagaacttgattacttgaacattccctatgacagatgaggtggttcttctggatttctggccaagtccatttgggatgagggtcaggattgcacttgctgaaaagggtatcgaatatgagtacaaagaagaggacttgaggaacaagagtcctcttctcttacaaatgaacccggttcaca

SEQ ID NO: 9356 - DNA, 242 bp, Glycine max
  Clone ID: 701149673H1
catacctgaaggactaaatctgccacaagacctgagctcaaagatctgttgaagagatgttttgaggattttggagcatttcactatctaattgctttgctgaatttgtgaatgactaatgttctcgaattctgcagttgcaaggttgcggaatcatgcaggggcaacttgttttacattgagcgttagtaacagagatgctgttagagaacagatacgctcacaattggaagatatgctga

SEQ ID NO: 9357 - DNA, 238 bp, Glycine max
  Clone ID: 701149674H1
gagataaatttggatcgtgaacggagaaatagggaatgggctgaacttactaactgtattgaggaactcgaggttcaaagggataagctccaaaagcagagagaactgttgcatgctgatagaattgaaatttatgctcagactgaagaattgaaaaaactagaagatttgaaagctgtctctgatgataatgctatcactgaaatgcttaaatctgatatggagtctaaccaaaaga

SEQ ID NO: 9358 - DNA, 233 bp, Glycine max
  Clone ID: 701149675H1
ggatacatagtgggtccccctctctactgggcattttcgttgcagtgaacaaccactcttcatcttctacttgtgcaccctgcatctgcgattgctcttcacaacccattctttctattccacaaggacttagcaacacttccttcggagattgtgcaaagcctgacccagaagtgagtggagacactgaaaagaattttgctgagctattgacagaagaactcaagcttcag

SEQ ID NO: 9359 - DNA, 231 bp, Glycine max
  Clone ID: 701149676H1
cttgactcacttggcaggccaagcaatgctgagtaacttgttgcccccatcatttatttgtgggtgctgtgatgaaaatagaaactgagatgatatcatagcctaattatgcttccatagaaatggaagactacgaaatgaagaagcaaacaatcaatggagataataagtggaagaatgacaaaggctagtgatttgaaatgaagatgatgccaccacgtgaagtggtaa

SEQ ID NO: 9360 - DNA, 231 bp, Glycine max
  unsure (1)..(231): unsure at all n locations; Clone ID: 701149677H1
tgctgcgtccactcattcattactcactatactcatacggggtttctaaatcatatgccaaattagtagacaccctatgaattgttgttctgccatggcgtcccttctcaaatcaccttcctttctctctcctnngaaccaaaagttgaattatgtaagcttttctcccatgaccacaaacctgcaatccaaattttgtcgtgctagtgtaagaaatggggagatggcatg

SEQ ID NO: 9361 - DNA, 230 bp, Glycine max
  Clone ID: 701149678H1
gagagtggtggagtgtgcagaagagcgtcgcagtcgcaaccctaatcagaagaagcgcacttcaagcgagtgacagccaccagccatgggtcgtatgcacagccgcggtaagggtatatcctcttctgctttgccctacaaaaggacacctcctagctggctcaagatctcttcgcaagatgtcgaagaaaatatctgcaagtttgcgaagaaaggtttgaccccgtctc

SEQ ID NO: 9362 - DNA, 231 bp, Glycine max
  Clone ID: 701149679H1
caaggaaactcttcagaatttatgtttggagttagcaaccatgggtgatctccaaacttgttgagcgtccacaaaactgtacgcttgctccagaatcaagcaaacaaattaaagccaacattaaggtttcatcaactgaaacaggagttatatttggtaacatagtctatgagacatcttctaatgttcttgagagaacagttattgttctaaatgatatccatattgaca

SEQ ID NO: 9363 - DNA, 232 bp, Glycine max
  Clone ID: 701149680H1
ttctacaatacttattagatatctgtttctaaggattaaaatgtatgtagattagaagtcttgagattccaacacagggattttttgatgtagcataatcattatcttatcctatatattcagtattttttggatcaaaagtattagtattgagcattgttgcaaaggttttaaattgtggttgactggttgcaattacaatttcagacaaaccttgatattgtggaaaatt

SEQ ID NO: 9364 - DNA, 239 bp, Glycine max
  unsure (1)..(239): unsure at all n locations; Clone ID: 701149681H1
ggggggaaggagtgaatgatggtttttctggacctgggaccnaatgattcacttattcctggtcttattgatgatgtagccttgaattgtcttgcttgggttagtggatctgattatgccgtgctatcgtgtattaataaaaggttcaataaactgancatantgggnatctatatgggtngaggaaaccattggggggctttgggaccntttggggaattggtttggtanacccaaag

SEQ ID NO: 9365 - DNA, 236 bp, Glycine max
  Clone ID: 701149682H1
ggatgcacaagtttgttgagatagctagaagcaataagatggaaaatgaaagtggcttgttttgtttgttgctacagttttggtagcatatgaatgccatggctcagactaccagaaattccctctccaaatgaaaactgggtttggtgggcaatacagcaatgaggtggcatgtgccagttggaggcttggcgtggaagcaaacaacgtagtcaagtggcaaactgttcctgcag

SEQ ID NO: 9366 - DNA, 238 bp, Glycine max
  unsure (1)..(238): unsure at all n locations; Clone ID: 701149683H1
tttactgggattggagttggcgctgcttactatggtctaagggcctgttgtggagttcatgacttttaacttctccatgcaggcaatagatcatattattaactctgccgcaaaatcaaactacatgtctgctgggcaaatatctgtgcctattgtctttagaggacccaatggtgccgctgctggagttggtgctcagcattctcaatgttangcatcttggtatggttcatgccct

SEQ ID NO: 9367 - DNA, 240 bp, Glycine max
  unsure (1)..(240): unsure at all n locations; Clone ID: 701149684H1
anggagggacctattatcccattactgtcaagaagcacntcaaggggcncaggagattgtgctcagtgcaaattgccctgcatatatcttgttgacagtggaggagcttttcttcccaagcaagctgaagtgtttccggacagagagaacttcggtaganangctctacaatcaggctgtaatgtctgctcaagggattcctcaaattgcattggtgttgggctcttgcactgctggtgg

SEQ ID NO: 9368 - DNA, 257 bp, Glycine max
  unsure (1)..(257): unsure at all n locations; Clone ID: 701149686H1
cgaatagctccacgcttctcgttccttaaattcctcttcccaagctctctccctnctctctctggggtgttttcccttcttgtccattcatatatatcacaatttcaactgcaaattttgaacaaaacttaattaagaaatccttctccggagccatggcagatctcaagtccacattctngaacgtctattctgttctcaaatctgaactcctccacgaccctgcttttgagttctccgatgatgctcgtaattgg

SEQ ID NO: 9369 - DNA, 237 bp, Glycine max
  Clone ID: 701149687H1
ggttgacaaagggagcgtgttgtacaagggggcaatttttttccaaaacctttttctctctcgcaacctcacctcttcctccttcaatctctttcggaatttcccaaaatccttagtgggaggaagagatggttctgactcagaagcttcacgaagccttcaaaggcaccgtcgagaggattactggcccccgaaccgtttccgccttcaaagaaaaaggagttctcagtgtctctg

SEQ ID NO: 9370 - DNA, 138 bp, Glycine max
  Clone ID: 701149688H1
attcccttcacttatgtgtcaagcaacttctttgctggttacttcctgcccaacttgtcacagcctggagccacagctgcccccagagacagagttattatcctaggagatggaaaccccaaagctgtttttaacaag

SEQ ID NO: 9371 - DNA, 242 bp, Glycine max
  Clone ID: 701149689H1
gaaggcagtcggagacaggccaagtatgctgtgcatgctctgggctgcaataacaaaggatgatggcctcaagtccctttctgttctgtacaagagacttgtagatatgctggaggagaaaacacatctacctgcagtattgcagtctctggggtgtatagcacagacggcaatgcctatatttgaaactagagagagtgaaattgaagaatttataataaacaagattctgaaaagtgata

SEQ ID NO: 9372 - DNA, 232 bp, Glycine max
  Clone ID: 701149690H1
gagggacacaaaattaaccctaagcctttccagggcacaggggggtgctcactacccagaaagaggaagggttccgtttttatccaaaaggattcctttccttctttctcgataatctattcatttaattgggtcaaattaatattaattaacattccttgaaaaaattaacaatgaggaagttgtgccctaattttgacaatgaagatgggttggataccgtccttgaggt

SEQ ID NO: 9373 - DNA, 229 bp, Glycine max
  Clone ID: 701149692H1
gggtataaacactatacatttatactgatcaaagaaactcaaaaaaatggtgtcctacttggtgcccctaaggcttgcaaattgggtcatgaaccaagtgcttgttaaatcatgttatggattttctaggaaacttaaaagccttgggtttcgttggggtgatctttcatccaaacccttgcatcaaccctcccctttccctaatattaccaagtgcgatttggagggt

SEQ ID NO: 9374 - DNA, 235 bp, Glycine max
  unsure (1)..(235): unsure at all n locations; Clone ID: 701149693H1
gacttgtaataattcttataacacaacacaaccccatgggccaccaccttccgcattcctcctccttcncctcctcctgctgctccacctcgccatcgccgctcacggcatcggcatcaactacggcacgctcggcgacaaccttccaccgcccgcggcggtggcgaacttcctgaagacgaagacgaccatcgaccgcgtgaagctctacgacgtgaacccggacatcctgcgg

SEQ ID NO: 9375 - DNA, 222 bp, Glycine max
  unsure (1)..(222): unsure at all n locations; Clone ID: 701149694H1
agaggactnccaaaaaattctgggganaactttggtagggtcataaaatttaggttgccatgaagaccactgccaatcataagcgcattacaccactattgaggttttacacttccaaaagtgaggaggagcttaaaagcctagatgattatgttgaaaatatgggtgaaaaccaaaaggctatcttttatctagcaactgacagcttgaagagtgcaaaga

SEQ ID NO: 9376 - DNA, 231 bp, Glycine max
  Clone ID: 701149695H1
gattcttaattgcattggttggtgaaatcattttcttcaattattattattttttcaatatctttattttcaaatcaatttttgtataattcaatctctctttctctttaattattattatgggagatgttactctgttttgtggcatctaagatatttaatcactgtggtggctgttcccgtagatctagcgttcatgaaattcggctttgttatcttcatatcttgctg

SEQ ID NO: 9377 - DNA, 231 bp, Glycine max
  Clone ID: 701149696H1
ggatgcacaagtttgttgagatagctagaagcaataagatgaaaatgaagtgcttgttttgtttgttgctacagttttggtagcatatgaatgccatggctcagactaccagaagttccctctccaaatgaaaactgggtttggtgggcaatacagcaatgaggtggcatgtgccagttggaggcttggcgtggaagcaaacaacgtagtcaagtggcaaactgttcctgc

SEQ ID NO: 9378 - DNA, 123 bp, Glycine max
  Clone ID: 701149701H1
cgtcaatacattttcccagtccgttttatggcattccgttttttgggggctggaattggtaaggattaagggataggaaactaccaaaaactggtaagataaaaaaacatctctttgggtccg

SEQ ID NO: 9379 - DNA, 254 bp, Glycine max
  unsure (1)..(254): unsure at all n locations; Clone ID: 701149702H1
gggagcgaacagaaaagaggacacagcgcagagccgccttcaacatctgaaacagactctatccctaatccctatcttcttctctgctctctccgcacgctttggctcctctgatctcaggtgttgttggcttggtatccgtgcaagttctgctgtagccgatttgaaggtgaaggtgtcancttaaagtttctgtcatgcntgaatcaaggnaantatccatttgggagcaactgagctgcttggagagtatt

SEQ ID NO: 9380 - DNA, 199 bp, Glycine max
  unsure (1)..(199): unsure at all n locations; Clone ID: 701149704H1
acataggacattattgtaataataatttgaattttctctaattttctctctcaaagaacaactttgaactctgacagctctgaactgtcccatagtgttggcattggcaactctctcacttcacacacacacctttcttcantcctaccaccatacttcangaagcctttttaaggactaaagttaggngagaaacctt

SEQ ID NO: 9381 - DNA, 259 bp, Glycine max
  unsure (1)..(259): unsure at all n locations; Clone ID: 701149706H1
gaccaccactactaccaagtgaaaaagcaactaagcatagtgtgtaagaaagggagaaaaacaagtgctgtgtagagagaaaaatggctaggtggtgcatgatcttggtggttcttgctcttgccgtggttgcaagtgccagaaacatgcccaatgacgctggtttgnaagaaccagaagaacttccttgggtatgggttttcgggagttggcaacaatggcnttccctttggtggagtgggttctgggttngatggna

SEQ ID NO: 9382 - DNA, 247 bp, Glycine max
  unsure (1)..(247): unsure at all n locations; Clone ID: 701149707H1
ggggaagctgcagtgtggataggcttgaggtgttcgaagttggaccatgcaaagatggttaccaaatgggtctcttaatcggccaaagattctccgaaaccataaggagtagagtggcctcagacctcattctacaaaaccagcttcgaccctttgcccncctcccctcattcacagtcacttctcaaaccacttttttataacannggccaccaaattcccaagatattgcttatcaacttaagga

SEQ ID NO: 9383 - DNA, 249 bp, Glycine max
  unsure (1)..(249): unsure at all n locations; Clone ID: 701149708H1
gactgaacaacgacttcatcttcactcttccttcaaatttccaacaagaaagtttgttcaactgtaccctttattggcgttagtatgctacctactggagcaaaagagacccaattacgtgagaacaacagccagaaggtccatcctcaaccaatggaagaggccatgaatcagaatccagaagcaatggaaaccctaatatctaaagtttttacaantanncccttccttgaagtcagcttatatccc

SEQ ID NO: 9384 - DNA, 248 bp, Glycine max
  Clone ID: 701149709H1
gaaggaagagtgagcgtgaaagatgccttgggtgaggctttcagagtctccaaggctcgacgttgctattgacatgggtaatccatttctcaatctcactgttgatggtttccttaagatcggagctgtcgcagccacgcgatcagctgctgaagatacttatcatattatccaaaaggggaatatctcaagtcgtgatttcgagaaaactttgaagaagatgtgtaaagaaggtgtatattggggaa

SEQ ID NO: 9385 - DNA, 199 bp, Glycine max
  Clone ID: 701149712H1
tgtgattggcgcgggcgccgacgatgccaaacgcgacgacgacagggctcccaagtcggaatcctgcaataaccccttccaattggtgaaggtggagagctgggtggacggtgaggaagggcatgtccacaatggcgtcagtgccagatttgggtctgtgttgccggacaaacctgacaagagtgtcagaactcccgca

SEQ ID NO: 9386 - DNA, 246 bp, Glycine max
  unsure (1)..(246): unsure at all n locations; Clone ID: 701149713H1
aaagatgccatctcatgaattatcccagccactggctgaagaaattagtcaggttcttggcaaatctgtgagtaggttgcacaaacaacacagctgccctgaaaatttatcagaactagacagcattcctatcaactatgaaganaaaaggtgcagcaaaaatcccgctggaactcgcttggaaagaacaaggagcatccctactgaagttgaagtttcctaaatgcaactgatcctgaaagtcaa

SEQ ID NO: 9387 - DNA, 231 bp, Glycine max
  unsure (1)..(231): unsure at all n locations; Clone ID: 701149715H1
ggcacaagtttgtangagatagctagaagcaataacgatgaaaatgaaagtgcttgttttgtttgttgctacagttttggtagcatatgaatgccatggctcagactaccagaagttccctctccaaatgaaaactgggtttggtgggcaatacagcaatgaggtggcatgtgccagttggaggcttggcgtggaagcaaacaacgtagtcaagtggcaaactgttcctgc

SEQ ID NO: 9388 - DNA, 249 bp, Glycine max
  unsure (1)..(249): unsure at all n locations; Clone ID: 701149717H1
ggatcaagacttgtgaatgatggtgaaacatcaaattcagtaagcaatgggatgagtgcaaagcatatcctagagtttgaggatgtcgaagcccaacagttgaaacaggaaaaggaggttttgtcatctaatcttacaaatggatctattacagacnncttgacacaattggccgcaactctattgaggaagaagctgggacctactaaggggatctgtagtttattattgtggcatccattggaacta

SEQ ID NO: 9389 - DNA, 57 bp, Glycine max
  unsure (1)..(57): unsure at all n locations; Clone ID: 701149718H1
actgttgaaccaaaaaacnaancnaaaaccaaaanaaacaagggggncccccttttt

SEQ ID NO: 9390 - DNA, 246 bp, Glycine max
  unsure (1)..(246): unsure at all n locations; Clone ID: 701149719H1
ggagttctaatatatcattcaaaagtttttaganatgttgtcaccccttcttctatttctatgcctaantcttcctttgtntttgtngtccttcntcaaataccgtaaaacctncaagaatccaccacttccaccaggtcctagaggcctncccataatagggaatcttcatcaactagatagncnttctctncctgagcagctanggncatctaccgggnngacnncgnccangattacccctca

SEQ ID NO: 9391 - DNA, 245 bp, Glycine max
  unsure (1)..(245): unsure at all n locations; Clone ID: 701149720H1
ggaagaagatcggacctggcatatacaacttgactacagtggaggaggctcaacgcattttgaccaacgaaactaaagttgttttgggcttcctcaactctttagtnggtcctgagagtnaggagcttgcngcngcttcaaggctnaagganaaaaggaaaaaancaaangtgaaanccnanatggngnaacgtnccanatgnnnaanaagttntngagcgnccannatngccccncannaagaa

SEQ ID NO: 9392 - DNA, 246 bp, Glycine max
  unsure (1)..(246): unsure at all n locations; Clone ID: 701149721H1
gccgtgaatgcgacaagctttgagtaagggttctctactncccattccttgtgcggcttgtcttatgacaccattttttttatatatagttgagngatcantatttattctaaagtgtccacttgataactaatactgcctcaaattttattntacctttttatcggtttcgaattcaaactccataggcatctgaaaaatngacaaaattanggctgttgtcgcaaaacatgcttcattaaacac

SEQ ID NO: 9393 - DNA, 243 bp, Glycine max
  unsure (1)..(243): unsure at all n locations; Clone ID: 701149722H1
atattcaattttacataantaaagataaaatcaacgatagctatagttttaaaattaaccatcgatttagttgcaactggaacacaggtttctttcaatgaaataatattaatatcaatttaataagctggtaatgtaaaatactgctaatgttaatatgaagtttggatggtctattggcagaagatgccaagtggtgtccnnnttcctctgaagggnaaaccggttttgggtttnaaggaa

SEQ ID NO: 9394 - DNA, 246 bp, Glycine max
  unsure (1)..(246): unsure at all n locations; Clone ID: 701149723H1
ggatataatgaaagtgaagtgagttttgtgcggggagcgagaagcgagaagggagtgaggtttggagaagagaganatgggaaaggagaagnagaggtatcttctgaaaacggaaccgtcggagtggtcgtgggaggaccaggcagcaaacggaggcacnancaaatgggatngggtgaagaacaagcaggcccagaaatacctcaagtccatgtccatcaacgacctctgcttcttctaccactc

SEQ ID NO: 9395 - DNA, 242 bp, Glycine max
  unsure (1)..(242): unsure at all n locations; Clone ID: 701149724H1
ggagtgagagtgagtgagtggttctcttgcagcaacaaggtttagtgacaccaaacagacgggaaatgggtcgtggggtcagtgctggtggtggacagagttccttggattatctctttggcagtggggtactgccagcagtgcaaannanntgaanactcaaaatgcaagtgctccttcaccaccggttgataagcaaagtccagcaccagcaccagcancagcacctgcacctgcagcag

SEQ ID NO: 9396 - DNA, 231 bp, Glycine max
  Clone ID: 701149725H1
gatccatactcaaaatacaaaaatggagagagtagctaaggtgttggtgatgttgagcatggtggtgttggtgcttgcatcaaatgctgaagggggacgattacttgaggaagagaatgtggatcagccccagaccttccttggatcaggtggaggccttggtgggatatttccaagcccaagcccaggcttcagcttcaccggcgtgggctttggcccatctgggttttg

SEQ ID NO: 9397 - DNA, 242 bp, Glycine max
  Clone ID: 701149726H1
ggttaccgttatcatgcaagctgataatggggcctctgaagttcttgttccgttattataaaactgagtccttcactctctctcgaaccagctcacagaaacaatgatctcctacgccgacatgctcaagggatcacatggatgtcaacaacttcaactatcctccattgtcagagatgtaaactacagctgtggctcgtgtggttatgagctgaacttgaactccagcaaccgcaacactt

SEQ ID NO: 9398 - DNA, 242 bp, Glycine max
  Clone ID: 701149729H1
gggacagattagttttcaacaagataaaagaaaagcttggaggacgagttcggtttatggcatcaggtgcctcacctttatcacctgatatcatggaatttttaaagatttgctttggttgtcgagtgactgaaggatacggaatgacagagagtacttgtgttataagctgcatcgatgagggtgacaaacttggtggtcatgtaggctctcctaatctagcctgtgagataaaactagtg

SEQ ID NO: 9399 - DNA, 253 bp, Glycine max
  unsure (1)..(253): unsure at all n locations; Clone ID: 701149730H1
atctatattgataatcatttgtacaatattaagtgggcaaaaacaaacttctgtaacatttgtagtcctagcattttgtaaaagtaaattcaaagtcatttcacacagtttactaaagcaataacaaataaaacttagtagcatattgtgtctattttatttgttttcttctgattttaaatcnctgctattacatttctaaaaaccantangggcacctatcaangtgcttcanttncttcgtaaaaggaag

SEQ ID NO: 9400 - DNA, 85 bp, Glycine max
  unsure (1)..(85): unsure at all n locations; Clone ID: 701149731H1
tggccacgactggggcccaaaccctggtggcttccctccccctacatggtaantnaatnatcaancatgcactcttcttgtggat

SEQ ID NO: 9401 - DNA, 257 bp, Glycine max
  unsure (1)..(257): unsure at all n locations; Clone ID: 701149732H1
ggncctctcacgtttttacacacgtagacacatancacattcataattcattgctatcaccacacaagcctagctcctcatatcataaccactncatttatcttccctctccannnnnnnnnnnnnnnnnnnnnntgggcgcgcgcacgtgctaggaaccatcgattcgagaatgggcaacgactgtgtgccgtcgacggcgggcggcggaggtcatggccggtngtggccgttgagctcatgaagcctccagnngg

SEQ ID NO: 9402 - DNA, 235 bp, Glycine max
  unsure (1)..(235): unsure at all n locations; Clone ID: 701149734H1
gataggcaaagaacacatagaatgtaattccaatattcgaatacatgatacaaaagagataatacaacccacatattattttaggatgagaattaacagataaaatagctaactataacctaacaattgaattacaatttngttacaactttctatcngattaacaattaacaacctgaatggncctngggttggcatctcgatccaacccttggacatgttggcctttgtttga

SEQ ID NO: 9403 - DNA, 226 bp, Glycine max
  unsure (1)..(226): unsure at all n locations; Clone ID: 701149736H1
ggacacgcaaaccacacactctactctctctgctctctacctcttgaagccctcaaaggctcaaacacaaacactaacactaacactagcattcactcaagagatcantaatgggatctggggccggcaatttcctcaaggtgcttctcaaaaatttcaatgtcctnntgggcctgcataatntggttatccccctatnggcttcaattagggcattgagagcaat

SEQ ID NO: 9404 - DNA, 222 bp, Glycine max
  unsure (1)..(222): unsure at all n locations; Clone ID: 701149737H1
ggacagcatatataacaataatctattttatactatacctacattttgataattttctttgtagttgatagccatggctacccgtggaaagcttgaggttgacattgatctcaagtccaacgcagacaagtactggcaaacccttaggaattctactgaaatattccctaaggccttcccacatgattacaaaagcattgaggttcttgagggtnatggcnt

SEQ ID NO: 9405 - DNA, 242 bp, Glycine max
  unsure (1)..(242): unsure at all n locations; Clone ID: 701149739H1
tacggtgtttatcttaattgtagtggaatttaatctctttgaaagaagctatccataagtagtttgctggctttcttgaccaatgactataatttggntttgctgtatttagttgcaattgaatttacaaatattgcttagtgtgctctgagtntangaantacctggagagatcaatttgggtaaatgatactatatttttcaaaagctttctcatgatgttgacaaaaaagcaattattt

SEQ ID NO: 9406 - DNA, 239 bp, Glycine max
  unsure (1)..(239): unsure at all n locations; Clone ID: 701149740H1
ggtgtgtgaagcaaacggttaaaggattgtgtttgtgtctgttggctatagctatgcactaaagttgtgattttgaaggactaatacaacctaaattataagggttggtttctgggggtttctgagaattcatatttgaataggtgaagattnaaaaaatggttgtgagaaaaagcatggggcgggcaaagtcactgcttttgctgctcatgnnnctatatttcctttgccacttataa

SEQ ID NO: 9407 - DNA, 243 bp, Glycine max
  Clone ID: 701149741H1
gagagaagggaagatgatgatggctcattctcgttatcttcttcacattccatccgttatcatctttatctgcatctctcacttccccgcctcgctcgcttcttcctgttcggacattacaacctaagacgctgtcgtgtcgtgtcccttcatttccaacacgcaccccgtggcacttcaagcctcttcattttgctctctctggggcactctcacttgggttattattcggaggaattggcg

SEQ ID NO: 9408 - DNA, 207 bp, Glycine max
  unsure (1)..(207): unsure at all n locations; Clone ID: 701149742H1
ggttggatggatgttcattctccaacttgataccgcgttcgctcactctctactcaacttcaattaatcaaatccctcactttctctctcttgtcttcaaatctcaattctattttggaaaatcagaatcaaagacagttaaaaatacagaacaaacatctcactcaacatcaacacttcagatctacgtttnccactctcacaaca

SEQ ID NO: 9409 - DNA, 243 bp, Glycine max
  Clone ID: 701149743H1
gggtgcgaccaaatattcccgttcctcgggccttgactattgagccatatattcgcattcgcgcgtttccttcggctcttgcttccgtgacttgagaaaagagaattagggtcacgagggtttcatcctgcggcatcagacatgggaggaggcaatgggcaaaaggcaaagatggctcgcgagaagaacatcgagaagcagaaggccgcctcaaagggaagccagctggattcaaacaagaaa

SEQ ID NO: 9410 - DNA, 221 bp, Glycine max
  unsure (1)..(221): unsure at all n locations; Clone ID: 701149744H1
gctctctctcctttaangtaaaatgaaagtaaggangtttaaatctagaatctaatgcaacctaaccaaatctttaacaactagactctctctttctttttggccttcagtaattggaaaattatttgagaagatacaccataatcctttcaatgtataanatttgttattaagatggatagaggtttggacaaaattcaatttgcatgatttccatatat

SEQ ID NO: 9411 - DNA, 229 bp, Glycine max
  unsure (1)..(229): unsure at all n locations; Clone ID: 701149745H1
gggactttggtggcatgatcantcatccttgtttactgcaccnccggtatttcaggaggacacataaacccggcggtgacattcgggttgttcctaggacgcgaggtgtcgttgataagggcgttgttgtacatggtggcacagtgtgccggtgctatctgtggtactggattggccaaggggttccaaaaagcatactacaacaggtatggaggtggtgccactctgt

SEQ ID NO: 9412 - DNA, 244 bp, Glycine max
  unsure (1)..(244): unsure at all n locations; Clone ID: 701149746H1
gggtcgtgtaacaggaattgacggaggcattcgaaatcggtgaagatggttgctatgaggtttcatcagtaccaggtggtgggaagggctcttcctaccgaatccgatgagcatcctaagatctaccgcatgaaactctgggcaactaacgaggtccggccaaatccaagttctggtatttttgagaaaattgaagaagggtaagaaaagcnatgggcnagtgctanccctaaatgagattttt

SEQ ID NO: 9413 - DNA, 250 bp, Glycine max
  unsure (1)..(250): unsure at all n locations; Clone ID: 701149747H1
gggactaaagatcagcaaagacttaattgaaattngtggtgatgctctaaaaaccaacatcaccacactaggacccttggtgttacccttttctgagcagcttctcttctttagcacccttgtgtggaggcacttatttggcagcaaaaatgatgggaattcaccctcaatgaagacgccatacattccggactacaaactggcttttgagcactttngtgttcatgctgcaagcaagaccattcttgat

SEQ ID NO: 9414 - DNA, 252 bp, Glycine max
  unsure (1)..(252): unsure at all n locations; Clone ID: 701149748H1
tcacattatcaatgttattcgttgcatttaagggaangaaaaagaacacaagaaaaattgaaaaacnaacatgagaaattgtgtttcaagttcaagataaatgantaagattagtatggtataatatgattgatgcataatcatgatctttaattatnattatactcttaaataaattttttatntataacanannggatatgnngnctcgcgacttnncaaataagggggaagtgctcatgaagggtgcta

SEQ ID NO: 9415 - DNA, 248 bp, Glycine max
  unsure (1)..(248): unsure at all n locations; Clone ID: 701149749H1
aggcccctttctttaaagcagtaatggcctgtcaataagatcaataaaagacttcagccagcatatataacacatctgaagataaaagaaaacttataacatattataggaatcaataaataagcacagttcatggataacattcaactggcaagcaccaagagcagctactaaagtctaaaaattcaacaacatactgtccatnagtccatttaatagtaacagtataatgcattgcctgtattccg

SEQ ID NO: 9416 - DNA, 240 bp, Glycine max
  unsure (1)..(240): unsure at all n locations; Clone ID: 701149751H1
tcactatttctgaaagacagctcagtggtgcttgatgagttctttcttttcacatatcatggagggaactgcttccatgttcaaatttttggtgggaatggattggngaggctatgcctcgaagaaacaagacaagaacaagctgccatccctcaattttttgatctgccttcagcaacaatgcctcactcttgagggtatgagataagnanncncgacaagaanagcttccatcccagt

SEQ ID NO: 9417 - DNA, 243 bp, Glycine max
  unsure (1)..(243): unsure at all n locations; Clone ID: 701149753H1
ggaggaagaggaaaagaggattagagggtcgccacgtttagcaataaccaaaccctctctactcttttttcttctccttctcttcgctagggttttagcttcttcctcttcacttcgttctttttcgcctctacaatgagcaacgacaaggacacattcaacgtcgccgancccacttctgctctcaacgaggacaatagagcagaccttgtcaatgctcttaagagcaagatacagatttgg

SEQ ID NO: 9418 - DNA, 243 bp, Glycine max
  unsure (1)..(243): unsure at all n locations; Clone ID: 701149754H1
aaagagacccggaaagggtgggaaccgcttttggaaatccattgggcttggatttaagactcccagggaagccatcgaaggaacctacattgacaagaagtgccccttcactggcaatgtttccatccgtggccgtatcttggctggaacatgtcacagtgctaagatgaacaggactattantgttaggagggaatatcntcnctttattcnagaataccagaggtacgnnaaagggncncc

SEQ ID NO: 9419 - DNA, 241 bp, Glycine max
  unsure (1)..(241): unsure at all n locations; Clone ID: 701149755H1
tatgacattgaatcatctgccatatttatgtttctttaatttctcttttatcacgcagtagttcatgcatccttttcattgggaaaatactaaaaatcatctgccatattagggtttaagtgttgtgtgacttgcgcccttctttttgcaccgtgtcacgatgcgacaaggaagagcagcaattattggattttacgtgtaaaacagtgaacnngacctggcaatacagtgctcaacgcaa

SEQ ID NO: 9420 - DNA, 240 bp, Glycine max
  unsure (1)..(240): unsure at all n locations; Clone ID: 701149756H1
ggcatcaattcaaaatatatcatcaattataagcatgggtttgtggaacacaacgaatgcagtgtcttgccgctttcacaagtttggtgatgaccaaaagaatctggtcttccaaggtgatgccacgtcttcttccaggggcatagaactcanaaagttagacggtggaggaaaaccagtgggtggcagtgtggggannnttncatactcttctccagtgcacctttgggaaagctctac

SEQ ID NO: 9421 - DNA, 239 bp, Glycine max
  unsure (1)..(239): unsure at all n locations; Clone ID: 701149757H1
ggggaagatgaagatgaagggggtgttgtgggttgtagttgtatcagtggtggttgcagcatggattcccctttcacactgttcaaagaaaccggtgggggtgngctagaaaggaggacattccgncacatcaagtntcaagtntgtnatangctcgctaaaganttgtatcancnggttcanaacangcnagctgagatcgctcccaaaaagatctcggagtaccaaatcattgagat

SEQ ID NO: 9422 - DNA, 245 bp, Glycine max
  Clone ID: 701149758H1
ggcatcaattcaaaatatatcatcaattataagcatgggtttgtggaacacaacgaatgcagtgtcttgccgctttcacaagtttggtgatgaccaaaagaatctggtcttccaaggtgatgccacgtcttcttccaggggcatagaactcacaaagttagacggtggaggaaaaccagtgggtggcagtgtggggagagtgttatactcttctccagtgcacctttgggaaagctctacagtgg

SEQ ID NO: 9423 - DNA, 242 bp, Glycine max
  Clone ID: 701149760H1
gactacaaatcagttttctacttgaatcttcgttatccttctttttttctccttgaacttcgaatattcactatggcagatgaggtggttctgctagatttctggccaagtccatttgggatgagggtcaggattgcacttgctgaaaagggtatcaaatatgagtccaaagaagaggacttgcagaacaagagcccttgctcctcaaaatgaacccggttcacaagaaaatcccggttctc

SEQ ID NO: 9424 - DNA, 244 bp, Glycine max
  Clone ID: 701149761H1
gctttggaagaggagtgaagcagcagaggggaggagcggcattaaaaatgcagatcttcgtgaaaaccctaacggggaagaccataaccctcgaggtcgaaagcagcgacaccattgacaatgtcaaggctaagattcaagacaaggaaggcatccctccggatcagcagcgtttgattttcgccggaaagcaacttgaagatggaaggaccttggccgatacaactccagaaggatccaccct

SEQ ID NO: 9425 - DNA, 247 bp, Glycine max
  unsure (1)..(247): unsure at all n locations; Clone ID: 701149762H1
ccatcatgaaatgtgatgttgatattagaaaggatctgtatggaaacatcgtgcttagtggagggtctactatgtttccgggaattgctgatcgtatgagcaaggaaattggtgctcttgcacccagcagcatgaaaatcaaggtggttgcacctcctgagagaaagtaacagtgtctggattggtggntctatcttggcatcacttagcaccttccaacagatgtggatctctaagggcgaatatg

SEQ ID NO: 9426 - DNA, 249 bp, Glycine max
  unsure (1)..(249): unsure at all n locations; Clone ID: 701149763H1
ggactctttcttttctttctaacaagcaccgcctccactaatggctatgagatcgtgggtgagtcgangatccgtgactcgtttgatggactcagcaaatcgaggggctttcagtcgcttcttcagcgacaagggtcgcgttctcagcgaggaggaacaggccaaagaaaacgtctacatccagaaatgggaganggagnggttggagaaacagaagcaacaggctgagaagaccaaggcagacaaggg

SEQ ID NO: 9427 - DNA, 245 bp, Glycine max
  unsure (1)..(245): unsure at all n locations; Clone ID: 701149764H1
aacgcgttagatcctgatagaccanagaatgncaagggnaactatcctcactgagaccgtccaaatgctaaaggncttaaccgctgaagttaataggcttaaaacagagcataaaacactttctgaagagtcacgcgaactaatgcaaganaagaatgaactcagagnagagangacatctcttaaatctgntatagaaaatcttaatgtgcatatcagcagagagtcagatcatgtccccgggg

SEQ ID NO: 9428 - DNA, 217 bp, Glycine max
  unsure (1)..(217): unsure at all n locations; Clone ID: 701149766H1
cccttagccaacacaaccattcatggccacctctggctattcagcaatcngcattcactggtcaaactgctctgaagcagctcaatgagttcgtccgnaagaccggtggcgccggnaaaggtcgcactaanatgnggcggaacngtcaanagtggncctnagagncttncggatgggcccgaccgtcccnangnncttgggnccattctcggagcaa

SEQ ID NO: 9429 - DNA, 245 bp, Glycine max
  unsure (1)..(245): unsure at all n locations; Clone ID: 701149767H1
gacggtaactgaaatctcgcaacgttatcactaatgttattgttgctgcgctacgtaagacacgagagaagggaagagaaaagctattgtgatttgtgagtgatatgagtatgtctattatgcatgcaatgtcaatcagaagcagcgctttcttttgctttcaaataaattgctccganncaaagccaggccgtggttttggagaaaacactaacgtnaacaggattaagaccaacaaatctgac

SEQ ID NO: 9430 - DNA, 239 bp, Glycine max
  unsure (1)..(239): unsure at all n locations; Clone ID: 701149768H1
ggaataccatgcagagtggattaatatatggaaaaacaaacataatgatgttttagctgggcaatgggttgaaggaatagtgacacatacaccagtgtacatggaatggtataggaaaaacactactttgttcttgtctgttgcacaacaactncatgatcccacgcacaacattacccaaaatgttgcagggtcagtgttgaccaaaaccntttnaattccgcatcctcngtcaatgt

SEQ ID NO: 9431 - DNA, 212 bp, Glycine max
  unsure (1)..(212): unsure at all n locations; Clone ID: 701149769H1
gacagctattcctcttaagcttgctactgagtttccacactgcataccttaggtcttccgaattcgaagttaatttgcaagatggctaaggaaaaggctcagatcaacattgtggtggttggtcatgtggaccctgaggaggtaaccaccattaacgagnngaagacgcctgttgtgganaaagaagctccagggcatgccatatganggcc

SEQ ID NO: 9432 - DNA, 238 bp, Glycine max
  Clone ID: 701149773H1
gtccagccactttctcctatgtaagatctacgggatataaaatgatgcttcgtgttcataatttctcacccatttgccacaaaactttaatgaaccatgtaagtccaatttcttgtttaaatttatattacacaaacacgctcacattctctcttatagatgttaatattcgtcggagatcgaattcaactattggaattcttctatgaaataggcatcttttatttatttttacatt

SEQ ID NO: 9433 - DNA, 237 bp, Glycine max
  Clone ID: 701149774H1
ggcacaagtgagtttgttgatcgagataactagaaacagtgtgatgaaaatgaaggtccttgttttcttcgttgccacaattttggtagcatggcaatgccatgcgtacgatatgttccctctccgaatgaacactggctatggtgcccgtactccggaggtgaaatgcgcaagttggaggcttgctgtggaagcacacaacatctttggctttgagaccattcctgaagagtgcgt

SEQ ID NO: 9434 - DNA, 241 bp, Glycine max
  Clone ID: 701149775H1
ggaagatgcccaaaaatgctcacgctcattttatactcggcttgatgtaccaaagattaagccaacctcaaaaggctgtgttagcatatgagaaggcagaagagatcttgctgaggcctgaggctgagattgacaggcctgaattgctttctttagttcagattcaccatgcacagtgcctgatactagaaagttcatctgaaaatagttcagataaagaacttgaacctgatgaacttga

SEQ ID NO: 9435 - DNA, 244 bp, Glycine max
  Clone ID: 701149776H1
gggactattcaaggtggccagacacgccagaagggtggagatcggtgactgaggaatacagcgacaaagtaatgggtctagcttgcaagctcatggaggtgttgtccgaagcaatggggttagagaaagagggtttaagcaaagcatgtgttgacatggaccagaaggtggtggttaattactaccccaaatgccctcaacctgacctcactcttggcctgaagcgccacacggatccgggcat

SEQ ID NO: 9436 - DNA, 243 bp, Glycine max
  unsure (1)..(243): unsure at all n locations; Clone ID: 701149777H1
ggaacaaaacaagtgtttcgaatagattatcctaagtctttgggaatagtgctgcaatggcttcaagtcaggaggaggtgacccttttgggagctactggaagcccatttgtgtgcagggttcatattgccctcaagttgaagggagttcaatacaaatatgtcgaagaaaatttgaggaacaagagtgaactgcttctcaaatccaacccagttcacaagaaggtncagtgtttattcacaa

SEQ ID NO: 9437 - DNA, 253 bp, Glycine max
  unsure (1)..(253): unsure at all n locations; Clone ID: 701149778H1
ggtggtggaagggttgttgagaaggggttttagaagtccacatttttcagatttgattcgcgttcctcttctctcttctcatcatcaatggcgacccccatcctcnnnnnnnnnnnnnnnnnnnnnnnnnnnnnnnncgacaccanggtcgatttacttgaacctttccatgtccgattcccttcgaagagctcccatcgggaagctatggatgtcttttgaaagccagatcttttngagggcatgcgttttg

SEQ ID NO: 9438 - DNA, 225 bp, Glycine max
  unsure (1)..(225): unsure at all n locations; Clone ID: 701149779H1
gggggcacagcagcgtncacgctttaatcgacgactaagtgcttcttctcgttttcttccctcgagttgttatcggtttttggcgggagtcgtcgcggtcgtcatcgtcattgaatcagccatgcctcggtactactgtgactactgcgacacctatttgacccacgattctccatctgttagaaagcagcacaatgcaggttacaaacacaaggcaatgtgagg

SEQ ID NO: 9439 - DNA, 248 bp, Glycine max
  unsure (1)..(248): unsure at all n locations; Clone ID: 701149780H1
ttcaaatgcaaatggttgcattgggagatgatgaaacatgcaaagcaatgatgggcgcaggatgcaaacaggtgtgccggattaatggatatggaaactgacacaaaccccattgatcggtctgtagcacacttactgtttcacaggccctcagatccatcggtgttgcttcctaacgaaactttaccttcaaatcgtgnncnaaggngnatngggaatgggggatcacccaccanaaagnngganaa

SEQ ID NO: 9440 - DNA, 242 bp, Glycine max
  unsure (1)..(242): unsure at all n locations; Clone ID: 701149782H1
gatatataaagaacgaaaaatccactaacagcagcaagcttatctctgcagcattgaacaccaattgaacaccaatctgcagcattgaacaccaattcaacgccaatgggtcaggaagaggaaaaatcccaagaaaacaaagtggaggagannnnnnnnnnnnnnnnnnnnnnnnnnnnnnngagaanaaatnanctacgagaanttcaggagaattctgcgcggccagaaatcgtgcttaa

SEQ ID NO: 9441 - DNA, 240 bp, Glycine max
  unsure (1)..(240): unsure at all n locations; Clone ID: 701149783H1
ggtgggatacgaacgttgactaccacgcccgtacgtaccattggttcttccatttcggaagtttctggattaagcaagtggattttttatttgagctgatggatcacaataaaacctaatatttgtgttttgggtttgtggaaaatacccaggatttgaggtnctggagaagangggataanagtgtatggacatggggcgtggtnaccgnggcccgaaaggaggaactatngctacagt

SEQ ID NO: 9442 - DNA, 238 bp, Glycine max
  unsure (1)..(238): unsure at all n locations; Clone ID: 701149784H1
ggcatcaattcaaaatatatcatcaattataagcatgggtttgtggaacacaacgagtgcagtgtcttgccgctttcacaagtttggtgatgaccaaaagaatctggtcttccaaggtgatgccacgtcttcttccaggggcatagaacnacngaaagtaaganggtggaggaaaacnatggntggcatttgggnanagtgtnaanctctccncgagcgcaccnggnanactntctnc

SEQ ID NO: 9443 - DNA, 239 bp, Glycine max
  unsure (1)..(239): unsure at all n locations; Clone ID: 701149785H1
gggaaggaacgcactcacgagcaagggaagcgactagtgagcgagtagagtttctgcttctactttacaagattacaatttacaagttacatttcagcaagtcaaaatttcctccagaaagttgctcgtgtaatggatataatctctcagttacangaanaagttaatttgattgcacatttggctttaatacagttgggacatngcaagggatgcccctccaatcggtgtggccaatt

SEQ ID NO: 9444 - DNA, 237 bp, Glycine max
  unsure (1)..(237): unsure at all n locations; Clone ID: 701149789H1
ggtgccgaaccacgttaaattcttgtgtttgttattatttttcttacggtgtaatctttggtgtggtnctcacgatcctttgtgggtttgaataattttanttgngtgagcgntgattagcccnancatatcagcataatgnnaaaagacttnatttaagtttagaaagttacaccttgataaatatgttttgaactttgagattcannatatgtttttggngaatgcncaactaga

SEQ ID NO: 9445 - DNA, 238 bp, Glycine max
  Clone ID: 701149790H1
ggatgacatgctcatacatgcttccaccattcaggaatgtgtcctcactggaacaatgatggtgcactgggtgcgcaagtttcccttcttttgtagtgacagagagtatatcatagggaggcgaatttgggatgccggacgaatttactactgtgtaactaagggagtaccttgcccctccatgccaaggcataacaagcctaaacgagttgatttattttattcaagctggtgtatt

SEQ ID NO: 9446 - DNA, 240 bp, Glycine max
  unsure (1)..(240): unsure at all n locations; Clone ID: 701149792H1
ggcagagtggaaggcagagaccaaaaaccactgacggaattgtagacgaaacagaacacagaaagagcgagcaacggccattcgatttcgatgtggcgcagtcgtgagtaacgtgcaataccacgggtaacgcggttttctggctcacctttccgcattttccttcttccctctcgcacccataagtacncctccctaaatcaacgctttcctcannaaaaacaaaaatcantctcatca

SEQ ID NO: 9447 - DNA, 258 bp, Glycine max
  Clone ID: 701149794H1
gtcaaggatcagattggaacctacacatactttccatcgacttcactgcataaagcagctggagggtttggaggactcaatgtctaccatagatctgtcatcccagttccttatccgtaccctgatggagatttcactttactcattggtgattggtacaagactaaccacaaggtattaagagaatctttggattctggaaaatctcttgcctttcctgatggtctccttatcaatggccaagctcatacaaccata

SEQ ID NO: 9448 - DNA, 255 bp, Glycine max
  unsure (1)..(255): unsure at all n locations; Clone ID: 701149795H1
gagttcagctgcgaaatccttgtgcaccgtaagggttgtgaagcaggcagagaagagccatggtgcacgtttccttctaccgaaactatgggaaaaccttcaagaagcctcgtcgtccgtacgagaaggagcgtttggacgccgagttgaagctggtcggtgagtacggacttcgctgcaagagggagttgtggagggttcagtacgctctcagccgnnnnccgtaacaacgccagaaatcttttgaccctcgac

SEQ ID NO: 9449 - DNA, 245 bp, Glycine max
  Clone ID: 701149796H1
gaaagaaagaaagtgcaacttcctctgttttgctcccctgtttaagccttatcataagcttagaatggcacacaaggaattttccattgccctagtgactctcattgttctctttgtcaacacgaacctccaaggtgccacggctgactatggtggtggttggcagagtgctcatgccactttctatggtgggggtgatgcttctggcacaatgggtggagcatgtgggtatggaaattgtatag

SEQ ID NO: 9450 - DNA, 267 bp, Glycine max
  unsure (1)..(267): unsure at all n locations; Clone ID: 701149801H1
gacttatggtctttgaaacaaagctagcatagcatttttccttttacaaagcaagacacccttttccttttcattccatcatctctttagctttgtccaaagaccatgtctgtggtggctgataattctgcaaacaatggaagccaccaagtggttttnaatgtaaacggtgatgcccccaagaagtgtgatgactcagccaaccaagactgtgtacctcttctgcagaagttggtagcagaggtggtggggacgtacttcttgata

SEQ ID NO: 9451 - DNA, 271 bp, Glycine max
  unsure (1)..(271): unsure at all n locations; Clone ID: 701149802H1
gatgccacaccaacactcctcttcccaacaacactcctctcccactttcctnatcgccttccaattttcttcaattcaagcaccaaactttcttcttcaagttcccgaacntgaacccgaaatcgaacccgaacctacttcgattgcgcaggntnanntgctcagtancagatggnaangntcngncnncggntggtgccanggatcttnttctnttncggnnaagccttnnttcagcagaaannancanangngtcttatgagtcaaagg

SEQ ID NO: 9452 - DNA, 260 bp, Glycine max
  unsure (1)..(260): unsure at all n locations; Clone ID: 701149803H1
ggagagacagcgtagggtaactnaaaganacgaaggaaatgaagaagtcttcgggaagcgcaactgacaaaaaganggtgcgacgctcatccgcaccagatcccacctccgacgctcctcctaggaaacaagttgtcaagaaagatgtgttccaggtttttgctgagaaggttagagatcataaggaattggtttcaaggtgggctgttctacaggagacgcgtgttgagtattttagagggaaggattttgtgagctct

SEQ ID NO: 9453 - DNA, 175 bp, Glycine max
  unsure (1)..(175): unsure at all n locations; Clone ID: 701149804H1
ggatttgagaattctnatggattctncgttgatacgaatggaaagaattaggggaagaggnatcgccggnnnatgaaancgaatgggaagatcgaaaagtnggangaagcaaannattntctggtcccgacgactagnnntagcnaagcattntctccgnagaannatngaacca

SEQ ID NO: 9454 - DNA, 171 bp, Glycine max
  unsure (1)..(171): unsure at all n locations; Clone ID: 701149806H1
tcatattcctaaaggtggatgtggacgaattaaagagtgtttctcaagattgggctattgaggctatgcccacttttgtgtttgtgaaagagggaacgcttctggacaaagtggtgggngcaaagaaggatgagctncnncagctacacnncnacggcccccccccccccc

SEQ ID NO: 9455 - DNA, 122 bp, Glycine max
  unsure (1)..(122): unsure at all n locations; Clone ID: 701149807H1
gtttacccatgcctgggacaanttgatttcattaatggtngtcctnccatggccanggtntctctgnggatgaaaaggtttacncagagcagttggagtaaagtnccagngtnagnngntat

SEQ ID NO: 9456 - DNA, 259 bp, Glycine max
  unsure (1)..(259): unsure at all n locations; Clone ID: 701149809H1
gggatnaagagagcttacaaagggnangtgaggnctacctgtcagattgcagccggtggggactctgctnataatttgcacagtccttnaatctcacgccaaacaacaagncttgaaaaagacttgcttcctcctcctccttcccatggcagtatccttggnagcatnaggggtcacantngtcctcatgcnagggtcaggtgaacaanggtgcncngcacaggnttggcgggcgcncgcaagcnncnnccgnangccc

SEQ ID NO: 9457 - DNA, 257 bp, Glycine max
  unsure (1)..(257): unsure at all n locations; Clone ID: 701149810H1
ggatgagatctacnatcacagaatcacnggttaactaagcnnnnatcactagaaancacaaggaagaatccaaaatgccgtngagttcattttgtgtcacatggccatatttgtggtgttgggactccaccagcttgcatccaattctaaccatnctagtcacactgatcagtgtgctatgttngctaagggggttcaaganttcnnnnnatgccnccctcctgggtnctccgctcccnggncnnncagnangcccc

SEQ ID NO: 9458 - DNA, 256 bp, Glycine max
  unsure (1)..(256): unsure at all n locations; Clone ID: 701149811H1
ggcacaagtnantttgttgatcgagataactagaaacagtgtnnatgaaaatgaaggtccttgtnntcttcgttgctacaatttnggtagcatggcaatgccatgcgtacgntatgttccctctccnantgnacactggctatggngccggnncccggaagcnnaatgcgcaagntcgaggcttnctgtgnggaagcacacaacatctttggctttgagaccattcngaanatgcgttgaagcaacaaaggaatac

SEQ ID NO: 9459 - DNA, 256 bp, Glycine max
  unsure (1)..(256): unsure at all n locations; Clone ID: 701149812H1
ggcacttcaattgcaatcaaattagttcattctctttgcgcagttgccctaacctccncctttcaagatgcanatcttcgtcaagaccctcaccggaaagaccatcacccttgaggtggaaagctctgacacatcgacaacgtcaagcnaacattcncgacnangnaggnatttccccnggatcgcanggttnantnnccggganccccnctcgggggcngnacccncntggtacactccccancggtcncccccc

SEQ ID NO: 9460 - DNA, 260 bp, Glycine max
  unsure (1)..(260): unsure at all n locations; Clone ID: 701149814H1
gaggcntccaaatatttncctttntagcnttnattanagnggcctanttnttgtctntctcaatgagnanggcntccactatgcnttgcgcactntggcgcttctgtgttcccttgttgctactngcnagcttcagntatgcacctnttgttttggcgacaactgaaatttcagggaatgaagtgagcactgatggaaaggtttaantgacagttagcanaacctnatctncnagacangangtagaagcaangttnaag

SEQ ID NO: 9461 - DNA, 258 bp, Glycine max
  Clone ID: 701149815H1
gtcattgttgtacattgggattgtgggttcaattttatttgggaaaaataaactaaaatcggtttgatctgggttccatgttaataaatgaaaagccaaataaatttagtaaattgttgagagtcgttgacaagttggaccataaaatggctttataatattttgaagtttcaaggatttattttgcaacttggagcatactaaatattaaaaataagtacatgctttgcctgtctcaaaatgaaatattgaggtttc

SEQ ID NO: 9462 - DNA, 265 bp, Glycine max
  Clone ID: 701149817H1
ggattaagtgagcaacacaacacaaccacacccatcattatctccttctccatctccatgggcttccttacccagttttgctccttttgtatttctattgcttgtaattgggagcaatgcaaggactttgtatccacttcccagcaaaggtggtaatgggagtaggaagcccctacaaacttttcgcccttataacattgctcatcgcggttcaaacggagagcttcctgaagaaacgcgtcctgcatacttgagagctattgag

SEQ ID NO: 9463 - DNA, 238 bp, Glycine max
  Clone ID: 701149818H1
gggcacaagtgagtatgttgatcgagataactagaaacagtgtgatgaaaatgaaggtccttgttttcttcgttgctacaattttggtagcatggcaatgccatgcgtacgatatgttccctctccgaatgaacactggctatggtgcccgtactccggaggtgaaatgcgcaagttggaggcttgctgtggaagcacacaacatctttggctttgagaccattcctgaagagtgcgt

SEQ ID NO: 9464 - DNA, 257 bp, Glycine max
  unsure (1)..(257): unsure at all n locations; Clone ID: 701149820H1
gattacacacattattatcatacacacacaaaaaaaacctctcatttcaaagagagagngagagatttcacagaccaaattgcagaggacgacaaggttcacaacttcaaggaaaatcgaaatggcccaagtgagcagagtgcacaatctttctcaaagcactcaaattttcggtcattcttccaatcccaacaaacccaaatcggcgaattcggtttcattgaggccacgcctttggggtccctcaaaatctcgca

SEQ ID NO: 9465 - DNA, 256 bp, Glycine max
  Clone ID: 701149821H1
gttccaattaatcacccgtctcctagcctttagccggaaagcacttactcctaccttgaaaccattcttgtgcacaataattaatttcacacttagcatgttctgcaattcctctgaaaggacaaacaaaaatcaaccacctccaaatgacaatctattgggctagatttaacagtttgctaaaattcttagttgctagccaggaaatgaaaaacgaattgattaattaattaatcgaaaacaagtttcataccaa

SEQ ID NO: 9466 - DNA, 261 bp, Glycine max
  unsure (1)..(261): unsure at all n locations; Clone ID: 701149822H1
ggaagctggaaaagttagaagtagtgaagaaaatgaaagtcattgttttcttngttgcnataanaantttaggtgcagaatggcaatgcaatgggtcagagcatgagcatgngcatggccacagctaccaaattttccctttgcgaatgaaaaccggccccggtggccactacattccggaggtatcgtgccaaagttggaggcttggtgtggagcanacaacgncttgactggagaaccttcctcaagtgggggggatat

SEQ ID NO: 9467 - DNA, 253 bp, Glycine max
  unsure (1)..(253): unsure at all n locations; Clone ID: 701149823H1
ggaggcaaggaacgaacgacngtattctctctccttccantcanctcaaatccanatncagatcccaattntccagtctttgctatggnatcaatttcgtccttatctctcacttctgtttccctccccaaatctcaatctctggaccccaagaaaatctntgattcntnttcctcctctggcagcaggagtnaanntgttgntgccncccatngntncaaagaaggnagatgcnttatnttcggggcgatcg

SEQ ID NO: 9468 - DNA, 260 bp, Glycine max
  Clone ID: 701149825H1
gagaaaagttttcatatatattaacaaaaactaatagtagtagcgttatattaggagttgataaaattttctctttcaagaaaatgtcgttcggcaagaaactgttcctccaaattctgtggtggttttccttgatcggtcttagttcccaaatacggagtcattacagttttgttgtgagagaggccaattatacgagactctgttcgacaaaaagcatattgacagtgaatggaaattttccaggaccaactatcaaa

SEQ ID NO: 9469 - DNA, 252 bp, Glycine max
  Clone ID: 701149826H1
ggagaaaatgccactttttcacttgggcactgatgggaaccttgtgttggcagatgctgatgggcagaattgcatggcaaactaacactgccaacaagggtgttgtggccttcaggcttctttcaaatggtaacatggtccttcttgatgcacaaggcgggttcgtttggcagagttttgatcaccccacagataccttttggttggtcatatctagagcaaaaggggcatccaagttggttagtaggcccc

SEQ ID NO: 9470 - DNA, 255 bp, Glycine max
  unsure (1)..(255): unsure at all n locations; Clone ID: 701149827H1
gaccgccataggaatattaaagaaggagaaaatcaccattgacccagaagatccagctgctgtttctcattatgcaaaggtcatgaaaacaattagagagaaggcaagcttattgtcggagtcccaagacatactatccaccattgaaattgagacacaggatattccagatgctcggactatcttcctgatttgangnaaanagtcaagagaggtctacagatggnttttgtnggngcggnngctctnatgata

SEQ ID NO: 9471 - DNA, 269 bp, Glycine max
  unsure (1)..(269): unsure at all n locations; Clone ID: 701149828H1
tgggtagcaaaaactataaatgatttgatgaattaatgatgataaatatttgccagtatagtttctttctgactatgggcgtaaaattttactattttgcttttattgtctaattcattgcctattcttctgcaatataattcaggaccttctaaagcttgaaaaaatcccaggaggatcttgcagaagatttggtganacaaccacgtttgctcantgggcagcagtggcaggggnagatcagaagacacncggaggnncgtttaant

SEQ ID NO: 9472 - DNA, 261 bp, Glycine max
  unsure (1)..(261): unsure at all n locations; Clone ID: 701149829H1
ggagaacaanacaagtgtttcgaatagattatcctaagtctttgggaatagtgctgcaatgggcttcaagtcaggaggnggtgacccttttgggagctactggaagcccatttgtgtgcagggttcatattgccctcaagttgaanggagttcnatacaaatatgtcgaagaacatttgagggacngnntgcatggctttcnaatccnaacccnttcacnccagggtnccccngngtttnntcagaacccncccccncccc

SEQ ID NO: 9473 - DNA, 254 bp, Glycine max
  unsure (1)..(254): unsure at all n locations; Clone ID: 701149830H1
ggtatgagttcacacttttatagacagccaggtccaatggaattatttcttccttctgttttctggtcgattaggatattactccaacatacataagcaagagttaaatctaatccttatccatccaaaggatcaacaaaatcattcaaggtttgtaattgctttacaatgatctccacggtcattgattccgggtnaaagttcntaaggtggaanacaaggatgaatgncatatgcccagtatagagaattgc

SEQ ID NO: 9474 - DNA, 107 bp, Glycine max
  Clone ID: 701149831H1
aaaatataattcataatggcaaaaatagattgctcagtattgtttttgttttttcctgcttcatcctgagttctacttgttttgttgatcatggtgtttttaacaga

SEQ ID NO: 9475 - DNA, 262 bp, Glycine max
  unsure (1)..(262): unsure at all n locations; Clone ID: 701149832H1
gggacatagttcagacttcagacttcccattccaatttcncangttttnccaaagaaggtgagtgntgagctaggagcatttgccaggnaaattggtgnccaacgtgctctcanggttaccatcgaaggtgttgcttctatgcaagtgcgtgtgcaagtncaggttcggtctctaaccgatcctcattttgtttccattactatgttgtctacaaagtttcanggccagaggggctctcttggtaattcgaagacccttttt

SEQ ID NO: 9476 - DNA, 229 bp, Glycine max
  unsure (1)..(229): unsure at all n locations; Clone ID: 701149833H1
gaagaagaagaaggancatggccatgagcatgggccatgacagcagcngcagcagtgaccantnnattaaactgctgcatcacctatanatttaaaagggtnatnggaccatagtagcgagggctgtnccttaanttctctctcactctctntctnantntctctctntntctngctcgcgctntccctatcntgtcnntatatatcngagtnagnnacccnagagnga

SEQ ID NO: 9477 - DNA, 257 bp, Glycine max
  Clone ID: 701149835H1
ggaggcggagacgaagaagtgaagagaagagaagagaagggatttggatctgaaaagagaagatggggggaggaatggaagcaaacaagaacaagttcatagaggattggggcactgccagagagaatctggagttcaatttccgttggactcgccgcaaccttgctcttgttggcatcttcggcatcgctattcccgtcctcgtctacaagggcatcgtccgtgaattccatatgcaagatgaagataatggtcgg

SEQ ID NO: 9478 - DNA, 254 bp, Glycine max
  unsure (1)..(254): unsure at all n locations; Clone ID: 701149836H1
gcaattcaaaaggttgctgctgcctatgactgtaaaattgttgagggtgttcttagccaccaaatgaagcagtttgttattgatgggaataaagttgtgcttagtttgtctaatccagacacaagggttgacgaagcagagtttgaggagaacgaagtttatgcaattgntatagtaacaagcactggggatggcaagcctaagctgttggatgagaagcagacaactatttataagagggctgttgacaagag

SEQ ID NO: 9479 - DNA, 194 bp, Glycine max
  unsure (1)..(194): unsure at all n locations; Clone ID: 701149837H1
ggttggattggttttcttcttccttttctcnaaagagnatctaatctcaatcctcattacagatttcttcattcctctctcagtcttttctgttttccccctttgacatcctcgttttcgccgaaacaaaaanttcgcccgattttnctgtntgcccngtttttctctccttgntgttatttgactcggntgtc

SEQ ID NO: 9480 - DNA, 251 bp, Glycine max
  unsure (1)..(251): unsure at all n locations; Clone ID: 701149838H1
gggggggcaaacaacagcgagagtcttnnctntcttgtacacttcanacnaacagcctcagcggaactctctnccggtgttggtgttgcnganggatcttagncaaagntcntgangatatgggagcgtgtntttcaactccacaaggttgcgtgggcnggaggttnacctcttccaagaacaaaaccnggaacaggaggagacagggntccacnagaantccccntcgnttttttncgcncnttggcanc

SEQ ID NO: 9481 - DNA, 254 bp, Glycine max
  unsure (1)..(254): unsure at all n locations; Clone ID: 701149839H1
gacagcatatagtcacataggctattaagggtgagatatatagaaaaacaaaggagaaaagatagaaatggagaagtttccagttgttgacatggggaaccttaataatgaagagagatcagcaaccatggagataatcaaagatgcctgtgagaactggggtttctttgagttggtgaaccatgggtatccatagagttgatggacgnggagagttacaaaagagcctacaaaaagtgtanggngcnaaggtc

SEQ ID NO: 9482 - DNA, 228 bp, Glycine max
  unsure (1)..(228): unsure at all n locations; Clone ID: 701149840H1
ggcngttcaattccaatatattccattctctctgtntatttccctacctctcccttcaagatgcagatcttcgtcaagaccctcaccggcaagaccatcacccttgaggtggaaagctctgacaccatcgacaacgtcaaggccaagatccaggacaaggaaggaatccccccggacnagcatnnnncaatttnggcngnaagnantgangngggcgtaccttnngtt

SEQ ID NO: 9483 - DNA, 250 bp, Glycine max
  unsure (1)..(250): unsure at all n locations; Clone ID: 701149841H1
aaaaaaaaatagagaaaatgaggaagagaaaaaaaactaagttggccaaagaaaagaagaaggagattgttccatgcataaggaatgaagcaccataccctttggtgccatccaagaaagacaaggaacaacactttcctcgtttccttgatatcttcaagaaattggngataactatcccatttggngaagccttgnaanaatgnngctctactaaaatttctaaaagnctncnnncaagggggggntt

SEQ ID NO: 9484 - DNA, 250 bp, Glycine max
  unsure (1)..(250): unsure at all n locations; Clone ID: 701149842H1
gacttattatttactagaaagcttgaaactttgcagacaattctgagacccagttgccggaagtggcggttcccagtgggaatggaggtggagactgaaaaatcagggtctgatgggaagggttggagtttttgtagaatgccattttggcaaacaactcacannnnnnnnnnnnnnnnnnnnnncatgtcttacatgcacaatgttcatccgcaaantcagaatnacnnncnatctgttgaccgatcca

SEQ ID NO: 9485 - DNA, 220 bp, Glycine max
  unsure (1)..(220): unsure at all n locations; Clone ID: 701149843H1
tacttatctgactacggctacattgaatcctctgggccatttaacgattctttcgaccaggaaataatatcagccattaagacctaccagaatttttccaatcttaatgttaccggcgacctgancaaccnnctaattcagcaaangttccntacgatgcggtgtccccgccgtnantcgngnnaananctnggggggngntntnccnnccggggggggg

SEQ ID NO: 9486 - DNA, 228 bp, Glycine max
  unsure (1)..(228): unsure at all n locations; Clone ID: 701149844H1
gggagatagcaatntnatntnattcatttcaatggcaactcaaggtgncgtcattanntgcaaagctgcggnggntgggacaccaacnagnccttaactgtccaagaccttcangtgganctnctcaggcgggaggttctgntaaatcccttnanggtcttttgnanaaggtngttacattggggcggcaaggttcccaaggttncttnnctnttctngtcagncatg

SEQ ID NO: 9487 - DNA, 238 bp, Glycine max
  unsure (1)..(238): unsure at all n locations; Clone ID: 701149845H1
ggtggcactcaaacattgttncgttgtaggnagaggaatcttgagaaatggcaggggacagcaagagcaagattctgttcatcggagggactggttacatcggaaaattcatcgtggaagccagcgccaaagctgggcaaccnacntttcctttggggnaggagttccnctctttcnaccccgcaaaatcacccctcntcgaccatttcaaaggncgngnccatcctgtttntgggag

SEQ ID NO: 9488 - DNA, 261 bp, Glycine max
  Clone ID: 701149847H1
gggcgatgaatcgaggcgcaaaagagttggggtgggatccttcttccctcatgatggctttcaccttcaagttcagtagagtagagtgagcgaaagtggaaaacaaaaatggaggagactcaagtgctgcacgaactccacaagctatcacagatagaatcagaggaaaccctaaaccaaatgctatgcaccctttggtccactcgtaaaacgggtcttcccctctccgacaagtcccatttccaatccctcctccactcc

SEQ ID NO: 9489 - DNA, 260 bp, Glycine max
  Clone ID: 701149849H1
gggaaaagttagaagtagtgaagaaaatgaaagtccattgttttcttcgttgctataataattttaggtgcagaatggcaatgcaatgggtcagagcatgagcatgagcatggccacagctaccaaattttccctttgcgaatgaaaaccggccccggtggccactacattccggaggtatcgtgcaaaagttggaggcttggtgtggaagcacacaacgtcattgactggagaaccattcctcaagattgcgagggata

SEQ ID NO: 9490 - DNA, 260 bp, Glycine max
  Clone ID: 701149850H1
ggcacaagtgagtttgttgatcgagataactagaaacagtgtgatgaaaatgaaggtcctgttttcttcgttgctacaattttggtagcatggcaatgccatgcgtacgatatgttccctctccgaatgaacactggctatggtgcccgtactccggaggtgaaatgcgcaagttggaggcttgctgtggaagcacacaacatctttggctttgagaccattcctgaagagtgcgttgaagcaacaaaggaatacatcca

SEQ ID NO: 9491 - DNA, 84 bp, Glycine max
  Clone ID: 701149851H1
caacaaggaacaaccttggaattcagaacaaactgagggtaccttcacaaagttgccagcatatcccttccttccctaaaaaaa

SEQ ID NO: 9492 - DNA, 253 bp, Glycine max
  Clone ID: 701149852H1
gaagaaaatgattctcacaaagcagtaccgatgcatacactcagctagctgtcaatgtactaaagggcatttaagtgaagatgtgatattcttagtatttcataatttgaattggaatcccaagctaattgctactctatcatgtgtgtgcaaatggtttgatgatcttgccaagcgagttctatggaaagagttttgtagaacaagagctccgaaaatgttgtgtgatctgcaatctaatgggagccacatt

SEQ ID NO: 9493 - DNA, 250 bp, Glycine max
  unsure (1)..(250): unsure at all n locations; Clone ID: 701149853H1
ggtgtacatgatgaactctaggaagtttgcaaaacggataaagagtgagcggaagttatattccggaaagttatatctttttcagttgtagtgtttttttgtttttatttttccctagataagcagaccgtggaaaactgcaagtnaaagctggagcttttgcttcaatcacatttgactatttcactgattagaacaggcaaagatgtctcttttgggttgatcaaaaannnaaanaananaatacnnc

SEQ ID NO: 9494 - DNA, 245 bp, Glycine max
  unsure (1)..(245): unsure at all n locations; Clone ID: 701149854H1
ggttgttgttacttttgctttaacacattacatcacatctttgtgaaaaaggggagtttcttattctttctagacgcttccattgatcggcgatttcttagacatggnggagcatnacgaacacgaggaagtgaagggtgagtncttgncttnagaagatttctgggaagatccacgaccacgattcgtcatcttcgtggattccganaacgagaaaaccagngttctgattcttgaagtaaagg

SEQ ID NO: 9495 - DNA, 237 bp, Glycine max
  unsure (1)..(237): unsure at all n locations; Clone ID: 701149855H1
aactgttgttgagggaactatacagaagctatttgaagggcatcatatgaattatatcgaatgcatcaatgtggactataaatcaactagaaaggagtcattttatgaccttcagcttgatgtgaagggctgtcctgatgtttatgcttcctttgacaagtatgttgaagttgaacgtctgangggataacccctctcnntcggnanaatatggttgcaggatgntaaaaggggtct

SEQ ID NO: 9496 - DNA, 232 bp, Glycine max
  unsure (1)..(232): unsure at all n locations; Clone ID: 701149858H1
gggaagtgtatttggnccactgacctatcttggtaganatttgaagtttaaaccttcaaattaatcaaaccattttaatttgcctatagattctgagtcactgctgctatggcgctacgcgtacttcttgtgttggggatgttgctgatgttgtgccttgttaaggtttcatctgatccaaagatagaagaagaaatactggaagcagaagaagaactgcagtttcccgata

SEQ ID NO: 9497 - DNA, 251 bp, Glycine max
  unsure (1)..(251): unsure at all n locations; Clone ID: 701149859H1
gtctgtttcacagtcatcacaaacgggaaaccaaccttcacctggagaaacaaaatctagcatctatgttttgtctcttggaaagtgtgaacggacttaaaagtgcattccaatggttttccaaacataccataattgtatacttctactgaatttcctaaaagtattttaacaatttgattcatttgaagangcatatnccccnccnaccaantctgggcntncnnttttgtcaagcccaatttgtnnca

SEQ ID NO: 9498 - DNA, 252 bp, Glycine max
  unsure (1)..(252): unsure at all n locations; Clone ID: 701149860H1
ggattccggacagaaaaaaacttggggacggtgaaattggagggttttccgggatcccaaggccgaatcttgattcaatttacgaaaagagaacacnatccgttgctgaatcttgaagccgaatcaaatcgtnnnnnnnnnnnnnnnnnnnnnnnnnngtcaatagcgtttagagagggaaaggtgaagtggggttgtctaatttgggtctgngntgnttgtgtggtgngngnaaanggganagacgacgtt

SEQ ID NO: 9499 - DNA, 266 bp, Glycine max
  unsure (1)..(266): unsure at all n locations; Clone ID: 701149861H1
gagcctcagcagaagcagaacgaggagaagcagaaggagcaaaagcaatggcgccgaagaagccgagaaccacgacaaggaaccctgatttggttagggggattggcaagtattcgaggtcgcagatgtaccacaagaggggcatctgggccatcaaggccaaaaacngtggcgtnttgccccgccacggtcccaagcccaagcccgaggccccggcccaaaacccgcnnattnctcnccngngaangaatttcncaaacnntant

SEQ ID NO: 9500 - DNA, 257 bp, Glycine max
  unsure (1)..(257): unsure at all n locations; Clone ID: 701149862H1
ggaagaaaataatacgtgcatacatagctatctatttatctatagncaagtggcgtncaagagacacgtggtaccctagctagagtgccattctgtggtttcttctttctttcttctgcatcacatcacaatttgcattgcntcgtgtntttttcttctttgctctccaaaaatctcncacacancngtatctagcaaatgggttctcccnancaagacccatggnctatcggaganggggaaccangggtttgncc

SEQ ID NO: 9501 - DNA, 253 bp, Glycine max
  unsure (1)..(253): unsure at all n locations; Clone ID: 701149863H1
acatacagtcatacattaaccacgttattctaatgtctgntnctgattattggaaaccaaattncacacatgcaaactcnggntcattgaaccttggttttgggacagtgcagtgaccatagcagaagaagctgtgatgtcaaacgcagcngagccaagnnggnggttaattnggaattngtctcacacagagcccnanngggaaaaantncaccatttgttctnctggtttctctttggatatctagttaag

SEQ ID NO: 9502 - DNA, 264 bp, Glycine max
  Clone ID: 701149865H1
gcattgaataagaactttgtgaagcttgtttcttggtacgacaacgagtggggatacagctccacgtgtcattgacctgcttgtattcgttgccaagaagtctttttaaggtggtgtactgcaaagttgcttgtctacacattatgtgcttgtctagttgcgatttagtgtcttgctcgtgcaaaaaatgagaggtctgaataaatcggtttctggaaccagtggatttaccttgttaggagcattagctctattttggacttt

SEQ ID NO: 9503 - DNA, 256 bp, Glycine max
  unsure (1)..(256): unsure at all n locations; Clone ID: 701149866H1
gattgnacgcagttcctggnaagtagcaaagtagaactctcntggngttggganccgaaacctaaganaaacgcngaatctgtttcggaaagcgaaggnggcatggcatttgagtccaacgnagttgcagccacaacgctccaagccatatgctacaagcgcggttccctccagcttctcgatcggagaaagctccctctggagacagtttacttggaaattcgggattcaacggatggctggaatgccatacggg

SEQ ID NO: 9504 - DNA, 253 bp, Glycine max
  unsure (1)..(253): unsure at all n locations; Clone ID: 701149867H1
tgggttcttgatacccgctcgtgacaatctcatacacatcttgaaaacccagaagagctttcatctgcacatgtcatcgatcaaaattcttttcaccaagaactgggagattgttcatcagaactccattgctcgtcatggctcaaggttcttcctctactcgaattcgtcttcctcaaaagcgtggattcacacagaatctccttcgattgcnncnntcccaggtccctcctttcacgggttgattcacata

SEQ ID NO: 9505 - DNA, 262 bp, Glycine max
  Clone ID: 701149868H1
ggaggtgagggttggttcatttgatctgcgactgagagaagagaagagaattgtgatggggggaggacagggtcacggcacaacctacaaaggtgttaccattcatcagccaaagcgctggcacactatcaccggcaagggtttgtgcgcggtcatgtggttttgggtattctacagggcaaagcaagatggtcctgttgtattgggctggagacatcctgggagggtcaccatgatgatcatggcaagggccattagcatt

SEQ ID NO: 9506 - DNA, 263 bp, Glycine max
  unsure (1)..(263): unsure at all n locations; Clone ID: 701149869H1
ggaacctgttgcaatggtaatcatctgagtcctggatccgttttggaagcttctttttcttccagtagtctggatgaaagctcagggcatggttttcaccctgaccccatgaattactcttattatggtcaaccggaacgtgatactgaactttcagattctgcaacatcctttaacaaaggaaggatggatgagacactgagtgatgtngtcaaccaaattccccgggcattagaaagtttgctcacttttgggacagaatt

SEQ ID NO: 9507 - DNA, 250 bp, Glycine max
  unsure (1)..(250): unsure at all n locations; Clone ID: 701149870H1
tcttgcatcttactttagcatggccagagaagttataaggttagtttagtagttgaaggaaaaaggcccaaaaaagaaaaattcgtaggttcatatctttttctcctaacaaaattaataaattaacagttattgattaaaaaaaactttagcatgttaaatgcgaagcctgttttcagtatgcatatcaagtacttacnggaacccttcaggtattccacaaatggaaaagaggtgcgagtgggaaata

SEQ ID NO: 9508 - DNA, 252 bp, Glycine max
  unsure (1)..(252): unsure at all n locations; Clone ID: 701149871H1
gtatcctaaaacaaaaaccgacgacgtagtccttgtatgctgtggaccattttcatgaatgcagcaagcttaacctagactaggtacattggttcctcaatcgagacatgactatttctaaagaacatgatccacattaatttgtccattcccattcttcttttgtcggtgtaacgaggcctcgacgaactttcnngtttcgagttcaactctatatattcagctaatcatgcatctttcgctactgctata

SEQ ID NO: 9509 - DNA, 249 bp, Glycine max
  unsure (1)..(249): unsure at all n locations; Clone ID: 701149872H1
gatcaattcaaaatatntcatcanttatacgcatgggtttgtgggaacacaacgaatgcagtgtcttnccgctttcacaagtttggtgatgaccaaaagaatctggtcttccaaggtgatgccacgtcttcttccaggggcatagaactcacaaagttagacggtggaggcaaaccggtgggtggcagtgtggggagantgtnatactcttctcnngtgnccnttnggaaaancnncanagntnncacc

SEQ ID NO: 9510 - DNA, 251 bp, Glycine max
  unsure (1)..(251): unsure at all n locations; Clone ID: 701149875H1
gagagcaaagacgaagaagaaacacccagtacccttcttacatcttaatttatttttctgaagacttttttttnttaatttcttcatttccaccattttctgttacgccaagctgcgtcggcgacgcgaattgtgattactgaacggtgaattttgaggntctgctangtttnncaangtanaagnggntgtatctgacaaggatggtcggatcccaatgggntgntctncanntnnaggggcnnccgggg

SEQ ID NO: 9511 - DNA, 254 bp, Glycine max
  unsure (1)..(254): unsure at all n locations; Clone ID: 701149876H1
ggtagcagttggtgacatgggcaaaagcagaagaaattggggattgccattggtgaatgctattgctgatctgattcaatcccttatctttccttccttccccatacccatttcatatcacttccttcaaacttttcaacttcactcttcaattcagttcaattcaaanatgccttgnggncaanacggcctnaacctctttctngccaagaaanncaattggnctcttcnccncnaaatcaaccaccctattt

SEQ ID NO: 9512 - DNA, 233 bp, Glycine max
  unsure (1)..(233): unsure at all n locations; Clone ID: 701149877H1
ggatatcagaagctnagacctagggatttcggccgnttgctcccccaaaaaggaaagaagcagattctgtcctttgaaatcaacaagaaaagatgtcaggtgaagaggtagctgttgcagttgaggtacctgctacttcaatnccnagtgaggccattggacntcntgacngtccaanagcctgngcctgnaaatctcggncgacntggncgtctnanacntcgntcaacang

SEQ ID NO: 9513 - DNA, 256 bp, Glycine max
  unsure (1)..(256): unsure at all n locations; Clone ID: 701149878H1
ggnnccgttntattgcatctacagaaggccgattntntcgccgnttctctctaatcctgtggtgttctcgtgtngnncgnaacaaaatggtnggaagtgtngacgccttgaatgagggnttgagaatcaacggagcagttgaaccgnngcctgagganctttgatgncaacagctgtaatcatagatcccgtgcctnctgcattgtagacaatggcattctgaaggaggaggcgcagatcataaaggaaaagaaaa

SEQ ID NO: 9514 - DNA, 261 bp, Glycine max
  unsure (1)..(261): unsure at all n locations; Clone ID: 701149879H1
ggtacaaatccaacacagcctcatctaaatctagagcccccaaaaacggaaactacattgcactttcagatattttgttcgttacnctctctctctctgcgacaccccaatttccaaaaacacaaacaagtggcctcattctgaactctgaaactcaaccttctttctnctcttctctctcgtgtttaactgttcagggcatcctagtttctctcagttagccaaatggtagctgcaatganagggtngtcgctgnnaana

SEQ ID NO: 9515 - DNA, 249 bp, Glycine max
  unsure (1)..(249): unsure at all n locations; Clone ID: 701149880H1
ataagcatgaccatcattcaacgttctctctatttgtcgttgtagcgccgcagccagcggttgaatttggaaaaagatgtctcaccggaagttcgagcacccgagacatggttcccttggctttctcccaaggaagcgagcttctcgtcatcgcggaaaggtgaaggcntttcccaaaggacaatctagtcaaccagcgggttgactgcttttgtgggctacaggcggaatnccccattttnngnggtg

SEQ ID NO: 9516 - DNA, 257 bp, Glycine max
  unsure (1)..(257): unsure at all n locations; Clone ID: 701149881H1
gggacatcgaagcaaaaaatgaaaacccaaantgctttctctcctctgtctttttctctctcttgctatccttttggctantngcactgctgcaagtgcaactccaagaagcgcagtgccaagccaccatntttcaacattcaacagaagcctctttccttccacttttctctttggaattggttcttctgcttaccaggcagaaggagcagcaagtgnagatgggagaggaccaagcntatgggacacctacacta

SEQ ID NO: 9517 - DNA, 262 bp, Glycine max
  Clone ID: 701149882H1
gacattttctacgtattgaatctcaagattctaagagagattttgctgctctttgaagaagggtgtttgcttgattttggagatgtcgctgctctcagatctcatcaaccttaacctctcagacactactgagaaggtgatcgcagagtacatatggatcggtggatcaggaatggacctgaggagcaaagcaaggactctcccaggaccagttagcgaccctcaaagcttcccaagtggaatatgatggttccagcacagg

SEQ ID NO: 9518 - DNA, 232 bp, Glycine max
  unsure (1)..(232): unsure at all n locations; Clone ID: 701149883H1
tgcctgttatgaaatacagaattgagcatctcttggannactattcaaggttcaactaaaaatgcagctggcagtaaatcctgagtcgtggagtagaaaaagggccaatcgtgacgtctattcggtgagccagcttgagtagaacagttactgaggaacgatgctctgcttaatgatatattgactttagcatatttgatgggtgcagtatactgttcatcacaattttgtt

SEQ ID NO: 9519 - DNA, 249 bp, Glycine max
  unsure (1)..(249): unsure at all n locations; Clone ID: 701149884H1
ggacgagangatagtcganaatattcagggtttgcacgcaaaggnngacgtaaaancctcgggggaactctgtattgataacacgccattgaagctctaattcgaattccatcacagacccttttcgtttgtcctctcaaagttttgttcttttggcctcgattgatattcagcgcnaaattttcttnttggnnnaataatntatgtcnacngtaatgcacatacatgcccttttnggtctttgnttta

SEQ ID NO: 9520 - DNA, 273 bp, Glycine max
  unsure (1)..(273): unsure at all n locations; Clone ID: 701149885H1
gcatatccaaaggaacaaaaatattattaagatgatcaacattattggagcacttgttctactctttgcatttctcttcctcagttgtntgtatgcacaagacacaacaacccttgtgcctgcaatcataacttttggtgattctgctgtggatgtagggaacaatgactatcttcccacccttttcaaggctgattaccctccttatgggagggactttgttaaccaccaacctactgggaggttttgcaatggcnaatnagcngntttcnc

SEQ ID NO: 9521 - DNA, 246 bp, Glycine max
  unsure (1)..(246): unsure at all n locations; Clone ID: 701149888H1
gacctcaacattctcacattccatcaccaaagcagtgtagttttccgttgtcactgccatgggctttcaaaaaagtactattccaatatttcactctggctttgtgtctgtcttcgcattttgtgcttttgagggcaatgctcgcactctcgaattgctccaatgcgtgagaggcatgagcagtggatggctatacatggaaaagtctacacgcnctcttnatgagaaacagcataaananccgtc

SEQ ID NO: 9522 - DNA, 249 bp, Glycine max
  Clone ID: 701149890H1
ggcacaagtgagtttgttgatcgagataactagaaacagtgtgatgaaaatgaaggtccttgttttcttcgttgctacgattttggtagcatggcaatgccatgcgtacgatatgttccctctccgaatgaacactggctatggtgcccgtactccggaggtgaaatgcgcaagttggaggcttgctgtggaagcacacaacatctttggctttgagaccattcctgaagagtgcgttgaagcaacaaa

SEQ ID NO: 9523 - DNA, 251 bp, Glycine max
  unsure (1)..(251): unsure at all n locations; Clone ID: 701149891H1
aactgttgttgagggaactatacagaagctatttgaagggcatcatatgaattatatcgaatgcatcaatgtggactataaatcaactagaaaggagtcattttatgaccttcagcttgatgcgaagggctgtcctgatgtttatgcttcctttgacaagtatgttgaagttgacnntcttgagggggttacnaattatcatgcggaacatatggttncnnntgccnaaaaanggntcccctnttcattcc

SEQ ID NO: 9524 - DNA, 254 bp, Glycine max
  unsure (1)..(254): unsure at all n locations; Clone ID: 701149893H1
ggatgcaaaagttagtagtagtgaagaaaatgaaagtccttgttttctttgttgctatagttctagcagcatgggcattggccatggctcagaccatgaccatgaccatggccacacctaccaaattttccctctgagaatgaaaactggccatggtggccactacattccggaggtatctgnccaagttggangcttgggtggaagcacaccacgtcattgactggnaaaccgttcctcagattcccgnngcc

SEQ ID NO: 9525 - DNA, 259 bp, Glycine max
  Clone ID: 701149894H1
gagcgaaacagagagtgatttcagtgagtgatcggtgttcacttgatctcatcataattcgtcagcgtcaattgaagaagatgccgatcagaaacatcgccgtcggaaggcctgaagaggcgactcaccccgacacgttgaaggcggctttggctgagttcatctcaaccttcatcttcgtgttcgccggctcaggctccggcatcgcctacaacaagctcaccgacaaggcgctgccaccctgccggctcatctccgc

SEQ ID NO: 9526 - DNA, 260 bp, Glycine max
  Clone ID: 701149901H1
gtttgatttctgggtattttagttgtggaagaattgaggaagctttgcacttgtttgatcaagtgcctgagagaaacgtggtgttctggacttcagtggttttgggttttgcttgcaatgcattgatggatcatgctcggaggtttttctatctcatgcctgaaaagaatatcatagcttggacagctatggtcaaggcatatcttgacaatggctacttcagtgaggcttataagctcttccgtgaaatgcctgaaaga

SEQ ID NO: 9527 - DNA, 252 bp, Glycine max
  unsure (1)..(252): unsure at all n locations; Clone ID: 701149902H1
ggaagcccaggatggatcaagaggactagctgacattgaggatgggacagatagtaaaagctgtgctgctgagatggaaaatgtatctgaagtcccaaagccctcagtatcagctgagaagggggaagacttgtctaagaaaggtataattggcagccaagcaaaaaggcangtatcagaagaatctgaagctgttacgggagtggattgatgttactccagattgtttggcngtgccagaaaccggcaact

SEQ ID NO: 9528 - DNA, 254 bp, Glycine max
  Clone ID: 701149903H1
ggaatggctcagacaacgctcaagcaaagagagaagcaatgtcaggaactcatggctatcctgctgaactccattatctaattccagtgtttttacaaatggagaagaatctatgaaagccattttactaatatgcaactgcacaaaaagtcgagccagctgatccagcacagggtgttgttgtaaaacatctcgttctacagaaaacatgccttctcggaaagatttattcatgtacaagcactggagtatac

SEQ ID NO: 9529 - DNA, 238 bp, Glycine max
  unsure (1)..(238): unsure at all n locations; Clone ID: 701149904H1
gcagcgtatcacctaccgcaagangnacagctatgccaccaaatccaaccaacacagggtcgtcaaaacccctggtgggaagctcgtttatcagaccaccaagaagagggccagcgggcccaagtgccccgtcactggcaagaggattcaggggattccacacttgaggcctgcagagtacaagagatcaaggttacccagaaaccgtaggactgtcaaccgtgcatatggcggagtt

SEQ ID NO: 9530 - DNA, 247 bp, Glycine max
  unsure (1)..(247): unsure at all n locations; Clone ID: 701149905H1
gatcatgtgcatggccgtggtgggtgcaccgatgatggcgcaagccatggacatgcaatgatgtgacggtgaacatggcacagtgcctatcctacctgatgcagggaggaacaccttcaacactttgctgcagcggagtcaagaacattcttggctntgctgtcaccaccgttgacaaacaaactgtgtgcaatgtctcaaggcggatgctgctaggtacaacatcaatgaccagtatgctcaggca

SEQ ID NO: 9531 - DNA, 247 bp, Glycine max
  Clone ID: 701149906H1
atcagtggtgccccccagggataacaacataatgctgtggaatgctgtcatatttggtcctgatgatactccatgggatggaggcacgttcaagttgacactccaatttactgaggactatccaaataaaccaccgactgtacgatttgtgtctcgcatgtttcatccaaatatttatgctgatggaagtatttgtttggatatattacaaaatcagtggagtcctatttatgatgtggctgctata

SEQ ID NO: 9532 - DNA, 245 bp, Glycine max
  Clone ID: 701149907H1
ggcacaagtgagtttgttgatcgagataactagaaacagtgtgatgaaaatgaaggtccttgttttcttcgttgctacaattttggtagcatggcaatgccatgcgtacgatatgttccctctccgaatgaacactggctatggtgcccgtactccggaggtgaaatgcgcaagttggaggcttgctgtggaagcacacaacatctttggctttgagaccattcctgaagagtgcgttgaagcaa

SEQ ID NO: 9533 - DNA, 257 bp, Glycine max
  Clone ID: 701149908H1
gggagctgagctgagaaaacccccaaccccaacctcaaccttaacctctcctcactttcttttcaaccagaactatgattaagctttttaaagtaaaggaaaaacagagagaactggcagaaaatgcgagtggcggaccacccgttaagaagcaaagtgccggcgagttgcgtcttcacaaaggaattttgcaggggcctagtcttgggatgagggagaggtggggacaagactgaagtcataatttgattatatga

SEQ ID NO: 9534 - DNA, 254 bp, Glycine max; identical to SEQ ID NO: 7691
  Clone ID: 701149909H1

SEQ ID NO: 9535 - DNA, 248 bp, Glycine max
  unsure (1)..(248): unsure at all n locations; Clone ID: 701149911H1
gataccaaaaacaaaacacaagccaagtgaaagtgagaaaaaataaaaattcaaagagcataatgtcagggatcattcacaagattggggagacccttcatgtgggagggcacaagaaggaggaggagcataagggtgagcaccatgctggagaatacaaaggggagcaccatggtgaacacagtagtgagtacanaggagagcatcatggtgancgcaaagctggagagtaccatggtgagcacaag

SEQ ID NO: 9536 - DNA, 248 bp, Glycine max
  unsure (1)..(248): unsure at all n locations; Clone ID: 701149913H1
gggggcatggagttggttcatcacagaacataatggaataccaacaacagaaacaacaatggaagaggtcacaagggacaaaacnnnnnnnnnnnnnnnnnnnncacatcaacaatctcgatgatggttgtcttatgcacattttcaacttccttcctcctattccagatcgctttaataccgccctcgtttgccacagatggaattacttggcatgtcatcctcgcttgtggcttcgggttgatcga

SEQ ID NO: 9537 - DNA, 247 bp, Glycine max
  Clone ID: 701149914H1
gggttaccaaatgcaaagacgggcattgaagttgaacaatccatcactaacacaagcgcagacaacaacataaccctgctccaaacacatcaatttcaataatgttttcttctgcaatttctcagaagcccttccttcagtccctcgtcattgatcgttacgctcagagcacaactgctgcaaccaggtgggagtgcttggggtttaacaagtcagaaaatttcagtaccaagagagtgttgcgtgg

SEQ ID NO: 9538 - DNA, 244 bp, Glycine max
  Clone ID: 701149915H1
cctgacccgtccggctttaccttcaaacaaaactgtgatggccagttggcaggttgtgtgcaacataacaacagccaagagaacatcaagtaaatgctgtgcctcgttttcatcttattacaatgattcagttattccatgcaaaacatgtgcttgtggatgccccaagaacacagagagaacatgtagtactagtgctccagctatgtggcttccaccagaggcacttcttgttccctttgtg

SEQ ID NO: 9539 - DNA, 257 bp, Glycine max
  unsure (1)..(257): unsure at all n locations; Clone ID: 701149916H1
ggtcatgcagtgaatggggttgcagagatacatagtgaaattgtaaaagatgatgttttcaatgcattttataagttgtggcccgagaagttccaaaacaaaacaaatggtgtgacaccaaggagatggatcaggttctgcaatccagatctgagtaaaataataaccgagtggataggtactgaggattgggtccgaaatactgnnantnnngncgagctacggaatttgtagacaatgaggatctacaagtgcag

SEQ ID NO: 9540 - DNA, 266 bp, Glycine max
  unsure (1)..(266): unsure at all n locations; Clone ID: 701149917H1
gaacactcctggcagcatatactcataaatcacatagctagttgtttaaagtaagagagaagaaagaagcaaatggcaaactttccagttgttgacatggggaagcttaacaccgaagagagacctgcagccatggagattataaaagatgcctgtgagaactggggtttctttgagntggtgaaccatgggatatccattgagcttntggacacagtggagaagctcacaaaagagcattacaagaagnctatggagcaaaggtt

SEQ ID NO: 9541 - DNA, 248 bp, Glycine max
  unsure (1)..(248): unsure at all n locations; Clone ID: 701149918H1
gatgtcagtatcttgacaattgataatggtgtttttgaagttcttgccacaaatggagatactcatcttggaggtgaggactttgatcagagaataatggagtacttcattaaattgatcaagaaaaagcatggaaaggatattagcaaggacaacagagcacttggcaagctgaggagagaggctgagcgtgcaaagagggctctcagcagnnagcaccaggtccgcgtggaattgaatcacttttt

SEQ ID NO: 9542 - DNA, 246 bp, Glycine max
  Clone ID: 701149919H1
gggcgaggatggcaaacacaaacagcgacaccaaagaagaaagcaaaaaaatggatgaaagagagacaatacctctcctcacctcatacaagatgggaaattttaatctatcccacaggattgtgttggcaccgttaacacgatcaaggtcttacaacttcgttcttcagccgcatgctgctctgtattattctcaaagaactactaagggtggctcttgatcggggaagctactggtgtatctga

SEQ ID NO: 9543 - DNA, 226 bp, Glycine max
  unsure (1)..(226): unsure at all n locations; Clone ID: 701149920H1
gccaagttcttcaangcaaattcgaggtacgagnntgtgctggccggtcagcttcctcataatacatgtgcaaatcctggttgatgaaaatgctttgaagaactttcacaacttcaatggaaacgtacaaagaaattggaatcaagtaactatacaacataagtgcagtcaggaagtgcagcatggctgcgactggtgctttctttggatcaaagtaaattgtggt

SEQ ID NO: 9544 - DNA, 225 bp, Glycine max
  unsure (1)..(225): unsure at all n locations; Clone ID: 701149921H1
ggctgccgctctcngagaaaaacagatagtgtangagagagaagagcggaagagaaaatgacgaccaggttcaagaagaacaggaagaagagaggtcacgtcagcgccggacacggccgtatcggaaagcaccgcaagcatcccggaggtcgcggtaacgccggtggcatgcatcgccaccgtatcctcttcgacaagtaccatcctggtttcttcgggaaggta

SEQ ID NO: 9545 - DNA, 245 bp, Glycine max
  unsure (1)..(245): unsure at all n locations; Clone ID: 701149922H1
atgttattcctgatttactatgagtgtgatgaaatgagtaggaacattaatatgaacgaagatgttgtaggagaatttagataactactgatttgctatgagtgtgatgaaattagtaggagcatagtatgaatgctaagctatgaatctggaagaatatnagtataatatatgatggnggaagagtaataatattagttgagttttagttcagctgnagttttagtnnattttctctcgagatt

SEQ ID NO: 9546 - DNA, 245 bp, Glycine max
  unsure (1)..(245): unsure at all n locations; Clone ID: 701149923H1
ggatcataaggcaaaaatctaaagagctacgatgacgcgagcaagcggcgaagattcctgagaagagtgggattngcttgagtcattctcttcccttctagctacgtaacgactaacgacgcactctactctttcttagggtttcctctcccgccaattttccctttccccaattcaattccaaccctaacctcactccactctcgccggaaccgcaccttcgattcgacctagggtttcacgaa

SEQ ID NO: 9547 - DNA, 245 bp, Glycine max
  Clone ID: 701149924H1
gacttatttatatgttaatttcatttttgtcttgtttctattaacaataacattaacattatgtagcatattttaaccttgaaatgttgttaaattgtaccagactgcaaagaccaaggtaattaatagctgcttgaatcctgtttggaatgaggagctgaatttcactctgacagaacccttgggagttctgaatttggtgagctccatgatatttagtatgccgcttcatcttgttttctcaa

SEQ ID NO: 9548 - DNA, 247 bp, Glycine max
  Clone ID: 701149925H1
gacgagacgatgtttatataatcaatctgtcaaaaccagttgtgtgtattgtttctgccaggcaaatatcaatagcaatagcagcaatgtcaatgttgagatcagtttgtcagttaagggtgggagtcacaacccaaaaaccttgcctccatccctcaatcttattctccttttccctctctcacaacactcacactctcactctcacatctttccccagaaccttccgtttccacccaccttcact

SEQ ID NO: 9549 - DNA, 254 bp, Glycine max
  Clone ID: 701149926H1
gagagaaataatggagaagaaaagcataacaagcagagcacattgtttagtgctagcatttccaggtcaaggccatatcaatcccatgcttcaattctccaagctattggagcgtcaaggggtgagaataacacttgttactactcgtttctattccaagaatttgcaaaacgtgcctccttccattgctcttgaaaccatttctgatgggtttgatgaagttgggccccaagaggctgggagccccaaggcct

SEQ ID NO: 9550 - DNA, 243 bp, Glycine max
  Clone ID: 701149927H1
tttcccagggttgagttcctacattgcatgagttgtaggaaggagcacaagctacgtcttaagagtaaaccaaacagtaagaactaccatgatgctttgaccaacaaatactggacatgttatccttggccttatcaaaagtaaggtattatcttgtgaactttctagtttaggtttcagttttatatttttcaaggtagttaacaacatctacatacctggaactcaaactcaagaccattg

SEQ ID NO: 9551 - DNA, 246 bp, Glycine max
  Clone ID: 701149928H1
ggagaaatgaaagtgaagagaggaagcagagtgtgtgactgttccccaatttcctgtgcttagagtgaagaagcatttagaaaaagcaagacacgatgccttcggctcaagatccattctacgttgtcaagcaagaaattcaagaatctattgataagctaaaatccacttttcaccaatgggaaaacactgctgatgttggcgagcgatccagtctatcaaaggaagttcttgctagttgtgaaa

SEQ ID NO: 9552 - DNA, 248 bp, Glycine max
  unsure (1)..(248): unsure at all n locations; Clone ID: 701149929H1
ggtgttgttgagattctaaaaattgccagttacattcccttcacaagattctcacaaacaactcttgagaaagaaagaatggctgccaacacattgatgagttctgccatctcagccttcccatcngctcctttcctcctcaaaatccagatttgccgcagcagttcctctttccagctttgttgtcaccaatgcctcttcttcnngcnnnnccatgagtgctgactggatgcctggccagcctagac

SEQ ID NO: 9553 - DNA, 258 bp, Glycine max
  Clone ID: 701149930H1
gacctcaacattctcacattccatcaccaaagcagtgtagttttccgttgtcactgccatggctttcaaaaaagtactattccaatatttcactctggctttgtgtcttgtcttcgcattttgtgcttttgagggcaatgctcgcactctcgaagatgctccaatgcgtgagaggcatgagcagtggatggctatacatggaaaagtctacacgcactcttatgagaaagagcagaaataccagacattcaaagaaaa

SEQ ID NO: 9554 - DNA, 257 bp, Glycine max
  unsure (1)..(257): unsure at all n locations; Clone ID: 701149932H1
gatcgaagcaaaaaatgaaaacccaaagtgcttctctcctctgtctttttctctctcttgctatccttttggctagtngcactgctgcaagtgcaactccaagaagcgcagtgccaagccaccatgtttcaacattcaacagaagcctttttccttccacttttctctttggaattggntctctgcttaccaggcagaaggagcagcannngtagatgggagangnccaagcatatgggacanctncactagacagc

SEQ ID NO: 9555 - DNA, 253 bp, Glycine max
  Clone ID: 701149933H1
ggcacaagtttgttgagatagctagaagcaataagatgaaaatgaaagtgcttgttttgtttgttgctacagttttggtagcatatgaatgccatggctcagactaccagaagttccctctccaaatgaaaactgggtttggtgggcaatacagcaatgaggtggcatgtgccagttggaggcttggcgtggaagcaaacaacgtagttcaagtggcaaactgttcctgcagcttgcggagagtacatagctg

SEQ ID NO: 9556 - DNA, 247 bp, Glycine max
  unsure (1)..(247): unsure at all n locations; Clone ID: 701149934H1
agagaaagtacatcaaagattaaaattttcagcaaaaatttccaggaaaagaggagtgtccgaccaacattttcagctgaaagaatatttggtggcactctactggcgatgtgctccaacgatttcatctgcttttatgactggggctgaatgcaggttgatctatcgcattgatgtcaatgtgaaaaacctctactgggctgacatggtgatctagtaacaattgctagcgatacnatcattctac

SEQ ID NO: 9557 - DNA, 246 bp, Glycine max
  Clone ID: 701149935H1
ggaggttgaaaacgaaaacggagacctaaacgacgccgttcttgttccaccccctaacttctccatggtcgaggactgcattttccgatccggcctccccaacccttccaatttcccctttctccaaaccctaaaccttcgttccatcatatacctgtgccctgagccttatccggaagaaaatctggacttccttcgttcgcagaatattcgcctttttcaatttggaattgaggggaaaacgga

SEQ ID NO: 9558 - DNA, 223 bp, Glycine max
  unsure (1)..(223): unsure at all n locations; Clone ID: 701149936H1
ggcagccggagaacncggtttatgatttcgaggacaagatcaactttgcggtgttcccttcgctgcagggtgggccccacaaccaccagatcggggctcttgccgtggcgctgaagcaggccgcgtcgcccgggtttaaggcctacgccaagcaggttaaggccaacgccgttgcgcttgggaattacttgatggggaaagggtacagtcttgtcactggagg

SEQ ID NO: 9559 - DNA, 246 bp, Glycine max
  Clone ID: 701149937H1
gggattggattcgaggataattattatcgtaaagaatattaaaaagcggaagaaagcagaacagagcatagcagagcagagagggaggtggaaaaagaaaaaaaggtgaggaagaaatcgaggaaaaggaagagaagaagaagggatgagtgccacagtgactctaactctaaacctatgtcgttcttccatcgttgcttcttgtccacattataaccacaaaccaaaccctaatttcaatgcctt

SEQ ID NO: 9560 - DNA, 241 bp, Glycine max
  Clone ID: 701149938H1
gggtgctgtgagtgagattacccatagatagagggcgcggcataacctaaacttacccttcttctctctgtgtgtgtgcgcatcaaacgcaaccagaagcagccatggccactgcaagaactgtgaaggacgtttctcctcatgagttcgtcaaagttactcttctcacctcaagcgatctggcaagatggagctgccagagtggactgatattgtgaaaactgcaagatttaaggagttg

SEQ ID NO: 9561 - DNA, 234 bp, Glycine max
  unsure (1)..(234): unsure at all n locations; Clone ID: 701149939H1
tgtgaaccggacatacaaggttggactgaaccggttcagtgatcttagcaacgaggagtaccggtcaaaatacctgggaaccaagattgatcccagcagaatgatggccagaccaagtagacgttactctccgcgcgtggctgacaatttgcnngaatctgttgattggaggaaagaaggtgctgttgtcagagtcaaaaaccaatcagaatgcgagggctgctgggcattctc

SEQ ID NO: 9562 - DNA, 240 bp, Glycine max
  Clone ID: 701149940H1
ggtgaagtgtatttggtcactgacctatcttggtagagatttgaagtttaaaccttcaaattaatcaaaccattttaatttgcctatagattctgagtcactgctgctatggcgctacgcgtacttcttgtgttggggatgttgctgatgttgtgccttgttaaggtttcatctgatccaaagatagaagaagaaatactggaagcagaagaagaactgcagtttcccgataacgagcca

SEQ ID NO: 9563 - DNA, 242 bp, Glycine max
  Clone ID: 701149941H1
gaagtgagtttgttgatcgagataactagaaacagtgtgatgaaaatgaaggtccttgttttcttcgttgctacaattttggtagcatggcaatgccatgcgtacgatatgttccctctccgaatgaacactggctatggtgcccgtactccggaggtgaaatgcgcaagttggaggcttgctgtgggagcacacaacatctttggctttgagaccattcctgaagagtgcgttgaagcaac

SEQ ID NO: 9564 - DNA, 223 bp, Glycine max
  unsure (1)..(223): unsure at all n locations; Clone ID: 701149942H1
ggcacaaaaatacactacaaaacaaaacagagnaaagagagagtgtgtgaaaagtgaaacaaaaaacagaacaacaatggcgacacttaaggttcctcagcctcttccccccgttgcagatgattgtgagcagctccgaaaagccttctcaggttggggaactaacgaggagctgattgtatcgatcttggctcataggaatgctgctcagaggaagcttatc

SEQ ID NO: 9565 - DNA, 243 bp, Glycine max
  Clone ID: 701149943H1
tccagctaaagacgttaaagaagcgctactaggagacaacctagtaccttttgaatctatgcttgttatttgatcactttttatagtaggacgcacctagttgctcatgatcctggggatttaaataaaacaagcgcaagctcggaaggtagtcatacctcacaaaatatatatatgtatgtttaggtagtgaaaataccttagatatgcatgtatgtaaacaaaaaaatacttcacaaaata

SEQ ID NO: 9566 - DNA, 252 bp, Glycine max
  unsure (1)..(252): unsure at all n locations; Clone ID: 701149944H1
ggaaaccagcaggggctccaattcctactcttagccgcagatctctcagggcttgcatcttctcagttgtgaagatgtacacatcaaggaagaaaatccacaaggataaggatgctgaaccaactgagtttgaagagtcagttggacaggcattgttttnnnctggaaaataccaaccaggagcttaaaagtgatctgaaggatttatacataaactcagctgtgcaagttgatgtttctgggaaccgcaag

SEQ ID NO: 9567 - DNA, 243 bp, Glycine max
  Clone ID: 701149945H1
ggcccccgttttattgcatctcagaggccgattctttcgccgcttctctctttccttgtggtgttctcgtgttgctcgtaacaaaatggttggaagtgttgacgctttgaatgagggtttgagaatcaacggagcagttgaaccgttgcctgaggactttgatgcaacagctgtaatcatagatcccgtgccttctgcagttgtagacaatggcattctgaaggaggaggcgcagatcaataa

SEQ ID NO: 9568 - DNA, 241 bp, Glycine max
  unsure (1)..(241): unsure at all n locations; Clone ID: 701149946H1
ggtttttaactgaaangtgaatgggtagttactctcgttacggttggagagaaatgaaggcgctaggcgttgttggtggtagtggtgccccagtgccagtggtatgttctagtgttaggaaccaccggtttcgcgtttccttctcttcttctccgtcatcgggacccaaaacggtggaacaagtgggaattgctgctccgaaatctgaatacaagcccggtgtgtttgatgacttgtttct

SEQ ID NO: 9569 - DNA, 246 bp, Glycine max
  Clone ID: 701149947H1
gggtatttagcctacattgtgtattttaccctgggtctcggttaccttctcccatggaacgctttcatcaccgccgttgattacttctcctttctctaccctgacgccagcgttgaccgcatcttcgccgtggtttacatgatagtcgggctggtggggatctccctcataatcctctacagccacaagtctgacgcctatgtgaggatcaacgttggattggccctattcgtcgtttcgcttctc

SEQ ID NO: 9570 - DNA, 266 bp, Glycine max
  unsure (1)..(266): unsure at all n locations; Clone ID: 701149949H1
tgctttgagtttcctcaactcaagaatggctgccaacgactcgtccaccgagattgatactaagaagctttcgaattgttggggaaatgctcaaatgccctttgcactccccactctcctctcttcacnaccccaacacctncacacatnattcaccaatggncgctggacaaattttttcagaatttctaaaactcccctggttctcataacncttttcctccaacaaaaattctctctctncccctcggaatttcanaaccctt

SEQ ID NO: 9571 - DNA, 241 bp, Glycine max
  unsure (1)..(241): unsure at all n locations; Clone ID: 701149950H1
gatctatctgagttctcagaagagaagacttatggtgcttcaaggcaaagtaggaaaatttttcccaacagacatataccttcaggcacacctcgtacaacagctgtgtcggtctctcgttcatctggtggcaggcgaagagacaatcctcttgcccagtctgttccaaacttttctgatttaaganaagaaatacaaagccttcttctggagtcagtaaaacaacccgctctcaggtagg

SEQ ID NO: 9572 - DNA, 247 bp, Glycine max
  Clone ID: 701149951H1
gacaccaaacaagttaaaagaagagcatcactgaactaacaaagcaaccctatgtcgaaggtggtttgtgtcaccggagccagcggcgccatcggatcatgggtggtcctactcctcctccagcgtggttacaccgtccatgccaccgtccaagatatcaaggatgaaaatgagacgaaacatttggaggaaatggaaggagcaaagagtcatctccatttttttgaaatggatcttcttgacatcg

SEQ ID NO: 9573 - DNA, 243 bp, Glycine max
  Clone ID: 701149952H1
tatgcgagtcaatgcttccgctacacaaggcagccccttattgatgcagatggcacaatcccaacctagaggtcagatgctaagtgaaaatattggtcctcgtgttccaagacttccatcatctttggggcagcctactgtatcaaatggaatttctaatggtcttctgggcagaaatgggattgctggtaataacagaggacctgcatataatcctgttccaccaagctcttcgttgttgag

SEQ ID NO: 9574 - DNA, 239 bp, Glycine max
  Clone ID: 701149954H1
gacagaacaatactgcaatagagaaagaggcagatagaaaaaaagagcgacttttgagttcaaaagatgactaacttcccattgatcaacttggagaagctcagtggtgaggaaagaaacgataccatggaaaaaattaaagatgcttgtgaaaactggggattctttgagctggtgaatcatggcattcctcatgacatattggacactgtggagaggttgaccaaagagcactacag

SEQ ID NO: 9575 - DNA, 238 bp, Glycine max; identical to SEQ ID NO: 8719
  Clone ID: 701149955H1

SEQ ID NO: 9576 - DNA, 268 bp, Glycine max
  unsure (1)..(268): unsure at all n locations; Clone ID: 701149956H1
cactcctacctatcctatgaggatgtagttttaaattaaatttcattaccaaataccaatatgagaattttataggaagtaatctataaacatatttatatatgtaattattatttgaggngtgtaacttatcctaactttaagaaacctccaaaaatttaactcacctttactttcacatacgaaaaataataattggttgaaaatagcatgttaaacatttcacataatgtatatatagctttggggtggaaattaagctacattt

SEQ ID NO: 9577 - DNA, 239 bp, Glycine max
  unsure (1)..(239): unsure at all n locations; Clone ID: 701149957H1
gatccgtatctcaaactaaacagcacaacacttttgcacaagcaattgcnacannccaacgttgaattgtgtctcantctcttntatctntngtnctntctcacagtgtctctnttcttctncaatcaagagnnganagaacacaccctgatnncanggnaggnggtgtaccagnggctganatgtcngccttcagagaatgtttgtctctancatggnagnatncttangttcntcgc

SEQ ID NO: 9578 - DNA, 240 bp, Glycine max
  unsure (1)..(240): unsure at all n locations; Clone ID: 701149959H1
ggagcctcgaaaaattctacatttatctatcttggttctctctctcaatctaacgatttcgccattcaacagcgatctttccgtctccatcatcgtcatnaacgctcccatttcctaaacctcaggttggttcttcttcttcgtgttcccgtgtttcgccttttctctctctttctttcaatctcaaaccacagctatgatcctctttcgcggaattcggtaattcgcctgttgttggtt

SEQ ID NO: 9579 - DNA, 242 bp, Glycine max
  unsure (1)..(242): unsure at all n locations; Clone ID: 701149960H1
gatatctattacatataaactaggtagcgtagttctattattactaaaacttgttacatcaagccaatggagacacacgctnagataagggtgtcaaagttcaagagggtttgtgtctctgtgggagtagccctggcaaaaagagaagctaccaagatgctgccattgaacttggcaatgaattggtctcaaggaacattgatctggtctatggaggaggaagcattggtttaatgggtttg

SEQ ID NO: 9580 - DNA, 246 bp, Glycine max
  unsure (1)..(246): unsure at all n locations; Clone ID: 701149963H1
ctacaccatatcgtctaagtggagcccgtccaagtgatcgaggtaacgtcatccgaggaagaccccgaggaggatctggaggagctaactcctgagcctgntgtggatgcccntgactattnagagggtgatgangatccactttcttgaggtggattctcccgaggaagtcatgtcggcatctgaggcagactctacggaggatagtggcccgggggagatggcgatcagcggaggctcttcatc

SEQ ID NO: 9581 - DNA, 250 bp, Glycine max
  Clone ID: 701149965H1
gggaaactcgcctgaggattgctgttggagcagccgaagggcttgcatatctccatcatgactgcaatccacgaatagttcacagagacatcaagtcttcaaatattctgttggatgagaactttgaggcgcatctttctgactttggcacggcaaaatgtatctcaacagcaaaaactcacgcatcaacttatgtccttggagctataggctatattgaccctgagtatgcccgaacatctaggctgat

SEQ ID NO: 9582 - DNA, 248 bp, Glycine max
  unsure (1)..(248): unsure at all n locations; Clone ID: 701149966H1
gattgagctttgttctcttttgtgttagtgagagaaagttctctctgcttctctctcttagactcaaaaccctattgcgtgctttgcaatcgaccccgattatgngccaacagtaacctccctcgaagaatcntcaagggaacgcagcgtttgctcagtgagccagcacctggaattantgcgtgcccttcggaagacaatatgcggtatttcaatgngatgatccttggcccaactcagtcgccnat

SEQ ID NO: 9583 - DNA, 237 bp, Glycine max
  Clone ID: 701149968H1
ggtgatttcattgcataatccattgactagaaatcccatattttccccccacattaactcacccaacccctctttctaaaaggcctcaaggatacactccggacttaattacgttattttgttagggtcaccgtttcgagatattctaaacttgtactgaaaaatatggagggaaaagaagaggacgtaagagttggagccaacaggtacggagagaggcagccaatagggaccgct

SEQ ID NO: 9584 - DNA, 236 bp, Glycine max
  unsure (1)..(236): unsure at all n locations; Clone ID: 701149969H1
ggagtgggacatttgtgtatttgagcttaggaatagaagtagagggaactagtgaagagataaagaagacggaggcggtttggagtatgacttcttgcacctcttttgcatcctttctcatnnnnnnnnnnnnnnnnnnnnnnntgtgcttcgcgcaaacccactcaatcacatgtaaacaacgcttcccatttccttctgtaaagggaagaagaaagttctcaactttatcattt

SEQ ID NO: 9585 - DNA, 215 bp, Glycine max
  unsure (1)..(215): unsure at all n locations; Clone ID: 701149970H1
ggtgcacaagtgaanttgttgatcgagataactagaaacagtgtgatgaaaatgaaggtccttgttttcttcgttgctacaattttggtagcatggcaatgccatgcgtacgatatgttccctctccgaatgaacactggctatggtgcccgtactccggaggtgaaatgcgcaagttggaggcttgctgtggaagcacacaacatctttggctt

SEQ ID NO: 9586 - DNA, 238 bp, Glycine max
  Clone ID: 701149972H1
gacacacagagcggttctcatattttggagaatccgaaaaacacgttaaagaaagtcccattcccactaccgaagcaaattaagaagatgaagcagcagagagtggagtttatgggcatgggcatgggcatgggcatgggcctgggccttttggtggtgatgatggcatgtgggtcggcgagtggtgcggatgatttggcaaccaagtgttcagcggtgattcagaaggtaataccgt

SEQ ID NO: 9587 - DNA, 237 bp, Glycine max
  Clone ID: 701149973H1
gacaacagcatcgtcggcggcgtaaccctccaacaacaacacttcctcgtcagaaaatgtctctggtggcgaacgaggatttccagcacattctgcgtgtgctgaacaccaacgtggatgggaagcagaagataatgttcgcaatgacctccatcaagggtattggaaggagattcgccaacatcgcttgcaagaaggctgatgttgacatgaacaaaagggctggtgagttgactg

SEQ ID NO: 9588 - DNA, 223 bp, Glycine max
  Clone ID: 701149974H1
tgctttgtgcctcctgaagatttattgagaagtaaaggggaaattggttggaagggatccgctgccactagtgcatttaggccagccgagctcaggaaagttatggaaatgccttttggggcgctaacttcctctatacctgatgctccagctggaaagcagagtcgagcaccattggatattgacttgaatgtggctgatgaaagaatacttgatgatattt

SEQ ID NO: 9589 - DNA, 243 bp, Glycine max
  Clone ID: 701149975H1
ttccatggtgaattgcttacatttattaactaatgaatgtgaaactgttgatacaaaatcttattcactgactgtagaattacctaaagaccctataaattttagattttgaaattttatcatctgcaattatttttcttaaattattgtcgtttgatgttacaggggttgactgtggtcaatgtatcggcaacaacatttcctcaaacattggattggctgcatggttaccttcttcaggta

SEQ ID NO: 9590 - DNA, 239 bp, Glycine max
  Clone ID: 701149977H1
gacgcacattgttactgaacacacaaaccctctcaccaaaccttcatcgatctctttgtttttttataaattataatattgatacgaagttgtttctgtaaatagcaattcagagaccttaaaggtagtgagtattttcctccttacttaatctattgtgtgatcaaagtcgttattattaaattagataattgataaccatgtcgatgaagctgttattagcttccctatccattcgg

SEQ ID NO: 9591 - DNA, 239 bp, Glycine max
  Clone ID: 701149978H1
gcagaggctgtgtttgaccaggagtttatcaacgtgaaactatctgattacattgggaagaaatatgttgtgctcttcttctacccgttggacttcacctttgtctgccccacagaaatcactgctttcagtgaccgacatgcagagttcgaggcactaaatactgagatattgggtgtttcagttgacagtgtgttctcgcaccttgcatggatccaaacagatagaaagtcaggtgg

SEQ ID NO: 9592 - DNA, 241 bp, Glycine max
  unsure (1)..(241): unsure at all n locations; Clone ID: 701149979H1
gacaactacatttgcaaaacaaaagccatagtttgttacttctcttcgccttttgctttgcaattgtcaccaaacaattcttgcttagctctcacaagcaagcattatcaacaatgtnngtcagaactagactcatattttcctctccttcccctaagcaatgcatnaatcacattcttgagttttctgagctttgtattaactgttttctttcatgttttagatgtagaagcaataatta

SEQ ID NO: 9593 - DNA, 158 bp, Glycine max
  unsure (1)..(158): unsure at all n locations; Clone ID: 701149980H1
gatctcaagccacttcagagaaaatngcggtacctctgctctcgaagaagatcgtgaagaagagggtgaagaagttcaagaggcctcagagtgacaggaaaatttccgtcaagacaaactggcgtagaccaaagggtatagattcccgtgttaggaga

SEQ ID NO: 9594 - DNA, 238 bp, Glycine max
  unsure (1)..(238): unsure at all n locations; Clone ID: 701149981H1
acacacgtgttatatgtggtgaaatagttaactgatgtaaaatcaataatccgaaatgatgaccatactttttgtcccaactgagatttaattctttaagtaatcaagatagaagtgcattttcttagctactaggtttactagatatttatagtttgtcagattttaagggtgtgatnagattacaacttgggtgtgacgggtatgctaatgacaaataaatgctaatgagatatcc

SEQ ID NO: 9595 - DNA, 240 bp, Glycine max
  Clone ID: 701149982H1
ggatgctcctccttagtcctcctcagcctcaacttcaacctttcttcacttcccttcacatggcagctcttgtgaaaccaatttccaatgtcactcccaaatttgtcagcagccccagaatgggctcatcacactcctccaaattcagcaccataataagaatgtctgccactgccaccccaccaccatccacctccacaaagccagcaagcagcaagaagggcaatatcaaggagaccc

SEQ ID NO: 9596 - DNA, 242 bp, Glycine max
  Clone ID: 701149983H1
cagtgtctagtcatactattcttagatgataaacaaagttaatgtccacatgtaataaacattacaaaaacaaatgatgtgcatcctatatagcaaataatataaatcatgatggatattttcatatgacattgaagtcttgagccatccaatgcaggatcccttaaattatgtaaaagctaagtcttagtctatttatcaaacaccaaataacctgtacacaattctgattcagaagtcaa

SEQ ID NO: 9597 - DNA, 235 bp, Glycine max
  Clone ID: 701149984H1
gggcattgagtgagagtgttccctctcctctcttctgctcaaacaatgtcgcaaacaacgctgcacgctttcgtcgccaaaaaccttggatgtggaatggcagaaggcaagtgtctcccatgttcaggtgtttctggaagaactgctgctgtatattcctactcttctctaggtcatcgcagaatccattcccatgtccaagttagaggactaaagtgtggctttaggggtgcat

SEQ ID NO: 9598 - DNA, 238 bp, Glycine max
  Clone ID: 701149985H1
gatgccatctcttccttgaagccaccccatcagtttgatgcctgtttcatggatattcaaatgccagaaatggatggatttgaagctacaaagcgagttagggagatggaagatagtgtgaacagagaagtatctatggatgactttgagaatattacaaactggcatgtacccattttagccatgactgcagatgtgatacatgctacacacgaggaatgcctaaagtggggcatgg

SEQ ID NO: 9599 - DNA, 232 bp, Glycine max
  Clone ID: 701149986H1
gaccgacataaggaaactctttctcttcttcgccagttttggactttgatccctgcagaatattgtgtaatcagactagtcactaatctctttggttgacaataattgtcataataccagtgattgttgcatagaaaatttgcccatgtatttatacctcagcacaccatgaaattagaaggtaataaagtggctttttggcattcaaatattggtctgagcctgaatctca

SEQ ID NO: 9600 - DNA, 237 bp, Glycine max
  Clone ID: 701149987H1
gaggaaataaacagcttccatttctttgcggtcttcctttccttgagagaagagcatctgaaacggcacatttagttgcagggagatctgggaagcatctcttcctcatggacaatgatgatggaaagcgtcctctgctcgtgcgaatggttaatgactctgatgatttaaagtttatgttagtattaaagtatcagttaagctcatcaaatgctagtatttgtttttgtattgttg

SEQ ID NO: 9601 - DNA, 234 bp, Glycine max
  Clone ID: 701149988H1
ggtgctgcagttcaagctgctatcttgagtggtgagggtaatgagaaggttcaggatcttctccttcttgatgtcacccctctctctcttgggttggaaactgctggtggggtgatgacagtcttgatccccaggaacactactatcccaacaaagaaagaacaggttttctcaacctattctgacaaccagcctggtgtgttgatccaggtttatgaaggtgagagaacaagg

SEQ ID NO: 9602 - DNA, 236 bp, Glycine max
  Clone ID: 701149989H1
cgtatttatatttctagtcaatgtgagatatttagcacctctaggaggttaggaattcttacacaatgtcttgagcctgatatacacatggtgttgaaagcagggacttaaacttagttatcatagacaatctgctttacaaacactgcataccattttgtgacggtcaccatatttctctaccaagtttaattatgcttgtaatttcttatttcggtggctgattcctttgtgtt

SEQ ID NO: 9603 - DNA, 235 bp, Glycine max
  Clone ID: 701149990H1
tatacttacgccatatcaatgacacgttccttctcttgaggagccaaagccataacaggcagaaaagagcttgcactttgcagctacaaacagttaaagaactagttgtaagtgcatcatacaatattaaatgaaatgcaatagtaaaaagcccgcctaccatgtagaaaccagccatatactccggagtggcaccaataggcacttgagaatcatacacaacaagtccaaccta

SEQ ID NO: 9604 - DNA, 241 bp, Glycine max
  unsure (1)..(241): unsure at all n locations; Clone ID: 701149991H1
gttgaagaagtagatggaaaagtggggcctggtgcactgtttgtaaaggtcagtatggatggtgcaccttacttaagaaaagtagacttgaagaattacaatgcgtatgccgacctatcttctgcgctggagaatatgttcagttgttncaccataggttcttgtggatctcatggaaatctgggaggggaggtgctgaatgaaaccaagctgaaggatctgcttcatggatcagaatatg

SEQ ID NO: 9605 - DNA, 242 bp, Glycine max
  Clone ID: 701149992H1
ggaaacagctgaaaagaatagcgtgacaatcagcaaaggcagaaagagctgaaggtgtgacacaaaagtagcaaatttcagcattagcgtagaaaatggagttcgttcctgaagaaggcaagcaccttcacgaggattgctccactctgattttgcctgctctgtcaattggcaatgtggggcagctggttgcagatcttttgatttcatcaatgggatcagagagagttgggtatttggat

SEQ ID NO: 9606 - DNA, 245 bp, Glycine max
  unsure (1)..(245): unsure at all n locations; Clone ID: 701149993H1
ggacgctagtaagtttttcatccaatatcacagaatcacaatagcttttctctccgtgtagactcatccaaacaaacactgtaaaaaccgcaagaactctctatcactttgccacccttcattcataaacactttccattattctatgaactcaaactcaaaacaatgaccactttttctctctactctcatttcctttnctcnnttcaactctattttccatgcccccttcaaagggaaacaac

SEQ ID NO: 9607 - DNA, 181 bp, Glycine max
  Clone ID: 701149994H1
tccctgattctgttggttccatctcttcattcataccttgatccgtgatctcccaatttctcacttgaaagtatgaagaaagaatagataagtaatggcaggagtagaagcaagggctctgtggcagagaactgctaatcgttgctttgtccaagaagatgcaaaaagagctcccaagttg

SEQ ID NO: 9608 - DNA, 239 bp, Glycine max
  Clone ID: 701149995H1
gacacaccgtttgttctattcttaactcaacttctgctacccactctcttcttccaagtccaaccacgcttttctctacagtcatgggcaaggtcaagatcggaatcaacggatttggaagaattggccgtttggttgccagagtcgctctgcaaagagacgatgtggagctcgttgccgttaacgaccctttcattaccaccgattacatgacatacatgtttaaatacgacagtgtt

SEQ ID NO: 9609 - DNA, 258 bp, Glycine max
  unsure (1)..(258): unsure at all n locations; Clone ID: 701150001H1
ggaagattgagagttagggtttaagcgagatcagagaagaaggcatcatgtttccgggaatgttcatgcgcaagcctgacaaagctgcagcactgaagcagctgaaatctcacgcggccatgttcgggacatgggttgttgttattcgagtcaccccttacgttcttcatttctctgcgccgagaaagaggacttaagctcgagcttnagcttctcaatcttccccgccagtggatcttcaggagtaggtgtgtcctg

SEQ ID NO: 9610 - DNA, 255 bp, Glycine max
  unsure (1)..(255): unsure at all n locations; Clone ID: 701150004H1
gagtgaagagatggaaggcatagtacacaggacagttgaagtgaatggcataaaaatgcatgttgctgagaaaggtgaaggtcccgtggtcttgttcctccacggcttcccggagctctggtactcctggcgccaccagattctggctctcagcaacctcgncctaccgcgccgtggctccagatctccgcggctacggagacaccgnggcaccagcttcaatcagcagctacaccatcctccacttagtttctg

SEQ ID NO: 9611 - DNA, 254 bp, Glycine max
  unsure (1)..(254): unsure at all n locations; Clone ID: 701150005H1
gagaacgaaaaagaatcatcgatggnagagacgaaaganggttcaggttcggagatgtctctnaaggatcagggcaannagtttttcaagtcaggaaantatctcaaagctgctgcactctacactcaagantngaagctagacccttctaaccctaccctctatagtaatcgtgctgnagcantactgcaattggataagcttaatanngctctagatgatncagagatgacaatcnaattaanaccccaatg

SEQ ID NO: 9612 - DNA, 240 bp, Glycine max
  unsure (1)..(240): unsure at all n locations; Clone ID: 701150006H1
tctagatttgaggcgtaaaggctgtatagatcatgaactcctggacatgatcatgggatatgctgtgtcacatgatgtccagcagttggcaattgaagttaatttaaatgctaaatttggttttaagttgcaccctagtatcttttcttgtaaatctttgacatttcttaagctttccatctgggctgtcccttggatgactgaacttccangttccctgcagttgccagcnttgaaaag

SEQ ID NO: 9613 - DNA, 256 bp, Glycine max
  Clone ID: 701150007H1
gggtgttggttcttcttttgctatctcaatctcaatggcttctaagatcttctatctattatctctcctcttgctagcacaccttcttcagccacacgtatttgttaaaggagatggcagtttgatagagaaaacctgcaagaacaccaagtactacaatctgtgtttctcctccctgaaatccaatccaagcagcgcaaacgcggacccaaagggcttggctgtgatcatggttgggattggaatggccaatgcc

SEQ ID NO: 9614 - DNA, 252 bp, Glycine max
  Clone ID: 701150008H1
ggaatcgacgaaactgaggcaaaacctacatagggaaggttgccccaatatcagcatgcttcccattgcactgcactcatcccatgcgaattaagctttccgattcgtttggacctaaaaaacaacacctggtttgattgtcaccttgggtcgcacagttattactacccttctcttgtgaattggtcgaatatatgctccaactatggataatatgaagaaagatgaaccccaaaatcggaagcaagatga

SEQ ID NO: 9615 - DNA, 255 bp, Glycine max
  unsure (1)..(255): unsure at all n locations; Clone ID: 701150011H1
gggaggaaggaacgagaaatgaaagaaacatttgttgtgtctgtgtgtgtgggtgggtggtacttagccaattgtgagcaaataacaaacgagtggctttcccttcttctcatcctatatataccattcccatcactccccatgccctctcaattcacttcctatccccttctctgattctctccatatattatctcaaacncctctcacagaatgggaagtgctggaggaactgactanggtgcatacacttag

SEQ ID NO: 9616 - DNA, 148 bp, Glycine max
  unsure (1)..(148): unsure at all n locations; Clone ID: 701150012H1
tctacttctacccctgctcccactctagcacctgcaccagcactagttccttctctagcaccctccggccccttcacttcgagcacaaatgtgatagtgncgatgctgcagagcctccaccacggcttatgcctggtgatgcaaagta

SEQ ID NO: 9617 - DNA, 258 bp, Glycine max
  Clone ID: 701150013H1
ggcacaagtgagtttgttgatcgagataactagaaacagtgtgatgaaaatgaaggtccttgttttcttcgttgctacaattttggtagcatggcaatgccatgcgtacgatatgttccctctccgaatgaacactggctatggtgcccgtactccggaggtgaaatgcgcaagttggaggcttgctgtggaagcacacaacatctttgggctttgagaccattcctgaagagtgcgttgaagcaacaaaggaataca

SEQ ID NO: 9618 - DNA, 106 bp, Glycine max
  Clone ID: 701150014H1
gactgagggttgtccaggagaacgatgtaatttaggcagagatgagttgtatcatacatatgcgggatatctaagaaataagcgtgtcattcttctacaatcccag

SEQ ID NO: 9619 - DNA, 272 bp, Glycine max
  unsure (1)..(272): unsure at all n locations; Clone ID: 701150015H1
gaagcacaaaccttattcaacactcatatccttatcctgtttctttcaatggaagtcatttctggcttctagcttgaatcccaacgctccgatgttcgtnccactcgcctatcggacggtggaggatttctccgaccagtggtgggacttcgttcactcctccccctggttccgcgactactggctccgcgagtgcttccaagatccccagttccaaaacgacgacgctttcgacttcgactttgacctagatctccaagatgaagatgaaa

SEQ ID NO: 9620 - DNA, 69 bp, Glycine max
  Clone ID: 701150016H1
ctaagatctgtaagaccaatgatgggtgcacatggtcagtttattggtaagtcaaaaggtgaagatata

SEQ ID NO: 9621 - DNA, 229 bp, Glycine max
  unsure (1)..(229): unsure at all n locations; Clone ID: 701150019H1
ggtagcggctcgctgcgttcataaaccctcattttcattgcgcaagaaaattgaagagaagcaaaaccccaacatccctttcgcctctgccctcaccagaacagaacatcgtcgtctcatttctgtccacatcgtcgtagcagagaagaagagaacctcttcaatcggaaatggacgccggnaaggttccgganntnccannctcganaacacacccacgcattggttg

SEQ ID NO: 9622 - DNA, 219 bp, Glycine max
  unsure (1)..(219): unsure at all n locations; Clone ID: 701150020H1
ctatcangtatccaaggatagctgancaagttcaataatgattggttaatagattcctgtcaaaaattgaatgagcatcaccttaattgccttcagaaactagaatttacttggtgccacagaactattctaagtacaaccgattttgtttcacagtattcaagtcaagttcttagtggcaaccttacatatagtgagtttagataatatacannnntc

SEQ ID NO: 9623 - DNA, 253 bp, Glycine max
  unsure (1)..(253): unsure at all n locations; Clone ID: 701150021H1
ggtgtccaagcttatttgttgctttgtgcttaatggaaggcccttgagcttttctttctttctctgctctcttttcttttaggtttccactctcacacactctccctctnctctttctctgcaataatctctcttctcttcttcactctctcaactcctgccaaacccccatttccgcagttcttaaatttggagtctgatgtctccgccattgctggttaccgaagatgaagggcagtnccatgcctcgatg

SEQ ID NO: 9624 - DNA, 248 bp, Glycine max
  unsure (1)..(248): unsure at all n locations; Clone ID: 701150022H1
gcagacgcatcacacattatgatgcgtgttattaaccataaccatgtcagacgaggaacaccacttcgagtcaaaggctgatgctggggcatcaaagacatttccccagcaagctggaaccatccgcaaaaatggttacattgtcatcaagaacaggccatgcaaggttgtggaggtttccacttccaaaactggcaagcntggacacgcaaagtgtcactttgttggaattgacatattcatgggaa

SEQ ID NO: 9625 - DNA, 251 bp, Glycine max
  Clone ID: 701150023H1
actccattacattcataaaattgtgtagatgaacaacaacaatgtgttttgcaaacgacaaggaataaaatacgtgaatatgatgcgttttacgtaggatatactaaaaaagcatacggtaaaggtatcaaatttaacaaaatcctatatcactagaggtttcacaaattcaaagaatgtaggtcctaaagaagaagaaaaggataagagagttgttttgataagcttccacgacatgcgagttcaagtgt

SEQ ID NO: 9626 - DNA, 249 bp, Glycine max
  unsure (1)..(249): unsure at all n locations; Clone ID: 701150024H1
gtgaagtgttattgtttcatcacgaagatatgggaattccctgggaaattgctaagcttggagttcgacagggtatgtggggagctgtcaagaagtttgatccaggactacggacatatgagaaacaaagggtttctggtaccccattgtcaccctgtgcacgtnctgctaagatcaacactaaagtaaccatggactatgtgaggtctctggaaaacacgaccagtgacttgttggagactggaaatc

SEQ ID NO: 9627 - DNA, 248 bp, Glycine max
  unsure (1)..(248): unsure at all n locations; Clone ID: 701150025H1
tcctccatgagataacgaggcaaaacaatcggattgatgacaaaaangctgcaacttgtgcaacttgataactggttctacatgttgacgccaatggagatagtttaagtcatcaagtttctcagcgatagagtttgggaacaactgagaaatgaaattcgaaggagtagaagccatggatgcatggatctggaacttgtgaagggacgatgattacgaaaaatggctctagntacatatccgggaac

SEQ ID NO: 9628 - DNA, 252 bp, Glycine max
  Clone ID: 701150026H1
ggaagatacggaggctgctgctatcgaatactcggataaggaggaacatctttccaatggcgtcccaaattacccgtgagtggtctggaatcaatacattcgcacctgctacccagactaagttgcttgaactcttgggaaaacttaaacaagagaatgtgaactccttaactatacttgtgatgggaaaaggtggtgttggaaaatcttcaactgtgaactccatcattggggatagagtggtttcgatca

SEQ ID NO: 9629 - DNA, 255 bp, Glycine max
  Clone ID: 701150027H1
ggcacaagtgagtttgttgatcgagataactagaaacagtgtgatgaaaatgaaggtccttgttttcttcgttgctacaattttggtagcatggcaatgccatgcgtacgatatgttccctctccgaatgaacactggctatggtgcccgtactccggaggtgaaatgcgcaagttggaggcttgctgtggaagcacacaacatctttggctttgagaccatcctgaagagtgcgttgaagcaacaaaggaatac

SEQ ID NO: 9630 - DNA, 252 bp, Glycine max
  Clone ID: 701150028H1
cagacttgtaaaatcgcaaaacaagaataaaaataaatttaaaattagcatcttctcgtaagttttcgaaatgttcagcgaatttgtcttccaatttttcttttgccatccttctagacacaaatataatagcctaataatagccttgtccttatgctttgggtggttccattaattgatagtatttgcttttttatttcttattgtcaactaatttgtcagccatctatttttcatggtagtcatatgatc

SEQ ID NO: 9631 - DNA, 241 bp, Glycine max
  unsure (1)..(241): unsure at all n locations; Clone ID: 701150030H1
tctccaagcatanaccagaacngnnagtactgtacattgatgtganatcaaattattacatgatcgcctaanagaggaaacnagtcagtaaggaaacaanacagtgggacaaaanatgttttaaatggtnacctagcgctannncttttgacttccacatctnaggttagntncatnnttgtngncancatcagnanggnagtgtatgggngatcacgatttagnatagtttagttnttng

SEQ ID NO: 9632 - DNA, 262 bp, Glycine max
  unsure (1)..(262): unsure at all n locations; Clone ID: 701150031H1
ggtccacccgtttcgttagatctaacaaccacttatcccctttctccttctaacgagtgaggaaaaatggcgcgtaagaagatcagagagtatgactcaaagaggttgttgaaggagcactttaagagactctctggcaaggagttgccgatcaagtctgnacaanntaccgcatcaactgatttcactgagctacaagagaaggaaccctggctttcatcttctaaattggttgttaaacctgacatgttatttggaaagc

SEQ ID NO: 9633 - DNA, 261 bp, Glycine max
  unsure (1)..(261): unsure at all n locations; Clone ID: 701150032H1
cctacgaccactatttactttgtatttatcggtggttggcgtatttcaacattaactaaagtatggaacactgtgctttaatttatacatcaggagagccaatgttagattagntaattanatganttagcatanattagttattagagnttcttataataccnaattgatganaattgtatggactntgctttatgagtggctcatgntgataagtcactcagtttagtagtgataataactcttttncnccatattttt

SEQ ID NO: 9634 - DNA, 248 bp, Glycine max
  unsure (1)..(248): unsure at all n locations; Clone ID: 701150033H1
gacgttgaggttgctgagcgtggctccttctctgggaaggactaccaggaccctccaccagcaccactcattgatgctgaggagctcacaaagtggtccttttacagggctctcattgctgaattcattgccactttgctctcctctacattatgtgctcacagtcatagggtacagcaccagactgacctcaggaaantggtgaatctgtggtggggttggattcttggcatgcaggggctttggtg

SEQ ID NO: 9635 - DNA, 251 bp, Glycine max
  unsure (1)..(251): unsure at all n locations; Clone ID: 701150034H1
aatgtccactgatttcttgctttctggtggaggcttcttccacaaccaggaccccttttcctcctaaatttgaccaaaagtactgggtgagaccatcaaagtatatagattatagaacatcaatagtggaacaacacgtaccactcaaaggatttcaaaaaataattatggttatcngagaatttaatcctacaaaacataaatcaacctatcaacagcaaaagggcaagaacaacacttanntcaaaatc

SEQ ID NO: 9636 - DNA, 246 bp, Glycine max
  Clone ID: 701150035H1
ggaagaagagtcacagtcacaccactttagttttaggctaatattgtgaaagaaagatgagcaagagggcaaggagtccaaggttggaactgaggctgaacttgtccccaccaagggcagcagcaacctcaattatatcttcttcggagctgtcatcgacggagtcttcgacgttgtcgccggtgtcggtgcaatcgctggagagctcctgcgtgtcttccgaggctgaagagacaaggcaatgct

SEQ ID NO: 9637 - DNA, 244 bp, Glycine max
  Clone ID: 701150036H1
gggatctagggttgctcaaacctaaaagactaaactcacgggtccatacgttttccttcatccagatctggcagactagtatccgatcctctgtcctctcgaagctttcatcgttcaacatattctcaccatctcagtcatgggcctgctatcttgttttaggtctaccgtcctgagaaaatgttccaaaggaagctctggcatgtcaagattcctgtatacgaacaattttcaacgaaacttg

SEQ ID NO: 9638 - DNA, 66 bp, Glycine max
  unsure (1)..(66): unsure at all n locations; Clone ID: 701150038H1
gttgctgtaacatgggcgtatgcttgttaatgncccaactgggtttaagagtccagaccataaaat

SEQ ID NO: 9639 - DNA, 244 bp, Glycine max
  Clone ID: 701150039H1
gaaggtgcaagagtttgttgtgagctataagctagtttatcgtgaggagaatatgaagttgtttgttttctttgttgctgcagtagttttggtagcatggccatgccacggcgcaggctaccaaaggttccctctccgaatgaaaactggctatggtgagcgttcttcggaggtaaaatgcgcaagttttaggcttgctgtggaagcacacaacatccgagcctttaaaaccattcctgaagag

SEQ ID NO: 9640 - DNA, 248 bp, Glycine max
  unsure (1)..(248): unsure at all n locations; Clone ID: 701150040H1
ggaacaagtttgcgtttaccttaaaaataaacgcacaacaagtaattcattaaaatatcacgttaggaataggaagtgacatttctagagcaacaactgattatngcttccgaccaagcagcaacaacagtccctttggattgttgggaggacaacgagaaaaaacgtgtagtcttggcggaagcaagtggagacttcatagatgttctctttagtttcctcactcttccattgggaactatcgtccg

SEQ ID NO: 9641 - DNA, 247 bp, Glycine max
  unsure (1)..(247): unsure at all n locations; Clone ID: 701150041H1
ggctcactcatctcttacaacgaaaccctcttcatcttgttctatctgtgacgagcatcatggcctcaagagcagtgttattgttggctatgtgtgtgcttccggcgatggttgtggccattcgcccagcaaagaaccctttttgcgtgaagggtcgtgtctactgtgacccttgccgtgctggttttgagacctcagctaccacctaanattgcnggngcngagattatgttgnatncaagagggg

SEQ ID NO: 9642 - DNA, 244 bp, Glycine max
  unsure (1)..(244): unsure at all n locations; Clone ID: 701150042H1
ggaagtgtattggtcactgacctatcttggaagagttttgaagtttaaaccttcaaacccttttgcctttagattctgattctgagtctctgctgctatatatggcgccacgcgtatttcttgtgttggggatgttgctgatggtgtgcctgttaaggtttcgtctgatccaaagagagaagaagaaatatnggaagaagaactacattttcccgataacgagccacttattgtgagagacggg

SEQ ID NO: 9643 - DNA, 215 bp, Glycine max
  unsure (1)..(215): unsure at all n locations; Clone ID: 701150043H1
ttagccaacacaaccatcatggccacctctgctattcagcaatcagcnttcactggtcaaactgctctgaagcagctcaatgagttcgtccgcaagnccggtggcgccggcaaaggtcgcactaacatgcgccgcaccgtcaagagtgctcctcagagcntttggtatggccctgaccgtccnaattattgggnctttctgggagnagnttccat

SEQ ID NO: 9644 - DNA, 265 bp, Glycine max
  Clone ID: 701150045H1
ggactgtcaccagcgcattatagcacaccacacaaaaaagcaaagcagaaaacaactgttacttacacacgccatgggtatgggtatgggtatgggtatgggtaaatgagtggtaaatgagtggtttttgagcagaagcagttaaaagagaaagggattcagcgaagatgacatcggttggtgtggcaccaacttcgggtttgagagaagccagtgggcatggagcagcaggtgttgatagattgccagaggagatgaacgatat

SEQ ID NO: 9645 - DNA, 269 bp, Glycine max
  Clone ID: 701150046H1
gatgtatggaagaacggagagggtgagaagcgcgatgaagttggtggccaagatgaaagaaagagggtgcaaaccaaatgtgtggatctataactcctgatagacatgcatgggagggacaagaatttgaagcagcttgagaagctgtggaaagaaatgaagagaagaagggtagcaccggataaggtgagttatactagcatcattggtgcttatagtaaagcaggtgagtttgaaacctgtgtgaagtttttcaatgagtataggat

SEQ ID NO: 9646 - DNA, 238 bp, Glycine max
  unsure (1)..(238): unsure at all n locations; Clone ID: 701150047H1
gtccccgcgccaactcaaacgcntccagcgcctactctccatgacgggggagtattccccgaggaacatcctcggnggccgctggagagaatatcacggcagcaacgactggaaagggatgttagaccctctagacgagaatctccggcganaggtcgttcgctacggcgaattcgtccaagccgcgtatcnagccttccattcagaccccgccatgtcaacggaggagccgccacat

SEQ ID NO: 9647 - DNA, 248 bp, Glycine max
  unsure (1)..(248): unsure at all n locations; Clone ID: 701150049H1
ggacgcgtataaaaaaataaaatcgagatgctgctacgacgtggcgtccaaactaagccacacggctaataaatacggccggcacactttcactgcatcaagaaaggaagaaacataccgaatgagagcatcaaactcttcttcttcgatttccattgcganggtgtactttttcttcttccttctcttcatttcttcgctcttcgatctncgtccggggatgctccgaataccaccaccaccactcg

SEQ ID NO: 9648 - DNA, 245 bp, Glycine max
  unsure (1)..(245): unsure at all n locations; Clone ID: 701150050H1
ggaacctttgcattctattcattcaagattcagcaagtgcgttttggaagcagagaccgaaatacttcgagatggcccgtacaaagcaaactgctcgtaagtcaactggaggaaaagctcccaggaagcagcttgcaaccaaggctgcacgtaagtctgcaccaacaactggtgntgtgaagaagcctcatcgttatcgccctggaactgttgctcttcgtgagattaggaaattcggcaagagc

SEQ ID NO: 9649 - DNA, 243 bp, Glycine max
  unsure (1)..(243): unsure at all n locations; Clone ID: 701150051H1
gcatcagtgagtgacagtaacatcaggttgtggtttgtgaaggaagaaagggaagaaagaagaatcaggagaaggaaataatagtcaaccatggcagggagattgactaacgcagcatcgaggatcttgggcggaaacggcgtcgtttatcgatccgtagcttcctctcttcggctccgctccggcatgggcctccccgtcggcaaacactagttcccganaaaccccttcccatgaatgaag

SEQ ID NO: 9650 - DNA, 242 bp, Glycine max
  Clone ID: 701150052H1
ggtggcactgtggctaagtagagaggtagctttccctgtaagactgttacttaagattaccaagaattctagctagctggttagttcttttgtcatttcaaagagaaactgagagagccatagctagggagaataccatggacaaattgtatgggttgagtcatctcttcatgacagtgtttcttcataacttctccatgttcaggtggtaccagccatcaccgatgtcacaatggctgctc

SEQ ID NO: 9651 - DNA, 256 bp, Glycine max
  unsure (1)..(256): unsure at all n locations; Clone ID: 701150053H1
gaggggaaaaaagtagaggtgttgaagttggtttaaaagctcaactgccataaccaatcaatgggaaatgaaaagagttggagtagttagcgttggtattttgtgtgtgttgtgacctctgtagaactagacatgttaanctctgcaagtggcatctgaaacaaattaacttaatatgntctcacttcncacacaaagttggctgttttttcttgctatatcntagtcagctcgcaaatggtcatatcanatcatt

SEQ ID NO: 9652 - DNA, 242 bp, Glycine max
  Clone ID: 701150054H1
ggcacaagtgagtttgttgatcgagataactagaaacagtgtgatgaaaatgaaggtccttgttttcttcgttgctacaattttggtagcatggcaatgccatgcgtacgatatgttccctctccgaatgaacactggctatggtgcccgtactccggaggtgaaatgcgcaagttggaggcttgctgtggaagcacacaacatctttggcttgagaccattcctgaagagtgcgttgaagc

SEQ ID NO: 9653 - DNA, 245 bp, Glycine max
  Clone ID: 701150055H1
ggcagccaaagaaaagaaaatcctcaattttctgagcagccaaacactctctctctgtctctcgaaaattctcagtttgcagagaaaatctgaatcatgtcgtggcaagcgtatgtcgacgatcaccttctgtgtgacatcgaaggtaaccacctcactcacgctgctatcatcggccaagacggcagcgtttgggctcagagcaccgacttccctcagttcaaacctgaggagataactgccat

SEQ ID NO: 9654 - DNA, 253 bp, Glycine max
  Clone ID: 701150057H1
gagagtggtggggtgtgcagaagagcgtcgcagttgtaaccctaatcagaagaagcgcagttcaagcgagtgacagccaccagccatgggtcgtatgcacagccgcggtaagggtatatcctcttctgctttgcccctacaaaaggacacctcctagctggctcaagatctcttcgcaagatgtcgaagaaaatatctgcaagtttgcgaagaaaggtttgaccccgtctcagattggtgtcattctcagaga

SEQ ID NO: 9655 - DNA, 247 bp, Glycine max
  Clone ID: 701150058H1
atctcccttccctgatccttaaatgttttagtcttcttttttattctaaaatatgttacgtttaacactctaatgacaacaccaaaacgtaaatatcccaaagccaattctctaattaaagagattaatttccaggattgtatatattgatcgacaatattattaagaaataagtggctaagttctgtccgaacttcatcttcatcaggcatattgtggggtactagcccactggctcctgattcca

SEQ ID NO: 9656 - DNA, 252 bp, Glycine max
  unsure (1)..(252): unsure at all n locations; Clone ID: 701150059H1
gaatatgaaaacaagaaattgcagttgaaatatgattttgagaaggaactcgaggaactttacaggaagtatgacattaaacgtaaggaggttgaggttgaatttcagaatataaggaagaacctggatacacaacataatatagttctgtaaataagatattggctgaggctttcagggctaaatccatggatcttaaagtancggtgcttcaagaatgcagcaagatgcaagtgttccacagcaactatt

SEQ ID NO: 9657 - DNA, 222 bp, Glycine max
  unsure (1)..(222): unsure at all n locations; Clone ID: 701150060H1
gatccttataagtttccctcgatcggcgaaaatatgtctggtttccttagcaacctctttggtttcaacggaaacaacaatggcactgaggatgcctttnnaaactcaggaggaggaggacaagacttcaaggacgcggagttcaacactggtgtgcaagttgccaaggggagacacgctccttgcagtggtaacagtgggactaaaagtgcttttaacaac

SEQ ID NO: 9658 - DNA, 204 bp, Glycine max
  unsure (1)..(204): unsure at all n locations; Clone ID: 701150061H1
gagagagtattggcgctncatcaanatgggtatttctagggattccatgcacaagangcgtgccactggtggcaagaaaaaggcttggagaaagnagagaaagtatgancttgggcgtcaggcagcacacaccaagttatcangcaacaagacaatcaggaggattcgtgttagaggtggcaatgttanatggagggcttgagg

SEQ ID NO: 9659 - DNA, 256 bp, Glycine max
  Clone ID: 701150062H1
gagtcttaccacacatccgccgcaacatcctcatctccgctacacctactttattctcatgttggctcttgaccgcccaacattctgttccgtacaaaatcgccggtcttaccgtagtccgataaaactttccctttagcttgatcggtacctttgcatcacataacacccccgatgcttttctccatttcatccatcctgcttgaatgcgatgattcacatccccttcaatttccccatcatcctgtattacaga

SEQ ID NO: 9660 - DNA, 259 bp, Glycine max
  unsure (1)..(259): unsure at all n locations; Clone ID: 701150063H1
ggcagcataaaatgtcaaatacaagtttgcttgatttccaatacagcctctcaaggaaaaaatacctgaggaagccatcacgtctgttctcctgggaccggcagaactcggggtcgaagaatgtatttcctcagcctaaggctgatgagatgaagcnnatgcnagacaagtttgattccaataaagatgggaaaatttctcaacaggagtacaaagccaccatggaggctctaggcatgggggactcggttcatgaagt

SEQ ID NO: 9661 - DNA, 261 bp, Glycine max
  Clone ID: 701150064H1
ctcccactcttcctatttgattttactctatttcagttgagagaaaaagtgtcaaaaataaattctatgatgtcatgaagtcctgtttgcttaatctgtatataattatatatgatgttctccttcacgagataactttgtaaaggttcttaacctttcttctgttatgaaagcaattgaatctcctgaaatttatgttaattggcaactcatttttagggatgatgatcatctaaagtcaaaacatgtgtgaaaggttct

SEQ ID NO: 9662 - DNA, 229 bp, Glycine max
  unsure (1)..(229): unsure at all n locations; Clone ID: 701150065H1
ggacttgctagaaaantanntanagctaaggagaantattganaagcaggaagaagcaagttatggcgacgaagcagcttccgcagatcgccattctgggagctggtatctttgtgaagactcagtacctccganactctccgagatctctcatctntncattctgaatccatttggagccgnactcaggattcagctacagctgccgtagacatagctcgtaagcatt

SEQ ID NO: 9663 - DNA, 239 bp, Glycine max
  unsure (1)..(239): unsure at all n locations; Clone ID: 701150068H1
tggaaatagaagagaaaattaacaaaatcaaatggtgccaaacagccaatggtgctttgttccttctatccacaaatgataaaaccatcaaattttggaaggtaaccagccatgagaccagtttgatggctcgatgccgtagagtatatgcccatgctcatgattatcatattaattctatttcaaataacagcgatggcgaaacttccatatcagctgatgattnacgannanggaat

SEQ ID NO: 9664 - DNA, 157 bp, Glycine max
  unsure (1)..(157): unsure at all n locations; Clone ID: 701150069H1
ggaacaagactatgacatagggtccacaataagagacaagattattccccatgctgtatcatggtttactggggaggccattcagggggacgagtttggagatctggaggacgatgaggangatgaagatattgaagaggacgatgatgaagatgaa

SEQ ID NO: 9665 - DNA, 242 bp, Glycine max
  Clone ID: 701150070H1
atcagtggtgccccccaggataacaacataatgctgtggaatgctgtcatatttggtcctgatgatactccatgggatggaggcacgttcaagttgacactccaatttactgaggactatccaaataaaccaccgactgtacgatttgtgtctcgcatgtttcatccaaatatttatgctgatggaagtatttttttggatatattacaaaatcagtggagtcctatttacgatgtggctgc

SEQ ID NO: 9666 - DNA, 244 bp, Glycine max
  unsure (1)..(244): unsure at all n locations; Clone ID: 701150072H1
gactgatgaagaatttgctagagaaacgattgctggtgttaatccaaatgtcattaagattcttgaggagttcccaccacgtagcaagctagattctcaagcctacggtgatcatacctctataataacaanacaacacttggagcctaacttgggtgggctcaccgttgagcaggctatccagagcaagaagttgttcatcttagatcaccatgactatctcattccatacttgaggaaaatg

SEQ ID NO: 9667 - DNA, 241 bp, Glycine max
  unsure (1)..(241): unsure at all n locations; Clone ID: 701150073H1
gnancttctcacgttcatttcctacacatccctagctntcgngttccgtcgntgacgatggcgtttcgggngcgaaccctganntccgctctctctttcttctctctctcttgtccatcgcttccgccaatgtcttctncgaagagcgtctcgatgacgggtgggaaaatcgatgggttaaatcagattggaaaaaagatgagaacgtggctggggagtggaaccacactctggtaaatgg

SEQ ID NO: 9668 - DNA, 180 bp, Glycine max
  unsure (1)..(180): unsure at all n locations; Clone ID: 701150074H1
ccaggctgagatggcagcggcaccagcagctaccttcactattggaaccaccggttccctaggccaaagaggaaactcgcttcctcaattaaagtcttctgggtcgaaattcaactcccagaatcntttgaagagcttctgcggcctcaaggccatgtcatccgtgagatgtgagtcaga

SEQ ID NO: 9669 - DNA, 248 bp, Glycine max
  Clone ID: 701150075H1
gacacacacgtaacttcatctgggttgcagggaaaaagaaaaataaaatgggttccgataataccaacttggagttcttgaaggagatcggtttgggctcctccaacattggttcttacattaatggccaatggaaagccactggttcttctgtcacttctgttaatccctctaacaatcagagcatagctcaagtgactgaagcgactttgcaagattatgaggagggattgcaagcttgcagtgaa

SEQ ID NO: 9670 - DNA, 235 bp, Glycine max
  unsure (1)..(235): unsure at all n locations; Clone ID: 701150077H1
gactgtcaccagtcgcannatagtcacaccacacnaaaaagcaaagcataaaacaactgttacttacncacgccatgggtangngtangggtatgggtatnggtaaatnagtggtaaatgagtggtttttgagcataagcagtnaananagctanggnattcancgannatgacatcggnnggtgtggcaccancttcgggnttgagnnnaagccagtgggcatggancagcang

SEQ ID NO: 9671 - DNA, 255 bp, Glycine max
  Clone ID: 701150078H1
gatcgattgctacatccaaaccctcgccaaggttctcggaagcgaggaggaagctaagaagaagatttacagtgtttcatgtgagaggtactttggtttcgggtgcgaaattgatgaagagacttctaataagctcgaagggttgcctggagttctgtttgtgctaccggattcgtatgttgatccagagaacaaggactatggcgctgaattatttgtgaatggagagatcgttcagagatcacctgaaagaca

SEQ ID NO: 9672 - DNA, 256 bp, Glycine max
  Clone ID: 701150079H1
ggcgcattgaacgaaaattagggtttgtagtgtagcaggaacaagcagcaatggcgccgaaggtaacacgcaaggttagcagaaaccccgaattgataaggggaattggaaagtactcgaggtcgcagatgtaccacaagaggggcatttgggctatcaaggccaaaaatggtggcgttttacctcgccacgaccctaaacccaaacctgaaacacccgctgaaaaaccacccaaattttaccctgctgatgatat

SEQ ID NO: 9673 - DNA, 257 bp, Glycine max
  unsure (1)..(257): unsure at all n locations; Clone ID: 701150080H1
atcgtacttccttttctactcattttgctttatagtggggcaggtcccttctctattaaatgcactttcaacgacgactaaaatattttcactccctaaagacatctttcccattagttgtaaaaatggttttttttttttccgtaagtcgttgaagntgtatatggggctntncccgatgangggagnttnacttttttaccgtanngcctngngtatntnaaangncttttttttttccattanttnaaaaaacc

SEQ ID NO: 9674 - DNA, 246 bp, Glycine max
  unsure (1)..(246): unsure at all n locations; Clone ID: 701150082H1
ggttctagtgtgtgattgtttgttgttgtaactcgttcttcttcttttgttgttctgtgtttgtgtttgttttttctctcacctgaaaatgtcttgctgcggtggtaactgtggttgcggaagctcctgcaagtgcggcaacggctgcggaggctgcaagatgtacccagacttgagctacactgagtcaaccaccaccgagaccttggtcatgggagtggcacctgttaaggctcaatntgaggg

SEQ ID NO: 9675 - DNA, 250 bp, Glycine max
  Clone ID: 701150083H1
ggcacaagtttgttgagatagctagaagcaataagatgaaaatgaaagtgcttgttttgtttgttgctacagttttggtagcatatgaatgccatggctcagactaccagaagttccctctccaaatgaaaactgggtttggtgggcaatacagcaatgaggtggcatgtgccagttggaggcttggcgtggaagcaaacaacgtatcaagtggcaaactgttcctggcagcttgcggagagtacatagc

SEQ ID NO: 9676 - DNA, 238 bp, Glycine max
  Clone ID: 701150084H1
gctccttccatttcattgcctttaataatcattaactagtgcatgttcccgtgcgggacaaattatgtgtgagaagtacaacttttttatttattttaaaaaagtaaatttaaaacttcggggtctaagtggataagtcatttgtaatttcgaattgacttaaatcaattcaaatagttttaatattgaatttgtcaattggttgagccattaatttaaatattactgattattgatt

SEQ ID NO: 9677 - DNA, 240 bp, Glycine max
  unsure (1)..(240): unsure at all n locations; Clone ID: 701150085H1
gagggaagatgatgatggctcattctcattatcttcttcacattccatcgttatcatctttatctgcatctctcacttccccgcctcgctcgcttcttcctgttcggacattacaacctaagacgctgtcgtgtcgtgtcccttcatttccaacacncaccccgtggcacttcaagcctcttcattttgctctctctggggcactctcacttgggttattattcggaggaattggcgtgg

SEQ ID NO: 9678 - DNA, 246 bp, Glycine max
  Clone ID: 701150086H1
gacagcgaaacagagagtgatttcagtgagtgatcggtgttcacttgatctcatcataatcgtcagcgtcaattgaagaagatgccgatcagaaacatcgccgtcggaaggcctgaagaggcgactcaccccgacacgttgaaggcggctttggctgagttcatctcgaccttcatcttcgtgttcgccggctcaggctccggcatcgcctacaacaagctcaccgacaacggcgctgccacccct

SEQ ID NO: 9679 - DNA, 239 bp, Glycine max
  Clone ID: 701150087H1
ggcacttcaattgcaatcaaattagttcattctctttgcgcagttccctacctctcctttcaagatgcagatcttcgtcaagaccctcaccggaaagaccatcacccttgaggtggaaagctctgacaccatcgacaacgtcaaggccaagatccaggacaaggaaggaattcccccggatcagcaacgtctcatcttcgccggaaagcagctcgaggacggccgtaccctcgccgact

SEQ ID NO: 9680 - DNA, 239 bp, Glycine max
  unsure (1)..(239): unsure at all n locations; Clone ID: 701150089H1
ggtgggcagttgtgtgacacagaattaagctagagcttcatagtttcttcttcttttctcacnttcccntctctncccttcagaccaaggggacaaaaaatcnnnnnnnnnnnnnnnnnnnnnattcccaaaaccatgtccccacagtcatctaagtttcgccttgggattcanggaacattgcnccttccgtgngtttctggcaccactaccaacatttatngagnttgtaagagaaa

SEQ ID NO: 9681 - DNA, 63 bp, Glycine max
  unsure (1)..(63): unsure at all n locations; Clone ID: 701150090H1
ggaaattcacagtggtggccttcatncgctgtggttttccattcgtcttccctttcttcttat

SEQ ID NO: 9682 - DNA, 247 bp, Glycine max
  unsure (1)..(247): unsure at all n locations; Clone ID: 701150091H1
atgtaggttccaatctcactacctatgtgaggacctttcatgccctggctcttataaatcccaagtgcacaactcacctaaacttttcattaccaaaaaacatggggtatattctatctcatatacaagtaaacatattatttttccttaacctgcaatcctatcagcataagtacaagaatcccacacaactatatganctcattaggctaacagtctaacaccctangtnttcttcaggnattcc

SEQ ID NO: 9683 - DNA, 226 bp, Glycine max
  Clone ID: 701150092H1
gggtcgtgaggacaaaagaagaagtatcactcatataatactctgtatcatttcatttcgataatcatccatagctactgaagaaaatggcaaccatctctgctgctatcacaaccccatcgatctcccgcgcaactcttgtgcaaaagcgggtctcatctcccgttcttggtttgccagcaatgggtaaggtgggaagagtgagttgctccatggaggaaaaacc

SEQ ID NO: 9684 - DNA, 253 bp, Glycine max
  unsure (1)..(253): unsure at all n locations; Clone ID: 701150093H1
gttgcattganttcctttccatttgcagcaatctccattgttctcatcctcattccatgtagacagcatgcnnagcatcatccaaaacgccttccttgaacttgaggagtgcttgtctttctctctctatgcacttaacttctgcaagtttacctggccagttgaatcccagagtagattctgaggtatgcaataaaaccagtagtagtacattaaattttttgagaaaataggttctcattgtaatgatggg

SEQ ID NO: 9685 - DNA, 58 bp, Glycine max
  Clone ID: 701150094H1
aagacgacagaaggggactgaaatgctctaatataaagctataataactacccaacgg

SEQ ID NO: 9686 - DNA, 255 bp, Glycine max
  Clone ID: 701150101H1
gcatgtttggatttattacttacatttttcaacagtgtcaggttgatcaaactagcatctatttcaatactaatcacgtgtcacttgggcttaaatcatgtatgcaaagactagagctttagatcagcgggtaaaccaacctttgaatttcatgcacattgttcagtcaggcagtggaagaaaaccatcataagcaagtcagctttttgccttcaaaagggggagagggggacaaaaaccatttatcaagcaaaa

SEQ ID NO: 9687 - DNA, 255 bp, Glycine max
  Clone ID: 701150102H1
gggaaccatcttgccagcctatcacgaaaatggaatttgaatttgaaaggcgaagagttacaaaggaagaaattcgtgagctgattttccgtgagattctagagtatcaccctcaactattgaaggactacatgaatggaacagagagaactaattttctttatccaagtgctgttgatcaattcagaaagcagtttgctcatttagaggaaaatggtaaaaatggtcctgttatgccacttgacagaaagcatg

SEQ ID NO: 9688 - DNA, 250 bp, Glycine max
  Clone ID: 701150103H1
tctatgctaacaaagatagtgtatgtaatatccacttcccttagtattatgttaatatttatcggtgatctgtaactttctgatatagtagtaggttagtactttgagattgttatagagactcttagtcttttgtagcgacccaattatgtagataaatatgtgacctggcgactggatcatcagggaagtcaccaaggcttctttcaacatgattcaatgtattgctgacctgggaaatgggttttta

SEQ ID NO: 9689 - DNA, 253 bp, Glycine max
  unsure (1)..(253): unsure at all n locations; Clone ID: 701150104H1
ggcatataataaacttaacagtgtgacagaacataatagcagaagggaacaagatggacttactggagttatgggcaattttcggccccggcgtcgccgcgccgtcttcggcgccggatggtggatctggcttgacgccgtcgtctgcagtaccgtcaccgttcccttccttcattaccttcccggaattttcgcatctcttgcggctttgatgttcaattgcgttagaaaagaagacatcgattattcnccc

SEQ ID NO: 9690 - DNA, 256 bp, Glycine max
  unsure (1)..(256): unsure at all n locations; Clone ID: 701150105H1
ggcagttaaaaaactgagtgatgatggactacacctacgacaccaaggcatcgcacaatgggggttgggtctagcggaaggagctagtctcccataacgtggagaaccaatgttcgaattcctgccgggagaggtgcccacatttagtgtctaaccataccttgaacaggattgcttccgaaggaggagacctgtgcaaaaccaaaaccaaaanaaaattgtcntaattttatgcaatgtaacctctggnataagg

SEQ ID NO: 9691 - DNA, 254 bp, Glycine max
  unsure (1)..(254): unsure at all n locations; Clone ID: 701150106H1
gaactaaaggagagtgcaattacgtagtgtgtgggagacaaagagagatggctaagtggtgtatgttggtgttggttcttgctctagctctggctgtggccacaantgcccagagatgcacccgaagatgttggtctcaaggaccagaagaacttcatcagctatgctggagttggtggctattcaggaattggaagcaatggactaccttttggaggtgccggaataggtggtggcaccaccgggataggtgg

SEQ ID NO: 9692 - DNA, 256 bp, Glycine max
  Clone ID: 701150107H1
catcatgaggttgttgcagatttggtgcagacaagctttcttttttctatccccatggatggtccaatgtccttctcaactcaacatgtatctgtgcagtgggttctccgctttgaatttttcacaactccaaagcatgtagattggaaaaagtatgagcatcctcttctaattgagggaagggaaaaaacggaatgggttcttccaattactgtacatgctccaccaccaagaggagctcctgctctggcacaag

SEQ ID NO: 9693 - DNA, 252 bp, Glycine max
  Clone ID: 701150108H1
gcagacgcatcacacattatgatgcgtgttattaaccataaccatgttcagacgaggaacaccacttcgagtcaaaggctgatgctggggcatcaaagacatttccccagcaagctggaaccatccgcaaaaatggttacattgtcatcaagaacaggccatgcaaggttgtggaggtttccacttccaaaactggcaagcatggacacgcaaagtgtcactttgttggaattgacatattcactgggaaaa

SEQ ID NO: 9694 - DNA, 253 bp, Glycine max
  unsure (1)..(253): unsure at all n locations; Clone ID: 701150109H1
gataacattactcagttattttttatgcttatttttttccccctttctcttatgagtggggaaaagtgtcggtttggctacgagtagaatccaagtgtaccatatatctgcttagggaagagtacgaaattgttccaaaaccaaatgttgcagagcctgccaagtggggtgtacaanatgagcctcttttggtttctagttttctctgcacatcttgcactagcatcctntcttgttgaatntcaagaacnng

SEQ ID NO: 9695 - DNA, 253 bp, Glycine max
  unsure (1)..(253): unsure at all n locations; Clone ID: 701150110H1
gactgcacaggtgagggaccaaaccaactacctcctcagcccccagtcctcttctctcctatttcccatattttatttgccaatcacacactaacccctaagagagagagacacagatactctctgaacactannnnnnnnnnnnnnnnnnnngctggtacttcccaaaagaaaagctcaacctccctcgtagtagctttcatttgaagaaactacataactctctctacaccttttttnaccttatngntcc

SEQ ID NO: 9696 - DNA, 249 bp, Glycine max
  Clone ID: 701150111H1
ggcatcaattcaaaatatatcatcaattataagcatgggtttgtggaacacaacgaatgcagtgtcttgccgctttcacaagtttggtgatgaccaaaagaatctggtcttccaaggtgatgccacgtcttctccaggggcatggaactcacaaagttagacggtggaggaaaaccagtgggtggcagtgtggggagagtgttatactcttctccagtgcacctttgggaaagctctacagtggtcgca

SEQ ID NO: 9697 - DNA, 261 bp, Glycine max
  Clone ID: 701150112H1
ggggtcattactcattacaagctagtgttggtaagacttttgcatttagtttggggaattgcaatattggtcagctagctaggaagtggtgttgtttttgtgttagtgctatgggaaggcaaccctgctgtgacaaacttggggtgaagaagggtccatggactgctgaggaagacaagaagctcatcaacttcattctcaccaatggccaatgctgttggcgcgccgtgccaaagctcgctggcctcaagcgctgtggca

SEQ ID NO: 9698 - DNA, 250 bp, Glycine max
  Clone ID: 701150114H1
ggcacaagtgagtttgttgatcgagataactagaaacagtgtgatgaaaatgaaggtccttgttttcttcgttgctacaattttggtagcatggcaatgccatgcgtacgatatgttccctctccgaatgaacactggctatggtgcccgtactccggaggtgaaatgcgcaagttggaggcttgctgtggaagcacacaacatctttggctttgagaccattcctgaagagtgcgttgaagcaacaaag

SEQ ID NO: 9699 - DNA, 251 bp, Glycine max
  Clone ID: 701150115H1
gtgaagtgttattgtttcatcacgaagatatgggaattccctgggaaattgctaagcttggagttcgacagggtatgtggggagctgtcaagaagtttgatccaggactacggacatatgagaaacaaagggtttctggtaccccattgtcaccctgtgcacgtgctgctaagatcaacactaaagtaaccatggactatgtgaggtctctggaaaacacgaccagtgacttgttggagactggaaatcag

SEQ ID NO: 9700 - DNA, 254 bp, Glycine max
  Clone ID: 701150116H1
gaacacaaacagcgcgagacagaggcacagagagaaaatggtttcggggtcagggatctgtgccaagagggtaattgtggacgcacgacaccacatgctggggaggctggcatcgatcgtggcgaaagaacttctgaatgggcagaaggtggtggtggtacgctgcgaggagatttgcatctccggtgggctcgtcgggcagaagatgaagtacttgcgtttcctccgcaagcgcatgaacaccaagccctctt

SEQ ID NO: 9701 - DNA, 251 bp, Glycine max
  unsure (1)..(251): unsure at all n locations; Clone ID: 701150117H1
gatatttgctggtaaacaacttgaggatggaagancccttgctgattacatattcagaaggagtctaccttacacttggttcctcgtttaagaggtggcatgcagattttcgtcaagactttgacgggaaagaccatcaccttggaggtggagagttcagataccatagacaatgtgaaagccaagattcaagataaggagggtatccccccagaccagcagaggcttatctttgctggtaaacagcttga

SEQ ID NO: 9702 - DNA, 249 bp, Glycine max
  Clone ID: 701150118H1
caagggatggaacaaaagaagtttgtggcactattaatggtggttgtggtaatggcttcttctatgtggaaagggtccaaaggtcttagtctctgtaacatggatgaaggtggattggaggcttgcaagccctcagtgactcagccaaacccagttgatccatcccctgattgctgcaaggctttggctggtgctgacttgaaatgccttgctcttacaagaactcttcagagttgcctttcttggaat

SEQ ID NO: 9703 - DNA, 232 bp, Glycine max
  Clone ID: 701150119H1
aaggggtctgcgcctatcaacctttcagatcgtctgcatcaagttcttcggtgggctcttgggtctgttgagatttttttcagcagacattgtccaatccggtatggttatggtggtgggttgaaatggttggaacgattttcctacattaactcagttgtatatccctggacttccctcccactgcttgtctactgtactttaccagccatatgccttctgactggaaaat

SEQ ID NO: 9704 - DNA, 160 bp, Glycine max
  Clone ID: 701150120H1
aacgacgtgttagagagttaggctattcagtcagtgtgcaatgctttatcatgacttcttctttatttattttcctttttcccttttatcttttgttttgtccatatttgtatataatcttttccatgttgttgtgtttggtgtgtgtttgtttatcgat

SEQ ID NO: 9705 - DNA, 248 bp, Glycine max
  unsure (1)..(248): unsure at all n locations; Clone ID: 701150121H1
accttgtcatgatctttattgcaaccatcagttttagacataagtttattttaattatacatttccactcagttatggatgaattttattgaggtggcatgctatccttagacaatccacttgttcatttttggatctgttagatttaccatatgttaaccngnnatnggtagttgtcaactgttatagttagcaaaataatatctctaattgaaggatgtattatcctgtaggtactctcttaatgt

SEQ ID NO: 9706 - DNA, 138 bp, Glycine max
  Clone ID: 701150122H1
gggatgaagctgacagtagtaaatttacaaagttggctgaacagacaaagacattcaggcccaatgatgaggatgatgacgactcagatgatgactttagtgatgatgaagagttgcactccccaattgacgaggtgg

SEQ ID NO: 9707 - DNA, 265 bp, Glycine max
  Clone ID: 701150123H1
ggaaaaagggagtgcctgataacccataaccgaccgcaccaccgttttcctttgctttgcgttctacaatgtcgaaaacctcagagattattacatgcaaaggaaaacctgtgactgtggaagagatacaagtagaccctcccaaagccaccgaagttcgagttaagatgctttgtgccagtatatgctccacagacatctctagcacaaaaggattcccacataccaattttcctatagcacttgggacacgaaggagttggta

SEQ ID NO: 9708 - DNA, 224 bp, Glycine max
  unsure (1)..(224): unsure at all n locations; Clone ID: 701150124H1
gatccttataagtttccctcgatcggcgaaaatatgtctggtttccttagcaacctctttggtttcaacggaaacaacaatggcactgaggatgcctttaaaaactcaggaggaggaggacaagacttcaaggacgcggagttcaacactggtgtgcaagttgccaaggggagacacgctccttgcagtggtaacagtgggactaaaatgcttttaccacntcc

SEQ ID NO: 9709 - DNA, 257 bp, Glycine max
  unsure (1)..(257): unsure at all n locations; Clone ID: 701150125H1
gacaccaacaccaaaacaaacccactaagatggcttcctttgtatccttcctagtgctgcttcttgcagcccttatcctcatgcctcaagggcttgctacttactacaaaccaattaagaagccaccagtgtacaagcctccagtgtacaagccaccagtgtacaaaccaccggtttataagccaaaaccaccggtttacaagccgaaaccaccggtttacaagccaccatataagaagccaccatacaatanantc

SEQ ID NO: 9710 - DNA, 256 bp, Glycine max
  Clone ID: 701150127H1
gagagaaagaaatggagaatgcggaggagcagcagcagcaaaacgaggaggttttgtcggttgaacttccggctccttccggtcggaataaactgttcttccctaagaaagtgggaacaccaagaaaaagtgagattgtattcattgctccaactggggaggagatcaataccaaaaaacaattggagcagtacctaaaggcacatcctggcaatcctgtcatttcagagtttgactggggaactggtgagacccc

SEQ ID NO: 9711 - DNA, 248 bp, Glycine max
  Clone ID: 701150128H1
ggcacaagtgagtttgttgatcgagataactagaaacagtgtgatgaaaatgaaggtccttgttttcttcgttgctacaattttggtagcatggcaatgccatgcgtacgatatgtcccctctccgaatgaacactggctatggtgcccgtactccggaggtgaaatgcgcaagttggaggcttgctgtggaagcacacaacatctttggctttgagaccattcctgaagagtgcgttgaagcaacaa

SEQ ID NO: 9712 - DNA, 252 bp, Glycine max
  Clone ID: 701150129H1
ggggatttgtcaggtagttggggatgatctcttgatgtcaaatgcaaaacgcattgagagagcaataactgagtctgcttgtaatgcccttcttctgaaggtcaaccaagttggaactattacagaggtcattgaagtggtgaagctggcaaaagaagcacattggggggtggtaacgtctcatagatgttgagaaactatagactctttcattgctgatttatctgttggccttgcttctggtgtaattaa

SEQ ID NO: 9713 - DNA, 251 bp, Glycine max
  unsure (1)..(251): unsure at all n locations; Clone ID: 701150132H1
ggttgctttctgtgctcattgcaacgaattgctaacgacacacagaccacagagaagctacgacaganaccaaggatgtcgtcgtcttcgtcggaagatgaatctatgtcggaacagagcaatgaattaggacttgatttcatcctgagcttggacaatgttccatcaaagctccctccacacctcgaactcttcaaaacacgcgttctttgcaacaatgatgctcctgtgcatacagatactgtacaata

SEQ ID NO: 9714 - DNA, 250 bp, Glycine max
  Clone ID: 701150134H1
ggcacttcaattgcaatcaaattagttcattctctttggcgcagtttccctacccctcctttcaagatgcagatcttcgtcaagaccctcaccggaaagaccatcacccttgaggtggaaagctctgacaccatcgacaacgtcaaggccaagatccaggacaaggaaggaattcccccggatcagcaacgtctcatcttcgccggaaagcagctcgaggacggccgtaccctcgccgactacaacatcc

SEQ ID NO: 9715 - DNA, 234 bp, Glycine max
  Clone ID: 701150135H1
agaataatggtggatattacaaatccccccccttcaacatgaccaagtcattctattacctcaaaatcaaaaggaagaatgatgattgatattatagattatcttccaacataatcaagtcatcctgttacctcaaaatcacaaggaagaatgatgatgaatattgaagattatctccccccaccccccgttgaaaaaaaaaactgctccaagtcatctcattatctcaaaacc

SEQ ID NO: 9716 - DNA, 241 bp, Glycine max
  unsure (1)..(241): unsure at all n locations; Clone ID: 701150136H1
tccgatggatggaccagtttgctttgtcattggatccgatgacagccatgtccttccatgacgaaaccctgccagcagatggtgcaaaagtggctcatttctgctcaatgtgtggccctaaattctnctctatgaagataacggaggatgtgaggaagtatgctgaggaacatggctatggaactgatgaagcttgcagcgtgggatggatgctatgagtgctgaatttcaagctgccaag

SEQ ID NO: 9717 - DNA, 246 bp, Glycine max
  Clone ID: 701150137H1
atcagcggtgccccccaggataacaacataatgctgtggaatgctgtcatatttggtcctgatgatactccatgggatggaggcacgttcaagttgactctccagtttactgaggattatccaaataaaccaccaactgtgcgatttgtgtctcgcatgtttcatccaaatatttatgctgatggaagtatttgtttggatatactacaaaatcagtggagtcctatatatgatgtggctgctata

SEQ ID NO: 9718 - DNA, 229 bp, Glycine max
  unsure (1)..(229): unsure at all n locations; Clone ID: 701150138H1
ggaccaaccatatactaatttctccaagaataagagaatccaaaagtctctcaaaaaataaccatgatgatgcatgtcctttgcttctcagtgttcctagcagcagcaatgcaaggaacactggcggttgaatacagntcaccaacaacgccctctcaacccctggtggtgttcgtttccgtgatgcaataggggacgaatacgccaaacaaacacttgactcagccac

SEQ ID NO: 9719 - DNA, 243 bp, Glycine max
  unsure (1)..(243): unsure at all n locations; Clone ID: 701150139H1
gaagaagaacaagctgtgattggattatggagtggcattgcttggttggtagggatgactgtgttcattgctgtgttgtctgaatatgtggtggatacaattgaggatgcatcagattcgtggggtttgtctgtgagctttctcagcataatcttgctaccaatagttggaaatgcagctgaacatgcaggagcaatcatatttgctttcaagaacaagctgganattccattgggtgttgca

SEQ ID NO: 9720 - DNA, 58 bp, Glycine max
  unsure (1)..(58): unsure at all n locations; Clone ID: 701150140H1
ggcggagaagaagccgaanncgggaaagaagcttccgaaggagggaaggagccggcgg

SEQ ID NO: 9721 - DNA, 245 bp, Glycine max
  unsure (1)..(245): unsure at all n locations; Clone ID: 701150141H1
gaaccgctaatccattttgttcagtgtgggacatagaagctgttcttgtgtgtctnnnnnnnnnnnnnnnnnnnnnnnncagagatgaagcaatccaagttcaagaggatttgtgtcttctgtggcagtagtccagggaacaaaactagttataaggacgctgctattgagcttggaagagaattggtgtcaagaaatattgatctagtatatggagggggcagcttgntttganggggtttacc

SEQ ID NO: 9722 - DNA, 247 bp, Glycine max
  Clone ID: 701150142H1
taccctcttctgagtgtctaacccttaaaactgattcatgcatactttctttagaccttaattagaagttaccctctcccgagtgtctaacccctaaaagaatataaagatgagaatgcaagagaaacatagaaaagataatagaatagaaaaacctggaaaagactcatgtgacattgataaatatagaaagtacaccatacatcgttggttttttaggcctgctagatcctaactaggggtttag

SEQ ID NO: 9723 - DNA, 248 bp, Glycine max
  unsure (1)..(248): unsure at all n locations; Clone ID: 701150143H1
ggagaaggagaagaaggagccattgcgtccttcgatgataaagaacaaggagaagcgatcggngctgcacgccaagctgaagcagcagaagaagctcgacaagcgcgccaaggccaaggctcgagacgctgctctcaagagagctctcgacctcggcgaggagcctccggagaagaaggttcctcgcaccatcgagaatcacgagggaactcgacgagaccgtttgcaagcccgacgatgatgaggtt

SEQ ID NO: 9724 - DNA, 253 bp, Glycine max
  Clone ID: 701150144H1
gataagtgtgaatgaaattcacatcagctaagaagaaggttgaatcctatagtgtggataaaattcataaatttaagctttaaaaactttaataaatgttcttattggatctttcatataaaatctaatattttattgtctctctctcaaaaaaagtacatttattatacacataaaaaagtgtgggcaagtttcatttcccttgagttagaatcactttatacttggaagtttgaaccccaaagacttttat

SEQ ID NO: 9725 - DNA, 252 bp, Glycine max
  Clone ID: 701150145H1
gagagaaagaaatggagaatgcggaggagcagcagcagcaaaacgaggaggttttgtcggttgaacttccggctccttccggtcggaataaactgttcttccctaagaaagtgggaacaccaagaaaaagtgagattgtattcattgctccaactggggaggagatcaataccaaaaaacaattggagcagtacctaaaggcacatcctggcaatcctgtcatttcagagtttgactggggaactggtgaga

SEQ ID NO: 9726 - DNA, 142 bp, Glycine max
  unsure (1)..(142): unsure at all n locations; Clone ID: 701150147H1
ttggagctctatgaagatatgatattagggaggttctttgaggacaagtgtgctgagatcnattataggggcaaaatgtttggttttgttcacttgtacaatggccaagaggctgtgtcaatgggttcatcaagctctgaag

SEQ ID NO: 9727 - DNA, 242 bp, Glycine max
  unsure (1)..(242): unsure at all n locations; Clone ID: 701150148H1
gganctggctgttatttgggcttttgtgntggtcntgttggagggtagcaccttggtgcttgtatttataatctctggtaccactggtactggttttttttattaataatatatatattttcagcctccaaaaaaaaagtgatatctggtccntttatactaatattcttgatcaattactagtgtgatactatgaattaatgcacactgaagcccaatatcactcctaacataacactact

SEQ ID NO: 9728 - DNA, 245 bp, Glycine max
  Clone ID: 701150149H1
actcatgcggttgttgagccattcgtcatagcaacaaacaggcatctgagcgtggttcaccctatttacgaacttttgtttcctcactatcgtgacaccatgaacattaattcacttgcccgcaaatccttggtcaatgcagacggtattatagagaaaacattcttgtggggtaggtactctttggaaatgtctgctgttatttacaaggactgggttttcactgatcaagcattgcctaatga

SEQ ID NO: 9729 - DNA, 255 bp, Glycine max
  unsure (1)..(255): unsure at all n locations; Clone ID: 701150150H1
cctctgcattatgcttgaggttatggtccgcaggcgtgacggattactcgagttgcttctcggtgatgatgttggagaagacatataacaatctgtttgagggcagtatttcaaggtacactttcctgaccaatgatgaattttgacatcaaattccggaaaaagcagtcgtcccataacttgaacatgagagatgctgcaccatatatnntaatccaatttatcaaagatgaaaaacagatcagcaaacagatg

SEQ ID NO: 9730 - DNA, 246 bp, Glycine max
  Clone ID: 701150151H1
gaagaagaagatggggaaacaggttgtgccggtgaaatcagtggtctacgcgctttcccctttccagcaaaagattatgccgggtctctggaaggacttgcccacgaagattcaccacaaggtctccgagaattggatcagcgccactcttttgctcggtcccctcgtcggcacctacgcgtatgttcaaaactacctggaaaaggagaagctggctcacaggtactgagctcttgcaagagctga

SEQ ID NO: 9731 - DNA, 242 bp, Glycine max
  unsure (1)..(242): unsure at all n locations; Clone ID: 701150152H1
aacagtaaaaaaacataagtaaactaaaattaaattaagggttagttgtttaattttgttttttaaatgttttttttaataaaaaaatgtaatttctgattttgtttaaaacaattccttttttgattatttaaaaagaaaatcatatttcctccttaaaaaaactttaaaaagantttctattaaaattgtttttctttagtttaaaaaagtcaccctaatacccaccaaantacaaatag

SEQ ID NO: 9732 - DNA, 241 bp, Glycine max
  Clone ID: 701150153H1
gaaacaaacttgtgtctgaaattgagcagtgcagagactcctgaacgtcaacggctatggcagcttcttcctttacaacatcttccattctcttcccattcacaactagttctaaatcccctccttctcaactattccctcttttccttgcaaacatcataccctccgtctcagacccgtctcagtctcagccgcttcaaccccaaccccctccatccaagccgaaaatccccggtctccg

SEQ ID NO: 9733 - DNA, 232 bp, Glycine max
  Clone ID: 701150155H1
ggagaaagcatttgtgatgggcagacgatctgtttgatggattgccccctccctcctcaagcactctcattcttcctcaacaacaacaacaggcaacaacataatcatgagccaattcttgttgctaccaacaacaacaaccctgaatcctctgcagttccggctccaaagccaatcctcaaaagtggccctcaagcgccccaaccctacttcaacccgacacccaagctgc

SEQ ID NO: 9734 - DNA, 234 bp, Glycine max
  unsure (1)..(234): unsure at all n locations; Clone ID: 701150156H1
ggtgacactgacatcactgaagatcatctaatgctctctcatctggttttgtgtgaaaaaattagccgtaatacttttaaagtgtatcctagaaagggcgaaacttgggccctttttaaaaattgggatattaaatggtacatggntgtgaaatctcatcagctctatgaatatgagtttgttgaaatcttgacagattatgttgaaggtaagggtgtatatgttgcatacatg

SEQ ID NO: 9735 - DNA, 53 bp, Glycine max
  unsure (1)..(53): unsure at all n locations; Clone ID: 701150157H1
gagggaaggaggagaagacaaattaaccaccaacaacaacaannaanannana

SEQ ID NO: 9736 - DNA, 241 bp, Glycine max
  unsure (1)..(241): unsure at all n locations; Clone ID: 701150159H1
tatgtacatatgctactaaattagtttacaaagataattagttcttaaggccgctcagagatgaatgcttccttctcagattcatcacccctggtattttagtcatgaattcttcaattcttcactcttctttaaatgtatgagtgctataatanctttcgtatgttgcttctcggtccatatatacctgagtgctagaatattttcgtagaaaaaaaattaacagaaccatgaaatttgt

SEQ ID NO: 9737 - DNA, 252 bp, Glycine max
  Clone ID: 701150160H1
ggccgagaaatggggtctgcagtattatcacaaacaataccagcagtcaaagtttcaagggctcttcatataccctatcaagtcatgccgtggaatttctgtttcctatgcccccctcactcctgctggacttcgatgggatcgagaatgggtggtggtgaattcccaagggagggcatgcactcaaagagttgatccaaagcttgctttggttgaggttgaattgccaaatgatgcacttgttgaagactt

SEQ ID NO: 9738 - DNA, 242 bp, Glycine max
  Clone ID: 701150161H1
ggagcgaagaagatattagggtttttgagtgcggtgcggcgatcctagcactctcttctgcagctttcgccgacagcttcattcaccatggctgagcaaaccgagaaggcttttttgaaacaaccaaaagtgtttctcagctcgaagaaaactgggaagggaaagagacccggaaagggtgggaaccgcttttggaaatccattgggcttggatttaagactcccagggaagccatcgaagg

SEQ ID NO: 9739 - DNA, 246 bp, Glycine max
  unsure (1)..(246): unsure at all n locations; Clone ID: 701150162H1
gaagaaaggaagaaacataccgaatgagagcatcaaactcttcttcttcgatttccattgcgaangtnnnnnnnnnnnnnnnnnnnnnnnnnnnnncttcgctcttcgatcttcgtccggggactgctccgaataccaccaccaccactcgccgatggccacgattcggaggcttacacgactcccaaggctctcaaaacagcgtcgaaaccgaagccctcgctcgattcgccgtagacgaacaca

SEQ ID NO: 9740 - DNA, 242 bp, Glycine max
  Clone ID: 701150163H1
ggaagtgatatagcgttgccattctcatcctcttctttctctctctaccattgccatggatccctacaagcaccggccatccagcgccttcaattctcccttctggactacaaattctggtgctcctatttggaacaacaactcctctttaaccgttggagctagaggtccaattctgctggaggattatcatcttgtggagaagcttgcaaattttgatagggaagtatcccagaacgtgt

SEQ ID NO: 9741 - DNA, 246 bp, Glycine max
  Clone ID: 701150164H1
gggggaaaaggaagaaagggcaagagagtcgagaaacggcgcactccgtctgttcctcaccgtcaccggcgcgcgcaccctctgttccagcgactcctaattaagttgggaaataaaaaagacttcaaatttcccagatggctgcagcctttgcttccagatgctctcgtgtgggccgttctctgtctggtggattaagcaacagttcccctggtttatttacctcatcacatggcatgacatgca

SEQ ID NO: 9742 - DNA, 244 bp, Glycine max
  Clone ID: 701150165H1
catgttgatgaaagctatggtactgtggaggaggatggggaaatctgtggccacttctgctgccagttgtatcatgacatctctgtggaccaattcttgcattctctgatgagcttccattagcactgagagctggagaataatggcaacagtccagaagaccaaatctattctattcaccacgaaagaaagatgactacattttttggctctggagtcaacactgtgggaggcagattataga

SEQ ID NO: 9743 - DNA, 247 bp, Glycine max
  Clone ID: 701150166H1
acttgagagcaatagagacgtcgttgagctccgggcacgggttgaagctttgcaactcagtttgccatgccgggttttgacatttgaacatgaagtggccggtgaattgccattattgattatttacatatgcgacaatggtgtgtcgttgtgcccgctttttacaaaagcacatcttgttcttatattttgtggagcttctctcttctctgcatgtatgcagttgtcagattttcacatcttgcag

SEQ ID NO: 9744 - DNA, 243 bp, Glycine max
  Clone ID: 701150167H1
gttgacattggttgaaaaaatcctagttgacatctgtaaaaaaatcctagtccaaggtctgtaaaaaaaatgcctagacaacatcggttaaaaaatagtcctaaccgacgtcgaacaaaaaacctagccgatgttggccaaaacatcactgaccgatgtcaaccaaaacagtctgggcaacaacgacaaaaaaatatccctggtcaatgttgacaaaaattcccatgacccacgccagtcaaa

SEQ ID NO: 9745 - DNA, 242 bp, Glycine max
  Clone ID: 701150169H1
ggcgtcttcgagtttcacagcgaagtcgtaggagggtttcaaaagatggagaacatgcagagcttctggcaattgggcgatgaactccgtggacactcaaaagcatcggaggatcacaaatggttaatggttgcttcgaaattggcggaacagacaagattgaaggggggagcgtgtgaacaaccttgatctttcaaagggccccattgaaacaaggtcaagggataaatttgggttccagg

SEQ ID NO: 9746 - DNA, 238 bp, Glycine max
  Clone ID: 701150170H1
ggagagtgttggttttatattttcaattagttcagggggggcactttaggtgcaatactataccagtatgctctaaaggattatgcattcaggaacttactcttctggactcagttgatttatggcttgtcagggatgcttgatctgattctggtctttagattgaaccttaagtttggcataccagattatttctttgttgtgattgttgaaagcatagctcaaatgactaataggc

SEQ ID NO: 9747 - DNA, 252 bp, Glycine max
  unsure (1)..(252): unsure at all n locations; Clone ID: 701150171H1
gatgacattgcattcaatggggaaaacccaaggcctggagtcatcattaacaaaccagatggaggtgatgtttatgaaggagttccaaaggattacaccggcgaagatgttactgttggtaacttttttgctgctttacttggaaacaagtcggcacttactggtggcngtgggaaggttgtggacagtggacctgatgatcatatatttgtatactatactgaccatggaggtccaggggtgctcgggatg

SEQ ID NO: 9748 - DNA, 243 bp, Glycine max
  unsure (1)..(243): unsure at all n locations; Clone ID: 701150172H1
ggttggccaaggtttgagagatgtggatattaaaaattatatcaaagttgagaaggtcccaggtgggcagctagaagattcaagagttctcaagggagttatgataaacaaagatgtggttgcccctggcaaaatgaggagaaagattgttttccacgtatcattcttcttgattgtccccttgagtataaaaagggtgaaaaaccaaacaaatgcctgaactgctcaaagaagangactggc

SEQ ID NO: 9749 - DNA, 237 bp, Glycine max
  Clone ID: 701150173H1
acttgagagccatagggacattgttgagctccgggcacgggttgaagctttgcaactcagtttgccatgccgggttttgacatttgaacatgaagtggctgatgaattgccattattgattatttacatattcaacaatggtgggttgttgtccctgctttctacaaaagcacatattgtgcatatattttgtggagctctctcctctctggcatgtatgcagctgtcaggttttca

SEQ ID NO: 9750 - DNA, 237 bp, Glycine max
  Clone ID: 701150174H1
ggcacaagtgagtttgttgatcgagataactagaaacagtgtgatgaaaatgaaggtcctgttttcttcgttgctacaattttggtagcatggcaatgccatgcgtacgatatgttccctctccgaatgaacactggctatggtgcccgtactccggaggtgaaatgcgcaagttggaggcttgctgtggaagcacacaacatctttggcttgagaccgttcctgaagagtgcgttg

SEQ ID NO: 9751 - DNA, 239 bp, Glycine max
  unsure (1)..(239): unsure at all n locations; Clone ID: 701150175H1
cattgtgatggtttgtttgaaacaagaaaaaactaaacaaaaaggaattgtgtatggtttcttttctttcatgcacctttttttgtccctttgatatgtgtaatctcgggttataactttgcctaggattcaaacnnnnnnnnnnnnnnnnnnnngctaaaactaacatgcttttaaaaagtaatttttgcccattttctttggaaagttcgcggatcaaaacacaaaaggtttttttg

SEQ ID NO: 9752 - DNA, 240 bp, Glycine max
  unsure (1)..(240): unsure at all n locations; Clone ID: 701150176H1
gaatgtagagaaccaaccatgggtcaatactcaattcatcatcagcttgtggccatagtctcattatttatccttttgcttccaaatatccatgggtggggagacgatgggcatgtcattgtttgcaagattgcacaggctcgcctcagtgaagcagctgcagaggctgtgaagaaactgctgccantntccgnaggaantgntttgnccanaanntgtccttgggnannncangtncac

SEQ ID NO: 9753 - DNA, 215 bp, Glycine max
  unsure (1)..(215): unsure at all n locations; Clone ID: 701150177H1
gggcacaagtgagantgttgatcgagataactanaaacagtgtgatgaaaatgaaggtccttgttttcttcgttgctacaattttggtagcatggcaatgccatgcgtacgatatgttccctctccgaatgaacactggctatggtgcccgtactccggaggtgaaatgcgcaagttggaggctgctgtggaagcacacaacatctttggcttga

SEQ ID NO: 9754 - DNA, 241 bp, Glycine max
  Clone ID: 701150180H1
gaagaagaggacgatgtaattattgaatccgatgttgagcttgagggtgaaacctgtgagcctgatgatgatcctccacagaagatgggagacccctctgtcgaggttactgaagagaatcgtgatgcatcgcagatggccaaaattaaagccatggatgctatttctgaaggtaagttggaggaggcgattgagaacttaacagaagctatttcactcaatcctacctctgccataatgt

SEQ ID NO: 9755 - DNA, 240 bp, Glycine max
  unsure (1)..(240): unsure at all n locations; Clone ID: 701150181H1
ccatccaacatataaaataaggaaatagntaaatatagggcaaattttacatttaaccatatccactactatatacgtgagtacactagtaaggagacatacacggaaaagagtgagattacaatnaaaatactgattcattttgtaaaagaaaacagtcagatttacttcttcatacagcaagcaagaatgtattcaatgttgacaagctctacttaattatttttattggtctgctag

SEQ ID NO: 9756 - DNA, 239 bp, Glycine max
  Clone ID: 701150182H1
cagagaggtacaacgaactatgttagaattgcttaatcagcttgatgggttttagcagtgatgaccggatcaaggtgatagcagcaactaaccgtgcagatattcttgatcctgccctgatgcgttctggtcgtttggatcgtaaaattgagtttccacacccaagtgaagaagcaagagctcgaattctacagattcattcaaggaagatgaatgttcacccagatgtcaactttgaa

SEQ ID NO: 9757 - DNA, 255 bp, Glycine max
  unsure (1)..(255): unsure at all n locations; Clone ID: 701150183H1
gacagctattcctcttaagcttgctactgagtttccacactgcataccttangtcttccgaattcgaagttaatttgcaagatggctaaggaaaaggctcagatcaacattgtggtggttggtcatgtggaccctgaggaggcaaccaccattaacgagctgaagaagcctgttgtggagaaagaagctccaggncatgccatatgagggcatgcacgtacggcctcggaggggaaccagaaaattatgttaaca

SEQ ID NO: 9758 - DNA, 236 bp, Glycine max
  unsure (1)..(236): unsure at all n locations; Clone ID: 701150184H1
ctcctcataaatgggggctactggtgtgagaaagggagagacttcctttgaagggaagacatnagtctctgtctacagttgtatacacgatagttcgtacaatgaaccatcaccagaaaaaaatatatataatttttttaaaaataatatcttatatacctcaaatcaagttgactgtttgatattccaagagattatcctttgatagccatgaatgatccacaaaacggcttgtt

SEQ ID NO: 9759 - DNA, 187 bp, Glycine max
  unsure (1)..(187): unsure at all n locations; Clone ID: 701150185H1
ggttgccattttcantgtttaactctgctctctnagggcagtgtgtggattgaggtgtcgcacggtgggtgtagcagtagattccgcctccaagaaaagaaagagcaatgcaagctgcatcttcagggcatcggatacggtctaaaatatcaggctagatgcatatccgatgtgaangcagaccacc

SEQ ID NO: 9760 - DNA, 213 bp, Glycine max
  unsure (1)..(213): unsure at all n locations; Clone ID: 701150186H1
ggcacaagtgagantgttgatcgagataactanaaacagtgtgatgaaaatgaaggtccttgttttcttcgttgctacaattttggtagcatggcaatgccatgcgtacgatatgttccctctccgaatgaacactggctatggtgcccgtactccggaggtgaaatgcgcaagttggangcttgctgtggaagcaccaacatctttggcttg

SEQ ID NO: 9761 - DNA, 221 bp, Glycine max
  unsure (1)..(221): unsure at all n locations; Clone ID: 701150187H1
gangcttagtgaggtgcangttaatttacttgaacaaaactttggaaatgaacgcaaacttgagtccgaaagaaaggataggctggcaatggagcttggtttggaccctcgacaagttgctgtgtggtttcaaaacagaagagcccgttggaagaacaaaaagttggaagaagagtactccagccttaaaaaaaatcntgaagccaccttgcttgagaaat

SEQ ID NO: 9762 - DNA, 207 bp, Glycine max
  unsure (1)..(207): unsure at all n locations; Clone ID: 701150188H1
gggacccagagggtgatgttaggagggtgagttcttcgaacacttgaatcggagggactgcagaagtcgcaacccaaccaaccatggcagcttctgatcccgacaagttgatggtcaaagctgataaactaacaagactcagtctcacgaggtggagtgcggattggaaaagtgctactgtccttnatgancggcnnttaaggggnt

SEQ ID NO: 9763 - DNA, 260 bp, Glycine max
  Clone ID: 701150192H1
caatggtatctgttccatcccattccttcttgttccatcctctttttatatatccaaacaaaggaatttaatcccattccattcaatctcatttgaccaatccaaatgtgcacaaactcacatctaagatggttgaaattaacaataagcaattaagtataacccttaaatccagaaagttagtgaataatgaaagtagacaagtagtatgcatcaaaataattttagatataacattagcaatagcatgtcaacatgta

SEQ ID NO: 9764 - DNA, 238 bp, Glycine max
  Clone ID: 701150193H1
ggaacaaacctatgttttacacatgtaagaatgagaaacacctatctctattttaaactcggttctcccttctcaactttctggcgtgttaacatcaaggggtgtctcaaatcttgatctttatcatccatccttcgctcagagaagcttctaaagaggaatagtatgttcgttgaagatagtgggaaaaatcatgtcaatttcaagaactcaaatggggtgtctctggtgctcatac

SEQ ID NO: 9765 - DNA, 244 bp, Glycine max
  unsure (1)..(244): unsure at all n locations; Clone ID: 701150196H1
gatcgaagcaaaaaatgaaaacccaaagtgcttctctcctctgtctttttctctctcttgctatccttttggctagtngcactgctgcaagtgcaactccaagaagcgcagtgccaagccaccatgtttcaacattcaacagaagcctttttccttccacttttctctttggaattggttcttctgcttaccaggcagaaggagcagcaagtgtagatgggagaggaccaagcatatgggacac

SEQ ID NO: 9766 - DNA, 247 bp, Glycine max
  Clone ID: 701150201H1
ggagagagagagaggctgaaacaaagaagtgaaaataacagcaaaaagtaggagctgcagcagctcccccgaagcttatctcagcggcagactctgaaagctgtttgagtagcctcaacccggagaatagcaccaatgggagaggaggaaaacaaaccagaggaacccatggcaaaggagaaaaacccagaggaagaagcaacccaagagaaaaaaccggagcaagagttccaaagaggaattgctg

SEQ ID NO: 9767 - DNA, 243 bp, Glycine max
  Clone ID: 701150203H1
gaaatcaacaacccaacatcaaatagcaattcactagccaccaatctgaattttgtccaatatcttgaaaaacagaaccgaaataaacaaatcctggactaaaacctaaatcaccattttgtcctaatgtgtacgatgtttgtaacttttctgttttgaatcaggccattatccaccttgtacagccttaggaaagggtatttgactctttaaacagttgccattttttttatttatttgtcc

SEQ ID NO: 9768 - DNA, 240 bp, Glycine max
  unsure (1)..(240): unsure at all n locations; Clone ID: 701150204H1
ggcgcattgaacgaaaattagggtttgtagtgtagcaggaacaagcagcaatggcgccgaaggtaacacgcaaggttagcagaaaccccgaattgataaggggaattggaaagtactcgaggtcgcagatgtaccacaagaggggcatttgggctatcanggccaaaaatggtggcgtttnccctcgcccaggncccctaaancccaatcntgaaaccccccgntaaaacnccncccnnt

SEQ ID NO: 9769 - DNA, 234 bp, Glycine max
  unsure (1)..(234): unsure at all n locations; Clone ID: 701150205H1
atactggatcaaatcataccaattactgattcactagttggatcattgattcactgtctcaaccaaatcaatgattggactaagtttcataactttaggtggtatccccttgcagcataacaaaaatatcttttcactaccttctttttacttggtttttttgtttgaaatcctaaaactaaagctcctaaacatgagttntttaatttccagagtgcctatnnnntcttgact

SEQ ID NO: 9770 - DNA, 233 bp, Glycine max
  unsure (1)..(233): unsure at all n locations; Clone ID: 701150206H1
ggcacaagtgagtttgttgatcgagataactagaaacagtgtgatgaaaatgaaggtccttgttttcttcgttgctacaattttggtagcatggcaatgccatgcgtacgatatgttccctctccgaatgaacactggctatggtgcccgtactccggaggtgaaatgcgcaagttgggggcttgctgtggaagcacacaacatcttnggctttgagaccattcctgaaggng

SEQ ID NO: 9771 - DNA, 122 bp, Glycine max
  unsure (1)..(122): unsure at all n locations; Clone ID: 701150207H1
gggaatgatgcatgctcagccttctaatgctttgccaagttcttgttgtctgcttctgattgtgaatacattctcaattcagtgtgttctgtgaaaatcctancaaattgcaatgtataatg

SEQ ID NO: 9772 - DNA, 234 bp, Glycine max
  unsure (1)..(234): unsure at all n locations; Clone ID: 701150208H1
ggggaaccctaattctgcgaggtgagtgaaaatggcggtacccttgctctccaagaagatcgtgaagaagcgcgtcaagaagtttatacgcccccagagtgatcgcaagatctccgtcaagccaagctggcgcagacccaagggtattgattctcgtgtcaggagaaagttcaaaggatgcactttgatgcccaacattggttatggctcagaccaagaaanccggcnnttatt

SEQ ID NO: 9773 - DNA, 211 bp, Glycine max
  unsure (1)..(211): unsure at all n locations; Clone ID: 701150209H1
gcacagggagttanttgaagaagaagatgacgntnaagatggcgaggatggttcagaagaacaagctgtgattggattatggagtggcattgcttggttggttggaatgactgtattcattgctgtgttgtctgaatatgtggtggatacaattgaggatgcatcagattcatggggtttgtctgtgagctcctaagcataatcttgccgc

SEQ ID NO: 9774 - DNA, 235 bp, Glycine max
  unsure (1)..(235): unsure at all n locations; Clone ID: 701150210H1
ggtggtagtgtggcagcgacacgtatcaacttcaataatcgcatcgcagaagcagtttccggtgcatctcatcgtctccgaaaatgaacgacgcagatgtctcgaagcaaatccagcagatggtgcggttcatccgccaggaagctgaggaaaaggccaacgagatctctgtcttcgccgaagaggntttcaatatcgagacgctgcanttggtcgaancngtcaannacaaggt

SEQ ID NO: 9775 - DNA, 233 bp, Glycine max
  unsure (1)..(233): unsure at all n locations; Clone ID: 701150211H1
gaaatacaacacaaacaattaacacacacaaacagagggctacgtacgatcaaattaattaagatggcggaagtgaggaacaaacaagtggttctgagggactatgtgagtggttttcctaaggaatccgacatgaacatagttgaaggaaccacaatattgaagcttccacaaggttccaatgatgtgcttctaaaaaatctctacctttcctgtgacccttacangnnatg

SEQ ID NO: 9776 - DNA, 240 bp, Glycine max
  unsure (1)..(240): unsure at all n locations; Clone ID: 701150212H1
gagaacgaaaaagaatcatcgatgggcagagacgaaagaaggttcaggttcggagatgtctctgaaggatcagggcaacgagtttttcaagtcaggaaagtatctcaaagctgctgcactctacactcaagccatcangctagacccttctaaccctaccctctatagtaatcgtgctgcagcactactgcaattggataaggcttaataaagctctagatgatgcagagatgacaatca

SEQ ID NO: 9777 - DNA, 234 bp, Glycine max
  unsure (1)..(234): unsure at all n locations; Clone ID: 701150213H1
gatctccctgattaaaggntatctctaaggtcctaaacaatcctctttcaaaaacataccgaganaagtgtggnaatgacganaccatcattggtagagtntctagttcttcaactccntgagatctcagctgngcaaatttggcaacttcnagctcaaatctggcatcttnnnaccaatctacntagacctccgcctcatcatatcnacccttctctcctccaacagntctct

SEQ ID NO: 9778 - DNA, 242 bp, Glycine max
  unsure (1)..(242): unsure at all n locations; Clone ID: 701150215H1
ggagagaaagganagggtgtgagaagagaatggagagtaaagaggaagatgttaacgttggagccaaacaagttctcagaaaggcaaccaattggtacagcagctcagggtggtggtnacaaggactacaaggnggcacccccagctccttgtttgaacnggtgagctcaaatcatggtccttctacagagcnggaattgctgattttgtggcaatttcttgttcctctacttaccatctta

SEQ ID NO: 9779 - DNA, 199 bp, Glycine max
  unsure (1)..(199): unsure at all n locations; Clone ID: 701150216H1
ttcgcaaaccctaattttcggaaagattcgcgatggctggcctccaaggatcgcganaaacttcgtctacattcgccaagtccgccgaacaggccgagcgatacgaagagatggtggatcaatgaagaacgttgcgaatctcgacgttgaactgactgtggaggagcggaatttactttctgctgggtacaagaatgtg

SEQ ID NO: 9780 - DNA, 246 bp, Glycine max
  unsure (1)..(246): unsure at all n locations; Clone ID: 701150217H1
atccatgctctttggtagggatttcctcttgagcttcaatctctacaatatcttcttctattctggccacncattgagtcacttcttatgccagcttaccaacctgaatttcttgattgtagagttctaacttcaggtgtttgatcgaggtcgtacccgaatcaaataaacattaaaaatgcagtaagaaaacgtgtaacaattggggggggggnatttgcttggtaaattaaacancgaataatg

SEQ ID NO: 9781 - DNA, 243 bp, Glycine max
  unsure (1)..(243): unsure at all n locations; Clone ID: 701150218H1
gatccgtatctcaaactaaacagcacaacacttttgcncaagcaattgcaacaaaccaacgttgaattgtgtctcactctcttttttctttttttctttctcacagtgtctctcttcttcttcaatcaagagaagaaagaacacaccctgataccatgggnnggtggtgtacccagnngctgatatnnctgcccnnngngcattgtttgnncncgngnagggaanacnccttatnngctnccg

SEQ ID NO: 9782 - DNA, 233 bp, Glycine max
  unsure (1)..(233): unsure at all n locations; Clone ID: 701150221H1
ggatcagggtgaagcttctaatccttctgataaaagtttcaataccttggaaacgaagcaaaatcctgaggcttctatggaagaaaagagttcatctgaacagccatcagattctcaaccaaagcccgatcatcacaaaagaaatcaagatgctctggctgcagcaaaagagcgctttctggcacgtaaganagcagggcnttcnccantttnccctgcctttgtcnagntgt

SEQ ID NO: 9783 - DNA, 232 bp, Glycine max
  unsure (1)..(232): unsure at all n locations; Clone ID: 701150223H1
gacctcattctgcttggattgggtccagacggccacattgcctctttgtttcctaaccactcagcactcaatgaaagggaagaatgggtaactttcattantgacttcctcaaacccccacctgagagaatcacattcaccttgcctgtcatcaattctgcatccaatgttgcagtagttgtcaccggtgaaagcaaagcggaannccgtacnctgggnaatnggngntggg

SEQ ID NO: 9784 - DNA, 231 bp, Glycine max
  Clone ID: 701150225H1
gaccaccttgttttcccattatcttcaattcttcttctcatcatttcttttcacacaaaaaggtaccatggaagggagaatgggactgttgtttcttgttgtattaggtgctgcttgggcatgtgatgcaagggaactggctaactctgaaacttctgaactaagcataaaaccggatgtgtgtgcactttgtgaggaatatattaccaaggcacttgattatctacatga

SEQ ID NO: 9785 - DNA, 239 bp, Glycine max
  unsure (1)..(239): unsure at all n locations; Clone ID: 701150226H1
gaagcacaacatctctatcgagtaaattaactatgaagcctaccctactattatccctttccttcctgcctctctttgctttcctggctctttcagaagatgttgaacaagttgtggacataagtggcaaccccattttcccaggtggcacatattacattatgccatcaacttggggcgctgccggtggtggattgaaactnggcngganngganacncannctgcnnagttnntntt

SEQ ID NO: 9786 - DNA, 192 bp, Glycine max
  unsure (1)..(192): unsure at all n locations; Clone ID: 701150227H1
gagggagagtgttgacgctccatcaagatgggtatttctagggattccatgcacaagaggcgtgccactggtggcaagaagaaggcatggagaaagaagagaaagtatgagcttgggcgtcaggccgcaaacaccaagttatccaagcaacaaaactatccggaggattcgtnttcgaggtgcanaatntna

SEQ ID NO: 9787 - DNA, 257 bp, Glycine max
  Clone ID: 701150229H1
gagtgaaggaagctgtccaagttaagaacttgagctgtgatgcaactttgacttgctgagtttgtttctgggttggattgtttttgcttgaaattgattgacttgtttccacatttgaatttatacaatggttttctgggaaggatatgtgagcgatgaattgatgggcacgtttgcccctattgtgctttattgggtatatgctgggttttatcacttggctcccacctttagataggtatcggttgcataccagg

SEQ ID NO: 9788 - DNA, 236 bp, Glycine max
  Clone ID: 701150230H1
gactcacaactccataacacaaggcagaaagcaagctcatcctagagttttaaaaatggcagcagcctcctccatggctctctcttccccatccttggctgggcaaggccgtgaagctgggcccatcagcccccgaagtcgggagggtcagcatgaggaagaccgtcaccaagcaggcctcctccggaagcccatggtacggcccagaccgcgtcaagtattggggccatctctgg

SEQ ID NO: 9789 - DNA, 228 bp, Glycine max
  unsure (1)..(228): unsure at all n locations; Clone ID: 701150231H1
ggtcatatagcaatattgccctagcagtaacaaattgcgtggtcaagtattctctgtgggntctattcttcaaacttcttctggttcttgggacctctctattatgtggtggcattgcaaacgttggagtggaacaaaaatatgatagaagacaagcagatgtgaactcacttatgctgttgttgggattgttgtgctacttgcttccaatgctgttcaaatacagtg

SEQ ID NO: 9790 - DNA, 154 bp, Glycine max
  unsure (1)..(154): unsure at all n locations; Clone ID: 701150232H1
ggcaagaaacattggggggangaaggnangcattccaaatgggnnaaaccaggnttccccattcaaggggggnccaataacttttccctaaaggggcccttnccccctnctttttttcctttncttttcaaanaanggggtttccaacccaagg

SEQ ID NO: 9791 - DNA, 240 bp, Glycine max
  unsure (1)..(240): unsure at all n locations; Clone ID: 701150233H1
ggggtccttgttgaattgttgggnggcattctactcagagctgtgaagtgcgaagatggtaacatggtncatgcgagcnccactgtttctttgctaaaaaaagctcctttattacagggaagagaaggagaagggcatggttccattgttgctcttctcngnagcatggcaaccttctcgtaagaaaanatcgctatgcttgtcgctatgttggcacaattacgaggtctccaatgnngc

SEQ ID NO: 9792 - DNA, 238 bp, Glycine max
  Clone ID: 701150234H1
gactcaaggaatgatgggcagaagaaacttttattttatcctagagaacatcaagtatcagtgactgatgataattgtcaagtttatattcctacattttcttgtcaactgggtgtatatattgaaggatcagtttcacctcctctttctggcgtccatatcagagtttttgctgctggagatagcagctttactacacttaaaagtggtgaattggttcttgaaacgaccactggtt

SEQ ID NO: 9793 - DNA, 235 bp, Glycine max
  Clone ID: 701150235H1
ggtgatttcattgcataatccattgactagaaatcccatattttccccccacattaactcacccaacccctctttctaaaaggcctcaaggatacactccggacttaattacgttattttgttagggtcaccgtttcgagatattctaaacttgtactgaaaaatatggagggaaaagaagaggacgtaagagttggagccaacaggtacggagagaggcagccattagggcccc

SEQ ID NO: 9794 - DNA, 239 bp, Glycine max
  unsure (1)..(239): unsure at all n locations; Clone ID: 701150236H1
tatcattatgggattattctaggcaattccctccccgaaaaggaaagaaattagtacacgctttttactttttttctttcgatatctgtatattggggattataaatattatctatctatttagtgagaagcttggattttgttcttatctactcgcatattttactctctagtgttttaattttgacataacgactaacactggtnctttgatgttaatttnncttnctngcagcggg

SEQ ID NO: 9795 - DNA, 230 bp, Glycine max
  unsure (1)..(230): unsure at all n locations; Clone ID: 701150237H1
ggcagttcaaagcgaagaaagattcgaaacgaagaaagaaagcgttgtgaagaatggcggaagagggacaagtgatcggtgtccacagcgtagaggagtggaaggaacatctcaagaagggagaaggcgtccaagaaattgattgtggtggattttactgcttcttggtgcggtccatgccgtttcatgccccattcttgcagagtttgctaaaaagttgccgattntcc

SEQ ID NO: 9796 - DNA, 235 bp, Glycine max
  unsure (1)..(235): unsure at all n locations; Clone ID: 701150240H1
gggaacacaaagcagaagtagttcttgagataaaaacggaaaggccaaaggttgcaaagagagaagaaactaaagaggcttccaaactaccattcaanncgagagatgggaaaaacaattcaaagtgcagaagataggaggcctaaaacaggagaaataacttcagagtttgaaaaggttattgaattcaaacaagctgtagaaaaaatggcatganggtccccncgggagnnct

SEQ ID NO: 9797 - DNA, 228 bp, Glycine max
  Clone ID: 701150241H1
gactcgcagttgcattgttgaacaagggtttctctgtctgcttcttcactttctctcgtttcaatcgaaaccaaaacaaaaacatgggcagaaaattcttcgtcggtggcaactggaaatgcaatgggaccactgaggaggtaaagaagattgttactactttgaatgaggctaaagtccctggagaagatgtcgtagaagttgttgtgagccctccttttgtgttcc

SEQ ID NO: 9798 - DNA, 228 bp, Glycine max
  unsure (1)..(228): unsure at all n locations; Clone ID: 701150242H1
ganggtttacaccgaggggacacaccttcagcagcagcagccatggttctcaaaaccgaactatgccgattcagcggtgccaagatctacccagggaaaggcatcagatttgttcgtggtgattctcaggttttcctgtttgctaactcgaaatgtaagaggtatttccacaacnggttgacgccatcaaagctcacctggatgcnatgtanagaaancancacgnnt

SEQ ID NO: 9799 - DNA, 227 bp, Glycine max
  unsure (1)..(227): unsure at all n locations; Clone ID: 701150243H1
gaggcctccaaatattttcctttntagctttgattagagtggcctagttgttgtttttctcaatgagaagggcttccactatgcattgcgcactttggcgcttctgtgttcccttgttgctacttgctagcttcagttatgcaccttttgttttggcgacaactgaaattncagggaatgaagtaancactgatggaaaggtttnaaatgaagagttancaaaaccc

SEQ ID NO: 9800 - DNA, 230 bp, Glycine max
  unsure (1)..(230): unsure at all n locations; Clone ID: 701150244H1
ggttctatagtgagtgcaagantaacccactttggatacggaaggttgtcgcaatggnnaaggttgnnttgttgttnctttgcannnnnnnnnnnnnnnnntctttggcttgtgctgattcaattgagaagtttnaggttcagaagcacttgaagaacttgaatagacctcctgtnaggtccatcaagagtccgatggagagtnattgactgtatccatgtccctnacca

SEQ ID NO: 9801 - DNA, 230 bp, Glycine max
  Clone ID: 701150245H1
ggagtttcgtaagattaggtttttgttctctctctctctgattcgatcgatttcgattgttgaattcatcacatcacggagccttgtacgttgacaacgatggtgctgccgctatttactgctttcattctctttgctttattccgaatggattgttagcagttccttccaccgtcccggcattcctttggtcatcacattatgaactggcctctgaaaatatattgaag

SEQ ID NO: 9802 - DNA, 233 bp, Glycine max
  Clone ID: 701150246H1
ccgacaggttgagatgagacgaacaaattggagggatgcatctgatgtccattccttctacttcacaagatttctagaagagatgaacgaaaaagacttgtggtatgagtttaagaaatggggggacgtgcgagaggttttcattgcaagaaactgaaataggcatggcaggaggaatggtttcgtgagattcaagggggtgggcgatgtgaggaggtttgaaagacaactgg

SEQ ID NO: 9803 - DNA, 235 bp, Glycine max
  unsure (1)..(235): unsure at all n locations; Clone ID: 701150247H1
ggagtggaagtagtagccaagtacgtcgtatatgtggntnatctttgctggttggttgtttgttccttccaattgtcagatctgaatcancggactcantcttcagactcaatnacacngaatggcttcgaagggggccannaacannaacannaccaccancaagntcacgntcatcatcnccatgatcntgnncnccatcatcatcgcgacagaaggggnnacatattctnat

SEQ ID NO: 9804 - DNA, 232 bp, Glycine max
  unsure (1)..(232): unsure at all n locations; Clone ID: 701150248H1
tcaaagttgtccccccgtgtgattgtgtgattatacatcaggagctgtacgtgacaagatggtgctgccgctatttactgnttcattcccctttgcctttatttccgaatggattgntaagcagtttccttccaaccggtcccgggncattncctttgggtccatncaacatttatggaaactggggccttcctggaaaaaataataantngaaaggggaaatnctggtnaa

SEQ ID NO: 9805 - DNA, 237 bp, Glycine max
  Clone ID: 701150249H1
gaagtaagaaaacacaacacgaatttcattgcagagtgttattttgagtatcagcatcaatggctccaattgcagtgggaaacgtgattccagacggcattttggcttacttggatgaagaaaacaaaccccaaactgtctccattcactctctcgccaccggcaagaaagtcatcatctttggggttcccggtgcttcatcctacttgcagcttgaagcacgttcctggcttcatt

SEQ ID NO: 9806 - DNA, 231 bp, Glycine max
  unsure (1)..(231): unsure at all n locations; Clone ID: 701150251H1
ggccgtggaagagagaaaccctagggtttggaagaagctgatccggagaagatggtgcagcgtctcacctaccgcaagcgccacagctatgccaccaaatccaaccagcacagagtcgtcaagactcccggtggcaagcttgtttatcagaccacgaagaagagggccagcggacccaagtgccctgtcatggaaagaggattcaagggatccacatttaaggcnaacaga

SEQ ID NO: 9807 - DNA, 236 bp, Glycine max
  unsure (1)..(236): unsure at all n locations; Clone ID: 701150252H1
catatgtctatgataatcacaagaaaataattttgtgagtgtcatatatagaaaaaaggcatcagatttcttcattgaactccatctaccaaacattagccgttaaaacaacatgcatgatgccttttcaactaagtgcttgtttggttaattttattttgaagtaatatatcttcaaacattagtgttcttaagtttgggtttagcctaactcagtcgagaaagtgggctgtncg

SEQ ID NO: 9808 - DNA, 232 bp, Glycine max
  unsure (1)..(232): unsure at all n locations; Clone ID: 701150254H1
gatacaaaaagttcttatcagtgacagagtaaaggaggcataccgatgacgatggcgatgacggcgtcgcagttgcggtgcggttgggggtggaggccaacgccgaatcagcagcagcaacgacgtcgtatggttccggtggtgtgttccatcgncatagagaacgcgaagaacaaagagagagcgaaactgaagaagctcttcgatgaagcgtacnagaggtgccgcactg

SEQ ID NO: 9809 - DNA, 207 bp, Glycine max
  unsure (1)..(207): unsure at all n locations; Clone ID: 701150255H1
ggatccacataaacatccaacatcgaaaggttgttaattttcaactcaatggttcttccctcaggttttgtttccatgttgatactttttggcatggttttggtagttggggtgaatattgtcccaggggttgaggcaaaggcaagggctttctttgtatttggagactcactggttnacagtggtaacaacaattacttagcgccc

SEQ ID NO: 9810 - DNA, 229 bp, Glycine max
  unsure (1)..(229): unsure at all n locations; Clone ID: 701150257H1
gtgatgtatatatctcagtaatatcaataattgaatttttatcaacaacgagaattactcaccttgctanttaaagtaaattacttattttagagaagctagatctcttaagctaatgtcttanaaattcatgtaaacttctgtacataaaaatgtcttgtaatataaatttctgtacagcagaatgtcttaaagtttatatatanacttgnntttncaggtagggnat

SEQ ID NO: 9811 - DNA, 231 bp, Glycine max
  unsure (1)..(231): unsure at all n locations; Clone ID: 701150258H1
ggcacaagtgagtttgttgatcgagataactagaaacagtgtgatgaaaatgaaggtccttgttttcttcgttgctacaattttggtagcatggcaatgccatgcgtacgatatgttccctctccgaatgaacactggctatggtgcccgtactccggaggtgaaatgcgcaagttggaggctgctgtggaagcacacaacatctttggcttngacactnnncctgnaggg

SEQ ID NO: 9812 - DNA, 228 bp, Glycine max
  Clone ID: 701150259H1
gagagtggtggagtgtgcaaaagagcgtcgtagtcgcaaccctaatcagaagaagcgcagttcaagcgagtgacagccaccagccatgggtcgtatgcacagccgcggtaagggtatatcctcttctgctttgccctacaaaaggacacctcctagctggctcaagatctcttcgcaagatgtcgaagaaaatatctgcaagtttgcgaagaaaggtttgaccccgtc

SEQ ID NO: 9813 - DNA, 229 bp, Glycine max
  unsure (1)..(229): unsure at all n locations; Clone ID: 701150260H1
aaagcaggacctttnagcttcctaatcccatgtactacattgagtagtancttcncctcnctcaacaatctagctagagtttgctcctatctatatgtaataaggtatgctgatatggcactattcatctaggagcattagctatgtttgttaatgtcactttatgttatgtgggtaagtcacctaagacactccacgtacctacttgttgtctcttacgcggctttaa

SEQ ID NO: 9814 - DNA, 234 bp, Glycine max
  unsure (1)..(234): unsure at all n locations; Clone ID: 701150261H1
ggngnggtngttcattctaccattnaggggttgaggtttccaatgactgttcctatagggactgctttggttgacatgtacgcaaagtgtggttgcattgaaaaagctaggatcttgtttgatgggatggtgaagaaggatgtgtggacgtggaatgtcatgatttgcgggctagcttcgcatgatcgtgcaaaggaggcactcacactgtttcagaggttcattgatgaaggt

SEQ ID NO: 9815 - DNA, 236 bp, Glycine max
  unsure (1)..(236): unsure at all n locations; Clone ID: 701150263H1
gatagcctgcctcgtcacaaaatactgaacgccgcagctctgtggttgatcgacgcattcttcacttcaatcccacaatgtcataacgcacagctcaccactcactctctcttcttctctgtttcttagctccctcntccttcaattccagaggacaggttcgttgcctgtgaagagcgtgancatttgcaaatgcgttgccacacccgaagctgagaccgctacaagacaggggt

SEQ ID NO: 9816 - DNA, 239 bp, Glycine max
  unsure (1)..(239): unsure at all n locations; Clone ID: 701150266H1
ggcacccagagaggaggaagctttgagaganagagagggaggagggagagtgttgacgctccatcaagatgggtatttctagggattccatgcacaagaggcgtgccactggtggcaagaagaaggcatggagaaagaagagaaagtatgagcttgggcgtcaggccgcaaacaccaagttatcaagcaacaanactatccggaggattcgtgttcgaggtggcaagttaaatgggggc

SEQ ID NO: 9817 - DNA, 238 bp, Glycine max
  unsure (1)..(238): unsure at all n locations; Clone ID: 701150267H1
ccagggtcaggggttgtcagcagcaagtggccatgtggatgatganggtgccttggtttctgacttttgttattaatgtcttttccttttttgctttcaataaaacatttatgaagcctctctgtttatcaaccatgtaaaaagtgatgatgacatggaaantgtaaaaattatctttgctcatgatgtggatgccnnccctgtgtggagaggcgctgcttcttgnanattganngcg

SEQ ID NO: 9818 - DNA, 226 bp, Glycine max
  Clone ID: 701150269H1
ggaagaagaagagagagtgatggagtgcgtattcggattggtgggtaatgggtttgcgatcgtggtggctgattcatcggcggtgcacagcatcctcgtccacaagtccaacgaggacaagatcatgctcctcgattcccacaaactcattgccgctagcggcgagcccggagacagggttcagttcacagagtacattcagaagaacgtcgccttgtatcagttc

SEQ ID NO: 9819 - DNA, 226 bp, Glycine max
  Clone ID: 701150272H1
gggcgcgggtgaggtagaacccttccactgtggtgactctgcgatgggtgcctacaagtatgtttcagagctatggcgcaagaagcagtctgatgtcatgcgcttcttgcagcgggtgaggtgctgggagtataggcagcaaccttccattgttcgtttgacagggtctacccgccctgacaagctcgtcgcttgggcttcaaggctaagcagggctatgtgattt

SEQ ID NO: 9820 - DNA, 218 bp, Glycine max
  unsure (1)..(218): unsure at all n locations; Clone ID: 701150273H1
ggggaaccaantaacataatagacagnttgctgaacctgatcaggaagtatggaccaaggtgataagaaggagggaagcaaaggcagcaaagaagaactatacccagaacagatcactacataacctctcggcaaaccaccccaactggagagacaaggaggatattacatccttttacttcactaatttcacagacaacgttaatgaagtgaggctc

SEQ ID NO: 9821 - DNA, 224 bp, Glycine max
  unsure (1)..(224): unsure at all n locations; Clone ID: 701150274H1
ggacggtcagaataaatcttggaagcaaaagacgaatcagaaccgtcgagtgtgagangccccagggcacagagcaactacaaaaccctacttatctcactttacaatgttgtcaagcctgccgagaaaaccctagttcgcttgcagttnacacaagaggccatcctattcatagctcganatgggngaagnagtggaggtagttnntccacaatctgtgtnga

SEQ ID NO: 9822 - DNA, 230 bp, Glycine max
  unsure (1)..(230): unsure at all n locations; Clone ID: 701150277H1
gggatcgaagcaaaaaatgaaaacccaaagtgcttctctccctctgtctttttctctctcttgttatccttttggctagtngcactgctgcaagtgcaactccaagaagcgcagtgccaagccaccatgtttcaacattcaacagaagcctttttccttccacttttctctttggaattggttctctgcttaccaggcagaaggagcagcaagtgtagatgggagaggac

SEQ ID NO: 9823 - DNA, 207 bp, Glycine max
  unsure (1)..(207): unsure at all n locations; Clone ID: 701150278H1
ggtctctcaatcacatnacgcacactgtcacaggngtagcggcgaaactgaggtcgtagaaagaatggcgaaaacgacgtcgttgttgctcttacactgctcctcttcggaaccttagctctcatccaggcgaagaaattcgaaggaggtttgaaggaatgacccacaagtttactttgatgttgagattaatggaaaagaagcngg

SEQ ID NO: 9824 - DNA, 237 bp, Glycine max
  unsure (1)..(237): unsure at all n locations; Clone ID: 701150279H1
gtcccaacaanctttctttccccggttctctccaggaacctaaggaaatcggtagaagataganagattaacaaaaaatctgctgtgaaagcagtgtatggtgatgaatttggggcacctggagaggagttnacgtccgggtatttgggctataaggagtgatttgcaagtcccancttcccctanttcccntacctatgcacaanggcaaagggccaccccccatggttnncgagg

SEQ ID NO: 9825 - DNA, 264 bp, Glycine max
  unsure (1)..(264): unsure at all n locations; Clone ID: 701150280H1
ggaaccaaaggtngaaagaaangaagagnttganggnaanatgaangtcctgaaggtnaaagataccaagcttgntccttctggcnccactgggatcggggntccaggantccaaggggtaaggttccaaanggggttgtgttgatctggcacccaagatgcttaaatttgcgttgaaaaatccattcattgcgagacttagcttcggaaatgaacccagttattgaaagcncnatgaatacncaaagggnccctaaagtcaag

SEQ ID NO: 9826 - DNA, 131 bp, Glycine max
  unsure (1)..(131): unsure at all n locations; Clone ID: 701150286H1
gaagaagaagaagganncatggccatgagcatggcaatgacagcagcngcagcagtgacagtgattaaactgntgcatcacctatatatttaaaaggtttatgggaccatagtagcgagggctgtgcctta

SEQ ID NO: 9827 - DNA, 227 bp, Glycine max
  unsure (1)..(227): unsure at all n locations; Clone ID: 701150288H1
ggaaaaaaaaatgccgggacacgaactcgaactgttttaggcttttagcttctctgagttttgacctacaacactctccaatcccctcttgtgtgttgtagccgccccgtgatcatcaatggcggaaactgctgacaaatctcaatctcaccnaaaggaatattatgtgaatgacaagcaaacanctgtagttgaaaaagctgttgaggtcaaagaagttgaanccc

SEQ ID NO: 9828 - DNA, 224 bp, Glycine max
  unsure (1)..(224): unsure at all n locations; Clone ID: 701150290H1
ggaacagagaaagaaatggagaatgcggaggagcagcagcagcaaaacgaggaggttttgtcggttgaacttccggctccttccggttggaataaactgttcttccctaagaaagtgggaacaccaagaaaaagtgagattgtattcattgctccaactggggaggagatcantaccaaaaaacaattggagcagtacctaaaggnanatcntggnaatcctgc

SEQ ID NO: 9829 - DNA, 225 bp, Glycine max
  Clone ID: 701150291H1
ggggggatcattgaaatttgttgatctttctgctaacaacttctcaagtggaattgaggaaattggtggagggcaatgtggtattcagtttctgaatttgtctcataaccttctgaaaggtaggttaccaaattcaattggaaaacagaattcacttaaaagtttggatttgagcttcaatgaattaggctccaacttgccagaggtgctgggaaatttaacctc

SEQ ID NO: 9830 - DNA, 265 bp, Glycine max
  unsure (1)..(265): unsure at all n locations; Clone ID: 701150292H1
ggttgctttgctttggtgcaaaagagaggaacagancagaactgagagaagcaagtgaaacactncaatgcacctaggtctaaaatgcgtctcgncttgcattaccttnttnttgnccggtttagagagattgnaaagcatttcattgatgnattggaggcanagcacanctgagtggctacccacctgcatacatngatggatggacgatcgancagacggacagnaagttgtttcctctgcatgangtcctggcancatacat

SEQ ID NO: 9831 - DNA, 238 bp, Glycine max
  unsure (1)..(238): unsure at all n locations; Clone ID: 701150294H1
gatatctctaattaacactaataacagcaaactaaaggtgaagtttgccagaaacaagatgggaaggaaccattttcagcagcaacactgtgctgatgggagcatgtggatggagagtcagggtcagcaacagagctatgccttccaagaagagtcttggagccctnnttacnactttngccacaaccacaagcaattncccaggcatgcacatggaacatgaacnacaacaacnaca

SEQ ID NO: 9832 - DNA, 216 bp, Glycine max
  unsure (1)..(216): unsure at all n locations; Clone ID: 701150296H1
cagtactatcatgtagttatatattagtagtattatgttggnaaaatnattattttgtaataattatttaaatgtcactgtaagttattgtaattggttgcaagtgaagtntttnttnacntaaccaaggatcataaactcggtataacttcncatngagcaagtgaaaacncgtaggtacttaaatangncggncattcaccaaacaaagaaccc

SEQ ID NO: 9833 - DNA, 271 bp, Glycine max
  unsure (1)..(271): unsure at all n locations; Clone ID: 701150301H1
gaggttaaggaaacaattgaagngtaaacaagaaaatgaaaaagtggaagctgagaaaccagaagtagatgctatggaagtagagagtggcattccgcagaaggaggggagtgataaaaaggagaaaaaagatgtggcgatggaggaggaggtgaagatgagggtaaggataatattgataagtcnaaagaagaagagaaggcagaagatagtaagggtgagaaaagatcaaaaaaacgtgggagagggaatatcaatggggagnaagtna

SEQ ID NO: 9834 - DNA, 266 bp, Glycine max
  unsure (1)..(266): unsure at all n locations; Clone ID: 701150302H1
agattgaggaggccaacgaggagcaagtacttgctgaactggccaggattgaggcttcgaaagaactgacagatattgagacccagagaaaacaggaagcaaatgaattttcattcaaattggaaagcacgaggagaaagttgaaggaggccattgaagagattgatgggtcaaaggagcttgaaatgaaattggcngtgacaatatcagatgttgatttcttgcagaatgagttaaagtcagttaaggaaatggataaaagggtt

SEQ ID NO: 9835 - DNA, 259 bp, Glycine max
  Clone ID: 701150303H1
ggcacaagtgagtttgttgatcgagataactagaaacagtgtgatgaaaatgaaggtccttgttttcttcgttgctacaattttggtagcatggcaatgccatgcgtacgatatgttccctctccgaatgaacactggctatggtgcccgtactccggaggtgaaatgcgcaagttggaggcttgctgtggaagcacacaacatctttggctttgagaccattcctgaagagtgcgttgaagcaacaaaggaatacatc

SEQ ID NO: 9836 - DNA, 234 bp, Glycine max
  unsure (1)..(234): unsure at all n locations; Clone ID: 701150305H1
ggagttttcaanntggaattatttttgccagaagaatatccaatggctgctccaaaggttaggtttctgacaaaaatatatcatccaaacattgataagcttggcaggatatgtcttgacattctganagataagtggagtnctgcccttcagattcgcactgtactttngagtattcaagctcttctaagtgcaccagnnccagatgatccgctttctgagaacattgccaag

SEQ ID NO: 9837 - DNA, 255 bp, Glycine max
  unsure (1)..(255): unsure at all n locations; Clone ID: 701150306H1
ggacccttcgcttctacgagtccttttttttgtggaatgtgttccagttatattatcagatcaaatagaattgccattccagaatgtcatcgactatagccagatatcaataaaatggccatccaatcaaataggccccgaactattgcagtacctggncatctataccagatgaagaaatagaaaaaataatagcccgtggtcgacaagttaggtgctggtgggtgtatgcttcagattcagaatcttgttcag

SEQ ID NO: 9838 - DNA, 136 bp, Glycine max
  unsure (1)..(136): unsure at all n locations; Clone ID: 701150307H1
agtggtgatagcagtggtgctgtttgtgttgctaagccctggtcttgtgtttcanttgccagggaagagcagagtggtggagtttgggaacatgcaaaccngtgcagtgtctatcttggtccacacaatcatctat

SEQ ID NO: 9839 - DNA, 240 bp, Glycine max
  unsure (1)..(240): unsure at all n locations; Clone ID: 701150308H1
gtagtatnacttttgtctcggaaattgttcttttgagttatggcaagcttaaaggttgcatgtgtggttttgatgtgcatggctgtgatgagtgcaccaatgatggtgcaagccgtgtcatgcaatgatgtttctgtgaacctagcaccgtgcctatcttacctgatgcagggtggagatgttccagaatcgtgctgtagcggagtgaggaacattctgggtctgccagcaccacctttg

SEQ ID NO: 9840 - DNA, 261 bp, Glycine max
  unsure (1)..(261): unsure at all n locations; Clone ID: 701150309H1
gacacacacgtaacttcatcngggttgcagggaaaaagaaaaataaaatgggttccgataataccaacttggagttcttgaaggagatcggtttgggctcctccaacattggttcttacattaatggccaatggaaagccactggttcttctgtcacttctgttaatccttctaacaatcagagcatagctcaagtgactgaagcgactttgcaagattatgaggagggattgcaagcttgcagtgaagcagccaagacat

SEQ ID NO: 9841 - DNA, 249 bp, Glycine max
  unsure (1)..(249): unsure at all n locations; Clone ID: 701150310H1
gatcgaagcanantatgggancccaaagtgcntctctcctctgncttggnctctctcttgctatccttnnggctantngcactgctgcaagtgcnnctccannanncgcagtgccnngccaccatgtntcancatncancagangccttnttccttccacttttctctttggaattggttcttctgcttaccaggcagaaggagcagcaagtgtagatgggagaggaccaagctatgggncnctacact

SEQ ID NO: 9842 - DNA, 246 bp, Glycine max
  Clone ID: 701150311H1
ggaaatgactttcacatagaaccagataatgacactggttgccatcactcttgcaagtgcaatccagcaaccaatgattgggttccttctccttccaacgaggtgggtttcaattcagacaaacctaacaggagtgacaactaagaatggaggagtggttacatgaagatatcaatatctcagcttcttttcagattgtgtggattccacgtggcgtttagagttgcaaaccaaataaatttaaat

SEQ ID NO: 9843 - DNA, 245 bp, Glycine max
  unsure (1)..(245): unsure at all n locations; Clone ID: 701150312H1
acctctcacgttctacgtctattagtgactactgtagtattgctacacgtgggctcatttattattgcgtggacggaaagtcatcttctattaacatcccatcaatttttcagatccatccgttcattttaccaccgacttctctcacccccttagatttcatccacgtgtccattgtgccacccacccacccatagcattcatacaacacacccataatcatcattccacaacaanatccaccg

SEQ ID NO: 9844 - DNA, 248 bp, Glycine max
  unsure (1)..(248): unsure at all n locations; Clone ID: 701150313H1
ggagcaagagtgaagagcgaagagaatggctcccaagggtttaatctttttggctgtgttatgcttctcagcactgtcactgagtcgttgtcttgcggaggataatggacttgttatgaacttctacaaggaatcatgccctcaggctgaagacatcangggagaacaagtcaagcttctctacaagcgccacaagaacactgctttctcctggctcagaaacatcttccatgactgtgctgttcaga

SEQ ID NO: 9845 - DNA, 226 bp, Glycine max
  unsure (1)..(226): unsure at all n locations; Clone ID: 701150314H1
gggggggaacatntggttgattagggtttctncgggtgctaatgctcttgttttctcacagtcacacagcaatggaagcaatcacagagggagtgaacaacatcaacatctccgattcttacaagaagaatcgcattcaggtctccaacaccaaaaagcccctcttcttccacgtcaatctcgccaagaggtatatgcaacagcataatgaagttgagctctcagc

SEQ ID NO: 9846 - DNA, 251 bp, Glycine max
  unsure (1)..(251): unsure at all n locations; Clone ID: 701150315H1
gggaggcaaaccgcttcattttgaaaattcacaaaccaatagtgaaaagagacagagagggaaaaagaagaagaaaagaaaaagaaaattgcaaaaagcgaaaccgaaaaccaaatccgaagagtgaaggttcgttgaatcccatggcgagagtgaagcacacgccagcttctcgcaaatccgctaaaaagcaagcgccacgcgcatccacttccacgcanncgccaccacaatcccaatcgcctgcaact

SEQ ID NO: 9847 - DNA, 250 bp, Glycine max
  Clone ID: 701150316H1
gacatcttcttttacgtattgaatctcagaattctctaaaagagatctttttctgctctttgaagaaagaagggtctttgcttgattttggagatgtctctgctctcagatctcatcaaccttaacctctccgataccaccgagaaggtgatcgcagagtacatatggatcggtggatcaggaatggacctgaggagcaaagcaaggactctcccaggaccagttagcgacccttcagagcttcccaagt

SEQ ID NO: 9848 - DNA, 146 bp, Glycine max
  unsure (1)..(146): unsure at all n locations; Clone ID: 701150317H1
ggcacaagtgagtttgttgatcgagataactagaaacagtgtgatgaaaatgaaggtccttgttttcttcgttgctacaattttggtagcatggcaatgccatgcgnaacgntatgttccctctccnnattcccnccggctncgat

SEQ ID NO: 9849 - DNA, 256 bp, Glycine max
  Clone ID: 701150318H1
ggattgaatgacgatgggatggtcaacactgaggattgttccaagtgtacacaatttgtggatcagagatgggatgagaatgataatgaggagattcgcaatcgatttgtgactggcaatttggcaaaagctgcacttagaaatgcattaccagcagctaatactgaagaggaaaatgatgatgtctatggtgactttgaagatttggaaacaggagaaaagcatgagaatcatcagacggatgatgcttggctgc

SEQ ID NO: 9850 - DNA, 248 bp, Glycine max
  Clone ID: 701150319H1
ggggttttatctcattaacgtttcttctcttcactctgcccgctgcatcaatggcttcagagaagaaactttcgaacccaatgagggagataagagtgcagaagctcgtcctcaatatctctgttggcgagagtggagatcgtctcaccagagcctccaaggtgttggaacaacctagtggccaaaccccagtgttttccaaagcaaggtacactgttcgttcctttgggattagaagaaatgagaag

SEQ ID NO: 9851 - DNA, 262 bp, Glycine max
  Clone ID: 701150320H1
gagagaaagagagagaaagatgtcgaagcgtggtcgtggtggttcggcggggaacaagttccgcatgtcgctgggtcttccagtggcggcgacggtgaactgcgccgacaacacgggggcgaagaacctctacatcatttcggtggaagggatcaaaggccgtttgaaccgtcttccctcggcctgcgttggcgacatggtgatggccaccgtgaagaagggaaaacccgatctgaggaagaaggtcttgccagctgtcatc

SEQ ID NO: 9852 - DNA, 261 bp, Glycine max
  Clone ID: 701150321H1
gactcccaataacttgaaattctcattcctaggcactgaacactccaacaaacctcttctctcaaaaccccacatcccagacaccatcaagttctatagtataagcgatggagtcccagagggtcatgtcccaggtggccacccagttgagagagtaaacttttttcttgaggctggtcctgagaacttgcaaaagggtatagacatggcagtggcagagactaaagagagtgtcattgcatcatcgctgatgcttttgtc

SEQ ID NO: 9853 - DNA, 252 bp, Glycine max
  unsure (1)..(252): unsure at all n locations; Clone ID: 701150322H1
acagaaaacatacctccagcaaccccaggtataggaacatcaggaatacccctaccaggaggataacgatagacacgtcccctaggaagcatctgntgtggcatcataggaactggctgctgggactgctgaactgcacctggacgccttccaccgggacgctgtccctgttgtccctgctgaaccattggcacgaaaaaattcggcacaggagctgcacctggcctcataccaggcataagttgttgttga

SEQ ID NO: 9854 - DNA, 251 bp, Glycine max
  Clone ID: 701150323H1
agagggttggcttcacaccggtaatgttggctacgtagatgatgatgacgaaattttcattgttgacagggtgaaggaactcatcaaatataaaggcttccaggtgccccctgcagaacttgaagggcttcttgtaagccatccctccattgcagatgcagctgttgtcccacaaaaggatgttgctgctggtgaagttcctgttgccttcgttgtgagatcaaacggctttgatctaactgaagaggctg

SEQ ID NO: 9855 - DNA, 254 bp, Glycine max
  Clone ID: 701150324H1
gggaagctggaaaagttagaagtagtgaagaaaatgaaagtcattgttttcttcgttgctataataattttaggtgcagaatggcaatgcaatgggtcagagcatgagcatgagcatggccacagctaccaaattttccctttgcgaatgaaaaccggccccggtggccactacattccggaggtatcgtgcaaaagttggaggcttggtgtggaagcacacaacgtcattgactggagaaccattcctcaaga

SEQ ID NO: 9856 - DNA, 246 bp, Glycine max
  Clone ID: 701150325H1
atctcccttgtagaaagagaaaagttttgaaaatgttgccttgttggttttcttattttcctttttgtgtgattgtgtgaaccttatgttagacggataaatgggatccgcgcaaatcgcaaaatggtcccctatatactcattgttcccatactctatttggttcattctaactgatgcctaccttacatacaacacagacaatatgagaaaaagagagggaaagaaaaaagcatgaaagggtgc

SEQ ID NO: 9857 - DNA, 248 bp, Glycine max
  unsure (1)..(248): unsure at all n locations; Clone ID: 701150326H1
gaatctgttggattcacaacaactggtcgaggcactatcactgtgtgacgatctactccaaagccagtctcccagtagagatggaaaacatgaagatcataagaaccaacccggtctttctgtttatgctcagctaggaccagaaaatctgaagaagnngattgaagagtgtcaaaatcttgcccttgataaagcaaatatagagaatgatacaccttcagagtttcgactaagtcagctggaatttg

SEQ ID NO: 9858 - DNA, 246 bp, Glycine max
  unsure (1)..(246): unsure at all n locations; Clone ID: 701150328H1
gttttggacttgttctttggtggaggcacaaacataatcaacaagcattctttgatgttaaagaccggcatcatgaagaagtctaccttggaaacttgaancggttccaattcagagaactccagattgctactaaaaacttcagtagcaaaaacatactgggaaaaggtggttttggaaatgtctacaaaggaattctccctgatggcactcttgtagctgtcaagaggcttanngatggcatgc

SEQ ID NO: 9859 - DNA, 248 bp, Glycine max
  Clone ID: 701150329H1
gaattataaaattggtcattggagtggataaagaagaaacgatggcaagtccaggatcgcacattgttgtccttgcgttcgtgttgctcatttcatcaaaacttgcagaatgtcacaacatagttcgcttccttcctggcttccagggaccccttccttttctacttgaaactggttacgtggaagtgggtgaaatgaagcagaggagcacgcagaactcttctattattttatcgagtcagagaacg

SEQ ID NO: 9860 - DNA, 234 bp, Glycine max
  unsure (1)..(234): unsure at all n locations; Clone ID: 701150330H1
aagacattgctgaggaattgnaaaacactaagaagctgatagaagaactcaaaaatagcttagaaaaggtagaaaaagatgagcttgaggcaaaaaaagaggttgaacatgtgattctcaaaattgaagagatggagcaagacattgctagtgaagccagtattgaagccaaggcaaaacttgaggctaaaaaatccatgcttactgaagcgcttttggagtttgaattcgttg

SEQ ID NO: 9861 - DNA, 214 bp, Glycine max
  Clone ID: 701150331H1
tgcaacttcctctgctttgctcccctgtttaagcctcatcataagcttagaatggcacacaaggaattttccattgccctagtgactctcattgttctctttgtcaacacgaacctccaaggtgccacggctgactatggtggtggttggcagagtgctcatgccactttctatggtgggggtgatgcttctggcacaatgggtggagcatgtg

SEQ ID NO: 9862 - DNA, 262 bp, Glycine max
  Clone ID: 701150332H1
ggaagtaaagaacataactaaacactagcaggaccaaaagggtattcttccgacgaagaaacacgatcgtatcgtatcaccggaaattctgactctcacagatttctgggagcgacaattgcaactccgattcgacttgaagagagggaggaaggtgaagaagattggcaaattataagaatacgttgagatgtcagcgcttttcaatttccattcatttctaaccgtgatacttctgggaatatgtgcctgcacttatttc

SEQ ID NO: 9863 - DNA, 187 bp, Glycine max
  unsure (1)..(187): unsure at all n locations; Clone ID: 701150333H1
ggagtgagtagtgagaatggagtttcaagggttaccggaaggttgcattgctagtatactctctcgcactacgccggcggacgtgtgtaggttttccgtcgtatcaaanattttccgttcggncggggaatcggannnnntgntgaaannnttgntnccgntcnnnttccnnnnccanaattcccag

SEQ ID NO: 9864 - DNA, 259 bp, Glycine max
  unsure (1)..(259): unsure at all n locations; Clone ID: 701150334H1
ggcacaagtgagtttgttgatcgagataactagaaacagtgtgatgaaaatgaaggtccttgttttcttcgttgctacaattttggtagcatggcaatacnatgcgtacganatgtcccctctncgaatgaacactngnttggtggccgtnctccgggagtttaatgcgcnanntggntggnttctgttgnagcncgccacatcnttggntttganaccattcctgaagagtncnttaagccacnaaaggttccatccg

SEQ ID NO: 9865 - DNA, 257 bp, Glycine max
  Clone ID: 701150335H1
gagggagtgaacaccaaagaagaagtaggatggtatgctggcaagaaaatggcctatatctacaaggctaaggtgaaaaaggatggaagccattaccgctgcatatggggcaaggttacgaggcctcacggcaacagtggtgttgtccgtgcaaaattcaagtcaaaccttccacccagatcgatgggagctcgagtaagagtattcatgtatccaagtaatatatgagattcaggtgataagacgctcagaattcg

SEQ ID NO: 9866 - DNA, 252 bp, Glycine max
  Clone ID: 701150336H1
gaccaccaaattatatatgatattttaagcgttgtttggggaagggtgattagaccccgactcaattacaccacgcttctaaattctgagaatgaattcgtaagatcgaagcaatagcctttttctctgccgccactggtttcgatcccacacccacaaacgcaaaccctccatcctttgaatgctcttgcgttttcctttcactacctcattcctaactcacacacacacaacgggtgatatcaatgtcga

SEQ ID NO: 9867 - DNA, 256 bp, Glycine max
  unsure (1)..(256): unsure at all n locations; Clone ID: 701150337H1
gacgaacaccacctttagcacaaaccaaaaacaccaaccaagaagtgaattttgcagcgaganancctgtagaattcaccccaattccagtgtcctatgctgacttgctcccatatctacttgataattcaatggtagccataaccctagccaaggttcatcaacctccatttttctgaggatacgactcgaacgcaacgtgtgcttatcgnggaggagccctggggcattccattgagtattgtatgaccccgaa

SEQ ID NO: 9868 - DNA, 250 bp, Glycine max
  Clone ID: 701150340H1
tcctccacaaaattgtttaaccattaaaaaatattttatatgagtgaaaagataaaatacgacacactaaagataaattaagaacctaaattaaattatattattatggtaaaaactagctactattcttaaatcctgtgacaataaaagatttatttaaaaaaagttaattaatacttacattaaagatacattaacgacgagaaaaaagagggtttacgacattattatattatggcaaatgctaatt

SEQ ID NO: 9869 - DNA, 184 bp, Glycine max
  unsure (1)..(184): unsure at all n locations; Clone ID: 701150343H1
agtagattttacaacttccataacaagtttcacaaggcataaacctcacatccccacatgcctcgcatagtccatcgccatcaataccatcttcantctttccacaacaatcaagcaatttctcaagtttcccctcctcatgcagttgctgaatttgctcagcnccaccaatgtagttctccca

SEQ ID NO: 9870 - DNA, 221 bp, Glycine max
  unsure (1)..(221): unsure at all n locations; Clone ID: 701150344H1
gattgtagtatanntagagaagttgtgagcatagctttcttcatcacttcacagtaagcactatagaaaaaacgacatgnattcatctatggctacccttattgctcccagcaaccactctccccaagaagacgctgaggctctcagaaaggcttttgaaggatgggggatgatgagaaaactgtcatagtaatattgggtcatagaatgnttatcagagg

SEQ ID NO: 9871 - DNA, 257 bp, Glycine max
  unsure (1)..(257): unsure at all n locations; Clone ID: 701150345H1
ggaacatgaatatctactcttttctgtttctcttattcttccgaaaatgcttctttttctttgcgggtattaaagaagcacgtttgtcaacttctttcaccaataaattaagcacggcaagttgtgtacgtagactatagagatcacgccgatggaagatgaagtgatgagngaagtggctgctccacctcgtcgtgttcttcttgtatcggctggtgccagccacagtgtggcacttctgagtggaaatgttgttt

SEQ ID NO: 9872 - DNA, 204 bp, Glycine max
  unsure (1)..(204): unsure at all n locations; Clone ID: 701150346H1
ttcgcaaaccctaatttcggaaagatcggcgatggctgcctccaaggatcgcgagancttcgtctacatcgccaagctcgccgaacaggccgagcgatacgaagagatggtggaatcaatgaagaacgttgcggatctcgacgttgaactgactgtggaggagcggaatttactttctgttgggtacaagaatgtgattggtgc

SEQ ID NO: 9873 - DNA, 92 bp, Glycine max
  unsure (1)..(92): unsure at all n locations; Clone ID: 701150347H1
tacnntcttattcatatatatttnttttaggctgaaccattgcaaaagttaagccttttgatctctttcttaaaagaaaagcagaatttcgt

SEQ ID NO: 9874 - DNA, 249 bp, Glycine max
  Clone ID: 701150348H1
gacggcaacagaagaataatcgagacacagatcatagtgatcattttttaatttctcagatttatccgacgtcgctgcagatccaccaaccgttatggctgccttcagcggtgatgaaacggcaccgtttttcggcttccttggcgccgcagctgccctcgtcttctcctgtatgggagctgcctatggcacagcgaagagtggcgtgggcgtggcttccatgggtgtaatgagacctgagctggtgat

SEQ ID NO: 9875 - DNA, 258 bp, Glycine max
  unsure (1)..(258): unsure at all n locations; Clone ID: 701150349H1
tcccccttgcgagctaacaaagcacaatcccccagtatccaattacaacatattatttatggtaagttttataccattacccaaagggncaatgaagctgcnaanagctaattgatcnanggantagtnctcanctancaacatgtccanacccnacaaccacttcataatanggtgtggacccantttgtgngatgganataatncagncaccatgtcatcatcccnacctaaccnatnntaggattaaagggnggg

SEQ ID NO: 9876 - DNA, 254 bp, Glycine max
  Clone ID: 701150350H1
agcaatggagacagagaaatggctgcagcattttatgctgctggttttgaaccatgagatattaccatgtcagaccttcttaatggaaagatctctttgctagacttccggggaattgtgtttgttggtggatttagctatgctgacgtgcttgattctgcaaaaggttggtctgctagcataagattcaacgagtccgttttacaacagtttcaggagttttacaagcgtccagacactttcagtcttggtgt

SEQ ID NO: 9877 - DNA, 240 bp, Glycine max
  unsure (1)..(240): unsure at all n locations; Clone ID: 701150352H1
ggcacaagtttgttgagatagctagaagcaataagatgaaaatgaaagtgcttgttttgtttgttgctacagttttggtagcatatgaatgccatggctcagactaccagaagttccctctccaaatgaaaactgggtttggtgggcntacagcaatgaggtggcatgtgccagttggaggcttggcgtggaagcaaacaacgtagtcaagtggcaaactgttcctgcagcttgcggaga

SEQ ID NO: 9878 - DNA, 258 bp, Glycine max
  Clone ID: 701150353H1
gaccaacaacaacgtcgtaaaagttcttccctttcactttctcacaatcccatagtaaccttctcttctttctgccactttttctcagtctttaatggctgcccgcatcaaaattccgcgttaaacaatcgtgggccggtgcaagttagcatttttcttatcttttgggatgtcaaaaagatacccaataggaaaagtcttttttcttcttcttttggggtgctttttttttgtcaaatttgattccagtttcaccct

SEQ ID NO: 9879 - DNA, 228 bp, Glycine max
  unsure (1)..(228): unsure at all n locations; Clone ID: 701150355H1
caaggtacaaggtnatggagtcattgtggccacccctactggaagcactgcctattctacagctgctggaggttccatggtccatccaaacgttccctgcatgctgtttaccccaatctgtccacattcactctcatttagaccagttatacttccagattctgctcaacttgaattaaagattccagaggatgcaagaagcaacacctgggtttcgtttgatggaaa

SEQ ID NO: 9880 - DNA, 249 bp, Glycine max
  unsure (1)..(249): unsure at all n locations; Clone ID: 701150356H1
gggagttacttgaaacgacatcgtttcagggaagggagtgaagtgatagaggaaaccgtagaacagtggtggaaaaatgaaggcattgggatggtggctgatagnggtaggcacgcttcgattggcctccgtgtggttcggtttctncgacatttgggctcttcgactcgccgtctnctccaacactacaatgactgaagttcatgggcgcacatttggaacttggacactgttgacctgcaccctttg

SEQ ID NO: 9881 - DNA, 246 bp, Glycine max
  Clone ID: 701150359H1
ggaacaacaagcaacaacttcaccattcccaaagcctgaaaggtttggactttgaagactctgttccctcttttatgcgggcatcaccaacaacacccttagcggttcttgcaacaaagtagcaatggcttcctgttacttcaatcctatcccttgtagttctcatctcattttggctgacttatctagacagttcaagattcccaagcttcttcacaggaaaaagaggtttgatggctcgcctag

SEQ ID NO: 9882 - DNA, 86 bp, Glycine max
  unsure (1)..(86): unsure at all n locations; Clone ID: 701150360H1
ggttgcgaaattctcccatctgcttctcactgatctccattcccattccatggcttccactgaatcatcccctttcaagaaaatnc

SEQ ID NO: 9883 - DNA, 244 bp, Glycine max
  Clone ID: 701150361H1
aaagagacccggaaagggtgggaaccgcttttggaaatccattgggcttggatttaagactcccagggaagccatcgaaggaacctacattgacaagaagtgccccttcactggcaatgtttccatccgtggccgtatcttggctggaacatgtcacagtgctaagatgaacaggactattattgttaggaggaattatctccattttatcaagaagtaccagaggtacgagaaaaggcactcc

SEQ ID NO: 9884 - DNA, 244 bp, Glycine max
  unsure (1)..(244): unsure at all n locations; Clone ID: 701150362H1
ggcacaagtgagtttgttgatcgagataactagaaacagtgtgatgaaaatgaaggtccttgttttcttcgttgctacaattttggtagcatgncaatgccatgcgtacgatatgttccctctccgaatgaacactggctatggtgcccgtactccggaggtgaaatgcgcaagttggaggcttgctgtagaagcacacaacatctttggctttgagaccattcctgaagagtgcgttgaagca

SEQ ID NO: 9885 - DNA, 248 bp, Glycine max
  Clone ID: 701150363H1
gatttaattgtcatccaaattgagaatcccaattccaaatatggaagcaatgttcctttgcttttgatgaattcattcaacactcatgatgacactcaaaagattgttgaaaaataccaaaactcaaatattgagattcatacttttaaccagagccagtatcctcgattggttgttgaggactctttgccattgccttccaaagggcatactgacaaggatggatggtaccctcctggccatggtga

SEQ ID NO: 9886 - DNA, 241 bp, Glycine max
  unsure (1)..(241): unsure at all n locations; Clone ID: 701150364H1
ggtgcacaagtgagtttgttgatcgagataactagaaacagtgtgatgaaaatgaaggtccttgttttcttcgttgctacaattttggtagcatggcaatgccatgcgtacganatgctccctctccgaatgaacactggctatggtgcccgtactccggaggtgaaatgcgcaantttgannctctttcgaagccacgactcttgggtttgagaccattccngnagagtgcntgnaccac

SEQ ID NO: 9887 - DNA, 222 bp, Glycine max
  unsure (1)..(222): unsure at all n locations; Clone ID: 701150365H1
aatgcaaaaggcgacactctccttcctacgtggcatgtcacgccaatgccagtggcggcttcaccattctcgctagtggctatggcgggttaagctctcttgctagtggctatgacagattccacaaancgnacgacccccgnaaccttttctnccntccngatnacnatncannatttnccnanctncntnggcntntnaannancctncnaagaagganc

SEQ ID NO: 9888 - DNA, 237 bp, Glycine max
  Clone ID: 701150366H1
ggtggtaaattagagaataaaaacgtgccatgagtatatggatcatgagggacgtacccaacagtcattggtgatcagtactccaaaatatcataagcgttatatcttgccagaagagggcgctccccatcaccatctttacaacctcagagatctggagctttttcattcacttcgaccatgcctaaaaaagatttagagaggcgatcggtttcaccataccggttcccccttcta

SEQ ID NO: 9889 - DNA, 250 bp, Glycine max
  Clone ID: 701150367H1
ggcacaagtttgttgagatagctagaagcaataagatgaaaatgaaagtgcttgttttgtttgttgctacagttttggtagcatatgaatgccatggctcagactaccagaagttccctctccaaatgaaaactgggtttggtgggcaatacggcaatgaggtggcatgtgccagttggaggctggcgtggaagcaaacaacgtagtcaagtggcaaactgttcctgcagcttgcggagagtacatagct

SEQ ID NO: 9890 - DNA, 249 bp, Glycine max
  Clone ID: 701150368H1
ggtggtaatgagtggtgaagatgggcaaagcaccttgttgtgagaaacatggggtcagaaggggagcttggacacccgaagaagaccaagctttggttgactacatccagaaacatggccatggaagttggcgttcactccccaaacatgcaggtctcctaagatgtggaaaaagttgtcggcttcggtggataaactatcttcgcccaggcatcaagcgtggcccatttactagtgaagaagaaagta

SEQ ID NO: 9891 - DNA, 250 bp, Glycine max
  Clone ID: 701150369H1
ggcagtcaagattgtgcgttatggaagatcacgaaagccagagaaaagtcagaatcctgtgcctccatggattcaggaccagtggtgaaatcctcaagcaattagtcttaagatggcctgaacctgtcttgcaaaagctggagcttgtgttcctcgatggcccgtttcctgcacagggaagatctgatgttgaaggcatttttgaccctccttattttgaatggttccaagccaatgaggagttcactga

SEQ ID NO: 9892 - DNA, 254 bp, Glycine max
  unsure (1)..(254): unsure at all n locations; Clone ID: 701150370H1
ggatctatcatgtaccatttttatgaacaattggatttatttgagcttcacaatcttatactacaccctaattccctccacaaccactttctgctgcatgccactaccgatggtgatttccgaccgtgccactatttggtgcagatctggtgctccagtnccggtagttctccaacgtcgatgaccccaccacgaggaaaaccttattttgccatatttattttgttctgtaattgcattcttaaaatccttta

SEQ ID NO: 9893 - DNA, 246 bp, Glycine max
  unsure (1)..(246): unsure at all n locations; Clone ID: 701150371H1
ggcacaagtgagtttgttgatcgagataactagaaacagtgtgatgaaaatgaaggtccttgttttcttcgttgctacaattttggtagcatggcaatgccatgcgtacgatatgttccctctccgaatgaacactggctatggtgcccgtactccggaggtgaaatgcgcaagttggaggcttgctgtggannnacacaacatctttggctttgagaccattcctgaagagtgcgttgaagcaac

SEQ ID NO: 9894 - DNA, 250 bp, Glycine max
  unsure (1)..(250): unsure at all n locations; Clone ID: 701150372H1
atcctcaaaaagttactactatttctttgttcttaatcgagggggagccaggggggattcattgcttcagttttgaactattgatttccagcatttaattgcatgtattgataagtatggatgggtggtaagctttcattttattatattgaaaacaaacctgaacagcagatatactaatggctccatccaaaactccaggacaaattcctagaccctgaaaccaaatgacaaagtgacaganaaacag

SEQ ID NO: 9895 - DNA, 214 bp, Glycine max
  unsure (1)..(214): unsure at all n locations; Clone ID: 701150374H1
attgtacttgtttttatactttgtcttatctttgatgggggacaagcttgagcatcccattaaataattatcctttcctgtttttatcacaccaacaaattatattattattttataggataataatacattagtagctccttgatgatctttcatttaaaanannnaaaaannnnnanaaganaanncnaanaangnnananatnnannntca

SEQ ID NO: 9896 - DNA, 239 bp, Glycine max
  unsure (1)..(239): unsure at all n locations; Clone ID: 701150375H1
gggaaagcgtatttggcactatctggtgttggtgaaaccattgaagaaagggctaggataactaagaacactgcactgagtgctgctttgaatacacaatttctctttcaaattggtatcttcactgctgtgccaatgatcttgggctacggtcttgagcaaggtttcttgagggccattgtcagttttgtcacaatgcagttccagctttgcactgtctttttcacatttncctggga

SEQ ID NO: 9897 - DNA, 242 bp, Glycine max
  Clone ID: 701150377H1
ggcacaagtgagtttgttgatcgagataactagaaacagtgtgatgaaaatgaaggtccttgttttcttcgttgctacaattttggtagcatggcaatgccatgcgtacgatatgttccctctccgaatgaacactggctatggtgcccgtactccggaggtgaaatgcgcaagttggaggcttgctgtggaagcacacaacatctttggcttcgagaccattcctgaagagtgcgttgaag

SEQ ID NO: 9898 - DNA, 243 bp, Glycine max
  Clone ID: 701150378H1
gacaacagcatcgtcggcgacgtaaccctccaacaacaacacttcctcgtcagaaaatgtctctggtggcgaacgaggatttccagcacattctgcgtgtgctgaacaccaacgtggatgggaagcagaagataatgttcgcaatgacctccatcaagggtattggaaggagattcgccaacatcgcttgcaagaaggctgatgttgacatgaacaaaagggctggtgagttgactgctgctg

SEQ ID NO: 9899 - DNA, 242 bp, Glycine max
  Clone ID: 701150379H1
cctgatcccggcgtggaactagcagtggcagacatgggagagagcatcaatgaaacagatccatcagggccatacttcctaggcctccctcttttcttcttcacaggctcaccagaagaaggtcctccacctccaccatcaggagaggaacctatgttaatgccatgactaaaactagcatgctgaggctgagactgagaatgagaataagaatgagactctactttaaatgcagaacctgg

SEQ ID NO: 9900 - DNA, 249 bp, Glycine max
  Clone ID: 701150380H1
gtcacaagtttgttgagatagctagaagcaataagatgaaaatgaaagtgcttgttttgtttgttgctacagttttggtagcatatgaatgccatggctcagactaccagaagttccctctccaaatgaaaactgggtttggtgggcaatacagcaatgaggtggcatgtgccagttggaggcttggcgtggaagcaaacaacgtagtcaagtggcaaactgttcctgcagcttgcggagagtacatag

SEQ ID NO: 9901 - DNA, 200 bp, Glycine max
  Clone ID: 701150381H1
tagataattaaatagataatgcggtttagggttgaaagctgctgtatagagatctgagttgtgatttggaacgtgtaagccattatcgttgatgtaatgcagagaccagacagctgttatataaaccaaaccttttgagatgtacatgggcgtgttgtctttatcacaatgacgcatgcaatcaaggcagcaaatcatgg

SEQ ID NO: 9902 - DNA, 97 bp, Glycine max
  unsure (1)..(97): unsure at all n locations; Clone ID: 701150382H1
gacacnanaaaagtgaaaccccccacaccacacccanccctcaccttagggntcctctgttctncttctnacncaatgggaaaaacnaatnanctng

SEQ ID NO: 9903 - DNA, 252 bp, Glycine max
  Clone ID: 701150383H1
tcaccataataaataaattcctccgtcactctcttattagttgcaagtcaagtcattttaggcgtatcctaatacttagagttgatgatgaaaattaagaaagcccgtaacttaaaaaaaaattgctcacttttatccaatttgtgttaaaagagttgaccaagcaatcatttctttcttaattataagatattttaaaaaaaatatttgaatctttttataattttttttaatttttatatgtattaatta

SEQ ID NO: 9904 - DNA, 249 bp, Glycine max
  Clone ID: 701150385H1
agatgaagaaaaaaaggagaaagaaaaaaaaaggaagcgagttaatgacatgaagaagcagcagtaagagcatgagaagatactggccaagaaggaagaaataaaaatacaacgccgagctacgggtgaagtcctagaaaataagaaaattatggatgaaagagaaaattataagaatttgccagtgcaagacaaaagagaatgcaatatggagaaaatttctgaaaccgaaccgttggcctgagggat

SEQ ID NO: 9905 - DNA, 244 bp, Glycine max
  Clone ID: 701150387H1
ggcaaaagttagtagtagtgaagaaaatgaaagtccttgttttcttgttgctatagttctagcagcatggcattgccatggctcagaccatgaccatgaccatggccacacctaccaaattttccctctgagaatgaaaactggccatggtggccactacattccggaggtatcatgccaaagttggaggctggtgtggaagcacacaacgtcattgactggaaaaccgttcctcaagattgcg

SEQ ID NO: 9906 - DNA, 247 bp, Glycine max
  Clone ID: 701150388H1
cacttggctccatccagtagctgttaagcaagtacagatcgagggaaccaccgcatttgccgtttctgggactcccgctgattgtgcttctctagggatttccaaagctctctttcccacagtacctgatctggtggtcagtggcataaacaagggtagcaactgcggttatcacattgtttactctggcactgtagctggagctcgagaggccttcttcaatgatataccttctatctccattcat

SEQ ID NO: 9907 - DNA, 244 bp, Glycine max
  Clone ID: 701150389H1
gggggggaaagagagtggattcttggtgactttcttgaccagaaaagtagcaaccgcagcaccaaagactttgctttgcatctatcgaattctaatccaattctctctgcatctacatatacaatatcataatcgttcataagattgcatttgcattgatttcaaaaatgcagatcaggggatcgagtcacagactctccagtatgggcaataatcgatcccgcattcccgcgctcctcatctc

SEQ ID NO: 9908 - DNA, 221 bp, Glycine max
  unsure (1)..(221): unsure at all n locations; Clone ID: 701150391H1
tccagagagaagaagaaacttaatcgatcatcacttcacttcactaatacatcatggcagacgagacccagaacaagtatgagagctctgaggttgaggtccaggatcgtggtgtttttgactttctcggtaagaaaaaggatgaagaagacaagcctcatcctcaggaggaggtcatcgccaccgagtttcaaaaagtcactgtctcagaccaagganag

SEQ ID NO: 9909 - DNA, 242 bp, Glycine max
  Clone ID: 701150393H1
ggtggaattgaaagagagataattagaggggttttctctttgagagaatcgtatcttacaacttttcgtgaccacttttagtgagggaagagaagctaagagagagactccaattagattcaagagagatggccatcagccatgaaacttgggctttcattttcggtcttctaggcaacgtgatctcctttatggtgttccttgctccattaccaactttttaccaaatctacaagaaaaaa

SEQ ID NO: 9910 - DNA, 223 bp, Glycine max
  unsure (1)..(223): unsure at all n locations; Clone ID: 701150394H1
ggatgcatagcaatncccaattcctaattgtttaaacctaattctcatttcttcatcgttcgattcttctcctcctaaagatgcagatcttcgtgaaaactttgaccggtaagaccatcacccttgaggtggagtcctccgacaccatcgataacgtgaaagctaagattcaagacaaggaagggatcccacctgaccagcagagacttatctttgcgggtaa

SEQ ID NO: 9911 - DNA, 246 bp, Glycine max
  Clone ID: 701150395H1
ggcatcaattcaaaatatatcatcaattataagcatgggtttgtggaacacaacgaatgcagtgtcttaccgctttcacaagtttggtgatgaccaaaagaatctggtcttccaaggtgatgccacgtcttcttccaggggcatagaactcacaaagttagacggtggaggaaaaccagtgggtggcagtgtggggagagtgttatactcttctccagtgcacctttgggaaagctctacagtggt

SEQ ID NO: 9912 - DNA, 246 bp, Glycine max
  unsure (1)..(246): unsure at all n locations; Clone ID: 701150396H1
ggacactgaggtttggatctttgcctgtttgggtttgtggactgccaaataagcgtttgtatatattattctcacggagtttgtgtgtgaggcagcagcacacggcacacacaaagaacaaaagncaaagacagagagaaacaatgtcttccccaagcaaacgccgagacatggacttgatgaagctgatgatgagtgattacaaggtggagacggtcaacgatggcatgcaagagttctttgtgg

SEQ ID NO: 9913 - DNA, 251 bp, Glycine max
  unsure (1)..(251): unsure at all n locations; Clone ID: 701150402H1
ggcanaagangngtgtttnncttagatnanccctaagtctttggnaatagtnctgcaatggcttcaagtcangaggaggtgacccttttgggagctactggaagcccatttgtgtgcaggggtcatattgcccttcaattgaagggagttnataccaatanggtcggagaaaatttggaggaacaaggnngaactgcttctcaaatcccaccccgttcacaagaaggtcccntgtttattccccatgggga

SEQ ID NO: 9914 - DNA, 249 bp, Glycine max
  Clone ID: 701150403H1
ggaggaggccaaggggcccttcgatgtcttcttgtgtttcaatgaggcagagacacgccacagcttcacaggtactctctatcacgctttacagagcgccagattcaagacttacatgggagaatggcaagttgagacgtggcgacaaaatcgcaaccgctattctcactgcaatggaagcatcaaggatttcaatcgtcgttttctcaccatactttgcctcctccacctgctgccttgatcaacttg

SEQ ID NO: 9915 - DNA, 228 bp, Glycine max
  unsure (1)..(228): unsure at all n locations; Clone ID: 701150404H1
ggagttcaaacaaancaaagccatggccacctccaacttctctattgttctctccgtctccctagccttctttttggtgctacttaccaagggcacactcgaccgataccgtttctttcaccttcaacaagttcaacccagtccaaccaaacattatgctccaaaaagatgctagtatttcatcctctggggtgttacaactncnccaaagttggcagcaacggcgtg

SEQ ID NO: 9916 - DNA, 249 bp, Glycine max
  unsure (1)..(249): unsure at all n locations; Clone ID: 701150405H1
ttcctaatcgacatcatgcaaatttcattcagggattgaatagaaaactcaatagccgacatcggtcgtgaaatggccctgactgatatttttcagccgacattgcgcaatttttttataaaaaacgctcgctggccgataatgttttttcttacggcaggggaagttttcttgttncggtgttgcataaaaaacttacattgtaggtcggctaggtttttccgtggcgagctcaaccgatgtttcatt

SEQ ID NO: 9917 - DNA, 250 bp, Glycine max
  unsure (1)..(250): unsure at all n locations; Clone ID: 701150407H1
ggacgccgtttccacgaccttgcgattcagcgcagcattngaaggcgattttttactagcatggcagcaataatgttgacgactatgaatattcctctgcacacttcggtttgggttaattcccggcggaagagttggtgctgctacgcctcactttcgcagccagacaggaaggagatccgnctcggtttgcccagcaaaggtcgcatgtncgctgancaccctcgancttctcaaganttgtnaattg

SEQ ID NO: 9918 - DNA, 248 bp, Glycine max
  Clone ID: 701150408H1
gggcgatgcaattgatttgtccggcgacggaggagtcattaagaccattgtcagaaaaagcaaagccgatgctgttggtccaacagaaaattttcctcttgttgatgttcattatgaaggcacacttgctgatactggtgaagtttttgacactacacatgaagataacaccatcttctctttcgagattggaaagggcagtgttatcaaggcttgggaaattgctgtgaaaaccatgaaggttggag

SEQ ID NO: 9919 - DNA, 237 bp, Glycine max
  Clone ID: 701150411H1
gggattgatggctattgttgcagaggataatgcagatcccaacggaacaaatcttgagcttacattcctctgcctgacgtcactgacgatatgtgatttgccagagttaaagtgttttttgcagtgtgacatgttgaagacattttcacatgtagaaccaaatactaaaaatcaaatctgtattgaaaagcttacacccaatttgcagcacctgacactcggtgaaaatgaactgaa

SEQ ID NO: 9920 - DNA, 239 bp, Glycine max
  Clone ID: 701150412H1
ggatacaatacagagtgcgttgttgctccttcgccacaactccctgccaacatgggtatctccagagattctatgcacaagaggcgtgccactggtggcaagaagaaggcatggaggaagaagagaaagtatgagcttggtcgccagcctgctaacactaagctgtcaagcaacaagacagtcaggaggatccgggttagaggtggaaatgtgaagtggagggcactgagattggatac

SEQ ID NO: 9921 - DNA, 113 bp, Glycine max
  Clone ID: 701150413H1
agaattcacatacgcttgtgttaccaacaacatctcagaattctctcatgtcaccaacctctcaaaccataacccgaaataactcaaatgggaggttgaattgtctatgctca

SEQ ID NO: 9922 - DNA, 251 bp, Glycine max
  unsure (1)..(251): unsure at all n locations; Clone ID: 701150415H1
acatgatgctaatcataatgtttagttgattaccaaaggaaattttagcattgtttgataattaaacatttgtaaatttctcactggactactggagaactttccacgtaagtttcagaaattaacgttgctattcttcattatatttacgaaagtgcaataaaaataagaataaaactaagaattaaccctactataatgctcacagcagccaacaaacaaccgggtagaacancattccatctactgaa

SEQ ID NO: 9923 - DNA, 231 bp, Glycine max
  unsure (1)..(231): unsure at all n locations; Clone ID: 701150416H1
ttcgcaaaccctaatttcggaaagatcggcgatggctgcctccaaggatcgcgagancttcgtctacatcgccaagctcgccgaacaggccgagcgatacgaagagatggtggaatcaatgaagaacgttgcgaatctcgacgttgaactgactgtggaggagcggaatttacttttctgttgggtanaaagaatgtgattggtgctcgganagcatcgtggaggatnctg

SEQ ID NO: 9924 - DNA, 251 bp, Glycine max
  unsure (1)..(251): unsure at all n locations; Clone ID: 701150417H1
ggcgagattgaatcgtaagcagcggctaccctaatcctctcctcttcctctctactaatttcagctatggccgacgaagctgtggttgttccagatcccacccagatcgatgtcaagctctttaaccggtggagttcgacgatattgagattactggaaattcctccgggnggttaaantgggatggggaantcaaagnaggcaangtatgtgcctaaaacggcnggnaggtactcggtgaagcggttcag

SEQ ID NO: 9925 - DNA, 250 bp, Glycine max
  unsure (1)..(250): unsure at all n locations; Clone ID: 701150418H1
gagagagtgtcatttgtatcgtaaatcttgtatagacagcacaaacgcagaaaccgcgaaattgtgcctaaaatcgatgacttcgctaaatggtgacgagagccaccaaccccacnaccggcaaancgcaagctggaaagattactgaagtgggatggtacgttnttggcgaggatcagcaanagattggcccttacgccttctcagagttgcgcgagcatttcttgaatggatacctctcggaaattac

SEQ ID NO: 9926 - DNA, 199 bp, Glycine max
  Clone ID: 701150419H1
tggaacatggcttccccaaaggcaagttcaagagcctctgtgtcttttgcggcagcaacttctggcaaccgtcaagttttcagtgacgccaccattgaattggccaatgaaactggttaagaggaacattgacttggtgtatggtgggggaaatgttgggctgatgggcctaatatcccagagaatgtatgatggaggc

SEQ ID NO: 9927 - DNA, 243 bp, Glycine max
  Clone ID: 701150420H1
agggttgtaattttttagatgcaaatctatgttgagtcatgatcaatccatcaaggccttgatgaatgatcacgaccttgatgaatgatcataggcttgatgaaataatcaagggcctcaatggattcatcacaaccttgatgaaatgatcaggactttgatgaatttttgacactgagccctaatgaattaacacaaccttgatgatgttgaagttggtcatgatcctgatgattatcaagg

SEQ ID NO: 9928 - DNA, 248 bp, Glycine max
  Clone ID: 701150421H1
ggaaaaagcaacgggagcacttactggatgatgcatacaacaagtacatgtttgatgacgaaggattgcccaagtggtttctagatgaggagaggagacatcgccaaccaataaagcctattaccaaagaggaaattgctgcgatgaaagcacagtttaaagaaattgatgctcgacctgcgaagaaggtggcagaggccaaagcacggaagaagcgtgttgcaatgaggaaacttgagaaggtacgg

SEQ ID NO: 9929 - DNA, 244 bp, Glycine max
  unsure (1)..(244): unsure at all n locations; Clone ID: 701150422H1
ctttgtagaatttagttcttaaaaaatattttataataaatacaatcaaacacactgttctgctgaagctgagctgaccagagaaacactcgtctgcccaatactgagacaaaagttcaaaagtttcttatatatgtgatcttaagaagagaggnatagcatgttaggttgttgttcatcctcatgaacgtattttatataagaatggttttgtatcttttgctccaaagatactttaaaagct

SEQ ID NO: 9930 - DNA, 190 bp, Glycine max
  unsure (1)..(190): unsure at all n locations; Clone ID: 701150423H1
atggatanancaagnanacatnggactagctncagttnanggtngagttcgcagagcagtgtcatctctcctttgancggnaaggtgnagcatcccaattcnccatcgggnagttattgcataganggtagactggnaagtccccgtcctcaagaatcggnatcaccnncatcaanccntccaacccaag

SEQ ID NO: 9931 - DNA, 238 bp, Glycine max
  unsure (1)..(238): unsure at all n locations; Clone ID: 701150425H1
ctccctggtcatctnaatnccatgtnagtcgatcctattntagcttnnnnngnatnnnngcggacctagtgaccgatgacttgtctangcatttgntgnntgnttgcattcnaaantngatttgtccggcatgctttacaaattcatgctcgttgggctaaagtgcattattttgagttnctattcttttngtgtctcttgcatccaaagttatgctagattgctanggataaaaaga

SEQ ID NO: 9932 - DNA, 235 bp, Glycine max
  Clone ID: 701150426H1
ggatagggatatggggaggggaagagtggagttgaagaggatagagaacaagataaacaggcaagtcacttttgcaaagaggagaaatgggcttctcaagaaagcctatgagctatctgttctctgtgatgctgaggttgccctcatcatcttctccaaccgaggcaagctttatgagttctgtagcagctctagcatgctcaaaacacttgaaaggtaccagaaatgcagctat

SEQ ID NO: 9933 - DNA, 243 bp, Glycine max
  unsure (1)..(243): unsure at all n locations; Clone ID: 701150427H1
tacctgtattagccataatgaaatgangaaaggttgatgaggataagattgattctatgatcttccaaatgtngagtgccttcntccttctttgantatttctcttctgatggggntagaancaanaaccaagctgtaagtctatggcttctntctacaaatgggggccanaacctnaatttgancntgnaattggncccccncatcaanttatcnatgtcactagtggtatctacacacgtc

SEQ ID NO: 9934 - DNA, 240 bp, Glycine max
  Clone ID: 701150428H1
ggtagagctgagctgcgaaaacccccaactccaacctctgttcatacgtctaccgcgctttcttttcaaccagaactatgattaagctttttaaagtaaaggaaaagcagagagaacttgcagaaaatgcaagtggcggaccacctgttaagaagcaaagtgctggagagttgcgtcttcacaaagatataagtgagctgaatccaccaaaatcatgtaccatgcaattccccatggcaa

SEQ ID NO: 9935 - DNA, 88 bp, Glycine max
  Clone ID: 701150429H1
ataaatgacgaatatgatattaatattatttcagataattcagccattagaaataaaacaataggtcaaataactactcatctagatc

SEQ ID NO: 9936 - DNA, 256 bp, Glycine max
  unsure (1)..(256): unsure at all n locations; Clone ID: 701150430H1
ggcgtaggcaaagagagagagagaaaagcgtgaatcatgtcggacgaagagcatcacttcgattctcaggcggatgcgggagcgtccaagacgtatcctcagcaggctggtaccattcgcaagaatggctacatcgtcatcaaatccaggccttgcaaggttgtagaggtctctacgtcaaagacaggcaagcatggacatgcaaagtgtcatttgttgcaattgatattttnatgggaanagctgaagatattgt

SEQ ID NO: 9937 - DNA, 243 bp, Glycine max
  Clone ID: 701150431H1
ggatatggcaattctggtgtgtatggtgcaggatacggtcctggggtaaccagtgcttgggactgattttcaacctgatagcattatatactgtcttgggtattaggtgcagacatacacctagggtgatttttctcccttttttgtcttctttttaagtttatggtcttaaatttatttttacctggtgtttcaagcctattcatttgtgcggttataatgctaatcactaaagggagatgt

SEQ ID NO: 9938 - DNA, 171 bp, Glycine max
  unsure (1)..(171): unsure at all n locations; Clone ID: 701150432H1
tttgaaagtaatgagaattattaattctccatgttactggcttggtttgatctaaatcgtaatgcactgctccagaggnagcagagnnataatgacgatatgatatnaatattattcagtaatcngccattagaataaaccataggcaatactcctcactngtcgntacgt

SEQ ID NO: 9939 - DNA, 247 bp, Glycine max
  unsure (1)..(247): unsure at all n locations; Clone ID: 701150434H1
ggcaaaagttagtagtagtgaagagaatgaaagtcctcgttttctttgttgctatagttctagcagcatggcattgccatggctcagaccatgaccatgaccatggccacacctaccaaattttccctcgggagaatgaaaactggccaaggggggcanaacatccgggaggaatcatgccnaaagttggaggcttggtgtggaagcacacaacgtcattgactggaaaaccgttcctcaagattgg

SEQ ID NO: 9940 - DNA, 246 bp, Glycine max
  unsure (1)..(246): unsure at all n locations; Clone ID: 701150435H1
gactgccttcattgctagcaatnacttatcgctacctccgacggttttacttgattcttgcgtagagactttttggctgacttggagtaatctgttctccctaattgagatgatctagcagtttctatatagccatgaatcccccatcccttgaaattattacttggaagcacaatacaagacaagtccaatcctttacccccaaggttgctaccacagctttcactgggtgatttatctccagaa

SEQ ID NO: 9941 - DNA, 251 bp, Glycine max
  unsure (1)..(251): unsure at all n locations; Clone ID: 701150438H1
ccccttggtgtgagatttccattgtgtgaaaccagatgttacttttattgcctgctctgctgatatttttgctggtcttgaaaactaaaatattgagaataaggagaagaccttataacctcatatttgtaaagaaaaatgcatctttgcaactggttaaaaagaataagaaaattttaattttaaaaataagggtgaaaaatttatgggatgantatatacganacattgtatgaaaagntcatccctaa

SEQ ID NO: 9942 - DNA, 243 bp, Glycine max
  unsure (1)..(243): unsure at all n locations; Clone ID: 701150439H1
gatcgaagcaaaaaatgaaaacccaaagtgcttctctcctctgtctttttctctctcttgctatccttttggctagtngcactgctgcaagtgcaactccaagaagcgcagtgccaagccaccatgtttcaacattcaacagaagcctttttccttccacttttctctttggaattggttcttctgcttaccaggcagaaggagcagcaagtgtagatgggagaggaccaagcatatgggacc

SEQ ID NO: 9943 - DNA, 239 bp, Glycine max
  Clone ID: 701150440H1
ggcagttgtattgttgaacaagggtttctctgtctgcttcttcactttctctcgtttcaatcgaaaccaaaacaaaaacatgggcagaaaattcttcgtcggtggcaactggaaatgcaatgggaccactgaggaggtaaagaagattgttactactttgaatgaggctaaagtccctggagaagatgtcgtagaagttgttgtgagccctccttttgtgttcctccgttgtaaaaagt

SEQ ID NO: 9944 - DNA, 245 bp, Glycine max
  Clone ID: 701150441H1
gacagagtagtgcagttatcaggagatgttcctggcggtaatgaaggctttggaggagataggttgtcagctaagggaaaacccaccaagacaagtcatttcaattagcccaacatacaattatgctgcaattcgaccatcccaaccatatcttgacccaacttcagttgattatgttacattcgagatgctgatttcggaaacaatggttggtgggttgattggccggtgtggctcaaacatat

SEQ ID NO: 9945 - DNA, 91 bp, Glycine max
  Clone ID: 701150442H1
ctatttaaatttgtcagaacaatgaggaaaaagtttcaagaagtagtggcacaaggccgtttatctatgacaacaaatgaacatcaagaat

SEQ ID NO: 9946 - DNA, 234 bp, Glycine max
  unsure (1)..(234): unsure at all n locations; Clone ID: 701150443H1
gacactaaacaagttaaaagaagagcatcactgaactaacaaagcaaccctatgttcgaaggtggtttgtgtcaccggagccagcggcgccatcggatcatgggtggtcctactcctcctccagcgtggttacaccgtccatgccaccgtccaagatatcaaggatganaatgagacgaaacatttggaggaaatggaaggagcaaagagtcatctccatttttttgaaatgga

SEQ ID NO: 9947 - DNA, 236 bp, Glycine max
  Clone ID: 701150444H1
tttatggataataatatggtactctaataaaatacagtataaaaaaattaactacaaatatgtatttaattagaattatttcacgtatatttcaaaacaagtaaaagtattgaaatgagaaaaatggtctcaataaagaatttgtacggacaaaagttcaaaaattgacttcaaataatagagtgatgaatgaaggaagcaacctgtaatccgcgacaaagatttgggagtagcca

SEQ ID NO: 9948 - DNA, 238 bp, Glycine max
  Clone ID: 701150445H1
gatccacataaacatcaacatcgaaaggttgttaattttcaactcaatggttcttccctcaggttttgtttccatgttgatactttttggcatggttttggtagttggggtgaatattgtcccaggggttgaggcaaaggcaagggctttctttgtatttggagactcactggttgacagtggtaacaacaattacttagcgaccactgcacgggctgattcccctccttatggcatt

SEQ ID NO: 9949 - DNA, 241 bp, Glycine max
  unsure (1)..(241): unsure at all n locations; Clone ID: 701150447H1
ctcttaccggatcacctcgcacagaaacatcaatcattaatggaacttataggggatttatggaagttatactgcagaacaatgatactaagatgnctacttatcacatgagtggatatgcattttttgtagtcgggatggattttggtgattggtctgagaatagcaggggtaccttataacaagtgggatggatngcncgcactacagcacaggtctancngggagcctggnanagcat

SEQ ID NO: 9950 - DNA, 229 bp, Glycine max
  unsure (1)..(229): unsure at all n locations; Clone ID: 701150448H1
atgtgattntttgggatacatcaagtattttgatcgctcacttcacaaatttcactggtggggtggaaaccattgnnnattgtgtatgtttgcatgaagaggatcatggaatgctctggaaacatcaagactggagaactgggctagcagaagtccgaagatctagaagacttacagttttcttncanatgtactgttgcccactatgagtatggattttttgggcntt

SEQ ID NO: 9951 - DNA, 215 bp, Glycine max
  unsure (1)..(215): unsure at all n locations; Clone ID: 701150449H1
attaattattntgtgtatcaaattatngggtatatctctatgtccattaatgcacaagaaatatgtctnttaataaggccttaaatgattcattaatactactcccattatgccctcccatcccattaatgcacngggatagaatctttagtttcagtgtataaaaaanaaagaagannagannaaaannngggggccnnngngntggggccccc

SEQ ID NO: 9952 - DNA, 266 bp, Glycine max
  unsure (1)..(266): unsure at all n locations; Clone ID: 701150450H1
gaccaaatcacgctctaattacactttctatctcatttccaatctcattttcgttcggttcaaacactctcatggcatcagacaagaagattaggatcggcatcaaacggatttggaaggattgggcccnttggtggnccngggttgcntcttcagagggaaatgaccgtnngaacctggttgnntgtcnaacganccntttccatccaccanttgtttaacantgaccatacnntgttccangtacggaccaccgttccatgggg

SEQ ID NO: 9953 - DNA, 236 bp, Glycine max
  unsure (1)..(236): unsure at all n locations; Clone ID: 701150451H1
ggatgagaaacattttcatttccttcccaaattcacccgcacgtgagtgagagtttcgtttcagagactgatttttgagctacgattccacaccgcattgccaaacatgggtgttcagaatctactccctcaagcagacagacgccagatgacaaaatcacaancctaaactgagcgatcggaagccttctngatcctatcttgggagcggctccnanctgcgcaaaattacgncg

SEQ ID NO: 9954 - DNA, 243 bp, Glycine max
  Clone ID: 701150452H1
tcatctgtaatacagacaggctttgaatatagctaggttcattacatagtcaactacaatttgtatatattggtgaactcaattcttatctgtttttatcacgttcagaatgcagtgcgacagcaattgtatttgttcgaacttagcctaacttttcaaggacacgtcacctcttctcttcaatagctgcctggataattctatgggcgaaactgccaaagcaaagcagtaccggagggaaat

SEQ ID NO: 9955 - DNA, 253 bp, Glycine max
  Clone ID: 701150453H1
ggagtttttggttatctgagttctgaattctgaatcctttccccaaatcacacttgcgagcccactctagtgccccatttcatgtcatgcttgctagattcagctacacagctaagctaagatatatagatatagctcatcacacgtttcaagtttccaaggcacatagacacagacacctcagaacctgaccaaaatacttactatatatctactcacattttacattccaactctttcctttccccttacc

SEQ ID NO: 9956 - DNA, 221 bp, Glycine max
  unsure (1)..(221): unsure at all n locations; Clone ID: 701150454H1
ggatgcacaagtttgtngagatagctagaagcaataagatgaaaatgaaagtgcttgttttgtttgttgctacagttttggtagcatatgaatgccatggctcagactaccagaagttccctctccaaatgaaaactggggttggtgggcaatacagcaatgaggtggcatgtgccagttggaggcttggcgtggaagcaaacaacgtagtcaagtggcaa

SEQ ID NO: 9957 - DNA, 253 bp, Glycine max
  Clone ID: 701150455H1
gcaaattaggcatttaaagaaaaaatcactctggtctagaagtttggaggaggttatggagaagcttgtagacattgtccattttttgtatttggagataagcaatgcctttggcaatgcagatgaccccaaaccattcattggacgcatgagcaatcgccaaagattgggccctgcaggccttgctttgcattatgcaaatatagtgcttcaaattgatactcttgtgggctagatcctctatacctgcaaa

SEQ ID NO: 9958 - DNA, 242 bp, Glycine max
  unsure (1)..(242): unsure at all n locations; Clone ID: 701150456H1
ggaacgcacaaacacacaaaaaatttctagagcgagaaagtgagaggagagagaaagtagctgatcctccatggcctccaccaaggaacgcgaaaactttgtctacaccgccaagctcgccgaacaagccgaacgctatgaagaaatggtggaagcaatnaagaatgtggcgaactgaacgtggaattgacggttcgaggagcggnaccttctgtgcggtagggtacaagaacgtgggtggg

SEQ ID NO: 9959 - DNA, 241 bp, Glycine max
  unsure (1)..(241): unsure at all n locations; Clone ID: 701150457H1
ggtatcaatcggccacacagaaatgggcagtgcttctctgattccagtttcctggttgccttggcggccactttctcctttcaagggaacggtgaaaaccttggtcgcaaaaccatggctgaagaagattcagcaagcaagacccctcatttccgtggttaacaaggctgcctctctatcttcccccgtgacagcacccagcgttcggcgttcggtttcgggtggganaattngggngccg

SEQ ID NO: 9960 - DNA, 233 bp, Glycine max
  Clone ID: 701150459H1
agagtgctttgaaaatgggaaagtttagttcaagttacagtacttctgattttgttcactttggagttctacttccctttcttctgttatcacagttgttctttcaacttgcatggtgtggctccatagtaaagttccttcctggattagagggaccccttccttttgttcttgaaaccgggtatgtgggagtgggtgaatcagaggatgtgcaggcattctactacttcatt

SEQ ID NO: 9961 - DNA, 239 bp, Glycine max
  Clone ID: 701150461H1
atctcccttccctgatccttaaatgttttagtcttcttttttattctaaaatatgttacgtttaacactctaatgacaacaccaaaacgtaaatatcccaaagccaattctctaattaaagagattaatttccaggattgtatatattgatcgacaatattattaagaaataagtggctaagttctgtccgaacttcatcttcatcaggcatattgtggggtactagcccactgggctc

SEQ ID NO: 9962 - DNA, 229 bp, Glycine max
  unsure (1)..(229): unsure at all n locations; Clone ID: 701150462H1
aagacgacagaaggggatcgaagcaaaaaatgaaaacccaaagtgcttctctcctctgtctttttctctctcttgctatcctatnacgctagtggcactgctgcaagtgcaactccaagaagcgcagtgccaagccaccatgtttcaacattcaacagaagcctttttcttccacttttctctttggaattggttcttctgcttaccaggcagaangagcagcaagtgt

SEQ ID NO: 9963 - DNA, 246 bp, Glycine max
  unsure (1)..(246): unsure at all n locations; Clone ID: 701150463H1
gggtttatgtgatgtcttcgtctattcccaattccaaattcaagaaattttttaaacttgacatatctgctatcaccttttccgtttcttgcgattcgacgatggccgatcaaaagctttcagaaccggcgcttaaacgtgagcngcttgatgaatncgtgagtagtctatattttgaacaacgaattcttgaatccgaantcnttcngnaccgcgnnaacanngaancangtangggganatggg

SEQ ID NO: 9964 - DNA, 186 bp, Glycine max
  unsure (1)..(186): unsure at all n locations; Clone ID: 701150464H1
ggtncgnnantncttcgntnctactattcagcnanntnncanccnagcgtacnntatntcccnctccnatgtacactggctatagtgcccgtactccggagtgaatgcgcaagttggaggcttgctgtggaagcacacaacatctttggctttgagaccattcctgaagagtgcgttgaagcaaca

SEQ ID NO: 9965 - DNA, 247 bp, Glycine max
  unsure (1)..(247): unsure at all n locations; Clone ID: 701150465H1
ggaagaaaaagagcgtgaaggtcgggggatagatagggtttggccnttaccctgctttgctctcggtggtgtcactgattggcgttgccaaatttccnttgggntgcttcttgctncgncgctntnataatccctcttctgcatnaattttgaattgaantttcnttcccaatatgctaaaatancctcnngcgnngtaataacngntncggaaggagnaggtagtggagnncnaggttcggnccna

SEQ ID NO: 9966 - DNA, 233 bp, Glycine max
  unsure (1)..(233): unsure at all n locations; Clone ID: 701150468H1
aaaatgacaccgaaaatgacgtcgtggtgaatgaattattcgaaacctttcatcttccataatcccgcaaggtaaacgacggtgacgattggtgggtggcgccgtacgcctcatcccatccatcgccatcggcnacttcccttaaacgacatcgcgtccatcaccccttttctcttcctcacagtncacagcagtggtagcttcccnnaaagagtggccatggnatcttcttc

SEQ ID NO: 9967 - DNA, 242 bp, Glycine max
  unsure (1)..(242): unsure at all n locations; Clone ID: 701150469H1
ggctgtgagtgagattacccatagatagagagcgcggcataacctaaacttacccttcttctctctgtgtgtgtgcgcatcaaacgcaaccagaagcagccatggccactgcaagaactgtgaaggacgtttctcctcatgagttcgtcaaagcttactcttctcacctcaagcgatctgggcaagntggagctgccagagtggactgatattgtgaaaactgcaagatttaaggagttggc

SEQ ID NO: 9968 - DNA, 241 bp, Glycine max
  unsure (1)..(241): unsure at all n locations; Clone ID: 701150470H1
gaccactactaccaagtgaaaaagcaactaagcatagtgtgtaaganagggagaaaaacaagtgctgtgtagagagaaaaatggctaggtggtgcatgatcttggtggttcttgctcttgccgtggttgcaagtnccagaaacatgcncaatgacgctggtttgggggaccagaagaacttccttgggtatgggtttttcgggagttgngcaacaatggccttccctttggtggagtgggt

SEQ ID NO: 9969 - DNA, 238 bp, Glycine max
  unsure (1)..(238): unsure at all n locations; Clone ID: 701150471H1
gaggataaagaaggagagactggactagctgagttagggtgagttgcaggcagtgtcatctctcctttgacgacaagatgagcatcccaattccccatcggcagtatncatagacggagactggaaagtcccgtcctcaagaatcggattcccatcatcaacccttccaccaacacatcatcggggatatcccagcagtataaggaagacgttgatctcgctgtcgctgcggcaaant

SEQ ID NO: 9970 - DNA, 208 bp, Glycine max
  unsure (1)..(208): unsure at all n locations; Clone ID: 701150472H1
ggcacaagtttgttgagatagctagaagcaataagatgaaaatgaaagtgcttgttttgtttgttgctacagttttggtagcatatgaatgccatggctcagactaccagaagttccctctccaaatgaaaactgggtttggtgggcaatacagcaatgaggtgggcatgtgccagttggaggcttgggcgtggnagcaaacaacgta

SEQ ID NO: 9971 - DNA, 192 bp, Glycine max
  unsure (1)..(192): unsure at all n locations; Clone ID: 701150473H1
agcaaggatgctttcggtaagcaaaatgaattgagtgacacaaagtacactgaaggaggatacaactccatggagaatcagnnnnnnnnnnnnnnnnnnnnnnnnaacgacaatgctgccaatgggaagtacttctacaacaacaatgatgctgccaacaacaggtactacaaaaccaaagctgtcaacaac

SEQ ID NO: 9972 - DNA, 279 bp, Glycine max
  unsure (1)..(279): unsure at all n locations; Clone ID: 701150474H1
gggaangaagggagggaagaatagaatgggatctggaagtggaaaacacactggagagttcttcaggagaagggatggcatggaggaagcattccgatggctcaccaatncaggctcccgccatgtccaccccctgggccttgggcattcggcccgtacgtncgtccttacggttatctaacccttcgtcgggcngataccaagttcttacatatgagggcttctatngcttccccggatncctacatttccgnatntttcttcaacgttggaaaaggc

SEQ ID NO: 9973 - DNA, 231 bp, Glycine max
  unsure (1)..(231): unsure at all n locations; Clone ID: 701150475H1
acttaactgcttaagggttggagggataaggaggatgtaagctccaattactaacattttccaataaaaaaatccaagttaatttattggtcgttgaattattccaacagccaagatcatgtagcaaacgacagaantgctgcagagaatccaagctgagtttncgtgcttttagccanggnatagaatttgaaatnggtgcacagtgacatatcaattagttagaactta

SEQ ID NO: 9974 - DNA, 238 bp, Glycine max
  unsure (1)..(238): unsure at all n locations; Clone ID: 701150478H1
gaataacaataaaacccactatttaggtataaaagaaggagagttagtgcacctccgtagggtttggttattagggttttcgctcaccggtgtgcagtcgagcccccgaagaaaaagcgaaaatgccgtcgcacaagacattcagaatcaagaagaagttggcgaagaagatgaggcagaacaggctatcccctactnnatccgcatgaggtnngacnaacaccatcaggtacaacgc

SEQ ID NO: 9975 - DNA, 242 bp, Glycine max
  unsure (1)..(242): unsure at all n locations; Clone ID: 701150479H1
gaagctggaaaagttagaagtagtgaagaaaatgaaagtcattgttttcttcgttgctataataattttaggtgcagaatggcaatgcaatgggtcagagcatgagcatgagcatggccacagctaccaaattttccctttgcgaatgaaaaccggccccggtggccactacattccggaggtatcgtgcaaaagttggangcttggtgtggaagcacacaacgtcattgactggagaacca

SEQ ID NO: 9976 - DNA, 246 bp, Glycine max
  unsure (1)..(246): unsure at all n locations; Clone ID: 701150480H1
gggtggagagaggggcactgactcacacccacaatagtcgggggcagcttcaaagtacctccacattgtctcctactcttactgttctcttctcttctcatcatttttattttttccaatcaaaccaaacaaaacataagcaccgctcttttctctccgaaatccccatctcccttcacttctgagctctggacgagatccccagatctaagcatctttcangcantttccatcagattcaccctt

SEQ ID NO: 9977 - DNA, 177 bp, Glycine max
  unsure (1)..(177): unsure at all n locations; Clone ID: 701150481H1
agggttcggatcctctancgccgcgccctcaaagacactctcaactgggccgtaacatcgccaaccttttttacgacgacggnttcaaaaccntccgcgaaaaggttcgagggagnaacagacacgtggaagaccntgataccattggacaaggctcntaanggatgctgaagcttc

SEQ ID NO: 9978 - DNA, 220 bp, Glycine max
  unsure (1)..(220): unsure at all n locations; Clone ID: 701150483H1
ancggaagaattatgtntaattcttctattagaccantactaaccacgcacggtgagcggattagtctccaatttagtgggtcnataggagacatncgtggcctctcacccaggaanaaattgaanatnatgtngcaccgtaatagtttggngggatgatttnttattgnatnttttttgggtatgtaaatgagtnnntnattactgttgggttatacng

SEQ ID NO: 9979 - DNA, 225 bp, Glycine max
  unsure (1)..(225): unsure at all n locations; Clone ID: 701150484H1
gagatagagagcgcggcataacctaaacctatctttcntctctctctgtgtgtgcgcttcaacggcaaccagaagcagccatggccactgcaaggactgtgaaggatgttttcacctacatgagttcgttaaggngtactcctcttcacctncaagcgatgccggcaagatggagctgccagagtggactgatattgtgaaaactgccaagatttaaggngttgg

SEQ ID NO: 9980 - DNA, 313 bp, Glycine max
  unsure (1)..(313): unsure at all n locations; Clone ID: 701150485H1
acgngaaagcagttnatgatgtaattntgatgtnaatagtanctgatgnagctcgagtntattcatatnttcaagggcgcntnatctanagttagttaaanttnataggttagnaaatcacttncgncaagtttaattttttngatcaggacnaagtnaggaacagggntcccaatttntgnaagccaagggtttccaaaannaacattgggtnagggaaatttaagttaaaaaactgggttttggaatcccnaaagtngttagncccggccagggaaattttanaccctnncctaatnncngacaatggaat

SEQ ID NO: 9981 - DNA, 239 bp, Glycine max
  unsure (1)..(239): unsure at all n locations; Clone ID: 701150486H1
gatgacatgcaacttaatatctctatatcttctccancagttatacaantgacctaccaanncattggtgcnactatttttgnagatataacgatngatgttctggaagacggtgaagtcatncctgtgcgcatgcatctcagtggnanttagtgcttcatgtgctgtggaaattgnaggnnncaatatnggctggtntggttcatantacaaacattttctgcatacttgnagtggag

SEQ ID NO: 9982 - DNA, 238 bp, Glycine max
  unsure (1)..(238): unsure at all n locations; Clone ID: 701150487H1
gacaacacaacgcaacacaacgcgcactctctcttttctctcttaacacaaaaaccctatcgttcttcgcggtttcgccgattctcgccatgccgaaagccaaatccgacgccaaagccgccgatagccggttgaagcgcnagggcgctggtgctggaaaggaagcattcgaagaaagctgctaaggatcctaacaagccaaagngacctccaagcgctttcttcgttttcatgtncg

SEQ ID NO: 9983 - DNA, 281 bp, Glycine max
  unsure (1)..(281): unsure at all n locations; Clone ID: 701150488H1
agaacatgcctttaccaaaggtgcctactttattgggaagatgatatggagcaaaggctacaagggaactgctcccaacttacttaaagatccatggaaaaggaatttatctggctcttgaggttgatttatttgggcagtgggagagggactncaggatggaagttttaaaaaaggctggcaaggaaaaaggttgggaaacttagccagttaggaagtnccaaccccagnctncggtggatncangnctagatggncctcctattatccatggatttaac

SEQ ID NO: 9984 - DNA, 237 bp, Glycine max
  unsure (1)..(237): unsure at all n locations; Clone ID: 701150489H1
gacccctntttaattcaaactgcgagancaaganaaatacnaaacttgatcgcaccacgaagcntcaaaactctctccccatcccacatctccatgcatattagctcgatgaaggtgaagtacctaacataaaagagccttggtaacagaaaaaacacatcatgagctcctgaaccacctttcatcgaccaggatcatangtttaaaacatggagatggcagcggatgagggagttg

SEQ ID NO: 9985 - DNA, 235 bp, Glycine max
  Clone ID: 701150490H1
ggcacaaaaatacaatacaaaacaaaacagagcaaagagagagtgtgtgaaaagtgaaacaaaaaacagaacaacaatggcgacacttaaggttcctcagcctcttccccccgttgcagatgattgtgagcagctccgaaaagccttctcaggttggggaactaacgaggagctgattgtatcgatcttggctcataggaatgctgctcagaggaagctatcagagaaacttatg

SEQ ID NO: 9986 - DNA, 240 bp, Glycine max
  unsure (1)..(240): unsure at all n locations; Clone ID: 701150491H1
gaagtcacactattacaaaatgaaccaccttcattccntagcttacactaccaccactaacctctgtggctcttccctaggttgggattatcacaaccttggagttctcaacgcggacaaaatgtctttaatgccagctatggagggaagtactacaccaccatcactatcatnacctcaacactctgatttctcaactgggtatctcgaagatgctttgattgaatcatgtgagcgttc

SEQ ID NO: 9987 - DNA, 234 bp, Glycine max
  Clone ID: 701150492H1
ggcacaagtgagtttgttgatcgagataactagaaacagtgtgatgaaaatgaaggtcctgttttcttcgttgctacaattttggtagcatggcaatgccatgcgtacgatatgttccctctccgaatgaacactggctatggtgcccgtactccggaggtgaaatgcgtaagttggaggcttgctgtggaagcacacaacatctttggctttgagaccattcctgaagagtgc

SEQ ID NO: 9988 - DNA, 237 bp, Glycine max
  Clone ID: 701150493H1
gatatccaaagaaacaaaaatattattaagatgatcaacattattggagcacttgttctactctttgcatttctcttcctcagttgtgtgtatgcacaagacacaacaacccttgtgcctgcaatcataacttttggtgattctgctgtggatgtagggaacaatgactatcttcccacccttttcaagggctgattaccctccttatgggagggactttgttaaccaccaacctac

SEQ ID NO: 9989 - DNA, 229 bp, Glycine max
  unsure (1)..(229): unsure at all n locations; Clone ID: 701150495H1
atcctcatcaatacagaaacactttcctctctctctntcttctccctaaatctctttataaggcataccaagactctcaaatgaaaaatcatatagcttcttgcttgctctcgctctctcattagaaattcataagaaaatgtggaagacatgaaaaaaggagtcacacatcctattctatcattacataacaaatcaactaatatgttaatctttgtcatcgtgagtg

SEQ ID NO: 9990 - DNA, 205 bp, Glycine max
  unsure (1)..(205): unsure at all n locations; Clone ID: 701150496H1
accaaaccaaataaagctcttggttggttcacccttgtgcttattttttgttgctgagaaagagcnnnnnnnnnnnnnnnnnnnnnngtttgatcggatgcgatgaggcacacaaggacaagtgattgatgaggcggttctngatgacataatccggcgcctaaacggaggtccgattggcccgacccggaaagcagttcagctc

SEQ ID NO: 9991 - DNA, 265 bp, Glycine max
  Clone ID: 701150501H1
aagggaaaaatagtaagggattagaagaattaattagataaatagtgggaagaactgaagaaggcattcagagaatgagcagatttgaaagaaaggggaaaccattggaggaaaagtttttctccttgttctcttcaatttcattcaatcagaaaaaaaaaaagacgcttcttttctttatgtcccttttgggaaccctgactgccacctgatctaacctgcatattgctacttttggccccccagtttggtcagtatgaaatgt

SEQ ID NO: 9992 - DNA, 126 bp, Glycine max
  unsure (1)..(126): unsure at all n locations; Clone ID: 701150502H1
ggaagcaaaaaatgaaaacccaaagtgcttctctcctctgtctttttctctctcttgctatccttttggctagtngcactgctgcaagtgcaactccaagaagcgcagtgccaagccaccatgttt

SEQ ID NO: 9993 - DNA, 254 bp, Glycine max
  Clone ID: 701150503H1
agaaggcagagttggtttatgcgagaaagaaacaactcaacaaattaagggtgaaagctgaaaaggttgctgaagagaggctcggttcccaacttgatgttcttgctgctgttaagtactgagtaatctgtgtttttaaatttttgatgcctacttattaccaaattgaactacatttcaatcttgcttaaggagatcgtatttgttattggatcataaatttgatatctgataatcttgacagatgttttatt

SEQ ID NO: 9994 - DNA, 89 bp, Glycine max
  unsure (1)..(89): unsure at all n locations; Clone ID: 701150504H1
gggggggaacatttggttgattagggtttcttcgggtgctaatgctcttgttttctcacagtcacacagcantggaaccaatcacagng

SEQ ID NO: 9995 - DNA, 187 bp, Glycine max
  unsure (1)..(187): unsure at all n locations; Clone ID: 701150506H1
gaacacgcggctgccgccggaggtgaaccgcgtgctgtacgttcggaaccttcccttcaacatcacgagcgaggagatgtacgacatcttcggcaagtacggcgccattcggcagatccgcatcggcaccaacanggacantcgggaaagggctttnatcgtctacgaggacntctangacgcnaaa

SEQ ID NO: 9996 - DNA, 189 bp, Glycine max
  unsure (1)..(189): unsure at all n locations; Clone ID: 701150507H1
gaggatcaaggttggtggcaaagctggtgctcttggtgacagtatcactgttacccgcgagaagaccaagatcattgtcacctctgacagtaacttttccaaacggtatttgaagtacttgacgaagaagtacttgaagaaacacaatgtgcgagactgngctcagagtgattncttcannnaaggatg

SEQ ID NO: 9997 - DNA, 227 bp, Glycine max
  unsure (1)..(227): unsure at all n locations; Clone ID: 701150508H1
ggatgcaaaagtnagtagtagtgaagaaaatnaaagtccttgttttctttgttgctatagttctagcagcatggcattgccatggctcagaccatgaccatgaccatggccacacctaccaaattttccctctgagaatgaaaactggccatggtggccactacattccggaggtatcatgccaaagttggaggcttggtgtggaagcacacaacgtcattgactgg

SEQ ID NO: 9998 - DNA, 203 bp, Glycine max
  unsure (1)..(203): unsure at all n locations; Clone ID: 701150509H1
aaagctgtgcagaaattacttgatgagcatcgcaaccaagctgatccttttaatcaaattgagcaaggatggtgtgatattcctggaactgtggatgaagttaaagcaaagctacaaatgaggcaagaaggagccatcaagagggatagagcatggcatactctctcctccacacagtcagaactgtgtgntngnccaaccca

SEQ ID NO: 9999 - DNA, 118 bp, Glycine max
  unsure (1)..(118): unsure at all n locations; Clone ID: 701150510H1
gagggagaattaggtttttagggtttacaccgagcagcgacacctccctcccgcagtagccatggttctcaaaactgaactatgccgattcantggtgccaagatcctaccccggnna

SEQ ID NO: 10000 - DNA, 241 bp, Glycine max
  unsure (1)..(241): unsure at all n locations; Clone ID: 701150511H1
ggagggagtttcatgaacaatctatttgtgttgttgttggaatactgagctgagagtggtggagtcaggatatcatatcatgtgcactctctcactgccatgcctctcttattctcttcacactcacacttaccagtctggacgcttctctcccccttgttcttttatcttcacaccttcatagncgctctcacagtcattccngactccatgcccccccctcagacgggggaaagaaaga

SEQ ID NO: 10001 - DNA, 249 bp, Glycine max
  Clone ID: 701150512H1
gggaacaacagcagcatcaacagcaaccctgaggagttggcggtggggtgcttgctttcgatcaggacaacgttgggcgacgaattcgaaggccaggtcgtgaccttcgatcgcccctccaacatcctcgtactccaggagccttccaaacctagccctcgtcgaaaccttaggttgctcaaagccaattacatcaaagacttcacctttcttggccatgcccaagaccctcttgatcccaacacctgc

SEQ ID NO: 10002 - DNA, 224 bp, Glycine max
  unsure (1)..(224): unsure at all n locations; Clone ID: 701150513H1
aagagaaagaagaagaaaacttcaatttttgacagccaagtttgtttccagtaacgacggacaacaacctttcacttttactatgatgagagaaaaccacgtctgaagagtttgagcagcaaagagaacttagaatgatggaggatttttggagcatgttttgtggggatcgtgattgtcctgggacccggggaaagnttttcnccatgnttaangtttttgga

SEQ ID NO: 10003 - DNA, 222 bp, Glycine max
  unsure (1)..(222): unsure at all n locations; Clone ID: 701150514H1
ggcacaagttanttgagatagctagaagcaataagatgaaaatgaaagtgcttgttttgtttgttgctacagttttggtagcatatgaatgccatggctcagactaccagaagttccctctccaaatgaaaactgggtttggtgggcaatacagcaatgaggtggcatgtgccagttggaggcttggcgtggaagcaaacaacgtatcaagtggcaaactgt

SEQ ID NO: 10004 - DNA, 249 bp, Glycine max
  unsure (1)..(249): unsure at all n locations; Clone ID: 701150515H1
gggacaatgaacctgaggagatagatgatccagaggcaacaaaaccagaagattgggacgatgaggaggatggtgaatgggaagccccaaagattgagaacccaaaatgtgaagcagcccccggttgtggtgagtggaagaggccaatgaagaggaatccagcttacaaaggaaaatggcatgccccactaattgaaaatcctgcttataagggatttggaanctcaggactttccaaacctgantatt

SEQ ID NO: 10005 - DNA, 256 bp, Glycine max
  unsure (1)..(256): unsure at all n locations; Clone ID: 701150517H1
gggttttcactcgcgtcgaattgaggtaccgtatggctacggtagtgccgtgtttggttgcgtaaaacaactcgcgttaactggttttttttaatcgaggttagcttctttggtttttttgctgctataggaattgggagtgatggatttctcttcggtgggggctgcgttggattcgaagtcgtacgacaaggttgcggatgtntgcgacaacttgatgcttcaggttgcagctgagggcattgcttatcaggac

SEQ ID NO: 10006 - DNA, 180 bp, Glycine max
  unsure (1)..(180): unsure at all n locations; Clone ID: 701150518H1
ggttttagcgcagttcttctagatttaaggaanatgggtaaggaaaaggttcacatcagtattgtggttatnggccatgttgactctgggaagtccactaccactggccacctgatctacaagcttggaggcattgacaagcgtgttattgagagatttgggaaggaagctgctganatg

SEQ ID NO: 10007 - DNA, 179 bp, Glycine max
  unsure (1)..(179): unsure at all n locations; Clone ID: 701150519H1
gtcatcttattcttgggatctgcacattagtacaacggggatgctaaggagactgggttgaagagacaaattcttgttgggttttgatgctgggagatgtgaaactcatccgtgatgtctctctgtattttgtaatagtagcatttcctcccngatttggnacctccaagggattcttt

SEQ ID NO: 10008 - DNA, 178 bp, Glycine max
  unsure (1)..(178): unsure at all n locations; Clone ID: 701150520H1
ggaggcggagacgaagaagtgaagagaagagaagagaagggatttggatctgaaaagagaagatggggggaggaatggaagcaaacaagaacaagttcatagaggattggggcactgccagagagaatctggagttcaatttccgttggactcgccgnaaccttgctcttgttggcat

SEQ ID NO: 10009 - DNA, 142 bp, Glycine max
  Clone ID: 701150521H1
agaccattatttccacctgaagcattgcttccatttaagtcaaattgacttccattttcctgtccaaactgagtcacattgttttttgaattaatttgggacattcttgaatcatcattgaaagttccactcctctctcttg

SEQ ID NO: 10010 - DNA, 267 bp, Glycine max
  unsure (1)..(267): unsure at all n locations; Clone ID: 701150522H1
tttggcgtttagtgatgtcataaaccaacattgcccccacagcacccctgtagtatgcacttcgtaactgctctgtatctgtttcataaaccattgaaaatgaaatattaggttaaactgaaatttggcatttaatgtacttgtaagtcaaccaaccattcgaaccaccaagcaatgataagaaataatcttaattaatcttgtgaagaagcactaactagatataantgctgcaagaaaaatggttctttgctacgctgnngataa

SEQ ID NO: 10011 - DNA, 121 bp, Glycine max
  unsure (1)..(121): unsure at all n locations; Clone ID: 701150523H1
ggcagtggagagcanagtgttagcaccaaaantgtcgnagtnnatgcttcgtgttccttggcactaattcctcttctctgcacctccttctcgccagtganncccncaaattggcgcctcc

SEQ ID NO: 10012 - DNA, 252 bp, Glycine max
  unsure (1)..(252): unsure at all n locations; Clone ID: 701150524H1
caatacaaaagtttttttggcatttcagaaaagaacacgaaaatacccgaagggagggcaaaagggtcattttaaatctttttcagacccctgactcgctcaggctagcctttngctcgcctgggccaccaagataacttcatggtgaagtaaccagctcgcctaagtgagtagtcatgaccccaaatgctttgtttttctataaataagctgaggtggggctaagagggaggttcagaagtctagaggtcc

SEQ ID NO: 10013 - DNA, 159 bp, Glycine max
  unsure (1)..(159): unsure at all n locations; Clone ID: 701150526H1
ctcttctcatttccttgangtctattagtgattttgtgggttccagtagtggtttatgccattattgtaaaccatggttacaatgctaataaaattgataaatttggcatccttgtctcttatcctctcacaattacatcttttcttatttaactncca

SEQ ID NO: 10014 - DNA, 241 bp, Glycine max
  unsure (1)..(241): unsure at all n locations; Clone ID: 701150527H1
ggttgtgtgtaagtgtgaagagaagagaatggtagtaggattgaatgtgcctcagccatttctgtcaccagtttgcaagacggcaccttacccacttgatctcatcgccaccgccgcgtccctccacttcggccaccttctccgccgccgcgcgacccaccatctccgccttggggttcttcttcactcctgtttcaagaaactcgcnctttaactcacatttttagatggaagaaggngg

SEQ ID NO: 10015 - DNA, 252 bp, Glycine max
  unsure (1)..(252): unsure at all n locations; Clone ID: 701150529H1
ggagaaatctgattcgttcattgccattgccagggttggaaagacctcgttgatgaatcaatacgtgcacaagaagtttagtcagcaatataaggctaccattggggctgattttgtcaccaaagagcttcagattgatgacagacttgtcactctacaagtgggtttcgtttcctgtttcaacgatatgggacactgctgggcaagagagattccagagtctcggggttgcatttncaagaggtnccgatt

SEQ ID NO: 10016 - DNA, 253 bp, Glycine max
  unsure (1)..(253): unsure at all n locations; Clone ID: 701150530H1
gactgtgaagtgtatttggtcactgacctatcttggtagagatttgaagtttaaaccttcaaattaatncaaaccattttaatttgcctatagattctgagtcactgctgctatggcgctacgcgtacttcttgtgttggggatgttgctgatgttgtgccttgttaaggtttcatctgntccaaagatagaagaagantacnggaancagaagaagatctgcagttncccgataacgagccnttatcgngag

SEQ ID NO: 10017 - DNA, 246 bp, Glycine max
  unsure (1)..(246): unsure at all n locations; Clone ID: 701150531H1
gtatagccctacctcaccatcatatagccctacgtcccctagttacaatccgcagtcagcgaagtatagtccttcgttagcatattctccaagcagtcngagattgtctccatcaagtccatatagtcccacatcaccaaattatagtccgacatcaccntcatattcaccaacatctccatcttattctccatcaagcccaacatacagtcccagcngcccatatattctggtgtgagcccagac

SEQ ID NO: 10018 - DNA, 237 bp, Glycine max
  Clone ID: 701150532H1
ggcagttcaattccaatatattccattctctctgtgtatttccctacctctcccttcaagatgcagatcttcgtcaagaccctcaccggcaagaccatcacccttgaggtggaaagctctgacaccatcgacaacgtcaaggccaagatccaggacaaggaaggaatccccccggaccagcaacgtctcattttcgccggaaagcaattgaggaggcgtacccttgctgactacaaa

SEQ ID NO: 10019 - DNA, 259 bp, Glycine max
  unsure (1)..(259): unsure at all n locations; Clone ID: 701150533H1
ggcacaagtgagtttgttgatcgagataactagaaacagtgtgatgaaaatgaaggtccttgttttcttcgttgctacaattttggtagcatggcaatgccatgcgtacgatatgttccctctccgaatgaacactggctatggtgcccgtactccggaggtgaaatgcgcaagttggaggcttgctgtggaagcacacaacatctttggctttgagaccattcctgaaagatgcnttgaagcaacaaaggaatacntc

SEQ ID NO: 10020 - DNA, 261 bp, Glycine max
  unsure (1)..(261): unsure at all n locations; Clone ID: 701150534H1
agctcaagggaggatcatgtttcaagatatggtactgataggtcttcagggccatctgcttatgatcaatcaagtgctccagagcataatgtaaaccatggcaacagaggcttgaggagtgaagatcggannntnnancccctgnncnattnnnaagggnnaaaactctcagaatgcttcttcagagaagatttngccaaaanaacnnctgagggacatgtcctgtcagcataagggntactacagtgctagagngagaac

SEQ ID NO: 10021 - DNA, 251 bp, Glycine max
  Clone ID: 701150535H1
ggatacatggggccgatttgctgaaaggagtgcagcatatcagccatggatgtggaatgtgggaaaccacgaagtagagtttttgcctgaagtgggagaagttgaacctttcaaaaactatctttaccgatatactactccctattcggcttccaaaagcaccagccccctctggtatgcagtcaggcgtgcctctgctcatatcattgtgctatcaagctattctccatttgtgaagtacacgcctcaat

SEQ ID NO: 10022 - DNA, 250 bp, Glycine max
  unsure (1)..(250): unsure at all n locations; Clone ID: 701150536H1
ggaagtgaagagagaaacaatggccaatgtttcaattccactcccacgaaacggtttctccaaacccaattactcgacaaaacgcccatgtttcaccccttcagcttcaacactcagaatttcttgctctggagtggctgagtttgntggatctcatcggaaaaaaggaggtttgtttaatttccantggaatnangggcntggnttgtggtattcttgcagcttgtgctgttacttctgctgcatttcc

SEQ ID NO: 10023 - DNA, 244 bp, Glycine max
  Clone ID: 701150539H1
gacctgcagacactctataacgtccagggatggaacccttacgcggtttctttcaatgcggatgaggacacttttaggttggtatttaagaatcccggcatggaggatgaccccacttgtggccccatcattgacaacattgctattaagaagcttttcactcctgataaacccaaagacaacgcatgattcaatggggattttgaagagggtccatggatgttcaggaacacttcactgggtg

SEQ ID NO: 10024 - DNA, 244 bp, Glycine max
  unsure (1)..(244): unsure at all n locations; Clone ID: 701150541H1
gaatacagaagacggttgctgaaacttgaagactctgctgcagatctttattcagcagagtatggaatatctgaattggagggaaccagtttattgggggatgaagaaccgtcatgggacatcagaagatcctgcttggaatggtgcactgatcacaatattgagttcatngaggcatgtggttcaaatgcggnttttgacaaatgcttgnccanaganggtgnttaacanggattgggncccc

SEQ ID NO: 10025 - DNA, 151 bp, Glycine max
  unsure (1)..(151): unsure at all n locations; Clone ID: 701150542H1
gggacatcgaagcaaaaaatgaaaacccaaagtgcttctctcctctgtctttttctctctcttgctatccttttggctagtggcactgctgcaagtgcaactccaagaagcgcaggncangccaccatgtttcaacattcancngangcnt

SEQ ID NO: 10026 - DNA, 238 bp, Glycine max
  unsure (1)..(238): unsure at all n locations; Clone ID: 701150543H1
gtagttggttttatgaaatgttgattgtgaataggccacaacagtgaagaaatcgcccataattggtcggaaaagggatggatatttgagaaccagtgagaacagagtctggatgccggaaattggccagaaaagtcttcacggcagcatgcaacaatgagtcatgctttaaactcgcaggggagtgcggaaaagagctctacagantctngggcttacanttgggggggcacaaaaa

SEQ ID NO: 10027 - DNA, 145 bp, Glycine max
  unsure (1)..(145): unsure at all n locations; Clone ID: 701150544H1
ggaactcataatattcatcactagaagtgttggatgcatttctatttctaacnnnnnnnnnnnnnnnnnnnnnnnnnngagaaagaaaagaatggcaaagttaataaaattctttgagttgaacacaggggccaagattccttct

SEQ ID NO: 10028 - DNA, 237 bp, Glycine max
  unsure (1)..(237): unsure at all n locations; Clone ID: 701150545H1
ggcagcgcttgagaccaagccccactcaaccaccacaccactctctctgctcttcttctacctttcaagtttttaaagtattaagatggcagagacattcctatttacctcagagtcagtgaacgagggacaccctgacaagctctgcgaccaaatctccgatgctgtcctcgacgcttgccttgaacaggacccagacagcaaggttgctggaaacatgnanaagnccatntgggt

SEQ ID NO: 10029 - DNA, 154 bp, Glycine max
  unsure (1)..(154): unsure at all n locations; Clone ID: 701150548H1
gactactcctattatatgtnataaaanttaattgcaatnnaaattcctgttatgcatatnaatngnnatntgcagagncnacacgcaagatntttcagagaagcctttaagctttcaaatgctatatanccttgacagngtgcacaagcttgga

SEQ ID NO: 10030 - DNA, 256 bp, Glycine max
  Clone ID: 701150549H1
ggtcgtttaaagatgcagagtctgcaacagaaggcttccgaatggagcggtgtttccatagacgacgctttcggcatcgacgacaccaatctcttccagaaactcggcctccaaaccttcattaacctctccaccaatttctacaacagggtttacgatgacgaggaagaatggtttcgttcaatattcgcgaattctgagaaggagaatgccattcaaaaccaatacgagttcttcgtgcagcgaatgggtggtc

SEQ ID NO: 10031 - DNA, 154 bp, Glycine max
  Clone ID: 701150550H1
ggagtataaacatagtactcgtgttcttttttcaatactacatcacattcaaatcattaaatctagctagcaaattagagttattatttattatcattgcacaaattaaatagcatactagtacatggcttctcctggtggaagtgggacctat

SEQ ID NO: 10032 - DNA, 245 bp, Glycine max
  unsure (1)..(245): unsure at all n locations; Clone ID: 701150551H1
gagagaaatatcttgttgagttgatttctgatcccaaattgagtttgagtttcagccatggtatctgtttctctgctcttattccaatctttctttgccttctttgcaccctctgaatctcacgacaaagtctcgttggaattgtactacgaaagcttatgcccctacagcgccaattcatcgtgatcacctcccaaaaatnttcaccccanatttgncccaatgggncaccnaaaattgttggg

SEQ ID NO: 10033 - DNA, 157 bp, Glycine max
  Clone ID: 701150552H1
acccaaacagaaagtggagactatttattttaggcttaggcatgggataaatccgcctatggtttcatatccgatcccaagctcaggtaaagaagaagagtggtgttaaggcgtctgcaactaacatagaacttaccagttgtaattgttcggaacc

SEQ ID NO: 10034 - DNA, 150 bp, Glycine max
  unsure (1)..(150): unsure at all n locations; Clone ID: 701150553H1
gatcactgatttgacacgtttgtgccgagaggggaaagttaaagaggcaattgaattgatggataaaggggtcaaagctgatgctggttgctttgcccttctgtttgactcgtgtggacaatctaagtcccttgaggatgctaanaaggc

SEQ ID NO: 10035 - DNA, 149 bp, Glycine max
  Clone ID: 701150555H1
gtccatggtctctgatgcttcttctggacctccatattatgataatgaatgctattgtcagaatcggtatccttgcctttcttctacaaccaaagattcccaaaagaagaacaagaaggtcaaagaatatggcagaagtcaacagcctt

SEQ ID NO: 10036 - DNA, 244 bp, Glycine max
  Clone ID: 701150556H1
gatgggttcgaagaggtatgcgctattgatgtgcggtgaggattcggagtacttggtgaagatgcacggaggcacctatggggtattcatgaagttgctccaagagcaagaggaaaagtgggacctctacaagctcgtccaaggagagttcccggagcagcatgacttgcctctctacgatggctttgtcatcagtggaagctgctatgatgcacatgccatgacccatggatccttgacctca

SEQ ID NO: 10037 - DNA, 143 bp, Glycine max
  unsure (1)..(143): unsure at all n locations; Clone ID: 701150558H1
gccatcttttattganttgattccaaatacaaacatggcaatnaanaagttcttgtgggttgttctgtccctttctttggtccttggagtggccaatagctttgattttcacgacaaggntttggacnccgaggaaaccctnt

SEQ ID NO: 10038 - DNA, 236 bp, Glycine max
  Clone ID: 701150559H1
gggtttgtttaagtatgcatttgctgaagaagggttttgctctgctccttcggaatcgaaatcaaagcctctttattggaaagtggataaccccactctctcacctatccaccttcaagatttgcctggattcacacgcagtgttttataagagtaatcatgctttggtatcaccagaaagtcatgtatatggcccattgcctgattggatcgacacgtcgggcgcattttatttc

SEQ ID NO: 10039 - DNA, 238 bp, Glycine max
  unsure (1)..(238): unsure at all n locations; Clone ID: 701150560H1
tactattgtcgcttaagccaaactcctccttcatgagcacgtctacaagatcatccgccacttcttcaccctggctgtgtgtggcacttgacttagcctctctatgttcattgacgatgttttgcattatcnggtcggcttgttgatgatacttctcaannttaggcttcaaccctgagatgtgttgaagccattcagcagaagggtacaaatctcccaagtcaaaacctccagcagc

SEQ ID NO: 10040 - DNA, 238 bp, Glycine max
  Clone ID: 701150561H1
acccaccattacaataatcccaactttccccctcacaaatggaaaaatgacaaaacacatccgctacactcacttttggcgcgaaaacgatatgagctagcttcaggatataataacaataatgtaaaaaaattaaacaaccattccaatcagtgctccatggctcctgacactgttgacgaattcctcatacactttctagctttcaggacatggttcttgaatccaccctagttaa

SEQ ID NO: 10041 - DNA, 147 bp, Glycine max
  Clone ID: 701150562H1
ccatgtcaaaaaatttgttagaatttttataaagtaaatgggattaatttaattgtttttggacaaattaggcccaaaaatttaaatagaacagaataaacccttctataatttgatactccaatgttacgtgcggtatcatattat

SEQ ID NO: 10042 - DNA, 245 bp, Glycine max; identical to SEQ ID NO: 9532
  Clone ID: 701150563H1

SEQ ID NO: 10043 - DNA, 252 bp, Glycine max
  Clone ID: 701150564H1
catcatgaggttgttgcagatttggtgcagacaagctttcttttttctatccccatggatggtccaatgtccttctcaactcaacatgtatctgtgcagtgggttctccgctttgaatttttcacaactccaaagcatgtagattggaaaaagtatgagcatcctcttctaattgagggaagggaaaaaacggaatgggttcttccaattactgtacatgctccaccaccaagaggagctcctgcttctggc

SEQ ID NO: 10044 - DNA, 161 bp, Glycine max
  unsure (1)..(161): unsure at all n locations; Clone ID: 701150565H1
ggnaacactaattttctctttccctttttttggacttatccttctttctgcaactccaaaatgggttccaaaggggcaaaaaatctagcactctcttcagncttgttgctccttttggtcggttttgcaacctcagannncaatggggncnnnccccgggg

SEQ ID NO: 10045 - DNA, 259 bp, Glycine max
  unsure (1)..(259): unsure at all n locations; Clone ID: 701150566H1
gacacacagagcggttctcatattttggagaatccgaaaaacacgttaaagaaagtcccattcccactaccgaagcaaattaagaagatgaagcagcagagagtggagtttatgggcatgggcatgggcatgggcatgggcctgggccttttggtggtgatatggcatttgggtcggccaattgttccgatgntttggcaaccaatgttcaggggtnttcaaanggaanacccggttttggattcncgaaggggaagaa

SEQ ID NO: 10046 - DNA, 153 bp, Glycine max
  unsure (1)..(153): unsure at all n locations; Clone ID: 701150568H1
ggaccgaccgcacaattttcatgaatttaatgtgatttactctggaggaagctaatcttcatcccaccctactgtaccagctgacacggacatcatctcacgcgtgcttgctgtatatccaattctncatacttttccttcattggcccaaaa

SEQ ID NO: 10047 - DNA, 128 bp, Glycine max
  unsure (1)..(128): unsure at all n locations; Clone ID: 701150569H1
gtctagcataagggttagtatcgagtagtatcatgtaatgcgatgaattaagatttgaatctttgtncaaaagagacatatttatgttgtgtacctgattgngccttgaataaaattgtctctaaana

SEQ ID NO: 10048 - DNA, 239 bp, Glycine max
  unsure (1)..(239): unsure at all n locations; Clone ID: 701150571H1
atcagtggtgccccccaggataacaacataatgctgtggaatgctgtcatatttggtcctgatgatactccatgggatggaggcacgttcaagttgacactccaatttactgaggactatccaaataaaccaccgactgtacgatttgtgtctcgnatgtttcatccaaatatttatgctganggaagtatttgtttggatatattacaaatcagtggatcctatttacgatgnggctc

SEQ ID NO: 10049 - DNA, 120 bp, Glycine max
  unsure (1)..(120): unsure at all n locations; Clone ID: 701150572H1
tttctctttctttaactcctctctcttgggaatcccagatctccaaaccagtgttcaagccccaccttcatatggttctagatggcaaaaccaanttcagctgatggtaggactanaant

SEQ ID NO: 10050 - DNA, 240 bp, Glycine max
  unsure (1)..(240): unsure at all n locations; Clone ID: 701150573H1
ggatcacaaatctttcgctaacactcattaattgcaagaatggcacttcgttgcttggtgatgtccctttctgttctcttcactcttggtcttgcgagagaaagccatgccagagacgaagatttttggcatgctgtttggccaaacactcccattnccaagttcattgcgagatcttctaaagcctggccctgcaatgttgaaatngnngntcaccctatgcaattgaagaaacacngt

SEQ ID NO: 10051 - DNA, 161 bp, Glycine max
  unsure (1)..(161): unsure at all n locations; Clone ID: 701150574H1
ggggggttgaagatacaagggagagagacttacatgtgttcctcattctccactgagctgtaaagaagctcttcaatgtcagagtggaattcngttaacctangctcagtttcagtgtatgggaagtatatacccatgtctgncaccggganaganantgt

SEQ ID NO: 10052 - DNA, 236 bp, Glycine max
  unsure (1)..(236): unsure at all n locations; Clone ID: 701150577H1
ggagagaagaagaaacttaatcgatcatcacttcacttcactaatacatcatggcagacgagacccagaacaagtatgagagctctgaggttgaggtccaggatcgtggtgtttttgactttctcggtaagaaaaaggatgaagaagacaagcctcatcctcaggaggnggtcatcgccaccgnntttcaaaaggtcactgtctcagncnaggagagancaagcacancttttaga

SEQ ID NO: 10053 - DNA, 239 bp, Glycine max
  unsure (1)..(239): unsure at all n locations; Clone ID: 701150578H1
ggcacgccattggtgatcacttccgatagctctcacaatcctatggcggagaacaacaacaaccaccaccttgaaaccgccaccagaaggcttgcctctgtgaccaaccacctcactccttcttcttatcacaangcacccggcgaactcgccccgtgcctcacttccggtgggaacaacagnttccgcngcntccanggagaatttccatcccacgacgtttttggagatcgtccccc

SEQ ID NO: 10054 - DNA, 246 bp, Glycine max
  unsure (1)..(246): unsure at all n locations; Clone ID: 701150580H1
gactantcctattatataaataaaatttaattgcaataaaaattcctgttatcatataaatagagatatgcagagacaacacacaagatgtttcagagaagcctttaagctttcaaatgctatataaccttgacagagtgcacaagcttttagcttttatttacataaccttgatagaaggaagaggacagagtatgctccaaatgggtttcaagntcanggtgatcgnccngtnangtgagnanc

SEQ ID NO: 10055 - DNA, 248 bp, Glycine max
  unsure (1)..(248): unsure at all n locations; Clone ID: 701150581H1
gacacaaaaaaagtgaaaccccccacaccacacccaaccctcaccttagggttcctctgttcttcttctaacccaacaagaaaaaaaantcannttccccaaaanacccttctngctccgcntggcgaaaacgaggccaggcagaaaggacgtggactcatacaccataagaggaaccaacaagatcgtccgagctggagactgtgttctgatgcggccctcggacacgtcgaagcccccttacgtgg

SEQ ID NO: 10056 - DNA, 251 bp, Glycine max
  Clone ID: 701150582H1
gaggcgcggcgggatcagcacaagattgcaaaatgaagttcaacattgcaaatcccaccactgggtgccagaagaagctggaaatcgatgacgacctgaagcttcgagcattttgggacaagaggatctcccaggaggttcttggtgatgctctgggtgaggagtttaaaggatatgttttcaaaatcaccggtgggtgtgacaaacaaggattccctatgaagcagggagtgctgacccctggtcgtgtt

SEQ ID NO: 10057 - DNA, 139 bp, Glycine max
  unsure (1)..(139): unsure at all n locations; Clone ID: 701150583H1
gattgaggtgaagaaactcaattctcactgaaagaaagttgctaacacttggcaccacttatcaacttatcatagttgataacatcaaaggcacaacttgagggaatnagggttgttatntcagcnagtatngcttttt

SEQ ID NO: 10058 - DNA, 137 bp, Glycine max
  Clone ID: 701150584H1
ggcacttcaattgcaatcaaattagttcattctctttgcgcagttccctacctctcctttcaagatgcagatcttcgtcaagaccctcaccggaaagaccatcacccttgaggtggaaagctctgacaccatcgaca

SEQ ID NO: 10059 - DNA, 158 bp, Glycine max
  unsure (1)..(158): unsure at all n locations; Clone ID: 701150585H1
ggatggggagagtggaaggctggaaggtgagatcataaccaaacattttgagatgctttaaggaatcaaaatcatcattgataatcgataaccaaaccaaaccttaaacaatttgcttttagtatcccacaanntacaaacatnggctgcnttgactc

SEQ ID NO: 10060 - DNA, 244 bp, Glycine max
  Clone ID: 701150586H1
gatcatacattgattgctagtgatgattttatcaagtctgacgtcatatttggaagcaaaaaaattgaggctccagtacttttccaggggattgggcattcactaaatcctaccaatagcctggtgttgaaagttctctctgcatctccttcagccttttctgctaacccaaaatctaaagtgacaagtcctccatcactcactggaacttcaatctcattagtttcattatacaggcaagaat

SEQ ID NO: 10061 - DNA, 202 bp, Glycine max
  unsure (1)..(202): unsure at all n locations; Clone ID: 701150587H1
gggaggccggtggcagtggcactgtcaccaccgccaccacttccgaccacggtgacaaggagaatgtccctcctccgcaaaagggtagtaagaacaaaattccccccgtcgttcctacgtctttcaagaagaagaagcgcagaagagaaagcccaagagggtgcctcttgctganntnacangctcttngatattcggntac

SEQ ID NO: 10062 - DNA, 243 bp, Glycine max
  Clone ID: 701150588H1
gacaacatatccattttatttacaacaacaatggcttctgtgcctcaaccaaaaatctcccttctaaccttattcttcttctcgtccttcaccatcattgcgcatgcaattgttcctcaaaacgaaaccttcaaatttgagaactcaggtgaacttggaccctacatcgttgagtacggtgcagattacagaatgataagcatcttcaatctccattccagttggtttctacaacaccacccc

SEQ ID NO: 10063 - DNA, 240 bp, Glycine max
  unsure (1)..(240): unsure at all n locations; Clone ID: 701150589H1
gcgtgaactttctgtacaagaacttcattgcaatttgtctcagttttttgctctgaatggaaaatgtgaaggagagataactatctaaattcaaatttattttataaccttgttaccattttcaccttnccaaattttnggttacatctaactactacaggggttgtctaggtatacgtaccattttnctttggtaacttttngcaaatgctcaaattcattctcagatggtagggnttt

SEQ ID NO: 10064 - DNA, 235 bp, Glycine max
  unsure (1)..(235): unsure at all n locations; Clone ID: 701150590H1
tcgaattgtgccgcgccacattcaattggcggtgaggaacgacgaggagttgagcaagctactcggtgacgtcaccatcgctaacggtggcgtcatgcctaacattcacaatcttctccttcctcagaaggctggtggatcatccaaggctgctgctgcagacgatgactcttaaataggggtttttttnccgtnaaangtnatngantttntnctctngggatncncgctgttt

SEQ ID NO: 10065 - DNA, 234 bp, Glycine max
  Clone ID: 701150592H1
ccatgtcaacctcgttgagattctcatggatgtggtatgtttctattctcttattctattttcaaaaaggttttgtggacaccattcaggtgtcttccctggagagaaaaagaaagaaaatgttcaaggtacacgtatgggtggaaagaagagagtcaaagagaaaagttaaaggaagaaactaggactcataatataataaatgatgtgatagaaaatgaaaagagataaaaa

SEQ ID NO: 10066 - DNA, 237 bp, Glycine max
  unsure (1)..(237): unsure at all n locations; Clone ID: 701150593H1
tctgcacctccaattgcttcctgcattctttttcgacttctgtaatgaccaatctgaaatgtaaaattacatttcagattaattacagattttggcttctggaatggttaattctganggtaaaaaaatatatatatttcagaaaaagtgcaggaagccactgccccatttgttcctgcaggaatagcccanttggagctacgccagatatgaaatctcgagagcttttcctttttt

SEQ ID NO: 10067 - DNA, 251 bp, Glycine max
  Clone ID: 701150594H1
ggcacaagtgagtttgttgatcgagataactagaaacagtgtgatgaaaatgaaggtccttgttttcttcgttgctacaattttggtagcatggcaatgccatgcgtacgatatgttccctctccgaatgaacactggctatggtgcccgtactccggaggtgaaatgcgcaagttggaggcttgctgtggaagcacacaacatctttggctttgagaccattcctgaagatgcgttgaagcaacaaagga

SEQ ID NO: 10068 - DNA, 241 bp, Glycine max
  unsure (1)..(241): unsure at all n locations; Clone ID: 701150595H1
gggtgtgaattgtggatttgtgattgtgggaaaaagatgccgcagangcactcgaagaacaacaacgatcttgcgttcttcacgtacgatgagaagcgaaaactaggttatgggacccagaaggagaggttgggcaaggactccattaagccctncgatgcttgctctctctgcctcaaatccctaattgatcctatgagctgccagaaaggccatctctttgcaaagagtgcattcttct

SEQ ID NO: 10069 - DNA, 181 bp, Glycine max
  Clone ID: 701150601H1
ggtgcaaaggaggaagaggaaaaagaggattggagggtcgccacgtttagcaacaaccaaaccctctctactctttcttcttctcttcgctagggtttagcttcttcctcttcattcgttcttctggcctctacaatgagcaacgacaaggacactttcaacggtcgctgatctcatttcc

SEQ ID NO: 10070 - DNA, 181 bp, Glycine max
  unsure (1)..(181): unsure at all n locations; Clone ID: 701150602H1
agtatagaaggttccttttgttttactttgatgtggagggaaattttctgaaagtgttttatggttgttggattggaactttacttgcatgctacatggagttcggttttcttgttcgtgttgnntgntggtgtggctagtggtacaatgcttgcttgggtntaatntgtnngntccccgg

SEQ ID NO: 10071 - DNA, 183 bp, Glycine max
  Clone ID: 701150603H1
tcttgccatgaattcttttaagtttggtggaacccctctaatttcctgaagacgcaagcagccactcacatcaagtcttgttaaaaattgcaattctttgaggcattcaggaaggaatgtgaaattattgtccctaggctaaagttttcacatgatcaagctggcatgaaacctgttgaaaaa

SEQ ID NO: 10072 - DNA, 161 bp, Glycine max
  unsure (1)..(161): unsure at all n locations; Clone ID: 701150604H1
aagacgacagaaggggatgtgttcaacatgatgcttcagatcctggaagatggaagactaacagacagtaaggggcagaacagtggatttcaagaacacacttcttataatgacatcaaatgttggaagcagtgtgattgagaaaggaggccgcnaaattg

SEQ ID NO: 10073 - DNA, 148 bp, Glycine max
  Clone ID: 701150605H1
ggttgaaaccagtgaattgcccagggcactgcctgatgtttaaacacagggttcgatcatatagagaacttcctcttcgctttgctgattttggggtttgcatcggaatgaggctagtggtgccctgagtggattaacacgtgttagg

SEQ ID NO: 10074 - DNA, 153 bp, Glycine max
  unsure (1)..(153): unsure at all n locations; Clone ID: 701150606H1
ggatggttggnacaaaaaggtcacagaaacaaaactccatgtacggcatcattgnngcttgtttgcgcgattcaaaactcagaaagangnnccncaagcaaacttagcacatngatgntggccagtggncaantctttcttatttanccctaa

SEQ ID NO: 10075 - DNA, 174 bp, Glycine max
  unsure (1)..(174): unsure at all n locations; Clone ID: 701150607H1
gaccgtgcgctagttctgagtattctgatcgctccctgagagagctcgtcgcggcggtgcagaggaagattgcaagatgangntcaacatcgcgatcccacanggantccagaagaactcgnatcgcgacgatngaaatgcgaacnattttgggcnaagaggtctcanagagtc

SEQ ID NO: 10076 - DNA, 178 bp, Glycine max
  unsure (1)..(178): unsure at all n locations; Clone ID: 701150608H1
gacagcatatatatcaataatctattttatactatacctaacattttgataatttntcnttggtagttgatagccatgggttaccccgtgggaagctgagggtgacnatggntctcnagtccaacggnggacaaggactggcaaacccttaggaattctactggaataatccctaagg

SEQ ID NO: 10077 - DNA, 154 bp, Glycine max
  unsure (1)..(154): unsure at all n locations; Clone ID: 701150609H1
tgcgtttgtacggaaccgacccggccataataaaagctctggcgaacacggggatcggaatcgtgatcggaacngcgaacggggacattccggggctaaccttggaccctaacttcgcgaaaacgtgggtnaacaccaacgtcgtaccgtacta

SEQ ID NO: 10078 - DNA, 193 bp, Glycine max
  unsure (1)..(193): unsure at all n locations; Clone ID: 701150610H1
cagttgtagcttccatattttaacaaatttagcgcagttttctgcgttacagacgtgtatccaacaaatttcccattcctccagccaggtccgggttaagcnattaaatggcaggtttganngtggcttccggggtccaagccaaaagctatcagtggtagnatcnatacattttaaaatttacctaaatttc

SEQ ID NO: 10079 - DNA, 179 bp, Glycine max
  unsure (1)..(179): unsure at all n locations; Clone ID: 701150611H1
accctaactaagtgtttagccactccatgaccattgaggggctctgtcgtggtgtgttcgtagccgcgctcagcacaacaccccctcgctcaacacaacaccccttcgntctcagnggtgtagatcgcncttaatgcgctgtggaagggtancggtgtttgttggatcgcggcttaaca

SEQ ID NO: 10080 - DNA, 185 bp, Glycine max
  unsure (1)..(185): unsure at all n locations; Clone ID: 701150612H1
gggttgtgacaggatcattgagctcgggcaagaatggaagaacacaggttgagcttgagaatgagcacgcttgtcntcactcnttccattatcatcatcggactctcntacccagcacaaccacttgcgttgaaccatctccgaaattcctaggaaaattcgcagcaacagcacgaacccattca

SEQ ID NO: 10081 - DNA, 198 bp, Glycine max
  unsure (1)..(198): unsure at all n locations; Clone ID: 701150613H1
ggcgcattgaacgaaaattagggtttgtagtgtagcaggaacaagcagcaatggcgccgaagtaacacgcaaagttagcagaaaccccgaattgataaggggaattggaaagtactcgaagtcgcagatgtaccacaagangggcattttggctatcaangncaaaatngtggcgttttacctcgccangnccctaaa

SEQ ID NO: 10082 - DNA, 182 bp, Glycine max
  unsure (1)..(182): unsure at all n locations; Clone ID: 701150614H1
gggaaaagttagaagtagtgaagaaaatgaaagtcattgttttcttcgttgctataataattttaggtgcagaatggcaatggnatggggtcngagcatgaacatgaacatgggcacagntaccaaattttcccttncgaatnaaaaccgggcccggtngccatacattccggangtatcgt

SEQ ID NO: 10083 - DNA, 165 bp, Glycine max
  unsure (1)..(165): unsure at all n locations; Clone ID: 701150616H1
ggggcacaagtgantttgttgatcgagataactnagaaacagtgtgatgaaaatgaangtccctgttttcttcgttgctacaattttgggagcatggcatgccatgcgtacggtatgttncctctccgnatgnacacttggctatggtgcccgtactncggangt

SEQ ID NO: 10084 - DNA, 154 bp, Glycine max
  unsure (1)..(154): unsure at all n locations; Clone ID: 701150617H1
tttctaggcaggtgaaagttatgcacgtatgnatgccnacgtcactgttcactcancatttctagaaaaaactgaaatttcgaaatcttgtatttattttacacatttttctgcacaaaaaacatcagggcattatgttccacaacttgcaaag

SEQ ID NO: 10085 - DNA, 177 bp, Glycine max
  Clone ID: 701150618H1
ggggggcatcgtttgttatagttgaaccatctaagtttaaggtagttggagaaaagactactgcaggacaggagctagccactgccctgcaaatcagagcactttcagagggttactagattgagtcgttgcagcgtggagctttgaagaagggagatgagcgaacgtgatgtgccc

SEQ ID NO: 10086 - DNA, 174 bp, Glycine max
  unsure (1)..(174): unsure at all n locations; Clone ID: 701150619H1
ggagagtgaaactgcgtcaaaccctctccttcgccgtcatcgccgcagcattggccaccatcagtttctccggctacgtgttgcagaatggagtcaaatcaggcagcttcttctatggaagttgagactgtcccatctgaagncaaacttttgccaccaaagccaaagttgagc

SEQ ID NO: 10087 - DNA, 175 bp, Glycine max
  Clone ID: 701150620H1
ggttgcgaaattctcccatctgcttctcactgatctccattcccattccatggcttccactgaatcatcccctttcaagaaaattcagattcaaagggatgacactacatttgacgcatatgtggttggaaaagaggatgctcctggaattgttgtgattcaggagtggtggggt

SEQ ID NO: 10088 - DNA, 190 bp, Glycine max
  unsure (1)..(190): unsure at all n locations; Clone ID: 701150621H1
gaacacaaacacaaattacatagcctcagtaatctgagagagaaacaaaaacaatgaaggttccattgccaagttccactcccttcccctatggtttttccttctcttgggcttcaaacacaaaaanccctccttagcagcagaaccagaggcccagtgggtgataaggaaagggaacctttgggaggca

SEQ ID NO: 10089 - DNA, 179 bp, Glycine max
  unsure (1)..(179): unsure at all n locations; Clone ID: 701150622H1
ggatcaaaatcacttgtaatgtaacactttgagttgcattacatcacaacaacaacatgggctgccactgctgctgcaggcatagcttccttggtttcttcttctattaacagtggcaaatgtcntcggtccncccagaacttgtccatatagnncnctnataaccacangggccntna

SEQ ID NO: 10090 - DNA, 195 bp, Glycine max
  unsure (1)..(195): unsure at all n locations; Clone ID: 701150624H1
ggatgctcagattcagcttctatctttgagacgaggaggtcgttgattgatatgataagaccaaaagctcatgtttgataaagcaccgtcaagaacagcctgaatttagtggncctacccctaaatcacagcgaaccaaaatgggcaaatccgaagacaacgattagaagaacttaggtaagaaactcaaagatg

SEQ ID NO: 10091 - DNA, 178 bp, Glycine max
  unsure (1)..(178): unsure at all n locations; Clone ID: 701150625H1
gaagaaagagaagtagtagcagtagcagtagggaagangatgatcgggcgtcgggaaagatcaagcagtacagtnacgtcctcgacaagcccttcaccaaggcaagcaagaaggtanttgaacgcatcggttctgttctcggagctgntcatncaaccaacgcangtcgacnatttgg

SEQ ID NO: 10092 - DNA, 183 bp, Glycine max
  unsure (1)..(183): unsure at all n locations; Clone ID: 701150626H1
ggtagcgcagagaaagaactagaactagggtttcatctttgccatcagtaaacgacaatgatttacgacgttaactctcctcttttccgatccttcctcagcccagaagggaaggncctctgataagagggaatcgggcgaacngaagccaaaagggcnggaacccaaagccagcgagaacaa

SEQ ID NO: 10093 - DNA, 180 bp, Glycine max
  unsure (1)..(180): unsure at all n locations; Clone ID: 701150628H1
tctggtttatgaagtgcttcttaaaagccattgtgaatccgtgtatagtcatttttgcacttcaatagttacatgccattttttctgcacattaaaatgatngagaaagtgnttgatagattgangagnatggaaaaattgaccaataggagttgtagtcctccaccatgncttttgttc

SEQ ID NO: 10094 - DNA, 181 bp, Glycine max
  unsure (1)..(181): unsure at all n locations; Clone ID: 701150629H1
gacagcatatatatcaataatctattttatactatacctacattttgataattttcnttgtagttgatagccatggctacccgtggaaagcntgaggttgacattgatctcaagtccaacgcagacaagtnctggcaaacccttaggnattctactgaaatattccctaaggcctcccaca

SEQ ID NO: 10095 - DNA, 168 bp, Glycine max
  unsure (1)..(168): unsure at all n locations; Clone ID: 701150630H1
gagaaaggatggaaacttgaatttggggggattaagctaagatttggaaaggannggtgcatccataaagggcntgtttcttggaccggatcaagaagggcttatcagaaggacccnaattttgcnantttgattnttgaaccngaattttcnanggaaantgttcca

SEQ ID NO: 10096 - DNA, 194 bp, Glycine max
  unsure (1)..(194): unsure at all n locations; Clone ID: 701150631H1
cgagtaaatgtctttcttgagccaaaagagatttcccagaatactagcgggaagtgtacccatccccaggcnatcccttcntncatangctaaggtggtgaccttcgggatggacggntatagccatcnagaattctttccgattgantacnccttctttcaaatttaataggaagaccttttggaggaannaa

SEQ ID NO: 10097 - DNA, 132 bp, Glycine max
  unsure (1)..(132): unsure at all n locations; Clone ID: 701150632H1
aagaaggaagcatcataaccggccaaagttctctctcttccattatccccataataaactagggaaaanattactcggtctctgtgtaggantgagtgtcgtganatggttgccaaaagtcacttcgtcngg

SEQ ID NO: 10098 - DNA, 179 bp, Glycine max
  unsure (1)..(179): unsure at all n locations; Clone ID: 701150633H1
tgagatgtggagcttgctttatggatttgtttaattttgttcttaagatcatattctttggaagggtatattattgatgttcatatagatacttttttttcagtgtaagtgaactccttccctgagtggttntgttgagcatgattggaagaattatcatataatgtgtaaaaccataa

SEQ ID NO: 10099 - DNA, 208 bp, Glycine max
  unsure (1)..(208): unsure at all n locations; Clone ID: 701150634H1
gaccgcacagnattagggttttcccaatttcacagagcaaacacnacgnaaccaacaattggcgcagcttccagncggcagtcngcagccgcaagcacggggnaaggcagcncntggaagcnggttgcagtgctttcggtnccgcaagaagaaccgnggtggncgtgaccttacttgcaaancgccggccggggtcttcatcaaggat

SEQ ID NO: 10100 - DNA, 183 bp, Glycine max
  Clone ID: 701150637H1
gacctcaaaaaacaaaaatcaataccttagagaaaacaaaagcacagaatcgaaagaagagttctttttgagtgagattgggatggctcgacgaagaagatcacattgaagagttcggacgggcgaggccttcgaggtggaggaggcggtggcggtggagtcccagacgatcaagcccatgtc

SEQ ID NO: 10101 - DNA, 181 bp, Glycine max
  unsure (1)..(181): unsure at all n locations; Clone ID: 701150638H1
ggaagagaaatagtgaaagattgcaacgacgcacgaaaatgggcgaccatttggaagacaaacgcagcgagaaacgcagtgcgtagtttgacgcatcctttgccattcatgcccggaacaccttcgatcccntctcattctcctccgtccggtaccttccggaacgggtcgcgatcccagt

SEQ ID NO: 10102 - DNA, 188 bp, Glycine max
  unsure (1)..(188): unsure at all n locations; Clone ID: 701150639H1
ggaatanaacacaaaagaaacaaattgctacatagcacacactccctcttctcttctacggttatggcgtccacgttggggcacttcttcaattggcgggttcntccttcgcggtggcatctcctcnttttcttccaagccttccattccaaacacttctctctaactttcagggcagagtatggggg

SEQ ID NO: 10103 - DNA, 104 bp, Glycine max
  unsure (1)..(104): unsure at all n locations; Clone ID: 701150640H1
ggggattgcatgttacatgctattttctctcctgnntgcntgggtgaactgaattcngggatgacggttgtganaagggtgtgggggtagaggntgaanaaatt

SEQ ID NO: 10104 - DNA, 181 bp, Glycine max
  unsure (1)..(181): unsure at all n locations; Clone ID: 701150641H1
gtggccgctgattctaaactctggtgtaccatattccaattctcaagattattcagcgactgcgtaccaagtttctgatccaaatgctgtcngtacatgttgcccgtgttacagtcnatgtcngccggntccatgcacgtcagttcctggttgttctttgggtngancatctgntagcaag

SEQ ID NO: 10105 - DNA, 178 bp, Glycine max
  unsure (1)..(178): unsure at all n locations; Clone ID: 701150642H1
gacccatatcacgagtatttactgcaaaacgtttcgattcaccggttcacgtcgtttcgggtggctggaagtagtgttcagtatttaatacctcctacctttncctgtggtgaacaggagggtaatcctttcncngtgggnttcncnatcnaagtnggaaanaantttccacaaatgg

SEQ ID NO: 10106 - DNA, 159 bp, Glycine max
  unsure (1)..(159): unsure at all n locations; Clone ID: 701150643H1
gggagcctcaaaactcaataagcacctaaagatgtcaagnngcggtggttatatcctaatagccaccggccatattgttcttccatattccggtcccctttgatcatgaggagttcaaggggtgctttattngnaggtttggnacaaacttacttgagc

SEQ ID NO: 10107 - DNA, 185 bp, Glycine max
  unsure (1)..(185): unsure at all n locations; Clone ID: 701150644H1
gagatcacaacatacaatggctgcagtgttctgggctttggctttagtaagcctctgctgccagtaccttccaatgcccaagcacctggcatctgtgccggcaaactcgncanctacaaccctanctgcaacatncccgtnttctgggacgnnaccggcantaacanagggaagcnttcnntncc

SEQ ID NO: 10108 - DNA, 180 bp, Glycine max
  Clone ID: 701150645H1
gaggaaatggatattcatcacctgtgtttaatgtcatcagtgatgcaactgaggttctgagtcaccacttagaaagcagttattgtcacctttgaatggggatgctgcttgcagatcattttaaaggtgatccactagacataggtgctggtatttatcaaagtcgttcaaaggctggtg

SEQ ID NO: 10109 - DNA, 215 bp, Glycine max
  unsure (1)..(215): unsure at all n locations; Clone ID: 701150647H1
gagacatatctctaattaacactaatanacagcaaactaaaggtggaagtttgcccagaaacnaagatgggaanggaaccattttcagtagcanccgctgtgcttgattgggagcatgtggntgggagagtccagggtcaagcaaccagaagttntgcccttccaagaagganttcttgggaagcccntgattaacaacttatgggnccacaaac

SEQ ID NO: 10110 - DNA, 177 bp, Glycine max
  unsure (1)..(177): unsure at all n locations; Clone ID: 701150648H1
ggctcactcatctcttacaacgaaaccctcttcatcttgttctatctgtgacgagcatcatggctcnagagcagtgtattgttggctatgtgtgtgcttccggcgatgggtgtgggcattcggccagcaaagaanccttttgcgtgaanggtcgtgtctatgtgacccttggcgngc

SEQ ID NO: 10111 - DNA, 178 bp, Glycine max
  unsure (1)..(178): unsure at all n locations; Clone ID: 701150650H1
ggaacaaaacaagtgtttcgaatagattatcctaagtctttgggaatagtgctgcaatggcttcaagtcaggaggaggtgacccttttgggagctactggaagcccatttgtgtgcagggttcatattgccctcaagttgaagggagttcatacaaatatgtcgaagaaaattgngga

SEQ ID NO: 10112 - DNA, 188 bp, Glycine max
  unsure (1)..(188): unsure at all n locations; Clone ID: 701150651H1
ggagagaaaaaatgggccaaatcaatcaaattctttgagttgaacacaggggccaagattccttctcttgggttagggacttggcaagctgaacctggtgttgtagctgaagctctcaccacagccattcaggttggatacaggcatattgactgtgctagtgcgtataagatcnngcagagattggt

SEQ ID NO: 10113 - DNA, 184 bp, Glycine max
  unsure (1)..(184): unsure at all n locations; Clone ID: 701150652H1
ggtagccgaatatggatttgatcaaggcttggaggttgagttccttctgtaagtggcnattncctcaccattctgtgctgctnccatttgtgtaagaacttnctcctttcagtttcaaattctccctanactcgtccaaagcctcnagtnctattccagngggnaaaagtagagacncngattc

SEQ ID NO: 10114 - DNA, 173 bp, Glycine max
  unsure (1)..(173): unsure at all n locations; Clone ID: 701150653H1
ggcagttcaaagcgaagaaagattcgaaacgaagaaagaaagcgttgtgaagaatggcggaagagggacaagtgaacggtgtccacagcgtagaggagtggaggaacatctcaagaagggagagatccagaattgantgtggtggttttactgcttctggtgcggtccatgcc

SEQ ID NO: 10115 - DNA, 175 bp, Glycine max
  unsure (1)..(175): unsure at all n locations; Clone ID: 701150654H1
caaatttaaggtttacataataagagctaataatacgagggaactagatggagccttctgagtcttgatagttgcataaaaccaaaaatggggaggcaatgtaatgccgatagtgatgatgtggcangtaattaacccnaagagaaacntggtaaatccgtccaacaagatgtcc

SEQ ID NO: 10116 - DNA, 155 bp, Glycine max
  unsure (1)..(155): unsure at all n locations; Clone ID: 701150655H1
gagagatatggggtatgggaagaatggagttgaacaggtagagaacaagataaacaggcaagttacgtttgcaaagaggagaaatgggcttctccagnaagcctatgagctatctgttctctgtgatgctgagggtgncctcatcatcttctcca

SEQ ID NO: 10117 - DNA, 186 bp, Glycine max
  unsure (1)..(186): unsure at all n locations; Clone ID: 701150658H1
ggcatcanttcanaatatatcatcaattataagcatgggtttgtggaacacaacgaatgcagtgtcttgccgcttcacaagtttggtgatgacccaaagaatcngggcttcaaaggtgattgcaacgtcnttccttccaaggggnttagaacntcaaaaggtagaccgtggaagaaaaccagttgg

SEQ ID NO: 10118 - DNA, 168 bp, Glycine max
  unsure (1)..(168): unsure at all n locations; Clone ID: 701150660H1
ggtatcacattggtttatatngaaacccnaaagnntgcncccntacacgttttngtcncctnntctcccatcnttgttcgagaagcattgagcagagaagagacagtgaatcgcggtncaatcaacccacttcancncaggngttgaagttgaganaaaaatgagcgg

SEQ ID NO: 10119 - DNA, 182 bp, Glycine max
  unsure (1)..(182): unsure at all n locations; Clone ID: 701150661H1
gacccatccattcttcaaatggaaaagctccatgcttctgtgctcgcncttgtattccttcttggtcatactnattcnaggaaagattngtaacangtatgaagatggagaccggtcngaagatggggntntgtgcaagttngancaaaagcccacttgttctngtggcttananaagatcc

SEQ ID NO: 10120 - DNA, 180 bp, Glycine max
  Clone ID: 701150662H1
gacagagtagtgcagttatcagggagatgttcctgcggtaatgaaggctttggaggagataggttgtcagctaagggaaaacccaccaagacaagtcatttcattagcccaaccatacaattatgctgcaattcgaccatcccaaccatatcttgacccaacttcagtggatatgttact

SEQ ID NO: 10121 - DNA, 157 bp, Glycine max
  unsure (1)..(157): unsure at all n locations; Clone ID: 701150664H1
gaggnaataaacagcttccatttctttgcggtcttcctttccttgagagaagagcatctgaaacggcacattagtgcagggatctggagcatctctctcatgacatgtgatggaaacgtctctgtcgtggatggtatgacctgatgattaagttagt

SEQ ID NO: 10122 - DNA, 178 bp, Glycine max
  unsure (1)..(178): unsure at all n locations; Clone ID: 701150665H1
gcactatcatttaccaatgatctattttngaatggaatantattctctatcatgggctaaattcttncagaaacggatgctaataaaaatatatatagataaaacctctagctaganggccatatctaagtattcatgtncttttacaactacttatcagttctactggggtnttgga

SEQ ID NO: 10123 - DNA, 183 bp, Glycine max
  Clone ID: 701150666H1
gaccacattccaaaacacaaacacatacattgtagtatcacttttgtctcggaatttgttcttttgagttatggcaagcttaaaggttgcatgtgtggttttgatgtgcatggctgtgatggagtgcacccatgatggtgcaagccgtgtcatgccatgatgtttctgtgaaccctagccccg

SEQ ID NO: 10124 - DNA, 185 bp, Glycine max
  unsure (1)..(185): unsure at all n locations; Clone ID: 701150667H1
ggaagaagagagagtgatggagtgcgtattcggattggtgggtaatgggtttgcgatcgtggtggctgattcatcggcggtgcacaagcatcctcgtccacaagtccaacgaggacaagatcatgctcctcgatttcccacaaacttcattgccgctagcggcgancccggaaacagggtttcat

SEQ ID NO: 10125 - DNA, 160 bp, Glycine max
  unsure (1)..(160): unsure at all n locations; Clone ID: 701150668H1
ggattctattccacgggaaatcagaattccaagancttcttgtatttgagtcttctagacaaggcaaggttgcaattcttgatgggcatatccagctgacagaaaacgatgaatttgcttaccaagagatgctcactcaccttgcactctgttccattcc

SEQ ID NO: 10126 - DNA, 118 bp, Glycine max
  unsure (1)..(118): unsure at all n locations; Clone ID: 701150669H1
gtagtttgaatggtatggaatttcttcattactcttccctctgcactgaataaaatatggcctctgacttgtctcaatagtcaatgtcgcaggtcaacctgttgntgtnntggttgag

SEQ ID NO: 10127 - DNA, 105 bp, Glycine max
  unsure (1)..(105): unsure at all n locations; Clone ID: 701150671H1
atatgatncacaaatggatggcggagcatcacgantgacatggntatnaatatctgtctcgtgtgagagtctctanagtgntantagtcatacncttcancnatg

SEQ ID NO: 10128 - DNA, 129 bp, Glycine max
  unsure (1)..(129): unsure at all n locations; Clone ID: 701150672H1
ggggctcaattccgattccgattccggattcatactcataaaccccttcaatgcnttattggaactaacgagggttttcttcaaggcacttgtttctccgcatgttcgaattccaggaggagtctcgta

SEQ ID NO: 10129 - DNA, 176 bp, Glycine max
  Clone ID: 701150673H1
ggctgttcccaatttgtttcggatctgtgttgacaaaccctaaccctgaggagtatgagtggttattgagattgaggaattgacgaaaggaaaggaaagggggagatgtacctgaagaaaccgctatggagtgaaacagggaaagacgatggtggaagtgcaaagacagaagaaga

SEQ ID NO: 10130 - DNA, 194 bp, Glycine max
  unsure (1)..(194): unsure at all n locations; Clone ID: 701150674H1
gggaataaggttggtgcagagtgagtgagagacgagaaaagaatgagtgaagaaggtcctcccaaagctatatacccaacnaagccccggnaaaagccgcnaacttgaaagccagtttccgggggnacnagaaattccgaacgggnttcttcttcgccggccggngttgggntaccccacgccggttcntcngc

SEQ ID NO: 10131 - DNA, 157 bp, Glycine max
  unsure (1)..(157): unsure at all n locations; Clone ID: 701150676H1
gggtggagagagggngcactgactcacanccacaatagtcgggggcagcttcaaagtacctccacattgtctnctactcntactggtctcntctcttctcatcatttttanttttttccaatcaaaccaaacaaaacataagcaccgctcttttctc

SEQ ID NO: 10132 - DNA, 178 bp, Glycine max
  unsure (1)..(178): unsure at all n locations; Clone ID: 701150677H1
ggcgacgtaagattttagtattgtcaggggtagtgtcggtgatgaagtaactagaataaatatagttacaacatcaacttccatgntcntcatgnttcacttctgctttaagtttgtggcttcnactttctcnttctagagtaggactaaactcatacactgatcatgggagtggatt

SEQ ID NO: 10133 - DNA, 175 bp, Glycine max
  unsure (1)..(175): unsure at all n locations; Clone ID: 701150678H1
agaaaaaggaatcggagatggaacagttagctatggaatggatgatggtgacgacntttacatgcgctcttggactggaacccttattgggcccnataatactgtacntgaaggaagatttatcaattggagttnttttgtgataaagnctacccnnaaaaggccccnagtgttt

SEQ ID NO: 10134 - DNA, 176 bp, Glycine max
  unsure (1)..(176): unsure at all n locations; Clone ID: 701150679H1
ggattccaaaacacaaacaccatacattgtagtatcacttttgtctcgggatttgttcctttgagtatggnaagcttaaaggttgcatgtgtggttttgatgtgcatggntgtgatgantgcaccatgatggtgccaaccgggtcatgccatgatggttccgtggaacnagcancg

SEQ ID NO: 10135 - DNA, 190 bp, Glycine max
  unsure (1)..(190): unsure at all n locations; Clone ID: 701150680H1
ggaagttganagtgttgaactatctctagctagcttttcacaaatttngttgcacttgcaactgangcaggnaagaggggcacgngangnngaagntggaagngaagaanaacccagaaaagtgganaaagggatangtgttgtacngnaatngaaattaaaattgagtgaaatttaagagnaggngggg

SEQ ID NO: 10136 - DNA, 165 bp, Glycine max
  Clone ID: 701150681H1
gccaattatagaatatcatatatggcatggtcatcctcctcctctccacctccaatactctccacaaaagcatgaggtgttcatagtttagaagtgaagacacccgcaagacttcacccagccatcttaatgctgcttggaaagattagatatcaaaacctactt

SEQ ID NO: 10137 - DNA, 153 bp, Glycine max
  unsure (1)..(153): unsure at all n locations; Clone ID: 701150682H1
gagcgtagttcctaacactacactcttccgccgattattcttcctctgtgccctagttctcttccgccgtgtcaacgaccgtctcccttgccgttcggcacgaagaacatctcggccaatcagttngcgtggaaatctcgaattttgatcaga

SEQ ID NO: 10138 - DNA, 166 bp, Glycine max
  unsure (1)..(166): unsure at all n locations; Clone ID: 701150684H1
gacaacaacaataacaatggctgcctcactacaagctgcagctatcttcatgcaancccancanggttggcatagcctctcgnaaacttcaaatctacacaatgcattctaaggctttggcttggaacctgctgcagctaaactcattgctcccttcagcctgatt

SEQ ID NO: 10139 - DNA, 163 bp, Glycine max
  unsure (1)..(163): unsure at all n locations; Clone ID: 701150685H1
gtcaacatgaaattgatgtgaagtctccctctaacttggaaaataatctgtcaagctctgataaatcagttgttgcacaatctcnagtgatcagatgaaattcagagtctaatgccatccagtgaacntgncatgggtttgggcctccaangangagntgggg

SEQ ID NO: 10140 - DNA, 178 bp, Glycine max
  Clone ID: 701150686H1
ctgatagttagcctatcctgatcaagcatgtctgcagattcctcttgttggactaaactcaaccaggaccgcattaaagacacacatacacaactaaattatcgcatgcgttctcgtgtagtacgacaacttaggctgtatatcaagagttagatcagacagttcagtgtgatgacct

SEQ ID NO: 10141 - DNA, 186 bp, Glycine max
  unsure (1)..(186): unsure at all n locations; Clone ID: 701150687H1
ggtggaattgaaagaggagctaattacaggggtttctctttgagagaatcgtattcttacaacttttcgtgaccacttttagtgagggaagagaagctangagagagactccaattagattcnagagagatggccatcagccatgaaacttgggctttcattttcggtcttctaagcaacgtganc

SEQ ID NO: 10142 - DNA, 180 bp, Glycine max
  unsure (1)..(180): unsure at all n locations; Clone ID: 701150688H1
gactacaaatcagttttctacttgaatcttcgttatccttctttttttctccttgaactcgaatattcactatgggcagatgaggtggttctgctagatttctgggcaagtccattgggatgagggtcaggattgcactgctgaaatgggnatcaaatatgagtccaaagaagaggactt

SEQ ID NO: 10143 - DNA, 189 bp, Glycine max
  unsure (1)..(189): unsure at all n locations; Clone ID: 701150689H1
ggangagagagganaagagaagctaaaganagaaaggagatgggagtggagaaaccagttgttgaggtcaggcacnggtcccgaagccnattcccggtccagaaccgtacccgtccacntgcncngggtttccgggagnaccgttgacnttcccnagaatttnngnagnncaangantcntgggcnngt

SEQ ID NO: 10144 - DNA, 175 bp, Glycine max
  unsure (1)..(175): unsure at all n locations; Clone ID: 701150690H1
atccaacacttcttattaggtgtttgatttcaaaaatactttttgttagcttggnatacttanattgtcacnttatataactaatacacctggaaaatcctaggaggntaagttaaaaaggangattttancntccattttaataatttaatcnatatgtgnccccnattccant

SEQ ID NO: 10145 - DNA, 170 bp, Glycine max
  unsure (1)..(170): unsure at all n locations; Clone ID: 701150691H1
gggactgacttgtgtgcttcagtttataggcacaccacgccacaacaccgatctcttctttaacgggtacttttgtgttctgagaagaaaaaagaaatagaaattaaaatagagcctctctgatcatggagtgattggagagttgggtcaccctgcnggtgctctgctca

SEQ ID NO: 10146 - DNA, 182 bp, Glycine max
  unsure (1)..(182): unsure at all n locations; Clone ID: 701150693H1
ggcatcaattcaaaatatatcatcaattataagcatggggttgtggaacacaacgaatgcagtgtcttgccgctttcacaagtttggtgatnaccaaaagaatctggncttccaaggtgatgccacgncttcttccaggggcatagaactcncaaagttagacngttggggnaaaccngtgg

SEQ ID NO: 10147 - DNA, 173 bp, Glycine max
  Clone ID: 701150696H1
gaaagcaaattgatccgctatatagaacaggtagcctcactcactcaaattcgaacttctcacgttcattctacacatccctagctctgtcgttcgtcgttgacgatgggcgtttcggtgcgaagcctgacttcgctctctctttcttctctctctctgtccatcgttccggc

SEQ ID NO: 10148 - DNA, 252 bp, Glycine max
  unsure (1)..(252): unsure at all n locations; Clone ID: 701150701H1
ggtccttcaaagggaatggtttgatgaatattctgagaaacatttgcgacatggtgagagacccctgaatcaggataccaactcatagaaggggctgaaggaacacttgtcagattggcttgaggaaagttagtgttctgggggtactgattgtactgagactgatgagactgttgtatctgatgggaattagtgttctgattggagttagcagangtctgagattgattctgatcaggatactgaatggga

SEQ ID NO: 10149 - DNA, 258 bp, Glycine max
  Clone ID: 701150702H1
gaggatcacagtaggagataagggagagcattcaccattttcttgtggtttggtttcctagagacactaagtactcccatggaacaaaacaacaaaagccttgtttcttctaaattcttatgtttatgtttgttgatcaccttgatcagcattattgttgctccacaagcggaagcagcacgagcatttttcgtgtttgggcgattcgcttgtagacaacgggagcaacaattcttgggccaccacggcgcgtgccga

SEQ ID NO: 10150 - DNA, 246 bp, Glycine max
  unsure (1)..(246): unsure at all n locations; Clone ID: 701150704H1
gggagttcaacgagatggagcaaataaagcacagaatagttgaagtgaatggcataaaaatgcatgttgcagagaaaggagagggtccagtggtgttgttcctccacggcttccctgagctctggtactcatggcgccaccagattctctctctcagctccctcggctaccgcgccgtcgcttcccgatctccgtngttacggtgacaccgaggcaccactttcaatcagcagctacaactgcttc

SEQ ID NO: 10151 - DNA, 211 bp, Glycine max
  unsure (1)..(211): unsure at all n locations; Clone ID: 701150705H1
gcacctaaaaataaaataacatatacattgtaaacacataaatgcaggcaaacacaaatttccctaaacacacaaaatataaaattgttaacatgaacataaataatcttcaatccattcaactgaattaacttaaacaacatcaccctaagtaacaactatatatgagcatccatcaagcagataaaatcaacaaatacacatggnccgt

SEQ ID NO: 10152 - DNA, 248 bp, Glycine max
  Clone ID: 701150706H1
ggagaccaagggctgcttcctagagtgttttgttattgtgccattgccatatatatcccgtgtttttaaatttttttcttcttgattttccattttaagtatttaaggtgttcagttctcctgtcatactttaaacagttcaaatactttattaaatatgctttccttcatctaattaggtattcagtttttgaccgcatctgtcatctacaacaccgtttattggcattgttcctgttcggtagtta

SEQ ID NO: 10153 - DNA, 245 bp, Glycine max
  Clone ID: 701150708H1
ggcatcaattcaaaatatatcatcaattataagcatgggtttgtggaacacaacgaatgcagtgtcttgccgctttcacaagtttggtgatgaccaaaagaatctggtcttccaaggtgatgccacgtcttcttccaggggcatagaactcacaaagttagacggtggaggaaaaccagtgggtggcagtgtggggagagtgttatactcttctccagtgcacctttgggaaaagctctaacggg

SEQ ID NO: 10154 - DNA, 273 bp, Glycine max
  Clone ID: 701150709H1
gaccacttcaaaacactcataacacaaagcacaaagcaaagctcatccttgagttaaaaaatggcagcagcttcttccatggctctctcatccccatccttggctggcaaggccgtgaagctgggcccatcagccccagaagtgggaagggtgagcatgaggaagaccgtcaccaagcaggtctcctcaggaagcccatggtacggcccagaccgagtcaagtacttgggcccattctctggcgagcccccgtcctacctaaccggtgagttc

SEQ ID NO: 10155 - DNA, 249 bp, Glycine max
  Clone ID: 701150711H1
acaaccatagattctaagggtggcctcagtggcttcatctatgccatcttttctagaaggtgagtttgctagctgctcatctgtgaggtagaacgtgtcaattgctgtgtagatcatccctttatcctttaccctaacataagagggcacagttttggtcatgaaatttcaaaactctgttgccaaaacttaaaagtgaatcaagagattataacaggatgggagcattacactattacagtaatgttt

SEQ ID NO: 10156 - DNA, 260 bp, Glycine max
  Clone ID: 701150712H1
ggcctattcccattttcttcctctaaaccctaaacaactctttctcttcttccttcgctcgttgttctccctcgcgtagatcgacaatggcggagacagagacgtttgctttccaggctgagatcaaccagctcctcagtctcatcatcaacaccttctactccaacaaggagattttccttcgtgaactcatcagcaacgcctccgatgctttggacaagattcgatttgagagtttgacagataagagcaagctcgat

SEQ ID NO: 10157 - DNA, 248 bp, Glycine max
  Clone ID: 701150713H1
ggcacaagtgagtttgttgatcgagataactagaaacagtgtgatgaaaatgaaggtccttgttttcttcgttgctacaattttggtagcatggcaatgccatgcgtacgatatgttccctctccgaatgaacactggctatggtgcccgtactccggaggtgaaatgcgcaagttggaggcttgctgtggaagcacacaacatctttgggctttgagaccattcctgaagagtgcgttgaagcaaca

SEQ ID NO: 10158 - DNA, 245 bp, Glycine max
  unsure (1)..(245): unsure at all n locations; Clone ID: 701150715H1
ggcttggcgtggaagcaaacaacgtantcaagtggcaaactgttcctgcagcttgcggagagtacatagctgactacgttctaggagaccaatatagatcagattccaaaacagttaaccaacaagcttatttctatgctaaatccctcaaactcaccaacaaagatgtctttgtcttggacgttgacgacactactctctctaatctccgtattntgctaacccagggntggggggggccnccc

SEQ ID NO: 10159 - DNA, 198 bp, Glycine max
  unsure (1)..(198): unsure at all n locations; Clone ID: 701150716H1
atagatacaagaagctaaaggagatgagccttgaagaacgtaaaaacactactccacgcacggtgatgattggaggaaaggcatttgcaacatacacaaatgctataaggatagtcaggttggtgaatgatgtcggtgctgttgtcaacagtgatcctgaggtcaacggctacttgaaggttgtgttnncccccaatt

SEQ ID NO: 10160 - DNA, 226 bp, Glycine max
  Clone ID: 701150718H1
gatccaccaactgggaagcaattcaaatccaaggctaccactcggtcttatacaacatactttgctgaagctttgattgcagaagccgaagctgacaaagacgttgttgcaatccatgctgctatgggaggtggaactggcatgaatctcttccatcgccgtttcccaacaagatgctttgatgtggggatagcagaacagcatgctgttacatttgctgcaggtc

SEQ ID NO: 10161 - DNA, 248 bp, Glycine max
  unsure (1)..(248): unsure at all n locations; Clone ID: 701150719H1
gggtgtcagaaagcaaatattgcctattcggcaatatggcggaaaatggttcaattgagctgaacaagtttgtgttgttttgtttgttgttgctaatacaagtggcagtttctgaaatcatttttgaagagcgactgatgatggatggcgaagtaggtgggtgaaatcagactggaaaagcagtgagggcaaagcaggttcattcaagcacacagctggaaaatgggctggtgatcccagatgacnaa

SEQ ID NO: 10162 - DNA, 207 bp, Glycine max
  unsure (1)..(207): unsure at all n locations; Clone ID: 701150722H1
ggcccttctagctttttcccagtccaagcagcctccaattcgtgccactctcttcaaaatggccgttaccttctcaaatctccacacagaatcaggtctcaagtccctcgacgacttcctctctgggagggtctacgtttctggggatcagttcacaaaggacgacatcaaagtgtatggtgctgttttggagangtnngtgactct

SEQ ID NO: 10163 - DNA, 252 bp, Glycine max
  unsure (1)..(252): unsure at all n locations; Clone ID: 701150723H1
ggcacagcactagatcatggtgtcgcggctgttgggtatggtacagctaatggtcatgattattggatcgtaaggaattcatggggtcctagctggggagaagatggctacatcaggttagaaagaaatcttgctaacagcagatcaggcaagtgtggaattgcaattgagccatcttatccccttaagaatggtccaaatccacctaatcctggaccaccacccccttcacctgtgaagccancaantgtt

SEQ ID NO: 10164 - DNA, 250 bp, Glycine max
  Clone ID: 701150724H1
gatagggtttttgtcgttgcgactaagagttgctgcttcttccgccactcagcacttcgctccctctgtgcttcaccaaccatggccgaaatcgaagctaccgttccagatccctctcaaatcgacgtcaaacttttcaaccgctggagcttcgacgacgttgaggttactgatatgtctctgggctgattacattggagtgtccccgtcaaagcatgctacatatgttcctcacactggctggtaggta

SEQ ID NO: 10165 - DNA, 213 bp, Glycine max
  Clone ID: 701150725H1
accccagaaagagaaattgaacatatgtttctaagatctaacatgtattgattggtgtgttgatggcctcatcctgatggtaccaagttctttaaaattagattttaatgtggctggatcaaccctatcatatactttaaatttcattccctttccttttcatctatgtcttttttttcttcttcctttaaatcattcgtgacggaatttgcg

SEQ ID NO: 10166 - DNA, 250 bp, Glycine max
  Clone ID: 701150726H1
ctattacattcgtagttagaaatatttttgttctatgcacgcatgacacctacacctttgcacacatattgagatgttaggccctatacccaggtttgtgtgagtcatagagagtggaggtcgatctgtggtcatgttaggtttccgactcgcttgataacagtgaaacctaacctagagttttccttttttggtgaggcattgtcgctggtagtccctaccgccacaatgttgttacctaagaggatga

SEQ ID NO: 10167 - DNA, 244 bp, Glycine max
  unsure (1)..(244): unsure at all n locations; Clone ID: 701150727H1
gaatgaaactctgaagcaaaatcgtcttttgagagaacgaggggatgataactcattccccaattctccaaacaatagtagtagtgatgcaaatcttcagaaaaatcgtgaccaaggagcttcacaaaaggcaatgtcattaccatcttcaccacangattatggaggccaggcttctaagagaagtggatcatcaagatacggagtgaatgatgaaatggagtcaacatggaataaagtactg

SEQ ID NO: 10168 - DNA, 245 bp, Glycine max
  Clone ID: 701150728H1
gattgactgtttttattttcattttttaataaatttgtcgcgtctagggattttcttcttctgtgtgggttcctcaaaactttcgaaatgaaagagagatttctacgaaaaatcccaatttttgggattttcactttcagggttttatttatttgaaaatttttctttctgggttttgtttatttgaaattttcactttaggggttttgctaatttatttgaatataccttgaaagattgtagaa

SEQ ID NO: 10169 - DNA, 252 bp, Glycine max
  Clone ID: 701150729H1
aatagttgcaacattaatctctgaaaaaatgagctgggcaatatgatggagaatacataggataagaagcatcagggattcatggtcaatggaccgtatgatgaattcatgcaaagggcaaagggggccatgtcgcgtcgactggcatgaaaagaggaacgggaactgtcggaagtttcaagatgaagctacaatcttaatttatgaattatgatgattttttgggaaaattagagaagaaaaacgacgtcg

SEQ ID NO: 10170 - DNA, 224 bp, Glycine max
  unsure (1)..(224): unsure at all n locations; Clone ID: 701150731H1
gagataganctgcttctangttgttgnaaagaaaccctagcaagcggaacaatggcagacgttgaggtcgatgtgnnnnnnnnnnnnnnnnnnnggcagccgaagaagagaacgttcaagaagttcagtttcaggggcgtggatctcgatgcgcttctggacatgtccaccgatgaactcgtgaagatgttcagtgctcgcgcacgtagaaggttccagagagg

SEQ ID NO: 10171 - DNA, 246 bp, Glycine max
  Clone ID: 701150733H1
gagtgagagggaggaagacatagacataaagaaggagaagtgaagtgatgaatgccccagatcgttacgagcgtttcgttgtccctgaaggcaccaaaaaggtttcttatgagagggacacaaagatcatcaatgccgcgtccttcaccatcgagagagaggagcacactatcggcaacatcctccgcatgcagcttcacagagaccccatgtgttgtttgccggatacatgcttctcaccctctc

SEQ ID NO: 10172 - DNA, 239 bp, Glycine max
  Clone ID: 701150734H1
tctctatcatagctgaagctgatcttcagaaactaaacaatgcattgaaaatactttctgaaactgagaagcagttaagaaattcgaagaatcaaacaacatggttcattgtagctctcctacagttaagctctgtagattgtcaatctgtggatgcaaatgataccaagttgagtcttagaggtgcatgcaatggaggtgagctgatttgtttccttgtttattacatatttcaatcc

SEQ ID NO: 10173 - DNA, 224 bp, Glycine max
  unsure (1)..(224): unsure at all n locations; Clone ID: 701150735H1
ggagggcgaggaagccacatagagacacaatacanagtgagttgttgctccttcgccacaactctctgccaacatgggtatctccagagattctatgcacaagaggcgtgccactggtggcaagaagaaggntggaggaaaaagagaaagtatgagcttggtcgccagcctgctaacactaagctgtcaagcaacaagacagtcaggaggatcccgtgttagag

SEQ ID NO: 10174 - DNA, 239 bp, Glycine max
  Clone ID: 701150736H1
atgtgtaatggccacatcttcttcaccgctctttcatgcatattttattattttaaccttttttcatatcaagtgttaatttacttccaataaagtctaataattgatgtgaataatgaggtgttgctttcgattccgcatcctactacatttagatccagaagatgcaaatggctctcatctaaccataggatagggaagggatattgaataaactcgtccttaattacttttctttc

SEQ ID NO: 10175 - DNA, 242 bp, Glycine max
  Clone ID: 701150737H1
ttgataatatcaatcctgggtcacagaaacgcggctcagcgtaagttgattcgtgaagcttatagtacaacccatggagaagatcttcttaaagatttagacaaagaactttcaagtgactttgggcgggctgtgatggtttggacattggatcctctgagcgtgatgcctttttagcaaatgaagccactaagatgttgacttcaaacaattgggtcatttggaaattgcttccactagat

SEQ ID NO: 10176 - DNA, 243 bp, Glycine max
  Clone ID: 701150739H1
ttcttatatattttcctttattaatacttttcaaattttaatttttctatttttttttctcatatatacacaaagggtcctaagggagaggggggccaaagcccctgcttgccctcccttggatccgtccctggttagtggtgctgtggtggtcagtgaggtagttatcatgtgctaaatatactgactaaagaggggtgggtgagtctaaagtgctcctgatatgttctggccatatcattg

SEQ ID NO: 10177 - DNA, 241 bp, Glycine max
  unsure (1)..(241): unsure at all n locations; Clone ID: 701150740H1
ggagcaaaaccctaatccctatttttcttcctcagtagtgtcatttacgcttctcttctctgcagcaactatgcctaaccctaaggtcttcttcgacatgaccatcggcggtcaatctgctggccgcatcgtgatggagctctacgccgacgtcactccccgcaccgccgagaacttccgcgcgctttgcaccggcgagaagggcgtagggcggagggcaagccntccantacaagggctc

SEQ ID NO: 10178 - DNA, 241 bp, Glycine max
  Clone ID: 701150741H1
gaccacattccaaaacacaaacacatacattgtagtatcacttttgtctcggaatttgttcttttgagttatggcaagcttaaaggttgcatgtgtggttttgatgtgcatggctgtgatgagtgcaccaatgatggtgcaagccgtgtcatgcaatgatgtttctgtgaacctagcaccgtgcctatcttacctgatgcagggtggagatgttccagaatcgtgctgtagcggagtgagg

SEQ ID NO: 10179 - DNA, 241 bp, Glycine max
  Clone ID: 701150743H1
ggacacgaacctattggttggcatacaccatctggcaatgtgaacaattctggaggtgcacctcctccatcctggattggatctagttcaaatgttcactctcccgctaaccgtagctggatttttaatcatgaagtcccagcagaaaatatgcagagtgtgtcagagttcagtccttggtccctttttccatcaattagctctgcatctggtgttcataatgcccattctgccccatctt

SEQ ID NO: 10180 - DNA, 51 bp, Glycine max
  unsure (1)..(51): unsure at all n locations; Clone ID: 701150744H1
gaatgttctcgantttgctgttaagtgttaatgaagaaattctgtttgtac

SEQ ID NO: 10181 - DNA, 248 bp, Glycine max
  unsure (1)..(248): unsure at all n locations; Clone ID: 701150746H1
ggcatctccactatattacaattactactttctctctctttgtaacttgtaagcatggagtcctcaaagatctatgcttacctcttcctttgcatgctcttcctctcctccgccactcccattctcggttgtggctactgtggcaaaccccnncnaaagcacaagcctggtaaaacaccaaagacacccacagtaccgttgttaagccaccagtcacaatcctcccattgttaagccacnagtcanat

SEQ ID NO: 10182 - DNA, 233 bp, Glycine max
  Clone ID: 701150747H1
agagaaagtgaaaattagaaactcttgtacttggttttatgccaaattaaggactcttttggttgtcaattagatcacaaagatatggaggttgccatggaactggaagatgatctattttttgctgatttgagcaaggaaattgctctactaattatggatgaagatgaagatccacttgcttcttgtcctcctgactctcttcaggctttttctggggcaattcatcctcc

SEQ ID NO: 10183 - DNA, 218 bp, Glycine max
  Clone ID: 701150748H1
ggagagagaattatcaaaggtgaaacgaagaagccctaactacgcacgcattcgtgagaaaactcaatattcgtcgctcatggcactctcttctcgtctcttttccaaatccaaattgatctatggcagtcaaatacttctacaaaaggagcatgctattccagttcgtcactttgctaaagagtctgcccctcctgcccttaagggagacgagatgt

SEQ ID NO: 10184 - DNA, 188 bp, Glycine max
  Clone ID: 701150753H1
gaccccaaaataaaataaaataaatctatcatctcctctttctccgggccttgttgccatcctggatacatatggacggcgaaaggttgagggagatggaggagatggggtgtggtcattatgtgggtcatggctacgtgagcaattggggcatgcaatgcaacagcatgcgtcgtcgtcaccatacg

SEQ ID NO: 10185 - DNA, 241 bp, Glycine max
  unsure (1)..(241): unsure at all n locations; Clone ID: 701150754H1
gttcttagtacatgatagattatactgtaaagttaaccagaaaacttattcttataagctaaaaagagcttattttttaaatttcaccaaacttgttaaaataagtttaaaaataactaataagagtcttcataaacagagataagctccctataaattcttccaaaaacctctgagaaatgtacatgcttgggcttttggatccagtcaaattcangacttaaaaaacgaacttaccctg

SEQ ID NO: 10186 - DNA, 205 bp, Glycine max
  Clone ID: 701150755H1
gtacatataaaatcagatggaggcatatgaacacaggttagcaaaatcttattgggccaatagcaagcagaggaaagacacattggcatgtgcacgtaagggaatacacataaatatataagcactgaaaaaacatgtgtaagaaccaacaatgttaaatttacaagtaatgacaacagtaggctaataactaaaagaacaaatg

SEQ ID NO: 10187 - DNA, 238 bp, Glycine max
  Clone ID: 701150756H1
gatatgcaatgatagcagtcccgtatttatgaaaggcccatcaactattgcacatttgtactctgatggcaaggcaagcgcttcacctctttgtgttctggctatgcttcttggcaagagttagatcggtaagcctcataaaaatctcgctacccttcttcatctgtttttgctgattatcactgtcactgattgggtgcaggacgaggattgcgtgtacacggtgtacgttcggacg

SEQ ID NO: 10188 - DNA, 238 bp, Glycine max
  unsure (1)..(238): unsure at all n locations; Clone ID: 701150757H1
gacagcatatagtcacataggctattaagggtgagatatatagaaaaacaaaggagaaaagatagaaatggagaagtttccagttgttgacatggggaaccttaataatgaagagagatcagcaaccatggagataatcaaagatgcctgtgagaactggggtttctttgagttggtgaaccatgggatatccatagagttgatggnccccgtggagaggatgacaaaagagncctac

SEQ ID NO: 10189 - DNA, 244 bp, Glycine max
  Clone ID: 701150759H1
gattcacagccattctttatctctcatttttttagggctcataaatctttttatggggtttcagggtcactaactactctgtctctgcttctccctgttttgggctcttgtccctgcacccaagcaagagctgcaaagttccacaatgtgagtggcttgagagggaaaaagccagttgtagcaaatgggtgcaatttgttcctgggaagttgggtggttgacacgtctttatcctctctatgat

SEQ ID NO: 10190 - DNA, 238 bp, Glycine max
  unsure (1)..(238): unsure at all n locations; Clone ID: 701150760H1
ggtagttccaccgagtagcaacaatgtcgaagcgaggtcgcggaggatcggcgggaaacaagttccgcatgtcgctgggtctgccggtggcggcgacggtgaactgcgccgacaacaccggcgcgaagaacctctacatcatatcagtgaaggggatcaagggtaggctgaaccggttgccgtcagcttgcgtcggagacatggttatggccacgtcaagaagggaaagccgatntcc

SEQ ID NO: 10191 - DNA, 208 bp, Glycine max
  unsure (1)..(208): unsure at all n locations; Clone ID: 701150761H1
tgtagcactcacgcatagaaggagactagccaccgagtacgagcaatcaaattagctttcagcctttggaaaataatgtgttttagccagctacacatttgcggaccataggtgatgataatttatagtctacaagtccctcaatcattatcactactgataataccgaggacgttgatgttgnaagataaagttgaagagaatcacg

SEQ ID NO: 10192 - DNA, 250 bp, Glycine max
  Clone ID: 701150763H1
accattaaacagtaatgttctgaaaaatctataaattggaagtatttcatatatcaagatcagtaacacttataagggtcttctttccaattgagatttaatatattttcacaaactcaaaatactgctctaactatatatgggcatgaatttttaaatatagccaccgcattgatgcagctggtacaacaaaggtgatatccagactagatgtattttatcattagagaaagaacatgtagacatgtta

SEQ ID NO: 10193 - DNA, 253 bp, Glycine max
  unsure (1)..(253): unsure at all n locations; Clone ID: 701150764H1
ggcacaagtgagtttgttgatcgagataactagaaacagtgtgatgaaaatgaaggtccttgttttcttcgttgctacaattttggtagcatggcaatgccatgcgtacgatatgttccctctccgaatgaacactggctatggtgcccgtactccggaggtgaaatgcgcaagttggaggctgctgtggaagcacacaacatctttggctttgagacnattcctnaaagatgcnttgaagcaaaaaaggnnt

SEQ ID NO: 10194 - DNA, 211 bp, Glycine max
  unsure (1)..(211): unsure at all n locations; Clone ID: 701150765H1
ggccattgttgttgctattatcatccgcagctgcttttattcgcaccgcaaacagtgagccatggccgtcggaaagaacaagcgcatctccaaggggaagaagggtggcaagaagaaggcagctgatccctttgccatgaaggattggtatgacattaaggctccttctgtttttcaagtgnaaaatgttggcaaaaaccctcgtctctcg

SEQ ID NO: 10195 - DNA, 239 bp, Glycine max
  unsure (1)..(239): unsure at all n locations; Clone ID: 701150767H1
aactgttgttgagggaactatacagaagctatttgaagggcatcatatgaattatatcgaatgcatcaatgtggactataaatcaactagaaaggagtcattttatgaccttcagcttgatgtgaanngctgtcctgatgtttatgcttccttgacaagtatgttgaagttgaacgtctgaaggggataacaaatatcatgcggaacaatatggttgcaggatgctaagaagggtgtcc

SEQ ID NO: 10196 - DNA, 185 bp, Glycine max
  unsure (1)..(185): unsure at all n locations; Clone ID: 701150768H1
gacgacatcaaagtgtatggtgctgttttggagaagccaggtgactcttttcccaatgctgccaagtggtacgaggttgtctcatctcagcttgctgcaagcttccncggcaatgctcaaggggtgagattcagtggcaaagcttctgctccagcggaggctgctcctgcgaaaccggatgcttc

SEQ ID NO: 10197 - DNA, 236 bp, Glycine max
  unsure (1)..(236): unsure at all n locations; Clone ID: 701150769H1
ggagagtacagaacgcggtaaccctagaatcccaaatccccaatcaatcgaccaagagcaggagcttcggtggcgatcttcatccgcctcggtgaaaaaaatgtctctggtggcgaacgaggatttccagcacattctgcgtgtgctgaacaccaacgtagatgggaagcagaagataatgttcgctctcactnnatcaaaggtattngcaggcgattcgctaacattgctgcaaa

SEQ ID NO: 10198 - DNA, 235 bp, Glycine max
  unsure (1)..(235): unsure at all n locations; Clone ID: 701150770H1
ttttccaataacagaggcatgttgcaagaaggtaatccataaaatagaaatgaaagggagggcaggaggaatacacatacaagataattaggatatactgttggaatatctttttttaatagaaaaaaatagatagaaaagaggaaaaatttgaccaagggaagaggaaattatccatacaacaaatacaaaggaacacaagggacaacacctatagnntgcaccaagattacct

SEQ ID NO: 10199 - DNA, 235 bp, Glycine max
  unsure (1)..(235): unsure at all n locations; Clone ID: 701150771H1
gacggttatggcgtccacgttgggcacttcttcaattgcggttcttccttcgcgctgcatctcttctttttcttccaagccttccattcacacactctctctaacttcagggcagagctatgggcggaaattttatggaggaattggaattcatggnatcaagggaaggtctcagctctcagttgccaatgttgccactgaagttaactctgtagaacaggcccaaagtattgtt

SEQ ID NO: 10200 - DNA, 212 bp, Glycine max
  unsure (1)..(212): unsure at all n locations; Clone ID: 701150772H1
gggtgttgaattaaaaaaaaaaggaagactaaaactaaaactaaaaccccactcagtcttccagtgaaaaaagaaaggcagcgatggaagaagacttcgacatccccggcggcgaggaaatggatctcggcgaagacagggtcggcgaggnncgggagatcggctcccgcggcctcaagaagaagctcctcaaagaaggtcaaggntgggna

SEQ ID NO: 10201 - DNA, 226 bp, Glycine max
  Clone ID: 701150773H1
gaacgcatcagaaaaagaaaagccttcaatcatatagcattctaagaaatgaagagccctaccattttcattctctttctactttctgccttctacacctcactcctaccttcagccaccgctcaagtcgtggttgacatggaaggtaatgatcttcaaaatggtgggaaatattatgtgttgccagtaatagagtcatcatatggtggaataagagtagccgcaa

SEQ ID NO: 10202 - DNA, 68 bp, Glycine max
  unsure (1)..(68): unsure at all n locations; Clone ID: 701150774H1
gaaaatgctantgttgtggtgaaaattgtagctttgtgctcgcaaatttaattctccatttgagggnc

SEQ ID NO: 10203 - DNA, 242 bp, Glycine max
  Clone ID: 701150775H1
gactcaccacttcaaaacactcataacacaaagcacaaagcaaagctcatccttgagttaaaaaatggcagcagcttcttccatggctctctcatccccatccttggctggcaaggccgtgaagctgggcccatcagccccagaagtgggaagggtgagcatgaggaagaccgtcaccaagcaggtctcctcaggaagcccatggtacggcccagaccgagtcaagtattggggcccattct

SEQ ID NO: 10204 - DNA, 243 bp, Glycine max
  Clone ID: 701150778H1
gacagcatatatatcaataatctattttatactatacctacattttgataattttctttgtagttgatagccatggctacccgtggaaagcttgaggttgacattgatctcaagtccaacgcagacaagtactggcaaacccttaggaattctactgaaatattccctaaggccttcccacatgattacaaaagcattgaggttcttgagggtgatggcaagtctcctggttctatccgccac

SEQ ID NO: 10205 - DNA, 242 bp, Glycine max
  Clone ID: 701150779H1
aacctttgctatgttattgtcttttggtgtgtatccatatatctattacgttcatagttaggaatgtttttgtgctactgaatcctgtggtagacgacatgtgacatacgtgttgcatctacctaggagttgtctgtttgcttggctagtagggtggggtaattcttagattgctctatgcacacatggcacttacacttttgcacacatgttgagatgttaggccctatacccgggtctat

SEQ ID NO: 10206 - DNA, 244 bp, Glycine max
  Clone ID: 701150780H1
gacacacagctattcctcttaagcttgctactgagtttccacactgcataccttaggtcttccgaattcgaagttaatttgcaagatggctaaggaaaaggctcagatcaacattgtggtggttggtcatgtggaccctgaggaggcaaccaccattaacgagctgaagaagcctgttgtggagaaagaagctccagggcatgccatatgagggcatgcacgtacggcctcggaggggaaccat

SEQ ID NO: 10207 - DNA, 236 bp, Glycine max
  Clone ID: 701150781H1
cataacaggccagacaactaccttaagggaataattaacagtgctttgaaaggacttaatgatactccacaacctaaatccaaggctgctgccaggtagattgttgttaagtgtaatatgcaaaaaggaatcactgaatgtggctactacgtgatgcactggatgtccacgataatcttaggatctttcaggaataattgggagacagtaattgtttatttccaaacaaagttggt

SEQ ID NO: 10208 - DNA, 144 bp, Glycine max
  Clone ID: 701150782H1
cttattacagtctgttaacatctagtttttcaatatcaaaacatcaccattttatatttcttgccttcaggaaaatgttctgatagccgggaagcgttttgagcaaagaatatcatgagattttagttgtgcacatgcattcca

SEQ ID NO: 10209 - DNA, 90 bp, Glycine max
  unsure (1)..(90): unsure at all n locations; Clone ID: 701150784H1
taggttactttgaaaactaattttagataatgaactttgttgatatgaaatatttatttttattaatacttatagagcagnnaatatatt

SEQ ID NO: 10210 - DNA, 230 bp, Glycine max
  unsure (1)..(230): unsure at all n locations; Clone ID: 701150785H1
gacacctcaacggtccttcttctctctctagaatccattttctctctctaaatttntctttctcattttctctctctttcttatctcggaaaatctttctgagccttcaaacgaactttggaattctccagaaccttctcgtttttccgccgaggatcgcgattccgcagaatcgttctcantcgtcgcttgattcggttcgattcgtggtttcgagctgcatgaactgg

SEQ ID NO: 10211 - DNA, 227 bp, Glycine max
  Clone ID: 701150787H1
gatgggaatactacagagaattgcagtagcatatttggttgtcgcactgtgtgaaatttggctcaagagtgatgatactgttaattcaggaccatccctattaaggaagtatcgataccagtgggctgtggctttgattcttctttcctttatcttgcttgctatatggattgtacgttccagattgggtgtatcaaattcaaacagaaccttctgcagagccaaga

SEQ ID NO: 10212 - DNA, 230 bp, Glycine max
  Clone ID: 701150790H1
gaaatcacaagggtttggtgttgggggccaacaatacgacctgcgtctgtgtaattgtaggtgccaaacatatggttgccgagatgaatgtccgtgaattttccatctctaagaatgaccgtacttcaaattccaattccaaatttcttaccttgcccaccattttgactcttggccgtgtcgccgctgtacctcttcttgttgccaccttctacatggatggttggcga

SEQ ID NO: 10213 - DNA, 160 bp, Glycine max
  unsure (1)..(160): unsure at all n locations; Clone ID: 701150792H1
ggcccaaattttttcatagcattttcagaggnacaatggcgggtagggtttcgacgtgcttctncttcgtgtttgctctttctctccttcttccttttcagatctccgctgaggaatcatcggagaaagagttcgtactcacattggatcactctaactt

SEQ ID NO: 10214 - DNA, 135 bp, Glycine max
  Clone ID: 701150793H1
gacagttagcataagtaacatactcacctttattccaagctctaaccatttcgacttgttgctaactagattgaggatagtgatctttgtcttcgccaacaacatcgtccacttgaacaaaaaatcaaaaagacc

SEQ ID NO: 10215 - DNA, 241 bp, Glycine max
  unsure (1)..(241): unsure at all n locations; Clone ID: 701150795H1
ggatgcaggagaggatgaatggtatagggttttccccggcgggatacagtcccgtaatcccttcttcatcctgttttcctaaaaaattgagagtccagccgcaacgggccttgagctctgacccctacgttctggaactcgccgaaaccctagaagactccttcccctcctntnnctccaccncactcccttctccagaacctccgcctctcctcctnanaatccctcctctccantggag

SEQ ID NO: 10216 - DNA, 185 bp, Glycine max
  unsure (1)..(185): unsure at all n locations; Clone ID: 701150796H1
gagcgatgtgtggaantacaatacttcttcatcagattcagttttgataaagaaaatcattcaaataagggactttattatctccaaagagctaagtacggaagaggccaaaaagaggattcaatcttggagcaccaatgaacattgcttgttggcaaagtctatgantacnttngnggtgtcna

SEQ ID NO: 10217 - DNA, 76 bp, Glycine max
  unsure (1)..(76): unsure at all n locations; Clone ID: 701150801H1
aagctagagcttacatagtttcnncttctnntctgcacctnccttctctgcccttcagacaaagggacaaaaaatc

SEQ ID NO: 10218 - DNA, 237 bp, Glycine max
  unsure (1)..(237): unsure at all n locations; Clone ID: 701150802H1
ggattcnatcgatttcgnttgttgaatttcatcccatgcgtggagccttcaaatttgtagttgaacaacgatggtgcnccgcnattngctgctttcattctcttttnggcntttatnccgaatggattgttagcagttccttccaccgtccccgnattccttnggtcatcacattatgaactggnctctgaaaatggatgaaggaatctgtaaattaccagtcatttctccaaaaga

SEQ ID NO: 10219 - DNA, 242 bp, Glycine max
  unsure (1)..(242): unsure at all n locations; Clone ID: 701150803H1
ctcaaacaacacgggccccagaacaaacatggtttcttccaacactgccgagctgctgagagaggagattcctgtgaagcaacaacctctgactttgtctgcagacatcataaccggcctcgtactcgtcgatgttgtcaatggcttctgcaccgttggagctgggcaatttggcgccgaatncaaccagatgaacgaatttntcagatggtaaaagtntctctgaggctgtccaaagcatc

SEQ ID NO: 10220 - DNA, 246 bp, Glycine max
  unsure (1)..(246): unsure at all n locations; Clone ID: 701150805H1
aacaaacaaataccattcactcatggtctttagccttcaacaacagtatcggatgattctggtcattcactttccatcttaataaatctcatctagctatgcnatgttgtgttgtgttgtgtgccaataattaaggacaaataaggagactagagtacgtactacctagtccactactgcttaattatgtncgtacgngtcngtnatttcacttttataagtaatgaatatgaatattatgttatg

SEQ ID NO: 10221 - DNA, 236 bp, Glycine max
  Clone ID: 701150806H1
agcattggaaagaattgacctatttgtatatacaatatgatgagtttgataatggctgcaactaccatcatgaaccattcacctgaagcatgggatcacatgcaattcaaagatgttgttgttaaagttgccaatgtggagttgtactacaaggctggttcacttctacttggaagagcatccagatcttatcaatgatgttctgaacgtccttgcacttcgtgtggaccatgcac

SEQ ID NO: 10222 - DNA, 238 bp, Glycine max
  unsure (1)..(238): unsure at all n locations; Clone ID: 701150807H1
gaggaagtcgatgagatgattcgcgaggctgacgttgatggtgatggtcagatcaactatgaggagtttgtcaaagtcatgatggccaagtgaggaccaatcaaccatnacaaaaaaaaattgaaaaacacctgaacagaaaaaagacagggcagataagttttgatgagaattatattttcattaggacaatcttcatttggggtcattagtttttgttggtcggctttgtntgctt

SEQ ID NO: 10223 - DNA, 235 bp, Glycine max
  Clone ID: 701150808H1
gattctgattctgtccatccaaatcttaaaaatattccagtgaagatcaacctcaatggcatctcttggcgtgcgaccagttcttccccctccattaacttccatctccgacccacctcctcttttcgatggcaccaccaggttgtacatcagttattcttgcccctatgcacaacgtgtgtggatcgctaggaactacaaggggctacaagataagatcatttggtccctatta

SEQ ID NO: 10224 - DNA, 239 bp, Glycine max
  unsure (1)..(239): unsure at all n locations; Clone ID: 701150810H1
ggactaatggccttgtttggnggggttttgggcccaccccagaagaagctcttaaggaaaactttagaagatggaagtgttaataaaggagggaacaaagttattaacacatggattgattcaatgagagcctcttctcccactcgatctgccaaatccacacaaaacaaccaaaaccaagacccaacaagtccttggactctttaccacccttcggcactgagcatgtttgatcatat

SEQ ID NO: 10225 - DNA, 227 bp, Glycine max
  unsure (1)..(227): unsure at all n locations; Clone ID: 701150812H1
gtggtaaggtgaatgtctatgacagagtctcgcctgataaggcacgagcaatcatgcagcttgcaacgagtccagtccagttactcaggatgatcctttaaatggaaatgcagctgtttggacttctccttgccacttaccgatggataaggatgtcctcgttcctgttgatactacatcctcagggtgntccnagcacattaagaggtggagtatcctctgcaata

SEQ ID NO: 10226 - DNA, 232 bp, Glycine max
  unsure (1)..(232): unsure at all n locations; Clone ID: 701150813H1
ggatggctaatctctcactcttgttcttcggtctcctcctattctccgctgccgtagccaccgtcgaacgaatcgacgatgaagacaaccttctgatccgtcaagtggtgccggacgcggaggaccaccacctgctcaacgcggagcaccacttctccgccttcaatnccaaagttcgcnaagacctacgccacgcaggaggagcacgaccaccgcttccgtatcttcaaga

SEQ ID NO: 10227 - DNA, 214 bp, Glycine max
  unsure (1)..(214): unsure at all n locations; Clone ID: 701150814H1
gaacacaaacacaaattacatagccnncagtaatctgagagagaaacaagaacaatgaaggtttccattgccaagttccactcccttcccctatgttttttccttctcttggccttcaacacaaaacccctcctagcagcagaaccagagccagtggttgataagcaagggaaccctttggagccaggagtagggtactacgtgtggccacttt

SEQ ID NO: 10228 - DNA, 232 bp, Glycine max
  Clone ID: 701150815H1
gacgcattttctgttctgttttgttctcattctgtgactctgtgcttagttaacgttaacagtgacttaagatggcggattctgcagatgtcacccacgatgttgtgtccctcctctcttctcctcaaagggactttcttcttcgaaacaacggcgatcaggttaaaattgacagcttgaagggtaagaaacttggtttgtatttttcggcatcctggtgtggtccatgtca

SEQ ID NO: 10229 - DNA, 230 bp, Glycine max
  Clone ID: 701150818H1
gcagttttgaatgtcgacaaaagaagtgtggatcgggacttggatgtctatcgtaacttgctttctaagttggtccaagcaaagagcttctaaaggaatatgttgacagggagaagaaggaaagagaagaaagggctgaaccacaaaagtctaatgaggccattacacaacaacagcaattttctagccttagttatggggttcctctgaatgatcaccttgtgaagatt

SEQ ID NO: 10230 - DNA, 232 bp, Glycine max
  unsure (1)..(232): unsure at all n locations; Clone ID: 701150819H1
atacctcacagaagtgaccattctttgttccaaatatggaacggggactttgagatggattcttcttcatatcagaaccatgggtcatgccattaggatncccaaggaactggagccctgcgtgaccaattccatgctgcagataagtgacattaatcagtaatcagtaatgagaaatggaaacctatgaattaatattgtaaaccatctacattgatctacaaatgacgac

SEQ ID NO: 10231 - DNA, 230 bp, Glycine max
  Clone ID: 701150820H1
ggcatcaattcaaaatatatcatcaattataagcatgggtttgtggaacacaacgaatgcagtgtcttgccgctttcacagtttggtgatgaccaaaagaatctggtcttccaaggtgatgccacgtcttcttccaggggcatagaactcacaaagttagacggtggaggaaaaccagtgggtggcagtgtggggagagtgttatactcttctccagtgcacctttggga

SEQ ID NO: 10232 - DNA, 246 bp, Glycine max
  unsure (1)..(246): unsure at all n locations; Clone ID: 701150821H1
ggaatgaacaaagagcccatttatgtcttcaatgtagaaacttgatttggacaagctgcaagagcattccatcagtgtcttgagctccaaatggagaacacctggatcctgacttttcacctttctcctcctcctgctccatccaaatgncagcnaaaaggggccnttggtgtnggnnttgggtgttggtgnccataggtgggcataggtntttggcattgggcattggggggcagtgttnaacac

SEQ ID NO: 10233 - DNA, 235 bp, Glycine max
  unsure (1)..(235): unsure at all n locations; Clone ID: 701150824H1
ggcatcaattcaaaatatatcatcaattataagcatgggtttgtggaacacaacgaatgcagtgtcttgccgctttcacaagtttgtgatgaccaaaagaatctggtcttccaaggtgatgcaacgtcttcttccaggggcatagaactcacaaagttagacggtggaggaaaaccagtgggtggcagtgtggggagagtgttatactcttctccagtgnacctttgggaaagct

SEQ ID NO: 10234 - DNA, 210 bp, Glycine max
  unsure (1)..(210): unsure at all n locations; Clone ID: 701150825H1
gaagccttcaaatattttncttnttagcttgattagagtggcctagttgttgtntttctcaatgagaagggtttccactatgcattgcgcactttgggcgcttctgtgttcccttgttgctacttgctagcttcagttatgctccttttgttttggccactgaaattcagggnatgaagtgagcactgatggaaaggttttaaatgaaga

SEQ ID NO: 10235 - DNA, 231 bp, Glycine max
  unsure (1)..(231): unsure at all n locations; Clone ID: 701150827H1
ggtgctgattatgttgttgagtcaactggcgtattcactgacaaggacaaggctgctgctcacttgaagggtggtgccaagaaggttgtcatctctgcccncnagcacagatgcacctatgtttgttgttggtgttaacgagaaggagtacaagccaggagcttgacattgtttcctaatgctagctgcactaccaattgccttgctcccctcgccaaggttatcaacgac

SEQ ID NO: 10236 - DNA, 228 bp, Glycine max
  unsure (1)..(228): unsure at all n locations; Clone ID: 701150828H1
cctgtcacttcctgatactttatgcggatgggtgtcanattatgatgatagtctcccaattcattcattggaatatctgttgtagcaaagaaagtacacaaatganatatagttgtcaaaaatggtaagtaactattagaattataccttgcgctggcagggtggaccaccatntaggggggantntttcncaggagtgtaggggaatttctcgaaggggcattncct

SEQ ID NO: 10237 - DNA, 242 bp, Glycine max
  unsure (1)..(242): unsure at all n locations; Clone ID: 701150829H1
gtacaaacaggtctgtgaagaactggttcaagctcaaaaccaggcccttttactttcttctgaatctcttgaagaaactaaaatagttaatgcttccttaaaaagagaggagattttgagaaagtttgctgctgaagagaaaacaaagtacntaaaagtcatganggagcttgaggagggcgaaaaataagttttccaaagagtcatatgaaagacagatggctgaacttgatgtccttaga

SEQ ID NO: 10238 - DNA, 256 bp, Glycine max
  Clone ID: 701150830H1
gtcgtgcgaggcccacatgatgctcctggccattggttggtaacagctgctaagcttgtgactgatggtggtaagattggattacaagtgaagtttgcattgttagattattggtgattccaggcaactgttcactctattcagggtatattggttgccatgtgttgcttaaaatggttttgaaactatagacacttgtatatattctttctacaggctgtgtacagtacaattacaaaatgagtggctgttgaaa

SEQ ID NO: 10239 - DNA, 232 bp, Glycine max
  unsure (1)..(232): unsure at all n locations; Clone ID: 701150832H1
ggaagacggtaaaagtacaagatagatattttatgctccaataccatttattctatacccaagtagggcctgtccaaaagattgggttgcgtgaaatcgggactggggttttgctgtccgttggaggtgctattttcatcaatgtgtttctcagtcagagtactcgtcccggaaagtttccatctatnctttttccaattgaaattaaaaatatccaacgcggcaaacncgg

SEQ ID NO: 10240 - DNA, 232 bp, Glycine max
  Clone ID: 701150833H1
aagaacggcgtgcagagaagctgaaaatgaagagtaaaacagacgatatttcagatgatgaggaagctaaacaaatgggtatcatcaaagtgatagtgaagatgagcaaaagaagcttgagattgaattgcggaacaaggctcttgaatccctcaaagcaaagaggggcgtgaataactaaatgcatcaaatccaagttttaagttgttttatgcttaaaaacttattgaga

SEQ ID NO: 10241 - DNA, 240 bp, Glycine max
  unsure (1)..(240): unsure at all n locations; Clone ID: 701150834H1
ggaagtttggaaatttgacacctaccccacaccatcatggcctgcatcgacaaattttgggttttcgccctcgctcttctcctcctcgttcccctctcctccaagttgctaggtgccagtcagactctgatgatgtagtggaggctgctgaagaatcaggtgatatnggcattgtnggtgatgatgtccaagaatttggtgatgggactttctcttctgctccaggaattgaaacaataa

SEQ ID NO: 10242 - DNA, 229 bp, Glycine max
  unsure (1)..(229): unsure at all n locations; Clone ID: 701150836H1
gggagattagggtgagtgatgcgaaactcgctaaaacagaaacaaatccaattnnnnnnnnnnnnnnnnnnnnngggttgagcctgaaagaacataacagtgggactgtgggagttggggactcgtttgccaagttgcttctcttcnatnccccgtgcttctggatnatcaantttacagcattnttattattattggagtgtttttgcaggtttnnnnaaaaatggaa

SEQ ID NO: 10243 - DNA, 242 bp, Glycine max
  unsure (1)..(242): unsure at all n locations; Clone ID: 701150837H1
atcaaagtatgtattagagagcctggtaaggaaaaagaganaganaacatctttgagttgtttcagttttttgctttgtaaaattcttgtttgaatataatttttaaaacttgatcaattttgagtgagaagtaatctagtaagtnngtataaanccaattttggaaaatagcttttaannctaaaaantganaactgaatcagtcatngcctaaatcttttaaacacctnatgangactat

SEQ ID NO: 10244 - DNA, 226 bp, Glycine max
  Clone ID: 701150839H1
gaatcccaagttgtgtatctgtttgcttagagtggtggtggtatgagttattggtactcctttcagggcttctaacaatgcagctgatgcagtagccaccgctggaataataattatggtcactttacctatctacaattttcattttgctttgagcttggccgtttcaacaaaggtagggaacaatcttggagctaacgggcctaacaaggcaaagacatcatca

SEQ ID NO: 10245 - DNA, 148 bp, Glycine max
  unsure (1)..(148): unsure at all n locations; Clone ID: 701150840H1
gcaaacatgatgggttctttgtaaatagggggaaattggaacggcataantgaacctcctgtactacctaatcagcaaccaaagaaaaggcanaaaaanatnnnaaagagnnaaanaagaaggnggccccnngttgntgngttntnnc

SEQ ID NO: 10246 - DNA, 230 bp, Glycine max
  Clone ID: 701150842H1
ggcacaagtgagtttgttgatcgagataactagaaacagtgtgatgaaaatgaaggtccttgttttcttcgttgctacaattttggtggcatggcaatgccatgcgtacgatatgttccctctccgaatgaacactggctatggtgcccgtactccggaggtgaaatgcgcaagttggaggcttgctgtggaagcacacaacatctttggctttgagaccattcctgaag

SEQ ID NO: 10247 - DNA, 175 bp, Glycine max
  unsure (1)..(175): unsure at all n locations; Clone ID: 701150844H1
tgctcatgcgaactgtgtacccaaccatcgctgttcctcttcctcttcctctttcaaaccttcccgttaggaccaatttcgccgttcgatgtgccaacgttcactcgcaaacgcaaattcgnntnngggnaatttggttcttnccgtaaagggaaannttaaanaagnccaccat

SEQ ID NO: 10248 - DNA, 224 bp, Glycine max
  Clone ID: 701150845H1
gataatataaatgaacttatattgtaatgaagtgatacttgatgggagtgagagtgttaggattttttaatataagaaggctaaaggaggatttctaattagatcaagaagcttataacctcaaaaaggtacatgaaatagcattttaaacaacattataagctattgaaatgagcttctttaccaaacaaatctattttggtctaacaaacttctaagttagt

SEQ ID NO: 10249 - DNA, 226 bp, Glycine max
  unsure (1)..(226): unsure at all n locations; Clone ID: 701150846H1
gacaacaaaaaatttctttagttcactatatccatggcaatgtcttaccaaattagaaattctggtgtcttctttttcctttgtgttcttctctttggtgtgtctgctctgggtcgaccagccacttttctgcaagactttcatgtcacgtggtctgactcccacatcaagcaacttgatcaaggcagggcaatccaactcagnnttgaccaaagctctggatgtg

SEQ ID NO: 10250 - DNA, 236 bp, Glycine max
  Clone ID: 701150847H1
ggcacaagtgagtttgttgatcgagataactagaaacagtgtgatgaaaatgaaggtccttgttttcttcgttgctacaattttggtagcatggcaatgccatgcgtacgatatgttccctctccgaatgaacactggctatggtgcccgtactccggaggtgaaatgcgcaagttggaggcttgctgtggaagcacacaacatctttggctttgagaccattcctgaagagtgcg

SEQ ID NO: 10251 - DNA, 235 bp, Glycine max
  unsure (1)..(235): unsure at all n locations; Clone ID: 701150848H1
gnncagttctgatatatcattgcanaagttttngaaatgttgtcaccccttcttctaatttctatgcntaactcttcctttgtntttgttgtccttcttcaaataccgtaaaaccttcaagaatccaccacttccaccaggtcctagaggncttcccataatagggaatcttcatcaactagatagtcccttctcttcatgggcagctatggcatctctnaaagaaatntggnnt

SEQ ID NO: 10252 - DNA, 231 bp, Glycine max
  Clone ID: 701150849H1
gaaggatatagttttgaagagctatgcatcaagaaagaagccattgagggagaagagaagttttgtgcaaaatccttgggaacagtaattggttttgccatttcaaagctgggaaagaacattcaagtactttcaagttcctttgtcaataagcaagaccaatacactgtggaaggagtgcagaatcttggagacaaagcagtgatgtgtcataggctaaatttcagaact

SEQ ID NO: 10253 - DNA, 232 bp, Glycine max
  unsure (1)..(232): unsure at all n locations; Clone ID: 701150850H1
gggagaaaagtggaagacagaagatgaagcagtgtagtggtaactccttgtcaatctttccactttgacattggccgacgcctccagataaacaaccttaactttcccacaacaccacccanccattcttttnctctctctagatttcatttagttgttgctgtcttcttctgtttgtgtgtgccaacacagagcgaaaaacatgnnnctgaaccaatcaaaagccgtgttg

SEQ ID NO: 10254 - DNA, 236 bp, Glycine max
  unsure (1)..(236): unsure at all n locations; Clone ID: 701150852H1
ggaagaaaaaaggaagggtaagtnaattgggagtggtggtggtagtgccaggtgtctgtctgagcgagaaaatagaataanaagctagaaattttggtacaaggtctgnttgtagaattgaagaagatgactggggggggtatcactatgcaatcgacgccgggaagctcaggatacttggatttgtatccagcgcggaagatgtcctttttcaaaaatcctacattcgcggactg

SEQ ID NO: 10255 - DNA, 230 bp, Glycine max
  unsure (1)..(230): unsure at all n locations; Clone ID: 701150854H1
gagggaaggaggagaagacaaattaaccaccaacaacagcagaagaaaataaaggagcaaactaaaatggcagcaaataaatacgttgcattgttgttggtggtgttccttatcgctggaagtgctaatgccagaccaaaagaagtcagctgcgcaagtatttgcatcgaccaangantgcaaaantgatttancantgggtgngcaatattcaatnggggtatcaaatg

SEQ ID NO: 10256 - DNA, 155 bp, Glycine max
  Clone ID: 701150855H1
agaaattccattttaaagagatgctcatgctcctctctttaccttgctcccgttaaagctacgcttccaactcggatagagctgtgttaactggtcctggttggtgagggtgctattggtgttgttctgttgatgtaagcagctgaatattgttt

SEQ ID NO: 10257 - DNA, 227 bp, Glycine max
  unsure (1)..(227): unsure at all n locations; Clone ID: 701150857H1
ggattgattccctcattcttcatccatagacatggccaccgtcacttctgcagccgttgctattccctcattcacggcctcaaggcaagcgcaggcaaagtgagtgccgcagttaaagtctcagctccccaagccgcaaggttgggcatcaaggcttcgctgaaagacgttggagtcgctgtngtggccactgccgcgagtgcagtgctgggctagcaacgccatgg

SEQ ID NO: 10258 - DNA, 222 bp, Glycine max
  Clone ID: 701150858H1
ggcgtcgctccgcaccagtttcaccgcacgaatatcttgttgtttggagcgatccgagaaaaactctgtaaactgttggtttaccaggacctccttacaggtgatgagcttctctctgactccttccgttacaaggaaattgagaatggaatgctgtgggaagttgaggggaagtgggttgttaaaggagcagttgatgtagacattggtgcaaacccttct

SEQ ID NO: 10259 - DNA, 226 bp, Glycine max
  unsure (1)..(226): unsure at all n locations; Clone ID: 701150859H1
ggcacaagtttgttgagatagctagaagcaataagatgaaaatgaaagtgcttgttttgtttgtngctacagttttggtagcatatgaatgccatggctcagactaccagaagttccctctccaaatgaaaactgggtttggtgggcaatacagcaatgaggtggcatgtgccagttggaggctggcgtggaagcaaacaacgtagtncaagtggcaaactgttcc

SEQ ID NO: 10260 - DNA, 50 bp, Glycine max
  unsure (1)..(50): unsure at all n locations; Clone ID: 701150861H1
cagcgaaactaactccacttctagtgaggaaacaananaaaanaagnana

SEQ ID NO: 10261 - DNA, 225 bp, Glycine max
  unsure (1)..(225): unsure at all n locations; Clone ID: 701150862H1
ggacattgctaaaccttaaaccctaatttttacaatccgagggtgaagagtttgatgggtcagcganagaacgacaacaacatcaatcagtgctcctcaagcaaggaagacgctgacatgaataacaaccaccttcgctttgaagaggctgtcgacgagagttccaacctcgaccaatccatgtgcgacatcgaagaatccgatgataaaaccagcgccgactat

SEQ ID NO: 10262 - DNA, 226 bp, Glycine max
  unsure (1)..(226): unsure at all n locations; Clone ID: 701150863H1
ggcacaagtgagtttgttgatcgagataactagaaacagtgtgatgaaaatgaaggtccttgttttcttcgttgctacaattttngtagcatggcaatgccatgcgtacgatatgttccctctccgaatgaacactggctatggtgcccgtactccggaggtgaaatgcgcaagttggaggcttgctgtggaagcacacaacatctttggctttgnagaccattcc

SEQ ID NO: 10263 - DNA, 231 bp, Glycine max
  unsure (1)..(231): unsure at all n locations; Clone ID: 701150864H1
aagngctatanctcttggnctggtctatttgtgtatgacattttctgggttttcttcactccagtgatggttagcgttgcaaatcatttgatgctccaataaagcttttattccccacagcagattcagcaaggccattttcaatgcttggccttggtgatattgttatncctggnatttttgtagcattggctttgcgatttgatgtgnccagaggaaaacagccccant

SEQ ID NO: 10264 - DNA, 252 bp, Glycine max
  unsure (1)..(252): unsure at all n locations; Clone ID: 701150865H1
gtccaagtcttgaccaaacccctctttttgaatccctatgtgccatgatttggcgttgcatggcccgggttcgattcaggatccgaacccaaaaccgtgaccgtgtgtagaaccgacccgtataagaggtcaaatgatatcattggtaatnaaccaagtgatatgcaaggttgaggttgaaagtgaatgctcaattgtagacactgatttgacaatcttagctagcatgcttgtggatcaaggagtggatga

SEQ ID NO: 10265 - DNA, 223 bp, Glycine max
  unsure (1)..(223): unsure at all n locations; Clone ID: 701150867H1
ggtgccctaatttctcaaatcggaatctttcactccaccgctctaacccctaattccgatcaacgcttttgcctcgtcgctcgccagtttgttagcgggagtcagttattctgntttattgacgaagtgataacaaatggatgattgggaggatgagcatattncccctattgatcttacattgaaagatccagttaaaagtaattgggatgatgaagatgtg

SEQ ID NO: 10266 - DNA, 240 bp, Glycine max
  unsure (1)..(240): unsure at all n locations; Clone ID: 701150868H1
gggtgtttgatggagnaaacgatatggggtcatttgccggtgctggtaagggcaaattcaaaagaatctattgaatacattctncaggccctttggagaactcgaaaaactggtcttggcactaccgaccgatgcatcatccaagaaatgctccagctccaaaatgaatctgatcttcgacccacttctggtttgcctccgaatgttaatcggggaggtgtgtttatgagaacactagca

SEQ ID NO: 10267 - DNA, 196 bp, Glycine max
  unsure (1)..(196): unsure at all n locations; Clone ID: 701150869H1
ggggaattcgcattttgtaaatgatatagtgcaaaactaattnacacttancatttgcnatttgctaagtacatatnttctttgcttgttnaagtttttggtctagcaggnaanacagctgacatggggatngaacaagtgatttantgncgtcttgaananntagncnnggnntncccnnngggcttagcagtnc

SEQ ID NO: 10268 - DNA, 223 bp, Glycine max
  unsure (1)..(223): unsure at all n locations; Clone ID: 701150873H1
atataattctataattaatttacatgtaagccaaagtggctcacacccattgcaagaatatgaaggattaatatcttcttcatggttagattctggaagtatattaaacattttcatttggtgagacatacctcgtaattatgattttcnnattttcaataagaattctgaaaaccatcatgaactaccgtattattttccatgaactaacaattctcaagag

SEQ ID NO: 10269 - DNA, 223 bp, Glycine max
  Clone ID: 701150874H1
ggcacaagtgagtttgttgatcgagataactagaaacagtgtgatgaaaatgaaggtccttgttttcttcgttgctacaattttggtagcatggcaatgccatgcgtacgatatgttccctctccgaatgaacactggctatggtgcccgtactccggaggtgaaatgcgcaagttggaggcttgctgtggaagcacacaacatctttggctttgagaccatt

SEQ ID NO: 10270 - DNA, 225 bp, Glycine max
  unsure (1)..(225): unsure at all n locations; Clone ID: 701150876H1
ggcatctggtaganttctatatgttgttgnaatttaaattaattttnncaattatattntctaagcnagccactttgatgtatcttgaaattattagaattctcaaagacgttaaaatttgagatcagcnacgtcagcattctgcccatattatngccanggngagaactgaantaantccccntganngngttngnaagggttgncgcgctannacaaggtgtt

SEQ ID NO: 10271 - DNA, 221 bp, Glycine max
  Clone ID: 701150877H1
gacaacatatccattttatttacaacaacaatggcttctgtgcctcaaccaaaaatctcccttctaaccttattcttcttctcgtccttcaccatcattgcgcatgcaattgttcctcaaaacgaaaccttcaaatttgagaactcaggtggacttggaccctacatcgttgagtacggtgcagattacagaatgataagcatcttcaactctccattcca

SEQ ID NO: 10272 - DNA, 223 bp, Glycine max
  Clone ID: 701150879H1
gaaaacggtcctgttactgatgttgatccaattggcaattctcctgtaatcattaagaagtctttgatggaggaaatagcttccacatgggtaaatgtttcattgagaatgaaagatgatcaagagactgataaagcttttggatgggtgcttgaaatgtatggcttatgctgtggcatctgcattgcatggtgtaaagcataatcttcgcaaagactttatg

SEQ ID NO: 10273 - DNA, 230 bp, Glycine max
  unsure (1)..(230): unsure at all n locations; Clone ID: 701150883H1
ggcaggcgaaagagaagatggccaccgttccagggcagcttcgtgtgggagatcgtgaagaaaaacaactcctttttggtcaagcagttcggaagcnggacccagagcgtcgaattcagcagagagagcaacaatctctacaacctcaattcgttcaagtactctggtttggcaaacaagaaaactgttacggtacagcctgagggtaaagatccaggatgtgttgttgg

SEQ ID NO: 10274 - DNA, 238 bp, Glycine max
  unsure (1)..(238): unsure at all n locations; Clone ID: 701150884H1
aatcatggacaaggttgctggccagctccatctccgttctggtgtttctggtattaggagttatgaaggagcctactgccaccccaaatgtaccaaagaccctcttttgggaattactcgaatgctgcattgcagtatcctgtgatgccctcatgcaaggctactatggatttgtctgctgctgcaanaantggcctcccccgtctttgttgctgctccagcagagaaaggccatttt

SEQ ID NO: 10275 - DNA, 202 bp, Glycine max
  unsure (1)..(202): unsure at all n locations; Clone ID: 701150885H1
gagctggtgttcaaggaggacgggcaggagtacgcgcaggtgctccggatgctggggaacgggcggtgcgaggcgatgtgcatcgacgggacgaagaggctctgccacatccgcgggaagatgcacaagaaaggtgtggatcgccgccggagacatcatcctggttggnctcagggactaccaggacgacaaggctgacgtc

SEQ ID NO: 10276 - DNA, 230 bp, Glycine max
  Clone ID: 701150886H1
ggggaatctaggcgagttaatcagaatgcacttgagcgagaacgaagggatagaggggaagaccttcgtggtcaccggtggactgggattcgtaggatctggtctctgcttggagctgcataacgtagaggtgccgtagaggtgcgagcctttgacctgccgcctctcttctccttggtcgcgtcctctcaaggaccaagggagttccttctggcatccaaggggatgtt

SEQ ID NO: 10277 - DNA, 224 bp, Glycine max
  unsure (1)..(224): unsure at all n locations; Clone ID: 701150888H1
gacactaaacaagttaaaagaagagcatcactgaactaacaaagcaaccctatgtcgaaggtggtttgtgtcaccggagccagcggcgccattcggatcatgggtggtcctactcctcctccagcgtggttacaccgtccatgccaccgtccaagatatcaaggatgaaaatgagacgaaacatttggaggaaatggaaggngcaaagagtcatctccattttt

SEQ ID NO: 10278 - DNA, 203 bp, Glycine max
  unsure (1)..(203): unsure at all n locations; Clone ID: 701150889H1
gaaggtttatcgacttcacatttgagtgtggttcttcatttcggacattcataccttcttcgtcctctgaatcaagtttcgnctttatttgagtagttttgctctttccttccaaaatgagccggccaatggaggaagatactgcaggtaagaatgaggaagaggagttcaacaccggaccactatctgtactcatgatgagt

SEQ ID NO: 10279 - DNA, 215 bp, Glycine max
  unsure (1)..(215): unsure at all n locations; Clone ID: 701150891H1
cgtgagtccnngcatcacttttaaaagaagccatccaagtcatcagttgtggttatgaagacaaaactgaatggggaaaagaagttgggtggatatatggttctgtgacagaggatatcttgactggatttaaaatgcattgccatggttgncggtctgtgtattgcattcctaagcggcctgcnttcaaggggtctgcgcctatcaacctttca

SEQ ID NO: 10280 - DNA, 220 bp, Glycine max
  Clone ID: 701150893H1
ggaagaaatcaaaatagaccgctggagaggccaacacaaggctaccgttgctacggaacccaaccaagttagtttgaaggttattgtgattggttgagtatgacttctcagctgaggaatggaagtgggagttcgagctcaagtttgaacagcatatttctggaaacagaggatgaccaaacaattgcaagcatattaacagaggacgaaaatctcaggg

SEQ ID NO: 10281 - DNA, 222 bp, Glycine max
  unsure (1)..(222): unsure at all n locations; Clone ID: 701150894H1
gaatcggaagaagagccacgctgaggcctaagatctccgaattccaagcgcctcttgatagggtctcccaccctaaccaagccagatcccgtttncaattccttctcagtttccttttctctgaaaaaacatgttgagggttgcagctagaaggctctcttcttctctctcatcttcttctccgttgcggcccaatcacgccgcttccgcttttctctctcg

SEQ ID NO: 10282 - DNA, 229 bp, Glycine max
  Clone ID: 701150895H1
ggcagacgccgtgactagacactcatctcactcgcgccatcttagggtttctccttttgtttcgcaacatggttgccgtaagaaaactaagaagacccatgagagcatcaacaacaggctcgctcttgtcatgaagagtggcaaattcaccctcggttacaagaccgttctcaaatctcttaggaactccaaaggaaaattgattatcattgctaacaactgcccccct

SEQ ID NO: 10283 - DNA, 228 bp, Glycine max
  unsure (1)..(228): unsure at all n locations; Clone ID: 701150896H1
ggnagcaaggacgatgagtatagtatgagtaatcagattcagagtgtatagtgattctgattctttcattttccatagattagcaagcaatcnnnnnnnnnnnnnnnnnnnnnnnnnnnnnnnnnnnnatggttcgggaagtatcagagagttgcattgatagcttattgacggagatggtggcgtgctnttgcacccgtttctacgcaaacaagcctgaactcgccg

SEQ ID NO: 10284 - DNA, 240 bp, Glycine max
  unsure (1)..(240): unsure at all n locations; Clone ID: 701150901H1
ggacagcaaaacaattttcaaacttcaattaccattccataacctaaatctcctctttgtttccgagtcagagagcaatggcacgtaccaagcaaaccgctcgcaagtccaccggcggaaaggcgccgaggaagcanttgggcgactaaagccgctcgnaattagctccggccaccgggggtgttaagaancccnaccnttnagggcccggaaagntggttctggggnaaanaaaaaaat

SEQ ID NO: 10285 - DNA, 258 bp, Glycine max
  unsure (1)..(258): unsure at all n locations; Clone ID: 701150903H1
gacagctattcctcttaagcttgctactgagtttccacactgcataccttaggtcttccgaattcgaagttaatttgcaagatggctaaggaaaaggctcagatcaacattgtggtggttggtcatgtggaccctgaggaggcaaccaccatttaacgncctgaanaacccccnttggggaaaaaagacccncnggggccntncnananggggggcaatgcaaggtccgnccggggggggaanaaattttttaatant

SEQ ID NO: 10286 - DNA, 250 bp, Glycine max
  unsure (1)..(250): unsure at all n locations; Clone ID: 701150904H1
gacagaacacaacacaaacacagagaaagagagtgaataaatccagcattgttctgttctctgcaacattctccactctcaaccatggcttcaaagcttttactcatcactgtcttcgtttttgatttgattgcttttggacttgccgtggctgctgagcggagaagaagcaccgctagtgttgtgacgggacantgaaaagaattataattactgtgtccaaaactctgatatagcaactggctatggt

SEQ ID NO: 10287 - DNA, 118 bp, Glycine max
  unsure (1)..(118): unsure at all n locations; Clone ID: 701150909H1
cttgccacaaagtttggggaccttagagttttggacacccctattgctgagaactccttcnngggnatggntatnggggctgnnatgatggncnngacgnnnttgttggggnaataaa

SEQ ID NO: 10288 - DNA, 241 bp, Glycine max
  unsure (1)..(241): unsure at all n locations; Clone ID: 701150910H1
ggcacaagtttgttgagatagctagaagcaataagataaaaatgaaagtgcttgttttgtttgttgctacagttttggtagcatatgaatgccacggctcagactaccagaagttccctctccaaatgaaaactgggtttggtgggcaatacagcaatgaggtggcatgtgccagttggaggcttggcgtggaacaaaacnacntatcaggtggcaanctgtncnngcagtgggggaaata

SEQ ID NO: 10289 - DNA, 243 bp, Glycine max
  unsure (1)..(243): unsure at all n locations; Clone ID: 701150911H1
gggcagagacgaaagaaggttcaggttcggagatgtctctgaaggatcagggcaacgagtttttcaagtcaggaaagtatctcaaagctgctgcactctacactcaagccatcaagctagacccttctaaccctaccctctatagtaatcgtgctgcagcactactgcaattggataagcttaatnaaagctctagatgatgcagagatgacatcaattaaccccccatggganngggntntt

SEQ ID NO: 10290 - DNA, 239 bp, Glycine max
  unsure (1)..(239): unsure at all n locations; Clone ID: 701150912H1
gggagtagcagtggcggggttagctacagtgaatccatggccatggcggctgcatttgcaactacaactgcgacactgagactgccaaatgttggagaaagcaaaagtttgcagctccgtaagtgtaaccctaatcccaataagcttanggttatgcgggggtttggcggttgttcggagtggcagtgagtgtgagattggaattggaagggttcgggcgattcganttcttttntggg

SEQ ID NO: 10291 - DNA, 246 bp, Glycine max
  unsure (1)..(246): unsure at all n locations; Clone ID: 701150914H1
gataattcacaagccacaaattagtactctcgttaatttttttgctaattgctaattgggcacaatggaaaagcttcatgctgtgtgcatcccatacccagcacaaggccacataaacccaatgctcaagctagcaaaactccttcatgttagaggcttccacatcacctttgttaacacagantacaaccacaaacgcttctcaantcangnggttngattcccctnaatggtgnccaataattt

SEQ ID NO: 10292 - DNA, 220 bp, Glycine max
  unsure (1)..(220): unsure at all n locations; Clone ID: 701150915H1
accctgaccatatagtataaataaacanattgaaaanaaaaactggaatgaatccaacaagagagagcaaaaggaagaaaataagaggtttacgaaagatnacgcttgagttcttgtttgtaaccgagttctttgagacgggcgtggccggaaatcagtggggctggcatttgcgaccacatgngangggatntttgtcnagccccctgagaggtggggg

SEQ ID NO: 10293 - DNA, 179 bp, Glycine max
  unsure (1)..(179): unsure at all n locations; Clone ID: 701150916H1
accggtggttctgttcattcttccttgcaccttcttctttgaagatcgaaattgtgtttttgaaaaaatgggagttccagagaaagaccctctttcccaattgagtttgccnccnggttttnggtttaaccccaccgangnggagcncctngtaaagtatttatgcgaagggtcgnggc

SEQ ID NO: 10294 - DNA, 257 bp, Glycine max
  unsure (1)..(257): unsure at all n locations; Clone ID: 701150919H1
ggcacaagtgagtttgttgatcgagataactagaaacagtgtgatgaaaatgaaggtccttgttttcttcgttgctacaatttnggtagtatggcaatgccatgcgtacgatatgttccctctccgaatgaacactggctatggtgcccgtactccggagtgaaatgcgcaagttggaggcttgctgtggaagcacacaacatcttggctttgagaccattcctgaagagtgcgttgaagcaacaaaggaatacatc

SEQ ID NO: 10295 - DNA, 248 bp, Glycine max
  unsure (1)..(248): unsure at all n locations; Clone ID: 701150921H1
ggcacaagtttgttgagatagctagaagcaataagatgaaaatgaaagtgcttgttttgtttgttgctacagttttggtagcatatgaatgccatggctcagactaccagaagttccctctccaaatgaaaactgggtttggtgggcaatacagcaatgaggtggcatgtgccntttggaggcttggcgtngangcaaacaacgtagtccagtggcatctgtttntgcagcttgcggagcgnactngc

SEQ ID NO: 10296 - DNA, 158 bp, Glycine max
  unsure (1)..(158): unsure at all n locations; Clone ID: 701150922H1
gcagtaggttttgaggaccctcgtgtaacacttactgttggtgatggagttgcatttttgaaggatgttccagaaggaacttacgatgcagttatagtggattcatctgaccctattggtcctgctcaagagctgtttgaaaagcnttttttgcgtcc

SEQ ID NO: 10297 - DNA, 244 bp, Glycine max
  unsure (1)..(244): unsure at all n locations; Clone ID: 701150924H1
ggttatcaagctcgtggatctctgccatcaaaatttgactgtgattacgcatatgtccttgggcacatctgctaccatatactggccgctggtctaaatggatacatggcaactttaactaacctgaagaatccagtaaacaagtggaaatgtggggctgctccaattgcatctatgatgactgtaaagcgctggtctccaaatccnggagctacatcaattggaaaacctgctattcatccag

SEQ ID NO: 10298 - DNA, 150 bp, Glycine max
  unsure (1)..(150): unsure at all n locations; Clone ID: 701150925H1
gagatagagagcgcggcataacctaaacctatctttcttctctctctgtgtgtgcgcttcaacggcaaccagaagcagccatggccactgcaaggactgtgaaggatgtttcacctcatgagttcgttaaggcgtactcctctcacctna

SEQ ID NO: 10299 - DNA, 156 bp, Glycine max
  Clone ID: 701150926H1
gggtaatctcttaaaatatagaacacactaccctcaacatagtaaagcagctggtgcaagtgaagcaatggctcaaaccatgttgctcatgtctagtgtctctagcagttattccgtggatttgaagaaagacttttcctccaattgcagagtcaa

SEQ ID NO: 10300 - DNA, 243 bp, Glycine max
  unsure (1)..(243): unsure at all n locations; Clone ID: 701150928H1
gatgaccttgatctctttggcgatgagactgaggaagacaaaaaggcagcagaggaaagggaggctgctaagaagtctaccaagaagaaagagagtggcaaatcttctgttctgcttgacgttaagccttgggatgatgaaacagacatgaagaagctggaagaggctgttcgcagtgttgaaaannccggnctanttggggggacnnaccaaaggggccccnntggntttagggaaaaaaat

SEQ ID NO: 10301 - DNA, 245 bp, Glycine max
  unsure (1)..(245): unsure at all n locations; Clone ID: 701150929H1
gatcgaagcaaaaaatgaaaacccaaagtgctactctcctctgtctttttctctctcttgctatccttttggctagtggcactgctgcaagtgcaactccaagaagcgcagtgccaagccaccatgtttcaacattcaacagaagcctttttcttccacttttcncctttggaattggttttctgcttacnaggnagaaggagnancaagtgtaagatgggaggggccaaggcnntttggancac

SEQ ID NO: 10302 - DNA, 249 bp, Glycine max
  unsure (1)..(249): unsure at all n locations; Clone ID: 701150930H1
atcagcggtgccccccaggataacaacataatgctntggaatgctgtcatatttggtcctgatgatactccatgggatggaggcacgttcaagttgactctccagtttactgaggattatccaaataaaccaccaactgtgcgatttgtgtctcgcatgtttcatccaaatatttatgctgatggaagtatttgtttggatatnnctanaaaancggggganccntatnggggaaggggccgnanaaac

SEQ ID NO: 10303 - DNA, 251 bp, Glycine max
  unsure (1)..(251): unsure at all n locations; Clone ID: 701150932H1
gatgcacaagtttgttgagatagctagaagcaataagatgaaaatgaaagtgcttgttttgtttgttgctacagttttggtagcatatgaatgccatgggctcagactaccagaagttcccctctccaaatgaaaactgggtttggtgggcatacagcatgaggtggnatgtgccagttggaggcttggcgtggaaccaaacaacgtantcangtggcaaactgttcctgcagctngcggagattaantac

SEQ ID NO: 10304 - DNA, 260 bp, Glycine max
  unsure (1)..(260): unsure at all n locations; Clone ID: 701150933H1
gggagagagaaagagatagagaacccgttcttctttttttccattaacattttcaatctctttcacctaagacacgttcctctttccattcctttcttcctccgtcccattctcgaattggcgtgtgcctcttgctatccctcaaaggtcttttgaagcagaagaatggacttctttactaggggacataaatggggggactctatgctnaagntggccaattctgggggnaacatgnagggggcctanttanctncttt

SEQ ID NO: 10305 - DNA, 288 bp, Glycine max
  unsure (1)..(288): unsure at all n locations; Clone ID: 701150934H1
acatttataaggacgccttggttctgggatgaactgcgttcattaaatatcttatcattgttagtacacaggcatacttggtattcctaaacaaaggaacatttttcacaacagcaagaggctaattgtctctttttcacggataaggcagttaacctgtagaaacttgctaggcagtggctcactagattcaagcatggcttgagcattaatcttttccataggagtnaaatcngggcaanccctttttaaaaaacctcaanaaaaaccggtttnaagggngaaacc

SEQ ID NO: 10306 - DNA, 253 bp, Glycine max
  unsure (1)..(253): unsure at all n locations; Clone ID: 701150936H1
gacagcaacacacattgttaaaagtttctttatttcaagtgaagttagttagttatatttatatacacaatcatgtcaatgagatcaattggtacaagccttagccttatggtatggcttgtaattgcaacatcagcattagcaaatctgataaccccccagtccctagacacacaggggaacccctcttggagcctggcaaaggnttactncatcaaacctgccataaccggacgttgggaggccggtcant

SEQ ID NO: 10307 - DNA, 213 bp, Glycine max
  unsure (1)..(213): unsure at all n locations; Clone ID: 701150937H1
atcancggtgccccccaggataacaacataatggctgtgaatgctgtcatatttggtcctgatgatactccatgggatggaggcacgttcaagttgactctccagtttactgaggattatccaaancaaccaccaactgtgcgatttgtgtctcacatgtttcatccaaatatttatgctgatggaagtatttgtttggatatactacangat

SEQ ID NO: 10308 - DNA, 243 bp, Glycine max
  unsure (1)..(243): unsure at all n locations; Clone ID: 701150938H1
ggatcggaagagttgctccactaaaaataccttgattaaatatttatatagtgaatagcagcaaagtggcaggagcttgcgtctgcaaattctatgttgtttgatttgcgtgagtgaattgggaagatgcncgtgtctgggtcgattcggcggggtctcttacggttggagttggaatcggaggagggacaacaccattaacagggcccagatggcgtttgatggcccaggaatcaccctccc

SEQ ID NO: 10309 - DNA, 242 bp, Glycine max
  Clone ID: 701150940H1
gggaagatgcagtaatatttccccttttcaatacctattgacttcagcttgtgtgttcatcaagaataacaataataatattagtatttggcatttgatttgaatcgattaagatctaagaagaagaataaggatggtgctgccactgctgaagctgggaacgctggccgtgaaaaccctaagcaaacccgtggcgagcagactgaagcagcaggccgctcttcaccccagattccgcgaat

SEQ ID NO: 10310 - DNA, 241 bp, Glycine max
  unsure (1)..(241): unsure at all n locations; Clone ID: 701150941H1
gaacaaaacaagtgtttcgaaacgattatcctaagtcantgggaatagtgctgcaatggcttcaagtcaggaggaggtgacccttttgggagctactggaagcccatttgtgtgcagggttcatattgccctcaagttgaagggagttcatacaaatatntcgaagaaantttgaggannaggntgancgtntanaannnccaccccntnnaaaaagggcncccttttttnaacaaaanng

SEQ ID NO: 10311 - DNA, 242 bp, Glycine max
  unsure (1)..(242): unsure at all n locations; Clone ID: 701150942H1
aaaatggaaatatcttcattccatcaatttcctgatgaatcactcagcgaggcgctcgaccatttccacggattactcagaaagacgcctacacatgggtacagtgagtcggtgcaactaaatatcttcatagatggcctgcaaccacantcaaagcaactcctttncgcatccgaagtgggaaaaatcntgttgaagaccggggggaggnangggngttganaaaaaacnngcccncnctc

SEQ ID NO: 10312 - DNA, 244 bp, Glycine max
  unsure (1)..(244): unsure at all n locations; Clone ID: 701150943H1
gactggtatatatactatttgatttgacgttgcttttcttgggtcattgctcatttgctcttatttgaaatccttgctttggggtgaaattgtagttaacaagaacatggtttctaaaaagaatgatggaaatagtcagtttaacatataaaatagantgccaaaactgtcaactgtcnaatttcttattattgtccttttttnggncagccagtggaagtaaatctgctaancgngantaatg

SEQ ID NO: 10313 - DNA, 217 bp, Glycine max
  unsure (1)..(217): unsure at all n locations; Clone ID: 701150944H1
gcacttggaatccaaaaatgagagaaatcatcagcattcacataggtcaggccgggatccaggttggcaactcctgctgggaactctactgcctggaacatggcatccagcccgatggcatgatgccaagtgactcctccttcggtgtagcccacgncgcttcaacaccttttnagcgaaacgggntcgggnaancacntcccnncgngtttttntt

SEQ ID NO: 10314 - DNA, 249 bp, Glycine max
  unsure (1)..(249): unsure at all n locations; Clone ID: 701150945H1
gagcaaaggaatggagagactgtgaaggaaagcaagcgagagggatggaaggtgtgcttcaagggaaatattaatggcaaagtgtatggtggcagatacacattgaagaagtgcaataaaagggagattgtttcagttggagatatgggtattattatcgggagaaagagaaggtgctcctgttcaactcctcgtgaggaccatcnttttctctntcctcactttcttggtggccatactgcnagnggg

SEQ ID NO: 10315 - DNA, 239 bp, Glycine max
  unsure (1)..(239): unsure at all n locations; Clone ID: 701150946H1
gatccgccttcttttttctctctccacccaacatcgaaacnaggtcgttttgtgttccgccgaaggaccgggggttgtagcagactagcagctatggatttggcatccaatctcggtggcaagattgacaaagccgaagttctctctgccgttcagaagtatgagaagtatcatgtttgctatggaggtcnaagnggaagaggggaanctatnncnccgtgnggtaaanaantnccncc

SEQ ID NO: 10316 - DNA, 244 bp, Glycine max
  unsure (1)..(244): unsure at all n locations; Clone ID: 701150947H1
gatgagaacatgttcaggttcaactattccaaggaatttctaagttgggctttgcgggttcctggctattaccagagttggcacattggcgtgagagccaagacatcgaagaagttggttgctttcatcagtggcatccccgccaggatcagggttaatgnngaggttgtgaagatggctgagatcaatttcttgtgtgttcataagaagctcaggtcaaagagacttgcgcctgttatgatca

SEQ ID NO: 10317 - DNA, 251 bp, Glycine max
  unsure (1)..(251): unsure at all n locations; Clone ID: 701150949H1
gatccacaacaaaaaactacttctcaatttcagttaacacaccaaccccacatccaaagcttcagttcaatatggcaaccttgtcaagttttgctcctttggccattctaagtttagttctagtaattagtgccattgtctttgaggctgaagctaggccaaggacattctttgtatttggggattcacttgtggataagggaaacaacanttnactgggnaacangggnnttgccggntgcccccccttt

SEQ ID NO: 10318 - DNA, 253 bp, Glycine max
  unsure (1)..(253): unsure at all n locations; Clone ID: 701150950H1
atacactatactgacatttaatgtattcataataaatttcaattttctataccaacanatttgtctatttatatgatatactatatacagtagtaatatagtattttgttctacaaatactttaactttantaaaatattacactagcaaatgactaatcccattaccaaaggtattggataaantggntacttttgaggggntttnntnattttnccctantttnaatancttcnccantggtnttnggcct

SEQ ID NO: 10319 - DNA, 245 bp, Glycine max
  unsure (1)..(245): unsure at all n locations; Clone ID: 701150951H1
gaagcttagtgatgaccaagttaatctccttgaacaaaactttggaaatgaacgcaaacttgagtccgagagaaaggacaggctggcaatggagcttggtttggaccctcgacaagttgctgtgtggtttcaaaacagaagagctcgttggaagaacaaaaagttggaagaagagtactcccaaccttaaaaaaaaatcatgaaggccacctttgctcgagaatgtcgcctagagactgnggtnt

SEQ ID NO: 10320 - DNA, 241 bp, Glycine max
  unsure (1)..(241): unsure at all n locations; Clone ID: 701150952H1
ggcagaagctttatgctacattggaaacgctcaagcacaatggagataattttgcagctgaaattcagaatagattgaggataattgttgcgggtggacatggtactgccagctggcttcttggagttgtatctgaccttaaattacctcagccgccaccatttgcaacggtgccattggggacgggaaanaattctccccttngnnttggntggggaangaaattcccancaggggttcc

SEQ ID NO: 10321 - DNA, 155 bp, Glycine max
  Clone ID: 701150954H1
ggaggcaaagcgaacaaacggctactctccttcccacttgctatcctcgaaattaacgaaacgtagttgaagaacccacagaatcagaaccccaacactgccttatgctttccctataaatacacactgtccctttcctgctcgtcatttaaaat

SEQ ID NO: 10322 - DNA, 238 bp, Glycine max
  unsure (1)..(238): unsure at all n locations; Clone ID: 701150955H1
cagaaatgaaatggaaagcaaaagatgctagttcaccagatccttattcaagatttatcaatgcattgtacaacttgcttgatggatctgccgaaaatgcaaagtttgaagatgaatgccgggcaattattgggaaccagtcatatgtgttatncacattggacaagttaatatacaaattggtcagacagcttcaaactgtcgcaaccgntgaggtagacantgagctctccattat

SEQ ID NO: 10323 - DNA, 236 bp, Glycine max
  unsure (1)..(236): unsure at all n locations; Clone ID: 701150957H1
ggaactccgaagctttgttggcggcaaagcaaatctngcatagcgatggcgcctccgaagctcttcgtatttgcgctttcagtaaccctgatttttgccatcgttggggccgaagccgatgtttccgtcgaaggagccactccagagcctnatacttccgcnatnaagnnccantggntnnacnanttncgaatgnncnantttnggnagtcnnaangcgntganggtggnganng

SEQ ID NO: 10324 - DNA, 130 bp, Glycine max
  unsure (1)..(130): unsure at all n locations; Clone ID: 701150958H1
ggaaaaccgaatatacagataccactgctgctgaanctaggagggggaaggatatccaaggtataccttgggataggttgagcattagtcgtgagaaatatagacaaactagactagagcatacaaaant

SEQ ID NO: 10325 - DNA, 236 bp, Glycine max
  unsure (1)..(236): unsure at all n locations; Clone ID: 701150960H1
gacacaccatccgttctagtctcaacttctgctcttccaactcctacaacgcttttctctgcactcatgggcaaggtcaagatcggaatcaacggatttggaagaattggccgtttggttgccagagtcgctctgcaaagagacgatgttgaactcgttgccgttaacgacccttnantaaccccggnttacatggantcttntaaaaaanggagttnnnngaggncngggnaant

SEQ ID NO: 10326 - DNA, 244 bp, Glycine max
  unsure (1)..(244): unsure at all n locations; Clone ID: 701150961H1
gaacgtgaaagggatcgcattatggagcggcgcgaacaaggagagggagcgagagcgcaaacgtgcacttgaaactaagcctgaacgaactccagcgagatcctccaaggatccccgtggtacttcaaaagatccccgtgggtcatctttgacaagggnggggagttctacacgaggggncnccnnacntnatgganattagantngggcccttttcnctntanaaagnaannaggntnttttt

SEQ ID NO: 10327 - DNA, 216 bp, Glycine max
  unsure (1)..(216): unsure at all n locations; Clone ID: 701150962H1
ggtgctgaaggatantcaggacacaatgctctganaggatgtgacattggggtataggtttttatattaattgtatgaagtcttaggcggtcttgtttgagtcgagatgattttattatttatttggacaagtttgaatatgatgtaaaagaaagtgaatgtgagccttttacccgttgaanggntccattaaaaggngtttnaaaacctttaatt

SEQ ID NO: 10328 - DNA, 251 bp, Glycine max
  unsure (1)..(251): unsure at all n locations; Clone ID: 701150963H1
gtgtcaatgccacgtgtgactgccacatgtcaatgccacttgtcaacgtctaagtggttccctgtaaatgtttcattttttgtaggtaaaattgtagttttgttcccctagttttactccaatttcgattttggttaattcgcacatttggtcccccagttttataaatccctttataaattcagccaaatttcattacgggagaaatggtatttcaatttccaaacaaaatnccatggtnatananggnc

SEQ ID NO: 10329 - DNA, 251 bp, Glycine max
  unsure (1)..(251): unsure at all n locations; Clone ID: 701150964H1
ggaagcagatttgattctgattctaatttatttgattctttattatttataaattgaaaagaaagtcacgctggcggtgaagaacgtttctgcggcgggccgaggagggaggaacacatgacggctgatttccgatgttgagaaccttgcggatgccgaaatccccgacaaccgcacatccaaattagcaccgattcatggtttcaagtggggttctgctgacgacggggatcaacagcgcgtatgttcnt

SEQ ID NO: 10330 - DNA, 112 bp, Glycine max
  unsure (1)..(112): unsure at all n locations; Clone ID: 701150966H1
ctatttggtttnatccatcantgaccctnctgntgccaccataaggtctcccagcatttggattcatntggtgcnctagttgntcnattcanctgtagancncttcattnnt

SEQ ID NO: 10331 - DNA, 237 bp, Glycine max
  unsure (1)..(237): unsure at all n locations; Clone ID: 701150968H1
gggataaagagagaagaagagagtcccttcacttacacatagagaaaaaaatggcagcatcagtttcatgctcatggctaactcttccgtcccaaatgaggaaactttccctcannnnnnnnnnnnnnnnnnnnnncatctccattctgcttctctcagtttctccagaaacctctcacacctcttcttctcacaaggtaatggttgtcgctgagcacagtgcagaggcgcgcgttt

SEQ ID NO: 10332 - DNA, 142 bp, Glycine max
  unsure (1)..(142): unsure at all n locations; Clone ID: 701150969H1
ggcagtggagagagagtgttagcaccaaaaatgtcgaagttaattcttcgtgttccttgcactaattcctcttctctggcncctccttctcgccagagaaaccctcagatccgggcgcatcctcgttttgctcgntgattcg

SEQ ID NO: 10333 - DNA, 226 bp, Glycine max
  unsure (1)..(226): unsure at all n locations; Clone ID: 701150972H1
ggacgatgccttgagttcattcttgctgttgtcttagccttaggcttctgaaaatctgtagaaaagaaacacaagaaaaagataagaaaaatagtattaattatgcgttgacttcaaagtttaaatttcattattaatcatcgaaattnaattgtgtctgaaagtgagatcataaattggctattcatttccttcagatggttacgtgtgtaatgtgttattgcta

SEQ ID NO: 10334 - DNA, 231 bp, Glycine max
  unsure (1)..(231): unsure at all n locations; Clone ID: 701150973H1
ggcacaagtgagtttgttgatcgagataactagaaacagtgtgatgaaaatgaaggtccttgttttcttcgttgctacaattttggtagcatggcaatgccatgcgtacgatatgttccctctccgaatgaacactggctatggtgcccgtactccggaggtgaaatgncgcaagttggnggcttgctgtggaancacaaaatttttgggttnngagacctcncggagggg

SEQ ID NO: 10335 - DNA, 219 bp, Glycine max
  unsure (1)..(219): unsure at all n locations; Clone ID: 701150974H1
gganacctggaaaagttagaagnagtgaagaaaatgaaagtnattgttttcttcgttgctataataattttaggtgcagaatggcaatgcaatgggtcagagcatgagtatgagcatggccacanctaccaaatttnccctttgcgaatnaaaaccggccccggtggcccataacttcgggggggtancnnaaaaangtnggaggctggnnnaanaccc

SEQ ID NO: 10336 - DNA, 210 bp, Glycine max
  unsure (1)..(210): unsure at all n locations; Clone ID: 701150975H1
gatgcatagcaatacccaattcctaattgtttaaacctaattctcatttcttcatcgttcgattcttctcctcctaaagatgcagatcttcgtgaaaactttgaccggtaagaccatcacccttgaggtggagtcctccgacaccatcgataacgtgaaagcnaagantncangacggggaagggnncccacntgacagtngtttttttt

SEQ ID NO: 10337 - DNA, 245 bp, Glycine max
  Clone ID: 701150977H1
gagagaaagagaaaatgaagaagtcttcgggaagcgcactgaccaagaagagggtgcgacggtcctccgccctagatcccacctccgacgcccctccaaggaaacaagctgtcaagaaagatgtgttccgggtgtttgctgagaaggttagagaccataaagaattggtttcaagatgggctgttctacaggagacgcgtgttgagtattttagagggaaggattcgtggagcttcttaaaaaag

SEQ ID NO: 10338 - DNA, 236 bp, Glycine max
  unsure (1)..(236): unsure at all n locations; Clone ID: 701150978H1
gatgccaaagagagtgagtgagtagggtttcaaattccaattcggaagaaatcggaatcggaaaaaatgggaggtggcggcggcgatcacggccatggacacggacacggtgatttcaggaacaaggtctggagtatgagcggtggcccttactgtcgcccaaagcactggaagcgcaacaccgccattgccatgttcggcgttgtcctcatctgnatccccatcgctatgaatcc

SEQ ID NO: 10339 - DNA, 249 bp, Glycine max
  unsure (1)..(249): unsure at all n locations; Clone ID: 701150980H1
ggtgtttgaatagacaaacaacagagtttatttctttttggttccttggttcacgctggctgcaaggcttgtgtttggtgggagcagctcctcaccgtgacgctgctctacgaagacgacgacaacctcgtgtgacaacatcaaataatgggaaaaggaaacatggaactcgagacaaacaaggtctatgactacgaggatgcaacgaggggacnttgaagtccccagataccgctcatcagataagct

SEQ ID NO: 10340 - DNA, 222 bp, Glycine max
  unsure (1)..(222): unsure at all n locations; Clone ID: 701150982H1
aagctttggaggttctgggctcaagaaaagtggaaagaaataagggctctttatcatgattgtatacatccaatattgagccctgtagtttatcaccatgataacttctgtcttattgtggcctctttatggcnctaatgttagtactgaactgaggtatttcgtgatgnagctgcaanaagttacttgttngnagtatatggngcnnccctggggggggtt

SEQ ID NO: 10341 - DNA, 201 bp, Glycine max
  unsure (1)..(201): unsure at all n locations; Clone ID: 701150983H1
ggangtgagtgaagaagcagagggantagcggcatnnaaaatgcagatcttcgtgaaaactctgacagggaagactataaccctcgangtcgagagcagcgacaccatcgacatgtcaagggccaagattcaagacaagganggcttcctccggatcagcagcgtttgnttttcgccggnaaagcagttgaagttgnaggt

SEQ ID NO: 10342 - DNA, 239 bp, Glycine max
  unsure (1)..(239): unsure at all n locations; Clone ID: 701150984H1
gatgcatcatcctctagggcccttgatggttggcaagatgaattccatttagctggaccgtcatggggcattggcattcttctggnagtgggttcactccatgattgttgtgcattattttttcctttccttcagtaacaagagatncgagcttntcctgacttctcggaagaactacatctctttcatgtccatgaggagggaatgacttccccttcctctctaatgannggnggngg

SEQ ID NO: 10343 - DNA, 232 bp, Glycine max
  Clone ID: 701150985H1
taatttgggaattattgctcccatcgccattggtttcattgtccggcgctaacattttgttgggtggggccttctctggagcggccatgaaccccgctgtgacatttgggcctgctgtcgtgagctggacctggaccaaccactggatctactgggccgggcctctcatcggtggtggaatcgctggccttgtttacgaggttgtctttatcagccacacccacgagcagtt

SEQ ID NO: 10344 - DNA, 77 bp, Glycine max
  unsure (1)..(77): unsure at all n locations; Clone ID: 701150986H1
ggacataatgtagtnagtataaatgcatnctnagncagcaagtgttgantancgagtagtcgatggagaagaagatt

SEQ ID NO: 10345 - DNA, 232 bp, Glycine max
  unsure (1)..(232): unsure at all n locations; Clone ID: 701150987H1
gagcgaggagaggaatcagaatcgcgttagggagaagaagagaaaatcgcaggtgaaaatgagcggaacggtgaagaaagtaaccgatgtagcattcaaggtgggaaggaacatcgattgggatggagtggcgaacttnctcgtctccgatgaggctcgcagggagttctccaatctccgtcgcgntttcgacgaggttaactcccaactcgaaaccagttcagncnggaat

SEQ ID NO: 10346 - DNA, 109 bp, Glycine max
  unsure (1)..(109): unsure at all n locations; Clone ID: 701150988H1
gggcgggaaaaagactgaccggaagcgaatagcgggaacaaattgacgaaccgccaaatctccaatatttttttttttaatatttccctttaaatttncctctttattt

SEQ ID NO: 10347 - DNA, 235 bp, Glycine max
  unsure (1)..(235): unsure at all n locations; Clone ID: 701150989H1
ggatctttgtctctgtctctgtttctactttgaggcctccgttgttggtgggtgggtctttcttctctcaaaatagccaccggagtgaacagaaaaatttctgctgcatcagctcgggcccacaccagaagggcaaagaaaaccaattccccttccctcccatcgggatttcttggaaaaagccactagcggtntttnnangggngtttttgagaggggtttnaangngttnacc

SEQ ID NO: 10348 - DNA, 165 bp, Glycine max
  unsure (1)..(165): unsure at all n locations; Clone ID: 701150990H1
gggcatcaattcaaaatatatcatcaattataagcatgggtttgtggaacacaacgaatgcagtgtcttgccgctttcacaagtttggtgatgaccaaaagaatctggtcttccanggtgatgccacgtcttcttncgggggctagaactcncaangttaggngg

SEQ ID NO: 10349 - DNA, 231 bp, Glycine max
  unsure (1)..(231): unsure at all n locations; Clone ID: 701150991H1
gcaggattgtggatgcaataatctcccatggatgtttcctaagagaatgcactgtccaacattccattgtgggtgaacgttcacgtttggattatggtgttgagctccaggacactgtaatgatgggagctgactattaccaaactgaatccgaaattgcttctctgctggcagagggganggttcccatngggattggagggnacaccaaaatngggactgnntntttgg

SEQ ID NO: 10350 - DNA, 205 bp, Glycine max
  unsure (1)..(205): unsure at all n locations; Clone ID: 701150992H1
gacaatcgacacggnaaaaggcgtcttcataaacgccgcccaaaacttctcatacccttttattcattccattcgtttctagggttttcttttctttgccgagaaaatgagagagtgcatttcgatcccacattggccaggccggttccaggttgggaaancctngtggggaatnttttnnctttgnaaanggggtttnngncgg

SEQ ID NO: 10351 - DNA, 231 bp, Glycine max
  unsure (1)..(231): unsure at all n locations; Clone ID: 701150993H1
gacaacacagaacaaaaacaaagaaaaaaaaaacccttagccaacacaaccatcatggccacctctgctattcagcaatcagcattcactggtcaaactgctctgaagcagctcaatgagttcgtccgcaagaccggtggcgccggcaaaggtcgcattaacatgcgccgcaccgtaaagngtgctcctcagatttttggtatgccntgncgtcnaaaagttttggggtct

SEQ ID NO: 10352 - DNA, 231 bp, Glycine max
  Clone ID: 701150994H1
gacttccgcaatggtgcatgtcgaaatcttgtttgtactgatctttttactagaggaatagacattcaagcagttaatgttgttattaattttgattttccaaagaatgcagagacttatttgcacagggttggtcgttcagggaggtttgggcaccttggtttagcagtgaacttgattacctatgaggatcgctttaattatatgggttgaacaagaacttggaactga

SEQ ID NO: 10353 - DNA, 240 bp, Glycine max
  Clone ID: 701150995H1
atgagctttcccaagcctttcaatgtaaactggcctaccttccttgtcaactccatgatacccttgagggtaatgctgcaacacttcttccagctcttcaaattcaaaatccttcaaatgtcagaacagacattagacttaaccaaccaaatcatgtatcaagtgcatcctagcatagaacacatgttctaaattttgaaacgtacaaacatcaaaacaattgtactatctgcttaaagt

SEQ ID NO: 10354 - DNA, 248 bp, Glycine max
  unsure (1)..(248): unsure at all n locations; Clone ID: 701150996H1
gggtgctcgaagaagtcccattcattgcactgatagcagcgatggggatcgatcttaaggctgggggtaagagcaaaaagaccaaaagaacagcaccaaagtccaatgacatctaccttcaaattactcgtcaagctttatcgatttccttgttcgaaggacagacagcaatttcaatggctgtgatactcaagcgcttgttcatggagcaaggttaacaagcctccaatttctttgtcaaggttant

SEQ ID NO: 10355 - DNA, 114 bp, Glycine max
  Clone ID: 701151001H1
tccttatttgccctgaccaagaatgtagtgaacacctgccaagaacgagaaaaagggaagcggtcatgttcaagaagataagggaagaaagaagaacaaaaaatcgtttgctag

SEQ ID NO: 10356 - DNA, 264 bp, Glycine max
  unsure (1)..(264): unsure at all n locations; Clone ID: 701151004H1
ggaagaacaagtcttgcattgggtggagcatacttagaaacagcaactatgtctctcatgcagcttactagctcccctgttggctcactggtccgtttcattgtaatatttgctttatggtacagaaccatggctttggccaagttgccaccaaacgcttcatcagttcnngcagttttagcgttggagattccatcgtggacccaggcaacaacaacaacataaaaacttgatcaagtgcaattnccacttatggaaaggttt

SEQ ID NO: 10357 - DNA, 268 bp, Glycine max
  unsure (1)..(268): unsure at all n locations; Clone ID: 701151005H1
ggaacaaaacaagtgtttcgaatagattatcctaagtctttgggaatagtgctgcaatggcttcaagtcaggaggaggtgacccttttgggagctactggaagcccatttgtgtgcagggttcatattgccctcaagttgaagggagttcataccaaatatgtcgaagaaaatttganggaaccagagtgaactgcttctccaaatccaacccagttcnacaagaaggttccatgttattccacatgagaagcccatagcgagtctct

SEQ ID NO: 10358 - DNA, 265 bp, Glycine max
  unsure (1)..(265): unsure at all n locations; Clone ID: 701151007H1
ggtgggagcgagccagggttttggtttttgtaaggcgaaaacagtgagagcngtgtggtgcttagtgctcacaccaattaccaatggcagtggagaagacggagcaagaactccgcaacgagatcgatgagcttcttcgccaacagcgcgagatttcgggaaaggcttcgagatcctcgaggtcttcgcagaggtgcttgccggntctcctgctctccgcanaacggtgntcgccaagacccttaattgccctggaganaaggac

SEQ ID NO: 10359 - DNA, 206 bp, Glycine max
  unsure (1)..(206): unsure at all n locations; Clone ID: 701151008H1
atgcttctttcaccatgtttgcaatgcttgttggattgctctctcagagcttgtcattcctgtaatatccaccactgttgcagattcagaagaactactacaccccnggatccacatggtggaagtccccccaggggttncnncggatctctgtggctcaaaaataggagtccccccatntcanggccangggancncnccaccaa

SEQ ID NO: 10360 - DNA, 252 bp, Glycine max
  unsure (1)..(252): unsure at all n locations; Clone ID: 701151009H1
aagacgacagaagggtacggctgcgagaagacganagangggttcagntggtatttcaggcttccagaagaangtatttgacctcttgtncnagattgcagatattcccttcttgagcgancacaaatctaagatttttcgatctcattgagaaagctgngaaacagccaaatctcacaattggnattctgtagcgttgtggntgtcttcgtgtcattttcttcagactccatattggtggcaagnancctg

SEQ ID NO: 10361 - DNA, 264 bp, Glycine max
  Clone ID: 701151011H1
agttctcagtgtagaatgtaaggaagtcgtttctcaatatggagagttgatatgggatttcttggtatcaggggtgaaaccagatgacatatgttcacaagttggtttatgttcttccaaaaggcatcaatctaagagtgctggaattgaaatggtgactgaaaaggaacaggaagagttggcagcgagagatactcctttgtgttctcttgtcagatgcttgttctttggatccagaatcaactaaaacaaaaggcaacgagg

SEQ ID NO: 10362 - DNA, 265 bp, Glycine max
  unsure (1)..(265): unsure at all n locations; Clone ID: 701151012H1
gggagttcaacgagatggagcaaataaagcacagaacagttgaagtgaatggcataaaaatgcatgttgcagagaaaggagagggtccagtggtgttgttcctccacggcttccctgagctctggtactcatggcgccatcagattctctctctcagctcnnnggctaccgcgccgtcgctcccgatctccgtgggtacggtgacaccgaagcaccaccttcaatcagcagtacaactgcttccacatagtgggtgatctcgttg

SEQ ID NO: 10363 - DNA, 250 bp, Glycine max
  unsure (1)..(250): unsure at all n locations; Clone ID: 701151013H1
aagacgacagaaggggatcaccacttggacgcaaaaatggcacctgcaacactgtctctgtctctcctcctcctgttctcactcagcatcgccgtaaccgttagatcgagcgactacgactacgattgtgtgtacactgcatacgtncgaaccggttcggtgttgaanggcggaacggatctagatcgggctgaagtgtacgacagtacggtatacatctacattaaaaactcgagcatggggcggntga

SEQ ID NO: 10364 - DNA, 263 bp, Glycine max
  unsure (1)..(263): unsure at all n locations; Clone ID: 701151014H1
ggaaaacaatgaagcagcatttttcagaaggtgttcgacctttaacgccgtggcaaactgtatataaactgcaccttttttcgtccattttcttaccataaatattcaattcaatgcttcatcctcatctattgcctattgcattcgtacctccctttgttttcgctattgctgtgtctctcgaggatgtctcaattgagttggtgctgaatccgaggttatttagctggtgtggaatcattcaacatatctggaagaggntt

SEQ ID NO: 10365 - DNA, 271 bp, Glycine max
  unsure (1)..(271): unsure at all n locations; Clone ID: 701151015H1
ggaagttgttgccgcgattttttttgccgcaaaacgcagccgcgacagcaaacccgcactgcaccaataattctcgtcgcacctgcaccctgcgaatattgactactcagctcttgctgccatagaggatggaatacgtcagcccagaaggacttcgcttggatggtcgccgaccaatggagatgcgacaaattcgtgcagagattggtgctgtatccaaagcagatggttctgccatttcgagatgggtaataccaaagtcttgctgcng

SEQ ID NO: 10366 - DNA, 190 bp, Glycine max
  unsure (1)..(190): unsure at all n locations; Clone ID: 701151016H1
actgctctcctcgatgaaaaatcattattagcttgtattgtacgcactattccagctggtggccgaattcgaatagttcaacgctcctaacaggcgggcaagatgctgcacctctacattggcatgattacaaaaggaagtatgggagctggatgactttgtagctagccatcnggaatattttggattg

SEQ ID NO: 10367 - DNA, 268 bp, Glycine max
  unsure (1)..(268): unsure at all n locations; Clone ID: 701151017H1
gacagcacagatattttctcaaagggaaatagcaccatttggcattttacaatttccaagctatggccanatcaactgggtcacttgtctttctctctattttcatttgctcctttcttgtaaacttagggaggggcacttannagtttgctaatggaatgctagaccaggaaagttggtgcgtagaaaaccttcaacaagtgatgttgcactgaatgatancattcatatggttgcattgcctngggtgattgcaaatgatccaacc

SEQ ID NO: 10368 - DNA, 171 bp, Glycine max
  unsure (1)..(171): unsure at all n locations; Clone ID: 701151018H1
ggtacncagaatntnnttagtaggaagtacntgaggaacctacaagctantngtancttggntggcatgcaagnaaatgcggaatngcnnggtctctgcttgtgttnactgctacatccagatnagcatagtgaggctagcctggcnttnnccattntactatgtggttca

SEQ ID NO: 10369 - DNA, 284 bp, Glycine max
  unsure (1)..(284): unsure at all n locations; Clone ID: 701151019H1
gggaaaaggatcgataatccgcgtctttttctgtgtatcccaagtaagcatcttcaagctctgctgaatcttcaatggcttctctactcaacatggtttctgttccatcaagaatatcaccaagctcacacacgagaaccattcgttcaatctcgncctggttttgcccaccattttctgtctcattttccnaggaggagattatcaatttangagcaaccagaaacnggatcctaatgaagttcaatctcaagggncggggtaaancaccatcnaaaggtggt

SEQ ID NO: 10370 - DNA, 268 bp, Glycine max
  unsure (1)..(268): unsure at all n locations; Clone ID: 701151021H1
catggaaaaataattaactcattttttcatgattaagtaaataaagttttaaattgaaacaataatgaagtagtaatctttgtagcacaatgaggtgttacaatgattactacattttagataattgcttggtggagaaaggtaagtataagagttgtgatagaggtagtaggggtcaaaanatccgctatggtgaaatagttatagatgtttgcaataatttttgccngcaactagctgtcntttcctggtttccctnagggcganc

SEQ ID NO: 10371 - DNA, 264 bp, Glycine max
  unsure (1)..(264): unsure at all n locations; Clone ID: 701151023H1
gacaacacaacgcaacacaacgcgcactctctcttttctctcttaacacaaaaaccctatcgttcttcgcggtttcgccgattctcgccatgccgaaagccaaatccgacgccaaagccgccgatagccggttgaagcgcaagggcgctggtgctggaaggaagcantcgaagaaagctgctaagggatctaacaagccaaagagactccaagcggtttctttcgtttcatgtccgagttcagagagcagttaagaaggganct

SEQ ID NO: 10372 - DNA, 268 bp, Glycine max
  unsure (1)..(268): unsure at all n locations; Clone ID: 701151024H1
ggagagattataaaattttattgtttttntttgtaaagtgaatcatccgttgatggtgcagtgccgtggaaattttcccccttaacccttctttaataatattcatattcatnctgcctttcttttncaaattaataatcgtttcattcacctattatgttactggcttgctnccttngtaatcccggtggctatgagccatatttcttccacctattttaattggggnggtnnacaagttgtttccccccgggnagaccnccattnt

SEQ ID NO: 10373 - DNA, 254 bp, Glycine max
  unsure (1)..(254): unsure at all n locations; Clone ID: 701151025H1
tgggcancagtgctccacattgcggtcggancaaaccacgaaagcttcgtggaggagttgctgaaactaatgtcgcgtgaagacttagaactgcaagatatcaagggtaacactgcattctgctttgctgcagcggttggaaacgtgcacattgctgagagaatgcgcagaaaaaatgcctccttgccaatgataaggggtggagaggatcactcctcttcattggctgtgtacaaggaagaagtgaatggctt

SEQ ID NO: 10374 - DNA, 262 bp, Glycine max
  unsure (1)..(262): unsure at all n locations; Clone ID: 701151026H1
ggcatcaattcaaaatgtatcatcaattataagcatgggtttgtggaacacaacgaatgcagtgtcttgccgctttcacaagtttggtgatgaccaaaagaatctggtcttccaaggtgatgccacgtcttcttccaggggcatagaactcacaaagttagacggtggaggaaaaccagtgggtggcagtgtggggagagtgttatactcttctcnagttgcacctttgggaaagctctacagtggncgcaantttgaaacc

SEQ ID NO: 10375 - DNA, 274 bp, Glycine max
  unsure (1)..(274): unsure at all n locations; Clone ID: 701151027H1
ggttgttgttttcagtgtagtggaagaatcactcccttatccatttccacaccacannatngnnngaaccaacgctctctcttcagcctccattctacgctctcccaacggccagtctctgacccgaagagcgaaccataatggaagagtaaattaccggaaaccgaataaccgtttctccgtgaaagcctccgccaaagagatgcctttgaccagcattcccgctctgctatgtannngggcatganaagctcgccgacgtgtngggtcactc

SEQ ID NO: 10376 - DNA, 267 bp, Glycine max
  unsure (1)..(267): unsure at all n locations; Clone ID: 701151028H1
ggagagagagaaactgagagaaattcgcaaaccctaatttcggaaagatcggcgatggctgcctccaaggatcgcgagancttcgtctacatcgccaagctcgccgaacaggccgagcgatacgaagagatggtggaatcaatgaagaacgttgcgaatctcgacgttgaactgactgtggaggagcggatttactttctgttgggtacaagaatgtgattggtgctcggagagcatcgtggaggatcctgtcttccattgagcaaa

SEQ ID NO: 10377 - DNA, 274 bp, Glycine max
  unsure (1)..(274): unsure at all n locations; Clone ID: 701151029H1
ggggcgaggtagccagagagtgatacaatacagagtgcgttgttgctccttcgccacaactccctgccaacatgggtatctccagagattctatgcacaagaggcgtgccactggtggcaagaagaaggcatggaggaagaagagaaagtatgagcttggtcgccagcctgctaaacactaagctgtcaagcaaacaagacagtcaaggaggatccgggttagangtgggaattgtgagttggagggcacttgagattggatacttggaattac

SEQ ID NO: 10378 - DNA, 286 bp, Glycine max
  unsure (1)..(286): unsure at all n locations; Clone ID: 701151031H1
gaaaggaaaggggaacccaaaccgaaaccctaaccctaacggagagatggcggagcacttgggcatcgatattcgggacggagaaggacagggtgaactgtccgttctacttcaagatcggcgcgtgcaggcacggcgacggtgctcccggcttcacaccaagccgacaattagccccaacattgggttctggtcgaacatgtaccaganggccggacatgaacantgagcattntaacnaacccggttaagccaacaaaccccattccccttgacccggacaagg

SEQ ID NO: 10379 - DNA, 275 bp, Glycine max
  unsure (1)..(275): unsure at all n locations; Clone ID: 701151032H1
aggagatagagtattacaaggagtatcaagccaaattaagaacccatcttggtgtagaaaaagccaataagatcataagcgaancttgtacttgatgagtttaggaaccaacgatttcctcgaaaactattacgtgttcccaacgcgaagactccacttcaccgtgtcacaatatcaggatttctactgcgtattgcggagaatttcgttaggggattgtacgcacttggagttagggaattgtccataactggtcttgttcccgtaggatgtct

SEQ ID NO: 10380 - DNA, 274 bp, Glycine max
  unsure (1)..(274): unsure at all n locations; Clone ID: 701151033H1
ggaaaaaaggaagaggaacgaagcaatcgcaagtngtctgttctgtcccgcgggagcagacgacctgtcttcatcgccaaacaacctcaaaaacattcatcaacgttcactattaatccatccatcattaagtaagaaaataaggttcgatttttttatctttgttttgcttctgatccatcatggaggtgccgagttcctgggatgcccttcgcaaacaggcaagaaaacttgaagctcagttggatgagcagatgaattcttatcgtaattg

SEQ ID NO: 10381 - DNA, 99 bp, Glycine max
  Clone ID: 701151036H1
ggttgtgtgggtaaatgttgtttgtcacttaacgttaatgccctccatattctttatttgtttcttgctatcaaactgagctgatacttcccctgaaaa

SEQ ID NO: 10382 - DNA, 253 bp, Glycine max
  unsure (1)..(253): unsure at all n locations; Clone ID: 701151037H1
cagtcatagaagacactacaagtattcccttgatgcgttatagttagttgcatacaaaatgaaatttaattcagagcttaattttaatattgatagaccccagattgaataagaagaaacatacacagtagtttttacacctgaacatccctcttccagtgaatcacataaaggtcatacatggcatgaatcaggacaaagctatcactcattggaattgatcagtaagtaaagattcagncagtatgggggc

SEQ ID NO: 10383 - DNA, 263 bp, Glycine max
  Clone ID: 701151039H1
taccaataagtaacaatcattttatctattattttttaaacaagggcttagactgtacgagataaagattatttatggttttcaggattattatggggtcccttaatttaaagtggaatcatcataaatcttcatggcctcttcaaaatgcctccgaaaactacttgaactctttcagcgccattagtgctccaaatctcagaacgtcttcgaccccataagagtcacaactcacaacctgaaaaggctgtgacatgtgttgg

SEQ ID NO: 10384 - DNA, 255 bp, Glycine max
  unsure (1)..(255): unsure at all n locations; Clone ID: 701151040H1
gagatccaaacgaaacgcaggagagacagacagagaagagaatggacgctattgattctgtgttcgatccgctcagggaattcgccaaggacagcgtcaggctcgtcaagcgatgccacaagcccgatcgcaaagaattctccaaggttgctgtgcgtaccgcgatccggtttccttgtgatgggattcgtgggttttncgtaagctcatcttcattcccatttaacaactcatcgtcggatcgggtaggtgggg

SEQ ID NO: 10385 - DNA, 259 bp, Glycine max
  unsure (1)..(259): unsure at all n locations; Clone ID: 701151041H1
gatcgaagcaaaaaatganaacccaaagtgcttctctcctgctgtctttttctctctcttgctatccttttggctagtngcactgctgcaagtgcaactccaagaagcgcagtgccaagccaccatgtttcaacattcaacagaagccttttccttccacttttctctttggaattggttctctgcttaccaggcagaaggagcagcaagtgtagatgggagangaccaagcatatgggacactacactagacagcata

SEQ ID NO: 10386 - DNA, 273 bp, Glycine max
  unsure (1)..(273): unsure at all n locations; Clone ID: 701151043H1
gatattcaaggaacatttagatggagggcgtccaggaggagataggatatataatgtctttgacaatcagcttcctgctgctttacggaagcttccacttgaccggcatctttctctccagaatgtaagaaaagtggtgtcagangctgatggttatcagcctcacttgattgccccagagcaaggttacagggcgcttgattgagggagctctcggttactttagaggcccagctgaagcttcagtagatgctgttaactttgttttgaaag

SEQ ID NO: 10387 - DNA, 261 bp, Glycine max
  Clone ID: 701151045H1
gaatggcatggttgcagttgcagagaatcatcaccaataccaagggaggtgctaatttgatctcaccgctcccacgattcttctcgaaatgttccccctatgttttgaaagttggaataccagagtttctaaacgggattgggaagggggttgagtcccacgttcctaagcttgaatctgaaatcggtgatttccagaaacttctcgtcattcgaacccttaaactcaagaagctcggtattccttgcaaacataggagtt

SEQ ID NO: 10388 - DNA, 268 bp, Glycine max
  unsure (1)..(268): unsure at all n locations; Clone ID: 701151049H1
gacagcacagatattttctcaaagggaaatagcaccatttggcattttacaatttccaagctatggccaaatcaactgggtcacttgtctttctctctattttcactttgctcctttcttgtaacttaggagggcacttanagtttgctaatggaatgctagaccaggaaagttggtgcgtanaaaaaccttcaacaagtgatgttgcactgaatgataacattccatatggttgcattgccttgggtgattgcaaatgatccaacca

SEQ ID NO: 10389 - DNA, 271 bp, Glycine max
  unsure (1)..(271): unsure at all n locations; Clone ID: 701151051H1
gggacagtgacttcggaattcccggtgcattttatattaagaacttcatgcaaaatgagttctacctcaagtctctaattctcgaagacattccaaaccacggaaccatccacttcgtatgcaactcctgggtttacaattccaaaaaactacaagactggtcncatnttcctttgnccaacaataccatatcttcccaggcgagacacccagctcccacttttgaagtacngagaaggaggatttgaggatgtaagaggggttggacngg

SEQ ID NO: 10390 - DNA, 262 bp, Glycine max
  Clone ID: 701151052H1
ggaacaacaagtcttacattaggtggaggatatttggaaacagctagcaactatggctctcatgcagcttactagctctcctgttgccttattgctccgtttcacagtaatatttgctctatgttacagaacaatggctttggtgaagttgccaccaaacgcttcatcagttcccggcggttttagcgtttggagattcgatcgtggactcaggcaacaaacaacaacataaaacactgattagtgcaatttcccacttatg

SEQ ID NO: 10391 - DNA, 269 bp, Glycine max
  unsure (1)..(269): unsure at all n locations; Clone ID: 701151053H1
ggctgtgagcttcagcaaaatgcgcgccctagcagctcagttctctaattatttatgcagaagaaaagttggggtcaatctgcgatctcgtaatttttcatcatataacagtaaagatgagctaaccatcgaggaagaagctgagagaaaagttggatggctattgaagacgatatttttgtccactgccaggggtagccgggatanccatttctttcccttatntgggagagnatttgatgccaacagtcctgtttcgcttttgcgtg

SEQ ID NO: 10392 - DNA, 263 bp, Glycine max
  unsure (1)..(263): unsure at all n locations; Clone ID: 701151054H1
gatgatgaaaagatggatgtttctacttcaaggaggtatggttcagagagctggatgtcaatggggaggaatgagcctacatattcggatcttctttcaggctttggggccagtggggatccttctcatttatccttgaaggatcaaatgagccctgcttattctggctagaaagcaatcattggatcatgaaggcaaacttcactgcctcatnccatggcctgtnntgccctctagtctgtncactgagccncttgggactc

SEQ ID NO: 10393 - DNA, 258 bp, Glycine max
  unsure (1)..(258): unsure at all n locations; Clone ID: 701151055H1
gagacttgacagaaagaccaacactcactacacctcttcccccaccacatagtgacatgccagtcattgatttctctaagcttagcaaagggaacaaagaggaagtcctcactgaacttttcaatcttgcaactgcttgtgaagagtggggatttttcagnnaattaatcatgaaattgacctcaatctgctggagagcatcgagaacctgagcagggagtttttcatgctactttggaagagaaacagaaataccct

SEQ ID NO: 10394 - DNA, 256 bp, Glycine max
  unsure (1)..(256): unsure at all n locations; Clone ID: 701151056H1
gggaactttgtgagctcgtttcagcgtcctgtgttgtgtatttttgaccggaatttcgagtngccggtggcgattcagcatgattttcgctaccggccgcttgttcatgatgtgcttgggttgaggctgaataggctgagtgtgcagggggagaagggtgggatgaggtcttatgagttggacagtgctgattcgtttgggttgcaaatgggtcgctggagtttccggaggttgcggtggagattgagacgccant

SEQ ID NO: 10395 - DNA, 259 bp, Glycine max
  Clone ID: 701151060H1
gggtgtatttcctttcctcatattctctattgagcacgagcactttgggactcacagcttcgtacttttcttctttctctttcccctcgaactcaaaaataaggtgcatggacgccggcggttagattccgatggccgtgaattcaacaccgccgaggacatgtggagggaacaaggcgggtgaccctagcaagaagacccagtggtatcgtgacggcgtctcctactgggagggtgttaaggcaaatatggatggggt

SEQ ID NO: 10396 - DNA, 261 bp, Glycine max
  unsure (1)..(261): unsure at all n locations; Clone ID: 701151061H1
ggaactcataatattcatcactagaagtgtnggatgcatttctatttctaacnnnnnnnnnnnnnnnnnnnnnnnnnngagaaagaaaagaatggcaaagttaataaaattctttgagttgaacacaggggccaagattccttctgttgggttaggcactgggcaagctgagcctggtgttgtagccaaagctgtcaccacagccatctggttgggatacaggcatattgatgtgctccagcgtataaccatcaagccngg

SEQ ID NO: 10397 - DNA, 264 bp, Glycine max
  unsure (1)..(264): unsure at all n locations; Clone ID: 701151062H1
ggcactacaaatcagttttctacttgaatcttcgttatccttctttttttctccttgaactcgaatattcactatggcagatgaggtggttctgctagatttctggccaagtccatttgggatgagggtcaggattgcacttgctgaaaagggtatcaaatatgagtccaaagaagaggacttgcagaacaagagccctttggctcctcaaaatgaacccggttcacaagaaaatcccggttctcatccacatggcnaacccnt

SEQ ID NO: 10398 - DNA, 278 bp, Glycine max
  Clone ID: 701151065H1
catgaaaactgcagctgggattgtatatcttcttgcttgtttgttagaaccttttatcccatctttcactcttgaagtatttaagcagctaaatttgcctgcggatacacatgttttcacttagtgatgataagggagatgttgatagggtaaaaagaccctgggatatcataagtgctggtcataaaattggaacacccaagccattgttcagggaactgaaagatgaagaggtggagttctacaggaagaagttcgcaggaagtcaagctgatagg

SEQ ID NO: 10399 - DNA, 286 bp, Glycine max
  unsure (1)..(286): unsure at all n locations; Clone ID: 701151067H1
gttcatgaggaagctaagatagtaggaaaaacaagctatgccagcaacttgtctgggtatgatgaatatgttccaatggtagacatacctgttgatgctggttggaagaagcaagcatctctacagaggncttacacctctaaaggagcactcctcctgacacncagaaaactcctgaangggattccaagctccggatgtggggtaagcangtcctantcttccttcttgactgtaattaaactcctccttacgccaggttgcatanccctgtggancaaanaat

SEQ ID NO: 10400 - DNA, 251 bp, Glycine max
  Clone ID: 701151068H1
ggtgatggaagaggaagaatacaactatagagaagtgaggcttccttctctgatagcagtggtgggcgagccagagctggggagggaaacaggggaaaggagaagaggaagggacataataatagccatagatcatggcccccaataccaaacatgctttcgattgggctctggttcacctttgcaaggtcgtgataccatccatctcgttcacgccgtttccgggtcttatggagaattagccattgagg

SEQ ID NO: 10401 - DNA, 245 bp, Glycine max
  unsure (1)..(245): unsure at all n locations; Clone ID: 701151069H1
ggagcaaaaccctatatccctatttttcttcctcagtagtgtcatttacgcttctcttctctgcagcaactatgcctaaccctaaggtcttcttcgacatgaccatcggcggtcaatctgctgggccgcatcgtgatggagctctacggccgacgtcaactccccgcaaccggccgagaantttccgcgcgttttgcnaccggcganaaaggcgtagggcngaacggcaaaccccttccataana

SEQ ID NO: 10402 - DNA, 216 bp, Glycine max
  unsure (1)..(216): unsure at all n locations; Clone ID: 701151070H1
gggaagctactcctgcagcaaagatgggacaagattttctccacaggaagcgcaagggtggggcggattgttatgtctgcagcantngtgcatctgacgcctgtgactttggagttaggtggaaaatgtccagcactaattgatctcttcttcttcttggggacaaagaggtggctgtgaagcgattttggtgggcaaatttggggcctgtgcngg

SEQ ID NO: 10403 - DNA, 261 bp, Glycine max
  unsure (1)..(261): unsure at all n locations; Clone ID: 701151071H1
ctctataatataacctttgcaatttggttgaaagaaattctacttcaataccacttgtgaggttgctgataattttggagtgcgtatatttaagtaagtttcaattactagaaaaattaaaaagattgtacaatgaatttgagggtttgatgtgttgtgtattctagtgaacccattaacaacaacaatgatgtgctgcattcattattagtttattgtacatttggcattagggcttagtctaactccatttcnctattt

SEQ ID NO: 10404 - DNA, 160 bp, Glycine max
  unsure (1)..(160): unsure at all n locations; Clone ID: 701151072H1
ctttacacttgcaaatttcctttggcgatgattctgtgggagctggaggtaaagtgaatttttctgtcacttgctattttgcacagcagtttgaatcacttagaaaaaaatgctgccccaatgaggttgattngtgcgatccatgagccgttgccgggag

SEQ ID NO: 10405 - DNA, 264 bp, Glycine max
  unsure (1)..(264): unsure at all n locations; Clone ID: 701151073H1
gggatttctgagattggatgcgaganttctgagaagaaaagagaagatcggtgagtgangaagcaaatagcaatngcaccgcnaccgtcaccactgccactgccnctgccactagcaacagcagaatgggaaccttgggcagagttttctacgccgtcggattttggatccgagagaccggccaagacatcgatcgcctcggcnctcgtcntccaaggcaactnancctctttcaagaaccagntggctaggccatcgancttt

SEQ ID NO: 10406 - DNA, 254 bp, Glycine max
  unsure (1)..(254): unsure at all n locations; Clone ID: 701151074H1
gatgccaaatccttttcattcaagatgaagatgattcgcattcttttcatctttgctcttctatccttcacttcccatgcttctaatgtcaatgacttctgtgtggcagacctgaagggtccagatagccctactggctatcactgcaagccacctaaaacagtaacatcacatgactttgtgttccatttaggccctggaaacattcaaacgtgttcaagnccgcaataacctctggatnngncaaagatccc

SEQ ID NO: 10407 - DNA, 101 bp, Glycine max
  unsure (1)..(101): unsure at all n locations; Clone ID: 701151076H1
ggantnagtantgagantngagtttcaagggttaccggnaggttgcattnctantatactctctcgnactangccggcggacgngtgtaggtnttccgtcg

SEQ ID NO: 10408 - DNA, 137 bp, Glycine max
  Clone ID: 701151077H1
tatgaaatgcaattcaaaatcgttacaccataatgatttggtttctaaatctctctctgaaattagattccatactatgtttatcctcttttctttgttgtaaatagcattttgaatcaatatattggcatgagtca

SEQ ID NO: 10409 - DNA, 272 bp, Glycine max
  unsure (1)..(272): unsure at all n locations; Clone ID: 701151078H1
ggaattgctagatgaaatggggccatcctagtataccactaagtgttatatccaaagctgcagagctccagtttcagtatactgttgataaagtatttctgggtaataggtggttgcggaaagcaacagggcattcaacccaatatttccatatatgggtgactcatttgagagaagaagtgaagctctcctactgagagctacagagtcaagcaagctncccttgagaacntcctaaagggggaggngatagggaaaatgccggatgcata

SEQ ID NO: 10410 - DNA, 262 bp, Glycine max
  Clone ID: 701151079H1
gagtgtaagcaaattgagctttcaacaatgacaataccaaatctcacccatttcaggtaacggtgaataagaaacaatttggtttaattttggagctgaagtgatgataagagtttctttgtcgcattgatgaggtaaaactttccctccttagctactacctttttggcattttggcaaccatttacaaattgagcataaaggaaagagctgaaagtgtgccaacttttttccttaaagatccttggtatcccacccctca

SEQ ID NO: 10411 - DNA, 280 bp, Glycine max
  unsure (1)..(280): unsure at all n locations; Clone ID: 701151080H1
aggagatngagtattacaagggagtatcaagccaaattaagaacccatcttggtgtagaanaagccaataagatcataagcgaancttgtacttgatgagtttaggaaccaacgatttcctcgaaaactattacgtgttcccaacgcgaagactnccacttcaccgtgtcacaattccggnatttctactgcgtattgcggagaattttcgtaggggattgtacgcacttgggagttaaggaattgtcccataactggtcttgttcccgtaggatgtctc

SEQ ID NO: 10412 - DNA, 104 bp, Glycine max
  unsure (1)..(104): unsure at all n locations; Clone ID: 701151084H1
ggggacccattgaacttatggtcccaacaaactaacaaaccttgtggtccaatttgcttntcttggttccgactctggcttgcttntcctcccaaactttcaac

SEQ ID NO: 10413 - DNA, 263 bp, Glycine max
  unsure (1)..(263): unsure at all n locations; Clone ID: 701151085H1
gacacatcaaacacataagtttgattgtcctagctttgagcaacatcatgaagatctccattctctttatcacaatcttttcttgtggttttcttggaaatgttgtttcaaatgctagtcctcttccatatgangctatttttaacttnggtgactctataagtgatactggaaatggctgctcatnaaccacccacctatgnncntggcaaccagtccttangggttcaacanactttaaacatccctnccgggacggangt

SEQ ID NO: 10414 - DNA, 264 bp, Glycine max
  unsure (1)..(264): unsure at all n locations; Clone ID: 701151086H1
gaggcgcggcgggatcagcacaagattgcaaaatgaagttcaacattgcaaatcccaccactgggtgcccgaagaagctggaaatcgatgacgacctgaagcttcgagcattttgggacaagaggatctccnaggaggttcttggtgatgctcngggtgaggncttnaaangatatgttttcaaaatcaccggtggggtgaccaaacnaggcttcccctatgaagngtggatgctgacccctggtcacggttcgacttngnnnc

SEQ ID NO: 10415 - DNA, 264 bp, Glycine max
  unsure (1)..(264): unsure at all n locations; Clone ID: 701151088H1
gggaactttgtgagctcgtttcagcgtcctgtgttgtgtatttttgaccggaatttcgagtngccggtggcgattcagcatgattttcgctaccggccgcttgttcangatgtgcntgggttgaggctgaataggctgagtgtgccagggggagtagggtgggatgaggtcttatgagttggacaatgctgattncgttttggggttgcaaatggggtcgcttggagtntccgggaggttgcngtggagattgaagacgcaatt

SEQ ID NO: 10416 - DNA, 264 bp, Glycine max
  unsure (1)..(264): unsure at all n locations; Clone ID: 701151089H1
ggcttttgtacaaaatttganataganataatctgtgctgtggtagtggaagcatcgagancatcgcagcgatggcnagagtnggtagaatgaagttgggntcacnaggcagggnggtntctttgcagggntttgggcgcatgaggcatgtctgcgttntatgggtcccncccaagcctgnacccgatnangattgtctnatccacccacgctgntcnaaacnnggtgtcaacttttccttgcacactttctggacgncnatgg

SEQ ID NO: 10417 - DNA, 141 bp, Glycine max
  unsure (1)..(141): unsure at all n locations; Clone ID: 701151092H1
gggctgagtccngnattctgaggnnccancncctnctanntctctctcccatccaaggttganctttcattccattttttggatnccaagactcaggctgggaaactttggaggttgntgggtgcagaagggnaangntgg

SEQ ID NO: 10418 - DNA, 150 bp, Glycine max
  unsure (1)..(150): unsure at all n locations; Clone ID: 701151093H1
gaagaaaacagcagttggatcaatatacatgactgtttcacacctcttgataaaggagttaccaaattttcgggtggatttatctgggctagtgagaaaacaggatttagacacctttatcttcatggtgcaaacgggacttgtttangg

SEQ ID NO: 10419 - DNA, 133 bp, Glycine max
  Clone ID: 701151094H1
ttacgtttaatttctgtacacacggcaacacagattccaaattccaaaagggaatcatcaatcatatcataatatggtctttttcagcagattgagccaatgcttcatgggattctgcggatgtagaggagta

SEQ ID NO: 10420 - DNA, 258 bp, Glycine max
  unsure (1)..(258): unsure at all n locations; Clone ID: 701151095H1
ctttcccaagcctttcaatgtaaactggcctaccttccttgtcacctccatgatacccttgagggtaatgctgcaacacttcttccagctcttcaaattcaaaatccttcaaatgtcagaacagacatagacttaaccaaccaaatcatgtatcaagtgcatcctagcatagaacacatgttctaaattttgaaacgtacaaacatncaaaacaattgtactaatctgcttaaagtannaagaagaaaaanatgattt

SEQ ID NO: 10421 - DNA, 248 bp, Glycine max
  Clone ID: 701151101H1
tatgacacaaatgttcgaggcaacaagaagacaagttcctgtaatcacttagctgcagaaaatttcgaccttcctcagcatgccatgcagcagcaacaggacaacttcattcgcggtcaaggaatcactgcagaaggcaacatctttgatgaagctaacatgcccaacaatcatcacatgtttgcaagagaagaaggtcaatttgaccgtttcaaagctttgaatgctccctttgagaccaatcacaa

SEQ ID NO: 10422 - DNA, 202 bp, Glycine max
  Clone ID: 701151102H1
cttcttcccttgattgatggactaactcttcatcaacaacagataaaaattctaagtcttgaacttctaaaagttgatcagtttgttgttcgtctcttatgaaattgtgtaacacaaaaaaagcattgataattcttatttgtgtcttatataaaaaaatgaaggagttctaatatactccatctttttttcaagatcctaa

SEQ ID NO: 10423 - DNA, 133 bp, Glycine max
  unsure (1)..(133): unsure at all n locations; Clone ID: 701151103H1
caagctgttcaatgctgtaaataaggcacnagctgctcagaaaggactgaacccctcaaggactaaggatgcnaaagagatacgaaaacgaaccaaacaggccttcttttcagagttagggaaaccatcattc

SEQ ID NO: 10424 - DNA, 257 bp, Glycine max
  unsure (1)..(257): unsure at all n locations; Clone ID: 701151104H1
gacagaacgaagctgctatcgataacatatttcacttgagacagncatctttatnctacgcaaganaagaatagaaaatggatatcaggttgatggatttggactctccattgttcaacactctgcaccgaatcatggatctgacagaggacgcagagaagaacttgaacgctccgacgcggacatacgtgcgcgacgcgaaggcaatggctgcgactcctgtcggacgtgaaggagtaccctaactactacgtgtt

SEQ ID NO: 10425 - DNA, 254 bp, Glycine max
  unsure (1)..(254): unsure at all n locations; Clone ID: 701151105H1
gacagaacgaagctgctatcgataacatatttcacttgagacagttatctttatctacgcaaganaagaatagaaaatggatatcaggttgatggatttggactctccattgttcaacactctgcaccgaatcatggatctgacagaggacgcagagaagaacttgaacgctccgacgcggacatacgtgcgcgacgcgaaggcaatggctgcgactcctgcggacgtgaaggagtaccctaactactacgtgt

SEQ ID NO: 10426 - DNA, 241 bp, Glycine max
  unsure (1)..(241): unsure at all n locations; Clone ID: 701151106H1
ggataaagagnaggancaangacagnatcgaactgatgcnaanatanaggagcagagataggatttnttttggccattaaattactttcttttgaggtttatgactgtgttggggttcactatgagtggtgttcctaaganatctcatgaggnttctgttcatcagtcttcaaagcatccacatcaagattcaggtacatattccangttnatgccatcagtttcanatnnccaccatatt

SEQ ID NO: 10427 - DNA, 229 bp, Glycine max
  unsure (1)..(229): unsure at all n locations; Clone ID: 701151107H1
gacgttccaataatgccccatttttctctctcccctctctcctgtgcaccttctcctctcccacctcgccgccgaatctttctcgctcctccccgaaccgccgcatcttccgccaccgacgccgcttcctcttctanttcctcttccgcttcgaatttcgctcccaaagtcgtcgtcaccagagagcgcggcaagaacgccaagcttatcnnngctctggctaaacatg

SEQ ID NO: 10428 - DNA, 237 bp, Glycine max
  unsure (1)..(237): unsure at all n locations; Clone ID: 701151108H1
gagggcgaggaagccacatagagacacaatacagagtgagttgttgctccttcgccacaactctctgccaacatgggtatctccagagattctatgcacaagaggcgtgccactggtggcaagaagaaggcctggaggaaaaagagaaagtntgancttggtcgccagcctgctaacactaagctgtcaagcaacaagacagncaggaggntcctnttagaggtggnantntgnact

SEQ ID NO: 10429 - DNA, 241 bp, Glycine max
  Clone ID: 701151109H1
ggttctctgtgaagagaaggaaaatgcaaaagcagaatgagaatagggagtggtagggttaattagagaggaaattggtaatgagaagcgtgtgcagtttacatgccccaattatgtggataataaagcaagcaagcactaggctgctgacctttgtgtcagtttaaagatgagtggaaaatcttcaagacttgggacatcttcataatgtaattaaagtgaaatagctgaattctcacta

SEQ ID NO: 10430 - DNA, 214 bp, Glycine max
  unsure (1)..(214): unsure at all n locations; Clone ID: 701151112H1
ggcacaagtttgntgagatagctagaagcaatnagatgaaaatgaaagtgcttgttttgtttgttgctacagttttggtagcatatgaatgccatggctcagactaccagangttccctctccaaatgaaaactgggtttggtgggcaatacagcaatgaggtggcatgtgccagttggaggctggcgtggaagcaaacaacgtatcaagtggc

SEQ ID NO: 10431 - DNA, 240 bp, Glycine max
  unsure (1)..(240): unsure at all n locations; Clone ID: 701151113H1
gagtgcagtatcgttgagaaataaggggaaaaaatggtgtcgctgaaactgcagaagcggctggccgcaagcntgctcaagtgtggcagaggaaaggtgtggcttgaccccaatgaagtcaacgaaatctccatggccaattctcggcaaaacatcaggaagttggttaaggatgggtttatcatcaggaagccaaccaagattcactcacgctcgcgtgctcgtaggatgaaggaggca

SEQ ID NO: 10432 - DNA, 159 bp, Glycine max
  unsure (1)..(159): unsure at all n locations; Clone ID: 701151114H1
catttcctgagattatcaatagaatcgatccaactacccaagtattttttatgtctatccaatgcatttactacaaatggaacatatatagattcaagtatcaagtaaaanatnccatgtatcaaaacangttatttggtgacagcagatgaaaggggt

SEQ ID NO: 10433 - DNA, 247 bp, Glycine max
  Clone ID: 701151116H1
ggcacaagtgagtttgttgatcgagataactagaaacagtgtgatgaaaatgaaggtccttgttttcttcgttgctacaattttggtagcatggcaatgccatgcgtacgatatgttccctctccgaatgaacactggctatggtgcccgtactccggaggtgaaatgcgcaagttggaggcttgctgtggaagcacacaacattctttggctttgagaccattcctgaagagtgcgttgaagcaac

SEQ ID NO: 10434 - DNA, 237 bp, Glycine max
  unsure (1)..(237): unsure at all n locations; Clone ID: 701151118H1
ggagtacattgatgacatttacaagttctacaaacttgttgagaacgagagccgcccccacgactacattggttcacagcctgagntaaatgagaggatgagagctattctggttgattggctgatagatgttcacaccaagtttgaactttcacttgagaccctttacttgaccatcaatatnnttgaggggttttnagcagttaagacanttccagggagggaactgcattggct

SEQ ID NO: 10435 - DNA, 167 bp, Glycine max
  unsure (1)..(167): unsure at all n locations; Clone ID: 701151120H1
agagcgctaagttaatgctaagaccctttaaaggcgacgagttaatngctaagaccctttaagggtgaagagttaaagcacaacgagtattgtgatggaaaccactgtgggaacccgacgggtttaatcacaagcgcgacaagtanaactattttgaggacaattgc

SEQ ID NO: 10436 - DNA, 233 bp, Glycine max
  Clone ID: 701151123H1
ggaaaaaggtgactgtataattgatggtggtaacgaatggtatgagaacactgaaagaagagagaaagaggtggctgaattgggtctgctctaccttgggatgggagtttctggtggtgaggaaggtgctcgtaatggtccctctttgatgcctggtggttcgtttgaggctttcaaatacatagaagatattcttctcaaggtggcagctcaagtacctgacagtggtcctt

SEQ ID NO: 10437 - DNA, 148 bp, Glycine max
  unsure (1)..(148): unsure at all n locations; Clone ID: 701151124H1
ggagggtgtgaattctaaaaggagagnncanctgagctggtcaganaatcactggcatcatccttgggttttgagttcctgacgnagnagccttacantcctccatccngggcatcccatctccaccctttaccttcccacttcttct

SEQ ID NO: 10438 - DNA, 235 bp, Glycine max
  Clone ID: 701151125H1
gaacccagttctcacagagtatgctgtgcaagacttaaatgtgaacacaaaactcccatttgcggataactcttttgacatcatcactaatgtggtgagtgttgattaccttacaaagcctcttgatgttttcaaggagatgtgcaggatacttaaaccaggtggactggccataatgagcttttcaaaccgatgcttctggacaaaagccatttctatatggacatcaactggg

SEQ ID NO: 10439 - DNA, 233 bp, Glycine max
  unsure (1)..(233): unsure at all n locations; Clone ID: 701151126H1
gaggcctccaaatattttcctttttagctttgattagagtggcctagttgttgtttttctcaatgagaagggcttccactatgcattgcgcactttggcgcttctgtgttcccttgttgctacttgctagcttcagttatgcaccttttgttttggcgacncctgaaatttcagggaatgaagtgagcactgatggaaaggttttaaatgaagagttagcaaaacctaatcta

SEQ ID NO: 10440 - DNA, 242 bp, Glycine max
  Clone ID: 701151127H1
ttctcatattttggagaatccgaaaaacacgttaaagaaagtcccattcccactaccgaagcaaattaagaagatgaagcagcagagagtggagtttatgggcatgggcatgggcatgggcatgggcctgggccttttggtggtgatgatggcatgtgggtcggcgagtggtgcggatgatttggcaaccaagtgttcagcggtgattcagaaggtaataccgtgtttggatttcgcgaagg

SEQ ID NO: 10441 - DNA, 206 bp, Glycine max
  unsure (1)..(206): unsure at all n locations; Clone ID: 701151128H1
gatagcctgcctcgtcacaaaatactgaacgccgcagctctgtggttgatcgacgcattcttcacttcaatcccacaatgtctataacgcacagcctcaccacttcactctcttcttgcttcctctgctttnttagctccctctncccttcaattccngaggacaggtttcgttgcctgtgaagagcgtgagcatttgcaantnct

SEQ ID NO: 10442 - DNA, 111 bp, Glycine max
  unsure (1)..(111): unsure at all n locations; Clone ID: 701151129H1
gntcacaacatcatagnnagcactatagtacannnaggacattcattgcatnctatggctacccttattgctcccagnaaccactctccccaagatnatgctgaagctctt

SEQ ID NO: 10443 - DNA, 177 bp, Glycine max
  unsure (1)..(177): unsure at all n locations; Clone ID: 701151130H1
ggaggaaagtgagtgagagaaagagatncgcagacacagagcagaatggcttctacccaatgtttcttggcaccaccatggctcttaccacccctggccagtgcccagatccccattcactacgcatgcttggttaggcaccaagcctaaccagcttgtttgcaaggcacagaaaca

SEQ ID NO: 10444 - DNA, 139 bp, Glycine max
  unsure (1)..(139): unsure at all n locations; Clone ID: 701151131H1
gacagcatntntatcantaatctattttatactntacctacattttgatanttttctttgtagttgatagccatggctacccgtggaaagcttgnggttgacattgntctcaagtccaacgcagacaagtnctggcanc

SEQ ID NO: 10445 - DNA, 98 bp, Glycine max
  unsure (1)..(98): unsure at all n locations; Clone ID: 701151132H1
ggccaattcagatcgcagacagacacagagagtgagagagggagatggggagcgacagcnngtgcagagaagtcggtgcagaaagagaaggaggagat

SEQ ID NO: 10446 - DNA, 241 bp, Glycine max
  unsure (1)..(241): unsure at all n locations; Clone ID: 701151133H1
ggaacagattgtgtgatgcttagtggtgaaagtgctgctggggcatacccagaacttgctgtgaaaatcatggctcgtatctgcattgaagcagaatcatcccttgactatggtgccatcttcaaagagatgataaggtctacaccattgccantgagtccattggagagccttgcatcatctgctgtccgcacagcaaacaaggccaaagnaaaactcttgttggtactgacncggggng

SEQ ID NO: 10447 - DNA, 232 bp, Glycine max
  unsure (1)..(232): unsure at all n locations; Clone ID: 701151135H1
ggcacaagtgagtttgttgatcgagataactagaaacagtgtgatgaaaatgaaggtccttgttttcttcgttgctacaattttggtagcatggcaatgccatgcgtacgatatgttccctctccgaatgaacactggctatggtgcccgtactccggaggtgaaatgcgcaagttggaggcttgctgtggaagcacacaacatcttgggctttgagaccnncnagnaggtg

SEQ ID NO: 10448 - DNA, 236 bp, Glycine max
  Clone ID: 701151136H1
aaagaggttcaagggatcgtacggtaacgctaggccgaagaaagagaagatgatagagcgcatcaaggacaaggtcgaagttcccaggtccactccttggcctctccctttcaagctcatctgattccctattttattctaggctttccgctcactcatatcacatatctactctctcgttaccattttctattcaattcgattttcacttttatgctctctctttggttttatca

SEQ ID NO: 10449 - DNA, 238 bp, Glycine max
  unsure (1)..(238): unsure at all n locations; Clone ID: 701151137H1
ggaaagggagagagagaggtcaattaatcaagaaatagagagcaaattaaagcatagccagtatggtgcactgtgtggtccttagcatatccagctcaaggccacattaaccctatgcataatttctgcaagctcttgcaacaacaaggtgtgaaagtaacactagtcaccaccctttcctacagcaagaacttgcagaacatacctgcttctagtgcattganaccattctgatggt

SEQ ID NO: 10450 - DNA, 231 bp, Glycine max
  unsure (1)..(231): unsure at all n locations; Clone ID: 701151138H1
tgatcgagactcggaggcactccatactcaactcttccacactccaagagtgnggcacagaatctcgatacgtctcatttaccagaaanggtttntggggaaaacactttgattctaaaacacttgagcagtggcaccaacattcatnntaatncatgngatgctctacgtggntggaaacaggaagcanngccgccagntaaagntcccncggcgnnnnnntgggaancc

SEQ ID NO: 10451 - DNA, 237 bp, Glycine max
  unsure (1)..(237): unsure at all n locations; Clone ID: 701151139H1
gggtggtgtgcgtgagagtgaagcgaggaagcgagaagcgacatggatccagacgcgttggcaaaggcattcgtggagcactactactccaccttcgacaccaaccgcaacaatctcgccaatctctaccaggaaggttccatgctctctttcgagggtcagaagatccagggctcccacaacatncgtcgccaaactcacctcccttcccttccaacagtgccagcactccatcac

SEQ ID NO: 10452 - DNA, 232 bp, Glycine max
  Clone ID: 701151140H1
gacctcaaaaaacaaaaatcatttactcactcgagaaagcgaaaagcacagaatcaaaagaagagttcttttttgagggagaagagttcttttttgagagagattgagatggcttcgacgaagaagatcacactgaagagttcggacggcgagaccttcgaggtggaggaggcggtggcggtggcggtggatcccagacgatcaagctcatgatcgaggacaactggcgccg

SEQ ID NO: 10453 - DNA, 233 bp, Glycine max
  Clone ID: 701151141H1
gaagacaacagtgctcccttgtttcttgacactggctcatgctctcagtccaacacagactgcaggagtaggtatgtttatggagagaaagaggaggtggatgagcatgctttcttcacagaaccttgtggtgttatgaaaagcttctctgcttcctctatggatgactcatggcaactcacaccattgactatgagctcctcatcttcatcttccaagcagaggagttcctt

SEQ ID NO: 10454 - DNA, 240 bp, Glycine max
  unsure (1)..(240): unsure at all n locations; Clone ID: 701151142H1
gtgtcacagctttacatgtgcatacgttgaaactgaagtgtctttnctgtccaagataactaaaagcctaaaaccacagaagaagattcttgaaggaattttctatctattttaaggttgatgctgtcgatcgcaacttgttcataactgtttgtgtttgtgaaataactttagttttcagatgtattattactgatattaaaaaacagtatatgtctggtcagtaggtacagggaagaa

SEQ ID NO: 10455 - DNA, 103 bp, Glycine max
  unsure (1)..(103): unsure at all n locations; Clone ID: 701151144H1
accccttctgctccatttctaattccaccatattggaacaantccttggccacagattttctttcttctctattattctgccaggatcaaataacaaaaaaaa

SEQ ID NO: 10456 - DNA, 205 bp, Glycine max
  unsure (1)..(205): unsure at all n locations; Clone ID: 701151145H1
ggctnatggcactgcttatcacaangcatgcttcaagtgctctcattgcaaaggaaccttgaagctcagcaactattcctccatggaaggtgttctatactgtaagcctcattatgagcaactcttcaaggagacaggatctttcaagaagaacttccagtcacctgctaagcaagctgtcaaaanaactcctgagctgacaagg

SEQ ID NO: 10457 - DNA, 179 bp, Glycine max
  unsure (1)..(179): unsure at all n locations; Clone ID: 701151146H1
ggcatcaattcaaaatatatcatcaattataagcatgggtttgtggaacacaacgaatgcagtgtcttgccgctttcacaagtttggtgatgaccaaaagaatctggtcttccgaggtgatgccacgtcttcttccaggggcatagaactcacaaagttagacgntggaggaaaaccat

SEQ ID NO: 10458 - DNA, 249 bp, Glycine max
  unsure (1)..(249): unsure at all n locations; Clone ID: 701151147H1
ggcagtgagaagaagagggggtcagagtgagaaagagaaagagagaattcgtaaaccctaatttcggaaagatcggcgatgactgcctccaaggatcgcgagancttcgtctacatcgccaaactcgccgagcaggccgagcgttacgaagagatggtggaatcaatgaagaacgttgcgaatctcgacgttgaactgacggtggaggagcggaatttgctttctgttgggtacaagaatgtgattggt

SEQ ID NO: 10459 - DNA, 126 bp, Glycine max
  Clone ID: 701151148H1
gagagagttaaagatagctggcgagttgtgaatcacagagatattatacctacggttccccgattaatgggttattgtcatgttgagcgactgtatttcttgctgcaggggttttaagacatgccc

SEQ ID NO: 10460 - DNA, 199 bp, Glycine max
  unsure (1)..(199): unsure at all n locations; Clone ID: 701151149H1
ggggacgcataggtaacgaatttaccgttacctgtggcgtcgcgttctcagatccctctctctttggagagaacgccccaacaatctaaatctgcatcgnnnnnnnnnnnnnnnnnnnnnnnatacttcatttatggggttttattagctacgctacttgtttgctgcaggctgccaacgaaaaggtcaaggcattttg

SEQ ID NO: 10461 - DNA, 140 bp, Glycine max
  unsure (1)..(140): unsure at all n locations; Clone ID: 701151150H1
ganaanaacacagcgtcctagatttcctcttctctgcttcggaagaaagngaaaacanacagaacaatggcgttcgcttctttcctcggcagagtcctcttcgcttctgtcttcatnctctnctggcttaccaacanttt

SEQ ID NO: 10462 - DNA, 232 bp, Glycine max
  unsure (1)..(232): unsure at all n locations; Clone ID: 701151151H1
ggttctagtgtgtgattgtttgtngttgtaactcgttcttcttcttttgttgttctgtgtttgtgtttgttttttctctcacctgaaaatgtcttgctgcggtggtaactgtggttgcggaagtccctgcaagtgcggcaacggctgcggaggctgcaagatgtacccagacttgagctacactgagtcaaccaccaccgagaccttggtcatgggantggcncntgtaagg

SEQ ID NO: 10463 - DNA, 232 bp, Glycine max
  Clone ID: 701151153H1
gagagcgattcggtaaattttcgtcttctgagtatagaagagaggcgttcccacgccgtcttacgtcgctttcgccgattccgagcctttgatcgaattcagcagtgaagatgtaagtgtagctgtgactgatatcttgaagctacctctgatggataaaagcaatggctgcagcttctctagtatattttcaattgctgtcttttcaagtgccatttttgttgtctccttg

SEQ ID NO: 10464 - DNA, 184 bp, Glycine max
  Clone ID: 701151155H1
ccgatcgcatagctcgctcgcaaccaccatgccttcccgaagaagaactctcttgaaggtcatcattctcggtgacagtggggtggggaagacatctttgatgaaccaatatgtgaataagaagtttagtaatcagtacaaggcaaccattggagcggattttttaaccaaagaagtgcattcc

SEQ ID NO: 10465 - DNA, 232 bp, Glycine max
  unsure (1)..(232): unsure at all n locations; Clone ID: 701151156H1
ggagcatagtgaaaagttcaattgttgaagatgatgagacacccataaggagtggtgaggaaggtgttgagtctctgccttgtgtgatatcaaacatatcctttgatcttgatcaagtgaagaaaatcaagtccaagctaggantgacagtaaacgatgtanttactggggcaattttctntgggattaggcgtncatgcaagagattgacataaggcaggcnacagcnttt

SEQ ID NO: 10466 - DNA, 234 bp, Glycine max
  Clone ID: 701151157H1
tctctagtctccagtaagcttgaaattagttttccatctattcattttcaacaagggaacatttccccatacaaacaaagactctataaatgtataaatgtataatgtaccacatttcaagttcattaaaattttatgggctactcaaatggaatacatgtaagtagtaaaagacataaattaagctcataccagcatattcatgaagctgaggaatacatataacaaaatgta

SEQ ID NO: 10467 - DNA, 211 bp, Glycine max
  unsure (1)..(211): unsure at all n locations; Clone ID: 701151158H1
gactcaccacttnnaaacactcataacacaaagcacaaagcaaagctcatccttgagttaaaaaatggcagcagcttcttccatggctctctcatccccatccttggctggcaaggccgtgaagctgggcccatcanaccccagaagtgggaagggtgagcatgaggaggaccgtcaccaagcaggtctcctcaggaagcccatggtacgg

SEQ ID NO: 10468 - DNA, 229 bp, Glycine max
  unsure (1)..(229): unsure at all n locations; Clone ID: 701151159H1
ggagttggggaaattgcttgctggtgtcaccattgctcatggtggtgttcttccgaacattaaccctgttttgttgcctaagaagactgagagggcttccaaggagcctaagtctccatccaaggcnactaaatctcctaaaaagtcttaactgacttagtttattgtttctctatttagtgtgcacaaaatgtaaatctgtgtttaggttcctcttgtatcaccatta

SEQ ID NO: 10469 - DNA, 234 bp, Glycine max
  unsure (1)..(234): unsure at all n locations; Clone ID: 701151160H1
atttctcgtatcctcaataccgtcccttcttgtcaaaatctctacaagaactcgtttacctatcactgcctcccagatgacaaaactttgccatttgatgaagcaattcagtttcttgagcaatgtgagaaggataaggagcgtgttctggttcattgcatgtcaggaaagagtagntctccagctatggtgaattgcatacttgatgaagtccaaaggntggagacttgtaca

SEQ ID NO: 10470 - DNA, 179 bp, Glycine max
  Clone ID: 701151162H1
ggataaagcctagaatagaaaacgctgtgctgtggctgagaaggggaaaggcgcggttgaaagattgaaagctcaacatgttcagggaaaggcgcaaagggtttgataactgctaaggacaaagataagaaaaaaccaatttctcgctcctcaagagccggtcttcagtttcctgttgg

SEQ ID NO: 10471 - DNA, 175 bp, Glycine max
  unsure (1)..(175): unsure at all n locations; Clone ID: 701151163H1
ctantcttatttgtcagaaggcaganaatggtaaacaaattagaagctataggcatatngcaggacttgggtacccaaatttttttacaaccacttcatattnttcttaagtagtganggtattgcagactacagaangggttttcagttcaatcctttcataacnnaaaannnt

SEQ ID NO: 10472 - DNA, 145 bp, Glycine max
  unsure (1)..(145): unsure at all n locations; Clone ID: 701151165H1
gactcntanaatgatttctgcgatttcgtgggtgcccaaaggggtttcgaagtcggagcctgtcgtggctgatcctcntcccgaagaggaaatccaaganatcatcgccagccacactaccaaaagtggagacagtgacaatgaa

SEQ ID NO: 10473 - DNA, 235 bp, Glycine max
  unsure (1)..(235): unsure at all n locations; Clone ID: 701151166H1
gcacaagtgagtttgttgatcgagataactagaaacagtgtgatgaaaatgaaggtccttgttttcttcgttgctacaattttggnagcatggcaatgccatgcgtacgatatgttccctctccgaatgaacactggctatggtgcccgtactccggaggtgaaatgcgcnnnttggangctgctgtggaancacacaactcngtggcttggnaaccnttccggaagngtncnnc

SEQ ID NO: 10474 - DNA, 232 bp, Glycine max
  unsure (1)..(232): unsure at all n locations; Clone ID: 701151167H1
aaaagtggtgtgctccacgaacgacaagacggtggcagtggaggtggtgcggctggcccctcacccaaagtacaagaggcgcgtnnnnnnnnnnnnnnnnnnnnnngcccacgatcccgataaccaattcaatgtcggcgacatcgtccagctccagaagaccaggcccatcagcaagaccaaggcctttctcgcactccccgttcccangaggtctcnannnggcccgagc

SEQ ID NO: 10475 - DNA, 232 bp, Glycine max
  Clone ID: 701151168H1
ggaggtagtgaggtacgtagctcaaaaaggtgttccccaaaccaaggtagctaaatggcatcatcatctgtgggcactttattacccaacaagttcacacaaaacaaacacttatcatctgttcctgcaagtagaggtgctccaacaaggagaagagtacacttagcaacaacaagagcagagagcatgactactgtcacagaaaaacttggcatcaagattgagaggaacc

SEQ ID NO: 10476 - DNA, 231 bp, Glycine max
  Clone ID: 701151169H1
gactcttagcttgcttgagcatgaaagcttccactctacccgtttactcaacccctcttcccaaaacctctaatttctctcttcatctccttccaatggcttccattcccacactctcttcaaccctacctacactctctgctcactccttatcccattcaaaccccaacaaccactgcactctccctcccacatctctcttcggcaccaggatcaccctcctacgcgcca

SEQ ID NO: 10477 - DNA, 213 bp, Glycine max
  Clone ID: 701151171H1
gcgtcacttcttcgaagtcgaccgtcatttcgtggtgttggcagccctggaagccttggctgaccgtggtgagatcgaacccaaggtggtggcggacgccatacgtcaagttcgggatcaacccggaaaaacgcaacccactggactgctgaggagacaccctgtgagcgaactcattcgcgtacctgacatcggcagcggtgaaggtgaagt

SEQ ID NO: 10478 - DNA, 235 bp, Glycine max
  unsure (1)..(235): unsure at all n locations; Clone ID: 701151172H1
gtggggttgaaaccaagctctatgcttgagaacgtcggggctcagcagcaagccaaagaactcgcaacggtgaaggttggtcacnagangtctcatgttgtncaacgaaagcagaccaaatcttaatgattctactaataacaatagcngtgcaccagctaccaaggcacaggttgttggttcgcctcctataaggtcatttnggnananttcattgggtcactacttcagngnt

SEQ ID NO: 10479 - DNA, 234 bp, Glycine max
  Clone ID: 701151173H1
gagtaacaataatttcaacacgttgcatcttcaacaaacattcagctactctagccatggctgctgctagtactatgatcacactcaagttctcattcctctggagtctccttctctcagttccactcttgggtgtaaagtcatcacatagccaccaaaatggtgggagaagaacaattcctccaacatgcaagcgcattgagtgccccacccatgatgtgattgaagtgggtg

SEQ ID NO: 10480 - DNA, 237 bp, Glycine max
  Clone ID: 701151174H1
caattcaacttaagagatcaatatggccaccaccactacccagcctccctgctaatatctgttttttccttctgttgttgcttctagcacactttcatttgggcataagccaacttgagctgaattactactctaaaagctgcccaaaagctgaagagatcatcaaggaacaagtcacacaactatataacaagcatggaaacactgccgtttcgtgggtcagaaatctcttccacg

SEQ ID NO: 10481 - DNA, 240 bp, Glycine max
  Clone ID: 701151175H1
gattgaaagaaactgttgaatcgcgtcgattaaggttttgagatttctaggctttcatctcagacagtgaaaaaatgatagatataagtacacttaatgctgcacagattactgtgctgggatctgccttttgtgctatgctttccatgcatttcacgtcgcagttactgtctcagcatctcttttattggaagaatccgaaagagcaaaaggctattatcattatcatcctcatggctc

SEQ ID NO: 10482 - DNA, 231 bp, Glycine max
  unsure (1)..(231): unsure at all n locations; Clone ID: 701151176H1
gataattgctgcggtccctaaacaacgacaaactcttatgttttctgccactgttccagaagaggtccgtcaagtatgtcatattgctttgagaagggatcatgaatttatcaatacagttcaagagggaacggaggagacactttnanaggtctgccagacgcatttagttgccccattggacaagcatttctctttactatatgttcttctgaaggaccacattgcaga

SEQ ID NO: 10483 - DNA, 230 bp, Glycine max
  unsure (1)..(230): unsure at all n locations; Clone ID: 701151177H1
ggtctcgtggaagtgtaagcaagcaaaaccctagcggcgcctgctttctttgttcgtgttttgcatcaggatggagtctcaggtgaagcacgcacttgttgtcaaagttatgggtcgtactggatccagaggacaagtgacccaggttagagtgattttttggatgatcagaaccgtcacatcatgaggaatgtgaaaggactgtgagagangganacatttctcnccct

SEQ ID NO: 10484 - DNA, 156 bp, Glycine max
  unsure (1)..(156): unsure at all n locations; Clone ID: 701151178H1
gaaaggaacaaagaaacnaagaagtaaacacactgtttcatactttgcgtttcgttcattcggcgtanaagcnaaagagagagatagagagagggaaaaaggttgctaccaacancanacnnaaacaatgttgcttgattccgcgtggcgagancc

SEQ ID NO: 10485 - DNA, 181 bp, Glycine max
  unsure (1)..(181): unsure at all n locations; Clone ID: 701151179H1
gatatantagccatttttctaaggttccattccctgcatttttctagctccttcttctctaaacactcatctatgactacctttccctcccnnnnnnnnnnnnnnnnnnnnnnnnnnnnnnnnnnnccaagatctagcatgttttactatgctggaagtgangatcantctgaggagcctc

SEQ ID NO: 10486 - DNA, 132 bp, Glycine max
  Clone ID: 701151180H1
tttagatcacctctgaaattctgctatggcctcaaccagatcactcattctttgtctgttcattcaactgtgcttctaccttctacccctctcattcgctcaatcccccgccaccgggtctgccgagggtta

SEQ ID NO: 10487 - DNA, 74 bp, Glycine max
  unsure (1)..(74): unsure at all n locations; Clone ID: 701151182H1
ttgaagattcttagtgaaatttttagggttagttttttttttatttttaatttttggtagtatttcgngtggnc

SEQ ID NO: 10488 - DNA, 229 bp, Glycine max
  Clone ID: 701151185H1
gatcaattcaaaatatatcatcaattataagcatgggtttgtggaacacaacgaatgcagtgtcttgccgctttcacaagtttggtgatgaccaaaagaatctggtcttccaaggtgatgccacgtcttcttccaggggcatagaactcacaaagttagacggtggaggaaaaccagtgggtggcagtgtggggagagtgttatactcttctccagtgcacctttggga

SEQ ID NO: 10489 - DNA, 237 bp, Glycine max
  unsure (1)..(237): unsure at all n locations; Clone ID: 701151186H1
ggttccataaaatgaaatcatactattataagtatgataagaaaacactactatatactagataatgagtttaccatcgtgagccactcagcctgtgtttggtnggagggattattcagcttccctttttccttccctccacccanccagagttanncaccgaaaatggctttccaactgaaatcactacctctcntaaatttctcttcactccccttcccgccaaaaccctaattt

SEQ ID NO: 10490 - DNA, 228 bp, Glycine max
  unsure (1)..(228): unsure at all n locations; Clone ID: 701151188H1
gatgttatacctgatgacgaccaactagagactgatgtgtttgaagttccaattgagaagttgacaattgaattcagcaaaccagctgatcaatcagaaaaggaaactcaactatttgaagacacaaatgcagtagcaatatcaaagccaganaagctttctgtggatgaacatgaactgacactaaagaatgntgaaattgcattgttgaaaaccggtttggaagag

SEQ ID NO: 10491 - DNA, 232 bp, Glycine max
  Clone ID: 701151189H1
gataccaaaaacaaaacacaagccaagtgaaagtgagaaaaaataaaaatcaaagagcataatgtcagggatcattcacaagattggggagacccttcatgtgggagggcacaagaaggaggaggagcataagggtgagcaccatgctggagaatacaaaggggagcaccatggtgaacacagtagtgagtacaaaggagagcatcatggtgaacacaaagctggagagtac

SEQ ID NO: 10492 - DNA, 233 bp, Glycine max
  unsure (1)..(233): unsure at all n locations; Clone ID: 701151191H1
gactgcagtgatcgtattaatcagctagccacaaggtacccaaatagcctcaggctataaatttcaatacccctctcgccaattgatctgttttaatttgtacttccacttccacattgcatntggtnacgttttttcttctactatagctatctttcattcnctctctagctacacacaacctctgtatattcnncgcgcgcgctttcgatcgatgctnttatagtgttccc

SEQ ID NO: 10493 - DNA, 197 bp, Glycine max
  unsure (1)..(197): unsure at all n locations; Clone ID: 701151192H1
tcagatctggagcaggagaatagcgttgggagcgttcgcgtttgttctgcttttcctatcggcctcagcagacgacgtcttgtgctctctgaagataactttcgagaaggaagttggtcaggacagaggagctctcgttgagttctatgctccttggtgtggacactgcaaaangcttgctccanantatgaaangt

SEQ ID NO: 10494 - DNA, 139 bp, Glycine max
  unsure (1)..(139): unsure at all n locations; Clone ID: 701151193H1
ttcattccaacagttctaattaaaatgaactcacaattttgtcagagatttcttgtgccgctatagatgtcatttggccatatcgctttgttcaggccatcttccatttgacatgtcttgcaatcggggatgangggtc

SEQ ID NO: 10495 - DNA, 229 bp, Glycine max
  unsure (1)..(229): unsure at all n locations; Clone ID: 701151194H1
gagacatatctctaattaacactaataacagcaaactaaaggtgaagtttgccagaaacaagatgggaaggaaccattttcagcagcaacactgtgctgatgggagcatgtggatggagagtcagggtcagcaacagagctatgccttccnngaagagtcttggagccctgataacaactatggccacaaccacaagcattcccaggcatgcactgaacatgaacaaca

SEQ ID NO: 10496 - DNA, 189 bp, Glycine max
  unsure (1)..(189): unsure at all n locations; Clone ID: 701151195H1
aatgtaaggacaaacattctaccctcagcaaaaggaaatggccaggtcacttctggcttctgcttacgtcctataaaccgcttgaaccatgatgttgtcttggattcttttgantctacaatgtcattccgcatccatttttcacatcgcctaaacccancaacaagcatttcttcagcnacctcagnt

SEQ ID NO: 10497 - DNA, 113 bp, Glycine max
  Clone ID: 701151196H1
ggcatcaattcaaaatatatcatcaattataagcatgggtttgtggaacacaacgaatgcagtgtcttgccgctttcacaagtttggtgatgaccaaaagaatctggtcttcc

SEQ ID NO: 10498 - DNA, 262 bp, Glycine max
  unsure (1)..(262): unsure at all n locations; Clone ID: 701151201H1
gagcgaagaagntattagggtttttgagtgcggtgcggcgatcctagcactctcttctgcagctttcgccgacagcttncattcaccatgggctgagcaaaccgagaaggcttttttgaaacaaccaaaagtgtttcttcagctcgaagaaaactgggaagggaaagagacccggaaagggtgggaaccgcttttggaaatccattggggctgggatttaagactcccagggaagccatcgaaggaacctacattgaacaag

SEQ ID NO: 10499 - DNA, 261 bp, Glycine max
  unsure (1)..(261): unsure at all n locations; Clone ID: 701151202H1
ggnnttatcatttgnggtcaaacaaatcanagccatngccanctccaacttctctattgttctctccgtctccctagccttctttttggtgctacttaccangggcacactcgaccgataccgtttctttcacttcaacaagttcaacccagtccaaccaaacattatgctccaaaaagatgctagtatttcattcctctgggggtgttaacaactccccaaagttggcngcaacggcgtgcccaacntcgggattntnng

SEQ ID NO: 10500 - DNA, 145 bp, Glycine max
  unsure (1)..(145): unsure at all n locations; Clone ID: 701151203H1
catcaagaatggcagnaangggttcnnngtcancataggtattncttgtntcgctttnnnctccnagaggtcttgggcagttaagcgtgcctatcacaaaccgttacaagagattttgnaaganggtgtncactggcnacnttcc

SEQ ID NO: 10501 - DNA, 248 bp, Glycine max
  unsure (1)..(248): unsure at all n locations; Clone ID: 701151204H1
gataaatcaaaagctcagagaacccatcccgccgccgccgtgtgctccgaccgccacctccattcgcngtgtactctcactgcccttaataaattatngattgtcttctcttatttttgctcctcntctgganttgnagngtgatggtnnangttnntngnggnaagaaaaactacntgtaggaaagggtgaacanangntattanttnngcngtggaancgnggtgntttttnccatnnngtagaca

SEQ ID NO: 10502 - DNA, 246 bp, Glycine max
  unsure (1)..(246): unsure at all n locations; Clone ID: 701151205H1
gcagaagataatgttcgcaatgacctccatcaagggtattggaaggagattcgccaacatcgcttgcaagaaggctgatgttgacatgaacaaaagggctggtgagttgactgctgctgagttggatagtgngatgactgtggtggcgacccctaggcattcaagntcccgactgggtttttgnancaganagngggttnaccaaggatgggcnantncntctccaagctggtgctcaaatgcccc

SEQ ID NO: 10503 - DNA, 239 bp, Glycine max
  unsure (1)..(239): unsure at all n locations; Clone ID: 701151207H1
gtttttgaagttcttggccacaaatggagatactcatncttggaggtgaggactttgatcagagaataatggagtacttcattaaattgatcaagaaaaagcatggaaaggatatnagcaaggacaacagagcacttggcaagcngangagagaggcngagcgtgcaaagagggctctcagcagccaccaccaggtccgcgnggaaattgaatccctttttgntggtgtngattttccc

SEQ ID NO: 10504 - DNA, 248 bp, Glycine max
  unsure (1)..(248): unsure at all n locations; Clone ID: 701151208H1
gnctcgagcctctacattacttaccatttnatttcctaganaaattagatcttacattcacatttcaacaatcacatacttattattattaaaaaanattcacaatactagtggccaatgctatttttagaatgacaaaaagttncattccaatctaactcaatccatttgatagtggacnattatgccatactnggccctcaatgagngctgaagntcctnngggtctagtttnttccaaaaagcnc

SEQ ID NO: 10505 - DNA, 167 bp, Glycine max
  unsure (1)..(167): unsure at all n locations; Clone ID: 701151209H1
attgtttcaacattcanattggcatcattaagatctgtgttaanccactaaatctcttangcagngggcattgtcntctgtccagcggcntgggtnaaanaaaaataganggcggggnacnncnagtccccccccccagnggcgnancgngctgnnncccgtccccc

SEQ ID NO: 10506 - DNA, 237 bp, Glycine max
  unsure (1)..(237): unsure at all n locations; Clone ID: 701151211H1
ggaataacaaaattttcctagaaacgttttctaatcggtcgcagagaaatgaaaaagctggcaaggaagttgcacaatgaagaagacgaaaacttatctcttccggttcacgacggagactctcgtcccttggaccctcaagagcaagaagagctggttcgttctcttggaaaggagtcaagctcagcagagtcgntnatggaggncgntntttgcagccnnnntnctnnngnaacg

SEQ ID NO: 10507 - DNA, 237 bp, Glycine max
  unsure (1)..(237): unsure at all n locations; Clone ID: 701151212H1
ggcacaagtgagtttgttgatcgagataactagaaacagtgtgatgaaaatgaaggtccttgttttcttcgttgctacaattttggtancatggcaatgccatgcgtacgatatgttccctcnccgaatgaacactggctatggtgcccgtactccggaggtgaaatgcgcaatttgggaggcttnttggggaacnnncaaaatttnggggttttnnaacncnttccgnanangggg

SEQ ID NO: 10508 - DNA, 234 bp, Glycine max
  Clone ID: 701151214H1
ctgctacagttgaaggtgttgaagcaacactttggagggtacctgagatgctttcggaactaatattggataagttgaaggcccctcctaaaccaaatgatgtaccagacataatgccagaacaacttgtggaggctgatggtttgatatttggttttccttctcgttttgggatgatgccgagccagctcaaggccttctttgatgcaactagtgagctatgggcatcccaag

SEQ ID NO: 10509 - DNA, 146 bp, Glycine max
  unsure (1)..(146): unsure at all n locations; Clone ID: 701151217H1
ggaccaacacctgtgcngcnattcnctgtcaccaaatttgatctttcttnctntcnttctttggtcgnnaatgatcaggcnacgggggtanactnaaaatttcaagggctaatactggcgatnngtnctagtncntncatcggttc

SEQ ID NO: 10510 - DNA, 262 bp, Glycine max
  unsure (1)..(262): unsure at all n locations; Clone ID: 701151219H1
gggctatggtagtancttttcgntggtccatncaccttataatcggnagaagagccangctgaggcctaagatctccganttccaagcgcctcttgatagggtctcccatttcanttcccatcttcagtttncctntccnctggaaanaaagntgttgaggggttgcaagctgtgngtaccngtgtctctgtncctnttgnttctncggttgcggncccanncangncggtttccgtgtttccnctnnnggaaaaggaggng

SEQ ID NO: 10511 - DNA, 252 bp, Glycine max
  unsure (1)..(252): unsure at all n locations; Clone ID: 701151220H1
gacgttcacattcaggaatcgttttcttcagaaaatatgccatcgttgagggaagcgcgagagccttcgttgttncaagatgagagctaagtggaagaagaagcgcatgaggaggttgaagagggagcgcccgaaagatgaggacanagatctnagtaggtgcttgnaacaaggatgggagatgatgngcttttcccntctgcttacccagcttccatgacattnnatgcctgtgcagggcnccttatgntg

SEQ ID NO: 10512 - DNA, 248 bp, Glycine max
  unsure (1)..(248): unsure at all n locations; Clone ID: 701151222H1
ggagtgagagaaagagatcgcagacacagagcagaatggcttctacccaatgtttcttgcaccaccatgctcttaccacccctgccagtgccagatccccatcactacgcatcttggttagcaccaagcctaaccagcttgtttgcaagggcacagaaacaacaaacaccacaagaggatattgatgtccagcnccaatctctcgccgtttagctctaactgtgctcattggtgcngngctgttggnt

SEQ ID NO: 10513 - DNA, 238 bp, Glycine max
  unsure (1)..(238): unsure at all n locations; Clone ID: 701151223H1
gggttcatgatcaggaattcccgggcagggaatctttcttcttatgggaatctcgtgggggattcatttggcaaattcggaaaagctctggtgcaaatatgcgttataatcaacaacattggaatgctgattatttacatgattattattggtgatgtgatttcctgnaacatctnctnctggtgantttcnacaatncggggggtnnttgangggntggtttggaattccacngttg

SEQ ID NO: 10514 - DNA, 253 bp, Glycine max
  unsure (1)..(253): unsure at all n locations; Clone ID: 701151224H1
ggcacaagtgagtttgttgatcgagataactagaaacagtgtgatgaaaatgaaggtccttgttttcttcgttgctacaattttggtagcatggcaatgccatgcgtaacgatatgttccctctccgaatgaacactggtcatggtgcccgtactccggaggtgaaatgcgcaaagttggaggcttgctgtggaagcacaacaacnatctttggcntttgaganccattcctgaaagagtgctttgaaagcca

SEQ ID NO: 10515 - DNA, 238 bp, Glycine max
  unsure (1)..(238): unsure at all n locations; Clone ID: 701151225H1
gatggcaaaaccgcgctttttgatttcgacgattcctctgtgtctgtcagtacaactcccgtgaagtnagaattggagtgaatgctaagttgacctcactaacagggttgagtggatgtgcaatgtncataagggtagtctcaaggctctgtttggcttccagtttgaaatgcttacacatcatggctgtatncaaatcttntngtttttnatacaaacanacattgnccatggannc

SEQ ID NO: 10516 - DNA, 235 bp, Glycine max
  unsure (1)..(235): unsure at all n locations; Clone ID: 701151226H1
ggacccaaattttaagaacttggctttgcttccttcaaagtgaggtctctaagtttcactttctttgcatagggcaacctcctttactctgtgactctgagtatcgtatcgttttattattatttctaattctctcttatcaggtccattgaatatgtctccgtcgttggatcttcctccccaagggtggctncagttttgatctatgccgaagannacgcaangnttcaaaaca

SEQ ID NO: 10517 - DNA, 235 bp, Glycine max
  unsure (1)..(235): unsure at all n locations; Clone ID: 701151228H1
gaacgcagccaagaaaagaaaatcctcacccattttcttcgtagccaaacactctgaaattctcagttatgtcgtggcaagcgtatgtggatgatcacctactgtgtgaaatcgaaggtaaccacctcacttcacgcngctatcatcggccaagacgncaagcgtttgggcttcagagcaccaattccctcagtccaaacctggggnngnagctgnncngngngnggggtncacc

SEQ ID NO: 10518 - DNA, 240 bp, Glycine max
  Clone ID: 701151229H1
ggtaggcaaagagagagagagaaaagcgtgaatcatgtcggacgaagagcatcacttcgattctcaggcggatgcgggagcgtccaagacgtatcctcagcaggctggtaccattcgcaagaatggctacatcgtcatcaaatccaggccttgcaaggttgtagaggtctctacgtcaaagacaggcaagcatggacatgcaaagtgtcatttgttgcaattgatatttttaatgggaaa

SEQ ID NO: 10519 - DNA, 234 bp, Glycine max
  unsure (1)..(234): unsure at all n locations; Clone ID: 701151230H1
accgtgctgtcatttgatttaaatttggatttagaaaagagtaaaagggaattaggtaacaagttttgttcatgaagtgataactaaaaggcactccttttgggtacggaatgtatcatactaaattactaatataatgtgtataaagctttcattgccaaccaatcagattggttagtgagcttccctagatggagtacattacaattgttaaatgtnaagtgtagtatatnt

SEQ ID NO: 10520 - DNA, 239 bp, Glycine max
  unsure (1)..(239): unsure at all n locations; Clone ID: 701151232H1
ccctacgcgctgagcgcgtctggggctagactttttttcaactttttgtttattttcttcatcttttaagcttttaatccctcctttttttatatctgtaagtcatgaataaaaaaaatcaattcttaataattaaacataaataactacttaaataatcatttttaaagatatttttattataaaaaaaactcatatttaataactatcggtnaaggccatagatttgaagcgtgata

SEQ ID NO: 10521 - DNA, 248 bp, Glycine max
  Clone ID: 701151233H1
gaacacgcggctgccgccggaggtgaaccgcgtgctgtacgttcggaaccttcccttcaacatcacgagcgaggagatgtacgacatcttcggcaagtacggcgccattcggcagatccgcatcggcaccaacaaggacactcgcggaacggccttcatcgtctacgaggacatctacgacgccaaaaccgccgtcgaccacctctccggcttcaagtcgccaaccgctacctcatcgttctctacta

SEQ ID NO: 10522 - DNA, 247 bp, Glycine max
  Clone ID: 701151234H1
gggattgaggagaagtgagcctgtggagtgttttcttctgatttcatctggatctgcgagagatgacggttctttcatttcttcaattgcgcgattctcacctttcggcccccacgccgtctactattctggccacgcccttatctgagtatgatacactcggcacctctatcaaagccgctgttgcttatcttgcaagggcattagtgaagcttatttgtctagctacttttcctcaaaggtatca

SEQ ID NO: 10523 - DNA, 239 bp, Glycine max
  unsure (1)..(239): unsure at all n locations; Clone ID: 701151235H1
taatttgggaattattgctcccatcgccattggtttcattgtcggcgctaacattttgttgggtggggccttctctggagcggccatgaaccccgctgtgacatttgggcctgctgtcgtganctggacctggnaccaaccactggatctactgggccggcctctnatgnggggtggaanccgttggccttgtnnanggggttnnttttgnangccnaccccgaggagnngcnccccac

SEQ ID NO: 10524 - DNA, 238 bp, Glycine max
  Clone ID: 701151236H1
ggaacaaaacaagtgtttcgaatagattatcctaagtctttgggaatagtgctgcaatggcttcaagtcaggaggaggtgacccttttgggagctactggaagcccatttgtgtgccagggttcatattgccctcaagttgaagggagttcaatacaaatatgtcgaagaaaatttgaggaacaagagtgaactggcttcttcaaatcccaacccagttcacaagaaggttccagtgt

SEQ ID NO: 10525 - DNA, 238 bp, Glycine max
  unsure (1)..(238): unsure at all n locations; Clone ID: 701151237H1
ggacccaacacaacactactagtgtggttttttcccttcatcgtcttcctcttgaaggtattgaagttgtnttgttatgtgtttgccanagggagagagagagccatggcactagaggcagtggtatttccacaatcacaagacccttttggtggtagtggttacggntcagtgantaatagggacttctacaacccgcacccttgtnggnngctnatttcacccgagntcanggggg

SEQ ID NO: 10526 - DNA, 215 bp, Glycine max
  unsure (1)..(215): unsure at all n locations; Clone ID: 701151238H1
ggggtgtgatctggangtgaaggtgaagaaatgcttcttcaaacgaggcaatttggcacagcgtgtccatgggtcagactcacacccgcaagcaaaagaaatagctcagtctcattggagaaggagcaattctggcccaaaatgttcggtgtcccaattggaattgaagagtgagantgagagcnaaacgaagccggtnccangcagaggcnttg

SEQ ID NO: 10527 - DNA, 223 bp, Glycine max
  unsure (1)..(223): unsure at all n locations; Clone ID: 701151239H1
gacagagagagaggttttgatgcaacgctgtcactnagaaaggatctctatctacgaaggagcggaataaaacccttctctctgtgattaagagaatggcttcagatcggaaacttcacacttttgaaggaggtngacaancacaacccagaccaggggttgcccggncgnaacnnttnnggcncaggggtnatntggngntcccccttntcnangggttnnc

SEQ ID NO: 10528 - DNA, 242 bp, Glycine max
  unsure (1)..(242): unsure at all n locations; Clone ID: 701151240H1
gcgagacggnttctgtaaaacagtggtaccgtgacgagctgcgagctcgatggaggcggaatggtgagcctgaaccgtggcggcgangttcccttcgcgctttgatctaaattatattaacgccaanagaggcacggcaaatggcttcaggggaccaataggcaaccacccccaaacccccannggtggnaantttnctccccantacnnntttcnanaagngtcncntnnctgaanagnaa

SEQ ID NO: 10529 - DNA, 239 bp, Glycine max
  unsure (1)..(239): unsure at all n locations; Clone ID: 701151242H1
gggaaacctgttggtccgatagttgatggtgatgctgttgtnacattcaacttccgagctgatcgtatgacaatgattgctaaagctcttgagtatgaaaattttgacaaatttgatagagttcgttacccananaatccgctatgctggaatgcttnaanatgatgggggaatggaaacttcccaagtcnannacccntgtttncccnncgngagnttnnnggntcnttngnggnnnt

SEQ ID NO: 10530 - DNA, 231 bp, Glycine max
  unsure (1)..(231): unsure at all n locations; Clone ID: 701151243H1
ggtccccttcttccacatccacactcccctctcaggtttttgtggataagattgagctataatggctgccaggagaccgggtttgattgctttgtntgatgttgatggaactcttacagctcccaggaaggtggtcacaccggagatgttgacattcatgcaagaactgcggaaggttgtaactgttggagttgttgggggttctgaccttataaagatntcagagcacct

SEQ ID NO: 10531 - DNA, 235 bp, Glycine max
  unsure (1)..(235): unsure at all n locations; Clone ID: 701151244H1
gactcgcgtattgtcataaacgacggtncgaataaaaaaggaaaagaagcgaggcaagtggtgtgttgagttaaacgacagacagcgacagtagtgtagcagacacgataaaaataaaagggtaaccaaccccagaaacctattcatctactnctctttagctgncttgttcctcnaaanttcctatgtggtgttcgcaganggnnattnccctgcntgggnccccnnccntttt

SEQ ID NO: 10532 - DNA, 70 bp, Glycine max
  unsure (1)..(70): unsure at all n locations; Clone ID: 701151245H1
caatattaacaactaatattattgataganaaaanaaaanaaaaaanaaaaaaaaaangngncccccgnt

SEQ ID NO: 10533 - DNA, 210 bp, Glycine max
  unsure (1)..(210): unsure at all n locations; Clone ID: 701151246H1
cattcttatattttaattaactttaactaaattattttttattgtatctgaagcaaaaacctattttgtttatgattcaatcgaaaaaaaatatgcaaaattaaaaattaaccaaaactataaaatttttaaattaggaataccaaanaagnnnnagnnanngannaaaaaaggnggncncccnntnngggcnntnncgcccnggggntt

SEQ ID NO: 10534 - DNA, 238 bp, Glycine max
  unsure (1)..(238): unsure at all n locations; Clone ID: 701151247H1
gagggtttatcgatttcacttctgagtgtggtgcttcactcttcacttcgcagcttcagatcttctccatcctctgaatcaagttttgactntncttgaagagtttctcaactgcactttccttccaaaatgagccggccaatggaggaagatgctgcgggtaaaaatgaggaagaggagttcaacaccggaccactatctggactcatgatgnntnttaagaataatacttcaggna

SEQ ID NO: 10535 - DNA, 247 bp, Glycine max
  unsure (1)..(247): unsure at all n locations; Clone ID: 701151250H1
ggtacttgtgttgtgtgtagatagccagccatgtcgatccttttctattcccncaccaacgtaccgttgttcaatttcaatttcaatttctcggcagccattgccatgttctttcacggctcaagtnagaagaagagggaaagggaaagtggtaatgagcatggaaggcagggnattggagtgatgggcaccaatnggggtaggatgnagctntttcgantcccgacggaaagnttnttcctgncnc

SEQ ID NO: 10536 - DNA, 229 bp, Glycine max
  unsure (1)..(229): unsure at all n locations; Clone ID: 701151252H1
gctgctggcgcttctgaaggacaacaaatcgccgttcacgatcaacccgtacccgttcttcgcttaccagagcgacccaagatccgagacgctggcgttttgcntcttccagcccaactcgggccgggtcgactcagacaacgggaagctttacacgaacatgttcgatgctcaggttgatggctgtacattcctgcctttnnagtgccatgggggttcaagggacgng

SEQ ID NO: 10537 - DNA, 239 bp, Glycine max
  unsure (1)..(239): unsure at all n locations; Clone ID: 701151253H1
gaggggaaaacagagattttgattacaaggggaaaagaaaagagattctgagactgaaagtaaattcgaagcnnnnnnnnnnnnnnnnnnnnnnntggtgaaagtggcgacgtacttccgcgatgacgctaggagccttcgtgttctgggcagtccatggaccaagctccatgttctgggntcgctctccgtcagccngaaaaaaaagnnnggttgcagagggacnccgntatcagggg

SEQ ID NO: 10538 - DNA, 228 bp, Glycine max
  unsure (1)..(228): unsure at all n locations; Clone ID: 701151254H1
gaccacaccgagtcgcagaaaaagaaaaaagcgatcatagtttcacttcggccttatccagtttagggtttcggttctctaccctatctttcacgtatcgaaaccttaaatttacgatcaggtctgagcaatctggttggtagaacctttggtcttagtgagtcaagttttatgtctganttagacgatcaaatcctatgccttncgatccttttgctgangcaaang

SEQ ID NO: 10539 - DNA, 232 bp, Glycine max
  unsure (1)..(232): unsure at all n locations; Clone ID: 701151255H1
ggatgcataaaccacgatggatgaaaggtggtttttccactttataaatacccaattcttcagccactttgcttttattttctgatatatctccttcctgttctgctaagtggcnnnnnnnnnnnnnnnnnnnatttcaagggctgaaacatctatctttaactgtattctcccttgttnccctcaccagttgattcaggttgcaaacatggcttttcccaggacnccatcc

SEQ ID NO: 10540 - DNA, 241 bp, Glycine max
  unsure (1)..(241): unsure at all n locations; Clone ID: 701151256H1
ataatttganaaatgtttgaaactncatattttgaaatatccgcttanagcaatttcaggancatttgctcgtaccaatattcgtntccatgtgtaatgccccttagtncaacacttcagcctactnaacgncancnccccctatatgcatgtgtcaaaggtttatctgccttgttaattgtataaaatcctttaaaaattataggaaaatggnatntcaagggnatngcgatannacatc

SEQ ID NO: 10541 - DNA, 235 bp, Glycine max
  unsure (1)..(235): unsure at all n locations; Clone ID: 701151257H1
gatccaaaaaactcttagcaaatccacattcctctccatgtccggagagccaccacggccgttggagatccacctgagggtcaactccaagagaggcggcaccaccatggtgcaccccgtggccacggcggttccggttcagtaccccagagaggaggagggagtgaagcattacagaaaaanggtttgcttgggntgatncctcctctttggtggttgncaangntcgntntgt

SEQ ID NO: 10542 - DNA, 228 bp, Glycine max
  Clone ID: 701151258H1
gacatggttgatggacttatacgtctaatggaaggggaaaacactggtccaatcaacattgggaacccaggtgaatttacaatgattgaacttgccgagaatgtgaaagagcttatcaatccaaaagtgcagataaatatggttgagaacactcctgacgatcctcgtcagagaaaaccagacattacaaaagcaaggaattgctgagatgggaaccaaaggtcaatt

SEQ ID NO: 10543 - DNA, 237 bp, Glycine max
  unsure (1)..(237): unsure at all n locations; Clone ID: 701151259H1
ggagaagttattagggtttttgagtgcggcggtccaaacactcttctctgcagcttttgcctacaactcccttcaccatggctgaacaaaccgagaaagctttttctgaagcaaccaaaagtgtttctcagcacaaagaagactgggaagggaaagagacctggaaaaggtgggaaccgcttttggaagtccattgggcttggattntaagactcccngggaagcccntngaaggga

SEQ ID NO: 10544 - DNA, 231 bp, Glycine max
  unsure (1)..(231): unsure at all n locations; Clone ID: 701151261H1
ggagatagaaatgcatgtgttgtgttgtgctacatataaataactcttgttctccctctacacactctctaccctgcctccaaaaacttgttgtttggcacttcttcacactcagctagcagatcagtcactgaagtggataagaatggaaaatctcagcaatggtcacttagaatcctttgtcaagnttccaacaatnangtttaccaagcttttcatcaatgggnggat

SEQ ID NO: 10545 - DNA, 248 bp, Glycine max
  unsure (1)..(248): unsure at all n locations; Clone ID: 701151263H1
gaaccaagttaaaaaaaaanaaaaaanctttaggaaatcaantgaagagngagaagntggcttgtgtttacccaggncagcttctctngtngtgnctganactgagcggggtnccaanagcagttnccgnaggnaatnacgcagcacccctnaccanccatgggggacgcttgctgactggaaagttnaacgttgncatnttatggnacggcccanttcaaagggccaaaaagaaagggntttttgcc

SEQ ID NO: 10546 - DNA, 260 bp, Glycine max
  unsure (1)..(260): unsure at all n locations; Clone ID: 701151264H1
ggtanttnatnnctggctcaccaagggcttatcacatcacaatntgtggcattgcctcgtgtcctttttcttctttgcttgccaaaaatcttacacacacaggtatcnaagaaaatgggttctcaccagcaaganccatggctattggagaatgggaanccganggtgttgaccaagggagnatagggatggncgttnctgcacacagcatgtccnccacgtctttgcgcaggaagtctagccganctcttgctccanag

SEQ ID NO: 10547 - DNA, 243 bp, Glycine max
  unsure (1)..(243): unsure at all n locations; Clone ID: 701151265H1
gacctcacagcagancaaaaganagaaaganactgcaacttcctctgttttgctcccctgtttaggccttttcataagcttagaatgacacacanaggaattttccattgctctagtgactctcattgctgttctctttgtcaacatgancatccaaggtgccactgctgactatgggtagttgngcagagtgctccatgccactttttatggcgggggtgatgcttctggcacaatgggtgg

SEQ ID NO: 10548 - DNA, 225 bp, Glycine max
  unsure (1)..(225): unsure at all n locations; Clone ID: 701151267H1
aagacgacagaagggcccaacacataattctaattatatgctaatgcttgcaaatgtggagtgagcattgagcaactacaggaagtataagatgtaaaaaaaannagnnaanacaaaaaaaaaagggnnccccnttnaggncccccnccccccggggttttttttcnggcgngnttctncgggggggnnntttnccccccnnangggggtnttnnnanggggggg

SEQ ID NO: 10549 - DNA, 255 bp, Glycine max
  unsure (1)..(255): unsure at all n locations; Clone ID: 701151268H1
gattgttagggcttatcctcatatcaatgccatcaactttgaccttgcctcatgtggttgccactgctncctaagttcgatgngatcacccatgtnggaggtnacatgtncgtgtccatncctagtgncngatggntacatacagcccgcnggttctgnntnactnaatgcgacgtatgtcgnatcaagttncnnggaanactggtgnacngcttttacnantccagcccagtnanannacaaggtccccngtgt

SEQ ID NO: 10550 - DNA, 235 bp, Glycine max
  unsure (1)..(235): unsure at all n locations; Clone ID: 701151270H1
gggactcccaagagttgctanaattcaagccaacattaggtgcaggaggcatcatgcgatgtggcctggagctgccaacagcatncgagatcgaccatctcgctcgctttgctgtagaggnncannncaaaagagagagttcnnttgctggncnaaaatgtgcggnttcccaattnggaattgaagagtganagtgaagggcnnnaacngaagccgtntccagcnagaggcatgc

SEQ ID NO: 10551 - DNA, 248 bp, Glycine max
  unsure (1)..(248): unsure at all n locations; Clone ID: 701151271H1
gtacacacacttgcncatcatcaaagtttcntcctttctctggctctttgccntctcctgacacatttggtgccttgtagagcgtgttttggcaggaaggtggtatggcgaaggaacgttgaggttgctgagcgtggctccttctcctgggaaggactaaccaggaccntccaccagtancactcatngcangctgngggagctcaaaaantggtnttttacagggntctcattgctgaatncattgc

SEQ ID NO: 10552 - DNA, 239 bp, Glycine max
  unsure (1)..(239): unsure at all n locations; Clone ID: 701151273H1
ggagaacaaaacaagtgtttcgaatagattatcctaagtctttgggaatagtgctgcaatggcttcaagtcaggaggaggtgacccttttgggagctactggaagcccatttgtgtgcagggttcatattgccctcaagttgaagggagttcaatacaaatatgtcgaagaaaatttgaggaacaagagtgaactgcttcncaaatccaacccagtttcacaagaaggttccagtgttt

SEQ ID NO: 10553 - DNA, 242 bp, Glycine max
  unsure (1)..(242): unsure at all n locations; Clone ID: 701151274H1
gagacataagaaatgcgattatagagagcgaatagaatattgttcttcagaactctgtaggcggatctcctttagtcctttgtctccgttccgtcgtcaaccctacctttggatctgcgtttggcnttcaggttttgaagtccgaaggcgacaganagaagagatncctggacggggnaatcaggtnngngtccgnannggtgagggttttttttgngggnagcntgtnnnctnggnnnnaa

SEQ ID NO: 10554 - DNA, 248 bp, Glycine max
  unsure (1)..(248): unsure at all n locations; Clone ID: 701151275H1
gacagccacaacactttccacttgtctccgaattagttatcttgagaaacattattcccattgctatatattatggctagcatgaaggttacatgggtggttgtgatcatgtgcatggccgtggtgggtgcaccgatgatggcgcaagccatggacatgcaatgatgtgacggtgaacatggcacagtgcctatcctacctgatgcagggaggaacaccttcaacactttgctgcagcggagtnaaga

SEQ ID NO: 10555 - DNA, 239 bp, Glycine max
  unsure (1)..(239): unsure at all n locations; Clone ID: 701151277H1
gggacttaattcagttctggtttctgaactcctctgtattccttagtgaggctaatggtgaaaatgatactagcactagcannnnnnnnnnnnnnnnnnnnnccatggtattcacttggctgtggacattgagcgagtgagggaagtagcagctaagcataacgtgtcttgcatcctagtttttgggagactcaagtgttgatgccagggaacaaacatgccccttcacaccanttntg

SEQ ID NO: 10556 - DNA, 241 bp, Glycine max
  Clone ID: 701151278H1
gttgttgcactggagaaatcacataactgcagcattgatagcatgatatggaagatggaaatctaacagatgggggtaggatcaattcaaggcaattgttaatagcagtcactagtttttgactactaacgtttagattttagagtaggggttcagttggttctttgtggaagtttgtgtatgcctccatatagttctgtaaatagagcataaaatttcacgggtttattctcaatgcaga

SEQ ID NO: 10557 - DNA, 245 bp, Glycine max
  unsure (1)..(245): unsure at all n locations; Clone ID: 701151281H1
gactgagaaaaaggagcaagcttaagctgttttctctgctctttgatcccgtgaaaaaaaaatggctggagatgaagaaaagcttcgaatagtgtgatgtttccatggctagcctttggtcacatgntcccaaaccttgagctggccaaaactcattgctcaaaagggtcaccacgtgagtttcgtatncnacccaagaaacntagagngntnttccaaaaacggtcagtaaacaccattnnttt

SEQ ID NO: 10558 - DNA, 233 bp, Glycine max
  unsure (1)..(233): unsure at all n locations; Clone ID: 701151282H1
ggttgtgaatcaacataaatattccgttttgcgtttctctgcctaaaaggnttgaaagatgggtcaagcactaggttgctatcaagttgatcagtcaaatgtggctatcaaggagcattntggaaaatttgatggtgtcctagaacctggatgtcattgccngccttggtgncctgggtaccagnttgcngggaatttttcnantggctgngcancaanttgnngtcnggatg

SEQ ID NO: 10559 - DNA, 246 bp, Glycine max
  unsure (1)..(246): unsure at all n locations; Clone ID: 701151283H1
ggggacgaatctcttgctggttgccacactacaccgatatttccacnaaacccgtttgcnnttgttgtttgcgaatanatggcaactaaagaggagcgtgggnncgttgaaggnagggtgatttcaaggggaagagggtattcgcaagggtccatctnaacgtncccttggnataaaanncttaaccncccntntnancatagnnnnccgggnggtnncacccanccannaactnctttgcgnggg

SEQ ID NO: 10560 - DNA, 249 bp, Glycine max
  unsure (1)..(249): unsure at all n locations; Clone ID: 701151284H1
gataccagatattgagaagtgcttagatgttgttgctacattgcaagcaaagaggggtactggtgaggcacttactgctgattttgaggtgtcagaagaaaaatattcacaagctcgcatagaggaaactgattcagtgtgtttatggctgggancaattgttatgttggaatantncatnngangagggcnactgnttcttcnacagaacaccctggnataantgtnncanccagtgnnaaaanctcc

SEQ ID NO: 10561 - DNA, 245 bp, Glycine max
  unsure (1)..(245): unsure at all n locations; Clone ID: 701151285H1
gaagaaagtgagggaaaaaagtagagtngtatgtgggttgctgcggcaacaaaaccattcatcaaattccaattccacagacacactacttaatcttccgcttcttctganggcaaaccaagcttcactctccnntnctncnnccgtgtctccggttccanncncctgctcaagcgcgtgggcacgcacaacggaagctttcatngcgacgaggcccctcggctgcnnnatgatncgctcaggaa

SEQ ID NO: 10562 - DNA, 249 bp, Glycine max
  unsure (1)..(249): unsure at all n locations; Clone ID: 701151286H1
ggcacaagtttgttgagatagctagaagcaataagatgaaaatgaaagtgcttgttttgtttgttgctacagttttggtagcatatgaatgccatggctcagactaccagaagttccctctccaaatgaaaactgggtttggtgggcaatacagcaatgaggtggcatgtgccagttggaggcttggcgtggaagcaaacaacgtagtcaagtggcaaactgttcctgcagcttgcggagagtacatnc

SEQ ID NO: 10563 - DNA, 211 bp, Glycine max
  unsure (1)..(211): unsure at all n locations; Clone ID: 701151287H1
ttgctcctccaaaatgtgattatcgtggtccatacacttctaacaagtggcttgtcaatgtgtgcacaaccttctcaaagatggtaatcaaattcaatttcttcaccaaattaattttagaattgtgttatnttggtataaaaacccatnagcattttatgttttgttgtattacaataattaggtaccatgttccacgctcatttcttcg

SEQ ID NO: 10564 - DNA, 219 bp, Glycine max
  unsure (1)..(219): unsure at all n locations; Clone ID: 701151289H1
gagagagaatcaaantaataccactttcttagtttcaaactcaacttttgagggtcttttctctattaaaaacacacaagagttttagtcttttagctaacagtgttcatatgatgaatgcttcaaagttcattaaatgtgttactgttggagatggagctgttgggaaaacctgcatgcntcatttgctacaccagcaacaagttccccactgattac

SEQ ID NO: 10565 - DNA, 241 bp, Glycine max
  unsure (1)..(241): unsure at all n locations; Clone ID: 701151290H1
ggttctagtgtgtgattgtttgttgttgtaactncgttcttcttcttttgttgttctgtgtttgtgtttgttttttctctcacctgaaaatgtcttgctgcggtggtaactgtggttgcggaagctcctgcaagtgcggcaacggctgcggtcgctgcaagatgtacccagacttgagctacactgagtcaaccaccaccganaccttgggtcatgggagtngcnacntgttaanggcnna

SEQ ID NO: 10566 - DNA, 225 bp, Glycine max
  unsure (1)..(225): unsure at all n locations; Clone ID: 701151292H1
ctccccattttccaagcagaaaatgagatccatgaaggtaaaaagaggaaatcaatggatcttcctgagacaagttcagctaactcaactcctggcagtttctgaaagtggaagcaagatcaaacatgtaaattccttctactatttttttctccaattatttttggccacgcaccatgttctgtatcanggcaagacncaatttgatttttgattttntnggaa

SEQ ID NO: 10567 - DNA, 244 bp, Glycine max
  unsure (1)..(244): unsure at all n locations; Clone ID: 701151293H1
ggaagtctaagaaagaaaacagagagcgaagaaggagaagagatcagaaaaatggcgtccaaagctccaaagaaggccaatctcctcgatcaccactccattcaagcacatcctcgacgagttcagtctccgaggtggtaacgagtcgtgggtttgtggaagacgtgagattgagcaatgtgaggctcctcattggggcaatnatcatcgtcattgctctcttcggcccatttctacaagaaga

SEQ ID NO: 10568 - DNA, 235 bp, Glycine max
  unsure (1)..(235): unsure at all n locations; Clone ID: 701151295H1
gagagaacgaganaaagaacaatgggggcgaagaagcagagccagggagtgaaaaataagggtaatggcgccaacaatgatgttttcgcgtcatgctccttctccagccttggacttgattccaatttatgtgaacaacttcgtgataggttggggtttgaaagttccaacgctggtgcaagctcaagcanttccccgttattctctcgggggcggnnatgcattggtgattcct

SEQ ID NO: 10569 - DNA, 238 bp, Glycine max
  unsure (1)..(238): unsure at all n locations; Clone ID: 701151301H1
gnaggaagtctattaatgagataaacttctgtatgaaaagcatgatcccagtaagaaagaggcatggangcctgtgacaaaagagtcaaacccatttcaacaatgtgcttgtgttgtctntccactacaccatttngatggtgagtatgaggacagataagcctatgatgaatgcctatttgatcaagatattgagtaaaaggtctatnctcaccccccaatcagtttgaatactttt

SEQ ID NO: 10570 - DNA, 274 bp, Glycine max
  unsure (1)..(274): unsure at all n locations; Clone ID: 701151302H1
gnagcgaagaagatattagggtttttgagtgcggtgcggcgatcctagcactctcttctgcagctttcgccgacagcttcattcaccatggctgagcaaacctggaaggcttttttgaaacaaccaaaagtgtttctcagctcgaagaaaactgggaagggaaagagacccggaaagggtgggaaccgcttttggaaatccatgggcttggatttaagactcccagggaagccatcgaaggaacctacattgacaagaagtgccccttcactgg

SEQ ID NO: 10571 - DNA, 276 bp, Glycine max
  unsure (1)..(276): unsure at all n locations; Clone ID: 701151303H1
gagaaaaccctggtttagtttggtgttaggctttgaagctaaagtcaacaacacatagcagaggatagatagtttgttcgttgcgttgccatgtcggcgtcggagattgtncgggaactggattcgctgaaggacgnnaagaccataattgagcagaaaatctctgcgcttgaagctcaactcagagagattnatctccaaaacgncgccgcncnacncaacggattgangcagacatgattcncagatacagtcgccaccttgtgcttccttcct

SEQ ID NO: 10572 - DNA, 261 bp, Glycine max
  Clone ID: 701151305H1
caccaatgggtgtttttgagtttgataagtttgccacaggaacagaggccatagccaagaaactggcagagctgagtgggaagggagtaacgaccatcattggaggaggtgactctgttgccgctgtggagaaggttggtcttgcagacaagaatgagccacatctccactggtggtggtgccagcttagagcttcttgaggggaagcaactccctggtgtccttgcccttgatgatgcttgagtaaacatcactagttcc

SEQ ID NO: 10573 - DNA, 264 bp, Glycine max
  unsure (1)..(264): unsure at all n locations; Clone ID: 701151307H1
ggacagagaaaggaaaggattaggggatagtggcaagcgaggaaggaagtgaagtttcaaggttgacgcaaagaattgaattgaagtgataagtattatatagcatgcaaagaaaatggtaaggtanngngaagtncgatagcagaaaaggaaaaaatgacgatggacgatgatagctccatatatgtagggggtcttccctacgacgccaccgaagaaaccatcgcaccgtcttcaatttgtatggcgctatccttgatgtta

SEQ ID NO: 10574 - DNA, 263 bp, Glycine max
  unsure (1)..(263): unsure at all n locations; Clone ID: 701151308H1
gcaggccggcattgacaagctcgccgacgctgttgggctcactcttgggcccagagggaggaatgttgtgttggatgagtttggaagtcctaaagtggtcaacgatggtgtcaccattgctcgcgcaatngagcttcccgatcctatggagaatgctggtgcagctcttatcagagaggttgctagcaagactaacgactctgcgggtgatgggactaccantgtttcggttcttgctcgcgagataattaagctggggcttc

SEQ ID NO: 10575 - DNA, 261 bp, Glycine max
  Clone ID: 701151309H1
gcacaagtgagtttgttgatcgagataactagaaacagtgtgatgaaaatgaaggtcctgttttcttcgttgctacaattttggtagcatggcaatgccatgcgtacgatatgttccctctccgaatgaacactggctatggtgcccgtactccggaggtgaaatgcgcaagttggaggcttgctgtggaagcacacaacatctttggctttgagaccattcctgaagagtgcgttgaagcaacaaaggaatacatccatg

SEQ ID NO: 10576 - DNA, 193 bp, Glycine max
  unsure (1)..(193): unsure at all n locations; Clone ID: 701151313H1
ccaagtgccagcatttgggagttgggattggaacgataacctacctttcacacagtgcttcgagtccagcgaggcaagctggtttgctacgatgtagtaattactctgagtctgaggaacgtgacctttatgttacaggggatttntacgagaataatgttgtcacgcccgccatgatcgttgttcctcgcag

SEQ ID NO: 10577 - DNA, 201 bp, Glycine max
  Clone ID: 701151314H1
agcgtggagacatacaagatatacatattcaaggtgctgaagcaggtccaccctgacattggtatctcaagcaaggccatgggaatcatgaacagcttcatcaacgacatcttcgagaagcttgctcaggaatcttccagacttgcccgctacaacaagaagcccaccatcattcaagggaaatccagaccgcggtcaggc

SEQ ID NO: 10578 - DNA, 263 bp, Glycine max
  unsure (1)..(263): unsure at all n locations; Clone ID: 701151315H1
ggcacaaaaaatggagttctacacaaggccaaataggagtgacatccacctctcagcagaggaagaagccaccatagaggcaaagaccagagactactttgatggggttgcaccacaacgccacacaaagcntcaacgaagtgagtattcagctcaatatgtggatgctttctccaatgcccatcactcttncttcttcttctnctataccagaattcatgcaattccaacgcctcgagaatgatccccaagagaagaattgg

SEQ ID NO: 10579 - DNA, 265 bp, Glycine max
  unsure (1)..(265): unsure at all n locations; Clone ID: 701151317H1
gacaacactcatagtagagtaaccaaaaggagagtgcaataactcgttgtacattcctagtgtgtgggagggacatggctaagatgtgtgttttggtnctggttcttgctctggctgtggccacaagtgccagaaacgttcccaaccccaaggatgctggtcttaaggaccagaagaacttcatcagctatggtggagttggtggttattccgggattgggaacaatggactgccttttggaggagctggtgccggaataggtgg

SEQ ID NO: 10580 - DNA, 262 bp, Glycine max
  unsure (1)..(262): unsure at all n locations; Clone ID: 701151318H1
gatgctgaagatcattgcacgcagctaagaggcaatgggttgctcagttcaattgaacctgcaagtggaggctgctgatggcaagtttcactttaaatctcactggcttttatgctattgaaaggtgagatggaactattagcaggtgtacataagttccccctcttgaaggcttagaaaccaaaaaagaaaatatatcttgtgtaaaaacttggccttatgtgaacgancctatgattaggccngtgatantngggtttga

SEQ ID NO: 10581 - DNA, 263 bp, Glycine max
  Clone ID: 701151319H1
gataggaattgaagcataggcacccttcccttccgtttcgaattagccatgaaaggcgtcttttcggcgcccggtgattacgttcacttcaagtctcaagtccctcttcacaaaatcccaattggcactaagcagtggcggtattacgatttcggtccgaaagctgtgcctccccttatatgccttcctggaaccgcaggaactgctgatgtatattataaacagatcatgtcattgtctatgaagggttaccgtgtcatatc

SEQ ID NO: 10582 - DNA, 261 bp, Glycine max
  Clone ID: 701151320H1
ggcgggaatctgtctgatgccacatcccaagtcagtctcagtaactgctcaacactgacacactcagctaccactctcctctctctagcttcagtaactagcttgccattttgctcaaactcaaagctcaataaatgtgcaaactttgaattgaaaacgtggaggaatcaatcaaggtggcgcaaagagaggagaagaggtggtagagagaaagtgatgggtcaggggctgagttgcagagggagccatgagcatggccta

SEQ ID NO: 10583 - DNA, 258 bp, Glycine max
  Clone ID: 701151322H1
ggtaggaaagagagtatgagtgagagtgtaggaaagagagtatgagtgagagtgtggctaacatttgtcttcatgttatgagggtatcctatattcctattttttatgatactggacacctagtatctatatacacctatagagagaaatgtaaatgtcacaggtctggtccatttggagatgaagtttccagagtgtttggtggtggtcttgtaccaggctcattgactttaattggtggtaatcctggtgttggga

SEQ ID NO: 10584 - DNA, 273 bp, Glycine max
  unsure (1)..(273): unsure at all n locations; Clone ID: 701151323H1
gacagttgttggtgtaaaggaacagcggtgggtgagtgagagagggaggaaacatggctacggcgtcggcgtcggcgtcgtgggaggaactgacgctgaaagtgaaatggagcggcaacgaatacaccgtccgcgtctgcnccgacgacaccgtgggcgaactcaaacgtcgaatctgcgagctaaccaacgtcttaccccttcgccagangctcttgtaccctaaactcgcttccgaactcagcgacgatctctcttcctctcccagcttcc

SEQ ID NO: 10585 - DNA, 260 bp, Glycine max
  unsure (1)..(260): unsure at all n locations; Clone ID: 701151325H1
gataatacatacgagtattttatgtatgatggcctgaaacactcttgtgttgagggaaatcatattgttaatgtttcctcattctcaaaagcatttggantgatgggatggcgggttggatatatagcatatccctctgaagtaaaagactttgctgaacancttctcaaagttcaagacaacattcccatctgtgcttcaatattatcacagtatcttgccctgtattcattggaagtggggcctcaatgggttgtaga

SEQ ID NO: 10586 - DNA, 269 bp, Glycine max
  Clone ID: 701151326H1
ggttgccaattattggtaacctccacatgctagggaaactcccgcaccgcacccttcaaacctttgcaagaaaatatggacccataatgtccttgaagctagggcaagtccaagccatagtggtttcctcccctgaaaccgctgaactattcctcaagacccaacacactgtttttgcaagcaggccaaagattcaagcctctgaatatctctctcatggcaccaagggcttggtgttttccgagtatagcgcctactggcgcaaagtg

SEQ ID NO: 10587 - DNA, 239 bp, Glycine max
  Clone ID: 701151328H1
gagggagagtgttgacgctccatcaagatgggtatttctagggattccatgcacaagaggcgtgccactggtggcaagaagaaggcatggagaaagaagagaaagtatgagcttgggcgtcaggccgcaaacaccaagttatcaagcaacaaaactatccggaggattcgtgttcgaggtggcaatgttaaatggagggcattgaggttggataccggcaattactcatggggtagtga

SEQ ID NO: 10588 - DNA, 259 bp, Glycine max
  Clone ID: 701151329H1
ggaagctggaaaagttagaagtagtgaagaaaatgaaagtcattgttttcttcgttgctataataattttaggtgcagaatggcaatgcaatgggtcagagcatgagcatgagcatggccacagctaccaaattttccctttgcgaatgaaaaccggccccggtggccactacattccggaggtatcgtgcaaaagttggaggcttggtgtggaagcacacaacgtcattgactggagaaccattcctcaagattgcga

SEQ ID NO: 10589 - DNA, 259 bp, Glycine max
  Clone ID: 701151330H1
gacagcatatatatcaataatctattttatactatacctacattttgataattttctttgtagttgatggccatggctacccgtggaaagcttgaggttgacattgatctcaagtccaacgcagacaagtactggcaaacccttaggaattctactgaaatattccctaaggccttcccacatgattacaaaagcattgaggttcttgagggtgatggcaagtctcctggttctatccgccacataagttatggtgaag

SEQ ID NO: 10590 - DNA, 284 bp, Glycine max
  unsure (1)..(284): unsure at all n locations; Clone ID: 701151332H1
gacaccaacacnaaaacaaacccattaaagatggnttcctttgtaatccnttccnaagtgcttgnttnnttgaagccctaatccctcntgccntnaagggcttctacttncttncnaaccaatttaagaagccaacagtgttacaanccttccagtgtacaagccaccagtgtacaaaccaccggtttataagccaaaaaccaccggtttacaagccggaaaccacgggttaccagnccancatataaggagccaccattcaagnaaccacttattccaagtac

SEQ ID NO: 10591 - DNA, 262 bp, Glycine max
  Clone ID: 701151335H1
aactgttgttgagggaactatacagaagctatttgaagggcatcatatgaattatatcgaatgcatcaatgtggactataaatcaactagaaaggagtcattttatgaccttcagcttgatgtgaagggctgtcctgatgtttatgcttcctttgacaagtatgttgaagttgaacgtcttgaaggggataacaaatatcatgcggaacaatatggtttgcaggatgctaagaagggtgtcctgttcattgatttccctcct

SEQ ID NO: 10592 - DNA, 258 bp, Glycine max
  Clone ID: 701151337H1
ggcacaagtgagtttgttgatcgagataactagaaacagtgtgatgaaaatgaaggtccttgttttcttcgttgctacaattttggtagcatggcaatgccatgcgtacgatatgttccctctccgaatgaacactggctatggtgcccgtactccggaggtgaaatgcgcaagttggaggcttgctgtggaagcacacaacatctttggctttgagaccattcctgaagagtgcgttgaagcaacaaaggaatacat

SEQ ID NO: 10593 - DNA, 284 bp, Glycine max
  Clone ID: 701151338H1
ggacccattcaacattttctctgtctatctctcgttgtagcgtaggcaagcagttgaatttggaaaacaagatgtctcaccgcaagttcgagcacccgagacacggttcccttggctttctcccaaggaagcgagcttctcgtcatcgcggaaaggtgaaggctttcccaaaagacaatcctagtcaaccatgcaggttgactgcctttgtgggctacaaagctggaatgacccacattgttagagaggttgagaaacctggatcaaagcttcacaagaaagag

SEQ ID NO: 10594 - DNA, 264 bp, Glycine max
  unsure (1)..(264): unsure at all n locations; Clone ID: 701151340H1
gattgtaaaaaatttcatttatgacaagagagaagggagcaaaatctggaaaagcttttgaagaggaaaaaaaggctgagaataataaataaaaagtnaagaaaagaaggaaggaaatggtgtgtgtatatgtgttggtgcatctgcatgtcaccaaatcagtgaagaaactgagtaatattactgccagctcaaatttctcatttataacaagccagcctcaggnggaaaatcacatcaaggagtactcatggaggaggggtt

SEQ ID NO: 10595 - DNA, 260 bp, Glycine max
  unsure (1)..(260): unsure at all n locations; Clone ID: 701151341H1
ggatactaaattactgatacaggaacagcagagaaacaaagttagaagtaaagaagatcatggcttctctagcaaccttggctgctgttcaaccagcnccgatcaatggccttgctggaagttccctctctggaactaagctctctttcaagccctctcgccacagtgtcaaatccaagaacttcaggagtggtgcccgtggtagcaaagtatggtgacaagagtgtgtactttgatttggaggatctgggcaacactac

SEQ ID NO: 10596 - DNA, 254 bp, Glycine max
  unsure (1)..(254): unsure at all n locations; Clone ID: 701151342H1
gattcatttcattcataccgttcgcaacacgatcactattctgcgacgatggtggcacattcgagttcttggggaagggcactcgtcgcgatctcgncctacaccttctcagccatcggcatcgcgtcggtatcggcgtctccgtnctcgncgcggctcaggggatctacatcaccggaagcagcttgatcggcgctgcaatcagggntcctcgaatcattcnaaaaatctcattagtgtaatnttctgtgaag

SEQ ID NO: 10597 - DNA, 71 bp, Glycine max
  unsure (1)..(71): unsure at all n locations; Clone ID: 701151343H1
catgtttggacatggngtcagccatggccgcctggtgacataaaacagatttcagtccctgttcgggttca

SEQ ID NO: 10598 - DNA, 255 bp, Glycine max
  unsure (1)..(255): unsure at all n locations; Clone ID: 701151344H1
gagggaaggaggagaagacaaattaaccaccaacaacagcagaagaaaataaaggagcaaactaaaatggcagcaaataaatacgttgcattgttgttggtggtgttccttatcgctggaagtgctaatgccagaccaaaagaagtcagctgcgcaagtatttgcatcgacaaagaatgcaaaagtgactttaacagttggtgtgcatattcaattgtggnatcaaatgtgcactcataggaccacaaaagaaat

SEQ ID NO: 10599 - DNA, 258 bp, Glycine max
  Clone ID: 701151345H1
gagggaagcacaaccaagcttctctgttaaaaaaaaattaggcgtctaaagggccaaagcttagaaagttgaagctttttttgttgaggtgaaagtgaaatggttggcaaggataatctgagggctgaggacttgaacttgtgctttaagaagcttatgatggtggccgggagtgggaacagtgagaaaggggtgaacttgaaggttggggtgatcaccgagtggaaggatattcctgtggagcttctgatgcaaatt

SEQ ID NO: 10600 - DNA, 252 bp, Glycine max
  Clone ID: 701151346H1
ggcacaagtgaacttgttgatcgagataactagaaacagtgtgatgataatgaaggtccttgttttcttcgttgctacaattttggtagcatggcaatgccatgcgtacgatatgttccctctccgaatgaacactggctatggtgcccgtactccggaggtgaaatgcgcaagttggaggcttgctgtggaagcacacaacatctttggctttgagaccattcctgaagagtgcgttgaagcaacaaagga

SEQ ID NO: 10601 - DNA, 111 bp, Glycine max
  unsure (1)..(111): unsure at all n locations; Clone ID: 701151347H1
gaagggagaattaggtttttagggtttacaccgagcagcgacacctccctcccgcagtagccatggttctcaaaactgaactatgccgattcantngtgccaagatctacc

SEQ ID NO: 10602 - DNA, 264 bp, Glycine max
  unsure (1)..(264): unsure at all n locations; Clone ID: 701151348H1
gggtaatctcttaanatatagancacactaccctcaanatagtaaagcagctggtgcaagtgaagcaatggctcaaaccatgttgctcatgtctagtgtctctaggcagttattccgtggntttgaagaaagacctgtttcctcnanttgcagagtcaaagtttaaggcctaagttctctcaactctcattcaacccacttccaccatcaacttcttcctttctncacccggtacattcacaaccctggctctcttcaaatcta

SEQ ID NO: 10603 - DNA, 213 bp, Glycine max
  unsure (1)..(213): unsure at all n locations; Clone ID: 701151350H1
gagagagtattggcgcttcatcaagatgggtatttctagggattccatgcacaagaggcgtgccactggtggcaagaaaaaggcttggagaaagaagagaaagtatgagcttgggcgtcaggcagcaaacaccaagttatcaagcaacaagacaatcaggaggattcgtgttagaggtggcatgttaaatggagggcntgaggctggatactg

SEQ ID NO: 10604 - DNA, 258 bp, Glycine max
  unsure (1)..(258): unsure at all n locations; Clone ID: 701151353H1
gacagacatcatttcaggaaccagaatcagagatttaaaggttggaacgaaaattaatcatcgatggcagcagagacgaaagaagtttcaggttcggagatgtctctaaaggatcagggcaacgagtttttcaagtcaggaaagtatctcaaagctgctgcactctacactcaagccatcaagcaagacccttctaaccctactctctatagtannnntgctgcagcattactgcaattggataagctcaataaagct

SEQ ID NO: 10605 - DNA, 257 bp, Glycine max
  unsure (1)..(257): unsure at all n locations; Clone ID: 701151354H1
ctgctacagttgaaggtgttgaagcaacactttggagggtacctgagatgctttcggaactaatattggataagttgaaggcccctcctaaaccaaatgatgtaccagacataatgccagaacaactnctggaggctgatggtttgatatttggttttccttctcgttttgggatgatgccgagccagctcaaggccttctttgatgcaactagtgagctatggggcatcccaagcattgccggnaaacctgntggg

SEQ ID NO: 10606 - DNA, 257 bp, Glycine max
  unsure (1)..(257): unsure at all n locations; Clone ID: 701151355H1
aagaatgaagaaattccaaaggtttctccctactttcgaaatcactatgggaacaatggaggcaatggtgaagagaatcaaggaaaagttgcaaccagaaagatcgttttagcactgcctgcctnctgtccccagaaattaccaactgtggttgacttaaaggagccgatgaggacgaataaagaagcttataacaacattaagattggactgatttnnaaagtagtggcaatgaaattggaactggaaacactaca

SEQ ID NO: 10607 - DNA, 155 bp, Glycine max
  unsure (1)..(155): unsure at all n locations; Clone ID: 701151356H1
gagcttgatcttttcaggggctgtgttagtttgaggtgtttgtttctacatgattgtcagtactatggcaggtttaggaggttcaaaatctttgccccccaccttgtngacttcagcatcaagggaatgagagtggatgaagtgtttggttctga

SEQ ID NO: 10608 - DNA, 256 bp, Glycine max
  unsure (1)..(256): unsure at all n locations; Clone ID: 701151359H1
ggtagcattcagtgaaacactagctagggtattgggagctctcgttgtttcggagttagggaccttacgcagccatggccactgctacgaatgccgccgccgccccaccacgccagctctcccagaaggaagctgacatccagatgatgttggccgccgacgtccacctcggcaccaagaactgcgacttccaaatggnnnnttacatcttcaagcgccgcaacgacgggatttacattattaaccttgggaagac

SEQ ID NO: 10609 - DNA, 257 bp, Glycine max
  Clone ID: 701151360H1
ggagtgagtagtgagaatggagtttcaagggttaccggaaggttgcattgctagtatactctctcgcactacgccggcggacgtgtgtaggttttccgtcgtatcaaagattttccgttcggccgctgaatcggacgctgtgtggaaacgttttctcccttccgattaccattccatcatttcccagtctccttcgcctctcaactatccttccaagaaggagctctatctcgctctctcggatcgccctatcatca

SEQ ID NO: 10610 - DNA, 255 bp, Glycine max
  Clone ID: 701151361H1
gggtgaaggtgaaggtgatgatggaattggaagtcgacgagaacgacttgaaagccgccggtgctgagctcttcgtcgacggtggtcggcgcggcattcgcatcaatggctgggtgatcgagactcggaggcactccatactcaactcttccacactccaagagtgggaacagaatctcgatacgtctcatttaccagaaatggtttttggggaaaacactttgattctaaaacacttgagcatggcaccaacat

SEQ ID NO: 10611 - DNA, 236 bp, Glycine max
  unsure (1)..(236): unsure at all n locations; Clone ID: 701151366H1
gggnagcactgagcacttgaggaaatgngnacccnatgggnaagcgatctacancgttggtaactggnttcgagaancttgacaggccattgatcgtctcggttnncgtcttcagggcggtaatacttccacgagcagctctctaggcatcgaactctagatgaacatatttccataaggctcctgttgttgatantgntntattctgnnnnaacgnctngtcattggagacgttc

SEQ ID NO: 10612 - DNA, 256 bp, Glycine max
  Clone ID: 701151369H1
tttgttcgtctcatatggtgctaggtgccacgcatttctcctccacctcttattctccatcgtgtttatgttcgcatctcatagaggcacgtgtatcccttgatgcttttaaaatataacacatgtaccccttaaggttgtaaaaatgttacacatggggtctttaaaaaataatacaagtgtcccttgttttacaaaaatttcacctaatacccatcttccatctcactcattgaatgtaaaagaaatacaacag

SEQ ID NO: 10613 - DNA, 240 bp, Glycine max
  unsure (1)..(240): unsure at all n locations; Clone ID: 701151370H1
ganggggttggatattcctacacagtgacaagaggtttgcngggtttgataaggagaagaaggagcttgatgcagaggttcatcggaaatatgtttttggtggacatgttgctgcctatatgaagatcttggcggaagatgaaccagagaaataccagtcacacttcagtgaatacatcaagcgtgggatagaagctgatggtattgaggcactgtataaaaatgttcatgctgccatcc

SEQ ID NO: 10614 - DNA, 254 bp, Glycine max
  unsure (1)..(254): unsure at all n locations; Clone ID: 701151373H1
ggaagtgtaagcactaagtggttgaggaaatgggaacccttgggagancgatctacagcgttggtaactggattcgagggactggacaggcnttncatcgtctcggttccctcctccagggcggttactacgtccaagagcagctgtctaggcatcgnactctgatggacatatttnataaggctcctgttgttgatgaggatgtatttgttncgcctantgcaaccgtcatggagacgttcaacttggaagag

SEQ ID NO: 10615 - DNA, 235 bp, Glycine max
  unsure (1)..(235): unsure at all n locations; Clone ID: 701151374H1
gtcaaagaatgnttcatatgtnatgtctgcttcanggggaaaaatttctctatgcaanatgatgacatctaagacaatgacaacttncatgncacctccaccagcngctacatggctgncattncatcnctcaagatcaanaatnttatngctattggcatggaggantcttccatacaaatctnnaatgttagagtggacgaggtcanaactaagctaaagggtcatcagaaga

SEQ ID NO: 10616 - DNA, 162 bp, Glycine max
  unsure (1)..(162): unsure at all n locations; Clone ID: 701151375H1
gcagacttgactttncgaagatttttttgcgttatnccttgagcagctggaatctgttattcaagggaaagagacttccataagtcatgaagagcttgttcttagaagccgagatcagtcagtatctgnctatgtcgttatgttcttcagatttgttacctc

SEQ ID NO: 10617 - DNA, 251 bp, Glycine max
  unsure (1)..(251): unsure at all n locations; Clone ID: 701151376H1
ggcacaagtntgttgaganagctagaagcaataaganganaatnaaagtgcttgtnctgtnngttgctacagttttggtagcatatgaatgccatggctcagactaccagnagttccctctccanatgaaaactgggtttngtgggcaatacagcaatgaggtggcatntgccagttggaggctggcgtggaagcaaacaacgtagtcaagtggcgaactgttcctgcagctttcggagatacatanctgc

SEQ ID NO: 10618 - DNA, 239 bp, Glycine max
  unsure (1)..(239): unsure at all n locations; Clone ID: 701151378H1
gnnggggttggatattcctcacagtgacaagaggtttgcngggtttgataaggngaagaaggatcttgatgcagaggttcatcngaaatatgtttttggtggacatgttgctgcctatatnaagatcttggcggaagatgaaccagagaaataccagtcacacttcagtgaatacatcaagcgtgggatagaagctgatggtattgaggcactgtataaaaatgttcatgctgccatcc

SEQ ID NO: 10619 - DNA, 258 bp, Glycine max
  unsure (1)..(258): unsure at all n locations; Clone ID: 701151379H1
gaagantttgaagttgccaatgactctagtaatgatgatattgagaatatgctctcagagacttttganctaggcatggnagaggacttcaatgtnctagagaacgagtttgagcagttggcgatgtcctctganactctagatcattctgatcctnatgctgaganaagtgtctcctcagggtcttaacanagatgttaaagcnattctnattaacttgacaccaaaatcaccaagggaaaggggtcccaagtncct

SEQ ID NO: 10620 - DNA, 259 bp, Glycine max
  unsure (1)..(259): unsure at all n locations; Clone ID: 701151381H1
taagggaggcagaaaagctggttgcaaccaagattcatccgatgacaataatatcaggttttcgaatggcagcagagtgtgctcgtnatgctttgttggagaaggttgtggacaataaagcagattctgagaaattcaggtcagacttattgaacattgcaatgactactttgagctccaagattctctcacaggacaaggagcattttgcaaaattagctgtggatgctgtaatgagactaaagggaagcaccaattt

SEQ ID NO: 10621 - DNA, 263 bp, Glycine max
  Clone ID: 701151382H1
gggaggaaggaaggtaaaggaagccagaggagatggaagaagagggttctcagcagccacagttggtgcttgccgagaagctattccttctccgacaacccgttcaagacattgacaaggttcgctacaaggaggatgttttcactcacatcaaggaaaacgagatggtccctttgtacgagaccctagtcgccgattccgtgttggactggatcgtgcccttttggacttcatgcgcgctaaaattgaagacgagctcacca

SEQ ID NO: 10622 - DNA, 255 bp, Glycine max
  Clone ID: 701151384H1
gagaagaaacgagagcgagagagagaaagaaatggcgaccaacattgggatcatggatgcggcttacttcgtcggcagatctgagattctttcttggatcaactcaactctgcaactcaatctctccaaagtcgaagaggcttgttccggcgccgttcattgtcagcttctcgatgccgctcatccagggatcgtgcctatgcacaaggtcaatttcgacgccaagagcgagtacgagatgattcagaactacaa

SEQ ID NO: 10623 - DNA, 233 bp, Glycine max
  unsure (1)..(233): unsure at all n locations; Clone ID: 701151385H1
gagagggcgaattctangaggcagagaaggaggaaangagtgtgttgccccagcagaagaaagatgaccagaaaactgttgactctgcgttgataaaagccatcgagagtgttccagacttgaagacttatctgggtgccaggttttctctaaaggctggcgtgaaacctcatgagctagtcttctagagtaaaggggtgttactcttgttcttcatatcctggttgtttatg

SEQ ID NO: 10624 - DNA, 260 bp, Glycine max
  unsure (1)..(260): unsure at all n locations; Clone ID: 701151388H1
aacacaatcatggggtgtatataaaagaggttaaaagggtataattggcaataaaaaatttaatgagaaggaaggggtgaatttagtaaancaggagcagtacttaacaagacccggatatctcagcccgccaatagaccagtccattggacccgaattgactgtttatagtttatacatgtaagtaccatcagtgattacctcagtaaacatgcaattagccaattacccccactaaacatgtttttagccgcagttaa

SEQ ID NO: 10625 - DNA, 254 bp, Glycine max
  unsure (1)..(254): unsure at all n locations; Clone ID: 701151389H1
atcaaccgagttggtgagagtccaaaagtaaatgcaagagcttgttctgttatacgcccacgtgcagtcttatctagtcccgaaaatgatggattaattggaagcataaatgacttgaaccacagtgtatcttcagctcacagaaagaataatgctnaagtgaagatagaaggccaagctaaagttttgtctattcaggtgaaggaaggaaaatattcggacaaggaggaatgtgaggcatcaacaaaggcaga

SEQ ID NO: 10626 - DNA, 250 bp, Glycine max
  unsure (1)..(250): unsure at all n locations; Clone ID: 701151390H1
attnagtatcttcacacgggttgtgttcctgcagtcatccatcgagacttaaaaagcagcaacattcttcttgacatacaaatgagagccaaggtttcagattttggactctcaaaacttgctgtggatggagcctcccatgtatttcgcatagttcgtgggacagtaggatatttggatcctgagtactatatttccagcagcttactgacaagagtgatattatagttttggcgtaattcttcttgaa

SEQ ID NO: 10627 - DNA, 251 bp, Glycine max
  Clone ID: 701151391H1
ggaagtagtaatggaaatggggatttccaagacaacaacaagcactgaggttaccgacgacaattccaatagcagcagcaccactcatactcaaactcgcaaccatatctcctttgctgctccctacgccgtaggagaaaaggtcttaaccaatcattctgattgtctttacgaagccaaggtgaggcaagttgaataccgcaacactaaaggatggcaattcctcgttcactatcttggttggaagaaga

SEQ ID NO: 10628 - DNA, 257 bp, Glycine max
  unsure (1)..(257): unsure at all n locations; Clone ID: 701151393H1
gatcgaagcanaaaatgaaaacccaaagtgcttctctcctctgtctttttctctctcttgctatccttttggctagtggcactgctgcaagtgcaactccaagaagcgcagtgccaagccaccatgtttcaacattcaacagaagcctttttccttccactttnctctttgganttggttctctgcttaccaggcnnaaggagcagcaagtgtagatnggngaggnncaagcntatgngacanctgcngtnnacatt

SEQ ID NO: 10629 - DNA, 259 bp, Glycine max
  Clone ID: 701151394H1
gaatccgcatttgtttgaaccaaataactggaggaagtttgtggggtttgtgaagaagatgaaagaagggaagagtgcacacaagtgttgggaagaggtggagagggaagctgagcattttgtgcatgttacacagcctcttgtgcaagaggctgcagtgctgatgcactgagaattgttgaacatccttgtggtaatagggcttaggataagtcacaaggaggctgtgtgaaagttttagtgaaccaacagcccaggt

SEQ ID NO: 10630 - DNA, 261 bp, Glycine max
  Clone ID: 701151396H1
ggcacaagtttgttgagatagctagaagcaataagatgaaaatgaaggtgctgttttgtttgttgctacagttttggtagcatatgaatgccatggctcagactaccagaagttccctctccaaatgaaaactgggtttggtgggcaatacagcaatgaggtggcatgtgccagttggaggcttggcgtggaagcaaacaacgtagtcaagtggcaactgttcctgcagcttgcggagagtacatagctgacaacgtctag

SEQ ID NO: 10631 - DNA, 181 bp, Glycine max
  unsure (1)..(181): unsure at all n locations; Clone ID: 701151401H1
atatataacaaatataatactattatacactaaaaatatttctcaattaattaaataattaaaaatatcaaattaaatgaaatgtttaatttttaatgtttaaactggaaagagaacagtaagaatgaganaggaaacgtaacaatgaagggaagagaacagtgagaggnagagagccata

SEQ ID NO: 10632 - DNA, 249 bp, Glycine max
  unsure (1)..(249): unsure at all n locations; Clone ID: 701151402H1
gactcgcagttgtattgttnaacaagggtttctctgtctgcttcttcactttctctcgtttcaatcgaaaccaaaacaaaaacatgggcagaaaattcttcgtcngtggcaactggaaatgcaatgggaccactgaggaggtaaagaagattgttactactttgaatgaggctaaagtcctggagaagatgtcgtagaagttgttgtgagccctcctttgtgttccttcctgttgtaaaagtttgctgc

SEQ ID NO: 10633 - DNA, 161 bp, Glycine max
  Clone ID: 701151403H1
ggccattgttgttgctattatcatccgcagctgcttttattcgcaccgcaaacagtgagccatggccgtcggaaagaacaagcgcatctccaaggggaagaagggtggcaagaagaaggcagctgatcccttgccaagaaggattggtatgacattaaggc

SEQ ID NO: 10634 - DNA, 130 bp, Glycine max
  unsure (1)..(130): unsure at all n locations; Clone ID: 701151404H1
cctacttaacgcgggtgttgagtctcacgcttaacgccctcgtttagcgcctgtgtcttcagtcgcgctcagcgcgagctgcaacgctgagcgaggcatctaggctggatcttgttngctggtttcttct

SEQ ID NO: 10635 - DNA, 159 bp, Glycine max
  Clone ID: 701151405H1
ggaccaatgggtgtttttgagtttgataagtttgccacaggaacagaggccatagccaagaaactggcagagctgagtgggaagggagtaacgaccatcattggaggaggtgactctgttgccgctgtggagaaggttggtcttgcagacaagatgagc

SEQ ID NO: 10636 - DNA, 247 bp, Glycine max
  Clone ID: 701151407H1
aatattgacctttgtaattttttggacggaattgttaagccttactactgtggttgtgtcagtaaatctaatattggttcttgctcacattgttgaatgatattttttatgacaccttcagattggagaataggtgtcattcttttgctggaatcccaagtttactgccatactactgtagcctctggtttaaataattttttcttggtagacttcatagattcaccaatggtcataacgttttgag

SEQ ID NO: 10637 - DNA, 213 bp, Glycine max
  unsure (1)..(213): unsure at all n locations; Clone ID: 701151408H1
gcctcctattttntaattaaaatatttatctcttacttttaaaatacacgtggttttagttgttgagaccaattttaattgttaatttgtgtgctttgttaacattaggggccaaatgtttgtttattaaatacatgaaaaatatttattttaattatttaattgttgataagcttaatttatatataanagaagaaaaaagtacacggtcat

SEQ ID NO: 10638 - DNA, 188 bp, Glycine max
  unsure (1)..(188): unsure at all n locations; Clone ID: 701151409H1
ggcttaacaaaaacccaaaaaaacatgcatttgttcctgaatttcttgacgaatcctaatncctaactaattcnactcaacagtacatnncaatccacngctttgttcaactcaaatcctcaatcgctcgcgatttcttcttctggaagnngcaaggatctcgataaanggcgaccactgcntgtttt

SEQ ID NO: 10639 - DNA, 179 bp, Glycine max
  unsure (1)..(179): unsure at all n locations; Clone ID: 701151410H1
gacaangaaacattcgcaaaancaaaatcccagtatcaaaattcttctctttntttcatatttcgcaaagacatggatttcagagtgatgggtttggagtctccactgttccacacgctgcaacacatgatggacatgtcagaggacggtgcaggagacaancaagncacacatngctc

SEQ ID NO: 10640 - DNA, 188 bp, Glycine max
  Clone ID: 701151411H1
gagcaataaccatagcagcacacgcaccacaccacacaaagctgttgacataacataacttcactttcaaggccaatcctctttaccttccactttttcctcctctcaaattcacatccccccccgaccctttaagtaaacaccaaaaacacacatacacactcacgcatattgacaccctttgcaca

SEQ ID NO: 10641 - DNA, 167 bp, Glycine max
  unsure (1)..(167): unsure at all n locations; Clone ID: 701151412H1
ggaagcgaaacggggttgcctcaacaattcgctgttgttgttctcttctcttctctttgacatgaatactctttcttccacgctccatggcgggnggcttccccgctcagcttcgaaaaccaaaaccgcatctctctcnaaatgccatcgcatttgggtcaccaaag

SEQ ID NO: 10642 - DNA, 205 bp, Glycine max
  Clone ID: 701151413H1
ggaacctttgcattctattcattcaagattcagcaagtgcgttttggaagcagagaccgaaatacttcgagatggcccgtacaaagcaaactgctcgtaagtcaactggaggaaaagctcccaggaagcagcttgcaaccaaggctgcacgtaagtctgcaccaacaactggtggtgtgaagaagcctcatcgttatcgccctgg

SEQ ID NO: 10643 - DNA, 166 bp, Glycine max
  Clone ID: 701151414H1
aagtccaacagggtcttggagttgtcaaactctaattacgggcctctgtcagttctacagagtacctgtcacctccagcaagggcatcaggccccctactaatcgagctttcatcaagaagtactgtggtctccaggcaggtgcagggcgaaaacacccacagcag

SEQ ID NO: 10644 - DNA, 249 bp, Glycine max
  unsure (1)..(249): unsure at all n locations; Clone ID: 701151415H1
gacggcaacagaagaataatcgagacacagatcatagtgatcattttttaatttctcagatttatccgacgtcgctgcagatccaccaaccgttatggctgccttcagcggtgatgaaacggcaccgtttttcggcttccttggcgccgcagctgccctcgtcttctcctgtatgggagctgccttatggcacagcgaagagtggcgtgggcgtngctccatgggtgtaatgagacctgagctggtgat

SEQ ID NO: 10645 - DNA, 162 bp, Glycine max
  unsure (1)..(162): unsure at all n locations; Clone ID: 701151416H1
gatccacatcattaacacgtttccattctatctctatcttcacatatctctacctccctcaaacagtttatgctagctcttgttccaatggcttcctcagttaaactctnatntttgtgctttctctcatngnncatctctttctncatagctccaancctc

SEQ ID NO: 10646 - DNA, 243 bp, Glycine max
  unsure (1)..(243): unsure at all n locations; Clone ID: 701151417H1
gactctccattttttttatcatttagcanngtcacattggactgcttcagatcattgaaagaagcctacctaagaagcaaaaggtgaagaaagaccctgctttgatagagaaggaggaaatggaaagatgtggaaaagtttgggcaaatattgtaagaagagacataccaaagcatctaggaacttcactatttttcatcgaagcagctcattgatgccaagagggtctcagaaacttgtcca

SEQ ID NO: 10647 - DNA, 188 bp, Glycine max
  unsure (1)..(188): unsure at all n locations; Clone ID: 701151418H1
gaagaagaagggagcgagcttcgtgatcgattgcgcgaaccggtggaggataagattatggacattgcttcnctggagaagttccttcaggagaggattaaggtcggcggcaaggccggtgcactcggcgattccattaccgtcaccagggacagagcagatcaccgtcacctccgacagcaattctc

SEQ ID NO: 10648 - DNA, 177 bp, Glycine max
  unsure (1)..(177): unsure at all n locations; Clone ID: 701151419H1
gcaactagccagtgcttctgtccttccaatgatcctcaaatcagcacttgagcttgatctgttggaaatcatagccaaggctggccctggtgttcatctttcccccactgacatttcttctcagctcccaacacagaaccctgatgcacccgttatgttggaccgtatatngcgcct

SEQ ID NO: 10649 - DNA, 155 bp, Glycine max
  Clone ID: 701151421H1
ctacgaaagacacttaattcccactcattagaagtcacttcctctccagttgcaatgtttccttctaacatttacagtaccactaccaccactactcaaaagctttgtgtcacataacacagtcctttagtgtccaggacaaatatccaaaacag

SEQ ID NO: 10650 - DNA, 258 bp, Glycine max
  Clone ID: 701151422H1
cattgatgtttattcggagtttttcccggatatagctgttggttacgaggatccccgagtgcatgttcatatcagcgatggagttgcgtttatcaattctgttcctgagggcacttacgatgtcattatatcggatgcttttccagcaatggggcatagtgctgatgttcttgctgatgaatgcttcttagaatcagtagcaaaggctcttcgacccggaggagtgttctctgctccagcagacagcctgtggcataa

SEQ ID NO: 10651 - DNA, 245 bp, Glycine max
  Clone ID: 701151423H1
ggaacccgcagagtgagtgagtaggttactggaaagaggaatggagaaggaagccgaattgggtgaaaaggagtttgaacaaatggtgcgggctttgccttccgatgctgtcaaggagttattgtcgcacggggtatgcactcgctgcatctttcgcctcttcggcctccaaggccccgtctatgcttctcctccctccctctcttccctcttcgatgcaacacaacaagattgcctttgcacac

SEQ ID NO: 10652 - DNA, 190 bp, Glycine max
  unsure (1)..(190): unsure at all n locations; Clone ID: 701151424H1
gaagatgactggatatgacaacgagattctgnnaaacaacagaatgctgcaaccatccaatgctttccttgctcaatatttgcctgccctttccttcctcccgtacccccatccatatttttgccacccaattctggtatcacaacagaattccttctccactcagcatgtagatttgctccccaataaa

SEQ ID NO: 10653 - DNA, 245 bp, Glycine max
  unsure (1)..(245): unsure at all n locations; Clone ID: 701151426H1
ggaggccacaagtacctaacacccagcnaagcttttggaacttagagttaagcagttaccttcctccaactataatatctcaaccaatcaaaatcctttttctcaatnnnnnnnnnnnnnnnnnnnnnnnnnnnncacaataagtgttgatttnttcctaaataagtgaaagtggagtnacaccttttttagtgttttncccattttgtgtgccagagtttnctgaggttccataggagaaaaaa

SEQ ID NO: 10654 - DNA, 238 bp, Glycine max
  Clone ID: 701151428H1
ggagaagaaaaagagcgtgaaggtcgggggatagatagggtttgcctttaccctgctttgctctcggtggtgtcactgattggcgttgccaaatttcctttggcttcttcttctccgaatctttcagaatctctctctcatttatttttgaattgaagtttcttctcatatctaaaatatctcgcgcgtgttattagcgatgcggaggaagaatagtggagctcaagttccgtctcta

SEQ ID NO: 10655 - DNA, 246 bp, Glycine max
  Clone ID: 701151429H1
ggccataagaaagagcaagtcgaaaagttcatctctccctctctctcacacatcccagccatgagcctcttcggtataggcagaaaccagagaacattccgcccgaaaaaaagtactccttctggaagtaagggagctcaacttagaaaacatattgatgccacgttgggtagtggaatctgagggaagcagtaaagctacctcctggggaggatttaaatgagtggctagctgtcaacactgttg

SEQ ID NO: 10656 - DNA, 182 bp, Glycine max
  Clone ID: 701151433H1
gatcacatatatttcttcagcacttatagtgtggtgagagagaaattaaggaagagctagcttaattgagtgctgctaattctatggctacccttgttgctccaaaccaaaaatctccggttgaagacgttgaggctctacataaggctctcaaaggatgggggaccgatgagaaaaccgtt

SEQ ID NO: 10657 - DNA, 98 bp, Glycine max
  unsure (1)..(98): unsure at all n locations; Clone ID: 701151434H1
anaagtnnacatgaaggtcctcccaatgctgaagcagtgncgccaagcttttgatgtttgctctcattggatgcacagctttattaacatacagtaca

SEQ ID NO: 10658 - DNA, 137 bp, Glycine max
  unsure (1)..(137): unsure at all n locations; Clone ID: 701151435H1
ggacaaggtgcatctctttggagatggcacactcaaagctatttttctggatgaagatgatgttgcaacatatacaatcaaggcaatagatgatccacgaacccttaacaaaacattgtacctaaggncctccagaa

SEQ ID NO: 10659 - DNA, 95 bp, Glycine max
  unsure (1)..(95): unsure at all n locations; Clone ID: 701151436H1
ggagttagagnagnngaagaaagagcaactcagtaacgacgatnctggagttggtgttgttgtacaagaacccattgactccacacatccctaat

SEQ ID NO: 10660 - DNA, 171 bp, Glycine max
  unsure (1)..(171): unsure at all n locations; Clone ID: 701151437H1
ggatgcattcatcatcgccatcaagacaacaacatcttcaatttgggacgttcttcttcttctcagctgcaaggtccaaaaagtcagtgcagtganaacggacgatccgaagatattaccctctctcataacattattcatcagatcagtttgatcttatgtaaatgaagt

SEQ ID NO: 10661 - DNA, 107 bp, Glycine max
  unsure (1)..(107): unsure at all n locations; Clone ID: 701151438H1
gtaggtgcaagagtttgttgtgagctataagctagtttatcgtgaggagaatatgaagttgtttgtttnctttgttgctgcagtagttttggtagcatggccatgcc

SEQ ID NO: 10662 - DNA, 252 bp, Glycine max
  Clone ID: 701151439H1
ggctcgctcgacaacaacagaaagcggcacgacaaaccctagcgattcgatggtgtgcgatgcgactcactgagttgaactagataaagatctgagtcgcggtgattggttcgacgcgctcatgggtgctgcgggctccaagctcgagaaggctctcggcgaccaattccctgaaggagagcgttactttggccttgagaatttcggcaatacttgttactgcaacagcgttttgcaggcactatattctgt

SEQ ID NO: 10663 - DNA, 173 bp, Glycine max
  unsure (1)..(173): unsure at all n locations; Clone ID: 701151441H1
ttcatgtgcccaagtgggtggaaggttcttgtcaaatattatgaaagtttgcaggcagaagagccatcacaacagcctgtgctatctacttagacattcttctaaaagtagaagcttagcatcaattgattccaatgggagagtgttaaaaacacttnctgggagtgccantt

SEQ ID NO: 10664 - DNA, 241 bp, Glycine max
  unsure (1)..(241): unsure at all n locations; Clone ID: 701151442H1
ggactcacacattgcttctgctaaccctctctgggctctccactgaactgagtctgaagaggaaaacatttaactaactgcaatggctgcacgtgtggctgcaaggtacggatctagaaggctatttagcagtggttctggaaaaatactgagcgangaggaaaaggctgcagaaaatgcttactttaagaaagctgaacaagagaagttggagaagcttgctcgcaagggtcctcacccc

SEQ ID NO: 10665 - DNA, 209 bp, Glycine max
  Clone ID: 701151444H1
ggagggcgtttcaccttgatcaaccgaaacgggtcgtgccctctctacgtgggtcttgaaaacaccgatacgccacttggttatccagtgaaatttacccattttgccctcaacgttcaagatgaggatataagggtgaacagcgacttgagaatcgaattcgtggaagtttccacaacgtgtgtgcaatccacggaatgggagggtgg

SEQ ID NO: 10666 - DNA, 249 bp, Glycine max
  Clone ID: 701151445H1
ggccgctctctgagaaaaacagatagtgtgggagagagaagagcggaagagaaaatgacgaccaggttcaagaagaacaggaagaagagaggtcacgtcagcgccggacacggccgtatcggaaagcaccgcaagcatcccggaggtcgcggtaacgccggtggcatgcatcaccaccgtatcctcttcgacaagtaccatcctggttttcttcgggaaggtaggcatgcgctatttccacaaacttcg

SEQ ID NO: 10667 - DNA, 241 bp, Glycine max
  Clone ID: 701151446H1
gatccacataaacatcaacatcgaaaggttgttaattttcaactcaatggttcttccctcaggttttgtttccatgttgatactttttggcatggttttggtagttggggtgaatattgtcccaggggttgaggcaaaggcaagggctttctttgtatttggagactcactggttgacagtggtaacaacaattacttagcgaccactgcacgggctgattcccctccttatggcattgat

SEQ ID NO: 10668 - DNA, 242 bp, Glycine max
  Clone ID: 701151447H1
aatttcggacaatacccttatggcggtttcatcctaaatcgtccaactctaaccagaagattgctcccagagccaggaaccaaagaatatggtgaacttaccagtaatcatcaaaaggcttatttgagaacaattacaggaaagactgaggcccttgtggacctaacagtgatggagatattgtcaaggcatgcttctgatgaggtctaccttggacagagggacaatccaaattggactgt

SEQ ID NO: 10669 - DNA, 140 bp, Glycine max
  unsure (1)..(140): unsure at all n locations; Clone ID: 701151448H1
ggagaganagagaggctgaaacaaagaagcganaataacagcaaaaagtaggagctgcagcagctcccccgaagcttatctcagcggcagactctgaaagctgtttgagtagcctcaacccggagaatagcaccaatggg

SEQ ID NO: 10670 - DNA, 241 bp, Glycine max
  Clone ID: 701151449H1
ggaggtgggaaatggcgtacctgaacgctaggcgcaccttagcatctaccctgtcacgagctctttcttcttcatccgctagcgcctctcgctttcgcttcgcattcgcattcgcgttgctccccgccaaacaaaccgcacccaaccctcactgggcgagtttcgcggttcggactcaatcttcgggttcgggttactcgcccctgaacgacccatccccgaactggagcaaccgtccccg

SEQ ID NO: 10671 - DNA, 76 bp, Glycine max
  unsure (1)..(76): unsure at all n locations; Clone ID: 701151450H1
gaccgcaaacccaatggtncaaaagcnctcactaagccaactgcttgtcttcttcatttcccacacnaacataacg

SEQ ID NO: 10672 - DNA, 248 bp, Glycine max
  unsure (1)..(248): unsure at all n locations; Clone ID: 701151451H1
ggtgactgaaaaaaggttttagatcgtaaaaactaatcactacgaaaacaagagatatcgaagatgggctctgcccaaagctaaggagatcgtgtcgtccaattccgtcgtcgttttcagcaaaacctattgccctttctgcgtcgatgtgaagaagctcttcggtgacctcggtgccaattacaaggccatcgaacttcgacaactgaatccgatggaaaagngctccgaggcagcttngttgaggg

SEQ ID NO: 10673 - DNA, 152 bp, Glycine max
  Clone ID: 701151452H1
aagatgagtatggagggttccgtagtcctaaagtagtggcggattttcgtggctacgcaaacttctgcttcaagacctttggagacagagtcaaatattgggtcactttgaatgaacccttatcatttagtctcaatggctacaatggtggc

SEQ ID NO: 10674 - DNA, 169 bp, Glycine max
  unsure (1)..(169): unsure at all n locations; Clone ID: 701151453H1
gacagaaagagactgagaaaaatagagtttagaactgaagatccagagcttttggaactgagaaattgttggaggaaacagtctttcagggccataaaaagatatttcatggggtctactgttgaatatcactccaacatatnttaacatcccagaacagattgagccc

SEQ ID NO: 10675 - DNA, 188 bp, Glycine max
  unsure (1)..(188): unsure at all n locations; Clone ID: 701151454H1
gtcatgaatagtgcactgacaatttttgtggtcaaaattgcgtgaacagtgttgtgaatagtgcattgatagttttttgcgataaaaaaatgattctataataacgtgaacagtgttctgacgcgcacaatgacataacagtgatgtgaatagtgttctgacgcacatagtgacgtgaatagtttcng

SEQ ID NO: 10676 - DNA, 240 bp, Glycine max
  Clone ID: 701151455H1
ggatgaacggtgaaccggatcccccttcgaagtgaattatattgcagcgaattcacacacactctgaacaacgcccaccatgcaggccagtgataggtttaacatcaattcccagcttgagcatctccaagccaaatatgttggaactgggccatgccgatttgaacagatttgagtgggcagtgaacattcaacgagatagctatgcatcatatattggacataccctttactgggatt

SEQ ID NO: 10677 - DNA, 173 bp, Glycine max
  Clone ID: 701151456H1
gagagagcgcggcataacctaaacctatctttcttctctctctgtgtgtgcgcttcaacggcaaccagaagcagccatggccactgcaaggactgtgaaggatgtttcacctcatgagttcgttaaggcgtactcctctcacctcaagcgatccggcaagatggagtgccaga

SEQ ID NO: 10678 - DNA, 208 bp, Glycine max
  unsure (1)..(208): unsure at all n locations; Clone ID: 701151457H1
gagagaagagagtgaggtttggtggtgtggtttagtgtcaaaatggcggcgagtagaagcactttacctctgatgaagtactcgagantgcgcgtggacgctcttccccgcaacactcccttgaccctcgnttccaacttgttgattcgccgcttctccgaagagggttagggggttgtttttctcgacaagtccgaggtcacagttt

SEQ ID NO: 10679 - DNA, 236 bp, Glycine max
  Clone ID: 701151458H1
tggaatcaagaccgatgctttcttcaaaactaatctttccgatgtatatgctgttggtgatgttgctactttccctttgaaattatacggtgaattgagaagagttgaacatgttgatcattctcgcaaatcagctgaacaggctgtgaaggccatcaaggcagctgaggaaggaagaacagttgaggagtatgattaccttccatacttctattcccgttcattgatctgtcttg

SEQ ID NO: 10680 - DNA, 183 bp, Glycine max
  unsure (1)..(183): unsure at all n locations; Clone ID: 701151459H1
ggacctgaactgcttctttacatttatttttcttctggtgattccacaatgtgtcctaacnctcaatcctcttcctcttaattatactctattcatctttttcctcataacctcaaacacaaaacccaagcattgcaattcccaatctcacagaaacaccaggaattaataanacacataaca

SEQ ID NO: 10681 - DNA, 194 bp, Glycine max
  unsure (1)..(194): unsure at all n locations; Clone ID: 701151460H1
gtgttctgagctgctagaagcaatggagaggaaaagaagccatgcttctttcaccatgtttgcaatgcttgttggattgctctctcagagccttgtcattcctgtaatatccaccactgttgcagatcagangaactactacaccccagatccacatgctgggagncccccccacangtttctccgattctctg

SEQ ID NO: 10682 - DNA, 238 bp, Glycine max
  unsure (1)..(238): unsure at all n locations; Clone ID: 701151461H1
ctctcaccattgttggaatatgtgtaccaccaatagttttaatgcaatcctaaaattattcatatataattatatccatattatgaaaattacatattacaataatgaaaattacaattacaattttgtnatcattagataattatcacataccttaaagtaagggtgaaacctggtgctttctcttattttagcgggtaaagtcagtcttganttagccatcaaatcaattgccttg

SEQ ID NO: 10683 - DNA, 243 bp, Glycine max
  unsure (1)..(243): unsure at all n locations; Clone ID: 701151462H1
gatcgaagcaaaaaatgaaaacccaaagtgcttctctcctctgtcttttnctctactcttgctatccttttggctagtggcactgctgcaagtgcaactccaagaagcgcagtgccaagccaccatgtttcaacattcaacagangcctttttgccttccacttttctctttggaaatggntcttctggttaccaggcagaaggagtcagcnagtgtagatgggagaggaccaagcatatggg

SEQ ID NO: 10684 - DNA, 241 bp, Glycine max
  unsure (1)..(241): unsure at all n locations; Clone ID: 701151463H1
gagacaccgacacagatctgtcttccgaagcaggaactaaatatggctgacttgttggaatggtcaaagcaagataagaaacgaatgcttcatgtcgtctaccgtgttggtgaccttgatcgcaccatcaaattttacacagaatgtttaggaatgaagctttgaggcaaagagatatcccagaggagaaatatgctaatgcttttcttggatttngncctgaagaatcccatttgttgtg

SEQ ID NO: 10685 - DNA, 175 bp, Glycine max
  Clone ID: 701151464H1
gacagccgctcacacataaaatctctccaagtgctgcatttgcgaattgaacctcaaaatcagtctctaatatttttctcactgtcttgtctctccagagaactgtatagagagagatggcagctgcaacatctggtgctgtgttaaatgggttgggaatcttccttcttgagtg

SEQ ID NO: 10686 - DNA, 141 bp, Glycine max
  unsure (1)..(141): unsure at all n locations; Clone ID: 701151466H1
gagatataccatgtgtcctgtattgagcctgcagtgaaaganataatacctcacaaaagccggtattgtgccaattgtactgctaatgtgattncnatctctccatgagaattgtgtgctatgtgaaaggttaaatgatgc

SEQ ID NO: 10687 - DNA, 152 bp, Glycine max
  Clone ID: 701151467H1
gagaggccaacgtctgtgacaccgcgaacagaattgcttcctctgatagacagctttccaagtcccccgcgggcactagtcccaactgcaattgcagcaagccttacattagttgccttcttcccttccaaacaccgcgttaagtagccatt

SEQ ID NO: 10688 - DNA, 193 bp, Glycine max
  unsure (1)..(193): unsure at all n locations; Clone ID: 701151469H1
gggagacatttgtttattagagaaatatcaaaggctatacaatatatcggttcagcaagaccaattaattcaggatatgggagaattcaaagaaacaggatgggaatgggacttcaagtggaggagaccactatttgacaatgagatagatcaggcggttgcatttattcaagaggtggaggggtcagantcc

SEQ ID NO: 10689 - DNA, 129 bp, Glycine max
  Clone ID: 701151470H1
agagcaggcctttaccaaaggtgcctactttattgggaagatgatatggagcaaaggctacaaggaactactccaacttcttaaagatcatcaaaaggaattatctgctcttgaggttgatttatttgg

SEQ ID NO: 10690 - DNA, 171 bp, Glycine max
  unsure (1)..(171): unsure at all n locations; Clone ID: 701151471H1
agagctggaggctgnaatatcatctgcagatgctanactctttggttgctgatgctgaatcaaagtggcaggaacttagtgatgctaaaatattggttgatgatgcaatagggcagcttagaagtgttactgaaagtataaatgaccgaacacgacaaattaaaaagatca

SEQ ID NO: 10691 - DNA, 237 bp, Glycine max
  unsure (1)..(237): unsure at all n locations; Clone ID: 701151472H1
ggaacgttgaaggaacatagaggcagaggtttttcttctctcaccgtagaatcgaatcgagttcactttgatcgtgtgtgtctccgatcttcaaatccgcaacaaccatggtgaggggattgctcaacaagctcgtctctcgctccctctccgtcgccggaaaatggcagcacaaccaactccgccgctcaacatccacgagtaccagggcgctgttgngatgagcaaacaggagtt

SEQ ID NO: 10692 - DNA, 146 bp, Glycine max
  unsure (1)..(146): unsure at all n locations; Clone ID: 701151473H1
atcgtttgcngcanatctccgctgaggaaagaaaccgatgaggcattcaaagctaagttccccaacgtcctcgtcatgcagggatacggtttaactgagtctgcagttacccgaaccactccagaggaggcaaatcaggtgggagc

SEQ ID NO: 10693 - DNA, 235 bp, Glycine max
  unsure (1)..(235): unsure at all n locations; Clone ID: 701151474H1
gtgcccttcagcattgggcccatctaggcccatcaagaagcttcaacatgaagcaaccaacttgcctgagcgagctgagcttgcttgggtgagcatgttgcttctggaggaagcctccagcaagcctgggagagctgggcagcaangtcctcccctattttttctataaatggacattggaggttgaggggaatgggttcaacaagctgggtattcagatttcacttaaaattag

SEQ ID NO: 10694 - DNA, 236 bp, Glycine max
  unsure (1)..(236): unsure at all n locations; Clone ID: 701151475H1
gacagcgaaacagagagtgatttcagtgagtgatcggtgttcacttgatctcatcataatcgtcagcgtcaattgaagaagatgccgatcagaaacatcgccgtcggaaggcctgaagaggcgactcaccccgacacgttgaaggcggctttggctgaggtcatctcaaccttcatcttcgtgttcgccggctcaagctccggcatcgcctacnacaagctcaccgacaagggcgt

SEQ ID NO: 10695 - DNA, 235 bp, Glycine max
  Clone ID: 701151476H1
gacaatttttctgatagttctgcggattccttttttggagccagtgcttctgtcagtaaacctgatggaagaggtttgaaacctaagttcaattcagcttctggtaacttttctaggaactcttcaatgtttttatcgaatcagacaagttccttggccagggcatcagaaaggccgagagctaatgatgggaggaagccaagttgacacatgcaagtgtttctgggagtagttt

SEQ ID NO: 10696 - DNA, 240 bp, Glycine max
  Clone ID: 701151477H1
ggcacaagtgagtttgttgatcgagataactagaaacagtgtgatgaaaatgaaggtccttgttttcttcgttgctacaattttggtagcatggcaatgccatgcgtaacgatatgttccctctccgaatgaacactggctatggtgcccgtactccggaggtgaaatgcgcaagttggaggcttgctgtggaagcacacaacatctttggcttgagaccatcctgaagagtgcgttgaa

SEQ ID NO: 10697 - DNA, 246 bp, Glycine max
  unsure (1)..(246): unsure at all n locations; Clone ID: 701151478H1
ggacatcgaagcaaaaaatgaaaacccaaagtgcttctctcctctgtctttttctctctcttgctatccttttggctagtggcactgctgcaagtgcaactccaagaagcgcagtgccaagccaccatgtttcaacattcaacagaagccttttttccttccacttttctctttggaattggttcttctgcttaccaggcagnagggagcagcaagtgtagatgggagaggaccaagcatatgggt

SEQ ID NO: 10698 - DNA, 240 bp, Glycine max
  Clone ID: 701151479H1
taaggagcctttctatcagtcaccaaatctcaatcgatcgtcatctgagaaacatcctcagagggatattggttcagaagaaattgcaattttgtttggctcagaaaaaaaggaagccctgaacaagtaatctgatacaacctaatctagagcaaggtggtatacagtattctgagaagaggacctcactggggagaattcccagtaatgtgaagaaaatgataagtgcctttgaaggtg

SEQ ID NO: 10699 - DNA, 128 bp, Glycine max
  Clone ID: 701151480H1
ggcacaccaacaccaaaacaaacccactaagatggcttcctttgtatccttcctagtgctgcttcttgcagcccttatcctcatgcctcaagggcttgctacttactacaaaccaattaagaagccac

SEQ ID NO: 10700 - DNA, 235 bp, Glycine max
  Clone ID: 701151481H1
ggttgcgtgtgatgaaccataaccatgtcagacgaggagcaccacttcgagtcaaaggctgatgctggagcatcaaagacatttccccagcaagctggaaccatccgcaaaaacggttacattgtcatcaagaacaggccatgcaaggttgtggaggtttcaacttccaaaactggcaagcatggacacgcaagtgtcactttgttgcattgacatcttcatgggaaaaagcttg

SEQ ID NO: 10701 - DNA, 169 bp, Glycine max
  unsure (1)..(169): unsure at all n locations; Clone ID: 701151482H1
attgagtatcttcacacgggttgtgttcctgcagtcatccatcgagacttaaaaagcatnnacattcttcttgacatacnaatgagagccaaggtttcagattttggactctcaaaacttgctgtggatggagcctcccatgtttctagcatagttcgtgggacngtag

SEQ ID NO: 10702 - DNA, 147 bp, Glycine max
  Clone ID: 701151483H1
ggcacaagtgagtttgttgatcgagataactagaaacagtgtgatgaaaatgaaggtccttgttttcttcgttgctacaattttggtagcatggcaatgccatgcgtacgatatgttccctctccgaatgaacactggctatggtgc

SEQ ID NO: 10703 - DNA, 170 bp, Glycine max
  unsure (1)..(170): unsure at all n locations; Clone ID: 701151484H1
ggaagagaaatagtgaaagattgcaacgacgcacgaaaatggcgaccatttggaagacaaacgcagcgagaaacgcagtgcgtagtttgacgcagtccttgccatttcactgcccgcacaccttcgattcccctctcatttctccttccgtccgttacctccgcanggnt

SEQ ID NO: 10704 - DNA, 216 bp, Glycine max
  Clone ID: 701151486H1
gtggtcccatagatttaacaccaacacctcaagtttgtgtgtttctacctgaaggggaagctgattgtacttgtggttctatgattgtgtggcatatgcttgcctgagtctgctgcacagaagttcacacaagccttgcagttgctcgattcggtttcttgactcaaaccttgccttaaattcaactgatcataccttatgttcctactgggttta

SEQ ID NO: 10705 - DNA, 128 bp, Glycine max
  unsure (1)..(128): unsure at all n locations; Clone ID: 701151487H1
ggtatccctaaaatacatcantctttacacctgtcatcaacattttcttaaaagtgaataacctaagtatcacatggaaaatatccaattataactcatcacataattcagcttttattatntttcca

SEQ ID NO: 10706 - DNA, 146 bp, Glycine max
  Clone ID: 701151489H1
gagtgaagaaaatgaaagtcattgttttcttcgttgctataataattttaggtgcagaatggcaatgcaatgggtcagagcatgagcatgagcatggccacagctaccaaattttccctttgcgaatgaaaaccggccccggtggc

SEQ ID NO: 10707 - DNA, 243 bp, Glycine max
  unsure (1)..(243): unsure at all n locations; Clone ID: 701151490H1
gggtgtngtgtggtggaggaggaatacacgaagcataggcaatgaaatgaggcgttttgactgaccttcttggatctgatcgaatccaaacccaaaccctaatctaatcccaaaaagcttattagtctctctcgatcaatcgaaccagcgagcaaagattgtctctctcctaggccatgcgaccaaccctgttcctccggcatcggccctcttccagagaggttcctttttcgttttcgccga

SEQ ID NO: 10708 - DNA, 221 bp, Glycine max
  Clone ID: 701151491H1
ggtgctctgctcgtgcctctagggttatcatttctccatttccattttctctctcacttttcaagaatcgtaagctatgggaaagtcttacccaactgtgagtgctgattaccagaaggccgttgagaaggcgaagaagaagctcagaggcttcatcgctgagaagagatgcgctcctctaatgctccgtttggcaggcatctgctggaactttgacaagg

SEQ ID NO: 10709 - DNA, 238 bp, Glycine max
  Clone ID: 701151493H1
gggagatagcaatctcatctcattcatttcaatggcaactcaaggtcaagtcattacctgcaaagctgcggtggcctgggaacccaacaagcccttaactgtccaagacgttcaggtggctccgcctcaggccggcgaggtccgtgtccaaatcctcttcaaccgctctctgccacaccgatgttacattgggggcggcaaaggatcccgaaggtctcttcccctgtattcttgggca

SEQ ID NO: 10710 - DNA, 231 bp, Glycine max
  Clone ID: 701151494H1
ggcacaagtgagtttgttgatcgagataactagaaacagtgtgatgaaaatgaaggtccttgttttcttcgttgctacaattttggtagcatggcaatgccatgcgtacgatatgttccctctccgaatgaacactggctatggtgcccgtactccggagtgaaatgcgcaagttggaggcttgctgtggaagcacacaacatctttggctttgagaccattcctgaagag

SEQ ID NO: 10711 - DNA, 232 bp, Glycine max
  unsure (1)..(232): unsure at all n locations; Clone ID: 701151495H1
ggagactgagtgacttgagtagcagaagagaagagaagatgggatctgtatgtatctgannctgtgcatcaccccatttcctgttgcggttgattcttgaggacaggcagagataggattaacttaatatgacgacacgacaccattgcaatttaccattctacattaggcatgccagccacccaatagataatagcaataagtctttcttcnttcaactcgcanggtattt

SEQ ID NO: 10712 - DNA, 119 bp, Glycine max
  unsure (1)..(119): unsure at all n locations; Clone ID: 701151496H1
gactcatctcacacttcctcttcctctctcantcagnttcagcaattgctattggcttctctcatggcttcagatnccannaaggattcgccctgctgatggcaaagctggaanngcag

SEQ ID NO: 10713 - DNA, 223 bp, Glycine max
  unsure (1)..(223): unsure at all n locations; Clone ID: 701151501H1
ggaacacaaacagcagcgtcttggtttgtgagagagacagaggcacagagagaaaatggtttcggggtcaggaatctgcgcgaagagggtagttgtggacncgcggcaccacatgctggggaggctggcatcgatcgtggcgaaggaacttctgaatgggcagaaggtggtggtggtgcgctgcgaggagatttgcatctccggtgggctcgtcaggcanaaa

SEQ ID NO: 10714 - DNA, 185 bp, Glycine max
  unsure (1)..(185): unsure at all n locations; Clone ID: 701151502H1
ggggagagaantagaggagaagggaggaaatatgagtagttcatcaaggccggtgccgaggagagagagtccatggggagtcaccggagagatctcctgaacccaaagctcaccgctgcaatgaccgtgtcgaggacgttattcaggcttgctttgagggaaacccattcaagactgttcctttt

SEQ ID NO: 10715 - DNA, 215 bp, Glycine max
  unsure (1)..(215): unsure at all n locations; Clone ID: 701151503H1
ggcagttgagatttgagaattgactctgagaatcgagaaaatggccggtttaccagcgaggctccgtctccaacccaccgacgtcaaagccgccgccttgtggggcgttaccgccgccactggcgctctctacctcattcagccatggggatggttgaagaagacattcttggagaagccagaacctgancaaaaatgagttggcttctgngaag

SEQ ID NO: 10716 - DNA, 151 bp, Glycine max
  unsure (1)..(151): unsure at all n locations; Clone ID: 701151504H1
ccagcactcgacaaagatacactttgggaatttcaacctaagaaaattggtgaaggcgaccttttaactggtggagatttatatgnnactgtttncgagaacagtctaatgcaacaccatattgcacttcctcctgataacatgggaaaga

SEQ ID NO: 10717 - DNA, 215 bp, Glycine max
  unsure (1)..(215): unsure at all n locations; Clone ID: 701151505H1
gtgtgtgcaaatagtgtaccatatatctgcttagggaagagtacgaaattgttccaaaaccaaatgttgcagagcctgccaagtggggtgtacaagatgagcctcttttggtttctagttttctctgcacatcttgcactagcatcctctcttgttgaatttcaagataatgatantccaaggcaaaagcaagngggcatgcagctattttgtcc

SEQ ID NO: 10718 - DNA, 203 bp, Glycine max
  unsure (1)..(203): unsure at all n locations; Clone ID: 701151507H1
tggtattagtgttgttgttgttgaaggtggaagcaagtccattaagaggtatgggaaacttatgcttagacgtattaattggagtgaagtttcaaaagataaagaagaaaatgaagattcagatgatgacaagcctgccaataagtgtgttctggtgtggcaaggangtgtngccaaacccagcttcaataggttcagtgtcc

SEQ ID NO: 10719 - DNA, 205 bp, Glycine max
  unsure (1)..(205): unsure at all n locations; Clone ID: 701151508H1
ggatgctaatagaataggtttcacaccacactaaagccaattagtccctctcttctccctttccttttctctatccaataatagagctttagnnnnnnnnnnnnnnnccatgcaagcatgttcctcctcagacgctccactctccaagaggttagatggcaaagtagcactcataaccggcggagcagtggcatcggtgaagcca

SEQ ID NO: 10720 - DNA, 211 bp, Glycine max
  unsure (1)..(211): unsure at all n locations; Clone ID: 701151509H1
gtacatactttacgcttaatcgactatttttattgttagaatatatgaaaatatccattatccaatattatcttgatcatcttagatcatctcatagtattagtttccctatttccttattttatgatttgtttcctatttagttagaattatgattagcataaaattagggttagtgctctaggtttgtttgatgancatatcatcngac

SEQ ID NO: 10721 - DNA, 209 bp, Glycine max
  Clone ID: 701151511H1
gaaaaagaaagatgagcgtgaagctgaattgcgtgggtggtggcgagactcacaacgtcttcgtttacggtagtctgttagccgatgaggttgtccataccctattgaagcgcgtccctccaaccgcacccgccatccttcacgactatcacaggtttaagatcaaaggtcgcgtttatcccggtattctccccgtccaaaacaacaaa

SEQ ID NO: 10722 - DNA, 205 bp, Glycine max
  Clone ID: 701151512H1
gggatgggtatgccagaagacagccaggaaatgtcgtggacttattgggtacgactgaccaaaacggggatgacgacttcattttgtggagacatattggggacgatagtggcctacatgcacatcaccgcaagccagaattaaagaaaaagggaaaaaaggaaattttgaggggaagccgacggtttcgaggaagctagagatt

SEQ ID NO: 10723 - DNA, 207 bp, Glycine max
  Clone ID: 701151513H1
gacagcggcgtttgaaactgagaaaataatggggtgggagagcttcgtggtggtgcacaacatagcaaagaggcacaacgtgggaacacttgctcgcagtgccaccgcgttcggcgtatcagaactcatcctcgttggtcgaagagatttcaactgtttcgggagccatgggtcctcctcccacctccgatttcgacacttccactc

SEQ ID NO: 10724 - DNA, 213 bp, Glycine max
  unsure (1)..(213): unsure at all n locations; Clone ID: 701151514H1
gaggatctgttgttgtgttgggtaaggtaagcatgttccgttcattgctccgccgcccgttttcgacgacgtcggcgagggcgttgaagcactgcgagaacnccgagtttctctctaagaactcgttcctgggaagctgggatgcgccacgggaccccaaggaggcggaggcgaagtaacgcgtcttcgaagagaatacgcattgcaagtgaa

SEQ ID NO: 10725 - DNA, 208 bp, Glycine max
  unsure (1)..(208): unsure at all n locations; Clone ID: 701151515H1
gagtgggtgaaggganggcaaatgganggagttctgactataaanaatactgaaattgcaaagcatctttcacttccaccagttaagctccactgcagcatgcttgctgaagannctatcaaagcngccgttnaanactntgangctaagcgtgctaaggcaactgctancnganaggcagcaacatntgagangcctgncactgntg

SEQ ID NO: 10726 - DNA, 210 bp, Glycine max
  unsure (1)..(210): unsure at all n locations; Clone ID: 701151516H1
ggcacaagtgagtttgttgatcgagataactagaaacagtgtgatgaaaatgaaggtccttgttttcttcgttgctacaattttngtagcatggcaatgccatgcgtacgatatgttccctctccgaatgnacactggctatggtgcccgtactccggaggtgaaatgcgcaagttggaggcttgctgtggaagcacacaacatctttgg

SEQ ID NO: 10727 - DNA, 206 bp, Glycine max
  unsure (1)..(206): unsure at all n locations; Clone ID: 701151517H1
agggtatgagttgttgaaaggtcagaagcaaaagaagaatagattagcaaaggaaagcaatattgttccaaagggaaagggaaatggagtagtttcatgcacagaggaagttcggaggggttgtnaggatgangnttgtggtganaangaccnngttagagcgtcnggtggcnncnctgcatggccagccnngncanancnnnttt

SEQ ID NO: 10728 - DNA, 207 bp, Glycine max
  unsure (1)..(207): unsure at all n locations; Clone ID: 701151518H1
ccctccttctagatgtcctatgcnaagtcanccaatgaagcatcggatgncanatcacncntatttgcctagttccgagaacagnttccaaacagggnnaancagtttttntgcctcgtttcagaaaaccagtgttantatntggttcacggtacaattanctcgnacaggttttacccctagtgtccagatnaagtacatttccag

SEQ ID NO: 10729 - DNA, 206 bp, Glycine max
  unsure (1)..(206): unsure at all n locations; Clone ID: 701151519H1
gatgatgaagattggaatgacactgctgctccaagtggaaaaaagaaactcactggcaatgtaactcctgtgtcaccaaatggaaatgcttcaaataattctatacatactcctaagagnaatgcccatcagaataatgttgaaaatncaaatntcccccccactaaatcggggggggctgttcgaaattctggtncagaaannaa

SEQ ID NO: 10730 - DNA, 204 bp, Glycine max
  unsure (1)..(204): unsure at all n locations; Clone ID: 701151520H1
ggagagtaataacggaagcaacccacaaaagcagcacaagaacactcatcagatcccagtgatcaattcaatttggcgttcatcactggtaaggcaaacatgaggggcattctttccgtaaggacagccttggttcaacatcatagtgagaaattgggccttggtttcagngtatttagcactcagggtgcttccactgctagt

SEQ ID NO: 10731 - DNA, 202 bp, Glycine max
  unsure (1)..(202): unsure at all n locations; Clone ID: 701151521H1
gagtggacttttatttacaatttaattagtttaagcttttgctaaatgtgagtatttnnagttttgctgaagctgaagcagttaaataaaattcggaganatgaattatgaaagcagggttgttttttctggtgttagtgttagagganagcnatttanacagagcacgaagatgaagggtctcttcaagnccaanccnccc

SEQ ID NO: 10732 - DNA, 213 bp, Glycine max
  unsure (1)..(213): unsure at all n locations; Clone ID: 701151522H1
gaccaatattctctctgaagtggaataagaaaggagattatcttctgactggaagttgtgatcaaactgcaattgtgtgggatgtgaaggcagaagaatggaaacaacaatttgaatttcattcaggtccaacacttgatgttgattggcgcaacaatgtgtcttntgccacaagttccacagacaatatgatatatgtttgcaaaatnggnc

SEQ ID NO: 10733 - DNA, 195 bp, Glycine max
  unsure (1)..(195): unsure at all n locations; Clone ID: 701151523H1
gggttctagacaagatcaaggacaagatccacggcgaggagggtggcgccaccgccgagggcgnnnnnnnnnnnnnnnnnnnnnnnnnnnnnnnnnnnnnnnnnnnnnnnnnnnnnnnnnnnnnnnnnnntgttagatttctcccactgctgcatcactatatatcttataaggtgttgggacctagtagtgagg

SEQ ID NO: 10734 - DNA, 200 bp, Glycine max
  Clone ID: 701151525H1
gtttatatggattagtggtgactggtaggtaaggttggtactatgttagtgagggaatgattaggttgcactatagaacgtaacatgtgactaatacttaattttaaattaattctattttgttctcacttcttagcttggtcacactaaagtatgagataaataaccttttctgcataattggggactgcatacatagg

SEQ ID NO: 10735 - DNA, 203 bp, Glycine max
  Clone ID: 701151526H1
ggaaatggaatgggtggagaatcaatttacggagagaagtttgctgatgagaacttcaagttaaagcatactggaccaggacttctatcgatggcaaatgctggtcctaataccaatggttcacaatttttcattacaactgtgacaactagctggttggacggaaggcatgttgtttttggtaaagttcttctggaatggat

SEQ ID NO: 10736 - DNA, 205 bp, Glycine max
  Clone ID: 701151527H1
gggatgcacaagtttgttgagatagctagaagcaataagatggaaatggaagtgcttgttttgtttgttgctacagttttggtagcatatgaatgccatggctcagactaccagaagttccctctccaaatgaaaactgggtttggtgggcatacagcaatgaggtggctgtgccagttggaggcttggcgtggaagcaaacaac

SEQ ID NO: 10737 - DNA, 188 bp, Glycine max
  unsure (1)..(188): unsure at all n locations; Clone ID: 701151528H1
gggaagaagaaaaagaagaagatggcattgagctgttcctgttcttcccctganatactggctcangttctggcacttgttgccagcatcttggtcctgctcctgggtcccccaatttaaggggtggcttggcttgggattctgataaacaaaggnccttcatcttcaatcttcatccattcttattt

SEQ ID NO: 10738 - DNA, 210 bp, Glycine max
  Clone ID: 701151529H1
ggggttgctgagaaaaaaagaggaagaaggggtccgggcagtgttattggatccagtgctgctggttgcatttgtgctttcctcacgatttttggtgttgggggagaggcattttctcggctttggagacttggatttgttgccagtttctgcactaagttgagtgacactgtctcaagtgagattgggaaggcatatggcaaaacaacg

SEQ ID NO: 10739 - DNA, 194 bp, Glycine max
  Clone ID: 701151530H1
gcacaagtgagtttgttgatcgagataactagaaacagtgtgatgaaaatgaaggtccttgttttcttcgttgctacaattttggtagcatggcaatgccatgcgtacgatatgttccctctccgaatgaacactggctatggtgcccgtactccggaggtgaaatgcgcaattggaggcttgctgtggaagca

SEQ ID NO: 10740 - DNA, 206 bp, Glycine max
  Clone ID: 701151531H1
gggataacttggagcgtgttcttgagtgcctagaccgggagaagtgtgaaacttttgaagattgtatcacttgggctcggctaaagtttgaggattattttgttaaccgggtgaagcagttgatctatacttttcctgaagatgctgcaactagtactggagctctgttctggtctgcaccaaaaagattccctcgtccactacag

SEQ ID NO: 10741 - DNA, 220 bp, Glycine max
  Clone ID: 701151532H1
ggcacaagaaatattggttcagattagacaatgtcaaaaggaagctgaggtaaagtggaaggaggagttgaaggctaaagaggaagccctagcactagttgaggaggaacgccactctaaggaagcagccgagtctaacaataagaggaagctcgagactttgcgtctgaagatagagatagatttccagcgccacaaagatgatctactaagacttgag

SEQ ID NO: 10742 - DNA, 209 bp, Glycine max
  unsure (1)..(209): unsure at all n locations; Clone ID: 701151533H1
tatccgatcctctgtcctctcgaagctttcatcgttcaacatattctcaccatctcagtcatgggcctgctatcttgttttaggtctaccgtcctgagaaaatgttccaaaggaagctctggcatgtcaagattcctgtatacgaacaattttcaacgaaacttgatttngtctggtggcatgaatcgtattangggtntttaacggga

SEQ ID NO: 10743 - DNA, 204 bp, Glycine max
  Clone ID: 701151534H1
gagagtattcttttccagattttccactttctttggagcaagttacttggaaaatgaaaatcccccttatgtcatgacatgagtagtagtatttaagacgcatccgtgcttgtgttgtaataaagttttgtgtgttgttaggaataggatggagggggttgagagcaaagaaagagaagtgatggtggcaaaaccagttgcagt

SEQ ID NO: 10744 - DNA, 202 bp, Glycine max
  Clone ID: 701151535H1
accataacacacacatgtacatttgtattttcagacttaaacaggccaatatggatttcaaagtttttttacaagttttctatgattatgtttgaataggtgttaagtctgcatgaaactcgtgcatcatatggaagcgtgtattacattggaactattgttcctgttgttatgattcttcttggtaaagtattaaacctgg

SEQ ID NO: 10745 - DNA, 200 bp, Glycine max
  Clone ID: 701151536H1
ggcattggcctacaaatctcaaccaccctatcttaaaatcttctgtgcaaccagaaaaaaacggaccttgccctcagtctcttttttccatcatcacttcattaaacattattcactctctttctctgtctctagtttttacaacatggctactgcggtaactgctgcagtgtctttccagccaccagtccacttctctt

SEQ ID NO: 10746 - DNA, 204 bp, Glycine max
  unsure (1)..(204): unsure at all n locations; Clone ID: 701151537H1
caagaaagtacaagtgaagcagtgaatgcatactatgcagcagcattgctgggtctagcatatggtgactcaagtcttgttgacactggatcaacgctggtggcgttggagattcttgctgcacaaacctggtggcatgtgaaagcagaagacaacttgtatgaagnnganttgcaaaagatagcagnntngtgggtnttctgc

SEQ ID NO: 10747 - DNA, 134 bp, Glycine max
  unsure (1)..(134): unsure at all n locations; Clone ID: 701151538H1
tacagctgangngtgcagcattggttncancaagctgaagangcttcgagcaatcagactactagtggttctgngcttcaggaacaagtcttgtccgaaaatttctagagctccatgacaagtatatgggcata

SEQ ID NO: 10748 - DNA, 203 bp, Glycine max
  unsure (1)..(203): unsure at all n locations; Clone ID: 701151539H1
ggaggaagaggaaaagaggattagagggtcgccacgtttagcaataaccaaaccctctctactcttttttcttctccttctcttcgctagggttttagcttcttcctcttcacttcgttctttttcgcctctacaatgagcaacgacaaggacacnttcaacgtcgccgatctcacttctgctctcaacgaggacaatagagc

SEQ ID NO: 10749 - DNA, 159 bp, Glycine max
  Clone ID: 701151540H1
gagtgtaaatattgtttcaagaaaaagaataagagtgaagagtcgatccagttatcacttaccacagcaaacactctagagttctaagcaatggcgattatctccgattccaacgaagaggagccgaaacccgctcactcttcaccaccgcaaccccaa

SEQ ID NO: 10750 - DNA, 200 bp, Glycine max
  unsure (1)..(200): unsure at all n locations; Clone ID: 701151541H1
ttccagaggatgatcagggacgaagactgcgcagatggaagaagagtacgccgaaaagctttccaaactctgcttgcatgagaccgaggaaacgcagaggaagaaattggatgaactgaaagtcttggaaaattcctattttgattactataaaatgaaaaagagaatgcagatgagntgatggtttattgcggagatgg

SEQ ID NO: 10751 - DNA, 188 bp, Glycine max
  unsure (1)..(188): unsure at all n locations; Clone ID: 701151542H1
agctaggatgtcgacattgaggatgattgttttgttaaattttgggggattttgcacaattgtcctcttaacccacctactagcaaaaggagaagaagcccgtgtcaagcttctaggatggatttgcgtagtctttgncactagtgtttttgcagcacctttaagcattattagggtggtaattcgga

SEQ ID NO: 10752 - DNA, 196 bp, Glycine max
  unsure (1)..(196): unsure at all n locations; Clone ID: 701151543H1
gttgtattgattgatcacttgggcttcatcaaaccaccattgaatgaagaagaaggtcttgtcttttctcagcttttgaatctatctagattcccaaaagtatatgtggaattagtcnctnntccagtgtccagagagaagtttccttatctggatnggcncnctttgncccagttgtcgctagtttggnnaaacg

SEQ ID NO: 10753 - DNA, 201 bp, Glycine max
  unsure (1)..(201): unsure at all n locations; Clone ID: 701151544H1
ggccattgttgttgctattatcatccgcagctgcttttattcgcaccgcaaacagtgagccatggccgtcggaaagaacaagcgcatctccaaggggaagaagggtggcaagaagaaggcagctgatccctttgccaagaaggattggtatgacattaaggctcttctgtttttcaagtgaaaatgttgggcannaccctc

SEQ ID NO: 10754 - DNA, 118 bp, Glycine max
  unsure (1)..(118): unsure at all n locations; Clone ID: 701151545H1
agggtttcaagagtgttttgaactactccagaaccctctcttgtttttcacaaatttgggttcagtagngtactgacccagaaaagaagattcaacaggtacctaagagaaggaaagg

SEQ ID NO: 10755 - DNA, 206 bp, Glycine max
  Clone ID: 701151546H1
tgagatggaagaggtttgcagtgcttgcagcgatgtgcattctagctgttcgggcagtaatagttcaacttgcatttttccttcacacccagactcatgtatacaagaggccacctgtcttttcaagatcattgatttttgctactgcattcatgagcttcttctctgtagttatagcactgtttaaggatatacctgacattgaa

SEQ ID NO: 10756 - DNA, 205 bp, Glycine max
  Clone ID: 701151547H1
ggagcaaaaccctaatccctatttttcttcctcagtagtgtcatttacgcttctcttctctgcagcaactatgcctaaccctaaggtcttcttcgacatgaccatcggcggtcaatctgctggccgcatcgtgatggagctctacgccgacgtcactccccgcaccgccgagaattccgcgcgtttgcaccggcgagaagggcgt

SEQ ID NO: 10757 - DNA, 199 bp, Glycine max
  unsure (1)..(199): unsure at all n locations; Clone ID: 701151549H1
ggagagagaagtgttcacgtctttgagaaatgggtgcttcggcatcggtcacagaaaaatccatccatgaattcatggtcaaggatgctaagggcagagacgtgaacctcagcacctacaaagggaaggttcttcttgtagttaacgtcgcttcaaaatgtggatttacaaattccnttacaccctgttactgagcana

SEQ ID NO: 10758 - DNA, 202 bp, Glycine max
  unsure (1)..(202): unsure at all n locations; Clone ID: 701151550H1
actgcttaangacccttctctctctcattgaggaggcagggaaagctaataaactagtggatgatgctcgatcttcatacgtaaaagagaggcttcataccaatccagctttcatggagaggctgcatgcgaagtcaatgaggttgcgagaatctaatcaggttcctgcttgaggttttcagatctgatgtatgaatttttg

SEQ ID NO: 10759 - DNA, 132 bp, Glycine max
  unsure (1)..(132): unsure at all n locations; Clone ID: 701151551H1
cacctacaacttgctacaacttacaaggccattcccacaatattgcatatntatngcaccccataaggcactgcacccactaccatcttaatttctccttcaattgctacttcaattctgattgcaaccang

SEQ ID NO: 10760 - DNA, 200 bp, Glycine max
  unsure (1)..(200): unsure at all n locations; Clone ID: 701151553H1
cagtctatgccagctagctgaaaataattgaaagcagtgctagcctatacatgtggctactatagggtcaaacgttttaaagaatattgttcccatctttccccatttcagattctgaaactaaaatcctaaataattactatttggaaccccaattnccatacacaatctcttcttataggtaatctcccattgcatng

SEQ ID NO: 10761 - DNA, 196 bp, Glycine max
  unsure (1)..(196): unsure at all n locations; Clone ID: 701151554H1
tggaaaaggtggtgcttttactggagaaatcagcgcggaacaactaaaagatcttggatgcaagtgggttgttcttggacattctgagcgaagacatgttattggagaaaatgatgagtttatagggaagaaagctgcctatgctttgngccanggtcttggggtgttgcatgcattggagattgttagaaganng

SEQ ID NO: 10762 - DNA, 178 bp, Glycine max
  unsure (1)..(178): unsure at all n locations; Clone ID: 701151555H1
gataccaaaanccaaaacacaagccaagtgaaagtgagaaaaaataaaaatcaaagagcataatgtcagggatcattcacaagattggggagacccttcatgtgggagggcacaagaaggaggaggagcataagggtgagcaccatgctggagaatacaaaggggagcaccatggtga

SEQ ID NO: 10763 - DNA, 202 bp, Glycine max
  unsure (1)..(202): unsure at all n locations; Clone ID: 701151556H1
ggagagagagaattggaaggttgcgacgagtgatgatatacacatattgtgacggtagtgaaatcgaggaaaaagaggtagcaatttgcgagttgcaatgagtaacgaaaaggctccttcatcagcttcttcgagtagctacgagttgagcaannncatcaatggcctcgacaaggttattcttcgcgacgcacgtggtagc

SEQ ID NO: 10764 - DNA, 201 bp, Glycine max
  unsure (1)..(201): unsure at all n locations; Clone ID: 701151557H1
gacacattgtgagtatcaacaagaatactcataatataggtagcatatagagctatagttatattgatattggctatttgttaagctcttatttcctcggccatggctaatnatgaacgtgatctcttctcggcggagattgtgaatcgtggaattgaaccgtcgggacccaacgctggctcgtagacattctctgngggg

SEQ ID NO: 10765 - DNA, 213 bp, Glycine max
  unsure (1)..(213): unsure at all n locations; Clone ID: 701151558H1
ggatgattcgaggagggaacaacaactgaaatattcaaaacacatgtaaactgtttctattaacttgagatttgtttgtcactgaaaaactcaccttcactgtctcagggaaaaatggcttcattgaaactgccagaggttgtcccttctcctacactagacagtgaacgactcagaaaggtttccaagggtatgggncagatgagaaagcgg

SEQ ID NO: 10766 - DNA, 198 bp, Glycine max
  unsure (1)..(198): unsure at all n locations; Clone ID: 701151559H1
tattgtataattccaggcttggactcatgagtggtaagttgaagtctaagtggattggtcctttgttgttactaatgtttttccctatggtatagttgagatcaaaagcgactccacaaacaagagcttcaaggtcaatggacaccgacttaagtcattcctcacaaacccttctttagtggacgtatggtggaanac

SEQ ID NO: 10767 - DNA, 212 bp, Glycine max
  Clone ID: 701151560H1
gattccaaaacacaaacacatacattgtagtatcacttttgtctcggaatttgttcttttgagttatggcaagcttaaaggttgcatgtgtggttttgatgtgcatggctgtgatgagtgcaccaatgatggtgcaagccgtgtcatgcaatgatgtttctgtgaacctagcaccgtgcctatcttacctgatgcagggtggagatgttcca

SEQ ID NO: 10768 - DNA, 200 bp, Glycine max
  unsure (1)..(200): unsure at all n locations; Clone ID: 701151561H1
ggaagcaaaaaatgaaaacccaaagtgcttctctcctctgtctttttctctctcttgctatccttttggctagtngcactgctgcaagtgcaactccaagaagcgcagtgccaagccaccatgtttcaacattcaacagaagcctttttccttccacttttctctttggaattggttcttctgcttaccaggcagaagga

SEQ ID NO: 10769 - DNA, 198 bp, Glycine max
  unsure (1)..(198): unsure at all n locations; Clone ID: 701151562H1
gaactgttgttgagggaactatacagnagctatttgaaggcatcatatgaattatatcgnntgcatcaatgtggactataaatcaactagnaaggagtcattnatgaccttcagcttgatgtgaanggccgtccgatgtttatgctccttgacaagtatgttgaagttgnacgtcttgaaggggataacaaatatcat

SEQ ID NO: 10770 - DNA, 203 bp, Glycine max
  Clone ID: 701151564H1
ggcacaagtgagtttgttgatcgagataactagaaacagtgtgatgaaaatgaaggtccttgttttcttcgttgctacaattttggtagcatggcaatgccatgcgtacgatatgttccctctccgaatgaacactggctatggtgcccgtacttcggaggtgaaatgcgcaagttggaggcttgctgtgaaagcacacaaca

SEQ ID NO: 10771 - DNA, 134 bp, Glycine max
  Clone ID: 701151565H1
gggacgaaagagccaaaatcccagacccaagtgctgtgaagcccgatgactgggatgaggatgcacccatggaaatcttagatgaagaagcagagaaacctgaaggatggttggatgatgagccagaggaaatt

SEQ ID NO: 10772 - DNA, 197 bp, Glycine max
  unsure (1)..(197): unsure at all n locations; Clone ID: 701151567H1
gaggggcacatcaaattctttatttataacatggagtactctgtggaaactttggaaagagatcttaagaacacgaggaaatactacgggagtggaaaaacaaaggaagcaccatggagagatcacagcttaaagggttgcacattttctcgtggaaaaagnggaaanttttgggccnccccccaattngggggggg

SEQ ID NO: 10773 - DNA, 199 bp, Glycine max
  Clone ID: 701151568H1
atcagtggtgccccccaggataacaacataatgctgtggaatgctgtcatatttggtcctgatgatactccatgggatggaggcacgttcaagttgacactccaatttactgaggactatccaaataaaccaccgactgtacgatttgtgtctcgcatgtttcatccaaatatttatgctgatggaatatttgtttgga

SEQ ID NO: 10774 - DNA, 199 bp, Glycine max
  unsure (1)..(199): unsure at all n locations; Clone ID: 701151569H1
atatgatcgagtatgaagagaagtgttgtgaaagactttggaaaaaaaaaagaagtgcctgtgcggcttacatcagagctattcaagacatgtacgatggggcaaatacaggtgttagaactccagaaggcaagaccanggactttcctgtaaggaggaganttaaataaatgttcanctgtgtgtccttgtttaatca

SEQ ID NO: 10775 - DNA, 197 bp, Glycine max
  unsure (1)..(197): unsure at all n locations; Clone ID: 701151570H1
ggggggaacataattatttaatacatttaagtaaaatttactttgtgaaggaaattgttctcatagatgtcaatacagacccgtccctctccatataattaataaaacctctccttttttcctcccatttatttaagtcaaattttttacanggcctaaaggtcattttgtttnnccgttcagtgtatctgccatnc

SEQ ID NO: 10776 - DNA, 193 bp, Glycine max
  Clone ID: 701151571H1
ctgctttcttttatcaggagaaaatttgcatttgcatccttacatattcgaattttgtgagcataagcctaccattaacttctacaatttctcactccatatagatatttaagtgtaaaaatattgaagtaggctaagtagtctctttaatggagttcaacttcagtttgcattctctttcatgctattctta

SEQ ID NO: 10777 - DNA, 196 bp, Glycine max
  unsure (1)..(196): unsure at all n locations; Clone ID: 701151572H1
aacctttgttgtcacacttcaagcgttggaagacaaaattcgaagttgttatgcagtgcgtattaaatataacagcgatgatttcttaaagatgattctcattgatggttgcttcataattgagctttttttgagactctatagatnncaactattggcggggaaaggaccctgtgttgctaaaagactggatgcg

SEQ ID NO: 10778 - DNA, 177 bp, Glycine max
  unsure (1)..(177): unsure at all n locations; Clone ID: 701151573H1
ggggtcatacaanancgagccagagcactgggcacatgcattctttaatggggcaaggtacaatcttctttcatcaaattttggacagcaattctacagttgggtgtcagaggcacatgaattgccaattactcaaatgattgatgcattncgaggtaagatgatggaaacaattat

SEQ ID NO: 10779 - DNA, 208 bp, Glycine max
  unsure (1)..(208): unsure at all n locations; Clone ID: 701151574H1
caagtgaaagtnaganaaaataaaaatcaaagagcataatgtcagggatcattcacaagattggggagacccttcatgtgggagggcacaagaaggaggaggagcataagggtgagcaccatgctggagaatacaaaggggagcaccatggtgaacacagtagtgagtacaaaggagagcatcatggtgaacacaaagctggagagta

SEQ ID NO: 10780 - DNA, 147 bp, Glycine max
  unsure (1)..(147): unsure at all n locations; Clone ID: 701151575H1
gatcgaagcaaaaaatgaaaacccaaagtgcttctctcctctgtctttttctctctcttgctatccttttggctagtngcactgctgcaagtgcaactccaagaagcgcagtgccaagccaccatgtttcaacattcaacagnagcc

SEQ ID NO: 10781 - DNA, 198 bp, Glycine max
  unsure (1)..(198): unsure at all n locations; Clone ID: 701151576H1
acatacatgttaattgcattttgcttttcagcatccatgtaagcattgctataatagcgttgaagagtcctaaaaaactcttgggactgtgttgcagctttccattgccccctcctctcagagaatatctacatggcaagtagcaacagaagttagagaggaccatntgttattataccaatgtacaaatcattaact

SEQ ID NO: 10782 - DNA, 203 bp, Glycine max
  unsure (1)..(203): unsure at all n locations; Clone ID: 701151577H1
gttatancgngntgcnnttccanccaatggggnttattntnannantcttggcgatgaatnctttcttngaatcagtagcaaaggctcttcgacccggaggagtgttctctgctccagcagacagcctgtggcataagaactttgtggttgcagacaccatagcaaattgcaagaagatattcaaaggctccgttaactatgc

SEQ ID NO: 10783 - DNA, 201 bp, Glycine max
  Clone ID: 701151578H1
gatcacaacacaagttgaaacacaaagaagaaaaaatgggttcctctttgtggacttgtctgattttgttatcacttgcttctgcttccttcgccgccaacccaagaacaccaattgatgtgccatttggcagaaactatgtgcctacttgggcctttgatcacatcaaatacctcaatggtggttctgagattcagcttc

SEQ ID NO: 10784 - DNA, 199 bp, Glycine max
  unsure (1)..(199): unsure at all n locations; Clone ID: 701151579H1
tctattactacacatantctgacaananatgattgctccaactttctaccaataactattataactgngccccaactctnaattcccntgagatagcataagtttctnttaacattaggtgtaaaggtttncatctaatcatngatatctatcaacaaanatccggtagtncacggataganggccacntgtnagacgt

SEQ ID NO: 10785 - DNA, 198 bp, Glycine max
  unsure (1)..(198): unsure at all n locations; Clone ID: 701151581H1
gggagacttaaatgaaaaggaaataatcttaagtggaaccttctgcgaaattagccttccttcgtcccttgattgaagtataaattaggggtgttgaaattcaaagccatatccgtcattaaccaaatttgtgtttctccgattgcaagcaatggactccttcaattccttcttcgattcanaaaaccgntggntccc

SEQ ID NO: 10786 - DNA, 149 bp, Glycine max
  Clone ID: 701151582H1
gatataaagaacgaaaaatccactaacagcagcaagcttatctctgcagcattgaacaccaattgaacaccaatctgcagcattgaacaccaattcaacgccaatgggtcaggaagaggaaaaatcccaagaaaacaaagtggaggaga

SEQ ID NO: 10787 - DNA, 153 bp, Glycine max
  unsure (1)..(153): unsure at all n locations; Clone ID: 701151583H1
gacactatgtgatgttgtaggtgtgtgtgttgttgcacactctccacacttacacagaganancagagagagaaagaaaaggatcaaatagttaaaacctttggttctttccctccatagttccatttttccattcaacaacacaacncctng

SEQ ID NO: 10788 - DNA, 198 bp, Glycine max
  unsure (1)..(198): unsure at all n locations; Clone ID: 701151584H1
gataacttttgggttgtgtgtcttattggtggaggaatgctcgttacccactccttttttagttcccaaattccccaaagaaaccaaaccaaaaacaaacgtatctgactctctctaatggagcggcacaantgcaagctctgctcccaaanattctccantggcananccctcggtggccaatgaaggttcnctccc

SEQ ID NO: 10789 - DNA, 194 bp, Glycine max
  unsure (1)..(194): unsure at all n locations; Clone ID: 701151585H1
ggcacaagtgagtttgttgatcgagataactagaaacagtgtgatgaaaatgaaggtccttgttttcttcgttgctacaattttggtagcatggcaatgccatgcgtacgatatgttccctctccgaatgaacactggctatggtgcccgncctccggaggtgaaatgcgcaagttggaggcttgctgtggaag

SEQ ID NO: 10790 - DNA, 194 bp, Glycine max
  unsure (1)..(194): unsure at all n locations; Clone ID: 701151586H1
ggagtgtatgtgccttgtgtgttcaaagtttgataatgcctcaaatacatgtagttgggttggatgtgatgtttgccttcactggtgccatactgactgtggattacgggaatcttatattagaaatgggcatgggacaaaagggntgaccgagatncagtttcactgtattgcttgngatcatcctcggagaa

SEQ ID NO: 10791 - DNA, 195 bp, Glycine max
  Clone ID: 701151587H1
gtagcatgttttaaccttgaagtgttattaaactgtaccagactgcaaagaccaaggtaattaatagctgcttgaatcctgtttggaatgaagagctgaatttcactctgacagaaccattgggagttctgaatttggtgagttccataatatttagtatgcccctcattctttgatttcttcagtctttcctag

SEQ ID NO: 10792 - DNA, 149 bp, Glycine max
  unsure (1)..(149): unsure at all n locations; Clone ID: 701151589H1
ggggagtggaattttcattggaggngaccatggttccaatggggataagccatggtcactagtttcatgaacaaattggaaggggcgagtttggtggcggataggcaagattcattggtgtggaaatggccttnaacagagtttacttc

SEQ ID NO: 10793 - DNA, 196 bp, Glycine max
  unsure (1)..(196): unsure at all n locations; Clone ID: 701151591H1
ggcacaagtgagtttgttgatcgagataactagaaacagtgtgatgaaaatgaaggtccttgttttcttcgttgctacaattttggtagcatggcaatgccatgcgtaacgatatgttccctctccgaatgaacactggctatggtgcccgtactccggagtgaaatgcgcaattggaggcttgctgtggaancac

SEQ ID NO: 10794 - DNA, 198 bp, Glycine max
  Clone ID: 701151592H1
gaagggggtttgataaaggttgacattgaaatttgaagccatggttcttgactccattctgacatctcctcgtctcaagtctccatctttcaggagacagtttaaaaaggatgaactgggtagttggtccacacttttccagaggcatcgcttcctcttatctgctcttgttctgctaaactctcctctgcactgttt

SEQ ID NO: 10795 - DNA, 199 bp, Glycine max
  Clone ID: 701151593H1
gatctcaatttcttttctctttgtcgcaaagagaagagatctgcctcctttttatcaaatctatctcttcttcaagaatagttgaaaatggggctgtctttcaccaagttgttcagccgactgtttgccacgaaagagatgcgtatactgatggtgggtctcgatgctgcgggtaagaccaccattctgtacaagctca

SEQ ID NO: 10796 - DNA, 150 bp, Glycine max
  unsure (1)..(150): unsure at all n locations; Clone ID: 701151594H1
gagaacagggacnagctaggaaanggggntngtttcacttcanatttggttaattagggttncgtggcncgagtaagaacgantgnagtcngagcagtaaaacccatcaaagaccctcactctcagcncactcttcacgtaagttaacag

SEQ ID NO: 10797 - DNA, 252 bp, Glycine max
  Clone ID: 701151604H1
gagagaagatggtggcaagttctagttcagaaggaacaggagtacccctattgagagcatctgataataatggaagagatcaaaacacaagatccccccaagctgagggatggtggaacaaagtgttggacatggaagaggccaagcaccaactcttgttttcactgccaatgattcttaccaacttgttctatcacttgatcattttggtttctgtcatgcttgttggtcaccttggtgagcttcagcttg

SEQ ID NO: 10798 - DNA, 261 bp, Glycine max
  Clone ID: 701151605H1
caccaggagagtagatgcaggcagacacacaagtgtgagatactttcccaattggtgactgtgcagttgatggaggttctgattgaaagaaagatgcaggagatgagggaggtgctacgaaaggaagcgttatactaggtgcttgaattgaactagcagctgcagcaggatcagctccattggtggttggttctggaactaggacagcatgcccaatgcgcttcgggtttttttatatccaaaacacccaattttgcccaa

SEQ ID NO: 10799 - DNA, 228 bp, Glycine max
  unsure (1)..(228): unsure at all n locations; Clone ID: 701151606H1
gggctgagantcggaagatactggactgctctggctgctggtaattgcaatggttgcagctatgccgggacattcagacctccaaagtgccaggttggttgtggccaaccaacccagagatggtaccatgtacctcgatcttggttgaagccagatcataacctgttagttgtttttgaggaactgggggagatccttcaaaaatttcacttgtaaagagatcagtga

SEQ ID NO: 10800 - DNA, 249 bp, Glycine max
  Clone ID: 701151608H1
ggaagacaaatttacgacagttaatggctatgaacacaatgccgaggtaatatatggagacacagattcagtcatggtacaatttggtgtttctgctgtagaagaagctatgaacttggggagagaagctgctgaatatattagtggaactttcacaaaagtaatagttcattttgcgttttatttttttctttagtcattgtaagtttgagaccctgtataatagcccgtgaaagtgatgaaaccctg

SEQ ID NO: 10801 - DNA, 251 bp, Glycine max
  unsure (1)..(251): unsure at all n locations; Clone ID: 701151610H1
ggcacaacatcttcagcttttccctcgttgaaatgaaaatgggttcttctttgtggactttgtgtctaattttggcttcactagccccttctgcattctgtgcctttccacggaggccagtggatgttccattcggcagaaactacgttcccacttgggccngnngatcacatcaaatacttcaatggaggttctgagattcaacttcatcttgacaagtacactggtactggcttccagtccaaagggtc

SEQ ID NO: 10802 - DNA, 203 bp, Glycine max
  unsure (1)..(203): unsure at all n locations; Clone ID: 701151611H1
gaactgtgtctgaattctgaaaaaactggaacatgtcttcaactactgtggtaggctctatttctacaacagcagctttgacacccttgttgccatcatcacgtacaagnagaagcacatttggcgccaattccacctccacaagcttccccgcttactccactctcctccaatctcctcttcttcaagctcaatcacacttc

SEQ ID NO: 10803 - DNA, 249 bp, Glycine max
  Clone ID: 701151612H1
ggaagaacaagtcttgcattgggtggagcatacttagaaacagcaactatgtctctcatgcagcttactagctcccctgttggctcactggtccgtttcattgtaatatttgctttatggtacagaaccatggctttggccaagttgccaccaaacgcttcatcagttccagcagttttagcgtttggagattccatcgtggacccaggcaacaacaacaacataaaaacattgatcaagtgcaattcc

SEQ ID NO: 10804 - DNA, 250 bp, Glycine max
  Clone ID: 701151613H1
ggttatttctgttgctgctgcaggctgcacttcattattgctacaaattaataaactctaaaggtgagtgattcctgagtttgtgtccagttaggagggatctggacgacgctattgaaagcacacataatcagatgcaaggttgtcagtctcatttgtcttgcttcttatagagtgcaaggcataatttttcacaattttgtaataatagtatgatatggttgaacataatctgctgtacttgtaatgg

SEQ ID NO: 10805 - DNA, 256 bp, Glycine max
  Clone ID: 701151614H1
gtcctgttgtgatgcctttgcaggtcatagctttatatataaaaaattactattgcctatgatattatgataaaagaccaaattagtatatgtataatactatagggtatttaaaaaataaaagtgactctaaagcaatagatgagaataataattccaaatccagtgtttagtttaatttagagttatcaagcttccaataagcatggatgtctcaaactatgcctagcttttgcaaccataataaaataacttc

SEQ ID NO: 10806 - DNA, 251 bp, Glycine max
  Clone ID: 701151616H1
gggagaagaaggaagcatcataaccggccaaagcttctctctcttccatttatcccccataaataaaactaggtgaaaaaaatatactctgtgcttctcatgatgatagtgtagctgaagctgcctctgctgcagcattggtgatttggacacaaaaaaagtttcaaacttttcagttctctgagcttctggtttatcattttgaaggagttcaatactttaccctattagttggttccctgaaattgtat

SEQ ID NO: 10807 - DNA, 185 bp, Glycine max
  unsure (1)..(185): unsure at all n locations; Clone ID: 701151617H1
gtcttcgccgcacgccgaaacantggccggaaaaggagagggtcctgctatcggaatcgatctcggaaccacctactcttgtgtcggtgtgtggnaacatgaccgngttgaaatcatcgccaangaccaagggancagnncgacgccgtcttacntcggcttcactgataccgagcgtctcatcg

SEQ ID NO: 10808 - DNA, 256 bp, Glycine max
  Clone ID: 701151618H1
ggtgtgagtgaagaagcagagggagtagcggcattaaaaatgcagatcttcgtgaaaacttctgacagggaagactataaccctcgaggtcgagagcagcgacaccatcgacaatgtcaaggccaagattcaagacaaggaaggcattcctccggagccagcagcgtttgattttcgccggaaagcagcttgaagatggaaggaccctggccgattacaacatccagaaggaatcaacccttcatctcgtcctcag

SEQ ID NO: 10809 - DNA, 253 bp, Glycine max
  unsure (1)..(253): unsure at all n locations; Clone ID: 701151619H1
gatcacaacacaagttgaaaacacaaaaganaaaaaatgggttcttctctgtggacctgtctgattttgttatcacttgcttctgcttccttcgccgccaacccaagagcaccaattgatgtgccatttggcagaaactatgtgcctacctgggcctttgatcacatcaaatacctcaatggtggttctgagattcagcttcatcttgataaatacacaggtactggcttccaatcaaaagggtcctacttgt

SEQ ID NO: 10810 - DNA, 251 bp, Glycine max
  unsure (1)..(251): unsure at all n locations; Clone ID: 701151620H1
ggacatcgaagcaaaaaatgaaaacccaaagtgcttctctcctctgtctttttctctctcttgctatccttttggctagtngcactgctgcaagtgcaactccaagaagcgcagtgccaagccaccatgtttcaacattcaacagaagcttttttccnnnacttttctctttggaattggttcttctgcttaccaggcagaaggagcagcaagtgtagatgggagaggaccaagcatatgggacacctaca

SEQ ID NO: 10811 - DNA, 249 bp, Glycine max
  Clone ID: 701151621H1
gacacacagagcggttctcatattttggagaatccgaaaaacacgttaaagaaagtcccattcccactaccgaagcagattaagaagatgaagcagcagagagtggagtttatgggcatgggcatgggcatgggcatgggcctgggccttttggtggtgatgatggcatgtgggtcggcgagtggtgcggatgatttggcaaccaagtgttcagcggtgattcagaaggtaataccgtgtttggatttc

SEQ ID NO: 10812 - DNA, 249 bp, Glycine max
  unsure (1)..(249): unsure at all n locations; Clone ID: 701151624H1
ggcatatccaaaggaacaaaaatattattaagatgatcaacattattggagcacttgttctactctttgcatttctcttcctcagttgtgtgtatgcacaagacacaacaacccttgtgcctgcaatcataacttttggtgattctgctgtggatgtagggaacaatgactatcttcccacccttttcaaggctgattaccctccttatgggacgnanttgttaaccaccaacctactgggaggttttg

SEQ ID NO: 10813 - DNA, 250 bp, Glycine max
  unsure (1)..(250): unsure at all n locations; Clone ID: 701151625H1
gaccgtttccatttctcaacaacttctgctacttcctactccaaccgcacttctgctccgcaattatcatgggcaaggtcaagatcggaatcaacggatttggaagaattggccgtttggtagccagagtggctctgcagagagacgatgttgaactcnnagccgttaacgaccctttcatcaccaccgattacatgacatacatgtttaaatacgacagtgttcatggacactggaagcatcacgatgt

SEQ ID NO: 10814 - DNA, 251 bp, Glycine max
  unsure (1)..(251): unsure at all n locations; Clone ID: 701151627H1
tgcgattgttaacatgggttctggagctgctattgttattccttccggatcctctttatgctgtttatgctgccaccaaagcgtacatcgatcagttttcgagatgtctctatgttgaatacaagaggagtggaattgacgttcagtgtcaggttccatggnatgtggcaaccaagatggcatcaatcaggaaatcttcattctttgttccatcaacagatggctatgccaaagcaggtgtgaaatggata

SEQ ID NO: 10815 - DNA, 255 bp, Glycine max
  Clone ID: 701151628H1
gacacaacacatagagataggaagacaaaacattctcactccgaacaaaatgtcgattaacagcgaatctacgccgccaccgctgatcggcaaaatcgggccttacaccgtcttcgtgacgccgccgtctacacccaaaccctccgacgaccaccccgtcaccaccaagatcgcacctccgccgctcagattcccaaagccgttccttcccccaaacccgtctccgaccccgacgattccgtcttcggttcttca

SEQ ID NO: 10816 - DNA, 251 bp, Glycine max
  unsure (1)..(251): unsure at all n locations; Clone ID: 701151629H1
gaagatgagggagttgatgatgcagctgttaaggttgttgacattgttgacacattcagacttcaggagcaacccgcattcgataagaagcagtttgttaccttcatgaagaggtttatcaagaatttgactcccaagctcgatgcagagcaacaggannatgtttaagaagcacatcgagggagcaactaaatacctgctctctaagattaaagatttccaattttttgttggtgagagcatgggtgatg

SEQ ID NO: 10817 - DNA, 251 bp, Glycine max
  unsure (1)..(251): unsure at all n locations; Clone ID: 701151630H1
ggagttgcacaaggttttgatanctgaatcgagttccagagaagaaatgctgaaagtctcaatttgaattctgaacatgccgccctagagaccattaatagattggaagctgctacattttcatggaaagagagaattatacaagaaaacagtggaaaatccccagttcgaacctcatggtctttcatgaaggaccctatggcaggtatagataagatggaactattgctggaacgtgcagaaacactttt

SEQ ID NO: 10818 - DNA, 251 bp, Glycine max
  Clone ID: 701151631H1
taatttgggaattattgctcccatcgccattggtttcattgtcggcgctaacattttgttgggtggggccttctctggagcggccatgaaccccgctgtgacattcgggcctgctgtcgtgagctggacctggaccaaccactggatctactgggccgggcctctcatcggtggtggaatcgctggccttgtttacgaggttgtctttatcagccacacccacgagcagcttcccaccactgactactaga

SEQ ID NO: 10819 - DNA, 250 bp, Glycine max
  Clone ID: 701151632H1
ggcacaagtttgttgagatagctagaagcaataagatgaaaatgaaagtgcttgttttgtttgttgctacagttttggtagcatatgaatgccatggctcagactaccagaagttccctctccaaatgaaaactgggtttggtgggcaatacagcaatgaggtggcatgtgccagttggaggctggcgtggaagcaaacaacgtatcaagtggcaaactgttcctgcagcttgcggagagtacatagctg

SEQ ID NO: 10820 - DNA, 247 bp, Glycine max
  unsure (1)..(247): unsure at all n locations; Clone ID: 701151633H1
gatttactatgttctgaccaacgtaaaagattaatggaaattgttgggctccatctttcatggaaagctcaatattctagtgaacaatgctgctacaaatataacaaagaagataacagattacacagcagaggtatatcagccataatgggcaccattttgagtccgtttaccattgtgtcaagttgcacacccattctaanagcnccgggaatgggacnncgtattattctaccgtagcagttta

SEQ ID NO: 10821 - DNA, 258 bp, Glycine max
  Clone ID: 701151634H1
gaagcctcagtctcaacacagaagcagaaggaggagaagcagaaagaggagacgaagcaatggcgccgaagaagccccgaaccacgtcgaggaaccctgatttggtcaggggaattggcaaatattcgaggtcgcagatgtaccacaagaggggcatctgggccatcaaggccaaaaacggcggtgttttgcccctccacgatcccaagcccaaacccgaggccccggcccagaagccgcccaagttctacccggccg

SEQ ID NO: 10822 - DNA, 254 bp, Glycine max
  unsure (1)..(254): unsure at all n locations; Clone ID: 701151635H1
gatcgatggatgctttaatttcgtgtggttattgaggaaatttcatatccgcaagggcagagagtagaaggaagaagagagaaagagggaagctgctgctgaatcgtaatcgatcttatatctacactctaccatggacattgatgatgatttcacattttgtcaggtcagtgcacctgttgatgttgaaacaaacnnggttgcttcagatatagctgatatttccataaagaagaatcttcaaatgcatctaa

SEQ ID NO: 10823 - DNA, 254 bp, Glycine max
  unsure (1)..(254): unsure at all n locations; Clone ID: 701151636H1
tggaagaattgttcctaggtttcaggagttatctccagaaaagttgggaaaggctggtatggttcgagaaaagtcctttggtacaacaaaagaccgaatgctgtacattgaacattgtgcaaactcaagggctgtaactatattcattcgtggaggtaacaaaatgatcattgaggagacaaagcgcancttcatgatgcctgtgcgtggctaggaatctatccggaacaactctattgtctatggtggtggtt

SEQ ID NO: 10824 - DNA, 272 bp, Glycine max
  Clone ID: 701151637H1
gagcttcttcgctcgcattgaatcgctgtctgtgacggtgaacgacgtcgagtgcgtctacgagtacgtgctttacgagggcgacaccgtttcggggaactttgttgtcgtcgaccatgatattttctggaactccgatcaccccggcattgatttcacggtgacatctgctgcggggaatactgtccacaatatcaagggaacctctggtgacaagttcagttttaaagccccaacacatggaatgtataaatttgttttcataaccctta

SEQ ID NO: 10825 - DNA, 86 bp, Glycine max
  Clone ID: 701151639H1
acaagactaaaagtgggggttaattttacttgttccctctttctccattacacagacttagagttcgtggtggtgactctgatttg

SEQ ID NO: 10826 - DNA, 255 bp, Glycine max
  Clone ID: 701151640H1
gggaaaagttagaagtagtgaagaaaatgaaagtcattgttttcttcgttgctataataattttaggtgcagaatggcaatgcaatgggtcagagcatgagcatgagcatggccacagctaccaaattttccctttgcgaatgaaaaccggccccggtggccactacattccggaggtatcgtgcaaaagttggaggcttggtgtggaagcacacaacgtcattgactggagaaccattcctcaagattgcgagg

SEQ ID NO: 10827 - DNA, 247 bp, Glycine max
  unsure (1)..(247): unsure at all n locations; Clone ID: 701151641H1
ggaagacaaatttacgacagttaatggctatgaacacaatgccgaggtaatatatggagacacagattcagtcatggtacaatttggtgtttctgctgtagaagaagctatgaacttggggagagaagctgctgaatatattagtggaactttcacggnagtaatagttcattttgcgttttatttttttctttagtcattgtaagtttgagaccctgtataatagcccgtgaaagtgatgaaaccc

SEQ ID NO: 10828 - DNA, 249 bp, Glycine max
  unsure (1)..(249): unsure at all n locations; Clone ID: 701151643H1
gatactcaattcattttcttcttctgcttcaccttctcttctcttctctcatagggttagggtttttttctcttcattgctctctctgtcgttttatttccatggctcagcaagatgctcagaatggtgggtcggagaatgccgctgctgcgtgtntcntgtcgctttgaagccgcannnacctcatcgaagctcccaaagcgaacgacgccgttctgttctacaaggccgcgtttgccgctgaggagg

SEQ ID NO: 10829 - DNA, 227 bp, Glycine max
  Clone ID: 701151644H1
gtaactcttatttttctggaaccttccgaggcatggtctctgccccaaaccccaatttcgacgaagctgcttcgctcgccctcgataatcgcgttcctgccaccgtcataacgggttttcttggctctggaaagactactctccttaatcatattctcacatctcagcatggaaagcggatagcggtcattgaaaatgagtttggtgaggttgatattgatggctca

SEQ ID NO: 10830 - DNA, 251 bp, Glycine max
  Clone ID: 701151646H1
ggaggacaactaccggtcctatttgcgcgaagacactgagaagaacaccaaatggagatatggtgcccctccaaattacgacgttgtcaacaagctatatgaagaaggcagaaccaaggtttggcctcagggttcacttgaagagcaggtgcagtctctagtgaagaattgggagatggaaatgttccacaaggtggacctgcaggatttcagatcaatagacccaaagaaatacactttcagcctgaacg

SEQ ID NO: 10831 - DNA, 249 bp, Glycine max
  unsure (1)..(249): unsure at all n locations; Clone ID: 701151647H1
gggattccacatttaaggccaacagaatataagagatcaangttacccaaaaaccgaaggactgtgaaccgtgcatatggtggtgtgttgtctggcagtgctgtnagagagagaatcattcgagctttcttggttgaagagcaaaagattgtgaaaaaggtattgaagatccanaagacaaaggnaaagcaagctttgaagggctganttttgagaaaagtgataaagatcttttggagggatttangt

SEQ ID NO: 10832 - DNA, 257 bp, Glycine max
  Clone ID: 701151648H1
gggactagatatttttttctctctcctcttcgccgctaattaacccttttctccccagcattcaatttctattagtatccaaaccttgattgcgttcttggattttcttgtgggtagggggtttctcctctctttctctgcagtttgatggatcgggaaggaggatccaacgccggatcttgctactactccgttctcgggattcgtagggatgcctccttctctgatattcgcactgcctaccgcaaactcgctat

SEQ ID NO: 10833 - DNA, 261 bp, Glycine max
  Clone ID: 701151649H1
ctagggcatctatcgcttttgaaatgtaaatgttctttaaaaaccaaaacagtacatgaacatttcctcaaagtgacaatcgcttgtaattgtcaagtttattatgctgtcatacaacttctgacttttgagaaagtgcattagtacaaccaacacctaactatgaaactaatgaagccactgcaatcagcatttcacatgccactgcaatccataagtattgctcagtaaaagtgtaagaagaaaaagttattacctttg

SEQ ID NO: 10834 - DNA, 254 bp, Glycine max
  Clone ID: 701151650H1
gatccacgtcttaaaattaactactagcgagtctcagtccagttagcacaccaaccccaaatccaaaggttcatttcaatatgaccatcatgtcaagttttggacctttgaccattcttagtatagtcttgttagtggttggtgtcattgtctctggggctgaagctaggccaagggctttctttgtgtttggagattcactgttgataatggaaataacaattacttggctaccaccgcacgtgccgatgccc

SEQ ID NO: 10835 - DNA, 253 bp, Glycine max
  unsure (1)..(253): unsure at all n locations; Clone ID: 701151651H1
ggagagaaaagtgaattggattgcatctctcgctttgtgttggaagaggggaatcgtagatctgannnnnnnnnnnnnnntaataataattttgtgatcagaattattgagctgaagaaaagacaatgggattgtgggaagcttttctcaattggctacgcagccttttcttcaagcaggaaatggagttatctctaataggacttcagaatgctgggaagacttcccttgtaaatgtagttgctactggtgg

SEQ ID NO: 10836 - DNA, 248 bp, Glycine max
  unsure (1)..(248): unsure at all n locations; Clone ID: 701151653H1
caattcccttatgttatcaaacataaaaagggaaaaggtaatattgtagccgatgctctttcttggcgtcatgcattactttctatgcttgaaacaaaattgattggtcttgaatgtttgaaaagcatgtatgaaaatgatgaaaattttggagaaatttttaaaaattgtgaaanattttcagaaaatggtttctttagacatgaaggctttcttttcaaagaaaacaaattgtgtgtgcctaaatg

SEQ ID NO: 10837 - DNA, 253 bp, Glycine max
  Clone ID: 701151654H1
gaggaccaagaagaagaaacaacctcaaaatccctttcttgtgtcgattagattactttcacaccagagtcgttcgagtacttcaccttctttctctctaagcgcaaaacctcgtactgtttttggcggttaaggatgtcggggaaaggagcgaaggggttgatcacaggcaaaacctccgccgccaacaaagacaaggacaagaagaaacccatctcgcgttcttctcgtgccggccttcagttcccagttg

SEQ ID NO: 10838 - DNA, 251 bp, Glycine max
  unsure (1)..(251): unsure at all n locations; Clone ID: 701151657H1
ggaagaaaaaggacgtcacttcctcgccacaccctgcttncgtgaatcttagtgcatcaagatctctgtctctctgtctctctgcaatcgaaaatgagcaagggaccgggtctcttcaccgatatcggcaaaaaatccaaagatcttttgactaaggactncanctccgatcagaaactcaccgtttcctcctacagcgtctccggagtgaccctcacttcaacatctgtgacgaaaggaggactctcaac

SEQ ID NO: 10839 - DNA, 258 bp, Glycine max
  unsure (1)..(258): unsure at all n locations; Clone ID: 701151658H1
ctatatatgggggaaccatatattatatatagcataaaccctaggaagttggaaccatacttatataacaagcagataacgaatttcttcttttataacaccaaaaaaaagtgtttttgaaagaaccataagatnnntaacattaagaaacaaatgacaaggaatctttataattagtacgaatgttggatgaagcctaagagctagctgttaaaaggttggcaggggagagaaccaagccacttaagtacttcaccg

SEQ ID NO: 10840 - DNA, 252 bp, Glycine max
  unsure (1)..(252): unsure at all n locations; Clone ID: 701151659H1
gtggcaagctgttaccaaagctgtgaagaaaatcaagcgaagaaatgggccacatagaggagaggatttcaccttgtcacaagcaatggccaaggccgatttttgggtcatgttcttctctcttgtcatgggctgtggatcgggcttgacaatcataaatncncatgggtcagatttgtcaatcattgggagacaacaatgtcaatgtttatgtgtcggttatcagcatatccaacttccttggtcgtgttg

SEQ ID NO: 10841 - DNA, 245 bp, Glycine max
  Clone ID: 701151660H1
ggcacaagtgagtttgttgatcgagataactagaaacagtgtgatgaaaatgaaggtccttgttttcttcgttgctacaattttggtagcatggcaatgccatgcgtacgatatgttccctctccgaatgaacactggctatggtgcccgtactccggaggtgaaatgcgcaagttggaggcttgctgtggaagcacacaacatctttggcttgagaccattcctgaagagtgcgttgaagcaac

SEQ ID NO: 10842 - DNA, 227 bp, Glycine max
  unsure (1)..(227): unsure at all n locations; Clone ID: 701151661H1
ggggaagaacattggaagtgataagtgataaaacagagtttcgttgaatctgcactaaaaccctacgcacacatcttggtgtaaatccaatcgatatagcagcaatgtctacgctganattgaagctcgagatgnctccaaaattgtgcttcagttttgcaaagagnatcgttgcatcagactttcagatgctgcngaacgaatgccaggtttctctgancactgtt

SEQ ID NO: 10843 - DNA, 250 bp, Glycine max
  Clone ID: 701151663H1
gacacaccatccgttctagtctcaacttctgctcttccaactcctacaacgcttttctctgcactcatgggcaaggtcaagatcggaatcaacggatttggaagaattggccgtttggttgccagagtcgctctgcaaagagacgatgttgaactcgttgccgttaacgaccctttcattaccgccgattacatgacatacatgtttaaatacgacagtgttcacggacactggaagcatcacgatgtca

SEQ ID NO: 10844 - DNA, 92 bp, Glycine max
  Clone ID: 701151664H1
atgtgcacatcctttctttgatgagcttcgcgagccaaatgcccgtcttcctaatggccatccactgcccccacttttcaattcaaacagga

SEQ ID NO: 10845 - DNA, 246 bp, Glycine max
  unsure (1)..(246): unsure at all n locations; Clone ID: 701151667H1
tacattaattttagatgatgtcaatttgcaacgttgattagtgatattcattattccagaagcaaaataaaaattacatattgatttcagcataaagtgagaagtgtatgggctaaaaaagacaaatcaacaagtattatcaccaattcaccataaagtgaaataaatataccagttttagaatttaagataattactcgtatgaaggatactagttagcaacattgacaatcattaattctanaa

SEQ ID NO: 10846 - DNA, 245 bp, Glycine max
  unsure (1)..(245): unsure at all n locations; Clone ID: 701151668H1
gaaggcagatataggaattgctatgggttcagggacagctgttgctaagagtgcttcagacatggtgctggctgatgacaactttgcctcaattgttgcggctgtggcagagggaagagctatatacaataatacaaaacagtttattcgatncatgatttcttccaatattggtgaagtagtctgtatatttgtggctgcggtgcttggaataccggatactctggcccctgtccagttgcttg

SEQ ID NO: 10847 - DNA, 247 bp, Glycine max
  Clone ID: 701151669H1
gaccaaaacaacaactgaagatatattatggcattctctatcttcaaacatgttctgtcgttattccttctttgcattttcttgcaggaacctaccaatgcccttagaaagacctacattgtgtacatgggaggacattctcatggtccagaccctttgcctagtgatcttgaaacagccacaaattcccatcatgatttactcgcttcttacttaggaagtcacgagaaggccaaggaagcaatta

SEQ ID NO: 10848 - DNA, 236 bp, Glycine max
  Clone ID: 701151671H1
taagtcatagttaatcacacttgcttttggaggtcaaggtttccttaattcacagggcttgccttaatagatattcatgattctgtgatcttgctgttttttcctctctttcctcgtcttgtggcttgcttctgtctggtttggcaatatatacttggtaaatacattaatttattcattttattggatctgtagtaggaatattgctgctacacaagcctactacttctctctgt

SEQ ID NO: 10849 - DNA, 246 bp, Glycine max
  Clone ID: 701151676H1
ggggttgggttgggttgtcattgttggcatagcaacaagttgacactaatctaatcacctcctctgcctctctttgtattctacgatggacacgcgcggccacgatgaggaggagccaccgaaacctgtggttctgatcacaggatgttccacgggagggataggccacgcgcttgcacgcgccttcgctgagaagaagtgcagggtggtggccaccagcaggtcgcggtcgagcatggcggactg

SEQ ID NO: 10850 - DNA, 248 bp, Glycine max
  Clone ID: 701151678H1
ggtgagacgagggtaaggtcgcgttgtgttgcgtcgtgtcgtgcgctgttcctctgtctgtcgtttttgttttcagaccaaaccctagctccgcatcgcaaccatgtcgaccaagcaaggtggaaaagctaagcctttgaagaaacccaagtctgataagaaggattacgacgaggttgacatggctaacattcagaagaaaaaggaagaggagaaggcgctaaaggagttgaaagccaaggcgcaac

SEQ ID NO: 10851 - DNA, 249 bp, Glycine max
  Clone ID: 701151679H1
gagagaaagcgaagagaaggccagtgagttttgcgcgtgcgagagagacagtggaaagaaaggaaagggatggcgctgggtctgatcaatgcgaaccctgtggttcacgccaagaaagagcgaatcgctcgttccgatgatcctcacgccgacgacgccgttgatcctctcgatatctatgatttcgtgagggatattcgggatcccgaacatccttattccttggaacagctcagtgttctctccgag

SEQ ID NO: 10852 - DNA, 212 bp, Glycine max
  unsure (1)..(212): unsure at all n locations; Clone ID: 701151680H1
aacatatgntgtatttatatattgccacaacaacaatccttatcagccaatggagaattcaatcctaaatcatctaagttaaggactcctacgnngagagaattactagtctctgaatctcagccgaaaccagtnccatttgaagacctgtcatcaattcaattatcatgttccaaattatccaatcatatcaagtctgagtaaaataactg

SEQ ID NO: 10853 - DNA, 248 bp, Glycine max
  unsure (1)..(248): unsure at all n locations; Clone ID: 701151682H1
ggctgggaaattcctgtcaaactgcagagaagagggcaaacaattagggtttttcaaattcaacatttcttcgtttaccaattttaggtttttttctctcctcactctgttgccttacctttcaattgcaattcgtacaggaggttgttgtattctcatgcacaattgaaactggcaaatgagtgatgnnnncnnaaaacgaggaagctggccagggggtgccctcggtcgtggaagaaaaccagcag

SEQ ID NO: 10854 - DNA, 237 bp, Glycine max
  unsure (1)..(237): unsure at all n locations; Clone ID: 701151683H1
gaaagaaaagagaaatggcaacagaaacaaaagtggcagtattaggtggcatcaccgaagtgcagggagctgccaacagcgtcgagatcaacaatctcgctcgctttgctgtagaggaacaaaacaaaagagagaattcagttctggagtttgtgagggtgattagtgcaaagcagcaagtggttgctggagtgaattactacataacattggaagccaaaagatggtgagntaaaa

SEQ ID NO: 10855 - DNA, 243 bp, Glycine max
  unsure (1)..(243): unsure at all n locations; Clone ID: 701151684H1
ggggtatctgcatctatgtgtttgtgcagtggggtcacatggaggagagagagagagattggacagctatagaacagctgggaggagagaaaggggttgggtctcctcaactcaacggcattactggaaagtcgccagtggtttaattatncaataactagtgggaatcagccaccacgtgcccttgtgaccgtccctttagtaggatacccctataataatagtctcatcatttatatactt

SEQ ID NO: 10856 - DNA, 255 bp, Glycine max
  Clone ID: 701151685H1
ggcatgatgtgaggctatcctcagttgggccaggccgggccaccaggtcggaggtgttccacagcccgggtggcttggacttggccatgaagcttcactatctcagggtggtgtacttctttgctagtgaggctgcacaagacctaaccatcatgaaaattaaggaggccatgttcactttgctcaaccattacttcatcacatgtggccgcttccggcgatcggattccggtaggcccttaatcaagtgcaatg

SEQ ID NO: 10857 - DNA, 245 bp, Glycine max
  Clone ID: 701151686H1
ggaacaagttggttcatcgccccatgtccacgtggcatcacaaagctgagacccccattagcctgaaaccaccaaaacccaaccaaacccttaagaaccaccttgaatgtaacaggcccaccaaggtgcttctactcttcagatccttcttaagaaaaaaacccactctcaacctcattgacagtttttctctgctgtatgccctcaaagcctgcaaccacaaacacccctccacccaaggaaaa

SEQ ID NO: 10858 - DNA, 245 bp, Glycine max
  Clone ID: 701151687H1
gaagcaaaaccctaatccctatttttcttcctcagtagtgtcatttacgcttctcttctctgcagcaactatgcctaaccctaaggtcttcttcgacatgaccatcggcggtcaatctgctggccgcatcgtgatggagctctacgccgacgtcactccccgcaccgccgagaacttccgcgcgctttgcaccggcgagaagggcgtagggcggacggcaagcccctccactacaagggctcgtt

SEQ ID NO: 10859 - DNA, 240 bp, Glycine max
  unsure (1)..(240): unsure at all n locations; Clone ID: 701151688H1
gagatagatatgtgacactagccctggagaagtgttgcgtgtattagagatatgagatattgcctcacttgaattttgaatttagaataagttttagataatgtttttgttattgttgcagattttatctttatattttgtgtttgttaattaatttaaataaatatgatagaagatagattaagttgtttaggatttcagatntggtgtaagcctatatataggccatctcacttatga

SEQ ID NO: 10860 - DNA, 244 bp, Glycine max
  unsure (1)..(244): unsure at all n locations; Clone ID: 701151689H1
ggctttccaaaatgcccactttttttcttccaacgctcctcctccttctcatagccttcgccacctctgtctccggccgccgtgacctcgtcggagactttctccggctgccctccgaaactgataacgacgacaacttcaagggcacccggtgggncgtcctcctcgccggttccaatggttactggaattacagacatcaggctgatgtttgtcacgcctatcaaatattgaggaaagtggt

SEQ ID NO: 10861 - DNA, 119 bp, Glycine max
  Clone ID: 701151690H1
cagccatgtccaaagcatgttggttcctcacactttcaatctctttctgccatcttcttcctcgtcttcacagtttcaattccagcctgttccaattccacagctcggaacttctcaat

SEQ ID NO: 10862 - DNA, 249 bp, Glycine max
  unsure (1)..(249): unsure at all n locations; Clone ID: 701151691H1
gccattttctgaatgcgctctatctatctcttccgatctggctactaaccctaacccgcttcgaaccgtggcttcctcggcctcgcagaacctctctcgaagaaaannnnnnnnnnnnnnnnnnnnnntcncaacaaacttccgggtcgacccggatcgtttaccgcgaacctcggatcccattggaatccaattttccgatctggcagcagaactggttcgtcgcattgctcttcctcatggctctcg

SEQ ID NO: 10863 - DNA, 243 bp, Glycine max
  Clone ID: 701151692H1
atcagtggtgccccccaggataacaacataatgctgtggaatgctgtcatatttggtcctgatgatactccatgggatggaggcacgttcaagttgacactccaatttactgaggactatccaaataaaccaccgactgtacgatttgtgtctcgcatgtttcatccaaatatttatgctgatggaagtatttgtttggatatattacaaaatcagtggagtcctatttatgatgtggctgct

SEQ ID NO: 10864 - DNA, 244 bp, Glycine max
  Clone ID: 701151693H1
gattcccaaatttctcattctcccatttcctctcagaaccctcgatcactcccacgcgctcctatatcctctccttcaccgtcgctctctccaacgatcacaacaacatcgtcatcccatggcaaacgccgcatctggtatggcagtccatgatgactgcaagttaaggtttttggagctgaagacaaagaggacacaccgtttcatagtttttaagattgaggagcagcagaagcaggtcatg

SEQ ID NO: 10865 - DNA, 243 bp, Glycine max
  unsure (1)..(243): unsure at all n locations; Clone ID: 701151696H1
gactgacatatttacgtgtagtctcgctggttttcgttgcttcctttcttcgttgcgacgccaatggcttctacgggcgaaaaagcaatggatgtcgaagatgcagagaatgaagttcagttcatctgctattctcaattcgatagcatctcggcagaatgaagttcttctccagaagatcttgcttgggntgaatcctgcctagttaaagatctgatattcagacactgatggatcctttga

SEQ ID NO: 10866 - DNA, 195 bp, Glycine max
  unsure (1)..(195): unsure at all n locations; Clone ID: 701151703H1
tggcgtcgggctggggaattaccggaaacaaaggtcgctgctacgatttctggatggatttcagcgagtgcatgtctcgctgccgtgagcccaaggactgnnatttctccgcgaagactacctcgagtgcctccaccatccaaagagtttcaacgacgaaaccggntttacaaggaggagcagcgcaaataaggg

SEQ ID NO: 10867 - DNA, 247 bp, Glycine max
  unsure (1)..(247): unsure at all n locations; Clone ID: 701151704H1
tgtgcaggaagatggaaattccgtactgtattgtgaagggaaaggcccgcttgggaacggttgtccacaagaaaactgcatccgttttgtgtttgaccactgttaagaatgaagataaattggagttcagcagagttttggaggctatcaaggctaacttcaacgacaaatatgacgagtacagaaagaagtggggtggtgggatcatgggatccaatncccaagcgaaaccagagcaaaggagaac

SEQ ID NO: 10868 - DNA, 265 bp, Glycine max
  unsure (1)..(265): unsure at all n locations; Clone ID: 701151705H1
gaagcaggaatttcatcatttttcatctcattcattttagtccccctggctacaaattttagagaagcaacctcagcaatcaaagaagctagccataagaagaccagtaatacttctcaaacaatgtatgagatttatggagcagtgttcatgaacaacattcttggctttgtggtgatctctatacttatatacatgcgtgaggtcacttgggaattctccgctgatgtgctagtcgtggcaatagtttgtgctgnaacgggcc

SEQ ID NO: 10869 - DNA, 260 bp, Glycine max
  unsure (1)..(260): unsure at all n locations; Clone ID: 701151708H1
ggaagacnaatttacgacagttantangctntgaacacaatgccgaggtaatatatgnagacacagattcagtcatggtacaatttggtgtcatcggctgtagnancaatctatgaacttgggganatnngctcctgnntntatnagtgggaactttcccncaaagtaatccttccatttcagcgatatatttggncctttaggacattgtaagtttnnggncccgggaaaaaagnccncnaaaaattttggaanccccg

SEQ ID NO: 10870 - DNA, 254 bp, Glycine max
  Clone ID: 701151709H1
gacaagcaacattgctaaccattctctgcacttttcagttacaaagcatttcattgttttacaatatacaacactacaatggctgcttcaacaatggctctctcttcatcatcattggctggccaagctatcaagcttgccccctccacccctcagcttggtgttggaagggttagcatgagaaaaacagcctccaagactgtttcctcaggaagcccatggtacggcccagatcgtgtcaagtacttgggccc

SEQ ID NO: 10871 - DNA, 252 bp, Glycine max
  unsure (1)..(252): unsure at all n locations; Clone ID: 701151710H1
ggcgttgtttcgtgcatctccgtcctggaccaagatttcgaatctccgcaggaccgaggttaccgtttatctcaaagacccactaaccagccggaacgagtgctacctgttggactctttctttgggcaagaagataacaatgtgggccagatattctgcggagaagtgagccccttgattccgggaatgttcagcggatgcattccangntgtttgctnatngggctacaggcagtgggaanacatacacc

SEQ ID NO: 10872 - DNA, 247 bp, Glycine max
  unsure (1)..(247): unsure at all n locations; Clone ID: 701151711H1
aggaacagtaagtgacaggcgactgagccctggtggattgcctcgaaagaaatttttagttcatcgcgaccggattttggaatctgctgcacaaatgatggacctgcatgccagtaataaagtggttcttgaggtggaatatgatgaagaagtgggcactggtcttggaccaactttggaattttataccttggtgtgccaggagttccagaaacctggcttggcagtggagagaagangatcttcc

SEQ ID NO: 10873 - DNA, 133 bp, Glycine max
  unsure (1)..(133): unsure at all n locations; Clone ID: 701151712H1
ggtcaaactttcagaggaaaaaggagttctattctgaaattngcagggtcgctaggcttcgtccatcctaatctagtggctgtgatgggatgctgctatgatcatggtgaccgctacattgttnatgantttg

SEQ ID NO: 10874 - DNA, 186 bp, Glycine max
  unsure (1)..(186): unsure at all n locations; Clone ID: 701151713H1
gacatagtgtgttaagcctcgccgactcggttgctattcagcgagtgagagtgagtgagtggttctcttgcagcaacaaggtttagtgacaccaaacagacgggaaatgggtcgtggggtcagtgctggtggtgganaganttcctggattatctctttggcagtggggtacctgccagcatncaa

SEQ ID NO: 10875 - DNA, 198 bp, Glycine max
  unsure (1)..(198): unsure at all n locations; Clone ID: 701151714H1
ggcatcaattcaaaatatatcatcaattataagcatgggtttgtggaacacaacgaatgcagtgtcttgccgctttcacaagtttggtgatgaccaaaagaatctggtcttccaaggtgatgccacgtcttcttccaggggcatagaactcacaaagttagacggtggagnaaaacagtgggtggaatanggganntt

SEQ ID NO: 10876 - DNA, 257 bp, Glycine max
  unsure (1)..(257): unsure at all n locations; Clone ID: 701151715H1
tggtattagtgttgttgttgttgaaggtggaagcaagtccattaanangtatgggaaacttatgcttagacgtattaattggagtgaagtttcaaaagataaagaagaaaatgaagattcagatgatgacaagcctgccaataagtgtgttctggtgtggcaaggaagtgttgccaaacccagcttcaataggttcagtgtccatgattgcatcaccgaagctgctgcccgaaaagtttttgcggatgctggcgttc

SEQ ID NO: 10877 - DNA, 159 bp, Glycine max
  unsure (1)..(159): unsure at all n locations; Clone ID: 701151716H1
tttcantcactaccttatgtngttgnactgttcagttcaatgctctggatctattacgcacttgtgaaaaaggatgctagcctccttctnattactattaactcctttgggtgngtganaganacnantnnccnngnaatcntnctngtannggccccc

SEQ ID NO: 10878 - DNA, 248 bp, Glycine max
  unsure (1)..(248): unsure at all n locations; Clone ID: 701151717H1
ggatttgagaggatcgtgagagggacggtagcagagattccgtgagttgcaaaaatgaaaacaattctttctgcagagaccatgaacatcccggacggcgtgagcgtcaaggttaatgccaaggtcatcgaagttgagggcccccgcggaaaattggtgcgagacttcaagcacttgaatctcgattttcagtcatcactgacgaaagggaanggncccnngggggggcnccttttttnttcaaaaaa

SEQ ID NO: 10879 - DNA, 196 bp, Glycine max
  Clone ID: 701151719H1
tattattgttgagtagaattactacaatctacacttcatatttcccaaatgatttttcaatatataatttcattatagtgtaaattttcttaaaagtgaaagtgtatatagagtcgatttaaaatgagttaagtttaccaaatatcttaatttaaatcagtagtaagtagtatattctatattttgcaaccaacaa

SEQ ID NO: 10880 - DNA, 257 bp, Glycine max
  unsure (1)..(257): unsure at all n locations; Clone ID: 701151721H1
ggttctaagagtattattattatgagtttatgatgactggttagtatactagggtattagatagtatgctgctaggggaaggggtcagttttttggtaatttttggaggccagggaattaagatttaagaaggggtatgttttaaattgctccttcattttaattttaatttcttttgtgtcaacaagtggggacctatttttttangcccttcttgattacaggggtgtttttttatataactttttcagaagtgt

SEQ ID NO: 10881 - DNA, 249 bp, Glycine max
  Clone ID: 701151722H1
gggtggagagaggggcactgactcacacccacaatagtcgggggcagcttcaaagtacctccacattgtctcctactcttactgttctcttctcttctcatcatttttattttttccaatcaaaccaaacaaaacataagcaccgctcttttctctccgaaatccccatctcccttcacttctgagctctggacgagatcccagatctcaccatctttcacgcactcttccatcagattcaccctttcg

SEQ ID NO: 10882 - DNA, 245 bp, Glycine max
  unsure (1)..(245): unsure at all n locations; Clone ID: 701151723H1
ggaaacgaagaantncctaactactcaagcattcgtgagaaaactcaatattcgtcgctcatggcactctcttctcgtctcttttccaaatccaaattgatctatggcagtcaaatacttctacaaaaggagcatgctattccagttcgtcactttgctaaagagtccgcccctcctgcccttaagggagacgagatgctgaagaacattttgtggagtgaagaacaaatttggaaccccncnag

SEQ ID NO: 10883 - DNA, 251 bp, Glycine max
  Clone ID: 701151725H1
cccgatgaacatgtcaatgagttcaagtcaatagagaagttcaaaattttcaacacaaataatttgtgggtgaacttaaacgcagttaaaaggcttgttgaagctgatgctcttaagatggaaattattcccaatccaaaggaagttgacggaataaaagttcttcagctggaaactgcagctggtgctgcaataaggttcttgacagggctattgggattaatgttcctcgatcacgattccttcctgtg

SEQ ID NO: 10884 - DNA, 249 bp, Glycine max
  unsure (1)..(249): unsure at all n locations; Clone ID: 701151726H1
atatatgataattttttaactttttacaaaatcacttcaaaagtccacatattaataatttatgattaaataataattttnttttatactggtagtacattattattaaacttattgaaaaagtatatttattcatagaaatttaaaggtatgagactgttagtgtgtttaataatcttaattttgtaaaattaattttaattaatgttgaatttaatatgaaatataaaanaatatttcaaaaataat

SEQ ID NO: 10885 - DNA, 141 bp, Glycine max
  Clone ID: 701151727H1
ggaggagatcctgaagtaaagacaataattcagtggcttgcagcttctcaggctctaagacctttcatagcttactacacatttggcttggaggcattgcagagcctagacgaggttgctcattggattttgtctcagaga

SEQ ID NO: 10886 - DNA, 264 bp, Glycine max
  Clone ID: 701151728H1
caatgttaacaattaatactcctcatcttttggcaaatagaagcctcacttatgtggactggtcaaggggtggtgctcacccagctacctttgggaaggatgacatcaaagaggaattcttcaagaaaattttgcaagatcagacatgtctttataataaccagccatcttccctttgcttcttatttgcaagaaaatttgcacctaatgctttgggccctcttttagacatagcacccaaagctctaggaattggaaaaaggc

SEQ ID NO: 10887 - DNA, 251 bp, Glycine max
  unsure (1)..(251): unsure at all n locations; Clone ID: 701151729H1
ggcctcctacatttcaccaccccctttatccttatctcctctcttcttcatttgttctgctcttcccctctatttaaagctcacacaaagggatcatataccttggttgcactttggtaaggtgagagaataggaaaaagggaaatatggcatttgcaggaacaactcagaagtgcatggcttgtgacaaaacagtttatctggttgataagttgacaagcagnaaccgagtgtancaatngggttgcttc

SEQ ID NO: 10888 - DNA, 254 bp, Glycine max
  unsure (1)..(254): unsure at all n locations; Clone ID: 701151730H1
ggagttgcacaaggttttgatagctgaatcgagttccagagaagaaatgctgaaagctcctcaatttgaattctgaacatgccgccctagagaccattaatagattggaagctgctacattttcatggaaagagagaattatacaagaaaacagtggaaaatccccagttcgaacctcatggtcttncatgagggccccnangnagggtataganaggnnggacctntgccggaaacgtngnaaaaccttttat

SEQ ID NO: 10889 - DNA, 261 bp, Glycine max
  unsure (1)..(261): unsure at all n locations; Clone ID: 701151731H1
gtgaaaaagcagcagaagatctgaggcaaagaataattgaacataatattcttgttgtatcaaaatactatgcaagaattacattgaagagacttgcagagcttttgtgcctcagtatacaggatgctgagaagcatctctcagatatggttgtgtctaaggcgctggtggcaaagattgataggccaatggggatagtctgtttccaaacagcaaaggatagcaatgaattcttatttcatgggcagnaacttggggaat

SEQ ID NO: 10890 - DNA, 232 bp, Glycine max
  unsure (1)..(232): unsure at all n locations; Clone ID: 701151732H1
ggaccaaaaacantacaagccaagtgaaaganggaagaaaagtcaaagacaatgtcagggatcattcacaagattgaggagacccttcatgtgggaggccacaagaaggaggaggagcacaagggtgagcagcaccatggtggagattacaaaggggagcatcatggtgaacacatactgaatacaanggagagcttctttgngtgannaaaccgggcccccttgggggaaa

SEQ ID NO: 10891 - DNA, 240 bp, Glycine max
  unsure (1)..(240): unsure at all n locations; Clone ID: 701151733H1
gagcgatttttccctcaccaangaagaaccaaaacaatggcggatcaactcaccgatgaacagatctccgagttcaaggaagccttcagcttgttcgataaggacggcgatggttgcatcacaaccaaggagcttggaactgttatgcgttcattggggcaaaacccaactgaggcagaactccaggacatgatnaatgnngtggatgctgatgggaatggtaccatgacttccctgagt

SEQ ID NO: 10892 - DNA, 220 bp, Glycine max
  unsure (1)..(220): unsure at all n locations; Clone ID: 701151734H1
gatggtgggaccagtgagacctcagtttgtgctctttggttcttccattgttcagctcagttactctctccaaggttggggcgctattcttgctcatttgtatgctcgcaaggcggatataattctgcgaggatactctggttggaattcanggcgtgcngtgcaagttctgngatgaaattttccctaagaccgccantnnccaaccagnttnggtatt

SEQ ID NO: 10893 - DNA, 248 bp, Glycine max
  unsure (1)..(248): unsure at all n locations; Clone ID: 701151735H1
gaacctcaaaatcagtctctaatatttttctcactgtcttgtctctccagagaactgtatagagagagatggcggctgcaacatctggtgctgtgttaaatgggttgggatcttccttcttgagtggaggaaacaggagccaaacccttctgncccactgctattggaggcaaagttggtgctgctgcggttactgttagtcctagaagactcnttgggnaaaanngtggngccaccaannagtcntg

SEQ ID NO: 10894 - DNA, 247 bp, Glycine max
  unsure (1)..(247): unsure at all n locations; Clone ID: 701151736H1
ggcactgcaaatcacttttctactttgagtcttcttgatccttctttttctccttgaactcaaacatggcagatgaggtggttctgctagatttctggccaagtccatttgggatgagggtcaggattgcacttgctgaaaagggtatcaatatgagtaccaaagaagaggacttgaggaaccaagngtcctcttctcctccaaatggaacccggttcacaagaagattccggttctcatccacaat

SEQ ID NO: 10895 - DNA, 248 bp, Glycine max
  Clone ID: 701151737H1
gggagagagagatgggaaggtccccttgctgtgagaaagcacacacaaacaaaggtgcatggaccaaagaagaagatcatcgcctcatttcttacattagagctcacggtgaaggctgctggcgctctctccccaaagccgccggccttctccgttgcggcaagagctgtcgtctccgctggatcaactatctccgccctgacctcaagcgcggcaatttcaccctcgaagaagaccaactcatcatc

SEQ ID NO: 10896 - DNA, 246 bp, Glycine max
  unsure (1)..(246): unsure at all n locations; Clone ID: 701151739H1
ggataaaggtcaattattagctgcaacatcgaataagctggaaatatgtgtggacctattcataatcatattgccatgggatcttgaagctgacactgatgatttgttgcttgctcttaacgcccaataccattgaatatcgaccaattgnnccgaagaagaggtcctcagcctcaacctctgtgaagcaaatggctggtcctaggattgctcatgctactttgaaaggaccaagtgttgtgaagg

SEQ ID NO: 10897 - DNA, 226 bp, Glycine max
  unsure (1)..(226): unsure at all n locations; Clone ID: 701151740H1
ggactgtcagcancncattatagcacaccacacaaaaaagcaaaacagagagaacaactgttactcacacacgccatgggtaaatgaatggtttttgagcaacagcagttaaaagagaaaagggattcagcgaagatgacatcggttggtgtggcacaacttcgggtttgaganaagccantgggcatggancaccacttnngganaattnccnaggggnttnnnc

SEQ ID NO: 10898 - DNA, 229 bp, Glycine max
  Clone ID: 701151741H1
aagcccggggcggttagtgtcttcattttgtgatgtatcttatttatgagaattcggtgggcttacataaggtggatgttaaccttcctacttcagaaggaaactcttttcagatgttaaaggttatgtaactgtattggcttttccttttagttctttggaagcttgtccagttttaatgtgacaaaaatgatactggtgtaactgcattcttttcttcccctagtgc

SEQ ID NO: 10899 - DNA, 246 bp, Glycine max
  unsure (1)..(246): unsure at all n locations; Clone ID: 701151742H1
gatactcaattcattttcttcttctgcttcaccttctcttctcttctctcatagggttagggtttttttctcttcattgctctctctgtcgttttatttccatggctcagcaagatgctcagaatggtgngtcggagaatgccgctgctgcggtgtcgtttgtcgctttgaagccgcagctcctcatcgaagctcccaaagcgaacgacgccgttctgttctacaaggccgcgtttgccgctgagg

SEQ ID NO: 10900 - DNA, 245 bp, Glycine max
  unsure (1)..(245): unsure at all n locations; Clone ID: 701151743H1
ctaggtgtaatgtgagctaaacaattaagaaattttttgtagagagcaaaaaagaagagatgtcaggtgcaatttggaaaacacacgggggtgcgagtgtaatttactcttgtttatttgttgtaaaatttaattcaaaattgtattattttttatattttaaatttaggtaataangagggaaaactaaatctataatgaatcaagaaaagaagggggaaaacatcaactctgaatgcagaaga

SEQ ID NO: 10901 - DNA, 163 bp, Glycine max
  unsure (1)..(163): unsure at all n locations; Clone ID: 701151745H1
ggctcgtgaagcacgggaaggtgtacaacgcgctcggcgagaaggagaagcgcttccagatcttcaaggacaacctgcgattcatcgacgaccacaactccgcggaggnccgaacctacaagctcggactgaaccggttcgctgatctcaccaanggggantg

SEQ ID NO: 10902 - DNA, 238 bp, Glycine max
  unsure (1)..(238): unsure at all n locations; Clone ID: 701151746H1
agaggaaaaagagttgattgctaagcctgctgggtctgattctattgaagggtatggcacaaagcttcagaaagaggtgaatggcaagaaagggtgggtggatcatttgttccacattgtgtggcctccttcctccatcaactacagtttctggccnnaaaaccccccttcttnnagggaagttaatgnggantattgcanccacctngggggngnggnanacatttgtcnaaaattg

SEQ ID NO: 10903 - DNA, 257 bp, Glycine max
  Clone ID: 701151747H1
ggagagagagaattggaaggttgcgacgagtgatgatatacacatattgtgacggtagtgaaatcgaggaaaaagaggtagcaatttgcgagttgcaatgagtaacgaaaaggctccttcatcagcttcttcgagtagctacgagttgagcaaaggcatcaatggcctcgacaaggttattcttcgcgacgcacgtggtagctccgctgaggtgtacttgtacggtgctcacgtgacttcatggaagaatgaccatg

SEQ ID NO: 10904 - DNA, 252 bp, Glycine max
  unsure (1)..(252): unsure at all n locations; Clone ID: 701151748H1
gggttaagtgaaaagtgaaaagtgaaaatggacttggaagcagtgaagaggtacttagagaaaggaggagaaacagcatcggcggtggatgggttgcctccgaggtttctggaaccgttaataatgaacgctcttaaggtcgatctcatcgaaactggtcgcgttgtctgctccatgaagatacctccgcgtttactcantnctgggattctnacaggtggaaccatcgctgctctggtcgacgtggtgggg

SEQ ID NO: 10905 - DNA, 249 bp, Glycine max
  unsure (1)..(249): unsure at all n locations; Clone ID: 701151749H1
gagagttgcatcgactganacccctaggaaaaaccccagtttctctctttccactagttccgttcaagttctaaccaagcactcacagtacttttgcttctctcgaagatgtctctacgagtgctgaaccctaangccgangtgctgaacanntngggggcacttcacatgaacatcaatgccgcnaagggtttgcaagatgtcncaaaaaccaacctcggtccnannggacccanaaatngcgggggg

SEQ ID NO: 10906 - DNA, 246 bp, Glycine max
  unsure (1)..(246): unsure at all n locations; Clone ID: 701151750H1
gatgcacaaatctttggtgctccttcggtctcttatcctaattaagttagtgcaaagattatggcttccaaacctggcatactaaccaattggccctggaagcctctcgggagtttcaagtgggtgattttgacaccatggattgcacacagcacttactctttcctagtgagtgagccaaaggagagggaccttacttatttcctcatctttcctcttatgatgtngnacgatgctgcatgacca

SEQ ID NO: 10907 - DNA, 252 bp, Glycine max
  unsure (1)..(252): unsure at all n locations; Clone ID: 701151751H1
ggatattggttctattctctatatctgtttgttcactaactatatattgatttgttatctagcgtaagataccattttcatcattcattgcataatataaatggcttcccgtaagtatttctctattgttatctatgcttttatacttggagcttttgcaaatacggcattctcatcattgtctcgngattactatgactacncgngcccnaatgctttgagcaccattaggagtgtgtggaggctgcgggt

SEQ ID NO: 10908 - DNA, 244 bp, Glycine max
  unsure (1)..(244): unsure at all n locations; Clone ID: 701151752H1
gtttgatgccaagatagcagcagcagtagctgaggaaacaaatctgccttttgttacggcagaaaataagtttgaggccttggctgcccatgatgcttttgttgaaactagtggagcacttaacactattgcggcttctttgatgaagangaactaatgnngnaacggttgttaggaagtggtccacgctgcggtcttggtgaactcattcttcctgaaaacgaaccaggaagtagtatcatgc

SEQ ID NO: 10909 - DNA, 244 bp, Glycine max
  unsure (1)..(244): unsure at all n locations; Clone ID: 701151753H1
ggaacaaaataatacgtgcatacatagctatctagctagcaagtgggacaagagatatatatacgtggtaccctagagtgccattctgtagtttatttctgctcaccaaggcttatcantcacaatttgtgcattgcctcgtgtcctttttcttctttgnctgccaaaaatcttacacacacaggtatctgncnaatgggttctcaccagcaagaaccatggctattggagaatgggaaaccga

SEQ ID NO: 10910 - DNA, 252 bp, Glycine max
  unsure (1)..(252): unsure at all n locations; Clone ID: 701151754H1
gccaaagtgccaaacaaactatttcctactatagtaatccaaatatatttaagagtttttaggaatgaaatgtcaaaccctagatccaataggtatattaatccataataaaggcccaaataattacacttgaagtttaaaataatagaaaaccatatcttaattcccacattaccagatgcanaaaaaaaangngtaaagtcccacccttcaggaaatctngngtcatatgcaacaacaattttgtactac

SEQ ID NO: 10911 - DNA, 258 bp, Glycine max
  unsure (1)..(258): unsure at all n locations; Clone ID: 701151755H1
gagagaaataatggagaagaaaagcataacaagcagagcacattgtttagtgctagcatttccaggtcaaggccatatcaatcccatgcttcaattctccaagctattggagcgtcaaggggtgagaataacacttgttactactcgtttctattccaagaatttgcaaaacgtgcctccttccattgctcttgaaaccatttctgatgggtttgatgaanttgggccccanaaggctgggagccccaaggcctataa

SEQ ID NO: 10912 - DNA, 250 bp, Glycine max
  unsure (1)..(250): unsure at all n locations; Clone ID: 701151756H1
gaggcctccaaatattttcctttttagctttgattagagtggcctagttgttgtttttctcaacgagaagggcttccactatgcattgcgcactttggcgcttctgtgttcccttgttgctacttgctagcttcagttatgcaccttttgttnagnacgacaactgaaatttcagggaatgaagtgancactgatggannggttttaaatgaagagttaaccaaacctaaccnncagggntgnggganna

SEQ ID NO: 10913 - DNA, 248 bp, Glycine max
  Clone ID: 701151757H1
gagagtaacagatctttgcattctctggttataattccgagccgggtttcttgttagcactgttaacttcctctaatggctcatcgctacgatagtaatcccttcgacgaagaagaagtcaaccccttctccgaaccagctgtaaggggaaaaacatcaagccaatcaagttatagcgggggtgcattttacactacaaatcctggaagtgttgctcctgccacaaattcaaggctatctcctcttaa

SEQ ID NO: 10914 - DNA, 246 bp, Glycine max
  unsure (1)..(246): unsure at all n locations; Clone ID: 701151758H1
ggcgaatagattgcaatattatgcaataatgtgaaaaaagttgaaatatgcatgcttttcatttttcaatcttcccttgttaaaaggagagactcactcacttccattgtcactgctcctttctcggannnnnnnnnnnnnnnnnnnnnnnnnnncttcgcgagtgagagatggcgcaaattctgcttcatgggactctccatgccaccatcttcgaggttgataggctcaatgctggtggtggtg

SEQ ID NO: 10915 - DNA, 245 bp, Glycine max
  unsure (1)..(245): unsure at all n locations; Clone ID: 701151760H1
gtttaatatactttgtaatgtatacattattttacttcttatgtctgtttgttatgataacataataaattaatatattatgtttgtaaatacatgcctatctatacacaattgaccaaaccatttgttgtacatacttgaatatcattatatttgataaatgcatttgtgaaatattgaaatggtagcattattaagccacatgttgaatttttttcttcttattttaattngaataacctttg

SEQ ID NO: 10916 - DNA, 250 bp, Glycine max
  unsure (1)..(250): unsure at all n locations; Clone ID: 701151761H1
actttaagtaaagtcattacatttgtggtggtatatgacaatttttgcgacagacagcttgggaagcttttgctaaataattttgctagtttggtttttttcttaaacataagcagttccaaagttgtctttttacagacatttcattgaagacataaaattaatatttatatttactaaaatggaaagatgaagtncaaacctagagcagtgaaaattcctctgctgaaataaaatgcatcttccaatt

SEQ ID NO: 10917 - DNA, 227 bp, Glycine max
  unsure (1)..(227): unsure at all n locations; Clone ID: 701151762H1
gggcagcagttgaacangaggcactgtggcagaantcctaggagtgtaaaacagagacgcaaaatgaagacgatcttgtcgtctgagaccatgaatattcccgacggcgtgagcntcanggttcacgctaaggttatcgangttgnggcnccctcgnanancatcgggagnttctnccacctgagtnnggnncnaccanttattaccgangntggcggaanaaggac

SEQ ID NO: 10918 - DNA, 232 bp, Glycine max
  unsure (1)..(232): unsure at all n locations; Clone ID: 701151764H1
ggcagcgattcgnntagcgaaagcaatcccccacccctaattttgatttgtgtcgaggaaaggacaggtcttggaaccctaaccgcacctctctctttcttcccgtgtgcgtcaaagcgaagaacgcgaccacgatggtgttctacttcaaagnngccccgaagccggggatttcaccaanttcaangggctttaaaantacgaaaacgggggncctcanaaatntttcccg

SEQ ID NO: 10919 - DNA, 255 bp, Glycine max
  Clone ID: 701151765H1
ggtacacttcttagcagaaaccaagacaacaagagttgagtatagtgttcttgtaccacagacagcgcagggtgtagcacatcattcctcgatcgagctcgctccaatggcagagacaccaaacaaaggccacatcgtgatggtacctctcatggcacaaggtcacctcatcccatttctcgcactagcaagacaaatccaacaaaacacaagttcaccatcaccatagccaacacaccccaaaacattcaacac

SEQ ID NO: 10920 - DNA, 171 bp, Glycine max
  unsure (1)..(171): unsure at all n locations; Clone ID: 701151766H1
acactcctttattataacaataatagaattgtatctcggttgcattttactttacatncccttttattataataacgaaaatacagttttgtagtaaaaaaattatgtccccaacaatgtcacaaaaatatgattctattatatatttatataacanaattatatttccat

SEQ ID NO: 10921 - DNA, 246 bp, Glycine max
  unsure (1)..(246): unsure at all n locations; Clone ID: 701151767H1
tacgtattttatgatagtttaaaatcatttagtgataattttgaatggtcaaagtgacattttttatcatttagattaaaggatcaagttgaatgaatttaaaaaattaaaagatcaaattaaacctaaaaaatattaaaggacgaagttgaatataaaaatgcaaaagaaggagccatgatccgtccagtaaatttacgtttagccttacatttagccccctngtgttnnccanacatgngcant

SEQ ID NO: 10922 - DNA, 246 bp, Glycine max
  unsure (1)..(246): unsure at all n locations; Clone ID: 701151768H1
gagagggagattcgggagcttattgagcaacgtgatcttgctcaatctcaggttgaggatttgctgcgcatggttggaaatgatcagaaatctagaaaagaaaggatgaacacctgggaagatgatgattcaacatcagagtnatcaagcattacaccttctgatttacgcattagagaattcaacaatcctcactacaacaatgaaaacagtgaaagtagtcctgataaacaccctgatgatgng

SEQ ID NO: 10923 - DNA, 255 bp, Glycine max
  unsure (1)..(255): unsure at all n locations; Clone ID: 701151769H1
aagagtacagaggaaaagccatagaaaggttgaacttctctctccgattccaaagccacccgcggaggaggcgaaaaaaccccaggaggaagaaaagcccaaaccagaggagaataaacaagagcctcaggttataacggttgttcttaaagttcacatgcattgcgaanttggcgcccaggaaatcaagagacgcatcgagaaaatgaaaggggtggaatcagcggaaccggatctaaagaaatcggaggtgag

SEQ ID NO: 10924 - DNA, 160 bp, Glycine max
  unsure (1)..(160): unsure at all n locations; Clone ID: 701151770H1
attgtttcaacattcaaattggcatcattaagatcggngttaaccactaaaatctctgaagcagagggcattgtctactgtcacaggcatgggtgaagaaaagaaagacgaagganacaaagaagangccaaagaggaaaagaaggaagaagagaagaag

SEQ ID NO: 10925 - DNA, 245 bp, Glycine max
  Clone ID: 701151771H1
gataattaagatggcaacgttcacataccacgtagaaacagttcaatcattcttagccctaagcagacttcacatactcatccacttagtggcagtgttgtctctctgttactaccgcatcacccacttcttcctccaacctccaacagtgccatggcttctcatgactgctgcggagttcttctctcgctgctctggttcttcaaccaagccttccggtggcgaccggtgtcgcggagtcatga

SEQ ID NO: 10926 - DNA, 142 bp, Glycine max
  Clone ID: 701151772H1
gatgaaagacaatttgcattcatagggggcagacatttgttgcatagtgcgatcataacaaatgaggtggttaaggaagttcataggagtcaaaaatcatgcctgatgttccaaagtagactatgagaaggcatacgattca

SEQ ID NO: 10927 - DNA, 241 bp, Glycine max
  Clone ID: 701151773H1
gaattttacggcctctgtgatccagataaggataacctgtgcctctatggacatccaaatgaggcctgggaagtaactctgccagcggaggaagttccgccagagctcccggagccggctcttggaatcaattttgctagggatggcatgaaccgcaggactggctttctctggttgctgtccacagtgattcatggttggtttctgtggccttttaccttggggctcgtcttaaccgcaa

SEQ ID NO: 10928 - DNA, 206 bp, Glycine max
  unsure (1)..(206): unsure at all n locations; Clone ID: 701151775H1
tcacggtgacttgaaagacaagccatggtggcctaagttgaacactcttcaagatctgattcacatttgctgcattattatatggactgcttcagcactccatgcagctgtgaatttcggacatacccttatggnggtttcatcccnaangggcaatctaacagagattgctcccagagccagggaaccaagatatggngacttac

SEQ ID NO: 10929 - DNA, 246 bp, Glycine max
  unsure (1)..(246): unsure at all n locations; Clone ID: 701151777H1
gactcactcattcactctacaattgtgatcttcacaaatcaacaacgtctctctctgttactctgaaaattgacttcaagttagtataactggctgtcaagttgtaatggcattggtctctggaagaagttctgcactgaacccaaatgcacntntatacnaanctgcngctcncgggnggtggaggntttntcacctnaatggtgggatcttgtgaaatcttcaacatggtttcgtgattattgg

SEQ ID NO: 10930 - DNA, 243 bp, Glycine max
  unsure (1)..(243): unsure at all n locations; Clone ID: 701151778H1
gatccacataaacatcaacatcgaaaggttgttaattttcaactcaatggttcttccctcaggttttgtttccatgttgatactttttggcatggttttggtagttggggtgaatattgncccaggggttgaggnaaaggcaagggctttctttgnatttggagactcactggttganagtggnaacancattncntagggancaattgnagggtngatnccccccttaagggattgactacc

SEQ ID NO: 10931 - DNA, 253 bp, Glycine max
  unsure (1)..(253): unsure at all n locations; Clone ID: 701151779H1
ggttgcgtgtgtgggtatcggcaatggaagaatgttcatccattgaggaatcggtggcgagcgtgatcgaagaagccaaggaggttcaagacgccgtttcctctcacatcccaaaggcttccagcgatgaagaacctctccgcnaacgtgtccgtgccgtcgattccagaatccattcgctacgttcctctctcgattctcttgtctccaccaaacaaatccctccctccttagccgttaagttagatgaaga

SEQ ID NO: 10932 - DNA, 247 bp, Glycine max
  unsure (1)..(247): unsure at all n locations; Clone ID: 701151780H1
agaaggcgagttctttgaggcagagaaagaggaaaagagtgtgttgccccagcagaagaaagatgaccagaaaactgtggacgctgcagtgttaaaagccattgagagtgtgccagacttgaggtcctatttgggtgccaggttttctctgaaggccggggtgaaaccacatgagctatctnctagaggaaagaggggtgttaccttgtttttgatatcgtgtttgtttattgatgctggttctata

SEQ ID NO: 10933 - DNA, 248 bp, Glycine max
  unsure (1)..(248): unsure at all n locations; Clone ID: 701151781H1
ggaagcagagataagtgtctcaacaagtgatatgcaaagcatgtctctctgtgcttcactctcctccacagcttcacacctcacttcccttgcctccgtctcttcttccacctctccactttcccgcaaattttctctcactttccgggaaaaaaacagaaccccaattgcaccacctcacaagctccccttcttctcagcaaggcctgcccccaccagagtagtgttggtgaagtntcaggccnana

SEQ ID NO: 10934 - DNA, 134 bp, Glycine max
  unsure (1)..(134): unsure at all n locations; Clone ID: 701151782H1
gctcaacacatggactgcttcaatcccatttacangtatcaactcctcaagggtgcttcccattcctagagaaccacaccacccattttcccatttgctctcaaacatgtcaaagtttgcatctttnagaaccc

SEQ ID NO: 10935 - DNA, 239 bp, Glycine max
  unsure (1)..(239): unsure at all n locations; Clone ID: 701151783H1
ggattttagttttagtattttagtttgggtgaaattgcaggaccctgtgtagtgtgtagtctccagacaaacatggcgaaaaaggtaaaagggtctcactctgcttcttctgcctctgcatcttcccgcaaactagtgctgaggattaaatcaaacgagggaatcaagggatcantgcggcagactaattcaagaaagaaacccaaagcaaagcaaaagaagaacanaanntttntgct

SEQ ID NO: 10936 - DNA, 245 bp, Glycine max
  unsure (1)..(245): unsure at all n locations; Clone ID: 701151785H1
gagggagaattaggtttttagggtttacaccgagcagccacacctcccgcagcagccatggttctcaaaactgaactatgccgattcagtggtgccaagatctacccaggaaagggcnnncanatttgttcgtngtgattctnaggttttcctgtttgcaaactcaaaatgtaagaggtatttccacaatcgcctgaagccttcaaagctcacctggactgcaatgtacagaaagcaacacaaaa

SEQ ID NO: 10937 - DNA, 224 bp, Glycine max
  unsure (1)..(224): unsure at all n locations; Clone ID: 701151786H1
gactgtatgagtgtaactntccccccaacacgatatgtgcctcagcttccacttcgctagttttctctcacacttttgaaggataggatcccacaactgacatcttctcggattgtccccaatgggggnccccaagtaaacaaaagggatggacagcaggctacaattcaagaaatcagctgcacttcgcttccacggttccggcataccaattgatccaaaac

SEQ ID NO: 10938 - DNA, 242 bp, Glycine max
  unsure (1)..(242): unsure at all n locations; Clone ID: 701151788H1
ggatggacacgagtgttgttgctgctacagatggagaagggtagaaccgtggtggtgtccgctctgcagtttgcttgcaccgatgatatctcaacaaacgtcgccaccgccgagaggctagttagagctgcacataaacagggtgcnaacatcattctcattcaggaactctttgaaggctattacttctgtnaggnacaaagagaggatttcattcaaagagctaagccacataaggacca

SEQ ID NO: 10939 - DNA, 219 bp, Glycine max
  unsure (1)..(219): unsure at all n locations; Clone ID: 701151789H1
gacactaaacaanntaaaagaagagcatcactgaaccaacaaagcaaccctatgttcgaaggtggtttgtgtcaccggagccagcggcgccatcggatcatgggtggtcctactcctcctccagcgtggttacaccgtccatgccaccgtccaagatatcaaggatgaaaatgagacgaaactttggaggaaatggaaggagcaaagagtcatctccat

SEQ ID NO: 10940 - DNA, 218 bp, Glycine max
  unsure (1)..(218): unsure at all n locations; Clone ID: 701151790H1
gagggacccaaantttaagaacttggctttgcntccttcaaagtgaggtctctaagtttcactttctttgcatagggcaacctcctttctctgtgactctgagtatcgtatcgttttattattatttctaattctctcttatcaggtccattgaatatgtctccgtcgttggatcttcctcccaagggtggcttcagttttgatctatgccgaagaac

SEQ ID NO: 10941 - DNA, 145 bp, Glycine max
  Clone ID: 701151791H1
actatattcaaaagtgcttacttccaggcacagttagatgcagaggacccagctagtagtattttttcatcaaatttggtgtgtagatttttacgaacttgggagtcatctattcataacaccacatgacatgggactatgataa

SEQ ID NO: 10942 - DNA, 242 bp, Glycine max
  unsure (1)..(242): unsure at all n locations; Clone ID: 701151792H1
ggaaaaactcattggccaccacttcaaagaataatgatgaagtagatggaaaaccgggtgcagcagcactctttgtgaaggtcagcatggatggtgctccctatctgaggaaggtagatctaagaaattgtacaatgtaccnggaactgtcttccccccttganaaattgttcagtgtantcntnnnggtnaatgngggncccncnnggnnccccgggagaaaatgtggtgaccccncccgc

SEQ ID NO: 10943 - DNA, 252 bp, Glycine max
  unsure (1)..(252): unsure at all n locations; Clone ID: 701151793H1
gngagaacacanancacaagtttgacctggtaatcagtgatgtacacatgccagacatggatggatttaagctgcttgagctagtgggacttgagatggatcttcctgtcataatgttatctgcaaatggtgatacgaagatggtgatcnaggggatttcncatggggcctgtgattatctgctgaaacctgtgagaatggaggagcnccaagaacnttggnngnatgnnnnccggggggaaaaatttnccc

SEQ ID NO: 10944 - DNA, 248 bp, Glycine max
  unsure (1)..(248): unsure at all n locations; Clone ID: 701151794H1
ggaaggcacagggtgagggagaaagagggtggtagtttcctgggagaggactttttgcttcattttctgagaactgcttctaaaacttttacattatatttggcatcaagagagactgcatgaatattttaagcgagaggctttgagggcgttggtagtaagaatggntnnccatatccacatgctcctcnggtccatttctggctaatcctttatcactctgccgcagtccctctctcaaccaccat

SEQ ID NO: 10945 - DNA, 189 bp, Glycine max
  unsure (1)..(189): unsure at all n locations; Clone ID: 701151795H1
tggcgtcgggctggggaattaccggaaacaaaggtcgctgctacgatttctggatggatttcagcgagtgcatgtctcgctgccgtgagcccaaggactgtgcttttctccgcgaagactacctcgagtgctccaccattccaagtntttnancgacgagnttnatttncgnggaggaacaaaggttct

SEQ ID NO: 10946 - DNA, 246 bp, Glycine max
  unsure (1)..(246): unsure at all n locations; Clone ID: 701151796H1
atgcacaagtttgttgagatagctagaagcaataagatgaaaatgaaagtgcttgttttgtttgttgctacagttttggtagcatatgaatgccatggctcagactaccagaagttccctctccaaatgaaaactgggtttggtgggcaatacagcaatgaggtggcatgtgccagttggaggcttggcgtggaacccaaanagcgtnnannggggaaattccctcnnatcngngggngganaata

SEQ ID NO: 10947 - DNA, 282 bp, Glycine max
  unsure (1)..(282): unsure at all n locations; Clone ID: 701151801H1
aagaaggaagctgaagtcatagaagagaagaaggaagtggnagtgacggaagagaagaaggaaattgaagtaacagaagagaagaaggaagctgaagtcatagaagagaagaaggaagtggaagtgacggaaganaagaaggaaattgaagtatacagaagagaagaaggaagcngaagtgaaagaagagaagaatganggggnagtgacggaagagaanaaggaagttgaagtnacggaagagaagntttaagcggnatgatagtagaagagaaccnnngg

SEQ ID NO: 10948 - DNA, 270 bp, Glycine max
  unsure (1)..(270): unsure at all n locations; Clone ID: 701151802H1
gatcgaagcaaaaaatgaaaacccaaagtgcttctctcctctgtctttttctctctcttgctatccttttggctannggcactgctgcaagtgcanctccaagaagcgcagtgccaagccaccatgtttcaacattcaacagaagcctttttccttccacttttctctttgganttggttcttctgcttaccaggcagaaggagcagcaagtgtagatgggagaggaccaagcatatgggacacctacacttagacagcatactgaaagg

SEQ ID NO: 10949 - DNA, 289 bp, Glycine max
  unsure (1)..(289): unsure at all n locations; Clone ID: 701151803H1
ccagcactcgacaaagntacactttgggaatttcaacctaaggaaattggtgaaggcgancttttaactggtggagatntatatgctactgttttngagancagnctaatgcaacaccatatngcacttcctcctganancatggganagattacctacagtgcaccacctggccaatattccatanaaggatactgtattggnacttgagtttcaaggtgtcaaaaagagattcancangtttcagactnggcccgtacgtacacnaaggcntgttgcatnaaaattg

SEQ ID NO: 10950 - DNA, 270 bp, Glycine max
  unsure (1)..(270): unsure at all n locations; Clone ID: 701151809H1
tgaatatggagaacaaacagaggaggaactcgcttcccggaggaaggaacctaccgtgtcactaatgagaatgtcattacttttatccaccttgtagccaatcaccgcttgnnttttcanatacgccaacaaagttcacatttcttgaggggatttcagcaacttatgcagaaggattggattgacatgtttaatgaacatgaacttcagctctgnnatcaggttnantgacagnttggntattnnngatctgcggctgcataccnacna

SEQ ID NO: 10951 - DNA, 270 bp, Glycine max
  Clone ID: 701151810H1
ggagaagagaagtgaactgaagggtgggtggtgtgattgagtatgagcatgaattctctcctagcaagcacgcgtgcttcttcttctccattataccaacactcttccaccttgacactcagacaaccccattttcttttcatctcctccaattccaagtcgtctgcctttccattggttgcatattgttcctctgccccttcacccaatgaatcagaccaaaccattcttctaaacgaaacctttcattctcaagtcacaacccccaaa

SEQ ID NO: 10952 - DNA, 267 bp, Glycine max
  unsure (1)..(267): unsure at all n locations; Clone ID: 701151811H1
gggaggccataaaaaagatgcgatgctacacgcaaacaagtagtacaagtccaataagaaaagcaagatagaaagattggctagttcacacacctcaattaatacaacaacaccctgttgctgatagtnttatagagagagttcgatcaattcaagcttgcaagcttaaccatggaacggtatgagataattaaagatattgggtcaggaaactttggtgtggcaaagctggtcaaggaaaaatggagtggtgaattatatgctatc

SEQ ID NO: 10953 - DNA, 264 bp, Glycine max
  Clone ID: 701151812H1
gacacacagagcggttctcatattttggagaatccgaaaaacacgttaaagaaagtcccattcccactaccgaagcaaattaagaagatgaagcagcagagagtggagtttatgggcatgggcatgggcatgggcatgggcctgggccttttggtggtgatgatggcatgtgggtcggcgagtggtgcggatgatttggcaaccaagtgttcagcggtgattcagaaggtaataccgtgtttggatttcgcgaagggaaggaag

SEQ ID NO: 10954 - DNA, 273 bp, Glycine max
  unsure (1)..(273): unsure at all n locations; Clone ID: 701151813H1
gaggatctgttgttgtgttgggtaaggtaagcatgttccgttcattgctccgccgcccgttttcgacgacgtcggcgagggcgttgaagcactgcgagaaccacgagtttctctctaagaactcgttcctgggaagctgggatgcgccacgggaccccaaggaggcggaggcgaantaacgcgtcttcgaagagaatacgcattgcaagtgaaggaggttcggaaggaatacataagagagatggaggtcatgaagattgagaaggagcgcaa

SEQ ID NO: 10955 - DNA, 267 bp, Glycine max
  unsure (1)..(267): unsure at all n locations; Clone ID: 701151815H1
gagagaaagagagagaaagatgtcgaagcgtggtcgtgntggttcggcggggaacaagttccgcatgtcgctgggtcttccagtggcggcgacggtgaactgcgccgacaacacgggggcgaagaacctctacatcatttcggtgaaagggatcaaaggccgtttgaaccgtcttccctcggcctgcgttggcgacatggtgatggccaccgtgaagaagggaaaacccgatctgaggaagaaggtcttgccagctgtcatcgttcg

SEQ ID NO: 10956 - DNA, 259 bp, Glycine max
  unsure (1)..(259): unsure at all n locations; Clone ID: 701151818H1
antacnngagcatcactgaactaacaaagcaaccctatgtcgaaggtggttctgtnncanngnagncaanngaaccnatcggatcatgggtggtcctactcctcctccagcgtggntacaccgtccatgccaccgtccaagatatctnggatganaatgagacgaaacatttggaggacatggaaggagcaaagagtcatctccattttnntgaaatggatcttcttgacatcgactccattgccgctntnnnaaaggg

SEQ ID NO: 10957 - DNA, 272 bp, Glycine max
  unsure (1)..(272): unsure at all n locations; Clone ID: 701151820H1
gacaatcgaacgggaaaangcgtcttcataaacgccgcccaaaacttctgcataccctttnattcattccattcgtttctagggttttcttttctntgccgagaaaatgagagagtgcatttcgatccacattggnnaggccggtatccangttggaaacgcntgctgggaactctattgncttgnacacggcattcagcacgatggacagatgccgagtgacaagaccgttngnggaggagacgacgccttcaacacattttttgagagac

SEQ ID NO: 10958 - DNA, 262 bp, Glycine max
  unsure (1)..(262): unsure at all n locations; Clone ID: 701151821H1
ggcacaagtgagtttgttgatcgagataactanaaacagtgtgatgaaaatgaaggtccttgttttcttcgttgctacaattttggtagcatggcaatgccatgcgtacgatatgttccctctccgaatgaacactggctatggtgcccgtactccggaggtggaatgcgcaagttggaggcttgctgtggaagcacacaacatctttggctttgagaccattcctgaagagtgcgttgaagcaacaaaggantacatccat

SEQ ID NO: 10959 - DNA, 263 bp, Glycine max
  unsure (1)..(263): unsure at all n locations; Clone ID: 701151822H1
gaacacgcggcttccgccggaggtnaaccgcgtgctgtacgttcggaaccttcccttcaacatcaccagcgaggagatntangacatctttggnaaatacggcgcnattcgccanatccgcatcggcaccaacaaggacactcgcggaaccgctttcgtcgtctacgaggacatctncgacgccaaaaccgnngtgnggccacctctccggcttcaacntngccaangnnacancatagtttctntattntcaaaacgnggnt

SEQ ID NO: 10960 - DNA, 265 bp, Glycine max
  unsure (1)..(265): unsure at all n locations; Clone ID: 701151824H1
gncttcattgcttctcagttctctcttctatttttggttttagctcgacttggttttttttcttttatcagttagctcaacttgtaagagtgctttaactggctggttntgtcttngtcannntccaattanaggaattcattggatattcatcttgaatgattggaagtccacatttgagggaatcatgttncgcantgcatntnntnaatgcgtacacaaatgtgangaatgtaccgttccatgntnnnncttcagttccacc

SEQ ID NO: 10961 - DNA, 268 bp, Glycine max
  Clone ID: 701151825H1
ggcggaactcatggcgccctaattgaagccccaggcggcggatttgtaaaagtggtgatgggttcatttgtccgcatagctcgaaaccttttatggtcttccttttgttcgcagtcattgtcgaagaatgtcagccaacaattatttacgtcttcggtgtctgtgttcaaaagttacaagttcaggtatgggagaacgccggttaggaagcatcgtgaggccaacgccacgcatactacagcggtcgagcttgcattcaattctgtag

SEQ ID NO: 10962 - DNA, 280 bp, Glycine max
  unsure (1)..(280): unsure at all n locations; Clone ID: 701151827H1
caatgttaacaattaatactcctcatcttttggcaaatagaagcctcacttatgtggactggtcaaggggtggtgctcacccagctacctttgggaaggatgacatcaaagaggaattcttcaagaaaattttgcaagatcagacatgtctttataataaccagccatcttccctttgcttcttatttgcaagaaaatttgcacctnnngccctgggccctcttttagacatagcacccaaagctctaggaattggaaaaaggcatagcttctaagctac

SEQ ID NO: 10963 - DNA, 277 bp, Glycine max
  Clone ID: 701151830H1
agctggcactgaatatgaaacagtcaaaagacaaatagacgaagttgagggagctgttgtgaaattagtagatactaatgatcaactgacaaaggatcttgaagagagcgccccgtctctgaacaggcagacttcggttgagttggaaaagagtagacacatccagagaaaaagaataaccgagcaggcacgaaaaggttctgaacagataggaaggttgcagtttgaggtgcagaacatccaatacactttgctgaaattggctgatgagagcaaa

SEQ ID NO: 10964 - DNA, 268 bp, Glycine max
  unsure (1)..(268): unsure at all n locations; Clone ID: 701151831H1
ggaggcagcagaagaaaaatacaanaaatgggagaaggatcctgctccattccgggtgggacgtctttaatcagaagacattatacaatgcatacnaaaagcggaccaanantgttgaagtcgatntagaagaatanaatagaatgnaagaagctgatccagagttctaccgtgatgcttcaagtctccaananggaaaggcaccagnaanctcagaggagaagattnacaagatggttcaagagcnanagaatanggacganaagcg

SEQ ID NO: 10965 - DNA, 269 bp, Glycine max
  Clone ID: 701151832H1
gctctttattattttcagttactaatcctagttatttgatttatatactttttttatagtaaatacatgagatagaatattcaaaatggaatatttctattattttattcttcatccaatgactatacattcattatattttaatgtaaatagaggaaaaactcgatggaaaaatggtggtttaattctatgttgtttaataggaagttagaatacaggtgtgaattaagtaaatcaatggatagtcttggtcctattgaaaataccag

SEQ ID NO: 10966 - DNA, 281 bp, Glycine max
  unsure (1)..(281): unsure at all n locations; Clone ID: 701151833H1
angaaggannctgtagtcatagaagaccgagangnccactggaagngnccgctgatnagaanctcanagtgatgcnngagnaggaagcctcctacgatgnnattnaaaatgctatgcaaggaggaatcagagggcaagttgaagggatttcttggttacactgnagntgnngtggtctccaccgactttgtgggcgatagcagatcaagnatttttgatgcaaaggctggaattacattgaataagaactttgtgaagcttgtttcttngtacgacaacga

SEQ ID NO: 10967 - DNA, 260 bp, Glycine max
  unsure (1)..(260): unsure at all n locations; Clone ID: 701151838H1
gggaggaagaggaaaagaggattagagggtcgccacgtttagcaataaccaaaccctctctactcttttttcttctccttctcttcgctagggttttagcttcttcctcttcacttcgttctttttcgcctctacaatgagnancgacaaggacacattcaacgtcgccgatctcacttctgctctcaacgaggacaatagagcagaccttgtcaatgctcttaagagcaagatacagagtttggctggncaanactcgg

SEQ ID NO: 10968 - DNA, 201 bp, Glycine max
  unsure (1)..(201): unsure at all n locations; Clone ID: 701151840H1
gatgccacaatggttgtcccncttaggcactttcttgttttgcnctctgcaccctcatatccatcatcttccacacccatngagcgctctctgagnaatcaatnatacaagntnnccannggncnancaaaggganagnaacnganccacttgcacnttttctaccacgacgtcttagagggcnnnagacancncaggtng

SEQ ID NO: 10969 - DNA, 273 bp, Glycine max
  Clone ID: 701151841H1
gacacacagagcggttctcatattttggagaatccgaaaaacacgttaaagaaagtcccattcccactaccgaagcaaattaagaagatgaagcagcagagagtggagtttatgggcatgggcatgggcatgggcatgggcctgggccttttggtggtgatgatggcatgtgggtcggcgagtggtgcggatgatttggcaaccaagtgttcagcggtgattcagaaggtaataccgtgtttggatttcgcgaaggggaaggaagaaacgccg

SEQ ID NO: 10970 - DNA, 73 bp, Glycine max
  Clone ID: 701151842H1
aagaaggaagtgaagtcatagaagagaagaaggaagtggaagtgacggaagagaagaaggaaattgaagtaac

SEQ ID NO: 10971 - DNA, 266 bp, Glycine max
  unsure (1)..(266): unsure at all n locations; Clone ID: 701151844H1
gaaaaaacatcgggaaaaagagctggcaaaacttcagagtgatgaagcaaagagatcctccattgatttgtcaagcaagaaagtggaacccgtagtggacgttgctagacaggttaaatctgttgaacccagtggatataattctaaagtaganataaaaaagatagataccaaaccggagccatctgaaggcacatctggtgcaccaaaaattcgaattaaaattaaaaaccgaatgctcagcaagtcctagggaatataatgtc

SEQ ID NO: 10972 - DNA, 261 bp, Glycine max
  Clone ID: 701151845H1
ggcacaagtgagtttgttgatcgagataactagaaacagtgtgatgaaaatgaaggtccttgttttcttcgttgctacaattttggtagcatggcaatgccatgcgtacgatatgttccctctccgaatgaacactggctatggtgcccgtactccggaggtgaaatgcgcaagttggaggcttgctgtggaagcacacaacatctttggctttgagaccattcctgaagagtgcgttgaagcaacaaaggaatacatcca

SEQ ID NO: 10973 - DNA, 262 bp, Glycine max
  Clone ID: 701151846H1
gactcactataaacattaattagaaaaagaaaacatattacttaaattgctttgatttttgtcttctaatgtgtttgggtttttttattagacaaaaataaataggttaaattataatttttaatttgtaattttattttttatctttaaatctgcaaattttgttcttcaatattctaaattatgcaattctagtccgtccgttgactatcggtggacattttcatgccttttaattaatacttttacaacattatttaaa

SEQ ID NO: 10974 - DNA, 276 bp, Glycine max
  unsure (1)..(276): unsure at all n locations; Clone ID: 701151847H1
ggggagagatagccacaggaagggttattccacannncannngatcancctgagnccaactgtgagttaatgttgatactcttggaagtggatttgatgcagttacaagcagccttcttgtcctctgaggttgttgcagcagaggcaagagacttagctcctgagcaacaagcagctggtggctgtccactgccactcaccaagtagctcacacatggcctcaagtccttganacatcactanatgaaattgcagcctctgaagttgacgcaagaa

SEQ ID NO: 10975 - DNA, 236 bp, Glycine max
  Clone ID: 701151848H1
gaaaaaaacacagcgtcctagatttcctcttctctgcttcggaagaaagagaaaacaaacaaaacaatggcgttcgcttctttcctcggcagagtcctcttcgcttctgtcttcatactctctgcttaccaacaatttaatgaatatggagttgatgggggacctgctacaaaagcactcagacctaagtttgatgcctttacacatcgggtgcattctcaagtgggctttcaaat

SEQ ID NO: 10976 - DNA, 234 bp, Glycine max
  unsure (1)..(234): unsure at all n locations; Clone ID: 701151850H1
gaattcannatatatcatcanttataagcatgggtttgtggaacacaaacgaatgcagtgtcttgccgctttcgnaagtntggtgatgaccnncanaatctggtcttccaaggtgatgccacgtcntcttccangggcanagnactcacanacttanatgcgtggagganaaccagtnggagncngtgtgngnngaggncgatnctcnnctccagtgcnccntggggnagctct

SEQ ID NO: 10977 - DNA, 267 bp, Glycine max
  unsure (1)..(267): unsure at all n locations; Clone ID: 701151851H1
gnaagtagccactcannccaggttnntgnctgtgatangatttcagttggctctactaatattgttcancnctntgccatgaggtttgaaaaatcaanttgaaattaantagtccttccatacaacctctagannancacanntcagtattggtanccntgctgcantagtttagngtctctcnctctcgganttcccaaacttatgtccttccnntaactctagaagtgnaaccncngggaaatgcagattgnctaacataatccc

SEQ ID NO: 10978 - DNA, 259 bp, Glycine max
  unsure (1)..(259): unsure at all n locations; Clone ID: 701151852H1
ataatcatgatgactttgtagtaaattaagaattcaatgtttgaacaatctaacagtttggatcatatnncttgaaatcggctcttgaaatcttcaacaatttccttttcttcatctttgctatgtttgcgattcctccaatcagnattatctgcgcatattaagnaacccagcaagaacctgattcatgtttactagtgttaactctatctgatnaatacaaagagttgcatcttataacaaaagcatgctaancttg

SEQ ID NO: 10979 - DNA, 256 bp, Glycine max
  unsure (1)..(256): unsure at all n locations; Clone ID: 701151853H1
gacacttaccactactaccaatactcctcgcacaacacaaccacaatggccgcgaagaagaagaatggcggcggaaacggcaacaacaaggagaacgaagacagcaccatcaccgtcgtcntgaaggtcnaaatgcactgcgacggttgcgcttccanaatcatcanacacctccgctgtttccaaggtgtggaaacggtnaaggctgatagcgacgccgggnagtgancgtgacggnaaaatggncccccgaaat

SEQ ID NO: 10980 - DNA, 264 bp, Glycine max
  unsure (1)..(264): unsure at all n locations; Clone ID: 701151856H1
gacttcattgcttctcagttctctcttctatttttggttttagctcgacttggttttttttcttttatcagttagctcaacttgtaagagtgctttaactggctggttttgtctttgtcaaaatccaattacaggaattcattggatattcatcttgaatgattggaagtccacatttgagggaatcatgttttcagtgcatcncntttaatgcttacacaaatgtgatgaatgtaccgttccataatcaaacttcagntccac

SEQ ID NO: 10981 - DNA, 280 bp, Glycine max
  Clone ID: 701151857H1
gacctcaaaaaacaaaaatcaataccttagagaaaacaaaagcacagaatcgaaagaagagttcttttttaagagagattgggatggcttcgacgaagaagatcacactgaagagttcggacggcgaggccttcgaggtggaggaggcggtggcggtggagtcccagacgatcaagcacatgatcgaggacaactgcgccgacagcggaattcctctccccaatgttaccagcaagattctggccaaggttatcgagtattgcaagaagcacgttgaggc

SEQ ID NO: 10982 - DNA, 262 bp, Glycine max
  unsure (1)..(262): unsure at all n locations; Clone ID: 701151859H1
gagcctgcacttctcaatcgcaaattttctcccccaaatcgtagatcctacggttaaattggtgtagtgtggtaagatgggaggaggatttagagtgcttcacttagttaggccatttctctcgtttcttcctgaagttcaaactgctgacaggaaagtgccatttagagagaaggtcatatacactgtganntctcttttcattttcctggtttgtagtcagctccctctatatgggatacactcaacaacaggtgctgat

SEQ ID NO: 10983 - DNA, 271 bp, Glycine max
  Clone ID: 701151860H1
gaacccgaacttacgatgtcagtatcacgtatgataaatattatcaaacaccacgagtatggcttactgggtatgatgagtcgagaatgcttttgcaaccagaacttgttcttgaagatgttagtcaagatcatgcacacaaaacggtaacaattgaggaccatcctcacttgccagggaagcatgcatctattcatccatgtcgacatggagcagtgatgaagaaaatcattgatgtgttgatgtcacacggagttgagcctgaagtcga

SEQ ID NO: 10984 - DNA, 163 bp, Glycine max
  unsure (1)..(163): unsure at all n locations; Clone ID: 701151861H1
aagaaggaagctgaagtcatagaagagaagaaggaagtggaagtgacggaagagaagaaggaaattgaagtaacagaagagaagaaggaagctgaagtcatagaagagaagaaggaagtgccgcgtgacggaagagaagaaggaaattgaagtaacagaagng

SEQ ID NO: 10985 - DNA, 269 bp, Glycine max
  unsure (1)..(269): unsure at all n locations; Clone ID: 701151863H1
ggagaganagagagatggaggagaagacggagaaggtgaagtctgaggcagttcagataattgaagcgtttgaggttctgccaaagctcgtggttttcgatctcgattacactctctggcctttctactgtgagtgtcgatcgaagcgcgagattcctttctcntatccccacgccaaaggcatttgttagctctcaaagagaaaggcatcgacattggccatcgcttctcgtcgccaacggcagacatcgcaaccgctttcctcaaca

SEQ ID NO: 10986 - DNA, 267 bp, Glycine max
  unsure (1)..(267): unsure at all n locations; Clone ID: 701151865H1
gacantggnngagngtgcanaagancgtcgcagtcgcaaccctaatcagaagaagcgcagttcaagcgagtgacagccaccagccatgggtcgtatgcacagccgcggtaagggtatatcctcttctgctttgccctacaaaaggacacctcctagctggctcaagatctcttcgcaagatgtcgaagaaaatatctgcaagtttgcgaagaaaggtttgaccccgtctcanattggtgtcatctcagagattctcacngtatgctt

SEQ ID NO: 10987 - DNA, 274 bp, Glycine max
  unsure (1)..(274): unsure at all n locations; Clone ID: 701151866H1
gacactaaacaagttaaaagaagagcatcactgaactaacaaagcaaccctatgttcgaaggtggtttgtgtcaccggagccagcggcgccatcggatcatgggtggtcctactcctcctccagcgtggttacaccgtccatgccaccgtccaagatatcnaggatgaaaatgagacgaaacatttggaggaaatggaaggagcaaagagtcatctccatttttttgaaatggatcttcttgacatcgactccattgccgcttnnccaaaaggg

SEQ ID NO: 10988 - DNA, 263 bp, Glycine max
  Clone ID: 701151869H1
ggcacaagtgagtttgttgatcgagataactagaaacagtgtgatgaaaatgaaggtccttgttttcttcgttgctacaattttggtagcatggcaatgccatgcgtacgatatgttccctctccgaatgaacactggctatggtgcccgtactccggaggtggaatgcgcaagttggaggcttgctgtggaagcacacaacatctttggctttgagaccattcctgaagagtgcgttgaagcaacaaaggaatacatccatg

SEQ ID NO: 10989 - DNA, 190 bp, Glycine max
  unsure (1)..(190): unsure at all n locations; Clone ID: 701151872H1
gancgtacgcatatttctgtgccaacaaaagaagatggcctcacaggtttgcaaagctgcttccggagccgcgangtcccttctctccgcttccagagcctcccatggacgtgcggttggggctgctacggctgtttcattgagctgcaaagtgcctcttttctacggaaagaacggttctggaagtggt

SEQ ID NO: 10990 - DNA, 259 bp, Glycine max
  unsure (1)..(259): unsure at all n locations; Clone ID: 701151874H1
gggacgctgctgctataaaaaagctcgaatactcggataaggagaaacatcttttaatggcgtcccaaatccgtgagtggtctggaatcaatacattcgcacctgctacccagactaagttgcttgaactcttgggaaatcttaaacaagagaatgtgaactccttgactatacttgtgatgggannnnnaggtgttggaaaatcttcaactgtgaactccatcannggggaaagagtggtttcgattagtcctttcca

SEQ ID NO: 10991 - DNA, 267 bp, Glycine max
  unsure (1)..(267): unsure at all n locations; Clone ID: 701151876H1
ggcaagagcaagagcaagagcgaaagcgncagagaagatggaaggagaagagggttctcagcagccacagttggtgctcgcggacaagctattccttctccggcaacccgatgtgcaagacattgacaaggttcgctacaaagaggatgtcttcactcatgtcaaggaaaacgatatggtccctctgtacgaaaccctagtcgctgattccgtgttggacttggatcgtggccttttggactcctatgcgngtaaaatgacgacgag

SEQ ID NO: 10992 - DNA, 239 bp, Glycine max
  unsure (1)..(239): unsure at all n locations; Clone ID: 701151877H1
gggagtctcntggccaactctgctacaaaagctgaaaagcgtattttagataacagactacaaaaagaggaagcattaaaggttcgagtgactaaagatnntgaggctagtgaaaaggagaaggaactggttactgagatatctgaactgcaatgcaaaaaagaagatctcgaagctgaattgtaaaaggttagcactactttggctgctgctcaagcacgactatggaatgtgaggga

SEQ ID NO: 10993 - DNA, 259 bp, Glycine max
  Clone ID: 701151878H1
ggaggaagtggatgacgagtgcacacgtgggagccatgtctagttctacatgcttcccttcacttcctcgacttcttcgaccttctttcaccaaaaccaaatcatcacctaagttcagcatgagcatgagcaaggatccggttcgtgagtggattctttctgatgggaaagctatggagataaccaaaattagccctgttggtgggggttgtatcaatcttgctagtcgctacgacaccgatgctggttcattctttgt

SEQ ID NO: 10994 - DNA, 265 bp, Glycine max
  unsure (1)..(265): unsure at all n locations; Clone ID: 701151879H1
ggcacaagtttgttgagatagctagaagcaataannatgaaaatgaaagtgcttgttttgtttgttgctacagttttggtagcatatgaatgccatggctcagactaccagaagttccctctccaaatgaaaactgggtttggtgggcaatacagcaatgaggtggcatgtgccagttggaggcttggcgtggaagcaaacaacgtagtcaagtggcaaactgttcctgcagcttgcggagagtacatagctgactacgttctag

SEQ ID NO: 10995 - DNA, 262 bp, Glycine max
  Clone ID: 701151880H1
ggcaccatgaggaatgttcctgtgggggcaggacggcgaaagaacaagaactctacctcgcattatcgccacatcactatctccgaggcccttcaagcagcaagaattgatgctcaaaatggaactcatcttccaactttgaaaggcaatggtagagtcctcagctttggattagatgcacatgcacctatttgtgattccatggcatctctcatgaatcttggagagaaaaaggctcttaatggcacaagaaatgggtttc

SEQ ID NO: 10996 - DNA, 270 bp, Glycine max
  unsure (1)..(270): unsure at all n locations; Clone ID: 701151881H1
gatcgaagcaaaaaatgaaaacccaaagtgcttctcctcctctgtctttttctctctcttgctatccttttggctagtggcactgctgcaagtgcaactccaagaagcgcagtgccaagccaccatgtttcaacattcaacagaagccttttncnnggcactttnctctttggaattggttcttctgnttaccaggcagaangagcagcaagtgtagatgggagaggaccaagcatatgggacacctacactagacagcatactgaaagg

SEQ ID NO: 10997 - DNA, 88 bp, Glycine max
  Clone ID: 701151887H1
gtgtcctaggactaatggcacaggtgacaacaatctagcaaatctagacttcagaactccaaatcattttggacaacaactacttcaa

SEQ ID NO: 10998 - DNA, 260 bp, Glycine max
  unsure (1)..(260): unsure at all n locations; Clone ID: 701151888H1
gaaaggaggaagaggaaaagaggattagagggtcgccacgtttagcaataaccaaaccctctctactcttttttcttctccttctcttcgctagggttttagcttcttcctcttcacttcgttcttttncgcctctacaatgagcaacgacaaggacacattcaacgtcgccgatctcacttctgntctcaacgaggacaatagagcagaccttgtcaatgntcntaagagccngatncagantttggctngncaacacc

SEQ ID NO: 10999 - DNA, 262 bp, Glycine max
  Clone ID: 701151889H1
ggttgcactcatcgacatgcacagttgcagccttgaagctaaaattaaaatgaacctagatgctcaagttgtggaacaggctgctgaagctaagaagccagagaggaagaagcccaaatccaaagagcctatggcaaaaaaggctaaagttgagaaggtgaagaaagtcaaggatcctaacatgcctaagcgtcctcccacagccttctttgccttcttggatgattttagaaaatctttcaaggaagctaatcctgattct

SEQ ID NO: 11000 - DNA, 257 bp, Glycine max
  Clone ID: 701151890H1
gaccggaaagaccataaccttggaggtggagagttcagataccatagacaatgtgaaagctaagattcaggacaaggaaggtatcccaccagaccaacagaggcttatctttgccgggaaacagcttgaagatggaagaacccttgctgactataacatccagaaggaatctaccctgcatttggtgttgcggctttcgtggtggcatgcaaatcttgttaagactttgactggaaaaaccataactttggaggttg

SEQ ID NO: 11001 - DNA, 257 bp, Glycine max
  Clone ID: 701151891H1
ctatataataagcacacagtttagcaacaaagaaaggcctactttgtgatagtttagagaggaaaattactttggagccttggctagcgaggcagagtttggtggtggcaaaacggggcactgatagcatgatatgaagtttgaaggtaaaatccacaaactatttgctttattcagtgattcagacttatctaaaactcaagaaagagttgagaaaagctaaagtggaaaagtaaaataacacaaccagtgcttac

SEQ ID NO: 11002 - DNA, 259 bp, Glycine max
  Clone ID: 701151894H1
aggatttgacataaatagatatgctgagagaatgaaagaggatgacaagaagactccctctctctggacaagggaaaactctccatcatcagtcccaactcatgctcctttagattcgactaggttagaatcagatactgatgcttcagacaatgagaaaatagactcttcccctgaccccgtgatggatacaggtatcattaaccctgatcagaaaatcttggttaatgaaggagaaaaaaatgccagtgcagatatt

SEQ ID NO: 11003 - DNA, 259 bp, Glycine max
  Clone ID: 701151895H1
ggaaccaaacaacaaatattcatggctttctttattctctccttcctcttccttcttcttgtttcatctgccactgcttgtgatcgctgcttgtatcaatccaaggcttcctatttctccaaagcttctgctctttcatgtaattaacaacattcattattattattatcttcaatttcaggccaagtatagaatgatcatactaatttaattattatgtgaatttgaaattgaattagctggggcatgtgggtatggc

SEQ ID NO: 11004 - DNA, 264 bp, Glycine max
  Clone ID: 701151901H1
gaggcaacacttgaagatcaagaaacaggtgctgtaagcaatatatatgaggataaaatttcaagaaaaatggacgttgaggaagattggcgatggcttaagaggaaacagaaagatgatcactatattgacttggaggcaacttttcatgaagacccaagtgtagaagggatcaactgtgggctacctaatgataaagttcagcatgtagatctttctgacacaattatgcagggttctgctgtcagttgtcagaaaatacct

SEQ ID NO: 11005 - DNA, 251 bp, Glycine max
  Clone ID: 701151902H1
gatcccaagctcacacaccaaaccaaagcaagaatagtgttctaagagtgagcaacaacttcaaacaccattgtgagaaatggctttccaagggtgcacttctcttgtgtctcaacattctcttcttcactgtggtaagctccacatatgtcccatgcaacccaccccctaaaactcctaaatacacacctgccccaaagccaccttccccaaagcaaccaagttgccccaaagacaccattaagttgggt

SEQ ID NO: 11006 - DNA, 256 bp, Glycine max
  unsure (1)..(256): unsure at all n locations; Clone ID: 701151903H1
actacacccacactaccatccagtttcttagatggctttgttattccttatgataattgctgctccttgcaagcagaggaactgcaacagaaactcttctccgagacacaatatggtgatacttgtgttgatcttccatgtgagaagaaaggcaatgagagaaccatatctccacagagtgtagcggcgagagaaaggagaagaaagatcctaagaagactcaagagcttgggaattggnccctggtggaccaaat

SEQ ID NO: 11007 - DNA, 258 bp, Glycine max
  unsure (1)..(258): unsure at all n locations; Clone ID: 701151904H1
gataacaacattgtcctacagtttccatgtatctggcaaccattatcgttcaactcttcactcttcttgtgtccaagtaatcatttcacatcccacaacgttgtcttccaacnnnnnnnnnnnnnnnnnnnnnnnaacttcaatttttgacagccaagtttgtttccagtaacgacggacaacaacctttcacttttactatgatgagagaaaaccacgtctgaagagtttgagcagcaaagagaacttagaatgatg

SEQ ID NO: 11008 - DNA, 262 bp, Glycine max
  Clone ID: 701151905H1
cactctttgaagaaatggaagcaagcagcatcaagctagatactattgcctgtgcagctctaatgagatcttttaataaaggtggccaaccaggaagggttcttagtcttgcagaaagtatgagagaaaaagaaattcctttcagtgataccatattttttgaaatggtatctgcctgtagcatattacaagattggaggacagctgttgatatgatcaagtacatagagccctcacttcctgtaatttcatccggatgttt

SEQ ID NO: 11009 - DNA, 234 bp, Glycine max
  Clone ID: 701151906H1
gacagcatatatatcaataatctattttatactatacctacattttgataattttctttgtagttgatagccatggctacccgtggaaagcttgaggttgacattgatctcaagtccaacgcagacaagtactggcaatcccttaggaattctactgaaatattccctaaggccttcccacatgattacaaaagcattgaggttcttgagggtgatggcaagtctcctggttct

SEQ ID NO: 11010 - DNA, 257 bp, Glycine max
  Clone ID: 701151907H1
gatgccacaatggttgtccctcttaggcactttcttgttttctctctcaccctcatatccatcatcttccacacccatggagcgctctctgagcaatcaataatcaagttacccacagaccaaccaagggtagagaaactgacccacttgcactttttctaccacgacgtcttagagggcaagaacatcacggtggtgaaaatcatcgagccatcagcgagcgaggttcgtgaagcaactgggtttggaaccacttt

SEQ ID NO: 11011 - DNA, 255 bp, Glycine max
  Clone ID: 701151908H1
gttaatgcaagtgattcgagaggtcaaacaccactacatcgctgtattctcaaaggaagatctacatttgctagattattgctttctaggggagccgatcctcgggctgtggatgagcagggaagaacccctattgagcttgctgcagagtcaaatgctggtggtgacagggaagtccatgctccattgactgattctagtggatgagagtgataggcaaaaatctcggagtataatacatatataaaatatgga

SEQ ID NO: 11012 - DNA, 240 bp, Glycine max
  unsure (1)..(240): unsure at all n locations; Clone ID: 701151909H1
ggagtcgatgctgtangtgatgtcgtagaagagcanttctgcaaaatccaaaaccccgaatttccaacaacaaacgctcnagctatttgagttgcgacgattcatccattcactcaattccttccaatgcagtctcccgatgacgttcgcaatctccctatcgacatcactttctctcgtctcggagaatggttggtggatcgcaagcgagtgcccgcggattggcgcaagcgcgtggcg

SEQ ID NO: 11013 - DNA, 255 bp, Glycine max; identical to SEQ ID NO: 8259
  Clone ID: 701151910H1

SEQ ID NO: 11014 - DNA, 261 bp, Glycine max
  unsure (1)..(261): unsure at all n locations; Clone ID: 701151911H1
tactatcagcttgagcgattggatatttcatcaaattcatttgtggggccttttcagccaggattgttgtcacttccttctattacttatctgaatatttctgggaacaaattaaccgggatgctttcgagaatctttcttgcaattctgagcttgatgtagtggatttatcctcaaatcttttgactgggagcttacctagatgtttagtgtcaanttccagcgatagcactggncctgtatgctaagaaattggnctac

SEQ ID NO: 11015 - DNA, 255 bp, Glycine max
  Clone ID: 701151912H1
cctaggacacccatgggggttccattgaaaaggcttagcttttggatttagatttgactttgggttggttttgggtatggataatgctcttgtagtgtgaagtgctagtggagttgaggaaagcttcctccatagacccaatgttcccccttttctttcttcctcttcacaaagttatattttgatgtttgaataggtaatggaagctttagccttttctatgcttaggttgctttggattggtttaaatgttgc

SEQ ID NO: 11016 - DNA, 256 bp, Glycine max
  unsure (1)..(256): unsure at all n locations; Clone ID: 701151913H1
tggttgttgtgcnctaatatcttatgntttaagccntanctattgttcanacaanttanacaggctcaaccacgggctcacaanacntnagcccaagctacatanatatcctatcngcattntnnnnatccttaaccctccactganatgcnnaangtcctcatcaagcccagcttaccccgaggatccttcctaaggagatttatagagncatcgagtcagtattcagtacccatgcaattgagagttcgctggt

SEQ ID NO: 11017 - DNA, 257 bp, Glycine max
  unsure (1)..(257): unsure at all n locations; Clone ID: 701151914H1
gcatccaataacttaggctcattctgtattattgaggtcagcacgtgattttatctaattatgacaaagaagagacggtgttgttaatattttaacgtttactagtatagaganaaaaaggacaacattagttgataattttaacgtgtgaaatctgtttttagcaagcatgatcttgaaggttgcaacctccatgattgctccaagcgactagtttattattgtgaattattttntattcttttattacgtgggat

SEQ ID NO: 11018 - DNA, 271 bp, Glycine max
  Clone ID: 701151915H1
gggcattggagagattggaacacccccccaaaacaagccccaattatggctctgaatctttgtatctcacctaactgtaaatgggtttcatctcctgcttccttagatagtgcatcttctttgagatcttcacttggttcttgttttggtaacataaacattactagtgtgagtttaagcactagtagaagtttgagtttgaggaggagtgggagtgttagtgtaagatctagtttggaaactacggggcccacagttacagtgggacagg

SEQ ID NO: 11019 - DNA, 270 bp, Glycine max
  unsure (1)..(270): unsure at all n locations; Clone ID: 701151916H1
cttgcaacgaactccacggaagaccagagagaagggtgccccacctctgcctcaacccttcactttttttccctttatgctttacattatagtttattttgaaattaaataaaataaaataaacaatcatcttccttttatacattaaattttgttttttcttctttgtagcttcaatcttgtcgtagatattccgtaaaaaaaaaatctttgtcgtagangttataatacaaaaatagtttaattattctgtggttaaactgttttttt

SEQ ID NO: 11020 - DNA, 200 bp, Glycine max
  Clone ID: 701151918H1
atcagtggtgcccaccaggataacaacataatactgtggaatgctgtcatatttggtcctgatgatactccatgggatgtcggcacgttcaagttgacactccaatttactgaggactatccaaataaaccaccgactgtacgatttgtgtctcgcatgtttcatccaaatatttatgctgatggaagtatttgtttgga

SEQ ID NO: 11021 - DNA, 255 bp, Glycine max
  Clone ID: 701151919H1
ggcacccaaaggtgcaaaaatattaagatgataaacattggagcacttgttgtactctttgcatttctcttcctcagttgtgcctatgcacaagacacaacaacccttgtgcctgcaatcataacttttggtgactcagccgtggatgtagggaataatgactatcttcccacccttttcaaggctgattaccctccttatgggagggactttgctaaccaccaacctactgggaggttttgcaatggcaaatta

SEQ ID NO: 11022 - DNA, 203 bp, Glycine max
  Clone ID: 701151920H1
tattagtaaaagaatctctgtgttgtcatcacacttcgctagatccagccccatcatggcttcagagaagcaagcggctcttgccgtcactccctctgatgctgatgctcctaccatatttgacaagatcatcaataaggagattccttctactgtggtttatgaggatgacaaggtgcttgccttcagggacataactcctc

SEQ ID NO: 11023 - DNA, 234 bp, Glycine max
  unsure (1)..(234): unsure at all n locations; Clone ID: 701151921H1
gatcagaactgaannnggaacccttcttctgcgacagttccagtgtcccactgtgtgcagagtgcagtgatagaaatctagctacctagttagggttaggggttctgcgtttctgcgaagatgactaagttcaggaaattgggtcgacccaccggtcaccgaatgtccatgctccgaaccatggtctcgcagttggtgaagcacgagcgcatcgaaactactgttgccaaggcg

SEQ ID NO: 11024 - DNA, 240 bp, Glycine max
  unsure (1)..(240): unsure at all n locations; Clone ID: 701151922H1
ggancntactcagaagatgangcaaaggccgtcatggtaacagatactaaatgttgttgcattttgtcatctacagggtgtggtacaccgagatcttaagccggagaattttttgtatgctaaaaaggatgaaagttctgagttgaaagctatagactttgggttatcagattttgtcagaccagatgaaaggcttaatgatattgttggaagtgcatattatgtggcccctgaagctct

SEQ ID NO: 11025 - DNA, 254 bp, Glycine max
  unsure (1)..(254): unsure at all n locations; Clone ID: 701151923H1
gggagananacaaatagaanaagctgcatttgcaganncgcattcgcgtttgtctgagagaganaattggaaggttgcgacgagtgatgatatgcatattgtggcggtagtgaaatcgagganaaagaggtagcaatcgtgggttgcaatgagtagcgaaaagtctcctncatcagcttctgcttcagcttcttcttcgagtagctacgagttgagcaaaggcancaatggcctcgacaaggttattcttcgcg

SEQ ID NO: 11026 - DNA, 262 bp, Glycine max
  unsure (1)..(262): unsure at all n locations; Clone ID: 701151925H1
ggatcagaaatcgtacagatacacacttggctgaggaaggtcggaaaagaaaatggagttgttcttctacacggtgttcggtctggntggccgcggttgtggcagttatggagctgagcaagaacaacaaggatcgaatcaacacctcttccgcattcaattccttcnagaacaactacctcctcgtctattccctcatgatggctggagattggctacaaggtccatatgtctactacctttacagtacatatggatacgg

SEQ ID NO: 11027 - DNA, 263 bp, Glycine max
  unsure (1)..(263): unsure at all n locations; Clone ID: 701151926H1
ggcgcattgaacgaaaattagggtttgtagtgtagcaggaagaagcagcaatggcgccgaagataacacgtaaggttagcagaaaccctgaattgataaggggaatcggaaagtactcgaggtcgcagatgtaccacaagannggcatttgggctatcaaggccaaaaacggtggcgttttacctcgccacgaccctaaacccaagcctgaagctcctgctgaaaaaccacccaaattttaccctgctgatgatatcaagaac

SEQ ID NO: 11028 - DNA, 255 bp, Glycine max
  unsure (1)..(255): unsure at all n locations; Clone ID: 701151928H1
gaaaaaaaaaagaaacaaattgagcaatgaatttgtaaatagggcaaaagtaatggataaggaattaatttctctggatatattagaaaaccgaattcgattgtctaatgatgaaactaaaacaaaatatttaactaaaatatatgatcctttcctgaacggacgctttcgtggacaaatcgaaaatgttttttcaacctcaatccaatatgaaaaaaatgaaaaaaaaaatnccatttngataaataaaattcc

SEQ ID NO: 11029 - DNA, 255 bp, Glycine max
  Clone ID: 701151929H1
gaggcaacgatgatgatgatgcagtaatgagccagccacgacgatgacatagtgacgacgaacaggtagcgacaccgaggaggcagcaacgaggccgtagaacattttagggatttcgtggtatgaggcttttaggttttagggttaccataaaaaaattaccacactgattaaaaatcgtgaatcgtttgacgtgcctatttttatttaatttactgaattagaggaaaaaaaatttcatcttttaatttggtt

SEQ ID NO: 11030 - DNA, 254 bp, Glycine max
  unsure (1)..(254): unsure at all n locations; Clone ID: 701151930H1
cattcacatgaaactgatgatcantatgatgaaaatcttgcaagaaaccctgcgtggaaggagttccanaaggaagctgatcttccatgcttggtttcaagtagttttcatgcaaatccattggctgtgactgtgaggcacagttttctgtgaggtntgtntcaatgtccatgagaggagtaacaganactgagggcaacatctgcgtttcaagccanctccgtttgtgttccttaataggagagagagattgc

SEQ ID NO: 11031 - DNA, 257 bp, Glycine max
  unsure (1)..(257): unsure at all n locations; Clone ID: 701151931H1
ctatggggcttagtgaccacgatatcgttgctctatctgggggtcacactattanagctgcgcacaaggagcgttctggattcgagggtccctggacctctaatcctcttattttcgacaactcatacttcaaggagttgttgagtggtgagaaagaaggcctccttcagctaccttctgacaaggcacttttgtctgaccctgtgttccgccctcttgttgagaaatatgcatcggacgaagatgccttcttcgct

SEQ ID NO: 11032 - DNA, 261 bp, Glycine max
  unsure (1)..(261): unsure at all n locations; Clone ID: 701151933H1
ggaagcataggcgagtagacaaggggaaggtgtggttatcaaaatgcagcttctcctttggaagagtagggatagggacaggtctaatggcggtgctgaagaagtttgtttgttcaacaattaccttaacaccgaattgatcttcggtctgggntgcaattgaaatgctgaagctctacgaggcttataagtgaatccttggtatctttctcataatctttgtccttgtaaaaggtcattcatgacatacaggaaattccc

SEQ ID NO: 11033 - DNA, 139 bp, Glycine max
  unsure (1)..(139): unsure at all n locations; Clone ID: 701151934H1
ggcgaacanaagttattagggtacntgagtgcggcggtccaaacactcttctctgcagcttttgcctacaactcccttcaccatggnngaacaaaccgagaaagctttctgaagcaaccaaaagtgtttctcagcacaa

SEQ ID NO: 11034 - DNA, 253 bp, Glycine max
  unsure (1)..(253): unsure at all n locations; Clone ID: 701151935H1
acccctaaaccccatgagactttggccaaaggaattttttttgtaacctctcaattgttttttccactcctccaggtatcctaaagaaagacaagaaantaaagggagagaatatattatcaagtttatcaagtaaagccttcccacaaatgagagggttatatgtttctaagagttcaaccttatagcaaatttgtccataatgggcttccacattttctcctttcttggatttgcactaatagagatccca

SEQ ID NO: 11035 - DNA, 252 bp, Glycine max
  unsure (1)..(252): unsure at all n locations; Clone ID: 701151936H1
catcagangagttgtaanttaagagcatggctgccacaagctcttgtatncatcatcttctcttaccttctcagcggaggctgcaagacaaagtcttggaccaagatcactccaatctccatttggctnctccagaaaagcctcctttcttgttaaggcagctgctaccccccctgtcaagcaaggatcagacagacctttgtggtttgcatcaaagcaaagtctttcttacttggatggcagccttccggg

SEQ ID NO: 11036 - DNA, 267 bp, Glycine max
  unsure (1)..(267): unsure at all n locations; Clone ID: 701151937H1
gacattgacttaaatcactaagctctgtgatgacaacgcaaagaggcattcttttatggggaggtganaagagatcctgaacataatgtgaaggataggtaaaagtgattttgtattattttgttagggatatactatatggtaagaaaataataagcgaccagttataagttattagctagccaaagatataaatcatgtcaagtacactcttaattacaactacaagaattaaatcccacatagaaaattgcaattaacaaaaaa

SEQ ID NO: 11037 - DNA, 254 bp, Glycine max
  Clone ID: 701151938H1
ggcattggggcatgcttttaatttcctagatctcccaaacaaattgtagcataagtcccatggccaaagagactagtgttgtttatctatatcccagcaaatcacaagtttggggtgagaattttgatcataaaaaacttgtaataacaacactagctgctaatggaaagaaggaggagagtaatggagcacctaatgacacatatcctgcgtttcccgggtggtatgctgatgtttcctggccaggagaagca

SEQ ID NO: 11038 - DNA, 232 bp, Glycine max
  unsure (1)..(232): unsure at all n locations; Clone ID: 701151939H1
gatcactgattagacaactctcttccaaccaccanggccaatttcaaaactttcttcatttcccaaaccctaaccctaaccctccttttctccaccctagtgactgccacttaccaccacaacatctctccaagtcttgtacgttctcgtgagaagctgacccaccttcacttctacttgcatgaaatttttactagcgaaaaaccctcgaacatcgtaatcgaccccccca

SEQ ID NO: 11039 - DNA, 252 bp, Glycine max
  unsure (1)..(252): unsure at all n locations; Clone ID: 701151940H1
gtgangaggtgtgccagcaagcaagtgcaggacagctggcaatcctctacatcttcactcctcctcggggcactcgggtcgggtggnatccgaccctgcatcgtggcgttcggggcggatcagttcgacgagtctgatccccaagcagacaacaaggacatggacctacttcaactggtactactttgtcatgggtgtagcaattcttgtggctgtgactgttttggtgtatattcaggacaatattggttg

SEQ ID NO: 11040 - DNA, 254 bp, Glycine max
  Clone ID: 701151941H1
ggtaacagaaacaggggattcgcagttgtggagtagatctgagttgtgagcaatagattctccaaatttggcggcaatgggtgggctcaccggctgaaagatctgtcgaccatcggcggaatcgccaccgtgtcgcttctccattccttcattcccactcactggcttcctttctccattgtcggtcgcgctcagaaatggactctctccaccactctcatcgtcactgcacttggagcaattttgcacgtaat

SEQ ID NO: 11041 - DNA, 231 bp, Glycine max
  Clone ID: 701151942H1
ggggtcttcgccgaaccctgtatcatgctgatggactgtctctgtgatttcctgagcagctcaggttttgtttctaatgtgatttcagaagatatcaaggacagggcaaaagcagttgctgaagaatggaaacccaggctggatgctcttgacatggatgctagcaatgggaattccttggaggctcatgcatttttacaacttcttgctagttttggaattgcctctggt

SEQ ID NO: 11042 - DNA, 253 bp, Glycine max
  unsure (1)..(253): unsure at all n locations; Clone ID: 701151943H1
ggaagatcgaattaggaattngcttgaacattttgtattttcttaatgttcaagctaggccacatagaagagcctaaaaatgacaaaaattaaaaatttgttggaccaaagaacagtggttgttatgaaattaatggaccatagtatctggcaaggtggtctcccctccagagtccagatatcatattcacacacccctgatgctaaaggttaattatttactatttgtggcncctagtttacaganttgtcc

SEQ ID NO: 11043 - DNA, 257 bp, Glycine max
  Clone ID: 701151944H1
ggaaattgtctgaaatgaaaacattctgatcatcattagataacttttcacattatgcagtcaacagcagcaccaccactctatcaacttgtgagcttcaagccaaagcttcaaactttcccttcaaaatctcaactttgccccttagggacccctttctgcagactagaaatggcttcaatttctgggtttgggctgaaacccctgagggctgtgagtgtttcttcttcatcttctgcatcaagtgatgatggatt

SEQ ID NO: 11044 - DNA, 252 bp, Glycine max
  Clone ID: 701151945H1
ggagaatgtgaggtagctgaactctgaactgaaatcctcagcagttagttcagttatggttgcagagattcctttcaaacacaaaagaacctcagattttggttcctaattgacaaccatggcgggtgcgtgcagagcacccatttgccatcttcctccgcagaagcccaaaaccagaatccagaattctcacagcagaagagctcaacttccaaataggcgtttgttcctcttctctctgcctctctctag

SEQ ID NO: 11045 - DNA, 232 bp, Glycine max
  unsure (1)..(232): unsure at all n locations; Clone ID: 701151946H1
gggatatcacgganacacgtcaaagacatttttttgtggggaagtcagtgatgaactgaaaaatcttgtcaaggtaactgaagaatgcctggagaagggaatagctgcgtgcaaggacggtgctctctttaggaaaattggaaagagaatcagtgagcatgctgaaaagtatgggctatggtgtagtggagcgttttgttggacatggtgtgggaacagtgtttcattctga

SEQ ID NO: 11046 - DNA, 268 bp, Glycine max
  unsure (1)..(268): unsure at all n locations; Clone ID: 701151947H1
ggacaaagaagattgaggaatgaagagaaaggtgtccctttcctgtcccctacagcatcggcgttgtaagagatcccattccaaatttccaatctcaattctcatttctcagtttcacaaactcaaataaaaaaaccaaaagggcagttactaattttcacaactggattcaagctggtttctcttcctcttcttcatgttcatttattgaatcccaccccaaatttcnaattctttctcttncactctcccacgtgcaccttcctct

SEQ ID NO: 11047 - DNA, 159 bp, Glycine max
  unsure (1)..(159): unsure at all n locations; Clone ID: 701151949H1
agggtggttttgatttggagtgcagctatgcgattgtacagagagccaagcagcagttattgtataagcttcgtagatttgagaaactggcggagttggatccagtggaacttgagaaaagaatgcaggatcaagaagaggacgagnttgacacatttt

SEQ ID NO: 11048 - DNA, 231 bp, Glycine max
  unsure (1)..(231): unsure at all n locations; Clone ID: 701151950H1
ggaagccaaataaaatccctttgtttgctcacataagatttgggtttcttcaaattatcttcttttttctcaaaaaaaaaagangaacaaatctttgtttaattttttgaaggaggttgaagaaagcaaaaggttgttgttttgttttaagtttctttgaaatggttttcatgtctgagatattattgttcccngaaaaaaaaattgnggaanggagagtgggagaaggag

SEQ ID NO: 11049 - DNA, 257 bp, Glycine max
  unsure (1)..(257): unsure at all n locations; Clone ID: 701151951H1
ggtacaccaagattgaaggcaacaaaaaggtagcaaatgtgggtgatgaagtgaagagtgttgcgatgaacgcgaaagtgaaagtgaaggtgggtgggtttctatggttggaaggtttagtagaggcgtgttgccttcatcgcgttgttattctgtgtatgaggtccaacaagctattgatgcgcactggtcagtgttncctcttgaatggtttcatcttcttaggaagtatattcgncctaaaactcggttgtnac

SEQ ID NO: 11050 - DNA, 259 bp, Glycine max
  unsure (1)..(259): unsure at all n locations; Clone ID: 701151952H1
gtccccacaacgtaataacgtgcctgcccctatacctcaccccacttactattattattgtacaacacaaccaggtccctgaatgctttttagagagagaaagagtaataataataaagtggaagaaaaagaattaggagagtgannnnnnnnnnnnnnnnnnnnnnnnnnnnnnnnnnnnnnttgagaagatggtgtttgaggaaactgagctgaggctgggactgggactatgtctccctggaaatggaaccacggc

SEQ ID NO: 11051 - DNA, 254 bp, Glycine max
  Clone ID: 701151953H1
aggtccctatcctgcaagtcccaggttttaatctcattgatatcatatagggtgtgattataggagaagaataggctcttacccccattatgcaacctctaaatccttggaagaacttgtcaggttaaaccatagtttactagaactacaacagaaagattatccacacataatgaagcacacttcaagaagcatccactcataggattgttaatgaactatacacaactaaaaaactaaaagggctaagtcaa

SEQ ID NO: 11052 - DNA, 221 bp, Glycine max
  unsure (1)..(221): unsure at all n locations; Clone ID: 701151955H1
ggcctacaaggtgtgttcataanaacnaaccacatagcatttctttttcactcttctctcttctattcagccactacctcacaccaccatgagtgccgagaaggtgaaactgactggcagattacgcctatttttcactaatgcaaaaccatacatcttaatgattggcttgcaatttggcatggctggaaattacatcttcggcaaggatgctcttaacc

SEQ ID NO: 11053 - DNA, 59 bp, Glycine max
  unsure (1)..(59): unsure at all n locations; Clone ID: 701151956H1
ggcncattgancgaaaattagggtttgtagtntatcaggntaccnngcacgccaatggc

SEQ ID NO: 11054 - DNA, 248 bp, Glycine max
  unsure (1)..(248): unsure at all n locations; Clone ID: 701151957H1
ggatgatcggagggattaaaaaaaaaaacctattctcctgatatggtctactcttgtgggtggtgggtaggaacaattcccagtgttctcagattggaatcccattgactctaccatggccacgccctctgatccttccaaccagtaagttcctccnttcccntttntttaccctattaattgttattctnaanttngtccccttctcnacagagaagctgttgtaaganggagaaacaacggacccc

SEQ ID NO: 11055 - DNA, 156 bp, Glycine max
  unsure (1)..(156): unsure at all n locations; Clone ID: 701151958H1
acccagcnttccatctaanatctncaagacctgtgtcattagcagcaaatttaacagtatnctnctggngattctcaagttgattgactagacttctctcagcatgnaggtagncnttactcannttggcaagancacatcttccanggannnttt

SEQ ID NO: 11056 - DNA, 251 bp, Glycine max
  unsure (1)..(251): unsure at all n locations; Clone ID: 701151959H1
agagataattagttatgacagcacagttcaatatatatataggatagtgtctacttgttggtggtgatatataacaataatgagaatttatgttnnnnnnnnnnnnnnnnnnnnnntgtgttttgatggatattattttgtattacagcaggaagaggaagagatccttcttggaggaatatgagaaaggaactggaaagtctttcaaaatgggggaacagcagtggcagtgcgatttgagagcaaaaaag

SEQ ID NO: 11057 - DNA, 249 bp, Glycine max
  Clone ID: 701151960H1
gatgctttgaagtctcccacaggagatgaagcatacaatgaaaatggtttagtgcctcgaacaatacgtttgctcaaggataagtacccagaccttgttatctatacagatgttgcattagatccttattcatcagatgggcatgatggcatagttagagaagatggagttattatgaatgatgagacagttcatcagctatgtaaacaagctgtagcccaggcccaagctggagcagatgttgtcagt

SEQ ID NO: 11058 - DNA, 250 bp, Glycine max
  Clone ID: 701151962H1
gagagaaagagagagaaagatgtcgaagcgtggtcgtggtggttcggcggggaacaagttccgcatgtcgctgggtcttccagtggcggcgacggtgaactgcgccgacaacacgggggcgaagaacctctacatcatttcggtgaaagggatcaaaggccgtttgaaccgtcttccctcggcctgcgttggcgacatggtgatggccaccgtgaagaagggaaaacccgatctgaggaagaaggtcttg

SEQ ID NO: 11059 - DNA, 210 bp, Glycine max
  unsure (1)..(210): unsure at all n locations; Clone ID: 701151963H1
aacnaaatncaaggcgcagtanactgnagnnatggttgtgtgcctcntcttgaccgtgggtttgaacactctcagaaaagnaaacatgtctaaaggaatgagcaatttcgntttcgttgcgtattcaaaccttctcgcgttcgtttttctgctactagcaaccacaatccgccacaggttcgttgcctcagatccaaagttccatacnac

SEQ ID NO: 11060 - DNA, 196 bp, Glycine max
  unsure (1)..(196): unsure at all n locations; Clone ID: 701151964H1
ggcctacgcagagagaaattgagtttctgagataaccacttttctctttgattcatcaatggcaaccgcgangaccgtgaaggatgtttcgcctcacgatttcgtgaaggcttacgcctcccatctcaagcgttccggcaagatggagcttcctgagtggactgatattgtaaaaacagcaaaatttaaggaattg

SEQ ID NO: 11061 - DNA, 128 bp, Glycine max
  Clone ID: 701151965H1
ggcacttttttttatcaatcgtagctctcgtccacattttcgattttcttcacttttttatttttcttcattactgaaaacctttcactttgtttttttaatccggattgccaatttatgtatatctt

SEQ ID NO: 11062 - DNA, 69 bp, Glycine max
  unsure (1)..(69): unsure at all n locations; Clone ID: 701151968H1
gttctctttggggtgcttcataatacatttcaaaaatgtgntcnctnaacaacngtagtcaacaattat

SEQ ID NO: 11063 - DNA, 247 bp, Glycine max
  Clone ID: 701151969H1
gatatataaacttgtttgtcagcaatattctttccttggtgccttctcctcccaaacctccccgcagggtgagaaaatcacctaaaactccttcattcatatttcatgtcctcgatcatggaaacacaacctgaatgcgctgtcatcaacatcccaaacataaaaacagagcaacatgtgtccgtgtccccaaagaagaagaacggtggcggcatgcgctttctcagggtggcactcttcaagatgc

SEQ ID NO: 11064 - DNA, 249 bp, Glycine max
  Clone ID: 701151970H1
gacctgaaaattgtaccaagatggcttcacttccatgtctcctcttttccatccatttcattgttatcatgtcaagttccttacccacaaatagtgatgaagtgtttgcaaaacagtctccaatgtctccatccacaaaacccgtggaaaaaatcacccaactacacttctatttccataacaacgtaacggagaaaaacccaactgctatgagaattgttgggcctcccaagggcttcattactcagc

SEQ ID NO: 11065 - DNA, 249 bp, Glycine max
  unsure (1)..(249): unsure at all n locations; Clone ID: 701151971H1
ggttttgaccaaggagaccaggcatggccgttctgcacacagagtgtcctccacctctttgcgcaaganatctagccgaactcttgtctcaaaggttccatgtgccactctcagaaactttctttcaaatttgcaagaggttattcttggcaccaagctttccattctcatccctgctattccagctgccatcgttgctgagtgctttgggctttggaagaccttngattnttatattaagcttacttg

SEQ ID NO: 11066 - DNA, 154 bp, Glycine max
  unsure (1)..(154): unsure at all n locations; Clone ID: 701151972H1
gggtgcacgagtgattttacaaaaganggttgcaccactcaaaacattcatcataccacctattttagggatttgatgcctaataatacctattttgggcaccaacaatgcacaaggatttaagctcttgcgaaccaaaccctcatctaacant

SEQ ID NO: 11067 - DNA, 248 bp, Glycine max
  unsure (1)..(248): unsure at all n locations; Clone ID: 701151973H1
ggtgaacaaattgaggtgtggtgtgcatgttcaacattggggcaccgatgatgggttcagctactgtgcaaatagcgacgtcaaaatttgttctttgcccgaatncttcagcggcgaaggttgcgagtcccaagaagaatgccgtcatcaattnctcttccaacttcaaaggaagtgttaccaaaatccatgccattccccctaatggctctgtctctatctgctcttcgcgtgtgtctgtgtcaagt

SEQ ID NO: 11068 - DNA, 251 bp, Glycine max
  unsure (1)..(251): unsure at all n locations; Clone ID: 701151975H1
ggacggagcagaggacaagatgggtagtgtgagttatagcaatctgaagaacgccatgatagcattcttggtccctctaccctccatcctattctacctctcattccaatcggccattagtactccttcttcttggtcttctctgtggacatggtgctntcaccaccctctgctattggccaatgtccttttcttcttcaatgtcaatttcctcttctggctcatcggcctaatccaatccagccactgga

SEQ ID NO: 11069 - DNA, 227 bp, Glycine max
  Clone ID: 701151976H1
acctccagcacccccagaacgtgtcgttgttagttcaatatcttttgggtcaattacgacttcaacttcatcagcccttgtaaaaggggctaggacatccctcttccaaaattttaactagttaaagttgtctcaaaggctctcaagtgaaaaatatcttgttaaatacatcctaatctaaaacacttaatgtcaagaatgttttcaatgcctcttactcgttacaa

SEQ ID NO: 11070 - DNA, 268 bp, Glycine max
  unsure (1)..(268): unsure at all n locations; Clone ID: 701151977H1
atacaaatgcttccagtccatatattagtnacaattcaacttcatattttgaanttcaaccaaattcagaaaagacatttaatgaacttcccagataaaccactgaaaaataagaataanaggataatatcattataagatatcaatacaaatgncttctagtccagatatcagttgcaattcaatttcaanataagaaattcagaaaagacattcaatgaacttcccagataaccactgaacaataagnataanaggattaaatcag

SEQ ID NO: 11071 - DNA, 243 bp, Glycine max
  Clone ID: 701151978H1
gagttcaagacaagtggttcaatcaagccctcgatatcactatcaggcattttggaagttaagccagtggacattactcacacagaccaaataaaggaagaccaacatggcacattggtctcagcaaacagcattggtgtttaccatgaccatttctacatattccatcttgattttgacattgatggtgtggaaaattcctttgtgaagaccagtctcaagactctacaagtcacagacaac

SEQ ID NO: 11072 - DNA, 229 bp, Glycine max
  Clone ID: 701151979H1
acctccagcacccccacgaacgtgtcgttgttagtacaatatcttttgggtcaattacgacttcaacttcatcagcccttgtaaaaggggctaggacatccctcttccaaaattttaactagttaaagttgtctcaaaggctctcaagtgaaaaatatcttgttaaatacatcctaatctaaaacacttaatgtcaagaatgttttcaatgcctcttactcgttacaat

SEQ ID NO: 11073 - DNA, 259 bp, Glycine max
  unsure (1)..(259): unsure at all n locations; Clone ID: 701151982H1
attgacacttatgttttctggaatgttcatgagccatctcctggcaattacaattttgaagggaggtacgatctggtacggttcatcaagacagtgcaaagggtggggctctatgtccatcttcgcattggaccttatgtgtatgctgagtggaactttggaggatttccagtttggttgaactatgttcctggcatcagcttcagaacagataatgggcccttttaaggcggaaatgcnaaggtttccnttcanaaaa

SEQ ID NO: 11074 - DNA, 229 bp, Glycine max
  Clone ID: 701151983H1
gacttcaaagtggagaaaaacacacacggttggttctccatctcttttctttttcctcaaaaagaataaaagggaaacaattgagtgaggttgctactcttcaatagtaaacttacccatggaagagggcagggttgtgaatgagtaacacacaagatgggaactgtgggatcttaaagggaaacccattctcaaatccaaaagtggtggttggaatgcttgctccttt

SEQ ID NO: 11075 - DNA, 212 bp, Glycine max
  unsure (1)..(212): unsure at all n locations; Clone ID: 701151984H1
ttgggttgtgttgtgagtgcataaatanataaataaaaacaattgtttcaacattcaaattggcatcattaagatctgtgttaaccactaanatctctgaagcagagggcattgtctactgtcacaggcatgggtgaagaaaagaaagacgaaggaaacaaagaagaagccaaagaggaaaagaaggaagaagagaagaaagaggagccacc

SEQ ID NO: 11076 - DNA, 253 bp, Glycine max
  unsure (1)..(253): unsure at all n locations; Clone ID: 701151985H1
ggtggcagttgtgtgacacagaaattaagctagagcttcatagtttcttcttcttttctcaccttccttctctcccttcagacaaagggacaaaaaatcnnnnnnnnnnnnnnnnnnnnnnnnnttccaaaaccatgtcccacagtcatctaagtttcgcctttgggattctaggtaacattgcctccttcgtgtgctttctggcaccactaccaacattttatagagtttgtaagaagaaatcaaccgaagg

SEQ ID NO: 11077 - DNA, 246 bp, Glycine max
  unsure (1)..(246): unsure at all n locations; Clone ID: 701151987H1
agaaaganaaaaaaaggaagcgagttaatgacatgnagaagcagcagcaagagcatgagaagatactgggccaagaaggaagaaataaaaatacaacgccgagctacgggtgaagtcctagaaaataagaaaattatggatgaaagagaaaattataagantttgccagtgcaagacaaaagagaatgccatatggagaaaatttctgaaaccgaaccgttggccatgaggnntccggcaaatgat

SEQ ID NO: 11078 - DNA, 247 bp, Glycine max
  Clone ID: 701151988H1
gacactaaacaagttaaaagaagagcatcactgaactaacaaagcaaccctatgtcgaaggtggtttgtgtcaccggagccagcggcgccatcggatcatgggtggtcctactcctcctccagcgtggttacaccgtccatgccaccgtccaagatatcaaggatgaaaatgagacgaaacatttggaggaaatggaaggagcaaagagtcatctccatttttttgaaatggatcttcttgaccatc

SEQ ID NO: 11079 - DNA, 242 bp, Glycine max; identical to SEQ ID NO: 9280
  Clone ID: 701151989H1

SEQ ID NO: 11080 - DNA, 243 bp, Glycine max
  Clone ID: 701151990H1
ggcacaagtgagtttgttgatcgagataactagaaacagtgtgatgaaaatgaaggtccttgttttcttcgttgctacaattttggtagcatggcaatgccatgcgtacgatatgttccctctccgaatgaacactggctatggtgcccgtactccggaggtgaaatgcgcaagttggaggcttgctgtggaagcacacaacatctttggctttgagaccattcctgaagagtgcgttgaagc

SEQ ID NO: 11081 - DNA, 218 bp, Glycine max
  unsure (1)..(218): unsure at all n locations; Clone ID: 701151991H1
gacgtgagaggagggtggacggaagcttctgngtctgagggagacggagacgattttacaaggaagatctgaaattctgaattcttaactggaatcagggttttggttttttttcattatcttcctcagtaagcaatgtcttctcccgcggagttttatcactctcttccgccaataacgaaggcatatggcaccgtttgcctgttggttaccgcaac

SEQ ID NO: 11082 - DNA, 245 bp, Glycine max
  Clone ID: 701151993H1
gacggaattgtgaattatgtgaagtcacaaagtcaaaagcacagtttgacagtatcatgtcatgggcaactggtggtggaggttcaaaggaataacctttttgttgccacctttatttttatttaagcaccttggtttctccgtctttcttggagacacacacacgctctctcatgactctaaccaacttacccaccaactaataatctttttaattccaaaaaaccaaacaatgcctctttttc

SEQ ID NO: 11083 - DNA, 255 bp, Glycine max
  Clone ID: 701151994H1
ttggtctattaatgagtttggtgatctgactagaggtgcagcaagcactggtaaaatgttcaatccggtaaatgaggaaaacagtaaggagccactgggcgacctgggaacactagaagctaacgaaaagggtgaggccttctatagtggggtcaaagaaaagctgagggtggctgatcttattggacgatctgtggtggtatatgcaactgaagataaatcagaacatggtataactgctgcagtaattgccag

SEQ ID NO: 11084 - DNA, 250 bp, Glycine max
  unsure (1)..(250): unsure at all n locations; Clone ID: 701151995H1
ggaagcaaaanatgaaaacccaaagtgcttctctcctcantctttttctctctcttgctatccttttggctagtggcactgctgcaagtgcaactccaagaagcgcagtgccaagccaccatgtttcaacattcaacagaagcctttttccttccacttttctctttggaattggttcttctgcttaccaggcagaaggagcagcaagtgtagatgggagaggaccaagcatatgggacacctacactag

SEQ ID NO: 11085 - DNA, 250 bp, Glycine max
  Clone ID: 701151996H1
gagatgcttagtcgcttgcaccatagaaatttagttaaattgataggtttatgcacagagaaacagactcgctgcttagtctacgagctcgtccctaatggcagcgtggaatcccacttacatggtgctgacaaggaaaccgaaccacttgattgggatgcatggatgaagattgcacttggtgcagctaggggattggcttatctgcatgaagattgtaatccatgtgtcatacatagggacttcaaat

SEQ ID NO: 11086 - DNA, 237 bp, Glycine max
  Clone ID: 701152002H1
gtattttggactcatgggtgatggtcaacctataggacgatacggtgatatgtgggctggatggtgtgttaaggctatctgtgaccatttgggcttgggagtgaagactggccttccatacatctggcacagcaaagcaagcaatccttttgtgaatctcaaaaaggagtacaagggcattttctggcaagaagagatcgttccattcttccaaagtgccaccattccaaaagaatg

SEQ ID NO: 11087 - DNA, 258 bp, Glycine max
  unsure (1)..(258): unsure at all n locations; Clone ID: 701152003H1
gattgaaactaaactccaacaagttcctaccatagtctgaggaaagtgagtgagagaaagagatcgcagacacagagcagaatggcttctacccaatgtttcttgcaccaccatgctcttaccacccctgccagtgccagatccccatcactacgcatcttggttagcaccaagcctaaccagcttgtttgcaaggcanngaaacaacaaacaccacaagaggatattgatgtcagcccaatctctcgccgtttagct

SEQ ID NO: 11088 - DNA, 257 bp, Glycine max
  unsure (1)..(257): unsure at all n locations; Clone ID: 701152004H1
gacaacatttaggggtgcattgcaaatggcttccattgttgcaagcttgccgccaccattgctgctccctgctagaaaatatcatccgggcaacttcccaagttcccctttttctcttctttcagggagacggaatcatgtntcttttgttgtgaaggcttctggagaaagttctgaatcttcaactacccttactgtttttaagtctgttcagaatgtttgggatcaacctgaggaccgtctgggacttattggtt

SEQ ID NO: 11089 - DNA, 255 bp, Glycine max
  Clone ID: 701152005H1
ggaacaagtgcgggaagacttttcatggaatgcctaagtttgagtagctcagtttcaaaatttgatgatgctgatgatgtcaatagggaggaccatcatagtagctgttgcagtgttgggatagggaataatagcatgaagatggagcacgcgtgccattctggtattctaagtcatagccgaagtggcgttcctttcaccggagatcttagacaagccaaatctggtgtacaaagttgctcaacattaggtccc

SEQ ID NO: 11090 - DNA, 137 bp, Glycine max
  unsure (1)..(137): unsure at all n locations; Clone ID: 701152006H1
ggctcgangaatgcaacgtttannatcccattgaatganacggttnctgatccnattnnntgtgctccaacacctgaaggagaaactgcttagtaaggtttagcttttcagtagctcagtngcacttgnttaanatc

SEQ ID NO: 11091 - DNA, 258 bp, Glycine max
  Clone ID: 701152007H1
gggtgaccaaatgcaaagacggcattgaaattgaacacaatccatgactaacacaagcgcagacgacaacataacactgctccaaacatatcaatttcaataatgttttcttctgcaatttctccgaagcccttccttcggtccctcgtcattgatcgttacgctcagagcacaactactgcaaccaggtgggagtgcttggggtttaacaagtcagaaaatttcagtaccaagagagagttgtgtgctgaggggttc

SEQ ID NO: 11092 - DNA, 245 bp, Glycine max
  Clone ID: 701152010H1
aagacgacagaaggggacacaataaacaaagagaaactccatacaaaagtcttctcttctgtcaccagctactcaaacaacaaccgttgatcatggaccctcatgttcttttcatgcgattgtgtctgtttcaactttgaaacaacaaagttacttaaccacgttggttcctagtactgtgttgattgcttggaatgctgttgttacaataacaataatattaataatggttgagagaaccgtgt

SEQ ID NO: 11093 - DNA, 259 bp, Glycine max
  unsure (1)..(259): unsure at all n locations; Clone ID: 701152013H1
cacacctaacctaataagataaagagataaaaatagaaaganaaaaatgaatataaaaggcggtataaagtgatagaaagatagagatgatcaaatgatgaatgctaatgtgatgtttggagtgattgatgattgtttctgtatcattattcaaaacaaaaacatanaacttaggatgtaaaaatcatgaacatgaacaactctaggtgttatgttacagcaaattatcaatggtgttctccaaagccggaagtcacag

SEQ ID NO: 11094 - DNA, 239 bp, Glycine max
  unsure (1)..(239): unsure at all n locations; Clone ID: 701152015H1
gggcattggagagattggaacacccccccaaancaagcnccaattatggctctgaatctttgtatctcacctaactgtaaatgggtntcatctcctgcttccntagatagtgcatcttcntgagatcttcacttggtcctngttttggtaacataaacattactagtgtgagtntaagcactagtagaagtttgagtttgangaggagtgggagngttagtgtaagatctagtttggaa

SEQ ID NO: 11095 - DNA, 250 bp, Glycine max
  unsure (1)..(250): unsure at all n locations; Clone ID: 701152016H1
ggaaccggnnatgaatagggtntggtttctactattccttctgctgatctcgaaatgcgatcatgtgtngagctcttacgcgggntccgctagctccgtcatcaacccttccaaggtcaaacagatttcctggnagccaagagcttcgnnnatgaaggtttcctcacggatttggaatgcgaccattgatctctctagcgaaatcggagttaagagatctgccgtagcggataatctctctggagagggc

SEQ ID NO: 11096 - DNA, 255 bp, Glycine max
  Clone ID: 701152018H1
ggagaacaaaacaagtgtttcgaatagattatcctaagtcttgggaatagtgctgcaatggcttcaagtcaggaggaggtgacccttttgggagctactggaagcccatttgtgtgcagggttcatattgccctcaagttgaagggagttcaatacaaatatgtcgaagaaaatttgaggaacaagagtgaactgcttctcaaatccaacccagttcacaagaaggttccagtgtttattcacaatgagaagccc

SEQ ID NO: 11097 - DNA, 256 bp, Glycine max
  Clone ID: 701152020H1
gacttcaaaacactcataacacaaagcacaaagcaaagctcatccttgagttaaaaaatggcagcagcttcttccatggctctctcatccccatccttggctggcaaggccgtgaagctgggcccatcagccccagaagtgggaagggtgagcatgaggaagaccgtcaccaagcaggtctcctcaggaagcccatggtacggcccagaccgagtcaagtacttgggcccattctctggcgagcccccgtcctacc

SEQ ID NO: 11098 - DNA, 252 bp, Glycine max
  Clone ID: 701152022H1
ggaggccatggcttgatctttatggagttaacgtgagacctgttgcgccagttgggagtgctagtaggaggccttatgtggatcctgcacttatacatcgttccttacctgatgagctgctttttgaggtttttgctcgaatgactccatatgacttggggagggcatcttgtgtatgtcgaaaatggaagtacacaattcgtaaccctgtattttggcgcaatgcatgcttgaaggcttggcagctatctg

SEQ ID NO: 11099 - DNA, 259 bp, Glycine max
  unsure (1)..(259): unsure at all n locations; Clone ID: 701152024H1
gattgtcctatatatgatcattcttctcatctattagatgccatactggagtagctggaggagaagtgtccaaaggcagaactggtatggtctggccctcatgtatctctaagataggaatggaagagtctactacatgctgaggtgaagatggatccactcttggaaatggtgcaacagctgatgttggcactagtccatgatgagtagnctcattggatctcgtctctaatctcttttttacaatcaacagctccag

SEQ ID NO: 11100 - DNA, 252 bp, Glycine max
  unsure (1)..(252): unsure at all n locations; Clone ID: 701152025H1
cacacacttgcccatcatcaaagtttcttcctttctctgctctttgccttctctgacacatttggtgccttgtagagcgtgttttggcaggaaggtggtatggcgaaggacgttgaggttgctgagcgtggctccttctctgggaaggactaccaggaccctccaccagcaccactcattgatgctgaggagctcacaaagtggtccttttacagggtctcattgctgaattcatngccactttgccttcct

SEQ ID NO: 11101 - DNA, 253 bp, Glycine max
  unsure (1)..(253): unsure at all n locations; Clone ID: 701152026H1
gggagctgggtttgttttcggcctttgatcttcgattctctctctttttctctcgcgaaaaccgtatcagcaatgtctggagaatcagccagcgctattcacaagggtcaagtcgatctcttagnnttcattgactggtctggggttgaatgcctcaatcaaagctccacccactctctccccaatgctatcaaacagggttatagagaagacgatggtttgcatctggagagtgatgcagacgagcagcttt

SEQ ID NO: 11102 - DNA, 255 bp, Glycine max
  Clone ID: 701152027H1
gacctcagcgtagttcctaacactacactcttccgccgattatttctccaaaccgattattcttcttctgtgccctagcgccttttcctccgccgtcaaccaccgtatccctcccgcttccggcaccgatcgaacagtctccggccaagttcagttcttgcttgcgaaaattctcggaatattttgaatccaggaaatcatgcacgcgccagttctagttctcaaggactctttgaaacgggagtctggatctaa

SEQ ID NO: 11103 - DNA, 260 bp, Glycine max
  Clone ID: 701152029H1
ggacgccattttcacatcaaaacgcttcaactaaaaaaatggcgttcttgtggaacaaaactagtatcgcttcccattttcgatctcactctcagaagactgagggtttgacttcttttccgcgccgtcgattccacgtcgaacccggggctcgtgaaaaagctctcttggcagaagatgcaacgctgaaaccgttcaaatcatataagaagagtgtaaaacagctcagaaaaattgggaatgctctgacagttgttgtt

SEQ ID NO: 11104 - DNA, 258 bp, Glycine max
  Clone ID: 701152030H1
gggcgtttgtaagagcatataaataacatagtcctccttcctttgttttttccacatcacgacatcacatcgcagagaagaacagagagagatccatccatcaattccaatggccgatcagctcaccgacgaacagatctccgagttcaaggaagccttcagcctcttcgacaaggacggggatggttgtattaccaccaaggaacttgggaccgtgatgcggtcacttggccagaacccacctgaggcagagctgca

SEQ ID NO: 11105 - DNA, 263 bp, Glycine max
  Clone ID: 701152031H1
ggtagccatagaatttcacattttatcttttgcattgagcaactaactcactcgcgccatggctgctaccatcatcaccacatgcaagctctcactgcttttgagtcttctctcagtttcacttttgctgggtgtgaggtctgatacccttcagaatgtaggcgcaattccccccacatgcaagcgcacagagtgtcccagctatgatgtcattcacgtaggcaacggctacgaaatccgtcgctataattcacccgtttgga

SEQ ID NO: 11106 - DNA, 177 bp, Glycine max
  unsure (1)..(177): unsure at all n locations; Clone ID: 701152032H1
gtagtgtaagcaacaaaattccatcaagtgtgatctcttaatatgtggagttgtgtgtggactactcttacttcataatttccatgcctgcaagtgcaagtgcaagtgccagttgctgagtngaacgtgccacttgacgcaagtgtttttggtgtcaccatgtgtgtgaaagatggc

SEQ ID NO: 11107 - DNA, 227 bp, Glycine max
  unsure (1)..(227): unsure at all n locations; Clone ID: 701152033H1
ggangttaataaaattaaattaanggcgcacgntatccgctccagagagtgcgaggcgagagagaatgacaatatctgttttcttagttcctcgacgnnncagttgtgtaactacagaatctcatggccaattcccacttacccttctctttcttcttctaagttaactgtttcactgtgctctccttcccctccaacatctgttatcgaagagggtccttctcctt

SEQ ID NO: 11108 - DNA, 254 bp, Glycine max
  unsure (1)..(254): unsure at all n locations; Clone ID: 701152035H1
gaaaatcattctgtcaaaccacccatgttgcagaggggggtgctcaggaccaactgcatagactgcttggatcgcactaatgttgcacaatatgcatatgggttggctgctcttggccaccagctccatgctctgggagttattgaccacccaaaaattgatcttgatgaccctgtagcagatgatttgatggggttttgnttagcggatgggtgatacactcgcacatcagtatggtggttctactgctcaca

SEQ ID NO: 11109 - DNA, 251 bp, Glycine max
  Clone ID: 701152036H1
ggggcgaggtagccagagagtgatacaatacagagtgcgttgttactccttcgccacaactccctgccaacatgggtatctccagagattctatgcacaagaggcgtgccactggtggcaagaagaaggcatggaggaagaagagaaagtatgagcttggtcgccagcctgctaacactaagctgtcaagcaacaagacagtcaggaggatccgggttagaggtggaaatgtgaagtggagggcactgaga

SEQ ID NO: 11110 - DNA, 252 bp, Glycine max
  Clone ID: 701152037H1
ggcatcagaggagttgtaaattaagagcatggctgcacaagctcttgtatcatcatcttctcttaccttctcagcggaggctgcaagacaaagtcttggaccaagatcactccaatctccatttggcttctccagaaaagcctcctttcttgttaaggcagctgctaccccccctgtcaagcaaggatcagacagacctttgtggtttgcatcaaagcaaagtctttcttacttggatggcagccttccggg

SEQ ID NO: 11111 - DNA, 251 bp, Glycine max
  Clone ID: 701152038H1
gatgtctaatttattcagagtgaagtgagtgttgctgcttggattttggtgatgtgtctaagttagtgagagggtccagaaaatagggaagtagggtaggataaagctctgatgcttggactcgcctattccccactatacccgtgtcgacaccacacgatttgggtgttgacacgaaatatgggtcggacccgggggaagaaagagggcgctgcaagagagttgaaatatttttccacttacatatcttt

SEQ ID NO: 11112 - DNA, 231 bp, Glycine max
  unsure (1)..(231): unsure at all n locations; Clone ID: 701152039H1
ggaggaaaagatananaganaaaaaaaaacagacgccctagatttgctcttctttgcttcggaagaaagagaaaaacaaataacaatggcgttcgcttctttcctcggcagagttctcttcgcttccgtcttcatactctctgcttaccaagaatttaacgaatttggagttgatgggggacctgcagcaaaagcactcagacctaagtttgatgcctttacacatcgagt

SEQ ID NO: 11113 - DNA, 248 bp, Glycine max
  unsure (1)..(248): unsure at all n locations; Clone ID: 701152040H1
gtccgttacaacttaaaccggtcatttatagcactttttttttgggtataaggtcgttgttttgctttgatatctctttcgggtcaattcttccctgccattatgatgtccatgaagacatttagtactgttaattagcattcgtgtctcctcgttaacgatgcttatttatatctattcttctacttgcgatgcaaagcagccnnaatcattagtaattatgagaaacatcatgaatgaacatagtt

SEQ ID NO: 11114 - DNA, 255 bp, Glycine max
  unsure (1)..(255): unsure at all n locations; Clone ID: 701152041H1
ggtgttggattggtttccattcccaattcccaatcgtgttgggtggccatggattctctactggcgaactatgcctcttcagatgaagaagaagatcaacagccatccccaccaaaaacggncgacgttttcctcccttcctcaacccaaactttctctgtttcaatcccttcctcaacccaaatcttctctgtttcaatcccttcctccacccaaacaaccttccaccgaaagctcttcccccccctaaaccct

SEQ ID NO: 11115 - DNA, 243 bp, Glycine max
  unsure (1)..(243): unsure at all n locations; Clone ID: 701152042H1
ggcatcaatannaaaatatatcatcaantataagcatgggtttgtgannacacaacgaatgcagtgtcttgccgctttcacaagtttggtgatgaccaaaagaatctggtcttccaaggtgatgccacgtcttcttccaggggcatagaactcncaaagttagacggtggaggaaaaccagtgggtggcagtgtggggagagtgttatactcttctccagtgcacctttgggaaagctctaca

SEQ ID NO: 11116 - DNA, 248 bp, Glycine max
  unsure (1)..(248): unsure at all n locations; Clone ID: 701152043H1
gttggtcatcttctttgtttcccgttgtcacccccaattgctggatcatttcccacattttaaaagcttcctgggcctgtatagtatcttcatttggctcctgttctaagtctctgttgatatctcttgtttcacttctggaattattnctgctgctattttgctgtatgatatttggttgcttatggcttccttccaaatgtatctgcccttctagcctttgatgtctcctatgggaccaacttcca

SEQ ID NO: 11117 - DNA, 252 bp, Glycine max
  Clone ID: 701152044H1
ggcgtccgagaatcgcatttttctagttcctgcgcatccaaacgagtccttaatatcgaactttcctgaagatggtgttgatagagcatgaagagagcaagcagagaaacgcgaacccctccaacgccgccaacgacgattccgacggcttcgaaaccgccagcgacaccgatctggccggtgaaggcgacgacagtggggccggcatcccggaagaacagaatcgcaccgaacagagtcataccgagaagc

SEQ ID NO: 11118 - DNA, 270 bp, Glycine max
  Clone ID: 701152047H1
ggacaaagaagattgaggaatgaagagaaaggtgtccctttcctgtcccctacagcatcggcgttgtaagagatcccattccaaatttccaatctcaattctcatttctcagtttcacaaactcaaataaaaaaaccaaaagggcagttactaattttcacaactggattcaagctggtttctcttcctcttcttcatgttcatttattgaatcccaccccaaatttctaattctttctctttcactctcccacgtgcaccttcctcttc

SEQ ID NO: 11119 - DNA, 253 bp, Glycine max
  unsure (1)..(253): unsure at all n locations; Clone ID: 701152049H1
atcagtggtgccccccaggataacaacataatgctgtggaatgctgtcatatttggtcctgatgatactccatgggatggaggcacgttcaagttgacactccaatttactgaggactatccaaatancccaccgactgtacgatttgtgtctcgcatgtttcatccaaatatttatgctgatggaagtntttgtttggatatattacaaaatcagtggagtcctatttatgatgtggctgctatactcacat

SEQ ID NO: 11120 - DNA, 246 bp, Glycine max
  unsure (1)..(246): unsure at all n locations; Clone ID: 701152050H1
ggcaccgcttgagcagacttaacaacagcacaaagcgggttactgtctgttcaagctaccatctctctctctctttcntagtgctccttgccagaagttaaaaatggcccaagaaactttcttattcacatctgaatcagtgaacgaggggcacctgacaagctctgtgaccagatctccgatgctgtgctcgatgcatgcttggagcaggacctgacagcaaggttgctgtgaaacctgcaccaa

SEQ ID NO: 11121 - DNA, 249 bp, Glycine max
  unsure (1)..(249): unsure at all n locations; Clone ID: 701152051H1
gaagaaagaagtgagaatacgaaagaaggggttttattgccaaatgaagaaggctcacgagacacgcatggggtcagccacatgctatcnnnnnnnnnnnnnnnnnnntctccggtggtggtgactcgccggaaaacacccactgccacctctaacgccgccgccgggaacacccttctcaaaatctcacccgattnnatcacctttctcctctctcttctcaattccccatctgggtatccctgtttc

SEQ ID NO: 11122 - DNA, 247 bp, Glycine max
  unsure (1)..(247): unsure at all n locations; Clone ID: 701152052H1
gcacaagtttgttgagatagctagaagcaataagatganaatganagtgcttgttttgtttgttgctacagttttggtagcatatgaatgccatggctcagactaccagaagttccctctccaaatgaaaactgggtttggtgggcaatacagctatgangtggcatgtgccagttggaggcttngcgtggaagnanacaacgtagtcaagtggnaaactgttcctgcagcttncggagagtacata

SEQ ID NO: 11123 - DNA, 226 bp, Glycine max
  unsure (1)..(226): unsure at all n locations; Clone ID: 701152053H1
ggtaccgatcaattnacaaccatatctatctattgagaaacatgaagaaggtttcacccttggcattttccattctctttttggccttcaccatagaaccctttattggcattgctgcagcagcaccagaagcagtgcttgacacctcaggccagaagctgagaacaggtgtcaggtactacattctgccagtgttcagaggcaaaggtggaggcctaacagtttc

SEQ ID NO: 11124 - DNA, 247 bp, Glycine max
  Clone ID: 701152054H1
ggaagaacaagtcttgcattgggtggagcatacttagaaacagcaactatgtctctcatgcagcttactagctcccctgttggctcactggtccgtttcattgtaatatttgctttatggtacagaaccatggctttggccaagttgccaccaaacgcttcatcagttccagcagttttagcgtttggagattccatcgtggacccaggcaacaacaacaacataaaaacattgatcaagtgcaact

SEQ ID NO: 11125 - DNA, 253 bp, Glycine max
  Clone ID: 701152055H1
cactctttgaagaaatggaagcaagcagcatcaagctagatactattgcctgtgcagctctaatgagatcttttaataaaggtggccaaccaggaagggttcttagtcttgcagaaagtatgagagaaaaagaaattcctttcagtgataccatattttttgaaatggtatctgcctgtagcatattacaagattggaggacagctgttgatatgatcaagtacatagagccctcacttcctgtaatttcatc

SEQ ID NO: 11126 - DNA, 254 bp, Glycine max
  unsure (1)..(254): unsure at all n locations; Clone ID: 701152056H1
ggaagggaaaaaagaaaagaaaagaaagcagtgaaggagagaaagatgggtaagaaggaagtggcgttgttgttgtttgagatgcgagcctattccggtagaaagggaaccttctctgtacttcttctctttctcctcttgattctaattcttcccatcatttaaagtttcttccttcgttcacactttctcttctcttctcttcttcttctttattnnaagacttcacctttttgttctaaacagagagaaaa

SEQ ID NO: 11127 - DNA, 246 bp, Glycine max
  unsure (1)..(246): unsure at all n locations; Clone ID: 701152057H1
ggcatcaattcaaaatatatcatcaattataagcatgggtttgtggaacacaacgaatgcagtgtcttgccgctttcacaagtttggtgatgaccaaaagaatctggtcttccaaggtgatgccacgtcttcttccaggggcatagaactcacaaagttagacggtggaggaaaaccagtgggtggcagtgtggggagagtgttatactcttctccagtgcacctttggganagctctanngtggt

SEQ ID NO: 11128 - DNA, 246 bp, Glycine max
  unsure (1)..(246): unsure at all n locations; Clone ID: 701152058H1
ggatgttgcaagggggatggcttatgttcatggccntntattgatccacagggacttgaaatctgataatcttttgatttttggtgacaagtcaattaaaattgctgactttnnagttncncgtattgntgtgcaaactgaaggaatgacacccgagactggnacatacngtncggatggctccggagatnatccagcataggccttacacacanaaagtngatgngtntagctnggggttgntct

SEQ ID NO: 11129 - DNA, 249 bp, Glycine max
  unsure (1)..(249): unsure at all n locations; Clone ID: 701152059H1
gatcacaaatctttcgctaacactcattaattgcaagaatggcacttcgttgcttggtgatgtccctttctgttctcttcactcttggtcttgcnagagaaagccatgccagagacgaagatttttggcatgctgtttggccaaacactcccattccaagttcattgcgagatcttctaaagcctggccctgcaagtgttgaaatcgatgatcaccctatgcaaattgaagaaacacagtacccgaaaa

SEQ ID NO: 11130 - DNA, 249 bp, Glycine max
  unsure (1)..(249): unsure at all n locations; Clone ID: 701152060H1
ggtgtgcgtcggagctgtctgtgcaaatttgcgttgttcttcgcggcacacctcactcactgaacggtaagtatggcggacaaggctgttacaatccgaaacccgaaagttcatgaccaacaggcttctttccaggaagcagtttgtcgntgatgtccttcatccagggagggcaaatgtttccaaggctgaacttaaggagaagctggctaggatgtatgaagtgaaagaccctaatactgtatttgt

SEQ ID NO: 11131 - DNA, 259 bp, Glycine max
  Clone ID: 701152061H1
aggcgaactgatttcgttatcagaacaagaattggtggattgtgatactggatataaccaaggatgcaatggaggacttatggactatgcatttgagttcataatcaacaatggcggcattgattctgatgaggattacccataccgtggtgttgatggtagatgcgacacatataggaaaaatgctaaagtcgtttctattgatgactacgaagatgttcctgcctatgatgagttagccttgaaaaaggccgttgca

SEQ ID NO: 11132 - DNA, 235 bp, Glycine max
  unsure (1)..(235): unsure at all n locations; Clone ID: 701152062H1
ggacctaggcaagtacntacaacaatattaaacatacgaatctttgttcaattgcgaggcaaagcaagcaaagcacaacacaagatggggatacttagtccagaacagctccgattcttcaactctcaaggttatcttgtgattgaatctttcgcatgtagcgatgagattgagtccatgatgaagaggatggagcagttggtagatgactttngacccttcttccaccgnctct

SEQ ID NO: 11133 - DNA, 254 bp, Glycine max
  Clone ID: 701152063H1
ggcatcaattcaaaatatatcatcaattataagcatgggtttgtggaacacaacgaatgcagtgtcttgccgctttcacaagtttggtgatgaccaaaagaatctggtcttccaaggtgatgccacgtcttcttccaggggcatagaactcacaaagttagacggtggaggaaaaccagtgggtggcagtgtggggagagtgttatactcttctccagtgcacctttgggaaagctctacagtggtcgcaagct

SEQ ID NO: 11134 - DNA, 260 bp, Glycine max
  unsure (1)..(260): unsure at all n locations; Clone ID: 701152064H1
gagcgtggaacgagacaactaagtacnanaatcgttatccgccgnaacagccactaagatgttctttgagtcttggcacgccacgtgtcagaactgccaacagatagtcccatctctttctccttctccctaaacctcgaactncagcanccccatnnactggtgattgtttgattgagccttgaagaaatggaccacagcgctgatgcacatcgcacggacttgatgaccataacgcggttcgtgctgaacgagcaatc

SEQ ID NO: 11135 - DNA, 259 bp, Glycine max
  unsure (1)..(259): unsure at all n locations; Clone ID: 701152066H1
gganaacctcacaacatgattnntaganannntncncnnnctnngggannantggnncaatggntctccagtcangangnggtgacccttttnggagctactggaagcccntttgtgtgcagggttcatnttgccctcaagttgaagggagttcaatacaaatatgtcgaagaaaatttgaggaacaagagtgaactgcttctcaaatccaacccagttcacaagnaggttccagtgtttattcanaatgagaagccca

SEQ ID NO: 11136 - DNA, 225 bp, Glycine max
  unsure (1)..(225): unsure at all n locations; Clone ID: 701152067H1
ggcacaagtgagtacngttgatcgagataactaacnacagtgtgatgaaaatgaaggtccttgttttcttcgttgcnacaattttggtagcatggcaatgccatgcgtacgatatgttccctctccgaatgaacactggctatggtgcccgtactccggaggtgaaatgcgnnctnncggaggctgctgtggaagcacacaacatctttggctttgagaccattc

SEQ ID NO: 11137 - DNA, 228 bp, Glycine max
  unsure (1)..(228): unsure at all n locations; Clone ID: 701152068H1
ttcttcaacttaggacntttgtgagaaggtganaaactaaaatattttccttgaatttacctggtgaaagcaaaganatctgtcagccagagcaattcattaatgccttgtaaaatacatnactaaatgaacaccaagcagaatagacaatnaattaatacagatccaaacgaaaacgcttctctatctgttaanacagtatttgcnaagaatatgagatgttttata

SEQ ID NO: 11138 - DNA, 255 bp, Glycine max
  Clone ID: 701152069H1
gggactaaagataactaaactcccagatatttgttcacttcactttctcagtgcagttgttgcctaatgcaatggaggaagaagccaaggtggttttgttgggtgcacggttcagtatgtttgagatgagagttaagatagctttggcagagaaaggaatcaaatatgagtacatggaacaagatctcaccaacaagagtactttgcttcaagaaatgaacccaattcacaagaagattccagttctcatacatc

SEQ ID NO: 11139 - DNA, 252 bp, Glycine max
  Clone ID: 701152070H1
ggatcagctgatactaaattactgatacaggaacagcagagaaacaaagttagaagtaaagaagatcatggcttctctagcaaccttggctgctgttcaaccagctacgatcaatggccttgctggaagttccctctctggaactaagctctctttcaagccctctcgccacagtgtcaaatccaagaacttcaggagtggtgccgtggtagcaaagtatggtgacaagagtgtgtactttgatttggagga

SEQ ID NO: 11140 - DNA, 226 bp, Glycine max
  unsure (1)..(226): unsure at all n locations; Clone ID: 701152071H1
acctncagcaccnccntaacgtgtcgttgttagtacaatntntnntgggtcaattacgacttcancttcatcancccttgtaaaangggctaggacatccctcgtcnaaaattttaactagttaaagttgtctcanaggctctcaagtganaaatatcttgttaaatacatcctantctanaacacttantgtcgcagaatgtntncaatgcntcttactcgttat

SEQ ID NO: 11141 - DNA, 222 bp, Glycine max
  Clone ID: 701152072H1
gtcttaatttgtttcttgttttctctgtcgtttcgttcccttaatctttgatctctgagttacaagttataacaaaagaaataaacaacacatataaatatttgtaagaaaatatatatatgatcatgggttttcttcacaaactatgggacgaaacgttggcgggtccagcaccggaaacgggtctggggaagctccgaaagtacaactcgttctccggcg

SEQ ID NO: 11142 - DNA, 246 bp, Glycine max
  unsure (1)..(246): unsure at all n locations; Clone ID: 701152073H1
ggcatcaattcaaaatatatcatcaattataagcatgggtttgtggaacacaacgaatgcagtgtcttgccgctttcacaagtttggtgatgaccaaaagaatctggtcttccaaggtgatgccacgtcttcttccaggggcatagaactcacatngttagacggtggaggaaaaccagtgggtggcagtgtggggagagtgttatactccttctccagtgcacctttgggaaagctctacagtgg

SEQ ID NO: 11143 - DNA, 254 bp, Glycine max
  unsure (1)..(254): unsure at all n locations; Clone ID: 701152074H1
ggattgcacaacaatacagtcacagaaacagagaaaaaacaaagaaaatggatgcagaaacggagtctccggcgccgggaacatcgccggcggtgatccacccggcagtggcaccaatctcctaccttctgggcacatggagangccaaggagaaggaggcttccccactatcaattccttctcctatggcgaagagcttcacttctcacattcccccaacaagcccgtgatagggtacactcagaagacatgg

SEQ ID NO: 11144 - DNA, 249 bp, Glycine max
  Clone ID: 701152075H1
tactatcagcttgagcgattggatatttcatcaaattcatttgtggggccttttcagccaggattgttgtcacttccttctattacttatctgaatatttctgggaacaaattaaccgggatgcttttcgagaatctttcttgcaattctgagcttgatgtagtggatttatcctcaaatcttttgactgggagcttacctagatgtttagtgtcaaattccagcgatagcactgtcctgtatgctaga

SEQ ID NO: 11145 - DNA, 247 bp, Glycine max
  unsure (1)..(247): unsure at all n locations; Clone ID: 701152077H1
ggcacaagtgagtttgttgatcgagataactagaaacagtgtgatgaaaatgaaggtcctgttttcttcgttgctacaattttggtagcatggcaatgccatgcgtacgatatgttccctctccgaatgaacactggctatggtgcccgtacttnggaggtgaaatgcgcaagttggaggcttgctgtggaagcacacaacatctttggctttgagaccattcctgaagagtgcgttgaagcncaca

SEQ ID NO: 11146 - DNA, 68 bp, Glycine max
  unsure (1)..(68): unsure at all n locations; Clone ID: 701152078H1
tcatagtaccatcattactttttcacatatacatatctgggaantaccntaaaatgtgggaaaaattc

SEQ ID NO: 11147 - DNA, 190 bp, Glycine max
  unsure (1)..(190): unsure at all n locations; Clone ID: 701152079H1
gagataaccggagangcgggnagcagcnngtttttgctanngagcaagattcgttgcanaggcttcaagngncgagnnatgctgcttcanttgccattgtanatgcttcgngnatagcagaggaagtttcatcacgtgnattngctactttctctaatggtggtataggagggatnncaggagtggagnc

SEQ ID NO: 11148 - DNA, 253 bp, Glycine max
  unsure (1)..(253): unsure at all n locations; Clone ID: 701152080H1
gaagaagcccaaatcggagaggttcccgctgaacacgtgggaattcgccgtcgccgtcgccgtcttcttggtgttctccaccggcctcttctgcatttacctcaccatgccctcggccgcttacaccaacctcaaactcccccgcaccctctnccgatcttcgcctcctcaaggaacatctttcgacgtatgcgagtaacaccctgcgcattcattcttgggtactgctccacctacatcttcatgcaagttt

SEQ ID NO: 11149 - DNA, 225 bp, Glycine max
  unsure (1)..(225): unsure at all n locations; Clone ID: 701152082H1
aaagttccttttttantccccccacatttctatcacncggcataacacattagccttttacagcgtcttcaattctcttgatcctaatttccattttttttgtcacaattgttgctttccgtatattctcctcctccttatctctatttaaatctgtctattacaatttgaaagcgatggatcaaggagagcttgcacgagtntttcaaatgtttgatcgaaatg

SEQ ID NO: 11150 - DNA, 264 bp, Glycine max
  unsure (1)..(264): unsure at all n locations; Clone ID: 701152083H1
gatgttaatgactgttgtagttgtgctacatatttggtggacagtggaaaggtggataaggagcggctgtgtattatggggggctctgctggtgggtataccaccttggctgtccttgctttcagagataacttttcaggctggggcttcctttgtatggtatagctgacttgaacttgttgagagcagaaactccataaaatttgaatccccattacgttgaaaacctagttggagatgataaaggataagtaatgacnagac

SEQ ID NO: 11151 - DNA, 251 bp, Glycine max
  Clone ID: 701152084H1
ggaaggaggaagaggttctgatcttctttgttttgttttgtctggttccctttcttccttcaaccaattttgagatccgaaaccggcatcagatccgattcgaaatgtacggattcgaagctctcaccttcaacatccacggcggcttcctcgaggccatcgtccgcggccaccgcgccggcctcctcaccaccgccgattacaacaacctctgccaatgcgaaaccctcgacgacatcaagatgcacctc

SEQ ID NO: 11152 - DNA, 243 bp, Glycine max
  Clone ID: 701152085H1
gaagcggatggagtcgaaccgcgagtccgcacggcgatcgcggatgaagaagcagaagctgctcgaagacctatccgacgtagcgagtcgccttcaaggcgagaacgtgcgcttagcgcagagcataaaggcgaaggaggaagcgtacgttgagatcgaagccgcgaacgacatcctcagagcacagaccatggaactcgccgaccggttaaggtttctgaactccattctcgagatcgccga

SEQ ID NO: 11153 - DNA, 243 bp, Glycine max
  Clone ID: 701152086H1
aagaacggcgtgcagagaagctgaaaatgaagagtaaaacagacgatatttcagatgatgaggaagctaaacaaatgggttatcatcaaagtgatagtgaagatgagcaaaagaagcttgagattgaattgcggaacaaggctcttgaatccctcaaagcaaagaggggcgtgaataactaaatgcatcaaatccaagttttaagttgttttatgctttaaaaacttattgagaaatatctta

SEQ ID NO: 11154 - DNA, 242 bp, Glycine max
  unsure (1)..(242): unsure at all n locations; Clone ID: 701152087H1
ggaanagtgaagagaatggctcccaagggtttaacctttctggctgtgttaatatgcgtttcagcactgtcactgagtccttctgttgcgggggaagggcaaaataatggccttgttatgaacttctacaaggaatcatgccctcaggctgaagacatcatcacagaacnagtcaagcttctctacaagcgccacaagaacactgctttctcctggctcaggaacatcttccatgactgtgc

SEQ ID NO: 11155 - DNA, 222 bp, Glycine max
  unsure (1)..(222): unsure at all n locations; Clone ID: 701152088H1
agaccaaaggagggtaaggaaaaacttcagcagaggaattccttgcagaagggtgcaactttactccctctctttctctcttgctctttcttgtcagggtttggtcatataagaagccatggccagttttggaggaaccacacaaaagtgcatggcttgtgccaaaactgtgtatcttgttnataagttaactgcagatagccgtgtctatcataaggcttg

SEQ ID NO: 11156 - DNA, 243 bp, Glycine max
  Clone ID: 701152089H1
aactgttgttgagggaactatacagaagctatttgaagggcatcatatgaattatatcgaatgcatcaatgtggactataaatcaactagaaaggagtcattttatgaccttcagcttgatgtgaagggctgtcctgatgtttatgcttcctttgacaagtatgttgaagttgaacgtcttgaaggggataacaaatatcatgcggaacaatatggtttgcaggatgctaagaagggtgtcct

SEQ ID NO: 11157 - DNA, 243 bp, Glycine max
  Clone ID: 701152091H1
ggcacaaatgagtttgttgatcgagataactagaaacagtgtgatgaaaatgaaggtccttgttttcttcgttgctacaattttggtagcatggcaatgccatgcgtacgatatgttccctctccgaatgaacactggctatggtgcccgtactccggaggtgaaatgcgcaagttggaggcttgctgtggaagcacacaacatctttggctttgagaccattcctgaagagtgcgttgaagc

SEQ ID NO: 11158 - DNA, 244 bp, Glycine max
  Clone ID: 701152092H1
aaggtcaataaaatgaggcttgctgaatacatcgaaacaatgagtggtgtgaaggtcagtttggatgctatgtttgatgttcaggtgaagcgtatacatgaatacaaaagacaattgcttaatatacttggaataatccatagatatgattgtatcaagaatatggacaagaatgacaggaggaaagttgtaccccgtgtttgcataattggtgggaaaacagctcctggttatgaaattgcta

SEQ ID NO: 11159 - DNA, 251 bp, Glycine max
  unsure (1)..(251): unsure at all n locations; Clone ID: 701152093H1
aagctgaagatgatggggagttgtatgatgaatttggaaatcttaagaaaaaattccgtgccaaaacacagcaagctgaagctgcacgtgggcttcctggttcagggcgtgctggttgggaggtcgaggaactagggatagacagggatgctagagaaagtagagacagaggaagggagcgcaatgatggggnnagcaggaacagagagcgaangganaaagagaggcctagcagttggaatagagagagg

SEQ ID NO: 11160 - DNA, 138 bp, Glycine max
  Clone ID: 701152094H1
gggatttggaagctgcagaacgaaggcatttcattagcagcgttaaagaagagagaagaaaaatgcgaaagttcgatccatggcccgttttcttcaagcgcgagtggaaacgcaactggccctttcctcgttggattc

SEQ ID NO: 11161 - DNA, 207 bp, Glycine max
  unsure (1)..(207): unsure at all n locations; Clone ID: 701152095H1
tggaaatcgatcgagangagcttcaggttcgagagtaagagcagtggattgcttttaggggatcagagtttgagctttaggcagcacgagattaggtattccgagtgtncaatttgctcgttcgcaatctcgcggtcgattaattcgtatactctaggtttttgtttgataattatactttgattgtgagtgagtattggattcgaa

SEQ ID NO: 11162 - DNA, 185 bp, Glycine max
  Clone ID: 701152096H1
gatcttctcaatatccacttacccttttgtgctgccactaataaaactgcacttcaacttcaaattttcaacctttccccattcacgtcccttcttccttccaatgttcccttccatcataaattctaatcaatctcgtgaccagcaacaacaaaagcaaaagggagaatggttagcaggaagtt

SEQ ID NO: 11163 - DNA, 282 bp, Glycine max
  unsure (1)..(282): unsure at all n locations; Clone ID: 701152101H1
gtggctggatcatccccagcntcttngatcatcaccagntccnccatcaanattatcacttccggtccggctttcatnttcntctccctcntcctncctnagcaanttactagtatcaaaattnctcccattaggaccctctngctatggccttacattctcctttgctgnagatagtantccattangcaacataacnacannaggngntaatangtgcanaatccattctnatcatncaaangnaataccaanctgataataagggggttctaatcaagg

SEQ ID NO: 11164 - DNA, 258 bp, Glycine max
  unsure (1)..(258): unsure at all n locations; Clone ID: 701152102H1
ggaagaacaagtantgcattgggtggagcatacttagaaacagcaactatgtctctcatgcagcttactagctcccctgttggctcatggtccgtttcattntaatatttgcttatggtacagaaccatgggctttngccagttgccacaaacgctcatcattccagcagtttagcgttggagattccatcgtggacccaggcaacagcaacnacataaaaacattgatcnagtgnattnccacttatggaaaggatt

SEQ ID NO: 11165 - DNA, 280 bp, Glycine max
  unsure (1)..(280): unsure at all n locations; Clone ID: 701152103H1
acccaagtacccagcatatcaccgtcagtcagtgggtaaagaaaaatgttgcaacttacacattccccatgaaccaatttaaaaccattttctagaaagaaaatgtaattgtgaaggactacaaccaaatagaaatacgtataaaatacaatgaaaaaacattaaatgcaccataaacaggtgaaggtggttgttgctgttgctgttggggcaactgacaatccaggcggacctgtatttgtgtatcaatgttgctctactgtgagtganctgcattggg

SEQ ID NO: 11166 - DNA, 280 bp, Glycine max
  unsure (1)..(280): unsure at all n locations; Clone ID: 701152104H1
gaagaagcagagtgagtgcagagagatggcttgcagacagttgtgggcttcaagagctgcttcctacctcaggatctccgtgtttcacagaagcttctctaacgttttgaatgatctgaagtatgctgattctcatgagtgggtgaaggttgatggaaattctgcaactgttggcataactgatcatgcccaagatcattgggtgangttgtgtatgttgaattgcctgaagtgggagccaccgtgaccaaggagaaggtttngtgcactgaaatgtgaa

SEQ ID NO: 11167 - DNA, 253 bp, Glycine max
  unsure (1)..(253): unsure at all n locations; Clone ID: 701152105H1
gtttagtctctcattgtcatggagactttacaantgtaaaagggaaatatttagtaaaggggaaaaagataagaaagggaatgaagggaaaaaaatgactctcattgcttgcttttcctnttctagcctttgncctctataaggaattatattctgttagaattttgtgtgtctctcctcttctctctcttctnttatagtgcaattagtggactctgaataatctgattncctaaatactcatcttcctnaa

SEQ ID NO: 11168 - DNA, 278 bp, Glycine max
  unsure (1)..(278): unsure at all n locations; Clone ID: 701152109H1
gactcgccttcagcttccacaatcctatcgcacatctttctcagttctacgatggagtttggggtgccgaggttaaggttggagantctgtnaaggtagacccanccgaattnngngcatgcatacacctttactnaggcngcncntggtgaggcaaaganagaanggcctganccngtggttctctacatgaaagtnggtgaacagaaatttgtcttgggaacctttccagggagaaatccctcaaatatcctggaatggtttggaaangagttgag

SEQ ID NO: 11169 - DNA, 279 bp, Glycine max
  Clone ID: 701152111H1
gacaacatttaggggtgcattgcaaatggcttccattgttgcaagcttgccgccaccattgctgctccctgctagaaaatatcatccgggcaacttcccaagttcccctttttctcttctttcagggagacggaatcatgtttctttgttgtgaaggctctggagaaagttctgaatcttcaactacccttactgttttaagtctgttcagaatgtttgggatcaactggaggacgtctgggactaatggttgggattgcagcatagcagcatttggga

SEQ ID NO: 11170 - DNA, 288 bp, Glycine max
  unsure (1)..(288): unsure at all n locations; Clone ID: 701152112H1
ggagacagaatggaggatcattctgctttcgatactttcaatccggttggtgcccacgagagtngacagattggggaagatccaaggggaatccccaataacctcatgccttacattcaccaagtcgccgttggcagattgcctcagctcaatgtttatggccatgactatcccactaaagatggcaccccgatccgggactatatccagtaatggacttggcagatgggccacattgctggcctccgaaagtttttgcaacagaccacatcggttgtagtgctacat

SEQ ID NO: 11171 - DNA, 280 bp, Glycine max
  Clone ID: 701152113H1
ggagtgagagaaagagatcacatagcagaatggcttctactcaatgtttcttgcaccaccatgctcttaccacccctgccagatccccatcacaacgcatcatggttagcaccaagcctaaccagcttgtttgcaaggcacagaagcaagaggatattgatgtcagcccaatctctcgccggttagctctaaccgtgctcattggtgtgtgtgttggctccaaagtccaactgctgatgcagttatgggaagtgcatgtgttggaagccaagacagcaca

SEQ ID NO: 11172 - DNA, 106 bp, Glycine max
  unsure (1)..(106): unsure at all n locations; Clone ID: 701152115H1
atcttganatntttggtcactacttctnctcttgcggntagggntttagcgcagttncttctagatgcaaggaananggntaacgnacangttacatcngtattgc

SEQ ID NO: 11173 - DNA, 255 bp, Glycine max
  unsure (1)..(255): unsure at all n locations; Clone ID: 701152117H1
ggggactgaggctgccattattccaattggganagggggcancgttgcttgcagggcgcttcgcagaggaatgatgaccccaaaactgtcccaggccgtgggtaaggaccgtnatggcttgttatgggcgnngtnctggngttttgtatgagancttgnncatgccatgnngcgagcgcactaatattgtgaatactcggagtgcgtaactgngagctacacagacgaccaaggctgatggctgggtnccnacag

SEQ ID NO: 11174 - DNA, 276 bp, Glycine max
  unsure (1)..(276): unsure at all n locations; Clone ID: 701152121H1
ggtgttttnattatnagaagaccaaatcgaggantccggaaagggaaggagagantggtttcgttcttcccttttcgantcctttnaaattgttcctttttnatttcaattcgnatagaattcttttccttctgatttgattagattagtgaagatgggatgaaacaagtcattaaaanctcgacgctttcctcgcgccgaggatcacttgttgcagaaaacccatctggggcctcgtatcggaattggttgattataatggcacatgttgtgcag

SEQ ID NO: 11175 - DNA, 284 bp, Glycine max
  Clone ID: 701152124H1
ggaagtgaagcagtgagtgagggaataatgttgcggattgctcccaaattcttcaccacggttcctcttcggaccatttcacccttcgcatgttcgcttctcagtccgttccatcgctgactcttctcctttcaacaaaatccgcattcaaagggatgatactgcatttgatgcatatgtcgttggaaaaaacgacgctctggaatcgttgtgcttcaggagtggtggggtgtggactttgaaattaaaaatcagctgtgatgatttctcaacttggtcgtgga

SEQ ID NO: 11176 - DNA, 286 bp, Glycine max
  Clone ID: 701152126H1
gggcacaagtttgttgagatagctagaagcaataagatgaaaatgaaagtggcttgttttgtttgttgctacagttttggtagcatatgaatgccatggctcagactaccagaagttccctctccaaatgaaaactgggtttggtgggcaatacagcatgaggtggcatgtgccagttggaggcttggcgtggaagcaaacaacgtagtcaagtggcaaactgttcctgcagcttgcggagagtacatagctgactacgtctaggagaccatatagatcagatcca

SEQ ID NO: 11177 - DNA, 100 bp, Glycine max
  unsure (1)..(100): unsure at all n locations; Clone ID: 701152127H1
gganaagattttncttgccctgtntaagnnattggtataacttcaccnngttttcatnttttttatcttcttttctatgactgnttnataatanatnatg

SEQ ID NO: 11178 - DNA, 294 bp, Glycine max
  unsure (1)..(294): unsure at all n locations; Clone ID: 701152128H1
aactgttgttgagggaactatacagaagctatttgaagggcatcatatgaattatatcgaatgcatcaatgtggactataaatcaactagaaaggagtcatcntatgaccttcagcttgntgtgaagngctgtcctgatgtttangctnnctttgacaantatnttgaagttgcaacgtctgaangggntaacaaatatcatgcggnacaatatcgnttgcangatgctaagnaggtgttccgcacatggnttncctcctgntcctnagcntcaacnnagnagtttgcatatgg

SEQ ID NO: 11179 - DNA, 278 bp, Glycine max
  unsure (1)..(278): unsure at all n locations; Clone ID: 701152130H1
gggcggnannccgacaaganggaanngttatcccaaattggattnntccnccgaaccntggaccctcacctaaacaatcagaacccaggatttggtgaaacgntgnnaaatggtangnaattggngttgccttggactnttccaanggaagcngantcgcnctgaaatgggctataacatcttatcngcaacggtggcctctctacatcgtcnacaccagcctncngnggantgaatcnggaatcttctctggtcnaccangnttcgccnctgttcnt

SEQ ID NO: 11180 - DNA, 289 bp, Glycine max
  unsure (1)..(289): unsure at all n locations; Clone ID: 701152132H1
gattggggtcttgtttagtttgttccaatccaacgttggttgtgtgtgtttgtgttgggaggattgggattgggattggaatcagcgaccccatgagacctcagagaacgtcgatccacgccgtcacgacatgggtgaggcgacagcccccaaaggtgnaggttttctcgccgtcgtttccgncatggcggcctcgtcctcttcggttcatcgtccaggatcagacaactttcgtcgctgccgaggtatccatcctcggaattncgtcctcactacaantcagaagagg

SEQ ID NO: 11181 - DNA, 278 bp, Glycine max
  unsure (1)..(278): unsure at all n locations; Clone ID: 701152133H1
aagacgaaactgtgctatggatacnttatttttttgtgaaatagattaattaatcnattttatctaacatatatcccttttgtagtaattantagantttgtagtaattattataagtattagaagcagcaattcttattnanttcagattaatacttgataacntanacatatatctntntatagatatagatagatntatatataatngacgtaaaanananaaagnntattnatgggaaanggngctgtngttggtggaggggaggccccatctt

SEQ ID NO: 11182 - DNA, 270 bp, Glycine max
  unsure (1)..(270): unsure at all n locations; Clone ID: 701152134H1
gancgctantnctngagtaanactgntacgctcnctgagaganctcggcgcggcggtngcagaataagattgcaagatgaagttcaanatcgcggantcncaccactcgatganagaagaagctcgagancgacgacgatcttnnacncccgancattttgggacaagaggatcncanaggaggtcatcggagatgnnacccgcggaggaattnaagggtangctncaaaattacggnngcagtcacnancaaggttcccatgaagcagg

SEQ ID NO: 11183 - DNA, 273 bp, Glycine max
  unsure (1)..(273): unsure at all n locations; Clone ID: 701152135H1
gntgttgaagcagagtagcagaagagggttaatgggngaagatccacagaagctgaagcgactagcggcggattcctacgactacgacaacgactctcgatgggcctggttactggaaacaatgttctcattcctccccacatggcttcttcgcgacgacgtcgtntcacacttcaaggnnnagttctacnacgctacgtgatcctgncttgtggtggagcattctnttggtggnatnnatccaaccgnacgttcntnaataactcatcgnca

SEQ ID NO: 11184 - DNA, 275 bp, Glycine max
  unsure (1)..(275): unsure at all n locations; Clone ID: 701152136H1
gacgagatcggnagacaagnccatgcgttaaaagacatgnatgctgnttntgatacatttcctgaaccctgttcgccagcgtgnccanccttncctaatgccnttgtgagatgtgttcacntttcangntccntcatgnctgtggncaaggttccatggagattcnagggatcttgagcnntnactgatcangtncaaggttcnttggntaatgnnnagtgngcccgctntngactncattagcngccatgggatagncgagaaggtttggtnca

SEQ ID NO: 11185 - DNA, 289 bp, Glycine max
  unsure (1)..(289): unsure at all n locations; Clone ID: 701152137H1
gacaganagaggctgagaaaaatagagtttagaactgangatccagagcttttggaactgagaaattgctggaggnancagtctttcanggccataaagagntatttcatggggtctactgntgaatatcacatccancanattnntaacatcccagnacaaattgagnctgcantgtggncagaatgctgnannccaagntagctactagnctttngcaaggngaanaagcgcccacattctccatgntctcnattggcccgttccacatnacnagaacagnganggg

SEQ ID NO: 11186 - DNA, 279 bp, Glycine max
  unsure (1)..(279): unsure at all n locations; Clone ID: 701152138H1
gacacgcagttgtattgtagaactgaacaagggtttctctttctctttctctgtctgcttcttcactttctctcgtttcaatcgaaaaaaatcatgggcagaaaattcttcgtcggtggcaactggaaatgcaatgggaccactgaggaggtgaagaagattgttactactttaaatgaagctaaagtccctggagaagatgttgtagaagttgttgtgagcctccttttgtgttcctccnttgtaaaaagtttctgcgccctgattccatgtctcggc

SEQ ID NO: 11187 - DNA, 277 bp, Glycine max
  unsure (1)..(277): unsure at all n locations; Clone ID: 701152139H1
atatcatgcttatatttctttctcattagacatatatactagcatttgggtgtcaaaatatatatatattttctgatggagaataactcgaacttacttgcagagaggaattatctcgtcctcaatgtcacgagtccatagggaccactccatttgaacagcagtgatgggatgaacagcatgtgctctcntattgtatctggactagctcagataatncaatatactcactttccctcttccacagtttctnagtncacatcnatataacatatca

SEQ ID NO: 11188 - DNA, 274 bp, Glycine max
  unsure (1)..(274): unsure at all n locations; Clone ID: 701152141H1
tataaattctattcttgactagtaaacatggtttatggtcttgtttaacactggcatagtgttctgtntctgaaatattatgctagtttcattcgtggacctcgtgtgaaactaaactccataaatttcattcaggnagcaacttgtacttctggcngtcctcggtcngcattntgatcctatcattgggacnaaattggcatcgaggggtagtanagttggcgttgaatataatcgtgccccaaatnggaacgcacagttaacnngggntggg

SEQ ID NO: 11189 - DNA, 298 bp, Glycine max
  unsure (1)..(298): unsure at all n locations; Clone ID: 701152142H1
ttgttcntaatgtcatgtaganaaaacttaaatattaatcattttgaaatgaagtataaattttgatggatctcactanttatttaattactttatgttttcctaattttattatttgtaataaattacaaccnacaatagagaatgtgttgaagagctctcacaacagaanatggacttatttnattatntataaaacgtcactcccttcagnngttntntagaatnagtctgaattggtcctggtgnacaaaaggtcccantntgttngccccttngcaaccatcgntcacaccaa

SEQ ID NO: 11190 - DNA, 274 bp, Glycine max
  unsure (1)..(274): unsure at all n locations; Clone ID: 701152145H1
tatcagatatgaacgggatagccataatgattcaaaaggtgacattaagacagacaaggatggctatggtatggtaagcagcagcagccacctgagttggaaagaatcaaaagagtataggggtaagagattttctgatgcccctggtgggagtttggattcctggcatacatcacgtggcatacacctactgaagttggaaaggacagttccatggcgagaaagggctatttggaacactgaggngtggagagccaattgatctaaaatggag

SEQ ID NO: 11191 - DNA, 297 bp, Glycine max
  unsure (1)..(297): unsure at all n locations; Clone ID: 701152148H1
gggggctcggggaggtggtgaggctgttcgtgaggtacttgaatttaagtactgtggcgacgtttcgcgaaaatgggggtggtggtnagtgtggaactccttggtggagagctttggagggtgcaaagagcaaggatttggggtctttgagttctgttcgttcgcttgggtgttggaacttctgcttgcagaggcctctgtataggnactgttgagaacgtcttgttttgccctatggcggcttcggttaagaatgtgtcccagtgttgncgttgggtggtactggaacctggacga

SEQ ID NO: 11192 - DNA, 271 bp, Glycine max
  unsure (1)..(271): unsure at all n locations; Clone ID: 701152149H1
ggggaagnnggaacatagtacaaaanccacctccaagtccatgctanttgttcttgcaagantaanagagangaggtggacaaacaaagctataatttttagaggggttaccaccctcaccttctgccaaaccaaacccacccttttctctctttaagctactattgtgctgagagctgaagaggattggggggtggaaatcaagaggcagtgaagcnagctgcagaccctgatggaaaatgtggatgatgagcagctgaagaacacattc

SEQ ID NO: 11193 - DNA, 275 bp, Glycine max
  unsure (1)..(275): unsure at all n locations; Clone ID: 701152151H1
gagccacactcttgttttaaacncttcactcactcactcactcactcctgttcgtaaatgtctatcacntccctcaccatggctgagtcctgcctcctctcttctccctcctcactcttccacaccaaaaccaaacnctctctctttacacccccctccaaacncctcacactccaattttcatgcctcaactcctccgtctctctctcctcgnggcaccaantcacggtctcccttgtaacttcgtggccaaacttcggattgggtcaacagag

SEQ ID NO: 11194 - DNA, 242 bp, Glycine max
  unsure (1)..(242): unsure at all n locations; Clone ID: 701152152H1
taatatncgaatagtattatcatgtatnccaattggaaactaagtaaatgagaacaaacaaaaatgaatgtagactaaaaaatttatgatcaacacatttaaaatgatttgaaggttaagnnaaataaaacatatattatataataaactgtcaattaacaaagtatttaaatttagaaacatgtttgtaggaaattctgaccacataggagtgtctgttacaaaactgaccatggcccatt

SEQ ID NO: 11195 - DNA, 285 bp, Glycine max
  unsure (1)..(285): unsure at all n locations; Clone ID: 701152153H1
ctctctggtagaactaattaaganatgataccaaacatatggagcaaaaagaagtataaagatgttgtgtctgaccacggatgatctggcggcctcttgtatctggagctggtgagtaccttcgaggagatacataccttctgtcaagtttatccctcaagtcattacctaaatagtctctcctccctggnataaaaaaaataaagtccattattgcnaactaatataaaagaccaacaaacattccagaatgtattnaatgattacnaaaccaagctaccatta

SEQ ID NO: 11196 - DNA, 265 bp, Glycine max
  unsure (1)..(265): unsure at all n locations; Clone ID: 701152154H1
ttatatgcctntttanttcctnnttcttcatttcaatataaatacacaatggatanaagtgggancggnaagtttaatgctatgtttgataganattgnnggtgaagaaaaggcaaagaggaaacatagagaatatncccgggngtttcatattggtttgatactgtgcaaatagagagannagganangagttagcatctcacatcatttatttcttgctgataggcagatttcacttttatcatnttccctgnnatagttatt

SEQ ID NO: 11197 - DNA, 251 bp, Glycine max
  unsure (1)..(251): unsure at all n locations; Clone ID: 701152157H1
ggtgangcgttatcgtggagttcaaacttcgaggggtttccttcacaactctgtaatttctaattcccanagtttactcttgtgtttaagccnngattcggagtgnagtaatggctgggnaggaanagntncgaanaattggntggangtttaacctgggaaanttacngagcgtgaantccggcctgcccttncacncgtnagggnnaaatnncccnanggccanatcntgncngaanggggtcccngac

SEQ ID NO: 11198 - DNA, 272 bp, Glycine max
  unsure (1)..(272): unsure at all n locations; Clone ID: 701152158H1
gagggtttggttattagggttttcgctgaccggtgcgcagtcgagcctccagaagacgaatcgaaaatgccgtcgcacaagacattcagaatcaagaagnagttggcgagaagatgatgcagagcaagnccattccctactngatccgcatgggtcgatngcaccatcagtacaacgcgaagtngtgantngcgtagcaacaagcttgggtcggaggtgttngctctgcctaggtccatttatccaattattatgctttatntcgtgggnaa

SEQ ID NO: 11199 - DNA, 276 bp, Glycine max
  unsure (1)..(276): unsure at all n locations; Clone ID: 701152159H1
ggaattcanaacnacacnacaangnggnanaccnaaaagaaggggnaaaaaagaaagaacngcttatngacntcgganggaannactgatttgantcgaagggattggaaantgttgttgctattgtctgttggtatngctcgtggacgcttcaccgaggaagcgcaantcgtggcgaagaaccatccccatggttttgttgcgaaccggagacgctgcccgatggaacgtgatttgatgtgtggcattgcatattcccgggaagactgggatggt

SEQ ID NO: 11200 - DNA, 293 bp, Glycine max
  unsure (1)..(293): unsure at all n locations; Clone ID: 701152160H1
ggagttcaacgagatggagcanataaagcacagaatagttgaagtgaatggcataaaaatggcatgttgcaganaaaggagagggtccagtggtgttgttctccacggcntccctgagctctggtacttcatggcgccaccagattctntctctcagctncctcggcnaaccgnnccgtcgctcccgatctccngtggctacgtgacancgangcaccancttcaatcagcagctacaactgnttccacatatgggtgatctcgtgcggttatgatctctggtgtcaacaatg

SEQ ID NO: 11201 - DNA, 283 bp, Glycine max
  unsure (1)..(283): unsure at all n locations; Clone ID: 701152164H1
ggaagctggaaaagttagaantagtgaagaaaatgagagtccatgtnttcttcgttgctataataattttaggtgcagaatggcaatgcaatgggtcagagcatgagcatgagcatggccacagctaccaaattttccctttgcgaatgaaaaccggcnccggtgggccnctacatgcggaggtatcgggcaaagttggaggctggtgtggaacacacaacgtcntngnctggggacatgcctcaagnnngngagggatatatngaanttcatgctggccaca

SEQ ID NO: 11202 - DNA, 285 bp, Glycine max
  Clone ID: 701152165H1
gctggtctacgggaaccagagattctgggttcggtccccagtggagtcgtttcatatttttgtaatttacaatccctgcaaaagtttgttcaactgagatatcattatccaaggttatctgatttttattttttaaccacatatctctctttaaaaatcatatactataaaacagccatcaagatctaagtgtagagatgctatttatttacaactttgattacaagtcacaagtgacctgtgctatatatcgtccaggtgtcattggagcaccagaatttttgc

SEQ ID NO: 11203 - DNA, 285 bp, Glycine max
  unsure (1)..(285): unsure at all n locations; Clone ID: 701152166H1
gggggancnntgaaatcanaataccttgtggnntaagatttaggggcttgatnggtgaatcctgatgaacagaatgtnggttaanttatacaanttntncaagatggtggaatagctgattcattataaannccgcganaagaagcatgcatgagtgattgccctctgattctttgtgaagtcaataaagtccctataattacnaactgagattcagaagctccggtangggtatagctagagcttatgcctgttancacatgtaantatttggcggattagaga

SEQ ID NO: 11204 - DNA, 269 bp, Glycine max
  unsure (1)..(269): unsure at all n locations; Clone ID: 701152167H1
gggaaccttangcattctattcattcangattcagcaagtgcgtattggaggcagagaccgaaatacttcgagatggcccgtacaaagcaaactgctcgtaagtcaactggaggaaaagctcccaggaagcagcttgcaaccaaggctgcacgtaagtctgcaccaacaactggtggtgtgaagaagctcatcgttatcgcctggaactgttgtctcgtgagattaggaataccagagagcatgagtctatcaggagcttcttccagag

SEQ ID NO: 11205 - DNA, 288 bp, Glycine max
  unsure (1)..(288): unsure at all n locations; Clone ID: 701152168H1
ggaggctactgaaatcattacttatactagttttctacgattattcatagtgaggcaatagtagcagcaattcacactggtctttgcttctcgttactcatttctcacctaactttctattcttctcagtctcagatcagaaccttagccatggcagcgttccagaagatcaaggtcgccaaccccatcgtcgagatggacggagatgaaatgactagggttatctgggaagtcatcaggncaagctcatttgccctcttggagtngactcaagtatatgacttaggc

SEQ ID NO: 11206 - DNA, 277 bp, Glycine max
  unsure (1)..(277): unsure at all n locations; Clone ID: 701152169H1
ggtntttnnnttnnnggangncnaantnnaggantcnggaaagggaagnaaaaattggttnngtncttcccttttcgantcctttnaaatngttcctttttnatttcaattngnatagaatccttttccttctnatttgattagattagtgaagatgggatgaaacaagtcattaaaacctcgacgctttctcgngccgaggatcacttgttgcagaaaaccatctggggctctcgtatccgtaattggttgattataatggcacatgttgtgcacg

SEQ ID NO: 11207 - DNA, 279 bp, Glycine max
  unsure (1)..(279): unsure at all n locations; Clone ID: 701152170H1
cagttgtatngtagaacttgaacaagggtttctcttnctcttgtctctggtctgcttcttcactttctctcggttcantcggaaaaatcatgggcagaaattcttcgtcggtggcaactnggnantgnaatggggaccactgaggagcgngngnaagattgntactacttnaaatgangctaaagtcnctggagaagatgttgtagaagtngttgtgagccnnncttttgggtgccttccgttttnanaagttnctgcgccctgatnccagtngnggnc

SEQ ID NO: 11208 - DNA, 88 bp, Glycine max
  unsure (1)..(88): unsure at all n locations; Clone ID: 701152171H1
tgatattttatgacgcatatagggntaactcgcaggntatancaatcaaattanntntatattctnctaatgtnaatcacncggtnag

SEQ ID NO: 11209 - DNA, 259 bp, Glycine max
  unsure (1)..(259): unsure at all n locations; Clone ID: 701152172H1
tggagttctatntttnnanttcattcgaagacaaatttgacgccatatagagaacatgtctnanacganngaananaaatctcaggctgnggccnaaagaatcnaggctgcagccctnantnctncnaaaggccttagncgtgcncaggcnganaggnctgcgactgcagctgcccganncgtcaatgcttattgngcagaaggaanatgccccagcagatggnagnagtnaaggcagcaaatttgccctgtatnttcc

SEQ ID NO: 11210 - DNA, 276 bp, Glycine max
  unsure (1)..(276): unsure at all n locations; Clone ID: 701152185H1
aagacgaaactgtgctatggatacattatttttttgtgaaatagattaattaatctattttatctaacatatatcccttttgtagtanttattagaatttgtagtaattattataagtattagaagcagcaattcttatttatttcagattaatacttgataacctaaacaatatatctatnnatngaatatngatagatgtntatataatagaacgtaaatcagananagnntntaatnnggnaagggggcttgtngttntttggaantcnaggc

SEQ ID NO: 11211 - DNA, 273 bp, Glycine max
  unsure (1)..(273): unsure at all n locations; Clone ID: 701152186H1
gtccaccttgttagatcaccttgcaaccaatagtatgacaaacaaaaganacctgcaagaggttctagtgaaatgtagataaagcacacaaattatttttagtcatatgagacatgcagcaaggtaagaaatttgttttgaccttccactgttcaattaaatatacacatctgtggtttatccggtgtgctcgaaatgaagttatcttaaatgacaacaactggttcgagatgagtttggtaattggattatgggttctgggatactgcagct

SEQ ID NO: 11212 - DNA, 275 bp, Glycine max
  unsure (1)..(275): unsure at all n locations; Clone ID: 701152188H1
ggctgatnatncngtacttgaanttaagnactgtggcgacgtttcgcnaaaatngnggtngnggngantgtngaactccttngtagganagctttangagggtgcaaagngcaaggatttggggtctttgagttctgttcgttcgcntgggtgttngnacnctgcntgcagaagcctctgnataggtatctgttgagaaacgtncntgattgcccnaatggcggcttcggntaagatgtgtcccaggtggtntcggtttgggtgggtactaggac

SEQ ID NO: 11213 - DNA, 196 bp, Glycine max
  unsure (1)..(196): unsure at all n locations; Clone ID: 701152189H1
gaagaagaagggagcgagctcgtgatcganttcgcgnanccggttggaaggttaaattatggacaattgcntccncnggangaaantncctcaggngagggntaaggtcgggggnaaggcngggngactcggggatncnttaccgncancnggggncnaangcaaatcccngtaaccccggaagaaatttcctaaa

SEQ ID NO: 11214 - DNA, 269 bp, Glycine max
  unsure (1)..(269): unsure at all n locations; Clone ID: 701152190H1
gtggtccagaatgatagcaaccctttcaattctcaccaaactgtatggtctaagagagataacaatcaaagaacttcaaaggcttctgacattcctactacggaacatgttccaagggtattgccaaagaacgaggacccaagtttggttaataggaacaaaagaatgttgggccagcttttgggactctcgagaattcagaaagggagacaagcaactctcaggaacagaggcatatatgcgagatctagttcctgcaagantgagca

SEQ ID NO: 11215 - DNA, 54 bp, Glycine max
  unsure (1)..(54): unsure at all n locations; Clone ID: 701152191H1
aagtttcttcctccaaattgnancctnatttcaaatccanaagaagatggnttc

SEQ ID NO: 11216 - DNA, 268 bp, Glycine max
  unsure (1)..(268): unsure at all n locations; Clone ID: 701152192H1
ggaagctggaaaagttagaagtagtgaagaaaatgaaagtcattgttttcttcgttgctataataattttaggtgcnagaatggcaatgcaatgggtcagagctgagcatgagcatggccacagctaccaaattttcccttgcgatggaaaacnggcccggtggccacnacattccggagtaaccgtgcaaagttggaggcttgtgtggaagcacacaacgtcattgactggagaaccattcnncagattgcgaggnttataggaact

SEQ ID NO: 11217 - DNA, 189 bp, Glycine max
  Clone ID: 701152193H1
ttattcaagaaacataaaacatatttttaattatattttgttttacctttttatacaatcttttagaaatacaaatacaaaatatctttccgcacctaaatgactcttaattttgtaatttctcaggagtggtgacaaagcccaagttaaacacggatcaaacagtgctataaagtttttatactgcta

SEQ ID NO: 11218 - DNA, 270 bp, Glycine max
  unsure (1)..(270): unsure at all n locations; Clone ID: 701152194H1
gaaacaaagcaagcnaaacaaaagacgcagtgatggagangatgaagagggtgcttctgctgcttctggccttcactgttcttctcatgttgccagaagctctgntacaaagttttactgttggaancaaccagttttggnaccccntnttaactacactgnagtgggcnaaggcaacatttcntacctggtgactggnccatttgtgtacgataggnaccancgaccgtgtggagtgancagacagatatgaacatgtactctgtcanc

SEQ ID NO: 11219 - DNA, 288 bp, Glycine max
  unsure (1)..(288): unsure at all n locations; Clone ID: 701152195H1
gattaatcaatcattcagggcgcgcgaggtagccaccctctctctttcttggccgcctccggccgcaaccaccgcccacacattcctatatagctaaattattcattcattcanctncaacaaaacaaagaagncattaaatagcgccttttgcgtatatacnnnnnnnnnnnnnnnnnnngggagaagtagagcgacaagtgcagttccagcaggtagaaacagagttgcaacattggcatgaagaaaaggagcgttgttgtcgagcagcatcgtgttgangcgcgg

SEQ ID NO: 11220 - DNA, 141 bp, Glycine max
  unsure (1)..(141): unsure at all n locations; Clone ID: 701152201H1
aagctgaagatgatggggagttgtatgatgagtttggaaatcttaaganaaaattnccgtggccannaacaccagcaagctgaaanctgcnacntgggcttncctggtttcaggggcgtgctggttgggaggtccangaaa

SEQ ID NO: 11221 - DNA, 216 bp, Glycine max
  unsure (1)..(216): unsure at all n locations; Clone ID: 701152202H1
tattngcgcntcatncaagatgggtatntctagggattccatgcacaagaggcgtgccactggtggcaagaaaaaggcttggagaaagaagagaaagtatgagcttgggcgtcaggcagcaaacaccaagttatcaagcaacaagacaatcaggaggattcgtgttagaggtggcaatgttaaatggagggcttgaggctggatactggcantncc

SEQ ID NO: 11222 - DNA, 186 bp, Glycine max
  Clone ID: 701152204H1
acttatttcttacacttgctgctggctgtgcatctgtcgtatgctgtcgttcatctcccaagcagaaagcacttgttactagattggtaaaggttaaaactggcagtacaactctagcaattggtgatggagcaaatgatgttggaatgcttcaagaagcagacattgggatcggtatcagtggtg

SEQ ID NO: 11223 - DNA, 262 bp, Glycine max
  Clone ID: 701152205H1
ggggatagagaagcgaaagaaaccaaaccacaatgaaataaaaagccccttttgtagaacagtgatacattcggtttctatttcttcctcatctcgtacgtttcgtggatccttactcaacgcaacacaacacaacacagaaaaattatgagttccaaaggtgttggtgaagattgcccgggatgggcagcaagagatgcatccggagttctatcaccttacaaattcagtcgcaggatcctgggaatgaagatgttcttat

SEQ ID NO: 11224 - DNA, 262 bp, Glycine max
  unsure (1)..(262): unsure at all n locations; Clone ID: 701152207H1
atcagcggtgccccccaggataacaacataatgctgtggaatgctgtcatatttggtcctgatgatantccatgggatggaggcacgttcaagttgactctccagtttactgaggattatccaaataaaccaccaactgtgcgatttgtgtctcgcatgtttcatccaaatatttatgctgatggaagtatttgtttggatatactacaaaatcagtggagtcctatatatgatgtggctgctatactcacatctatccagt

SEQ ID NO: 11225 - DNA, 242 bp, Glycine max
  unsure (1)..(242): unsure at all n locations; Clone ID: 701152209H1
ggcacaagtgactttgttgatcgagataacnagaaacagtgcgatgaaaatgaaggtccttgttttcttcgttgctacaattttggtagcatggcaatgccatgcgtacgatatgttccctctccgaatgaacactggctatggtgcccgtactccggaggtgaaatgcgcaagttggaggcttgctgtggaagcacacaacatctttggctttgagaccattcctgaagagtgcgttgaag

SEQ ID NO: 11226 - DNA, 261 bp, Glycine max
  unsure (1)..(261): unsure at all n locations; Clone ID: 701152210H1
cacaacattaaggcatggacagaaatatatttgctgagtttgtgtgatgcattggttacaagcccgaagtctanttttgggtatgttgctcatagtcttggaggtttgaagccatggattttgcagagggcgtatggggaaaccatcccagatccaccttgtcgtcgagctaatccatggagccttgtttccatatcctcccaagtatgactgtagggccaatagcacagttgattttacttccattttcancatatgaag

SEQ ID NO: 11227 - DNA, 260 bp, Glycine max
  unsure (1)..(260): unsure at all n locations; Clone ID: 701152212H1
ggaatatganaggtgggataatgtcaggaaaaggnactcttacttggataaatggggactcatacgaaggaaactggttaaatggcatgatgcatgggtttggagtttatacttggagtgatggaggatgcnatgttgggacttggncatttggtctaaaagatggcaaaggaaccttttacccganaggtagccgtcttccttgggtgcaagaaattnacctcagtgccttgagaaaangagggttgctgccagtttga

SEQ ID NO: 11228 - DNA, 247 bp, Glycine max
  unsure (1)..(247): unsure at all n locations; Clone ID: 701152213H1
aagacgacagnagggtacggctgcganaagacgacanaagggggaaccagagtgangatcgaagagaatggctcccaagggtttaatctttttggctgtgtaatgcttntcagcactgtcactgagtcntngtcttgcggaggataatggactngttatgaacttctanaaggatcatgccctcaggctgnagncatcatcacngaacaagtcaagttctctacaagcgccacaagaacatgctttt

SEQ ID NO: 11229 - DNA, 264 bp, Glycine max
  unsure (1)..(264): unsure at all n locations; Clone ID: 701152214H1
gaccacattccaaaacacaaacacatacattgtagtatcacttttgtctcggaatttgttcttttgagttatggcaagcttaaaggttgcatgtgtggttttgatgtgcatgggctgtgatgngtgcaccaatgatggtgcaagccgtgtcatgctnngatgttnctgtgaacctagcaccgtgcctatcttacctgatgcagggtggagatgttccagaatcgtgctgtagcggattgaggaacattctgggttctgccagcc

SEQ ID NO: 11230 - DNA, 265 bp, Glycine max
  unsure (1)..(265): unsure at all n locations; Clone ID: 701152215H1
ggcacaggtgagtttgttgatcgagataactagaaacagtgtgatgaaaatgaaggtccttgttttcttcgttgctacaattttngtagcatggcaatgcccatggtagganatgttnccnctccgaatgnacantgggntntggtgcccgtantcagnnnctgaaatgcgcanttgnaggcttgcctgtggangcacacaacatcttnggttngagaccattcctgangantgcgttgaagcaacaaaggantacatccatggc

SEQ ID NO: 11231 - DNA, 104 bp, Glycine max
  unsure (1)..(104): unsure at all n locations; Clone ID: 701152217H1
attgtcccagttcctgttaagatgcacacagcccttggtctctgccgtgcaaatgacaataactttgctacaatgtcctcgtcaatccaacggtgataacttnc

SEQ ID NO: 11232 - DNA, 271 bp, Glycine max
  Clone ID: 701152218H1
ggccattgttgttgctattatcatccgcagctgcttttattcgcaccgcaaaacagtgagccatggccgtcggaaagaacaagcgcatctccaaggggaagaagggtggcaagaagaaggcagctgatccctttgccaagaaggattggtatgacattaaggctccttctgtttttcaagtgaaaaatgttggcaaaaccctcgtctctcgtactcagggtaccaagattgcttctgaaggactcaagcatagagtgtttgaggtctcctt

SEQ ID NO: 11233 - DNA, 262 bp, Glycine max
  Clone ID: 701152219H1
gtgactggggccctttagttgatgttgttggttattgttttcttgagccttgcatcaaagtatcaaccccaggaagattttgtccaatggattcaaaaaggaccacctcctttatattttgggtttgggagcatgcctcttgaagatcctaaaggaacaacagatgttatattggaggcactaaaagatacagaacaacggggaattattgaccggggttggggcaatctagggaacttggcagaactttctgacaatgttt

SEQ ID NO: 11234 - DNA, 244 bp, Glycine max
  unsure (1)..(244): unsure at all n locations; Clone ID: 701152221H1
ggnancaaanaatgnanacccgaagtgcttcntctcctctgnntgtntctctctcttgctatcntnttgggctagtaggcactgctgcaagtgcagctccaagaagcgcagtgcccaagccaccatgtttcaacattcaacagnagcctttttcctnnanttttctctttgggaatggttcttctgcttaccaggcagnagnagcagcaagtgtagatgggagagggaccaagcatatgggncc

SEQ ID NO: 11235 - DNA, 266 bp, Glycine max
  Clone ID: 701152225H1
ggcagtacagtggtgattggtgaagtgaatagcggggagatgcagaagggcaactatcaaaccgatgcgttcattggtgccgaagggaagcagcagaagcatgacatgtctatgccttacccattcactcactcaaacccatagccataacctactggctactaccttctcttcttctctctataatagtaacaaccgtaaccccctctttcaattattctccggtattctccggcctcgaattcgagcattttccaccgacttca

SEQ ID NO: 11236 - DNA, 260 bp, Glycine max
  unsure (1)..(260): unsure at all n locations; Clone ID: 701152226H1
catccactccattttgtggagacgtttatcatatctcctaagaagatatttcctaacacaacaaatgtttttcttgtcgantctttcaaaatcatttctttgggcatccaattattttttaaaattaatttcaccaaatctaaaagatccgaacaagttacaattatttcatattggtgagagaagacgtggtgtctatgtgagattgattggttatgttcaataatgtgacaatgaatactcattaacattacatcatg

SEQ ID NO: 11237 - DNA, 267 bp, Glycine max
  unsure (1)..(267): unsure at all n locations; Clone ID: 701152227H1
gtttcaaatcaatgannatattttttatgttcaaaatttggatgcgaaaaaaggaagaatttgaaatttctagttatacagaggaaagggcaaaagaaagttcgaaaaaagaggaggaaaaaaaaaggaanatgaggaaagaaaacgtatngaaatagcagaagcctgggatngcttatatttgctcaagtaataaggggtattttattaatancccaatccttcttagaaatntattctattaccttcattgntaataactaaaaa

SEQ ID NO: 11238 - DNA, 258 bp, Glycine max
  unsure (1)..(258): unsure at all n locations; Clone ID: 701152228H1
ggcagttcaattccaatatattccattctctctgtgtatttccctacctctcccttcaagatgcagatcttcgtcaagaccctcaccggcaagaccatcacccttgaggtggaaagctctgacaccatcgacaacgtcaaggccaagatccaggacaaggaaggaatccccccggaccagcaangtctnattttcgccggaaagcantggantnttgccgtacccttgctgatacancattcagaggaggtactcttc

SEQ ID NO: 11239 - DNA, 256 bp, Glycine max
  unsure (1)..(256): unsure at all n locations; Clone ID: 701152229H1
ggccgctttgtgctgctgttgcaaaacttagggttgggcctttttttgaggttttcagcgcttctttctcacaatggttcttcagaatgatattgatttgctgaatcctcaagctgagttggatnagagaaagcacaaactcaagcgtcttgttcagtcaccaaactctttcttcatggatgttangtgccgggatgcttcaacataacaatgtgtttagccatctcaaactgttgtggtgtgcggaaactgccag

SEQ ID NO: 11240 - DNA, 269 bp, Glycine max
  unsure (1)..(269): unsure at all n locations; Clone ID: 701152230H1
ggaatatgaaaggtgggataatgtcaggaaaaggaactcttacttggataaatggggactcatacgaagggaaaactggttaaatggcatgatgcctggggtttggagtttaataccttggagttgatggaggntgcnaatgttgggnacttggganatttgntccnaaaagatggcaaaggaaccttttaccngaaaggtagccgncttccttgggtgcaagaattnacctcagtgccttgagaaaaagagggttgctgccagtttga

SEQ ID NO: 11241 - DNA, 237 bp, Glycine max
  unsure (1)..(237): unsure at all n locations; Clone ID: 701152231H1
gggagctnagctgaganaacccccaaccccaacctcaaccttaaccttctcctcannttcttttcaaanccaggantatggttaagcttttaaagtnaagggaaaaccgttgagacntggcggaaaatgcgattggccggaccacccgttaggaagcaanttgccgncgagttgcgtcttcccaagttatagggggctgantctaccaaatntgtnccatgcattcccccatggcaa

SEQ ID NO: 11242 - DNA, 213 bp, Glycine max
  unsure (1)..(213): unsure at all n locations; Clone ID: 701152232H1
gtcatacacagcatcatnatccatangtagnnatggncgtcacgataccatgttagcgactagcctngacattgatngcgtccnctaactatcaggccattgngacgtcaaactnatcactcatctgcttgctcngtccanancgacttcagctggtgccaatntccaatatcaacatggngtgcaatagctctcatgtaacagatnnagagg

SEQ ID NO: 11243 - DNA, 244 bp, Glycine max
  unsure (1)..(244): unsure at all n locations; Clone ID: 701152233H1
gggaaaagttaacaagttagtgaagaaaatgaangtcattgttttccttcgttgctataataattttaggtgcagaatggcaatgcaatgggtcagagcatgagcatgagcatggccacagctaccaaattttccctttgcgaatgaaaaccggccccggtggccactacattccggaggtatcgtgcaaaagttggaggcttggtgtggaagcacacaacgtcattgatggagaaccatcctc

SEQ ID NO: 11244 - DNA, 263 bp, Glycine max
  Clone ID: 701152234H1
ggattgtagaattgaagaagatgactggggggggtatcactatgcaatcgacgccgggaagctcaggatacttggatttgtatccagagcggaagatgtcctttttcaaaaatccttacattctcggactggctgctgtcgccggcatcggtggtctcctcttcggctacgacactggtgtgatatcaggggctcttttatacattaaggatgatttgaggaggttagaaacagcaatcttctccaggaaacaatagtcagca

SEQ ID NO: 11245 - DNA, 261 bp, Glycine max
  Clone ID: 701152235H1
ggggtctctgaagatcagatcctcatcttctaccatttcaggtgctcactttcttcgcccatttttattgtttgttgttttaacaaaacccataatcagatccgatcctcttgagattgggatcaacgccgagtccatgagcacgccagcgctttcagggggcacgggcctcttctctgggttcactcggttatgcaagggccttgcggtggtgctgtttgcggtcacattgcggttcagtttttcccttcagctgttaac

SEQ ID NO: 11246 - DNA, 106 bp, Glycine max
  unsure (1)..(106): unsure at all n locations; Clone ID: 701152239H1
ataaatgacgaatatgatattaatattatttcagatanttcagccattagaaatanaacaataggtcaaataactactcatctagatcagataccgatagganatg

SEQ ID NO: 11247 - DNA, 251 bp, Glycine max
  unsure (1)..(251): unsure at all n locations; Clone ID: 701152240H1
cggaaatgtctagaacaaaatcccaatcttgtccgaaacccagttatgtgtggatatggagtgggtgctgccagtaaccagcctatggaaatcttgaactgtagccaaccaagcagactaaatatcccagtaaatcagtccctgcttccnggaaagaaaatgtttcaagcccaagttaaggaaaaaaactcagcaggatatactattgaaaccgttattgatggaaagcctcttcatggagttctgtttaa

SEQ ID NO: 11248 - DNA, 262 bp, Glycine max
  unsure (1)..(262): unsure at all n locations; Clone ID: 701152241H1
caactatcaactatcatctaaacaactaccaacagtgggcatcagagctacgttcggtcatacattggggcgtagttatattacctacctaccattccanaatcctcccaactacttcaaaaatttcctttgtactattaacccactctaataatattttttctaagttatggataacactactcaatcgtcaactatttctgtccctatctttaatggtgaaaattatgatttttggcgtgttaaaatggaaacatatttt

SEQ ID NO: 11249 - DNA, 144 bp, Glycine max
  unsure (1)..(144): unsure at all n locations; Clone ID: 701152242H1
gtattatganggaaaganagcttctgaaacagagctcctgaccagattcccatatggaggagtaattctgaggccaggatttntttatggtactcgaagtgttgggagtatgaagataccccttggtgtaattggntctccatt

SEQ ID NO: 11250 - DNA, 273 bp, Glycine max
  unsure (1)..(273): unsure at all n locations; Clone ID: 701152243H1
ggactcttctacgtaccagtttgctgatggtgaagcatgacgcatgagatgcgatgagatcccctttttgatggttcacttcacacttctttgtatccanatccaacagttttctcccacattcagctttgacacttgnatctcattcatagatggagtcaccccacgcatccctcttcatcaaattcaagacaccaatctttttctgcttcttcctaagcactctttcagtctcagcttcttcaaaatcaanccatctattnccnnaagaag

SEQ ID NO: 11251 - DNA, 259 bp, Glycine max
  unsure (1)..(259): unsure at all n locations; Clone ID: 701152245H1
gtccttcggatcaaaatccaaaaactaagccaacaaacacatgctccaatgtctaatctacagatttttaatatgtcaaaganatatttgattctagaccatggagaattgaatatttgcttctttaatcaatatcgttccttttatactataaaatggactcaataatacttgcntaactaaacggccttatcttaaagttacatgagcaaccgngcctctttgtttttttataattaaccgagcctttantttcttc

SEQ ID NO: 11252 - DNA, 265 bp, Glycine max
  unsure (1)..(265): unsure at all n locations; Clone ID: 701152246H1
ggatccaatcaagaatacaataacatagcatagagtgagaagtgagaagagaaaaatggcaatctccatacccagtagacaacttttcatagatggagagtggaaagttcctcttctcaaanaaatcggtttccgntcatccaaccccgntactgaaagacatcatagggcatattccagccgctactaaggaagatgatgaccttgcggtggatgctgctaaaagagcttttcccataacaagggcaangattggtcttcagcc

SEQ ID NO: 11253 - DNA, 263 bp, Glycine max
  unsure (1)..(263): unsure at all n locations; Clone ID: 701152248H1
ggttgtgtgagtgcgagaaacacgaagagaggttcatgggtactagtacgaggagtacgttttcagtttgcagatcacagtgaccatttgtgtatgatttctaaggtcttgtcatggagtgtaatgcaaatctcctcgggcatggggcngggggcnctaatcctctccattanaaagcnctgaaaatccagggtnccacccactgtngnngcattaagcnatcgggaatcacgttggattttgcnccatcgggggnagncttt

SEQ ID NO: 11254 - DNA, 275 bp, Glycine max
  unsure (1)..(275): unsure at all n locations; Clone ID: 701152249H1
gagcaaccataattttcattttattatttttttgacaagcagctctagaaaaatctgcaaagannaaaaacaagaggaggaaatgcaacttacttgttgatataaacttcacagagagaaagttgttgtaaagccttgttgctgccatggccacccacgcggctcttgcttctacaaggatcccttcaaacacaaggttcccatccaaggcctctcactctttcccaacccaatgcgccttaaagagacttgaggtgacagaattctctgggttt

SEQ ID NO: 11255 - DNA, 233 bp, Glycine max
  unsure (1)..(233): unsure at all n locations; Clone ID: 701152250H1
gatnancatagaagaagcacaaagancaagcattancactaggagcagcaacaactagtctcagctgaaatggcctcttcagtgatggcatctgtggccctcaaacctgcccctttcactgttgagaagtcctcagtgagaggccttccctctctctcaaggaactcttcttcattcagagttgtggccagtggcaagaagatcaagactgacaaaccttatggantaatggt

SEQ ID NO: 11256 - DNA, 257 bp, Glycine max
  Clone ID: 701152251H1
gggatgatttctcagatactgatattttttctgatgatgaagaaattgcaaaaactatgtctgagaatgatgataccttacggtctttggtgaaaatggggtacaagcaggtggaggctttaattgccatagaaagattaggcccaaacgcctcacttgaagaattggtagattttataggtgttgctcaaatggcaaaggctgaagatgctcttctgcctcctcaagaaaagttacaatacaatgactatgctaag

SEQ ID NO: 11257 - DNA, 239 bp, Glycine max
  unsure (1)..(239): unsure at all n locations; Clone ID: 701152252H1
gacgctgctgatatgatcgataagcttcttgaaaccaaggcttaaactagtaaaanggacaagcatgtccatttagagttttttgctatgtcgacggaaggggtttttaatctttatctttggtattacaacttgattgtctaagtaactgctagttcttttctggattgtattgcgattactataataatagttttaagaactcagtcatttgtttccgttgaatgaaattgattgtc

SEQ ID NO: 11258 - DNA, 291 bp, Glycine max
  Clone ID: 701152253H1
ctcgagagcttcacataatccagattctggaagagtgatccaccatgcccggggaacttgagtcattttgtgctcgtaatggcatacgtttatccctaatgcagggtttgtctgggattgtaaaaacagtgccatcaacaacattcccaactccatttcaatcacctctgtttacaggaagcttcccttcgagtccccgcatgtttagtcctgatcttggtcagaggattggacgaattgatctggtcccacctttaagtttagatggtcaattagggaaaacaatgcatc

SEQ ID NO: 11259 - DNA, 257 bp, Glycine max
  Clone ID: 701152254H1
catccactccattttgtggagacgtttatcatatctcctaagaagatatttcctaacacaacaaatgtttttcttgtcgactctttcaaaatcatttctttgggcatcaattattttttaaaattaatttcaccaaatctaaaagatccgaacaagttacaattatttcatattggtgagagaagacgtggtgtctatgtgagattgattggttatgttcaataatgtgacaatgaatactcatttaacattacatc

SEQ ID NO: 11260 - DNA, 279 bp, Glycine max
  unsure (1)..(279): unsure at all n locations; Clone ID: 701152257H1
ggattctcgtgtaactgaaactgaaactgcttctgcttcggaagcttctttctttgggggcagcaatgatgaacaaaactcttctcctcacttatttctacttgttcatctacattttgctttcttctggagtcattttgtacaacaagtgggttttgtctccaaagtactttaactttccgcttcccatatcactcaccatgattcacatgggcttttctggggcagtggcatttttcttgtccgggtctttaaggttgtcatcctgtnaaaatgaca

SEQ ID NO: 11261 - DNA, 256 bp, Glycine max
  unsure (1)..(256): unsure at all n locations; Clone ID: 701152258H1
agggtcccaatattctgttagatgacacccttccaactgaagttaacaaggatctaatgaatgccgtgaaggattccattgttcaggganttcagtggggtgcacganaagggctctctgtgatgagcccatcagaaatgttaaattcaagattgttgatgcaaagattgctacagagtcacttcatcgggggtctggtcagatcattccaacagctagacgagtggcctattcagctttcctcatgggctactcc

SEQ ID NO: 11262 - DNA, 257 bp, Glycine max
  unsure (1)..(257): unsure at all n locations; Clone ID: 701152259H1
gatgctcaaggatgttgggagtagaaattgaacctcatggtgacttgaatactgaagcggaaaggaaattgggtcagctagtctcagagaaatatggcacagagttctatatccttcaccggtaccctttggctgtaaggccantctatacaatgccttgctacgacaatcctgcatacagcaactcgtttgatgtctttattcgaggtgaggagatantttcaggagctcagcgtgttcatgtgccagaatttttg

SEQ ID NO: 11263 - DNA, 260 bp, Glycine max
  unsure (1)..(260): unsure at all n locations; Clone ID: 701152261H1
gattctaagtcattgctttgactgaggaactccttgcaactgcagagcagaatgaaatccctgctcctcctaacgctgctgctgcctctccaaccttgtcccatacataatgacaatccaagtgctggatagcagtctgatcatccangagaaacttccgttggcaccaaagttcaggcatttggagtgaagtggggatggtatgatgcaacagttgaggcttatacaccaaatggttattatgtaagctatgacaattg

SEQ ID NO: 11264 - DNA, 238 bp, Glycine max
  unsure (1)..(238): unsure at all n locations; Clone ID: 701152262H1
gagccaaagaaaagaaaatcctcaattttctnagcagccaaacactctctctctgtctctcgaaaaattctcagttttgcagagaaatctgaatcatgtcgtggcaagctatgtcgacgatnaccttcctgtgtgacatcgaaggtaaccacctcantnacgctgctatcatcggccaagacggcagcgtttgggctcagagtaccgattccctcattcaaacctgaggagataactg

SEQ ID NO: 11265 - DNA, 279 bp, Glycine max
  unsure (1)..(279): unsure at all n locations; Clone ID: 701152263H1
aacacattcaatgcaaaccacaaagaaagctcagtggagggagagtaacatcttaggcacaagttccttatcttttgcagggtagaacctcaaaccctgtctggcagtctttgcanctattagggnnatcctcaatttcctncctcnttcanntcntcnganagctcatatggcggcnaaantcantcttctaaagcttccaatccttcctancaagccatnantgcnagcccatcaacctcanaactttttcnattccttccatctattcnaaattaa

SEQ ID NO: 11266 - DNA, 261 bp, Glycine max
  unsure (1)..(261): unsure at all n locations; Clone ID: 701152265H1
gaagcatagttgaaacaagtcaagtccggaagaaaggggagaaatgccgaagcaaacaattccaaaggtgggaaagtgcatatcagcatcaagaagaaggggtgatggtcatacgaaacggaagaagcacttatttggcaaatgggtcaggagcatgagcagcagcaccattcaaagtaatgatataggacaacctgggacagtgttccaaaggagagagtggatgtgtggtgatangggctggtgtggttggctcgccat

SEQ ID NO: 11267 - DNA, 258 bp, Glycine max
  Clone ID: 701152266H1
ggcacaagtttgttgagatagctagaagcaataagacgaaaatgaaagtgcttgttttgtttgttgctacagttttggtagcatatgaatgccatggctcagactaccagaagttccctctccaaatgaaaactgggtttggtgggcaatacagcaatgaggtggcatgtgccagttggaggcttggcgtggaagcaaacaacgtagtcaagtggcaaactgttcctgcagcttgcggagagtacatagctgactacg

SEQ ID NO: 11268 - DNA, 258 bp, Glycine max
  Clone ID: 701152267H1
ggtagccatagaatttcacattttatcttttgcattgagcaactaactcactcgcgccatgggctgctaccatcatcaccacatgcaagctctcactgcttttgagtcttctctcagtttcacttttgctgggtgtgaggtctgatacccttcagaatgtaggcgcaattccccccacatgcaagcgcatagagtgtcccagctatgatgtcattcacgtaggcaacggctacgaaatccgtcgctataattcacccg

SEQ ID NO: 11269 - DNA, 268 bp, Glycine max
  unsure (1)..(268): unsure at all n locations; Clone ID: 701152268H1
ctagggcatctatcgcttttgaaatgtaaatgttctttaaaaaccanaacagtacatgaacatttncctcaaagtgacaatcgcttgtaattgtcagtttattatggctgtcatacaacttctgacttttgaggaaagtggcattagtacaaccaacacctaactatgaaactaatgaagccactgcaatcagnatttcacatgccactggcaatccataagtattgctcagtaaaagtgtaagaagaaaaagttgttacctttgtta

SEQ ID NO: 11270 - DNA, 258 bp, Glycine max
  Clone ID: 701152270H1
ggattgaaagaagtttctctaccaatattcatccttcacggggaagctgacactgtgactgatccatcagtgagcaaagccttgtatgagaatgcaagctgttcagacaagaagcttcagctttacaaggatgcctatcatgcacttcttgagggtgagcctgatgaaataataactcaagtttttggtgacatcatatcttggctagatgagcacagcttgacacacaatcaatcttcctcttaataccgattaatt

SEQ ID NO: 11271 - DNA, 255 bp, Glycine max
  Clone ID: 701152271H1
gggaaacaagagatggcaggtttgggaatatggatgggtttcgttagcctgtgtcttctgtctgtatcagtatcaggtctgctccaacgcctagagcaccctgtcaaagctgatggcccacttagccttatggtcattggagactggggaaggaaaggaacatacaaccaatctcaagttgccactcagatgggaagggttgctgcaaattaaatatcgactttgtgacatccactggagacaatttctacgatg

SEQ ID NO: 11272 - DNA, 255 bp, Glycine max
  Clone ID: 701152273H1
ggttttcatattcttttcctttcattgcataacttcttctatatacttctctctttctctctctcatcccactgttaccatttccattggttgtttgttctcagctcaagaaggattcttgcctaagtcctcgtttttttatcggaatggtagatttgaggtgaaaaggttccatatttgttaggccttggatcttcttcatcaatggagtatttgcatcttgaagatcatgggaagcggaatggagaaggaaga

SEQ ID NO: 11273 - DNA, 259 bp, Glycine max
  unsure (1)..(259): unsure at all n locations; Clone ID: 701152274H1
gattctaagtcattgctttgactgaggaactccttgcaactgcagagcagaatgaaatccctgctcntcctaacgctgctgctgcctctccaaccttgtccatacataatgacaatcaagtgctggatagcagctctgatcatcaagagaaacttcctgttggcaccaaagttcaggcagtttggagtgaagatggggagtggtatgatgcaacagttgaggcttatacaccaaatggttattatgtaagctatgncaa

SEQ ID NO: 11274 - DNA, 229 bp, Glycine max
  unsure (1)..(229): unsure at all n locations; Clone ID: 701152275H1
ggagaagaggcanntttgggcaactaagttgtatcacacaatggggantttcatgatatcaccttttgaactatgtctgggctgctgcgtcctgatctcctgggttgatgcaagtgaaaaatttctcgagtgcagaagaaaactctagattccccaccccctagttggatggattantttcccctttcattcgaatggattcttcatttgctcgtccgttgtanaatag

SEQ ID NO: 11275 - DNA, 235 bp, Glycine max
  unsure (1)..(235): unsure at all n locations; Clone ID: 701152276H1
gcgtcaacccgccatggatcatgtcatcaattggatttcccttgcgtcttctctgtcagagttccaacccactatcgatcggatcgtcaatggggattgtgtcccagacaagttgtttagcgacaaagattaatctaatagttgaaaaattcactgggcataaatttagcggtatgagtaaccctagtgttganaattacgcccttctcatgattggggttcaggttncttcaca

SEQ ID NO: 11276 - DNA, 237 bp, Glycine max
  unsure (1)..(237): unsure at all n locations; Clone ID: 701152277H1
gcgtcaacccgccatggatcatgtcatcaattggatttcccttgcgtcttctctgtcagagttccaacccactatcgatcggatcgtccatgggattgtgtcccagacaagttgtttagcgacaaagattaatctantagttgaaaaattcactgggcataaatttagcggtatgagtaacactagtgttgaaaattacgcccttctcattgattggggttcaagctttcttcacag

SEQ ID NO: 11277 - DNA, 253 bp, Glycine max
  unsure (1)..(253): unsure at all n locations; Clone ID: 701152278H1
ggctcactctctagggtttttatttctctcttctctctgcatcgcttcaggttcttctgaaaagatgtctcgcgtgtatgttggtaacttggattcacgagtcacgagagagactcgaagacgaattccggttttcggagtaattcggntgtttgggttgcangtagaccacctggtnatgcttnattgactttgatgaccgcagagatgcacaggatgctatccgtgaattggatggcaagaatggttggag

SEQ ID NO: 11278 - DNA, 252 bp, Glycine max
  unsure (1)..(252): unsure at all n locations; Clone ID: 701152280H1
ggcacaagtgagttttgttgatcgagataactagaaaacagtgtgatgaaaatgaaggtccttgttttcttcgttgtacaatttggtagcatggcaatgccatggtacgaatgttccctctccgaatgaacatggnaatggtgccggtactccggaggtgaaatgcccaattggaggcttgcgtggaagccacaacatctttggctttgngaccattcctgaagattgctttnaccaccaaggatncntcct

SEQ ID NO: 11279 - DNA, 256 bp, Glycine max
  unsure (1)..(256): unsure at all n locations; Clone ID: 701152282H1
gaagcgcagttcgttccacgttgttgttcgctctgtgtctctcactctctctatntttgcatcattcatcggaaatggctctcgaggttgctgttaaggctgctgttggggctccaaatgttctcggagattgtccattttcccaaagggtcctcttaactttggaggagaagaaaatcccttacaaactccacctcatcgatctcagtaacaaacccgaatggtttttgggtgtgaatcctgaagggaaggtgcc

SEQ ID NO: 11280 - DNA, 257 bp, Glycine max
  Clone ID: 701152283H1
gctccacaattaggtcttggaccgacccttttgtgtaagtgcaatggccatggctaagcttgtatgtgttctgcttctgggcattccttgggcatttccatgatcacaactcaagttatggcaacagattctgcctatcacttggatggaaggagttatggacctgggagtctaaagacctcacagtgcccttctgaatgcacaagaagatgtagccagacacagtaccacaagccgtgcatgtttttctgccaaaa

SEQ ID NO: 11281 - DNA, 259 bp, Glycine max
  Clone ID: 701152286H1
gtagtgagggatgatttagaaatgaggaacataacctcacctttgacccccctcaaatcttcaagttgctctgatgctgcaagcttgaaatcaaacatttctgatcagccggaaacgaagaactcgaacactcctccaatccttaaatcttcaagtctcttcgatgcttcgagcatgaaatccagcatttctgattatccaggtcttaagaaacaagatgtgagtaaccctcctcctttagtttcagaacctgattctg

SEQ ID NO: 11282 - DNA, 268 bp, Glycine max
  unsure (1)..(268): unsure at all n locations; Clone ID: 701152287H1
gctattgagttttgttcaaagtacattgaaaaggcaaaacctgttgggtttcttgagtctcggcatgacgaaagagtgagaggtaaggattcaagagaattgcatgttatcactctaagtctagaagaattgcaacaaactcatttgtatatactgaataacagaaatgaagttctgccatacatagtttgtcactgagctttagtcaaggaaagtaacccataatgaccaagaatagggtgttgaaagagcatnncaagactttcct

SEQ ID NO: 11283 - DNA, 254 bp, Glycine max
  Clone ID: 701152288H1
cacatgctgaggaaaagaaggggttcctcgacaagattaaggagaagctaccagggcacaagaagacagaggaggccacagctactactcctcctccaccaccacctgttgcatcattggagcatggtgaaggtgctcatcatgaaggagaggtcaaggagaagaaaggtgtattagaaaagataaaagagaagcttcctggttatcatccaagacagaggaggaaaaggaaaaggaaaaggagatggtgctca

SEQ ID NO: 11284 - DNA, 252 bp, Glycine max
  unsure (1)..(252): unsure at all n locations; Clone ID: 701152289H1
gaagaagaagggagcgancttcgtgatcgattgcgcgaaccggtggaggataagattatggacattgcttctctggagaagttccttcaggagaggattaangtcggcggcaaggccggtgcactcggcgattccattaccgtcaccagggacaagagcaagatcaccgtcacctccgacagcaacttctctaaacggtatctgaaatatttgaccaagaatactttgaaaaagcnccatgtgagggtttgc

SEQ ID NO: 11285 - DNA, 252 bp, Glycine max
  unsure (1)..(252): unsure at all n locations; Clone ID: 701152290H1
aatttggtggcaccccagcgggacagcttggnagataatctagccaagcagaatactgctcaggagaagccagtggaacatgattcctctcagggaggtaacggtcggttaacagttaaactttggaggccggttagccagcatggaactaaagatctattgccacttcaaaatggtggtaccagaagctgatgtattaatggaaaatatgacctaaatttgtccggtccatgtagtttgaggttgtgtata

SEQ ID NO: 11286 - DNA, 185 bp, Glycine max
  unsure (1)..(185): unsure at all n locations; Clone ID: 701152292H1
gacagcagagcaaaagaaaganagaaactgcaacttcctctgttttgctcccctgtttaggccttttcataagcttagantgacacacaaggaattttccattgctctagtgactctcatcgctgttnctctttgtcaacatgaacatccaaggtgccactgctgactatggtagttggcagagt

SEQ ID NO: 11287 - DNA, 238 bp, Glycine max
  unsure (1)..(238): unsure at all n locations; Clone ID: 701152302H1
tcacttatgaagagagactcaagaaaggattcttcaaatggaggactctctgatgcaccagatgtttctgatgttcgtagcagcatgattggagaaattgagaaccgttcatcgcatttgcttgctanaaaggcagatattgaaactcagggagaattcgtgaattcattgataagagaggtgaacgatgcatttntcagaacatagaagatgtagtggcattgtgaagggcggatga

SEQ ID NO: 11288 - DNA, 256 bp, Glycine max
  unsure (1)..(256): unsure at all n locations; Clone ID: 701152303H1
gcagaattggtgtctttatgctcagagtttcttaacggtggcacagacacaacagcaacagcggttgagtggggcatagcacagctcatagcgaaccctaacgttcagacaaagctgtacgaggaaataaagagaacggtgggagagaagaaggtggatgaaaaggacgttgagaaaatgccatacctacacgctgtggtgaaggagcttctaagaaancnccctccaacacatttgtgctaaccgttttgtgnnt

SEQ ID NO: 11289 - DNA, 256 bp, Glycine max
  Clone ID: 701152305H1
gggtggggtgtgcagaagagcgtcgcagttgtaaccctaatcagaagaagcgcagttcaagcgagtgacagccaccagccatgggtcgtatgcacagccgcggtaagggtatatcctcttctgctttgccctacaaaaggacacctcctagctggctcaagatctcttcgcaagatgtcgaagaaaatatctgcaagtttgcgaagaaaggttgaccccgtctcagattggtgtcatctcagagattctcaggtat

SEQ ID NO: 11290 - DNA, 256 bp, Glycine max
  unsure (1)..(256): unsure at all n locations; Clone ID: 701152306H1
gatattatcttgcttttgtacaaaatttgaaatagaaataatctgtgctgtggtagtggaagcatcgagaacatcgcagcgatggcgagagtgggtagaatgaagttgggttcacaaggcatggaggtgtctttgcagggacttgggtgcatgggcatgtctgcgttctatggtcctcccaagcctgaccccgatacgattgctctcatccaccacgctgttcaaaactggngtcattnntnnaanttnnnggntt

SEQ ID NO: 11291 - DNA, 245 bp, Glycine max
  unsure (1)..(245): unsure at all n locations; Clone ID: 701152307H1
ggcgcattgaacgaaaattagggtttntagtgtagcaggaagaagcagcaatggcgccgaagataacacgtaaggttagcagaaaccctgaattgataaggggaatcggaaagtactcgaggtcgcagatgtaccacaagaggggctttgggctatcaaggccaaaaacggtggcgttttactcgccacgaccctaaacccaagcctgaaagctctgctgaaaaaccacccaattttacctgcng

SEQ ID NO: 11292 - DNA, 257 bp, Glycine max
  unsure (1)..(257): unsure at all n locations; Clone ID: 701152308H1
ggatgcacaagtttgttgagatagctagaagcaataagatgaaaatgaaagtgcttgttttgtttgttgctacagttttggtagcatatgaatgccatggctcagactaccagaagttccctctccaaatgaaaactgggtttggtgggcaatacagcanngaggtggcatgtgccagttggaggcttggcgtggaagcaaacaacgtagtcaagtggcaaactgttcctgcagcttgcggagagtacatagctgac

SEQ ID NO: 11293 - DNA, 188 bp, Glycine max
  Clone ID: 701152309H1
ctttcagggggcacgggcctcttctctgggttcactcggttatgcaagggccttgcggtggtgcttgtttgcggtcacattgcggttcagtttttcccttcagctgttaactaccttgctcttattcccgccaggacaatcccatttgcctggaatctcatcacagctggttatgttgaacaatctat

SEQ ID NO: 11294 - DNA, 257 bp, Glycine max
  Clone ID: 701152310H1
ggcacaagtttgttgagatagctagaagcaataagatgaaaatgaaagtgcttgttttgtttgttgctacagttttggtagcatatgaatgccatggctcagactaccagaagttccctctccaaatgaaaactgggtttggtgggcaatacagcaatgaggtggcatgtgccagttggaggcttggcgtggaagcaaacaacgtagtccaatggcaaactgttcctgcagcttgcggagagtacatagctgactac

SEQ ID NO: 11295 - DNA, 255 bp, Glycine max
  Clone ID: 701152311H1
gggtggcgttttaacagaagcaattagaagaaaaccattcacactgttattgttggatgaaatagaaaaagctcatccagatatattcaacattcttcttcaaattttagaagatggtcaacttactgattctcagggtcggagagtttcatttaaaaatgcattggtggtgatgacttcaatgtggggtctagtgccattgctaagggtcgacacaactccataggtttcttgattccagatgataaaacaact

SEQ ID NO: 11296 - DNA, 258 bp, Glycine max
  Clone ID: 701152312H1
gattgaagaacctttcaaatcccttcttctttctctcccaaatctcaatcttcataacattcacccatttcttcacattgggggcttagggttctatttgtagattttgatgctcgagttctgtggtttctaaagcattgaaatggggaaaggaagaagtcctgggaaatggttcaagaatttactcttggggaagaaatcgtcttcaaagtctacttcatcaaagaagaatgacatttttaaaccttcattgacaaa

SEQ ID NO: 11297 - DNA, 260 bp, Glycine max
  unsure (1)..(260): unsure at all n locations; Clone ID: 701152313H1
ggcacacagttatacagctctagagaattatcataccctttaagatgaaaccgtacctacgtccaatattcctattatncccttatccttctcgaccaatccacttcggcgagtgcttctaatagtaggtttatagaattcttttcaaaattaaagaattcttttaatcctaagtctgaagaactaaaatcaaaagatataaagaagtccccgagcgtcgaatttttgaagaagaaacatgacggagttaaggacttctc

SEQ ID NO: 11298 - DNA, 259 bp, Glycine max
  unsure (1)..(259): unsure at all n locations; Clone ID: 701152314H1
ggagagggattggagttgggaagaatagaatacgccttggatcttattcagctcaactcaggtatgtatgtttcctcccttcaccttctctttctgcctccttccatttcttatacttatcattcttccttccttaatccgttaagtcaagcaatttgcctttcaactgtttgatcaaagttgccatgaaacaaatagcttttttttcatctttgcccaataattctaacttaactcatctttcattttngggttttta

SEQ ID NO: 11299 - DNA, 258 bp, Glycine max
  unsure (1)..(258): unsure at all n locations; Clone ID: 701152315H1
attgaaactgtttgtagaaatgaggaaaaaaaatttgantcctactgatcatactttatgtaccattttaaatgcttgcagcagccctgcagtgctccttcaaggaagacanatgcactctcttgtnannaanatgggttcagaaaggaatgtgtttgttgccagtgcttgattgntatgtattcngngggtggcatatggccgnggcncatgtgtgtactcccattcnaagagganctntgtttggcngactccact

SEQ ID NO: 11300 - DNA, 260 bp, Glycine max
  unsure (1)..(260): unsure at all n locations; Clone ID: 701152316H1
ggcattgctttacccgatacgttgaatatcatcgatgcgtantgccaagggagaaggtgcaccagaatgtgacaagtttgccaaatattatcgttctctttgccctggtgaatggattgacagatggaacgagcaaagggagaatggaacattcccaggcccgctgtaggtggtgtgcataactgaaatggctgcacaattcgtttttcagtattatatttcaaattgctagagataaactcccatacatttggggatgt

SEQ ID NO: 11301 - DNA, 273 bp, Glycine max
  Clone ID: 701152317H1
ggaacctttgcattctattcattcaagattcagcaagtgcgttttggaagcagagaccgaaatacttcgagatggcccgtacaaagcaaactgctcgtaagtcaactggaggaaaagcccccaggaagcagcttgcaaccaaggctgcacgtaagtctgcaccaacaactggtggtgtgaagaagcctccatcgttatcgccctgggaactgttgctcttcgtgagattaggcaataccagaagagcactgagctcctaatcaggaagcttcc

SEQ ID NO: 11302 - DNA, 255 bp, Glycine max
  unsure (1)..(255): unsure at all n locations; Clone ID: 701152318H1
gaaaaagaattggcagaacgttcgctgcctatatctgaagagtaccatggggaaatcgtaccgtgtcttttgagtagtggttcttaaaattcagtgaatttctgattgcacttaatatactgtcatgataggttggacagaatttntcatcgttctacagttttgttggatgagtattttttggctagtatttcttgttattgacatttatgtttcaagtgctttgcaacaaaaaaanacnnnaannnaannnng

SEQ ID NO: 11303 - DNA, 270 bp, Glycine max
  Clone ID: 701152319H1
gaggatagagatcaccaacaaaatatttgctttttgttttatttcattgcaaccatgtttggctatgcagcagcagtaattgcagcaatcctcttcttccaatacttcttccataggagacgatgttgcaaacactccattttgacagaataccctatcattggcatgctaccacaattactcttcaatttatggcgtgcccatgattattcaactcaggtgttgcaacgacatggtggcactggtgggttcatggaccttggtttacca

SEQ ID NO: 11304 - DNA, 255 bp, Glycine max
  unsure (1)..(255): unsure at all n locations; Clone ID: 701152320H1
atgccaggnacagctttgttgtagtttagctggctgccaaaataatttttcagaatgatatctataaatggagcgtatgtaataaatcgtaagtttgtctagagaatgaaacaaaatcctagnttgagtcactgtgtttgtaggtatactttcagaataaattaccactgaagtgtaggtctttctaaacattggttcaagaactaccttcttgtgccagagtgttttctaaaacatttactgcaaatactaggt

SEQ ID NO: 11305 - DNA, 250 bp, Glycine max
  unsure (1)..(250): unsure at all n locations; Clone ID: 701152321H1
gtgtctggttccatataggattccttagttaaaatgtctaaaattgagtaaagctagctataatatataactcttggttaaactttcaagggcacgtttagtttacaatattaattaatttctcgtgttgtgacctctattttaatacaaaatttgtgactaaattaatttatnggcaccttttaatcacattcaatattttgantcntttattattacnnctagaagaaancnggnggtttacnccccc

SEQ ID NO: 11306 - DNA, 252 bp, Glycine max
  Clone ID: 701152322H1
ggatatgtggctcctgaatatgcaaatactggtcttctaaatgaaaaaagtgatgtttatagctttggtgttgtgctattggaagcaattactggaagagatccagttgactatggacgtccagcacaggaagttaatatggttgattggctgaagacgatggttggaaccaggagatcagaagaagtggtggacccaaacattgaggtgaagccatctaccagagctttgaaacgggtgccttaactgctt

SEQ ID NO: 11307 - DNA, 251 bp, Glycine max
  unsure (1)..(251): unsure at all n locations; Clone ID: 701152323H1
gacgacacaacacaacacaagctttattctttttcttcgcttcttctgtacagcacccaagattgaagatgatagaccttgcgcgcgtgcagaaggagcttgtggaatgcagcaaggacgcggagggatcgggcatcaaagtcagccccaaaaacgacaaccttgttctcttgatcggcacnttctggccccgtnggaactccatatgaagggggcntttccagattgatatcacttgcctgatgggtacc

SEQ ID NO: 11308 - DNA, 254 bp, Glycine max
  Clone ID: 701152324H1
gattatatttgagttcaaacaaatcaaagccatggccacctccaacttctctattgttctctccgtctccctagccttctttttggtgctacttaccaaggcacactcgaccgataccgtttctttcaccttcaacaagttcaacccagtccaaccaaacatatgctccaaaaagatgctagtatttcatcctctggggtgttacaactcaccaaagttggcagcaaggcgtgcccacctcgggatctctcggt

SEQ ID NO: 11309 - DNA, 153 bp, Glycine max
  unsure (1)..(153): unsure at all n locations; Clone ID: 701152325H1
gatcgcatttcatagcactcaccctcattaccaacacgaaagcatagccaaaaccttttttcgaagtctctgattttcctaatggctccggcaaaggcagagaagaagccggcggagaagaagccagcgnnngagaaggcaccggcggagaag

SEQ ID NO: 11310 - DNA, 264 bp, Glycine max
  unsure (1)..(264): unsure at all n locations; Clone ID: 701152326H1
gcccccattactcacttttcatccttcgatcatgcacttagttgcttccaattaagatggttctgctagagaagctctgggatgatgttgtggctggccctcaacctgagcgtggccttggcaagctcagaaaactcaccaccctcaaaactattgatgaaggagaaagtagcaagctgcagaagacgttgtcgatgccgtcgacaccaacaaccccgatgactccgangactccaacgacaccgggatcggcccgtaaagtga

SEQ ID NO: 11311 - DNA, 188 bp, Glycine max
  Clone ID: 701152327H1
gttttgtgtgtgtcgaagtggatagttccttccttcaattaatctccgatccgaaaccgaatggggattctgtacgcgctggttggtcgtggatcggtggtgctggcggagttcagcggcaccaccaccaacgccagcgcatcgcgcgtcagatccttgaaaaaatccccggcaacaacgacacgcac

SEQ ID NO: 11312 - DNA, 253 bp, Glycine max
  unsure (1)..(253): unsure at all n locations; Clone ID: 701152328H1
cctattaattattgtcttccactgtcacaattctcaactaatattttctaacattacaatctcacatcatcacaacggcaatcttccacaagcatgaagttgnaaatgattggagatttttcaagtcaacaacaaacaacaaagttgacaagtatgaatgaagatttttcaattgtctaccaagctcgagtatttcaaagtttaaactgatattcttgtggagaatatcatattgtcatttatctaaggggat

SEQ ID NO: 11313 - DNA, 254 bp, Glycine max
  unsure (1)..(254): unsure at all n locations; Clone ID: 701152329H1
agagggagacggtagcagataagcctaaacacgaaactcgcaaattccctcaacactggagtcgctggaaaattcattctgggactcagctgagctgaccaagcatgattcaaaatggttgcattgtatcccaagggtgtgcccctctgaattctaggtcacgcaaccatgggcatactagtactctgcctttcgttgcgttctctaatgcctcccaaggttgccgtctctaacatccggagttttggggaana

SEQ ID NO: 11314 - DNA, 257 bp, Glycine max
  Clone ID: 701152330H1
ggagagagaatgggaaggaagaaggggtatgttgagttcgaggagtcgccgccggacgatttcgatccggcgcatccgtacaaggacccggtggcgatgctggagatgagggagcacatcgtgagggagaagtggatccaaatcgagaaggccaagatcattagggagaagctccgatggtgctaccgcatcgaaggcgtcaaccacctccagaagtgccgccacctcgtcaaccatatctcgagtccacccgcgga

SEQ ID NO: 11315 - DNA, 253 bp, Glycine max
  unsure (1)..(253): unsure at all n locations; Clone ID: 701152331H1
ggacacaatcaatcccattattaaagggataagccttcaaccttgcaacacaacactacaacctaaggtctgcactacgagaatgtctcagggaagaggcagtgcatctttacctattgtggtcactgtggtttcactactgtgcctttggttcttttggaacgtgctgatgcagcaatttacaccgttggaggactgggggatggacttcaacactaatgcttggcccaaaggaaaagnttcagagcggtgt

SEQ ID NO: 11316 - DNA, 267 bp, Glycine max
  unsure (1)..(267): unsure at all n locations; Clone ID: 701152332H1
gacaagatcccactgggaaggactttagtgggcaagactctgatcaaacaagacttcaaaacgtccatactgagacaagccaattttaaaggtgcaaagttaataggtgctagcttctttgatgctgatttaacaggtgctgacctttcggatgctgatcttagaaatgcagatttttccctggcaaatgtgacnaaggcaatttaagcatgctaacttggaaggtgcattgcaacaggaacacttctttaggggacaatgttacng

SEQ ID NO: 11317 - DNA, 259 bp, Glycine max
  unsure (1)..(259): unsure at all n locations; Clone ID: 701152333H1
agggtaaagagtatgtgtttgttgccaattcggataacttgggagctatagttgacttgaaaatcttgaatcatttgatccagaacaagaatgaatactgtatggaggtgactcccaaaacattggctgatgtaaagggtggcactttgatttcttacgaaggaagggttcagctcctggaaaattgcnnaagtccccgatgaacatgtcatgagttcaagtcatagagaagttcaaaattttcaacacaaatatttgt

SEQ ID NO: 11318 - DNA, 283 bp, Glycine max
  Clone ID: 701152334H1
taattctagttaataaagacagatttatcgttaacaaacatttcttctttgaacagtttgcccaacaactctaaaaaggatatgcagacaacatggaatttcaagatggccatcccgaaagataaataaagtgaatcgttcgttaaagaagatacagactgtgcttgattctgtccagggagtggaaggagggctaaagtttgatccttataccggggggtttatagccggaggatcatcatgcaggaaacggaagcacataaatatcttgtgtttcctgaga

SEQ ID NO: 11319 - DNA, 255 bp, Glycine max
  Clone ID: 701152335H1
ttatgcaagcattataacaaggattttggaattgagtgccggattgggagattccataacatatatggtccttatgggacatggaagggtggaagggagaaggctcctgctgctttttgtcgcaagacacttacttccaaagatcgatttgagatgtggggagatggattgcaaacaagatccttcaccttcattgatgagtgtgttgaaggtgtactgagattgactaaatcagactccgggagccagtgaata

SEQ ID NO: 11320 - DNA, 254 bp, Glycine max
  unsure (1)..(254): unsure at all n locations; Clone ID: 701152336H1
gaccggngatgtgaaactactcatcactcactccaaacccaccacaccaccattattcatatctcattctctaacctttcactattccctctcattcactctcnagctagtttcctcatcanngtagaagnaccaatacttgtactctctcttactttttaaccatgtagaatgattcacctaaggaaaaattagtagcttcttgttgtgcttttnatttggtttggtttngtgtagagataaaccgttgggaa

SEQ ID NO: 11321 - DNA, 249 bp, Glycine max
  unsure (1)..(249): unsure at all n locations; Clone ID: 701152337H1
tgtactggtacagtacagtgatgatgatcaatgaccccaacttgaacaacttccacacaaagttggaagtagtaaagctcaacgggctgtggtcggcagacagtgttgagatccgttgacagaaagaattacataccacaattctaatataaaacctgcagaaaccacctggattgctgatctcactaattgtggctatacgggtagctttcgctatttncccgtttttacaaagcccatagatgtngg

SEQ ID NO: 11322 - DNA, 254 bp, Glycine max
  Clone ID: 701152338H1
ctctcatgtttgtaggctatgtggatgagttgcatctggctggtgtttctttggcttcttcatttgccaatgttactggtttcaacgtgttggtatgctgacactattttctcttatgttatgttttacaccaactttcaaaatctgtcagatctgtctgtgcatcttgcatcatattatatatggactatagtctatgagggtgttaattctttgtcatcaatttgattaatacccattaaatagagaaaaca

SEQ ID NO: 11323 - DNA, 252 bp, Glycine max
  Clone ID: 701152339H1
gggaccctgaaattcttaagcaattgcatccatttaaagtttttgttctctgttctgcattgaaggttctgccctatagaggaagcagagaggatagctttaagaaatttctgaaggaccatttaaaattagaattgcctccagcacgttagtcttatgtaactagtcctgattatttttatatttgttgatggtattgttttcctgattacataaggggccttacaaagttgatacatattgtttttttag

SEQ ID NO: 11324 - DNA, 254 bp, Glycine max
  Clone ID: 701152342H1
ggaagaaaaagaaaacagaggcttaggcaactaagaaagaaagatgaagctgaaggtatatgcggaccgcatgtcccagccatcccgtgcggttctcatattttgcaaagtgaatggaatagattttgaggagatcaaagtcgatttatccaaacgtcagcagttatctcccgaattccgagcggttaaccctttaaggaaagtccctgctattgttgatggaaggttcaagctatttgagagtcatgctattc

SEQ ID NO: 11325 - DNA, 253 bp, Glycine max
  Clone ID: 701152343H1
ggcgtacacagcctcaacaaccctaacgcgtgcagagcagagagagacgcagccatggggcgaagacccgcgaggtgttataggcaaattaagaacaaaccataccccaagtcacggttttgccgtggtgttcctgatcccaagatcaggatttacgatgttggtatgaagaagaagggtgttgatgagtttcctttctgtgtccatctggttattgggagaaggaaaacgtttctagtgaggccctggaagc

SEQ ID NO: 11326 - DNA, 251 bp, Glycine max
  Clone ID: 701152344H1
aagctcagtgaggtgcaagttaatttacttgaacaaaactttggaaatgaacgcaaacttgagtccgaaagaaaggataggctggcaatggagcctggtttggaccctcgacaagttgctgtgtggtttcaaaacagaagagcccgttggaagaacaaaaagttggaagaagagtactccagcctaaaaaaatcatgaagccaccttgcttgagaatgttgcctggagagtgagtgttgaagctcaagagc

SEQ ID NO: 11327 - DNA, 253 bp, Glycine max
  unsure (1)..(253): unsure at all n locations; Clone ID: 701152345H1
atcgaagcaaaaaatgaaaacccaaagtgcttctctcctctgtctttttctctctcttgctatccttttggctagtngcactgctgcaagtgcaactccaagaagcgcagtgccaagccaccatgtttcaacattcaacagaagctttttccttccattttctctttggaattggttcttctgcttaccagggcagaaggagcagccagtgtagatgggagaggaccagcatatgggacactacattagacag

SEQ ID NO: 11328 - DNA, 255 bp, Glycine max
  Clone ID: 701152346H1
gttgaaaagttggttacacaacttccagaaggtggtgttttgcttctagagaatgtgaggttctacaaggaggaagggaagaatgatcctgaatttgcaaagaagttggcttctctagctgatctctatgtgaatgatgcatttggcactgcccacagagctcatgcttctacagaaggagttgccaatacttgaagccctctgttgcaggattcctaatgcagaaggagcttgattatctagttggggctgtgt

SEQ ID NO: 11329 - DNA, 268 bp, Glycine max
  unsure (1)..(268): unsure at all n locations; Clone ID: 701152347H1
ggtgggacaaagagagaaaaccgaatagaaaagaaggtagctagctagggttttggcgcgaagaagaatggggaagaagaagctggagataaagcgaatcgagaacaaaagcaatcggcagataacattctccaagaggcgcaaaggattgatgaagaaagcccgcgagttatccattctctgcgatgcgaagttgggcgctgcttcatcttctccagcaccggcaagctctacgantttgcaacggtgacatttngccgangtcntg

SEQ ID NO: 11330 - DNA, 252 bp, Glycine max
  unsure (1)..(252): unsure at all n locations; Clone ID: 701152348H1
gatacacaatacttcctttcacagtgtcttccatcctcttccaactttcacactttcacttgctctctctttgctcttatccnnnnnnnnnnnnnnnnnnnnnnnntgggttttctattctcagtttgcggtgtttgatagaaataatggatcggaagggccaagatcaaaagtacaattcttcaccatctctatgagagcagagacagagcccttactangaaatcttgtcnccctgtttcagattggctc

SEQ ID NO: 11331 - DNA, 259 bp, Glycine max
  unsure (1)..(259): unsure at all n locations; Clone ID: 701152349H1
gcacaagtgagtttgttgatcgagataactagaaacagtgtgatgaaaatgaaggtccttgttttcttcgttgctacaattttggtagcatggcaatgccatgcgtacgatatgttccctctccgaatgaacactggctatggtgcccgtactccggaggtgaaatgcgcaattggaggcttgctgtggaagcacacaacatctttgggctttgagaccattcctgaagagtgcgttgaagcaacaaaggaatacntcc

SEQ ID NO: 11332 - DNA, 255 bp, Glycine max
  unsure (1)..(255): unsure at all n locations; Clone ID: 701152350H1
gacagcatatatatcaataatctattttatactatacctacattttgataattttctttgtagttgatagccatggctacccgtggaaagcttgaggttgacattgatctcaagtccaacgcagacaagtactggcaaacccttaggaattctactgaaatattccctaaggccttcccacatgattacaaaagcattgaggttcttgagggtgatggcaagtctcctggttctatccgccacnnaagttatggt

SEQ ID NO: 11333 - DNA, 255 bp, Glycine max
  unsure (1)..(255): unsure at all n locations; Clone ID: 701152351H1
ggaagaaaaaganaacagaggcttaggcaactaaganagaaagatgaagctgaaggtatatgcggaccgcatgtcccagccatcccgtgcggttctcatattttgcaaagtgaatggaatngattttgaggagatcaaagtcgatttatccaaacgtcagcagttatctcccgaattccgagcggttaaccctttaaggaaagtccctgctattgttgatggaaggttcaagctatttgagagtctgctattctc

SEQ ID NO: 11334 - DNA, 252 bp, Glycine max
  unsure (1)..(252): unsure at all n locations; Clone ID: 701152352H1
ggctttagattcttttcccctagattcagccacagttggaaaaaaaaaagttgttcgagatggcacgtacgaagcaaactgctcgtaagtccacaggaggaaaggcacctaggaagcagctcgcaaccaaggctgcacgtaagtctgcaccaactactggtggtgtgaagaagccacntcgttatcgncctggtacggttgctctccgtgagnttgggaatccnngaagattccggnnttttacncngganc

SEQ ID NO: 11335 - DNA, 248 bp, Glycine max
  unsure (1)..(248): unsure at all n locations; Clone ID: 701152355H1
gaagggggtttgataaaggttgacattgaaatttgaagccatggttcttgactccattctgacatctcctcgtctcaagtctccatctttcaggagacagtttaaaaaggatgaactgggtagttggtccacacttttccagaggcatcgcttcctcttatctgctcttgttctgctaactctcctctgcactgtttatctttactttgctgtcatttaggggctaatggcnctgttccggtttgacg

SEQ ID NO: 11336 - DNA, 251 bp, Glycine max
  unsure (1)..(251): unsure at all n locations; Clone ID: 701152356H1
ggatccaaagacgcatcttttgcttcactcgtcatcactacgcagattcgcagcaaaccagactaaactccgacgatgcctcccgtcgctcctcgatccggtgatgccatattcgccaacgtcgaacgcgtcaatgcggagtgtttactttgacgtatggcgcaattgtgcgtcaattgctcacggatctggaagnngctgaggaggttaacaagcagcttgatcaaatgggttacaatattggaatccgt

SEQ ID NO: 11337 - DNA, 250 bp, Glycine max
  unsure (1)..(250): unsure at all n locations; Clone ID: 701152357H1
gacagctgaaaagaatagcaaaggcagaaagagctgaagcttcttcgtgtgtgacaaagtaacaaatttcagcattagcttagaaaatggagttcgttcctgaagaaggcaagcaccttcacgaggattgncccactttgattttgcctgctctgtcgattggcaatgtggggcagctagttgcagatctttgatttcatcatgggttctgagaganttgggtattggatganctaacgttttncctggg

SEQ ID NO: 11338 - DNA, 242 bp, Glycine max
  unsure (1)..(242): unsure at all n locations; Clone ID: 701152358H1
tagttatctttctttttcttcaatttcaccacctattcctaagtgcattgaacctgtaaaaatganattatcttaaagttgaacatggacctagatttaaactctgaaaaactgactcagccttcgtctaggtctttaatgccgtatgtagtgggaacttcgattnttatctaatnttatatatatnatcttccnaaccctcaatcgggcngaaaaattgcatttctaaaanaaaaancgga

SEQ ID NO: 11339 - DNA, 251 bp, Glycine max
  Clone ID: 701152359H1
ggggaaccctaattctgcgaggtgagtgaaaatggcggtacccttgctctccaagaagatcgtgaagaagcgcgtcaagaagtttatacgccctcagagtgatcgcaagatctccgtcaagccaagctggcgcagacccaagggtattgattctcgtgtcaggagaaagttcaaaggatgcatttgatgcccaacattggttatgggctcagacaagaaaacccgccatatctaccaaatggtttcaagaa

SEQ ID NO: 11340 - DNA, 276 bp, Glycine max
  Clone ID: 701152361H1
gatcacccagggatttttattctatcatcttgccatggtagaacaccagatcccaaagaaaagaaagatgatcataagatgggagaaggaaagctgagcttgttgaaatggaaaatgttaaacgacattgagaaggtagggaagagggtgaagcagaatttgagtccacagcaaaagcaaaagggtgattggaaagacttgttgctgatgagtatatcgtttgcagtttatgtgtacatatcccagatgctagtttgtgcctatttgcttggacct

SEQ ID NO: 11341 - DNA, 254 bp, Glycine max
  unsure (1)..(254): unsure at all n locations; Clone ID: 701152362H1
ggggccacgaaacgacacctctctgcgcttaaaacgactgcggcccacgatcgcgttcttcagttgaggcatgttattcgctgctcactcctnnnnnnnnnnnnnnnnnnnnnnnnnnnnnnnnnnnnnnnnnnnnnnnnnnnnnnnnnnnnnnnnnnnnnnnnnnnnnnnnnnnnnnnnnnnnnnnnnnnnnnnngatggaacaatcggttttggatgatataatcaatcgcctcctcgaagttcgtacccga

SEQ ID NO: 11342 - DNA, 254 bp, Glycine max
  unsure (1)..(254): unsure at all n locations; Clone ID: 701152363H1
ggcatcaattcaaaatatatcatcaattataagcatgggtttgtggaacacaacgaatgcagtgtcttgccgctttcacaagtttggtgatgaccaaaagaatctggtcttccaaggtgatgccacgtcttcttccaggggcatagaactcacaaagttagacggtggaggaaaaccagtgggtggcatgtggggagagtgttatactctctccagtgcacctttgggaaagctctacagtggtcgcaancttt

SEQ ID NO: 11343 - DNA, 247 bp, Glycine max
  unsure (1)..(247): unsure at all n locations; Clone ID: 701152364H1
tacaccacttgcgggtgcgtccatcgtgaaagacaactcgttagggctttagcaggtggaaccaattggggtattgggtcttcatagcatatgtataggtgggagtgtaggcatttgtgttgactgagggaggtcatgcatggcatatgcatgcgatctgattttgttaattttctatgtatggtcnggtttggtaccactggtaccnatctaatatattganctttggccgntaaagaaaacgagt

SEQ ID NO: 11344 - DNA, 261 bp, Glycine max
  Clone ID: 701152365H1
gacagctgaaaagaatagcaaaggcagaaagagctgaagcttcttcgtgtgtgacaaagtaacaaatttcagcattagcttagaaaatggagttcgttcctgaagaaggcaagcaccttcacgaggattgctccactttgattttgcctgctctgtcgattggcaatgtggggcagctagttgcagatcttttgatttcatcaatgggttctgagagagttgggtatttggatgatcctaacgttttgcccgtgttggcca

SEQ ID NO: 11345 - DNA, 269 bp, Glycine max
  unsure (1)..(269): unsure at all n locations; Clone ID: 701152366H1
cttctaagaaaacaacagaagagtagttatctttctttttcttcaatttcaccacctattcctaagtgcattgaacctgtanaaatgaaattatcttaaagttgaacanngacctagatttaaactctgaaaaactgactcagccttcgtctaggtcttntaatgccgtatgtagtgggaacttcgatttttanctaatattatanatatcatcttcccaaccctcaatcaacagaaanatatgcattctaaaaaaaaaaaactgggaa

SEQ ID NO: 11346 - DNA, 254 bp, Glycine max
  unsure (1)..(254): unsure at all n locations; Clone ID: 701152367H1
ggggaaccctaattctgcgaggtgagtgaaaatggcggtacccttgctctccaagaagatcgtgaagaagcgcgtcaagaagtttatacgcccncagagtgatcgcaagatctccgtcaagccaagctggcgcagacccaagggtattgattctcgtgtcaggagaaagttcaaaggatgcactttgatgcccaacattggttatggctcagacaagaaaacccgccattatctaccaaatggtttcaagaaat

SEQ ID NO: 11347 - DNA, 271 bp, Glycine max
  unsure (1)..(271): unsure at all n locations; Clone ID: 701152369H1
gatcacccaggatttttattctatcatcttgccatggtagaacaccagatcccaaagaaaagaaagatgatcataagatgggagaaggaaagctgagcttgttgaaatggaaaatgttaaacgacattgagaaggtagggaagagggtgaagcagaatttgagtccacagcaaaagcaaaagggtgattggaaagacttgttgctgatgagtatancgtttgcngtttatggtacatancccagatgcnantttgggcctattttgcnggc

SEQ ID NO: 11348 - DNA, 251 bp, Glycine max
  unsure (1)..(251): unsure at all n locations; Clone ID: 701152370H1
ggggccacgaaacgacacctctctgcgcttaaaacgactgcggcccacgatcgcgttcttcagttgaggcatgttattcgctgctcactcctnnnnnnnnnnnnnnnnnnnnnnnnnnnnnnnnnnnnnnnnnnnnnnnnnnnnnnnnnnnnnnnnnnnnnnnnnnnnnnnnnnnnnnnnnnnnnnnnnnnnnnnngaatggaacaatcggttttggatgatataatcaatcgcctcctcgaagttcgtac

SEQ ID NO: 11349 - DNA, 245 bp, Glycine max
  unsure (1)..(245): unsure at all n locations; Clone ID: 701152371H1
ggcatcaattcaaaatatatcatcaattataagcatgggtttgtggaacacaacgaatgcagtgtcttgccgctttcacaagtttggtgatgaccaaaagaatctggtcttccaaggtgatgccacgtcttcttccaggggcatagaactcacaaagttagacggtggaggaaaaccagtgggtggcantntgggganatgtnaaaccttcnccagtgcnctttngggaaanctcaaagnggccc

SEQ ID NO: 11350 - DNA, 246 bp, Glycine max
  Clone ID: 701152372H1
tacaccacttgcgggtgcgtccatcgtgaaagacaacttcgttagggctttagcaggtggaaccaattggggtattgggtcttcatagcatatgtataggtgggagtgtaggcatttgtgttgactgagggaggtcatgcatggcatatgcatccgatctgattttgttaattttcatgtaatggttctgttttggtaccactggtaccctatctaatatatttgatctttggccgattaaaagaa

SEQ ID NO: 11351 - DNA, 248 bp, Glycine max
  unsure (1)..(248): unsure at all n locations; Clone ID: 701152374H1
ggatgcgaacgtaaccaggctctggttttgcggttagggtagctctttctactcaaaacaaaacaaaacatcaatttctgtttcagttcgcggagatcaatatttgtcgctgaggtcgatcgtcgntaaaaggcaatgtttttgtgggattggttttatgggattctagcgtcgcttggcctgtggcagaaggaggccaagatcttattcttgggcctcgataacgctggcaaaaccacttgcttcaa

SEQ ID NO: 11352 - DNA, 252 bp, Glycine max
  unsure (1)..(252): unsure at all n locations; Clone ID: 701152375H1
gatcgaagcaaaaaatgaaaacccaaagtgcttctgctcctctgtctttttctctctcttgctatccttttggctagtngcactgctgcaagtgcaactccaagaagcgcagtgccaagccaccatgnttcaacattcaacagaagcctttttccttccacttttctctttggaattggttcttctgcttaccaggcagaaggagcagcaagtgtagatgggagaggaccaagcatatgggacacctacatt

SEQ ID NO: 11353 - DNA, 229 bp, Glycine max
  unsure (1)..(229): unsure at all n locations; Clone ID: 701152376H1
ggaaaaaatgaggaacttgaagtattatctcaagnnagaagaagagagacaacaaaaattgcatgaggaggaggaagctcggaaacgtgaagatgctgaaaggaaaaggaaggaagaagaggaacgcttgcggaaattggaggagatagctgaaaagcaggggcagagagagagggaacttgaagaaaaagagaaacaaaggagagaagcttgttgggtagantgctgc

SEQ ID NO: 11354 - DNA, 249 bp, Glycine max
  Clone ID: 701152377H1
gatatcaataagattcgtgacattctgccgcacaggtttccatttcttctagtggatagagtgattgagcacaatcctggagtttctgcagtggccataaagaatgtgacaataaatgacaacttttttcctgggcatttccagaaagaccaatcatgcctggtgttctcatggtttaggcaatcgcacaagttggtggctggttatgttgcagcctgaagttggaggttctcgtgagaatttctcttt

SEQ ID NO: 11355 - DNA, 251 bp, Glycine max
  unsure (1)..(251): unsure at all n locations; Clone ID: 701152379H1
tcatttagttttcagtaaaattaaagcatcaattcaacatgattatcttattggatgctcacttaacaaaagttactagatactctctcaaactagtaatcattcaagaacgaattgttatagattgttttgacaaaagaaaaagattaatataggagaattgtaacccacaaacagaacgaaatgataatttcagtacctagcaaaactggcggagcttncgttatatcatcaacnatctaaacgagata

SEQ ID NO: 11356 - DNA, 260 bp, Glycine max
  Clone ID: 701152380H1
ggggttccctttgtttcacctggtgataaatcaggttattatattgagcggtcagatgagcctgagtttcttgctggtagacaagctagaatcatttacaaaggaaagcatattggcacttttggcattgttcatcctgaggtattaaacaactttgacattcccgatccctgctcctttgttgaacttaacatcgaaagtttcctataaagatctgtatcagttggtaaccccatttgtcccattcgcccttttgaata

SEQ ID NO: 11357 - DNA, 250 bp, Glycine max
  unsure (1)..(250): unsure at all n locations; Clone ID: 701152383H1
gacactaaaaacttttcaagacaagatatcgttagtttacttattggttctaactcctctctccctctacattaacttacattctatgtatgcgctggcttgcttctctggtactcnnacatgtgtgcttctttctccagcacttgcaggttagttggaagcagattgggagcatttaagaatcagaatgaaagttgcgttacaagtcccnaaagctcgaagctttngcanggncccggtnccccccncg

SEQ ID NO: 11358 - DNA, 251 bp, Glycine max
  unsure (1)..(251): unsure at all n locations; Clone ID: 701152385H1
ggggggcgcttgttctagctgacagaggaatttgtcttattgatgagtttgacaagatgaatgaccaggatagggtgagcatccatgaagccatggagcagcagagtataagcatatcaaaagctggaattgttacatctcttcaggcacgctgttctgttattgctgcggcaaatcctgttggtggaagatatgattcctcaaaaacattctctcaaaatgttgattgacagatccattatttcncgttt

SEQ ID NO: 11359 - DNA, 237 bp, Glycine max
  unsure (1)..(237): unsure at all n locations; Clone ID: 701152386H1
gacgtggattgattacaagatgccaacgtctaaacctcttttccccaaagagaagaaaacataatagatatctcattctcatcttcatctgcatctgcccatgtttcttgtttctgtctgcaattttcaattccaactctctctcacatgcaattctccatccaacaaaagtttctcatcatttctgtttcccataggcattattaaaatactgaattnggnaaattccttccncaa

SEQ ID NO: 11360 - DNA, 250 bp, Glycine max
  unsure (1)..(250): unsure at all n locations; Clone ID: 701152387H1
ggagttgagaggatcgtgagaggggcagtagccgagattccgtgagttgcaaaaatgaagacgattctttccaccgagaccatgaacatcccggacggcgtgagcatcaaagttcatgccaaggtcatcgaagttgagggcccccgcggaaaantggtgcgagacttcaagcatttgaatctcgattttcagctcattactgacgaaaacggtaaaagaaagctgaaaatcgacgcgtggtttggttctc

SEQ ID NO: 11361 - DNA, 247 bp, Glycine max
  unsure (1)..(247): unsure at all n locations; Clone ID: 701152389H1
gagggtacaatacaaacacaaagtcagaaacacaaatctgtgtatagtggagtagtagggtttttgcgtttgagagagaagaagcatgagcaggagtttgggaattccggtgaagctgctccacgaggcttcggggcacgtggtgacggtggagctcaagagcggagaactctacagaggaagcatgatcgagtgcgaggacaactggaactgtcaactcgagagcntcacctacatgccagggtgg

SEQ ID NO: 11362 - DNA, 252 bp, Glycine max
  Clone ID: 701152390H1
gacaccaacaccaaaacaaacccactaagatgggcttcctttgtatccttcctagtgctgcttcttgcagcccttatcctcatgcctcaagggcttgctacttactacaaaccaattaagaagccaccagtgtacaagcctccagtgtacaagccaccagtgtacaaaccaccggtttataagccaaaaccaccggtttacaagccgaaaccaccggtttacaagccaccatataagaagccaccataccag

SEQ ID NO: 11363 - DNA, 188 bp, Glycine max
  unsure (1)..(188): unsure at all n locations; Clone ID: 701152392H1
tatactcagacacctgaatacgaacaccctctgtgctgcgcagccctaggcccagtgccgggcccagggaggggaaataatcctctggcaaggcaatgtgatcattttcccttccttccgctgatccagccccaaggtctagacaggaaanggcacgcagagcaggaaggagggctccgtgtgagcga

SEQ ID NO: 11364 - DNA, 232 bp, Glycine max
  unsure (1)..(232): unsure at all n locations; Clone ID: 701152393H1
ggttntgatttnatgantgctgctacanaagtctcacttccaatgatcatctgnaattacatangatttatagggtcatcaagaactcttcagcatcncaannggtgacntataatcnaaangcaagggacagacacanagaagttgttatcttgaatcagaaaacatgatgctaagangctcttcaacaccagttcttggatccctcctctctnccttcacagatagccta

SEQ ID NO: 11365 - DNA, 231 bp, Glycine max
  unsure (1)..(231): unsure at all n locations; Clone ID: 701152394H1
anatcaccagaaattgtangaagatggtagaacgttgnncgagtccgattgtgttgctctgtctcttctcattttctgcacttactctagctttttcgccatgccccctcactgggttaccgctggtgagaaatatcagtgagattcctcaggataactacggtagggctggtctctctcacatgactgttgtaggtccattgttgcatggatgaagaggtgaagtctggc

SEQ ID NO: 11366 - DNA, 255 bp, Glycine max
  Clone ID: 701152396H1
ggagagaagttattagggtttttgagtgcggcggtccaaacactcttctctgcagcttttgcctacaactcccttcaccatggctgaacaaaccgaggaagcttttctgaagcaaccaaaagtgtttctcagcacaaagaagactgggaagggaaagagacctggaaaaggtgggaacgcttttggaagtccattgggcttggatttaagactccccagggaagccatcgaaggaacctatattgacaagaatgc

SEQ ID NO: 11367 - DNA, 261 bp, Glycine max
  Clone ID: 701152401H1
ggagttctgacgtttctatattcacttcctctgaactttagccatatccctcatcaagttagttttcacttagtatatatttcattgatacaattaccctaacactgttttggatagccatggaacacaaagtagccacaacaactgaaggacaatccataagatgtaaagcggcaatttgtcgcaaagcaggtgaaccactgtgtattgaggagatcattgtggcgccaccaatgcctggtgaagctcgcattcgtatta

SEQ ID NO: 11368 - DNA, 249 bp, Glycine max
  unsure (1)..(249): unsure at all n locations; Clone ID: 701152402H1
ggagtttgcattttgtagtcactagtcacaatttgttggaggagaagagatggtttggccaattaggtccagaataagttctcttctctgttctaaggcacctttagttggttcatacatctatgactcatgtgggtgnttacgcttttctgctccaaccagctcctccataacaaggcattggccaaaaattatggattgggtacaaatggaccgttgccgtgcagcagcatcgttaccttcgatcaa

SEQ ID NO: 11369 - DNA, 257 bp, Glycine max
  Clone ID: 701152403H1
ggatcgaagtggagcttccatttcatagccggcggtgaagatagatagttagcagacttggctgaccctgagcaggaggaataagaataagatgcctccttatgattgtatgtttctgtttaagccccatataaggaaggaagctgtcatggatttagttgtgagggtgggaaagcatgtgtgcagaagaaatggggttgtcactgatatcaagagtctcggaaaagttcagttgggctatggtgtgaaaaagctag

SEQ ID NO: 11370 - DNA, 127 bp, Glycine max
  Clone ID: 701152404H1
aggagatcgcacttaacacatcacacagcaagagaaagagtaatagaatcgtggttcgtttgcagaagaagaggttaagagaaggagtgaccgaagcgaagatgttaccaacagcttccaaaggacg

SEQ ID NO: 11371 - DNA, 237 bp, Glycine max
  unsure (1)..(237): unsure at all n locations; Clone ID: 701152406H1
ggtggcagttgtgtgacacagaaattaagctagagcttcatagtttcttcttcttttctcaccttccttctctcccttcagacaaagggacaaaaaatcnnnnnnnnnnnnnnnnnnnnnnnnnttccaaaaccatgtcccacagtcatctaagtttcgcctttgggattctaggtaacattgcctccttcgtgtgctttctggcaccactaccaacattttatagagtttgtaaga

SEQ ID NO: 11372 - DNA, 241 bp, Glycine max
  Clone ID: 701152407H1
aacctgattttgtgttataattgatatagttgtcagggagagggggaagctttgtccaaattacattttcaagtgatatatagccattgattatgctaaaattcaaccagcatgtaattgtctagccgtacatgcatgatgactttcttgggattgtctggctgtatacttgcacattggctcagtattagtgttatgaagttactaagttgtatacttggattaaattatttactaatgt

SEQ ID NO: 11373 - DNA, 239 bp, Glycine max
  Clone ID: 701152409H1
tatgctttatataagtataaatattatggttagaatttacagaataaccatgcccaagtgagtcaacatatgcacttgaaaaaatttatttttgatattcattattttagtaagtagttgtgattccatgaaacacttgaaaacattgccaaagattactactaacctaatccttcgctacctatatatgaaggaaatgcatttgggaaccaaatctatgtatgctcaagaaaacattg

SEQ ID NO: 11374 - DNA, 239 bp, Glycine max
  unsure (1)..(239): unsure at all n locations; Clone ID: 701152410H1
cgaaatcagagatttaaattgtggcttagttactttgagatatatggtggaaaactttttgatcttcttagtgatagaaagaaactctgcatgagagaagatggacggcagcaagtgtgtattgtaggactgcaagaatttgaagtttctgatgtacaanttgtcaaagaattcattgaaaaggggaatgcagcaagaagtacagggtcaaccggtgcaaatgaggagtcctccagatc

SEQ ID NO: 11375 - DNA, 238 bp, Glycine max
  unsure (1)..(238): unsure at all n locations; Clone ID: 701152411H1
gatgtttccaatgttcaagtttgtgaatctcccaagtctgaggactcccaagagagcaattgcaagagctccatcattaaggaacgtagagggtgctacaagagaagaagaactgaacaaacatgggagaaggaatctgaagctccaattgatganggccatcagtggagaaagtatggccaaaaggagatcctgagtgccaaattcccanngaactactatagatgcactcacaatt

SEQ ID NO: 11376 - DNA, 240 bp, Glycine max
  unsure (1)..(240): unsure at all n locations; Clone ID: 701152412H1
aaaaacaagtacgtgcaaacgtatagtgaaggagctgcattcttatgagaaggaagttgagagagaagctgccaaaacagctgatatgaaggaaaaaggagccgatccctatgatctcaagcaacaggaaaatgtcttggctgagtctaggatgatgattcctgactgccgcaagcgccttgaggccgctttggcagacttgaaaggattattggctganttggaggagtcggatgagaa

SEQ ID NO: 11377 - DNA, 242 bp, Glycine max
  Clone ID: 701152413H1
gagaaaaggaaggatttgcccttcaatgatcatcagaaagcatggcaacaattgcgaaggggacgatatgttgaattcaatttggtatatgataggggtacaacatttggactgaaaactggagggagaatagagagtatacttgtttctctcccactgactgctcggtgggaatacgatcataaaccggaagaaggaagcgaagaatggaaactcttggacgcatgcatcaaccccaagga

SEQ ID NO: 11378 - DNA, 247 bp, Glycine max
  unsure (1)..(247): unsure at all n locations; Clone ID: 701152417H1
ggattttcttgtgggtagggggtttctcctctctttctctgcagtttgatggnncgggaaggnnnntncaacgccggatcttgctactactccgttctcgggattcgtagggatgcctccttctctgatattcgcactgcctaccgcaaactcgctatgaggtggcacccggacaagtgggctctgaatcccgcaaccgccggcgaaccaagcgccggtttcagcaaatccaagaagcctactcagt

SEQ ID NO: 11379 - DNA, 249 bp, Glycine max
  Clone ID: 701152418H1
ggggcagataggaaccctaaattgcagtttgacctagagaggccgagcgagagagcgagggagcatggaggagggaaaattgagagagctgaagcaattcatagagatatgcaagtccaatccctcacttctccacaatccatctctttcattcttcaagacttatcttctcagcctcggtgctcgcatccctccccaacccaaaacggaaccaggtgattttgatgacaagtcagatcctcctttatc

SEQ ID NO: 11380 - DNA, 247 bp, Glycine max
  Clone ID: 701152419H1
gaccacaccgagccgcagaaaaagaaaaaagcgatcatagtttcacttcggccttatccagtttagggtttcggttctctaccctatctttcacgtatcgaaaccttaaatttacgatcaggtctgagcaatctggttggtagaacctttggtcttagtgagtcaagttttatgtctgaattagacgatcaaattcctactgccttcgatccttttgctgatgcaaatgctgatgactcgggtgctg

SEQ ID NO: 11381 - DNA, 218 bp, Glycine max
  Clone ID: 701152421H1
ggcacacagttataacagctctagagaattatcataccctttaagatgaaaccgtacctacgtccaatattcctattattccttatccttctcgaccaatccacttcggcgagtgcttctaatagtaggtttatagaattcttttcaaaattaaagaattcttttaatcctaagtctgaagaactaaaatcaaaagatataaagaagctcccgagcgt

SEQ ID NO: 11382 - DNA, 235 bp, Glycine max
  unsure (1)..(235): unsure at all n locations; Clone ID: 701152423H1
cgaaatcagagatttaaatngtggctnanttacttngagatatatggtggaaaactttttgatcttcttagtgatagaaagaaactctgcatgagagaagatggacggcagcaagtgtgtattgtaggactgcaagaatttgaagtttctgatgtacaaattgtcaaagaattcattgaaaaggggaatgcagcaagaagtacagggtcaaccggtgcaaatgaggagtcctcca

SEQ ID NO: 11383 - DNA, 241 bp, Glycine max
  Clone ID: 701152424H1
ggtgaggcgagggtaaggtcgcgttgtgttgcgtcgtgtcgtgcgctgttcctctgtttctcgtttttgtgttcagaccgaaccctagctccgcatcgcaaccatgtcgaccaagcaaggtggaaaagctaagcctttgaagaaacccaagtctgataagaaggattacgacgagattgatgtggctaacattcagaagaaaaaggaagaggagaaggcgctaaaggagttgaaagccaag

SEQ ID NO: 11384 - DNA, 237 bp, Glycine max
  Clone ID: 701152425H1
gatcgcaagctcgatcattttcctatacttcgttttttatgagtctgatctttttgttctccgacttatgcatcttcttgtgctaaaacaaaaggtctttggtctaatttcttcgagctgagaagatcgatgcacttcacgagggattcaaaagcactgacacatacatgcttacaaacaaagttttttttccttgcttcaagatctttttcaatatttcgctctccagctcgtttt

SEQ ID NO: 11385 - DNA, 235 bp, Glycine max
  unsure (1)..(235): unsure at all n locations; Clone ID: 701152428H1
aaaganacccggaaagggtgggaaccgcttttggaaatccattgggcttggatttaagactcccagggaagccatcgaaggaacctacattgacaagaagtgccccttcactggcaatgtttccatccgtggccgtatcttggctggaacatgtcacagtgctaagatgaacaggactattattgttaggaggaattatctccattttatcaagaagtaccagaggtacgagaaa

SEQ ID NO: 11386 - DNA, 244 bp, Glycine max
  Clone ID: 701152429H1
ggttgcagagagacatctattgacactgtaatggtgccaaattaagtgctcatttcttcttgtagtgattattagaggatttgatcgttaacaatttctcttcttatttgtttaatgtttttggtttcttaggtgaattattcaagaggacccgacaatcccacaaagcagaaagagaggttgttatgttatggcgggcaaaggtgttggttcagtggctaaggcagtagcagaatatcagtat

SEQ ID NO: 11387 - DNA, 246 bp, Glycine max
  Clone ID: 701152431H1
ggggtgggtaggatatgatattttggtccttgatcgaatcacaaggataggaatggaatcagaagaagtgatgagcgaggtgcacctgggttgcccagccggtttctccggaccctatatttcccttttctctttctctacgaatctccaattcgaccaagatggtgaccttcttctccctcgacgacgcaccgctatgttcgaagcaaacgcacaacattcatttagtgtcagaatccagcataa

SEQ ID NO: 11388 - DNA, 248 bp, Glycine max
  unsure (1)..(248): unsure at all n locations; Clone ID: 701152432H1
tataagacccaacttaaactagagagttgttatgggattttctaaaattaatctatttttgttttattatgtgacaagtgaaagtgaaatgcgcaggtatatctcaacttatgctaatttacattgatatatccatttttttttngtaataactcttgtttctcttttgagcttccaaatattgaaactatgctcaaattttataaagcttaaattccctcaaagtcaagatagttattatctccact

SEQ ID NO: 11389 - DNA, 251 bp, Glycine max
  Clone ID: 701152433H1
gagccgtgctacatcaactttttctctataactgaataatcaaatcaacaatagaagctttatataatggggaagaggctcaagatgttggaggtgctaggacataatatcgacatattaaccaaattaagaccaagaatgaaccaatcttaggtaaattaagaccaagaatgaaccaatcctaggtaaattacacatgttatgggcttgcatgacaacatattgtccacacagtctattttttataggta

SEQ ID NO: 11390 - DNA, 248 bp, Glycine max
  Clone ID: 701152434H1
gacgacaacagaagaataatcaaatttctcagatctatccgacgtcgtcgcagatccaccaaccgttatggctgccttcagcggtgatgaaacggctccgtttttcggcttcctcggagccgcagctgccctcgtcttctcctgtatgggagctgcctatggcacagcaaagagtggtgtgggcgtggcttccatgggtgtgatgagacctgagctggtgatgaagtctattgtccctgttgtcatgg

SEQ ID NO: 11391 - DNA, 242 bp, Glycine max
  unsure (1)..(242): unsure at all n locations; Clone ID: 701152435H1
gacggcactcgttttcgttctcgttctggtttatagatctttgcgaaggaggtttacagcgctcaaccaaagatgcagaacgaggaaggacagatcactgagctttacattcctaggaagtgctccgccacaaacagattgattaccgctaaggaccatgcttcggttcagatcaacattgggcatgtggatganaatggcgtctacaatggccattctccacttttgccctctgcggattc

SEQ ID NO: 11392 - DNA, 238 bp, Glycine max; identical to SEQ ID NO: 8719
  Clone ID: 701152436H1

SEQ ID NO: 11393 - DNA, 236 bp, Glycine max
  Clone ID: 701152437H1
ggaggcagacataacacagatccgtcttgaacttctctgtgttctgaaacagcaacaatggcaaaaaccatgactatgtggtttctgttggtcactctttccttcgtttatgctgctgccactgctaatactcaaatcaaagttactaacaaccctgcggacaagttggtagttgcgattaacgaaaacagaactgctcacaaggtgtcagccttaacggacaacccggggcttgc

SEQ ID NO: 11394 - DNA, 233 bp, Glycine max
  unsure (1)..(233): unsure at all n locations; Clone ID: 701152438H1
acaatattccattttgatatgtaaatgtaaatgtgagtttcttagaaaatgttttcgctatagttcttaattagatattatttttccatgtgctatgcaaaaatggtttaaggaaaagttcttgaagcatctcttcgtgtgcatatcacatcatgtcaataaacacaacttccaatattctatagtggtcactcttcattttgacgtnatgtnatcatanccaaatattttcc

SEQ ID NO: 11395 - DNA, 239 bp, Glycine max
  unsure (1)..(239): unsure at all n locations; Clone ID: 701152445H1
ggaagagggttgagttcagagttgaaacttgagagagtgtcgttgattccaatttacgacggaggagtgaggaatcacaatctccaccggcgaaacctgtaactgttggcgacgctcaacactcgcactacgccgatagtgatggagagtgcttttgcanccgcctctgcgattactgaccagaggcagaagatagagcagtataagcaaatacttgctgctgtcatttcatctaatga

SEQ ID NO: 11396 - DNA, 251 bp, Glycine max
  unsure (1)..(251): unsure at all n locations; Clone ID: 701152446H1
gatccaaacagttggtttgaaattgaaacaatacactagaacccttcaaaacttccacacataaataaatgntttgggacttgtgaaaacttcccatcatttagcttctcacacaagaattttgaacttcactctatcatggaggaaggggtggaagcagatgaagtggtaaggtcattgagcagcttgaggatgaacatagggtctttgagcaggaggagttgggtctcagaaactgttccagagatgtg

SEQ ID NO: 11397 - DNA, 253 bp, Glycine max
  Clone ID: 701152447H1
gatccacaacaagaaactacttctcaattcagttaacacaccaaccccacatccaaagcttcagttcaatatggcaaccttgtcaagttttgctcctttggccattctaagtttagttctagtaattagtgccattgtctttgaggctgaagctaggccaaggacattctttgtatttggagattcacttgttgataatggaaacaacaattacttggctaccacggcacgtgccgatgctcccccttatggg

SEQ ID NO: 11398 - DNA, 260 bp, Glycine max
  unsure (1)..(260): unsure at all n locations; Clone ID: 701152448H1
ggggttaaagaaaaagaagaataaaaattagggcgaacgggtcataggtgtgaagtgaaagagagattctgcgtgcaggaagagcgaacnngntgagtgtggcaatggcggaggagcaaggtgaattcaggatttacaattccatgactcagcagaaagagatcttcaaaaccaaagtccccggcaaggtttccatgtacgtttgcggagtcactgcctacgacttcagccatctcggtcacgctcgcgctgcggtttct

SEQ ID NO: 11399 - DNA, 244 bp, Glycine max
  Clone ID: 701152449H1
ggcacaagtgagtttgttgatcgagataactagaaacagtgtgatgaaaatgaaggtccttgttttcttcgttgctacaattttggtagcatggcaatgccatgcgtacgatatgttccctctccgaatgaacactggctatggtgcccgtactccggaggtgaaatgcgcaagttggaggcttgctgtggaagcacacaacatctttggctttgagaccatcctgaagagtgcgttgaagcaa

SEQ ID NO: 11400 - DNA, 242 bp, Glycine max
  unsure (1)..(242): unsure at all n locations; Clone ID: 701152450H1
gannccntcanatatntcccttctgagctttgattagtgtggcctagttgttgctttctcgatgagaaaggcttcttccactatgcattgcgcacttctgngcttttgggttcccttgttgctgcttgctagcttcagctatgctccttctgtttcggccacaactgaaatttcagggaatgaagtgaacacagatgggaagnnnntaaatgaagagttagcaaaaccaagtctanaaggnt

SEQ ID NO: 11401 - DNA, 237 bp, Glycine max
  Clone ID: 701152451H1
atattgcaattattataaaagttatttttaatagtggactataaaaatgaggcttttatttatatttttaaggcacttattgattaatttcaagaggaaatccacaatgctataattcttaaattattttttatgaaggaaaatgtttttctatatatgtgtgtgtgcaagaaaatcaggtagtcactatgtctgaaaaaaagtagaagtcaatagtatagataatgtgatgtttct

SEQ ID NO: 11402 - DNA, 235 bp, Glycine max
  Clone ID: 701152452H1
ggtgggaagaacgaagcagaagaagcatctcagaacagaaccaccgaacccactcagaagcaaatccgaaaactcctcatataatagtactggtattcagctgttcatgacaaaagcctgaaccgatcatgtcagaaggtgcagaaattgatgagcgtgtggaccttgacgaggaaaattatatggaagagatggatgatgatgttgaagaacaaatagatgatgatggagtgga

SEQ ID NO: 11403 - DNA, 232 bp, Glycine max
  Clone ID: 701152453H1
gatctacgatcatacaaacctttattctaagttctgatggctctgcgatcattctcttacgatgtgttcctcagcttccgaggggaagatactcgttatggtttcactggctatctctacaatgtccttcgggaaaggggaattcacaccttcattgatgacgacgagccccaggaaggggacgaaatcacgacaacacttgaggcggctattgagaagtccaagattttca

SEQ ID NO: 11404 - DNA, 233 bp, Glycine max
  unsure (1)..(233): unsure at all n locations; Clone ID: 701152454H1
ggtgagacgagggtaaggtcgcgttgtgttgcgtcgtgtcgtgcgctgttcctctgtctgtcgtttttgttttcagaccaaaccctagctccgcatcgcaaccatgtcgaccaagcaaggtggaaaagctaagcctttgaagaaacccaagtctgataagaaggattacgacgaggttgacatggctaacattcagaagaaaaaggaagatnnccaaggcgctaaaggagttg

SEQ ID NO: 11405 - DNA, 190 bp, Glycine max
  unsure (1)..(190): unsure at all n locations; Clone ID: 701152455H1
aatttagttgatgtggcaataacnctgactaaantatgataacgatgagacaaaaaattaagcatttggtctttttacatatgatactgctttagaattagctgtgttaaaagtgaaagttttactcctttactacctttattaatacaaaatggttcatgaagttacatttttctaactacaccagtaa

SEQ ID NO: 11406 - DNA, 222 bp, Glycine max
  Clone ID: 701152458H1
atttggatctgaaaagagaagatggggggaggaatggaagcaaacaagaacaagttcatagaggattggggcactgccagagagaatctggagttcaatttccgttggactcgccgcaaccttgctcttgttggcatcttcggcatcgctattcccgtcctcgtctacaagggcatcgtccgtgaattccatatgcaagatgaagataatggtcggccgtac

SEQ ID NO: 11407 - DNA, 231 bp, Glycine max
  unsure (1)..(231): unsure at all n locations; Clone ID: 701152459H1
ggcaggcgaaagagaagatggccaccgttccagggcagctcgtgtgggagatcgtgaagaaaaacaactcctttttggtcaagcagttcggaagggggacccagagcgtcgaattcagcagagagagcaacaatctctacaacctcaattcgttcaagtactctggtttggcaaacaagaaaactgttacggtacanctgagggtaaatntnagnntnttttttggccaaa

SEQ ID NO: 11408 - DNA, 235 bp, Glycine max
  Clone ID: 701152460H1
gataccaaaaacaaaacaagccaagtgaaagagagaagaaaagtcaaagacaatgtcagggatcattcacaagattgaggagacccttcatgtggaggccacaagaaggaggaggagcacaagggtgagcagcaccatggtggagcatacaaaggggagcatcatggtgaacacagtactgaatacaaaggagagcatcatgttggtgagcacaagccggagcacctggaggaga

SEQ ID NO: 11409 - DNA, 246 bp, Glycine max
  unsure (1)..(246): unsure at all n locations; Clone ID: 701152462H1
agaccatgcattgatgagttacagattgaccagtaaccaaataaaataattgctcaacaatatagaacaaaagaaatccatgcaatcaacaccatgtcagatttcttacatgtatagaaaaacacttgcactagactcaatcaaatatatgcccaaagtgtcttgaatatcacaatcaaactgctaattgttcaaggaatagatttaattgtctcaatcttcaatctgctagattataattanggc

SEQ ID NO: 11410 - DNA, 217 bp, Glycine max
  unsure (1)..(217): unsure at all n locations; Clone ID: 701152463H1
ccatggattcttcttcacacatggcttcgnttccggaagatatcatcaccgacgagcatttacaacagcaaactcaacccgcctcagcctctgctttcgcttccgttcctcagcgcccgccaactaagagctcttcagaaaaatatgcacctttagattggtccgtgtattttgacaaagaagacgatgttgcaattcccgaatcgaacgatgtttt

SEQ ID NO: 11411 - DNA, 246 bp, Glycine max
  Clone ID: 701152464H1
gatgcacaagtttgttgagatagctagaagcaataagatgaaaatgaaagtgcttgttttgtttgttgctacagttttggtagcatatgaatgccatggctcagactaccagaagttccctctccaaatgaaaactgggtttggtgggcaatacagcaatgaggtggcatgtgccagttggaggctggcgtggaagcaaacaacgtagtcaagtggcaaactgttcctgcagcttgcggagagtac

SEQ ID NO: 11412 - DNA, 242 bp, Glycine max
  Clone ID: 701152465H1
ttccttggttgttcttgttgctgctcctgaattggtactaaggctaatctatgatgtccatttgaatacttttgttgttgcccatttgaatgcttctgttgaggctgcactggggcatggtctccattgctactaggcatagaattcttaactttcagcacatcaagagtttcaacatacttttgaactctttttaccttcaaaattaatgtttcactgccattagaaccatgagtgcataa

SEQ ID NO: 11413 - DNA, 239 bp, Glycine max
  Clone ID: 701152466H1
ggatcgaaacaatgtaaatttgacaaggatacttttcatttgtttatttttcctggtttatcaagtaaaatgacatggagattattaatgatcatggagattattaagcatgcagatacttgtgtttcctagtgtcatttctaatttccatggcatcatttttgtgcatttagaattagcacttgttacctaagcctaataaaatatttattgcaatcatccagagcttgaggaaacta

SEQ ID NO: 11414 - DNA, 233 bp, Glycine max
  Clone ID: 701152467H1
ggcacaagtgagtttgttgatcgagataactagaaaccgtgtgatgaaaatgaaggtccttgttttcttcgttgctacaattttggtagcatggcaatgccatgcgtacgatatgttccctctccgaatgaacactggctatggtgcccgtactccggaggtgaaatgcgcaagttggaggcttgctgtggaagcacacaacatctttggcttgagaccatcctgaagagtgc

SEQ ID NO: 11415 - DNA, 233 bp, Glycine max
  Clone ID: 701152468H1
ggtagctttgttgctcttataaattctattctggttgacgcttctctcaccatccccatttcgcgttggtgcaaagcatccttcgtttcaatttctctctctcagcgctttctgcaatcgaacctttcatctccaaagggatccacaggccgaaggagaaatggggctgacattcacaaagcttttcagtcggcttttcgcgaagaaggaaatgcgaattctgatggttggtc

SEQ ID NO: 11416 - DNA, 228 bp, Glycine max
  Clone ID: 701152469H1
ggcacaagtgagtttgttgatcgagataactagaaacagtgtgatgaaaatgaaggtccttgttttcttcgttgctacaattttggtagcatggcaatgccatgcgtacgatatgttccctctccgaatgaacactggctatggtgcccgtactccggaggtgaaatgcgcaagttggaggcttgctgtggaagcacacaacatctttggcttgagaccattcctgaa

SEQ ID NO: 11417 - DNA, 229 bp, Glycine max
  unsure (1)..(229): unsure at all n locations; Clone ID: 701152470H1
gggtgaaaatcggaatcgaaaacaatggagaaagagaaaggaattgaaaactggagcgaaggntggaagacctggtagacgccggcgacgttgaatccgcgatctcactccttgaatccgtcgtcgaaaccctaaacccttccgattcggcttcgcagcttcccttggcctctgctctctccgacttggccaacctttactcctccannngcttctctctcaaagccga

SEQ ID NO: 11418 - DNA, 229 bp, Glycine max
  Clone ID: 701152471H1
ggatgcacaagtttgttgagatagctagaagcaataagatgaaaatgaaagtgcttgttttgtttgttgctacagttttggtagcatatgaatgccatggctcagactaccagaagttccctctccaaatgaaaactgggtttggtgggcaatacagcaatgaggtggcatgtgccagttggaggcttggcgtggaagcaaacaacgtagtcaagtggcaaactgttcc

SEQ ID NO: 11419 - DNA, 230 bp, Glycine max
  Clone ID: 701152472H1
ctagaatatttcttgaagcatttagacttttttttacaaaaagggaaaaggagattggcaatctaagctttgataaagatgatcagttggctgtagaatttgttactgcagctgcaaacataagggctgcttcatttggcatccctctccaaaacctttttgaagctaaaggtattgctggtaatattgtgcatgctgttgcgactacaaatgctgtgattgctgggttg

SEQ ID NO: 11420 - DNA, 236 bp, Glycine max
  unsure (1)..(236): unsure at all n locations; Clone ID: 701152473H1
ggttgtcaagcctgccgagaaaaccctagttcgcttgcagtcacacaagaggccaatcctattcatagctcgagatgggtgaagaagtgaaggtagttgttccagaatcagtgttgaagaagcgcaagagggaggaggaatgggcgttggcncagaagcaagaactcgatgctgccaagaagaagagagccgagagccgcaaacttcatcttaccacnggagctaagcngttacgc

SEQ ID NO: 11421 - DNA, 232 bp, Glycine max
  unsure (1)..(232): unsure at all n locations; Clone ID: 701152474H1
ggactgaaagaaggagacaaaaatagaggaggaaaaattagaattgtaagcacacagtttccacctaactccaccgnccaattagttggttacaatatctgccaccaacctaaatgagtcgctcattgaaagctttcaacaggcaccttacttnccctccctcttcatcaacgcacagcttcttcttcttctcatgccttcatagcttcctctcctctccctctttttccac

SEQ ID NO: 11422 - DNA, 241 bp, Glycine max
  Clone ID: 701152475H1
ggaagcaaacaaacgcgctttaaacatgattatttcattgcataatagattgaggcggtgaaagaccgaaaggctaaatctttttgaacagacgaaggaaaaacgcagtgattaagcgcagacatgtatcatccaacaagaggtggcgttcgtggcggtcgagatcgtaagtcatgttcaatttctcgctatttcccaaaatttctctttctctctcttttgggtattgaatcgtttcgga

SEQ ID NO: 11423 - DNA, 232 bp, Glycine max
  Clone ID: 701152476H1
gatggatgtcttgtaaaaacagatgtgaaaagagtgggtgcagatgcttggtcccttatgcattcgtctattcctgataaactacaaagcctatacaatgatggctacaagttggtaatttttaccaatgaatccaatattgaacgttggaagaataagaggcaagtagctgtggactcgaaaattggacgtctaaataattttattgtgaaagtgaaggttccagttcagg

SEQ ID NO: 11424 - DNA, 234 bp, Glycine max
  Clone ID: 701152477H1
gattgctctgcagttgtgagagttagaacactacacatcagttctcctattttggctgctaaaagtcctttcttctacaagcttttctcaaatggaatgagggagtcagagcagaggcatgtcaccctaagaattaatgcttctgaggaagctgctcttatggagcttctgaattttatgtatagtaataccttgagcattacttcaccacctgctttattggatgtgttgatg

SEQ ID NO: 11425 - DNA, 236 bp, Glycine max
  unsure (1)..(236): unsure at all n locations; Clone ID: 701152478H1
ggagatgagtaactctacagagagaaagccacatgcactgttgacaccattaccacttcaaggccatatcaacccattgttgagattagcaaagctgcttcatctgagaggctttcacataacctttgtccacactgaatacaacattaaacgcttgctcaactcaaggggtcctaaagcccttgatggcttcaagactttcattttgngncnntaccagttnntntccccccaaa

SEQ ID NO: 11426 - DNA, 240 bp, Glycine max
  Clone ID: 701152479H1
ggcacaagtgagtttgttgatcgagataactagaaacagtgtgatgaaaatgaaggtccttgttttcttcgttgctacaattttggtagcatggcaatgccatgcgtacgatatgttccctctccgaatgaacactggctatggtgcccgtactccggaggtgaaatgcgcaagttggaggcttgctgtggaagcacacaacatctttggctttgagaccattcctgaagagtgcgttga

SEQ ID NO: 11427 - DNA, 243 bp, Glycine max
  Clone ID: 701152480H1
gaacacttctctagctatcattgctcttcagctctcttctttccaatacctcgttcaatagctccaaggttctgagttgcaagctaacatgggtgagatagctttaccaaatggcattagcaatggcaatattaatggagtcaatggacaaagccattctcttaatggttacaggaagagttgttggtatgaagaagggattgaagaggacttaagatggtgctttgctctcaatagtatatt

SEQ ID NO: 11428 - DNA, 234 bp, Glycine max; identical to SEQ ID NO: 9128
  Clone ID: 701152482H1

SEQ ID NO: 11429 - DNA, 234 bp, Glycine max
  Clone ID: 701152483H1
catatttaaaaccaatattacctgtacataaattttgaaggacctaatgttgcagttccaacacgagcacctgagacaggtgacaaggatgaggaaggtgctggacctctgacatggtttacctggtgggccttaaaaattaattatgctgacagtgtacgtaagtccaagaaacccctgaactagtatgaattatgctatgagcaagttttacctgttgtcccaacttgctaa

SEQ ID NO: 11430 - DNA, 229 bp, Glycine max
  Clone ID: 701152484H1
gctctcgttcctgctgaagcagaagggttcctcactctcttcatctgattgaacaaaatgtacacctcgaggaagaaaattcacaaggataaggatgccgagcccactgaatttgaggagacagttggacagtacttgttcgacttggagaacaccaatcaggatctgaaaagtgacttgaaagatctctacataaaccaagctattcaaatggatgtggctggtaatc

SEQ ID NO: 11431 - DNA, 229 bp, Glycine max
  Clone ID: 701152485H1
gaacgcagccaagaaaagaaaatcctcacccattttcttcgtagccaaacactctgaaattctcagttatgtcgtggcaagcgtatgtggatgatcacctactgtgtgaaatcgaaggtaaccacctcactcacgccgctatcatcggccaagacggaagcgtttgggctcagagcaccaacttccctcagttcaaacctgaggaaataactgccatcaataatgactt

SEQ ID NO: 11432 - DNA, 226 bp, Glycine max
  Clone ID: 701152486H1
ggcacaagtgagtttgttgatcgagataactagaaaccgtgtgatgaaaatgaaggtccttgttttcttcgttgctacaattttggtagcatggcaatgccatgcgtacgatatgttccctctccgaatgaacactggctatggtgcccgtactccggaggtgaaatgcgcaagttggaggcttgctgtggaagcacacaacatctttggctttgagaccattcct

SEQ ID NO: 11433 - DNA, 232 bp, Glycine max
  unsure (1)..(232): unsure at all n locations; Clone ID: 701152487H1
gacaacacagaacaaaaacaaagaaaaaaaaacccttagccaacacaaccatcatggccacctctgctattcagcaatcagcattcactggtcaaactgctctgaagcagctcaatgagttcgtccgcaagaccggtggcgccggcaaangtcgcactaacatgcgccgcaccgtcaagagtgctcctcagagcatttggtatggccctgaccgtcccaagtacttgggtcc

SEQ ID NO: 11434 - DNA, 219 bp, Glycine max
  Clone ID: 701152488H1
gacagcatatatatcaataatctattttatactatacctacattttgataattttctttgtagttgatagccatggctacccgtggaaagcttgaggttgacattgatctcaagtccaacgcagacaagtactggcaaacccttaggaattctactgaaatattccctaaggccttcccacatgattacaaaagcattgaggttcttgagggtgatggc

SEQ ID NO: 11435 - DNA, 229 bp, Glycine max
  unsure (1)..(229): unsure at all n locations; Clone ID: 701152489H1
ggaagaaaataatacgtgcatacatagctatctatttatctatagcaagtgcgtcaagagacacgtggtaccctagctagagtgccattctgtggnnnnnnnnnnnnnnnnnnnnngcatcacatcacaatttgcattgcctcgtgtcctttcatcttctttgctctccaaaaatctcacacacacaggtatctagcaaatgggttctcaccaacaagaaccatggcta

SEQ ID NO: 11436 - DNA, 230 bp, Glycine max
  Clone ID: 701152490H1
gacctcagagcagtagatggcttccacttccatagttccattccagctcttaacaattacatgagacagagaaagggttgacggacagagaacccaccttttgttgtattgcagatccatccgctctgtccaccaggtgaatggaaggaagtggcggtggcggtgcttcaccgtctgcaccggtgaagcagtatttgcacgatttctcgaagctgtttcagtactatctg

SEQ ID NO: 11437 - DNA, 233 bp, Glycine max
  Clone ID: 701152491H1
ggaaggagccgtagcagcagcggaagcttctagcttgggcagcgaatcacaatggcgagaggattgaagaagcatttgaagaggcttaatgccccaaagcattggatgcttgacaaactgggtggtgcatttgctcctaagccctcatctggaccacacaaatccagggaatgcctgccactcatactcattttgcgaaaccggctgaagtatgctctgacaataccgtgaat

SEQ ID NO: 11438 - DNA, 199 bp, Glycine max
  Clone ID: 701152492H1
agggtggttttgatttggagtgcagctatgcgattgtacagagagccaagcagcagttattgtataagcttcgtagatttgagaaactggcggagttggatccagtggaacttgagaaaagaatgcaggatcaagaagaggacgaggatgacacatttatggaagaggaagatggtcatgatgagaaaaaccaagcatc

SEQ ID NO: 11439 - DNA, 129 bp, Glycine max
  Clone ID: 701152493H1
ttttgacatcacttgaatcatctgtaattggcattacccagttttctgctgaaccagagagcagataagaatcaaaaccatcatcaaagaaattgtccatatgaccatcttcaggtttttccatttcat

SEQ ID NO: 11440 - DNA, 237 bp, Glycine max
  unsure (1)..(237): unsure at all n locations; Clone ID: 701152494H1
ggcgtgaaggaagtgcgaacgagtgagcttggaaatggcggaggagcaagctgaattcaggatttacaattcgatgagtcagcagaaagagctcagttgcaattgattcaatccttattggaagtggagaaagaagttggaaaagttttggacgtcctaggattattgtcctctaaatcttatgccgangttctgcatcagttaaaagataaggcattgaacagagcaggtctgaca

SEQ ID NO: 11441 - DNA, 239 bp, Glycine max; identical to SEQ ID NO: 9294
  Clone ID: 701152495H1

SEQ ID NO: 11442 - DNA, 257 bp, Glycine max
  Clone ID: 701152496H1
gacaagatcccactgggaaggactttagtggcaagactctgatcaaacaagacttcaaaacgtccatactgagacaagccaattttaaaggtgcaaagttaataggtgctagcttctttgatgctgatttaacaggtgctgacctttcggatgctgatcttagaaatgcagatttttccctggcaaatgtgacaaaggcaaatttaagcaatgctaacttggaaggtgcacttgcaacaggaaacacttcttttagg

SEQ ID NO: 11443 - DNA, 261 bp, Glycine max
  unsure (1)..(261): unsure at all n locations; Clone ID: 701152502H1
ggagacacaaactcacacactttgtactctccgtcctttccttcttcgatccagatctctcttccttctccctcaaatggcttcccttctgcaatgttccaatgcccctcgtctctctttncnaatcgagctctggtacccggtacaggatctccaacccaagttcagtttccctttcaattaagggaagaagtttcccatccgttacattgcagcccagaggggtcggtttcagcttagatgtgcggcaaaaccagagat

SEQ ID NO: 11444 - DNA, 260 bp, Glycine max
  unsure (1)..(260): unsure at all n locations; Clone ID: 701152503H1
ggcacacagttatacagnttctanaganttatcataccctttaagatggaaacccgtncctacgtnnaatattcctattattccttatccttctcgaccaatccacttcggcgagtgcttctaatagtaggtttatagaattctttncaaaattaaagaattcttttaatcctaagtctgaaganctaaaatcaggngatgtaaagangctcccgagcgtngaattttngaagacgaaacatgacggagntagggattct

SEQ ID NO: 11445 - DNA, 195 bp, Glycine max
  unsure (1)..(195): unsure at all n locations; Clone ID: 701152505H1
gacaacactcatagtagagtaaccaaaaggagagtgcaataactcgttgtacattcctagtgtgtgggagagacatggctaagatgtgtgttttggtgttggttcttgctctggctgtggccacaagtgccagaaacgttcccaaccccaaggntgctggtcttaaggnccagaagantttctcagctngggggg

SEQ ID NO: 11446 - DNA, 255 bp, Glycine max
  unsure (1)..(255): unsure at all n locations; Clone ID: 701152506H1
actcgtaagtatcttagtcatgtgatgagaaatttatgtagtaacataataacatgtcaaacttcaactaacaagttttcaagctatgattatgaatttgctctcttcctttttgtttaatactttgttggttttgtttcaacatgtggtttcacagacctttataacnggatataattgtggtaagtgtcanaaagtgtnncattatagaaaagttannacaagtaaantcggggcanaaatttttttggaggg

SEQ ID NO: 11447 - DNA, 239 bp, Glycine max
  unsure (1)..(239): unsure at all n locations; Clone ID: 701152508H1
ggacgatgtatgtgantatttgtaactgatcanaagaagatagattatcggttaaatagatggtttgaaaaaccttattctacgccacccttttggnttagcataacagagacatccntcctcagtcattcgcaatgggcccgacgactccttccattcaccttccctccgncgcctcttccatcgccggctcgcgtcgcctnctctctctgcattcccgtcggctccccgnccctatt

SEQ ID NO: 11448 - DNA, 259 bp, Glycine max
  Clone ID: 701152509H1
tttaacttaaaaacaactacacaatgcttctttatttttttttatatagaagttttatttaaatttaaaaaatacttgtgcattttatttaaaacttgttaatttaatagatgtaatattaattttcacaaatgtgattaaaaaaaccacttgattaagttgattctccctataaatttattttagtttttcataccacaaataatgttattaggacatagttttgcttttcataccacttgaatttgagacttttggt

SEQ ID NO: 11449 - DNA, 248 bp, Glycine max
  unsure (1)..(248): unsure at all n locations; Clone ID: 701152511H1
gacatgtcaaacctcaagctacccatctccctctgaacactttttctcccctttcctttttttacacctttcactggtaggtcatattgccagaggattttggctataatgactgcatctgggtncagtggttgtcccacaagatgtccacagctaccttttcatcccatgggatcacgccatgcccgggttatggccttctctgtggctgggagaaataaacaagggatagcatttcgtcaagtgga

SEQ ID NO: 11450 - DNA, 227 bp, Glycine max
  Clone ID: 701152512H1
gggcacaagtttgttgagatagctagaagcaataagatgaaaatgaaagtgcttgttttgtttgttgctacagttttggtagcatatgaatgccatggctcagactaccagaagttccctctccaaatgaaaactgggtttggtgggcaatacagcaatgaggtggcatgtgccagttggaggctggcgtggaagcaaacaacgtagtcaagtggcaaactgttcct

SEQ ID NO: 11451 - DNA, 215 bp, Glycine max
  Clone ID: 701152513H1
agcgtggagacctacaagatctacatcttcaaggtcctcaagcaggttcaccccgacattggtatttccagcaaggccatgggcatcatgaacagcttcatcaacgacatcttcgagaagctcgcccaggaagcgtcgcgtttggctcgctacaacaagaagcccaccatcacctcgagggagatccagaccgccgtgcgtctcgtgctccctgg

SEQ ID NO: 11452 - DNA, 248 bp, Glycine max
  Clone ID: 701152514H1
gatgggaagactgccttctttcccaatcaagggagaggctgttacaaatttggatttcattcggaagaggaagatctctggtgacttcaacatgataatggatcagaaaatttacacatgcgaacaacctcagtgcccttacagtgaaattcaccatggttttgctgacagaaattctagggacaaccatcgattgagttgtccttatagaggcagtgcttcaacagattatggaggttcaaattttc

SEQ ID NO: 11453 - DNA, 211 bp, Glycine max
  unsure (1)..(211): unsure at all n locations; Clone ID: 701152515H1
ttcgcaaaccctaatttcggaaagatcggcgatggctgcctccaaggatcgcgagaacttcgtctacatcgccaagctcgccgaacaggccgagcgatacgaagagatggtggaatcaatgaagaacgttgcgaatctccgacgttgaactgactgtggaggagcggatttactttctgttgggtacaagaatgtgattggtgctcngaga

SEQ ID NO: 11454 - DNA, 252 bp, Glycine max
  Clone ID: 701152516H1
gcacaagtgagtttgttgatcgagataactagaaacagtgtgatgaaaatgaaggtccttgttttcttcgttgctacaattttggtagcatggcaatgccatgcgtacgatatgttccctctccgaatgaacactggctatggtgcccgtactccggaggtgaaatgcgcaagttggaggcttgctgtggaagcacacaacatctttggctttgagaccattcctgaagagtgcgttgaagcaacaaaggaa

SEQ ID NO: 11455 - DNA, 240 bp, Glycine max
  unsure (1)..(240): unsure at all n locations; Clone ID: 701152517H1
cttcccctcgcgaaacgcgcgtatcggtaactgattcgcgaccacgatcctccgctcgagctgcgccggcgcaacggcgtcgtcggatcccgaattctcatgccgtcgatgtctaactccggcaagtntccggccgangtattcaccagccgcggaggcgactagccagcgcgtggtaatcatccactgataccaaattcaatagccccaagcangatcttgatagcattgtccagaaac

SEQ ID NO: 11456 - DNA, 236 bp, Glycine max
  unsure (1)..(236): unsure at all n locations; Clone ID: 701152519H1
tgnagancaagtcatgcnttgggtggagcatacttaganacagcaactatgtctctccatgcagcttantagctccccctgttggctcactggtccgtttcattgnaatattngctttagggnacagaaccatggctttngccaagttgccancaaacgcttcatcanttcnagcagttttngcgttnggaanncnancggcgntnagggnaagctcacgattgattccttntttt

SEQ ID NO: 11457 - DNA, 186 bp, Glycine max
  unsure (1)..(186): unsure at all n locations; Clone ID: 701152520H1
ggagagagaganttcgangcagctaccggagananagatggngaaagagcnggagatcgcacttaacacatcacacagcaagagananantaanagaatcgtggntcgtntgcagaagaagannttnaganaanggantgancnaaggcgnagatgttacccaaccggcttccnaaaggacgttct

SEQ ID NO: 11458 - DNA, 233 bp, Glycine max
  unsure (1)..(233): unsure at all n locations; Clone ID: 701152521H1
ttaggtaaacatangttatatatcattattgtgataaaaccactgatgacttgtgtgatgtgtttttcttacatattgtcactgttttttttttattaatatatagccactgttgttatngtgattatcatgatgttgtattaatattnattaaaaaacatngggtangtttcaccaatttnagganngtttnntggcccggnaanaccacccaattttnngggangnccttt

SEQ ID NO: 11459 - DNA, 264 bp, Glycine max
  unsure (1)..(264): unsure at all n locations; Clone ID: 701152522H1
gacacactcatttttcttttcactcaaatcatggatttcttgcaagcacaagaaaatcagatacttgtgggtgtggccgtggccgttgtagccattgggcttggtgcagtatatctctattcatccaagaagaccaaaggttgcttgggacccagagaactttaagggcattcaaacttgttangcgtgacacagtgagccataatgtngaaaaagttcagnatttgccnctcnnaannacntncantctgggggggggcnnnc

SEQ ID NO: 11460 - DNA, 256 bp, Glycine max
  unsure (1)..(256): unsure at all n locations; Clone ID: 701152523H1
gangcactataagcannatgcagnncatctantggccgtttttgagannaggntgaaanatatggctatggcagtgcctctaangtgttgtgcagcagncatgtngcatgtacctncacggaagcaantngttgtggtggtgaaaggacttctggggactttnaanacatncttgtgcagctcatggcnnatatgtttcccaacagaacagttattcatatagattcccaacaacaaagaatggntgggaattcgg

SEQ ID NO: 11461 - DNA, 246 bp, Glycine max
  unsure (1)..(246): unsure at all n locations; Clone ID: 701152525H1
ggttcttctccatttgtctgagaaattcgtgaaggaacctcactctgttgctgcattcccccatggctctggttcagattttgcgttagggtttcttctgnactcgagtcagttttgaggctggagactgttaactactttgttacgaggaggccatggctgatctttatggagttaacgtgagacctgttgcggccagttgggagtgctagtaggaggcttatgtggatcctgcacttatacatc

SEQ ID NO: 11462 - DNA, 245 bp, Glycine max
  Clone ID: 701152526H1
catgaatgttttaacttccattgtgatgatctcgtgataaaccctacattgtgggtcctcatggctagtttcctgtaagctcttagtgcattaattattctccattttgaccaaaagaaagggtgattcccttcggaagatcattaattagacaggtgttttgttaccatgctagatttaccttgtctatcaaaactttgtgaaacttttttacacttaaaaattagtactaaaaataatgtggc

SEQ ID NO: 11463 - DNA, 246 bp, Glycine max
  unsure (1)..(246): unsure at all n locations; Clone ID: 701152527H1
ggaaacttgtgagcctgttacaattattgagacccctccaatggttattgttggtgttgtgggttatgtgaaaactccacgtggtctccgaacattgaacactgtctgggctcagcatttgagtgaggaattgaaacncaggttctacaagaactggtgcaagtccaagaagaaggccttcaccaagtactctaagcagtatgaaactgaggaggganngaaaaacattgaggcgcantggagaaa

SEQ ID NO: 11464 - DNA, 246 bp, Glycine max
  unsure (1)..(246): unsure at all n locations; Clone ID: 701152528H1
gaagaagaagaaggagcatggccatgagcatggccatgacagcagcngcagcagtgacagtgattaaactgctgcatcacctatatatttaaaaggtttatgggaccatagtagcgagggctgtgccttaannnnnnnnnnnnnnnnnnnnnnnnnnnnnnnnnnnnnnnnctttttccctatcttgtgatctatttatgagtgagaaaaacaaaagtgagaaattgtgcgtgtatctggttgcta

SEQ ID NO: 11465 - DNA, 225 bp, Glycine max
  Clone ID: 701152530H1
gggcacaagtgaatttgttgatcgagataactagaaacagtgtgatgaaaatgaaggtccttgttttcttcgttgctacaattttggtagcatggcaatgccatgcgtacgatatgttccctctccgaatgaacactggctatggtgcccgtactccggaggtgaaatgcgcaagttggaggcttgctgtagaagcacacaacatctttggctttgagaccattc

SEQ ID NO: 11466 - DNA, 244 bp, Glycine max
  unsure (1)..(244): unsure at all n locations; Clone ID: 701152532H1
ggatgaaccaaatgagaggtatttctggttctggttcgagtagcagagaagcaaggagaagaaaggcgaggtcgacgtcaccagtgaaggaccgatccaaaacctcttcatctaagttaannnnnnnnnnnnnnnnnnncaaacgaagcacctcaccctctgcnactctcctcgacgtcgatgatgacgtcactcatctttcacgattaccctagcctaaccctaacctaatcctaaccctngg

SEQ ID NO: 11467 - DNA, 256 bp, Glycine max
  Clone ID: 701152533H1
gtctcatgatgctgaagcaattgctcttctcttttctattaatcggacgtctaggatgcagctccaaaacatcatctttgagactcactgcctgcaaacagttatcagatattcttctctcaaagcgtaccattgaaaccgagtttggagatattgtccaaacgatgtagacagaatctgagttcttctcctaatattctgttagttgtgttggtcgagaagtgaatcatgtcactcgttattcagtaaggatgtc

SEQ ID NO: 11468 - DNA, 234 bp, Glycine max
  Clone ID: 701152534H1
ggaaactcaaaacgtagcattccttcaaacttgcactttgcagcctttttaacttcaacttcattgtttctgtcgccttgctttgcttttaacgttaacctgcaattgcataaactttcaataactcagtgctcacacttcaattacaagctttggtttttcacttcacgcttgaaacccaatggcagcctcagctttctccaacacattggtttctcccattctcttccatcc

SEQ ID NO: 11469 - DNA, 257 bp, Glycine max
  Clone ID: 701152535H1
aagggttagggttttacactgcgggcagcttacttcgggctccatcttcttcgatctctcaaactctatcggcgcagaaccaatcctatatcactatggggaagacacatggaatgggagctgcccgcaagctgaagtctcaccgtaggagacaaaggtgggctgacaagtcatacaaaaagtctcatcttggaaatgaatggaagaagccttttgctggttcatcccatgcaaagggtattgttcttgaaaagata

SEQ ID NO: 11470 - DNA, 251 bp, Glycine max
  unsure (1)..(251): unsure at all n locations; Clone ID: 701152536H1
ggaggcggagacgaagaagtgaagagaagagaagagaagggatttggatctgaaaagagaagatggggggaggaatggaagcaaacaagaacaagttcatagaggattggggcactgccagagagaatctggagttcatttccgttggactcgccnaaccttgctctngttggncatcttcggcatcgctattcccgtcctcgtctacaagggcatcgtccgtgaattccatatgcaagntgaagatatgg

SEQ ID NO: 11471 - DNA, 253 bp, Glycine max
  unsure (1)..(253): unsure at all n locations; Clone ID: 701152537H1
tacgatgatgttcttcaacctggttgccattttgtgccatggtgtcttggctgcggtgtggctggtgtcctttctacgcgtgtcatgcagctaagtcttcgttgtgaaactaagacaaaggacaatgtgtttgttaatgtggtgcctcaatccaatatcgagcattggcagaaaagggcatcagntgcttactaacaaactcaccaataccaggccacagtatacccccctatgtcttngatgaaagnacccc

SEQ ID NO: 11472 - DNA, 250 bp, Glycine max
  unsure (1)..(250): unsure at all n locations; Clone ID: 701152538H1
cttgactcacttgggcaggccaagcaatgctgagtaacttgttgcccccatcatttatttgtgggtgctgtgatgaaaatagaaactgagatgatatcatagcctaattatgcttccatagaaatggaagactacgaaatgaagaagcaaacaatcatggagataataagtggaagaatgacaaaggctagtgatttgaaatgaagatgatgccaccacgtgaagtggtaangtggaggatcttgtacct

SEQ ID NO: 11473 - DNA, 250 bp, Glycine max
  Clone ID: 701152539H1
ggtgcaattgaaagagagatttgatagcctcaacttcaagtaagggttttctctttgagaaaatcgtatcttacaccttttggtgaccactttgagtgagagaagagaaattaagagagatactcaaattagattcaagagagatggccatcaaccatgaaacttgggctttcattttcggtcttctaggcaacgtgatctcctttatggtgttcctcgctccattaccaactttttaccaaatctacag

SEQ ID NO: 11474 - DNA, 250 bp, Glycine max
  Clone ID: 701152540H1
ggcacaagtgagtttgttgatcgagataactagaaacagtgtgatgaaaatgaaggtccttgttttcttcgatgctacaattttggtagcatggcaatgccatgcgtacgatatgttccctctccgaatgaacactggctatggtgcccgtactccggaggtgaaatgcgcaagttgggggcttgctgtggaagcacacaacatctttggctttgagaccattcctgaagagtgcgttgaagccaacaaa

SEQ ID NO: 11475 - DNA, 248 bp, Glycine max
  Clone ID: 701152542H1
caatatacatattgcatgtatatattcaatgtacattaatttgaattcttcaactcttttggtcgttgtggggtctttatacaggcctggaaagaacatggaatataatgtagttgccagaaaaaagaattggtggaatgtgattcacatgcatgtgttgtggtccggtttgttagtacttatgtcttagctcgatctcgagatatggatgttgatttacagttgaaaatatgataataaatttaacg

SEQ ID NO: 11476 - DNA, 247 bp, Glycine max
  unsure (1)..(247): unsure at all n locations; Clone ID: 701152543H1
gacactcaaatccaattccactcccaccgaccaaaacgcgcaacacgttgtaattaaaacgacaccgaaactaatgggcgtcttcagcgaaaacccgaatccggacccggttgtgatccgccagttcgggcttcaaatctcgaatccgaattccaactnatccgcgaactcatcgaccactatccttttatctcgatggacacagaattccccggtgttgttttccgaccacacctggaccccacaa

SEQ ID NO: 11477 - DNA, 242 bp, Glycine max
  Clone ID: 701152544H1
ggtgagttcattaacatatacaaattctctgtgttgtgttgtgtacttgtgttaattgtgttgttgttgtaggaaatttaagtgaagagagaatgatgatgaagtctgctatgtgtgcattggtgcttgtggcactggttgtggttgaagtggggcccatggctgaggctgcggtgacttgcaacccaacacagttgactccttgtcttccggcaattaattcaggttctgcaccttcgagt

SEQ ID NO: 11478 - DNA, 244 bp, Glycine max
  Clone ID: 701152545H1
gaacacgcggctgccgccggaggtgaaccgcgtgctgtacgttcggaaccttcccttcaacatcacgagcgaggagatgtacgacatcttcggcaagtacggcgccattcggcagatccgcatcggcaccaacaaggacactcgcggaacggccttcatcgtctacgaggacatctacgacgccaaaaccgccgtcgaccacctctccggcttcaacgtcgccaaccgctacctcatcgttctc

SEQ ID NO: 11479 - DNA, 244 bp, Glycine max
  Clone ID: 701152546H1
gacgtacgcaactgaaaaggaaaaccctaagagatgaagagaactcctatcttgttccctctcttctttcttctttgtgccttcacctcatatctaccttcagccaccgctgatgatgatcatgtgtacgacactgacggcgataagcttcaatacggtgtcaattatttcgtgttgccagtgataagaggaaatggcggtggaatacaagtagcaaaagcaggaaacgaaacttgccctctga

SEQ ID NO: 11480 - DNA, 243 bp, Glycine max
  Clone ID: 701152547H1
ggagggtgtgaattctaaaaggaaagaacagctgagctggtcagaaaatcaatggcatcatccttgggttttgagttcctgacgaagaagccttacagtcctccatcctgggcatcccatctccaccctttacttcccacttcttctctcttgcccatcttcccatccaattcacagatggaaccttcccaatctgcccaccaataccgagctgtggatcaagcgagacgactttccggaatg

SEQ ID NO: 11481 - DNA, 243 bp, Glycine max
  Clone ID: 701152548H1
ggcacaagtgagtttgttgatcgagataactagaaacagtgtgatgaaaatgaaggtccttgttttcttcgttgctacaattttggtagcatggcaatgccatgcgtacgatatgttccctctccgaatgaacactggctatggtgcccgtactccggaggtgaaatgcgcaagttggaggcttgctgtggaagcacacaacatctttgggctttgagaccattcctgaagagtgcgttgaag

SEQ ID NO: 11482 - DNA, 250 bp, Glycine max
  unsure (1)..(250): unsure at all n locations; Clone ID: 701152549H1
catgaatgttttaacttccattgtgatgatctcgtgataaaccctacattgtgggtcctcatgggctagtttcctgtaagctcttagtgcattaattattctccattttgaccaaaagaaagggtgattcccttcggaagatcattaattagacaggtgttttgttaccatgctagatttaccttgtctatcanaactttgtgaaacttttttacacttaaaaattagtactagnaataatgtggctttt

SEQ ID NO: 11483 - DNA, 249 bp, Glycine max
  Clone ID: 701152550H1
gacctcaacattctcacattccatcaccaaagcagtgtagttttccgttgtcactgccatgggctttcaaaaaagtactattccaatatttcactctggctttgtgtctgtcttcgcattttgtgcttttgagggcaatgctcgcgctctcgaagatgctccaatgcgtgagaggcatgagcagtggatggctatacatggaaaagtctacacgcactcttatgagaaagagcagaaataccagacatt

SEQ ID NO: 11484 - DNA, 256 bp, Glycine max
  unsure (1)..(256): unsure at all n locations; Clone ID: 701152551H1
gacactttttttttctttttaactttatacattgtactgattgtagagagagagagatgatagatgcaagacgtttaggatatccaagggaaagtgaatcccaactctctcgagagccacgaaaccagaacttcgagtgactcaacctcaaaaaagctaaatcctttgatgaagaaaaagcagcagaaaaagaccgaagatttctacaanagtttcttgatccctctnanagcctttgggnntnggaggggttncc

SEQ ID NO: 11485 - DNA, 200 bp, Glycine max
  unsure (1)..(200): unsure at all n locations; Clone ID: 701152552H1
cacctacaacttgttacaacttacaaggccattcccacaatattgcatatntatagcaccccataaggcactgcacccactaccatcttaatttctccttcaattgctacttcaattctgattgcaaccacgacactatccaccttccaaacatgggcggtatcagcttgaggaaatcaaaacggaaaacgtcgatctgg

SEQ ID NO: 11486 - DNA, 269 bp, Glycine max
  unsure (1)..(269): unsure at all n locations; Clone ID: 701152554H1
ctatctcccttacttaaactaagagaagatcattgtaacaataacaagacaaaagtggttagttccctttaccgaaacgaaagagggtttctctcgaactttggcgaacgaggttacaaccatgntctggaagtntgtcttagaacgacgtagttcaaccaactttgcntttttcgttgtggctgncgttacttgctttnaaagnaatatgtgtcnntntctaaataaatcctttcacgtnctcgtgtggagattcattanctagataa

SEQ ID NO: 11487 - DNA, 227 bp, Glycine max
  unsure (1)..(227): unsure at all n locations; Clone ID: 701152556H1
gggcattggggcaangcttttaatttcctagatctcccaaacaaattgtagcataagtcccatggccaaagagactagtgttgtttatctatatcccagcaaatcacaagtttggggtgagaattttgatcataaaaaacttgtaataacaacactagctgctaatggaaagaaggaggagagtaatggagcacctaatgacacatatcctgcgtttcccgggtggt

SEQ ID NO: 11488 - DNA, 246 bp, Glycine max
  Clone ID: 701152560H1
ggcgaaactcgtcgtcgtgttcttgccgcacaccacttcgttgcgccatcttctttcaacaatcagccacagctcttctcccactttccctaacttcgaggccaccaacttctcatatttcaagacaaaaggaatggtgggtttatctcttggagaaacgcatttcatccaaggtggcattgctcaagatcttcgttgtgatggtagaaagagattgacatatcgaccaatctctgttgaaactgg

SEQ ID NO: 11489 - DNA, 220 bp, Glycine max
  unsure (1)..(220): unsure at all n locations; Clone ID: 701152561H1
ggggtttactgaanaatgaaacaaactccaaatattgagacatttttctctgttgttcagatagaatagcagaccacagtaatggggatgttgccattgattcataccaccgctacaaggaagatgtggccatgatgaaggatattggattcaatgcctacaggttctccatctcttggccaaggatactacctcgtggaaacctgcagggaggagttaa

SEQ ID NO: 11490 - DNA, 252 bp, Glycine max
  Clone ID: 701152562H1
ctatctcccttacttaaactaagagaagatcattgtaacaataacaagacaaaagtggttagttccctttaccgaaacgaaagagggtttctctcgaactttggcgacgaggttacaccatgatctggaagtatgtctataacgacgtagttcaaccaactttccctttctttttggctgtctttacttgctttaaagaatatatgtcaatttctaataaattctttcacgtctcgtgtggagattcataac

SEQ ID NO: 11491 - DNA, 261 bp, Glycine max
  Clone ID: 701152563H1
tacctgtttgttttgtaggtactgtctataaaaaacactagatgacatgcattgcataactttactgcatctgggtgacaccaaaacagatcacgcaccacaacttcatccttcaatctatgccaatgaatgtattgatcacgttcgagaagcttcatcagatgctgcatttcggtatcagctcctcttattgaagaacgtatgcacttcttgcattggtaaatttgctttatcgtggtgtaactgtcggcattgtgttcc

SEQ ID NO: 11492 - DNA, 250 bp, Glycine max
  unsure (1)..(250): unsure at all n locations; Clone ID: 701152564H1
gacacacaaacacaacaacatatggaggtgctaagggtgcaaaccatagcttccaaatccaaagatgctgccatcccagccatgtttgttagggcagagacagagcaaccaggcatcacaaccgttcaaggggtgaaccttgaggtgccaattattgattttagtgacccagatgaagggaaagtggtgcatgagattttggaggcaagtagggactgggggaatgttccaaattgtgaaccatgacntc

SEQ ID NO: 11493 - DNA, 247 bp, Glycine max
  unsure (1)..(247): unsure at all n locations; Clone ID: 701152566H1
gagagaaacaacnaganagagatgagaacaaacaagaatcaagagagagaggtgttaccacgttagtctatgaacagtcaccccgagagactganatttccagaccctcaaatcannctctctattcnctcatcatcaatcantccagttcctgntcggataggaatgggaatatatcncaggcactccnnnaaactgganaagttttctgaagatggtgnaaatgaccgtcttggtatggtttnnc

SEQ ID NO: 11494 - DNA, 251 bp, Glycine max
  Clone ID: 701152567H1
ggcagcagttgggaggaggcactgtggcagaagtcttaggagtgtaaaacagagacgcaaaatgaagacgattctatcgtccgagaccatgaatattcccgacggcgtgagcatcaaggttcacgctaaggttatcgaggttgagggccctcgtggaaaactcgtgcgagacttccaccatctgaacttggacttccaattattaccgacgatgggcggtaaaaggaagctcaagattgattcttggtttg

SEQ ID NO: 11495 - DNA, 244 bp, Glycine max
  unsure (1)..(244): unsure at all n locations; Clone ID: 701152568H1
ggttactggcagattgaaatgggagattttttcgttggaggtgtttcaacaggtgtttgtgagggtggctgtgctgctattgtggattcaggaacatctttgcttgctggtccaactcctgttgtgggctgaaatcaaccatgccattggagctgaaggagttctcagtgtagaatgtaaggaagtcgtttcctcatatgggagagttgatatggganncttggtatcaggggtgaaacanaat

SEQ ID NO: 11496 - DNA, 254 bp, Glycine max
  unsure (1)..(254): unsure at all n locations; Clone ID: 701152570H1
ggagccgccgccgcactgtggttttgcgtttctgaaagtggagagaaccctagaaaccaaactgtgctgtgcttcctacagtcatggcggacgtcatgattatgaaggagatcgaggacacgtcgcttcgtctcggcgtcgatctctccactctcgatctcgacgccattcgccntcccctaccggcgaagattgcggcatcgtccatgatgacgaggaggttnaccnggnggagantccngngtttgaanctg

SEQ ID NO: 11497 - DNA, 246 bp, Glycine max
  unsure (1)..(246): unsure at all n locations; Clone ID: 701152571H1
gatcgaagcaaaaaatgaaaacccaaagtgcttctctcctctgtctttttctctctcttgctatccttttggctagtngcactgctgcaagtgcaactccaagaagcgcagtgccaagccaccatgtttcaacattcaacagaagccttttccttccacttttctctttggaattggttcttctgcttaccnggcagaaggagcagcnagtgtagatggggagagggccaagcatatgggganact

SEQ ID NO: 11498 - DNA, 249 bp, Glycine max
  Clone ID: 701152573H1
aaagagacccggaaagggtgggaaccgcttttggaaatccattgggcttggatttaagactcccagggaagccatcgaaggaacctacattgacaagaagtgccccttcactggtaatgtttccatccgtggccgtatcttggctggaacatgtcacagtgctaagatgaacaggactattattgttaggaggaattatctccattttatcaagaagtaccagaggtacgagaaaaggcactccaacat

SEQ ID NO: 11499 - DNA, 239 bp, Glycine max
  unsure (1)..(239): unsure at all n locations; Clone ID: 701152574H1
ggcacaagtgagtttgttgatcgagataactagaaacagtgtgatgaaaatgaaggtccttgttttcttcgttgctacaattttggtagcatggcaatgccatgcgtacgatatgttccctctccgaatgaacactggctatggtgcccgtactncggaggtgaaatgcgcaagttggaggcttgctgtggaagcacacaacatctttggctttgagaccattcctgaagagtgcgttg

SEQ ID NO: 11500 - DNA, 238 bp, Glycine max
  Clone ID: 701152576H1
ggcacaagtgagtttgttgatcgagataactagaaacagtgtgatgaaaatgaaggtccttgttttcttcgttgctacaattttggtagcatggcaatgccatgcgtacgatatgttccctctccgaatgaacactggctatggtgcccgtactccggaggtgaaatgcgcaagttggaggcttgctgtggaagcacacaacatctttggctttgagaccactcctgaagagtgcgtt

SEQ ID NO: 11501 - DNA, 238 bp, Glycine max
  Clone ID: 701152577H1
gagtgctgtgcgtcacatctaatgtcttagtttctgtgatctaatctaaattttcaagcttctacaaatacccacccaatccattttcatatataatcttctaccacgagcacgtgctgcctccattccagaatgcttcgttaccttttgatgttcttcttattgggcttgggaacccgtgtggagtcacacgaggaatcgggtcattggagctgcgagtccgagtcggagatccgag

SEQ ID NO: 11502 - DNA, 247 bp, Glycine max
  unsure (1)..(247): unsure at all n locations; Clone ID: 701152578H1
tgccgatgaccgcagcttcaggtgtgtttaccaagaggaagatgagcaaaaactcaagggactaaagatcagcaaagacttgattgagattngtggtgatgctctaaaaaccaacatcaccacactaggacccttggtgctacccttttctgagcagcttctcttctttgccacccttgtgtggaggcacttatttggcagcaaaaatggtgggaattcaccctcaatgaagaagccttacattcct

SEQ ID NO: 11503 - DNA, 119 bp, Glycine max
  Clone ID: 701152579H1
tctaggctcccaaaattcacaaaagctgaatctgaaggtctaaaaaattccatagattttcttggtgtgaattaatacaccacttattatgcggaacatgctgaacctgtcagtgccga

SEQ ID NO: 11504 - DNA, 240 bp, Glycine max
  unsure (1)..(240): unsure at all n locations; Clone ID: 701152581H1
gaagcataagcaacacgagttgtaaaacgcgggaacgcaaaagcgcgcgggaggaaatgctgctgagtaccagtaaactacagttttctcggtggacttcttnaaacacttacgcnacggaaattcaattagctccaccantctgtcagcacaaatccgtagccattctctctcactncggaatcctaacctccccgccagaaagaccagattcatctctacgtcgaaatcttctncaag

SEQ ID NO: 11505 - DNA, 222 bp, Glycine max
  unsure (1)..(222): unsure at all n locations; Clone ID: 701152582H1
ggaagcaaatccatcgaaatggcagcatcgtcttcttctccttcaaaggagccacaactcaaggacgaggaggatcgggaacaagaggaacaacaccaacagccacagccagtcaaagagtgcgtccacaaaaccaaaacgatccagtttctcggacgtaccactccgatcgttttcaaaacgacaanggacnctgcccgctcctcgctatctgtaatgttt

SEQ ID NO: 11506 - DNA, 242 bp, Glycine max
  unsure (1)..(242): unsure at all n locations; Clone ID: 701152583H1
gagctagagctagctagggtttcttctgagattcgaaaggaaagtttgagattctcaaagtaacgaactaaactataactaactaactccgtttgtaatgagttgtgttggaagtgagtgatgtttgaatgaaggagaattatatatcagaaagggctttttcttgccagagtaaggcggcggcggggaaatcngaantnccccnaaatctgatttttttttaaatgaatggtaataatant

SEQ ID NO: 11507 - DNA, 243 bp, Glycine max
  unsure (1)..(243): unsure at all n locations; Clone ID: 701152584H1
gagtccaaatattactcctccaatgtcatcaaatgatcatgaggaaactgattttgcagaggatgagaagttaagaccagtacaagatgatgtcaatatactacgacataattcgcctatcaacagtgtagcacctaagaagactaaaggttctcaaaaaccacttccgnangtaacaacaatctctgaaatgatgagttactgcttcagaaaccgtgcctcatttcattcgggngggccagg

SEQ ID NO: 11508 - DNA, 241 bp, Glycine max
  unsure (1)..(241): unsure at all n locations; Clone ID: 701152586H1
ggcacaagtttgttgagatagctagaagcaataagatgaaaatgaaagtgcttgttttgtttgttgctacagttttggtagcatatgaatgccatggctcagactaccagaagttccctctccaaatgaaaactgggtttggtgggcaatacagcaatgaggtggcatgtgccagttggaggcttggcgtggaagcaaacaacgtagtcaagtggcaaactgttccctgcagttgcgggng

SEQ ID NO: 11509 - DNA, 245 bp, Glycine max
  unsure (1)..(245): unsure at all n locations; Clone ID: 701152587H1
gcatacaaaaggaatcaacacttcacttggtcttgaggctaaggggaggtaccatgattaaagtgaagactttaactgggaaagaaattgaaattgacattgaaccaactgatacaatcgaccggatcaaggaacgtgtagaagaaaaagagggattccacctgtgcagcagaggactcatatatgccggtaagccagcttgctgatgacaaaaccagctanagagtaccaacattgagggtggt

SEQ ID NO: 11510 - DNA, 237 bp, Glycine max
  unsure (1)..(237): unsure at all n locations; Clone ID: 701152588H1
gatggaggaattgaacaaaccaatggacggatcagcaaccagctggttatccgatttggaaatggatgattacaatttatttccagacgaatgtcccttgaacttgaacttgtttgatgancnaagagtttctctcacaagacattgctagtgcccttcaagaacagacacagaccttgcancaatctngtcttcagagtgcnctcaaaancngtgagcaatcatccaccgangana

SEQ ID NO: 11511 - DNA, 238 bp, Glycine max
  Clone ID: 701152589H1
tttcaagttattgtgagcaaagaaagatagtgagtgaagtaactgaagagaagaaaaaatgccgtgcctcaacctcagcaccaacgtgtccctcgaaggcgtcgacacctcttccatcctcgccgaagccacctcctccgtcgccagcataatcggcaaacccgaagcctatgtgatgattgtactgaaaggatcagtacccatagcttttggtgggaatgagcagccagcagcttat

SEQ ID NO: 11512 - DNA, 236 bp, Glycine max
  Clone ID: 701152590H1
gggtgttgctcatgtacacaggtacctgttgcttggctagtgggtaaaacaattggactctacttctcagcggaatggtgcgtcccatgcgccaagttcactccaaaactgatttctgtttacgagaagataaagcacgagctagccggaaagggagaggaagacttcgaagttgtgctaatatccagcgaccgcgaccaagcatcctttgactcctactacagcaccatgccttg

SEQ ID NO: 11513 - DNA, 236 bp, Glycine max
  unsure (1)..(236): unsure at all n locations; Clone ID: 701152591H1
gtggcaagagagattatgaaccacaggtcccttcggcatcccaatataattcgttacaaggaggtggttttgactcccacacatttagcaatagtgatggagtatgcagcagggggagagctctttgagaggatatgcagtgctggcaggttcagtgaagncgaggctagatatttctttcagcagctgatctccggtgtccatttctntcataccatgcaaatatgccacagaga

SEQ ID NO: 11514 - DNA, 240 bp, Glycine max
  Clone ID: 701152592H1
gatgcacaagtttgttgagataactagaagcaataagatgaaaatgaaagtgcttgttttgtttgttgctacagttttggtagcatatgaatgccatggctcagactaccagaagttccctctccaaatgaaaactgggtttggtgggcaatacagcaatgaggtggcatgtgccagttggaggcttggcgtggaagcaaacaacgtagtcaagtggcaaactgttcctgcagcttgcgg

SEQ ID NO: 11515 - DNA, 240 bp, Glycine max
  Clone ID: 701152593H1
gaaccacacatttttcattaccgccgtgataacacactaacaccaccacttcatcaactttacttgacaacaatattgtaaaactcaaaatctagtttcatactttttttcttcttcttgaaatgggctctccaggctgcttctcttgttcctgcttctttctcggttcttaaagagggaaagagtggtgtgtctctcaaggactccaccttgttcggtctttcattttcagaacctatc

SEQ ID NO: 11516 - DNA, 235 bp, Glycine max
  Clone ID: 701152594H1
gaatacagagtgagttgttgctccttcgccacaactctctgccaacatgggtatctccagagattctatgcacaagaggcgtgccactggtggcaagaagaaggcctggaggaaaaagagaaagtatgagcttggtcgccagcctgctaacactaagctgtcaagcaacaagacggtcaggaggatccgtgttagaggtggaaatgtgaaatggagggcattgagattggatact

SEQ ID NO: 11517 - DNA, 236 bp, Glycine max
  Clone ID: 701152595H1
ggggtttatttccatcacaggtgaaacatgccagaacaatcatactgttctttttgccttttgtgcaggtgaatagacaagtgatactccccaatccatactctagtgtctacatgctcctgtcacctgtaactgcaatttttctgcaaaggatgatgtcaagactccaaaatgccccggattgaatcatgctggctgagtactggatgaatagtaatccttatataaaagctatt

SEQ ID NO: 11518 - DNA, 109 bp, Glycine max
  unsure (1)..(109): unsure at all n locations; Clone ID: 701152596H1
tcgattttcatttttcttttctttttttttncnctttacttattactattattattcatctncgnttctttgcctnaagcttccttggatttttttcnccccggttngg

SEQ ID NO: 11519 - DNA, 248 bp, Glycine max
  Clone ID: 701152602H1
gacaactcagaaaggaaagctttgaggtttcttccgcattttagagtggtgagaggatggtgggtgttatttcgttggtaacagggatggctggtcctagtgggtttggatcagcttccactgcagaacaggttactgatggaattgatgccagcaacctcactgcaattatcacaggaggagcaagtggtataggcttggagacagcaagagtgttggttcttcgaaaggtccatgtgatcatgcag

SEQ ID NO: 11520 - DNA, 228 bp, Glycine max
  unsure (1)..(228): unsure at all n locations; Clone ID: 701152603H1
ggatgacaataatantagacacattaccagtatnctactatgaaaaaatggtgggctatgcaccttctgagctttgcggatttggtctttgccagtgaaaggatcgatgtgggtctgaaaagaggcaaatttagtcatccagcttggacaaatgagaaaactggggcaaatgaagagggtgaggatgaaggagaagcccgtgctgtgactgccattccatacagccag

SEQ ID NO: 11521 - DNA, 240 bp, Glycine max
  unsure (1)..(240): unsure at all n locations; Clone ID: 701152604H1
gaatcattgttggctcgtatacaacaattggaacaggagcgtgatgaattacgcaaagatattgaacagttatgcatgcagcaagctgggcctggctatcttgctgtggctacccgaatgcattttcaaaggacagctggattggagcaggagattgagagtttgaaaaagaagttngctgcatgcacaagagaaaatctaaatctacaagaggngctttctggggnctnacnagatttt

SEQ ID NO: 11522 - DNA, 241 bp, Glycine max
  Clone ID: 701152605H1
ggaagaaggttggttgattggtctcattgattccgaagagaaaagaaaagatgtttgagccacaacagctatacactcgcgcgaagaccgaggaattcgacctcgaatcaggagaaaccctctacccagggctgagcgtcggcgagaaccagctccgatggggtttcatccgcaaggtctacggcatcctctccgcgcagatcgtcctcaccaccctcgtctccgtcaccaccgttttcta

SEQ ID NO: 11523 - DNA, 239 bp, Glycine max
  Clone ID: 701152606H1
ggtgaggacaaaagaagaagtatcactcatataatactctgtatcatttcatttcgataatcatccatagctactgaagaaaatggcaaccatctctgctgctatcacaaccccatcgatctcccgcgcaactcttgtgcaaaagcgggtctcatcttccgttcttggtttgccagcaatgggtaaggtgggaagagtgagttgctccatggaggaaaaaccttattctgtgaaggaaa

SEQ ID NO: 11524 - DNA, 237 bp, Glycine max
  unsure (1)..(237): unsure at all n locations; Clone ID: 701152607H1
gagaaacaaggcatggaggttaacattgagaaaacgttgctaatgtgtaagagtttcatgaaagaggtaaagatatggggttgtttgaagcagacaggggtcagcctgagatacatgatggagtttggttccaaccccactcagaagaatttgctcatttctgcacagttccttcacaaagagcttcnacttagaattgcaaggagagccattgagcttcactctctccctcatggc

SEQ ID NO: 11525 - DNA, 248 bp, Glycine max
  Clone ID: 701152608H1
ttcaatataagctaatagcttctctagctaaactgataagagcttactctgctatacgagtatgtttaacattccccttgcagacttggtggataaaattggctaaacagcataagctcatcttgacgattatagaacctagtttgtacaactcctagtgaggacatgacgtgattagcctttaatggtttacttttgttggtttagacgtaccttagaggggaatatatgtatgtgtctatgtgaca

SEQ ID NO: 11526 - DNA, 266 bp, Glycine max
  Clone ID: 701152609H1
cacgctattttaggcactttttaaaaataattaaaaattataaaattttatgaatctcacttgcttatttttaaaaaatctagatgactcataattttataaatttttaaaaattcaacaaataaaaaagaataaactattataaaaagtgtgataaaatatatattactatcactcctctctatttgtaaatacacattattgatccctacaacctaatccaacttaattttcgttttaacttttatacacaaaattatactgtg

SEQ ID NO: 11527 - DNA, 237 bp, Glycine max
  Clone ID: 701152611H1
gatcaattcaaaatatatcatcaattataagcatgggtttgtggaacacaacgaatgcagtgtcttgccgctttcacaagtttggtgatgaccaaaagaatctggtcttccaaggtgatgccacgtcttcttccaggggcatagaactcacaaagttagacggtggaggaaaaccagtgggtggcagtgtggggagagtgttatactcttctccagtacacctttgggaaagctcta

SEQ ID NO: 11528 - DNA, 238 bp, Glycine max
  Clone ID: 701152612H1
gacttcaaagtggagaaaaacacacacggttggttctccatctcttttctttttcctcaaaaagaataaaagggaaacaattgagtgaggttgctactcttcaatagtaaacttacccatggaagagggcagggttgtgaatgagtacacacaagatggaactgtggatcttaaagggaaacccattctcaaatccaaaagtggtggttggaatgcttgctcctttgttgttggtatc

SEQ ID NO: 11529 - DNA, 245 bp, Glycine max
  unsure (1)..(245): unsure at all n locations; Clone ID: 701152613H1
gagaattagggctttttcagttttcctcttctgaatccaccgccactgcagcgtggacggaatcggagtnnnnnnnnnnnnnnnnnnnnnnaagtccttgaagtgctgctctagtttgaggcacaatgagattggagaaatgctggttttgctcttcaaccatataccctggacatggaatccagtttgttcgtaatgatgcaaagatttttcggttttgtagatctaaatgccacaagaacttt

SEQ ID NO: 11530 - DNA, 241 bp, Glycine max
  Clone ID: 701152614H1
gctctctgttctttctattcaaagatctgtaaatttatatattatcttttatcatatatagtattagtatagtccacttgtttaaaccacctgtgttgcatattctgaatcctatcatcttgtggctttgatgtctagagcattggaacatgattacatagggttggcagagaatccgtcaatggatggtaaaaactcatcatcactgaacttgaaggagacagagctgaggcttggcctc

SEQ ID NO: 11531 - DNA, 76 bp, Glycine max
  Clone ID: 701152615H1
gatgatgatcatgatcatgttatgatgagacgatgtgaaaaaatatatataagaaggaaggcaacttctccaattt

SEQ ID NO: 11532 - DNA, 246 bp, Glycine max
  unsure (1)..(246): unsure at all n locations; Clone ID: 701152616H1
gacacaccgtttgtnctattcttaactcaacttctgctacccactctcttcttccaagtccaaccacgcttttctctacagtcatggacaaggtcaagatcggaatcaacggatttggaagaattggccgtttggttgccagantcgctctgcaaagagacgatgtggagctcgttgccgttaacgaccctttcattaccaccgattacatgacatacatgtntaantacgacagtgttcacggnc

SEQ ID NO: 11533 - DNA, 224 bp, Glycine max
  unsure (1)..(224): unsure at all n locations; Clone ID: 701152618H1
attgtggangaacaagaaaatttctgctggcatgcttggcggagcactgctgtttgggttctttttgagttgcttgagtatcaccttcttactctggtgtgtcacattttgatactgttgcttgcagttctgttcttgtggtccaatgcccatactttcatccacaaatctccacctcgcattccggaatttcatcttccagaggagccatcctgcaagttgcg

SEQ ID NO: 11534 - DNA, 241 bp, Glycine max
  unsure (1)..(241): unsure at all n locations; Clone ID: 701152619H1
gatttgaagccagagaatgtgctgataagagaggacgggcacattatgctttcggattttgatctctgcctcaaatgcgacgtcgttccgaagctgctgagaagcanaaccagttcagaaagcagtgtcaagacccgaaggagttcagcaccatcttgtgttgcagcccccatgcactcatgtttctctgcctcaagcaagagaaaganagtggtcacaacagcattcatangggaaattt

SEQ ID NO: 11535 - DNA, 236 bp, Glycine max
  Clone ID: 701152623H1
atcagcggtgccccccaggataacaacataatgctgtggaatgctgtcatatttggtcctgatgatactccatgggatggaggcacgttcaagttgactctccagtttactgaggattatccaaataaaccaccaactgtgcgatttgtgtctcgcatgtttcatccaaatatttatgctgatggaagtatttgtttggatatactacaaaatcagtggagtcctatatatgatgt

SEQ ID NO: 11536 - DNA, 237 bp, Glycine max
  Clone ID: 701152624H1
gctaccactgttgttgtgaagaggttgaaggaggtggctgttggaaagaaggattttgagcagcttatggaggttgttgggaatcttaaacatgagaatgtggttgagctgaaggggtattactattccaaagatgagaaactcatggtctatgattactacactcaggggagtctctcggctttcttgcatggtaaaagaggagaggatagggtgcctctagattgggatactcgg

SEQ ID NO: 11537 - DNA, 237 bp, Glycine max
  unsure (1)..(237): unsure at all n locations; Clone ID: 701152625H1
tcccaacgttaaaatgtgttcattaagtgctgatatgacaaatgaatgttcacagtagcacgacacatgacngtcacntgacatggatgccacatggaggtgtgacatgacaccccaagaaagtgtcatgtcttagccttatgggtgtgtcacatgtcactttcatgtggtaccacgtagcacaatgtttttactatcatttttagtccttcaaaattttgaaattcgaattttagt

SEQ ID NO: 11538 - DNA, 237 bp, Glycine max
  Clone ID: 701152626H1
gatctaaaagtctttggatttgggttcggatctgttccaaatttccaatatatttcagagagaggcagaaaaggaagaagtaaaggagatggtgggaccagtgaggcctcagtttgtgctctttggctcttccattgttcagctcagtttttctctccaaggttggggtgctattcttgctcacttgtatgctcgcaaggccgatataattctgcgaggatactctggttggaattc

SEQ ID NO: 11539 - DNA, 216 bp, Glycine max
  unsure (1)..(216): unsure at all n locations; Clone ID: 701152627H1
tctttcggagttcgtttgcgtgtgttgtgtgatcagtcaccgatggcagcaccacctgcgagggcacgtgccgattacgattacctcatcaagcttcttcttattggcgatagggtgtcggaaagagttgtctgcttttgcgattttctgatggttccttcacaaccagttttatcaccnnnattggcattgattttaagataagaaccattgaac

SEQ ID NO: 11540 - DNA, 238 bp, Glycine max
  unsure (1)..(238): unsure at all n locations; Clone ID: 701152628H1
ggcacaagtttgttgagatagctagaagcaataagatgaaaatgaaagtgcttgttttgtttgttgctacagttttggtagcatatgaatgccatggctcagactaccagaagttccctctccaaatgaaaactgggtttggtgggcaatacagcaatgaggtggcatgtgccagttggaggcttggcgtggaancnaacaacgtagtcaagtggcaaactgttcctgcagcttgcgg

SEQ ID NO: 11541 - DNA, 230 bp, Glycine max
  unsure (1)..(230): unsure at all n locations; Clone ID: 701152630H1
gacacaacatcaccatcaacaacaagcagatcatctctccctctctctcaacccataatagtcatgggttgaaggaggattttgagcagtatgctgagaaagcaaagactttgccaccgactcaatcaaacgaagacttgctatcctttatggattgtacaaacaggcacggttggnctgtcaanaccagcggtctgaatntccacaggnggncgggntaattggttcct

SEQ ID NO: 11542 - DNA, 245 bp, Glycine max
  Clone ID: 701152631H1
ctccgcaatctctcttcgaagatgtttcccagtggtgccaactgtgctagccagcatcttcaccagttgcagagatctcttcagtgtcagaacttgggatggagtaacattttcactctttagcaaccactcttcagcatgtgtgaagtctatgatctttggaaggaggccccttgtgtttccaatctttccacagttgtcaaggtcacgtgcaagttttttcagtatgaggagtcccaagtggt

SEQ ID NO: 11543 - DNA, 246 bp, Glycine max
  Clone ID: 701152632H1
ggtagttgtgattcttcaataccatatattctctttctctttcttgatttgtgttgtgaaacagttaaaagtggtcttgatgtctgaggcattggaagaggttgttccttcaatgaaaggagggtgtgaagaagaagggttgaacctggaggctactgagctgaggcttgggttgccagggtgtgagtcaccagagagggagggtgtgtttaagagtgtggtggtgtctggggccaagaggggttt

SEQ ID NO: 11544 - DNA, 246 bp, Glycine max
  Clone ID: 701152634H1
gggagctgagctgagaaaacccccaaccccaaccttcaaccttaacctctcctcactttcttttcaaccagaactatgattaagctttttaaagtaaaggaaaaacagagagaactggcagaaaatgcgagtggcggaccacccgttaagaagcaaagtgccggcgagttgcgtcttcacaaagatataagcgagctgaatctaccaaaatcacgtaccatgcattccccaatggcaaagatgact

SEQ ID NO: 11545 - DNA, 219 bp, Glycine max
  Clone ID: 701152636H1
aggtaagaacaggaagaggggaaagaacgaggcggacgacgagaagcgagagctggtgttcaaggaggacgggcaggagtacgcgcaggtgctccggatgctgggtaacgggcggtgcgaggcgatgtgcatcgacgggacgaagaggctctgccacatccgcgggaagatgcacaagaaggtgtggatcgccgccggagacatcatcctggttggact

SEQ ID NO: 11546 - DNA, 237 bp, Glycine max
  unsure (1)..(237): unsure at all n locations; Clone ID: 701152637H1
tgtactggtacagtacagtgatgatgatcaatgaccccaacttgaacaacttccacacaaagttggaagagagtaaagctcaacgggctgtggtcggcagacagtgttgagatccgttgacagaaaganttacataccacaatnctaatataaaacctgcagaaaccacctggattgctgatctcactaattgtggcctatacggagtagcctttcgctattttccctgtttntaca

SEQ ID NO: 11547 - DNA, 223 bp, Glycine max
  unsure (1)..(223): unsure at all n locations; Clone ID: 701152639H1
agnagtatcaaatatttgttcctcttgtaaaggaggtaagataatttgatacttctcttattgtgagtgatggagtaattttttaaaattatatgtaaaaatatataaacaaatttatatacccagttataaaaaaattgagtaattaatattagtaaatataaatttaattatttaattccaaaaagattactcatttggtctttgcacattctttatcttt

SEQ ID NO: 11548 - DNA, 246 bp, Glycine max
  Clone ID: 701152640H1
aaagagacccggaaagggtgggaaccgcttttggaaatccattgggcttggatttaagactcccagggaagccatcgaaggaacctacattgacaagaagtgccccttcactggtaatgtttccatccgtggccgtatcttggctggaacatgtcacagtgctaagatgaacaggactattattgttaggaggaattatctccattttatcaagaagtaccagaggtacgagaaaaggcactccat

SEQ ID NO: 11549 - DNA, 234 bp, Glycine max
  unsure (1)..(234): unsure at all n locations; Clone ID: 701152641H1
tgctaaagccgtgtgtatctctacctctgtctcccttgagcagagtaaaaaaacaaaaatggcggattttagctgaaganttcttnanggggagaaaataccctttcattgtcactctcttaatcttgctcatttgcgtcacgctcttcctcttcagcttcaaccacaccacctcaaacactgttgctttctattctgttatccaagagaaaccaccccttaacccttctcaag

SEQ ID NO: 11550 - DNA, 236 bp, Glycine max
  unsure (1)..(236): unsure at all n locations; Clone ID: 701152642H1
atccatgttgctcgattatatttcttatttatatttttaccccttccatttctttcttttcattccttattcatgtcacaacaatttccaatnctcaaagacaaccttaaattgaggacannnnnnnnnnnnnnnnnnnnnnnnnnnnnnnccaaaagtttctatttctttaaattaatttcttactttaaaatatcagntaattaacaacatactgactaaaaagttggctattg

SEQ ID NO: 11551 - DNA, 235 bp, Glycine max
  unsure (1)..(235): unsure at all n locations; Clone ID: 701152643H1
ggcacaagtgagtttgttgatcgagataactagaaacagtgtgatgaaaatgaaggtccttgttttcttcgttgctacaattttggtagcatggcaatgccatgcgtacgatatgttccctctccgaatgaacactggctatggtgcccgtactccggaggtgaaatgcgcaagttggaggcttgctgtggaagcannnnccatctttggctttgagaccattcctgaagagtgc

SEQ ID NO: 11552 - DNA, 244 bp, Glycine max
  unsure (1)..(244): unsure at all n locations; Clone ID: 701152644H1
ggaagttatagagagagaggagtttggagagaagagtgaagaaggcaaatcgcgaagactagatctgatctgagagaatggctcctcggtctagcagcaaggacgcccaagaccttttccgcgctctttggtctgcttatgctgcaacccccactaatctcaagatcattgatctctatgtcatctatgccgtattcaccnntntcatccaggttgtttacatggctttggttggatcatttcc

SEQ ID NO: 11553 - DNA, 238 bp, Glycine max
  Clone ID: 701152645H1
gatgaggtgagagctagaaactgaggacttagctagtagttagagatgcctgagttttgcgtgacaggtggtactgggttcatcgcatcttacctggttcaaggccttactagagaagggtcacacagtgaggaccaccgtgagaaacccaggggatgtggagaaggttggttttctgactgaactaagtggagccaaagagagactgaagattttgaaagcagatctattagtggaa

SEQ ID NO: 11554 - DNA, 238 bp, Glycine max
  Clone ID: 701152646H1
gggtcaacacaactcactagagtatgatccatttttcccctttaattgattatttgttagattaatagcaatggctgggactatagcaaccactagtgtcaggtggattcagcaaggaaacaaatgatctccattatttgtcttcctcatatttgtcatttgcagaggtttcaacatgtctcacatgcatattacttgaccgtgtcccatacatattccttagagaaagcagaatgat

SEQ ID NO: 11555 - DNA, 243 bp, Glycine max
  unsure (1)..(243): unsure at all n locations; Clone ID: 701152647H1
gacccgcgaatcagacatggacctagatttgcggaaaagtggccatggcattggcngcaatgcatcactgnaatccaatcttgtgctgtattcttactgtcatagctcttgctcatggcgtattcgatttgcttatccctcaaanggatcccatancagtacaaagcagtggatctttcaaaaggagagcagtaccgtccagacttcgagagcntgaatcctctgcactnngtcnccagtatg

SEQ ID NO: 11556 - DNA, 242 bp, Glycine max
  unsure (1)..(242): unsure at all n locations; Clone ID: 701152649H1
ccaagccttaagcaacataaacactactcttgatttctaggttgaaatcgctggtgctggcaacttgaacatacgaatttgtataaattactgggaattggtcactacgtttttttagcttaaattttaatgaatttccagacattttgaccaaaattataaattagganccagtgattnggtttaagggaaaaattaggaaaatccccccagttggccaaaaatccagggncaggaaaaaa

SEQ ID NO: 11557 - DNA, 254 bp, Glycine max
  Clone ID: 701152650H1
gggtgtagcgcagagaaagaactagaactagggtttcatctttgccatcagtaaacgacaatgatttacgacgttaactctcctcttttccgatccttccacagccagaagggaggctcctctggtaagaggaaatcggacgaacagaagccaaaagagcagaaacccaaagccagcgagaacaaacctataatgactgagtgataacagctgagctgcattcagttgtagaatgaaaataggtggtaggtatt

SEQ ID NO: 11558 - DNA, 238 bp, Glycine max
  Clone ID: 701152651H1
gatcaattcaaaatatatcatcaattataagcatgggtttgtggaacacaacgaatgcagtgtcttgccgctttcacaagtttggtgatgaccaaaagaatctggtcttccaaggtgatgccacgtcttcttccaggggcatagaactcacaaagttagacggtggaggaaaaccagtgggtggcagtgtggggagagtgttatactcttctccagtgcacctttgggaaagctctac

SEQ ID NO: 11559 - DNA, 238 bp, Glycine max
  Clone ID: 701152652H1
gaaggaaagtcctttcgctttcctgtctttcattgttttgttttaactgtttcgaatccctgcgcttgcttagggaggaaccgttgaagtgggttgacccagtactgctttcaatttgctgctgaaggaaagggttgggatgggttgtgacttttccaagtacacagtgtgctgcacgggtacggagcaaagatggtccggctgctgaggctcaggttgatggtggaaacgaagacaa

SEQ ID NO: 11560 - DNA, 234 bp, Glycine max
  unsure (1)..(234): unsure at all n locations; Clone ID: 701152653H1
attggaagaggcattgtgcagtagcttcaatttttgtttcctgggagagcgagaagagtgttcggatttcaccattccaggtggagggaactagctcatgtggtgacggcggaagatgcttctgtcgtcgatacgcagaggattcactagtcnntaggtcccatacgaaccctctcttcgcactccgaaatgaaagactttctggattacctcgactccctcaaaaattacgag

SEQ ID NO: 11561 - DNA, 235 bp, Glycine max
  unsure (1)..(235): unsure at all n locations; Clone ID: 701152654H1
gacactaaacaagttaaaagaagagcatcactgaactaacaaagcaaccctatgtcgaaggtggtttgtgtcaccggagccagcggcgccatcggatcatgggtggtcctactcctcctccagcgtggttacaccgtccatgccaccgtccaanatatcaaggatgaaaatgagacgaaacatttggaggaaatggaaggagcaaagagtcatctccatttttttgaaatggatc

SEQ ID NO: 11562 - DNA, 236 bp, Glycine max
  Clone ID: 701152655H1
ggcagcaacacacattgttaaaagtttctttatttcaagtgaagttagttagttatatttatatacacaatcatgtcaatgagatcaattggtacaagccttagccttatggtatggcttgtaattgcaacatcagcattagcaaaatctgataaccccccagtcctagacacacaaggcaaccctcttgagccaggcaaagattactacatcaaacctgccataaccgacgttgg

SEQ ID NO: 11563 - DNA, 237 bp, Glycine max
  Clone ID: 701152656H1
cctctaagaaagaaagcacttggctgcaagtgggtgtacaaaataaagcataaagttgatggaagtgtagaagggttcaaagcatggttagtaattcttggcaatcatcaaaatgaggggatcgattacacatagacttttgcaccagttgtaaaaatggtaacagtacgcatagtgttagccgcaacagccacacaagcttgagaattacatcagattgatgtgcataatgcattt

SEQ ID NO: 11564 - DNA, 237 bp, Glycine max
  Clone ID: 701152657H1
gacactccaaagtcaccctacaacaacaacacacacactcctcacacaataatggaagaagggcaaagaaaaacaacaacactacttctatgctcccacattgtggttcttcttttactctccctagtggccgagactagtgccaaggtttcagcagtgatcgtcttcggcgactcctccgtcgacgccggcaacaacaacttcatccccaccattgcacggagcaattttcagcca

SEQ ID NO: 11565 - DNA, 237 bp, Glycine max
  unsure (1)..(237): unsure at all n locations; Clone ID: 701152658H1
gggaagaagattaacgaaggatggaatctgggtctagcgaaggagaagaggtgcagcaacgcgtngccgttgagggagagagtggagtggtcagatgttactccggttcctcaaaacgacggccctaaccctgtcgttccgatccagtacactgaagagttttccgaagttatggattactttcgcgccgtttacctcaccgatgaacgctcccctcgngccctcgctctcacagcg

SEQ ID NO: 11566 - DNA, 214 bp, Glycine max
  unsure (1)..(214): unsure at all n locations; Clone ID: 701152659H1
gaggaaaatnaatgcaactaccacaaagacttacgctacaagaaccatatttttcttgaaaagtgatggaaccttgacgccattggccattgagttaagtaagccgcatcctcagggtgaaggatatggtcctgttagcgaagtctacgtgccttcgagcgagggagttgaagcttacatttggttactggcaaaggcttatgttgttgtgaat

SEQ ID NO: 11567 - DNA, 237 bp, Glycine max
  unsure (1)..(237): unsure at all n locations; Clone ID: 701152660H1
ggattttgggaagacttgcaaaagtctactcccttcccctttcagttagccggttccactctctctaactctatatacccactcacctctctctcattcatttattcattcaggtcagtcaatcattcattcctattccttctttctcttccaattccaaatcacaacccttcgttttccctctctagaatcttcttctccattcaattnntactccttttttcctctctgtccctc

SEQ ID NO: 11568 - DNA, 186 bp, Glycine max
  Clone ID: 701152662H1
tcttagatctcttctttctctacgccgcacgccgaaaccatggccggaaaaggagagggtcctgctatcggaatcgatctcggaaccacctactcttgcgtcggtgtgtggcaacatgaccgcgttgaaatcatcgccaacgaccaagggaacagaaccacgccgtcttacgtcggattcactgac

SEQ ID NO: 11569 - DNA, 242 bp, Glycine max
  Clone ID: 701152663H1
gaggcatcattcatacactgaacgaacgctcagctcagtcaggtgccggcgttcctctttcacgttctcatggaaaacgacgacgtcgacatgcacgctgccgacaccagcgaagaattggatgacatgaagaagcgcttgaaggagatggaagatgaagctgctgctttgcgagagatgcaggccaaggtcgagaaggaaatgggatctgcgcaagatcctgcaaatgcttctgcaagtca

SEQ ID NO: 11570 - DNA, 246 bp, Glycine max
  Clone ID: 701152664H1
gacacaccgtttgttctattcttaactcaacttctgctacccactctcttcttccaagtccaaccacgcttttctctacagtcatgggcaaggtcaagatcggaatcaacggatttggaagaattggccgtttggttgccagagtcgctctgcaaagagacgatgtggagctcgttgccgttaacgaccctttcattaccaccgattacatgacatacatgtttaaatacgacagtgttcacggac

SEQ ID NO: 11571 - DNA, 74 bp, Glycine max
  Clone ID: 701152665H1
gaactacaaaaatatctcacgcaataacataccctaacacaaacaccttcctcccttaaaaatgttgaagcatt

SEQ ID NO: 11572 - DNA, 254 bp, Glycine max
  Clone ID: 701152666H1
ggcagacgccgtgactagacactcatctcactcgcgccatcttagggtttctccttttgtttcgcaacatggttgccgctaagaaaactaagaagacccatgagagcatcaacaacaggctcgctcttgtcatgaagagtggcaaattcaccctcggttacaagaccgttctcaaatctcttaggaactccaaaggaaaattgattatcattgctaacaactgcccccctttgagaaagtcagagattgaatac

SEQ ID NO: 11573 - DNA, 240 bp, Glycine max
  Clone ID: 701152667H1
gattgagtacaacttcacattttagaagaataccccctcttttgctgcatcagaggagttgtaaattaagagcatggctgcacaagctcttgtatcatcatcttctcttaccttctcagcggaggctgcaagacaaagtcttggaccaagatcactccaatctccatttgggcttctccagaaaagcctcctttcttgttaaggcagctgctaccccccctgtcagcaaggatcagacag

SEQ ID NO: 11574 - DNA, 71 bp, Glycine max
  Clone ID: 701152668H1
ggagactttcccttcagttcctttcacctttctttcttcttctagggcggcaaaaccttcgtaactgtttg

SEQ ID NO: 11575 - DNA, 237 bp, Glycine max
  unsure (1)..(237): unsure at all n locations; Clone ID: 701152669H1
cctccctgcattgaaaaataacattccaaataaggtaaggtatttgtattctcagagttatacaccaattcaatcagattaaataggaacatatcttttgcatgtaagttcattaacttttataataattacattacctaaagagtaattccaacnngatttctgattggtagatggtgtttacagtgataatgcatgacaattaaactcaacattataagtactaatccattgtca

SEQ ID NO: 11576 - DNA, 230 bp, Glycine max
  unsure (1)..(230): unsure at all n locations; Clone ID: 701152670H1
ggcacagagcaatactgcaatagagaaagaggcagatagaaaaaagagctgagttttgagttcaaaagatgactaacttcccagtgatcaacttggagaagctcaatggtgaggagagaaacgacaccatggagaaaatagaggatgcngtgaaaactggggattctttgagctggtgaatcatggcataccccatgacttattggacactgtggagaggttgaccaaag

SEQ ID NO: 11577 - DNA, 235 bp, Glycine max
  unsure (1)..(235): unsure at all n locations; Clone ID: 701152672H1
ggaaggtgaaggtgaaggtgatgatggaattggaagtcgacgagaacgacttgaaagccgccggtgctgagctcttcgtcgacggtggtcggcgcggcattcgcatcaatggctgggtgatcgagactcggaggcactccatactcaactcttccacactccaagagtgggnaacagaatctcgatacgtctcattaccagaaatggtttttggggaaaacactttgattctaaa

SEQ ID NO: 11578 - DNA, 246 bp, Glycine max
  Clone ID: 701152673H1
atataaatataagcttgtatcttaaaaaatgttatttcaaatagcatttcaaaaatattagaaactattaaggttatgtttcacaacattaaccaaaagttggctggttataatgagaaacaacaaagattcgaaatcatttagaaaatgaaggttgtacttacttggtataacacttcatctgccacccaatttccaatacttgaaatatagctctacaaagattgaaatttcagatcttttata

SEQ ID NO: 11579 - DNA, 232 bp, Glycine max
  Clone ID: 701152674H1
aattgattagaagctaagcctaatcgattagtctgttcagtcgagacaatgactggtttttcaggagtctccgctttaatcggttaccggataatcataatcgattactttgttcataatcaattacattgttcttgaaagttttccagattttggaaagaacactttaatcgattgaaatgataatataattgttacttctttgaaataattgattgcattgactatttaa

SEQ ID NO: 11580 - DNA, 241 bp, Glycine max
  Clone ID: 701152678H1
gggctagggttccataacattagcgatagtaaaattgtatgatagtaaaatcttgataatggtcgttactgctgcggtgctgtcctattttatttcaataagaatccttgagccaaacaaggaacacacaacacatttgtcctgaaatagctttcaataatatgcggctcattcagtttctgacttcctgcctccagcatcacagaataattatctcaagttgatttggtgttccttccaa

SEQ ID NO: 11581 - DNA, 244 bp, Glycine max
  Clone ID: 701152679H1
acatactgcaaattgtacaaaatttaagtatagcagatctgtaaaatttatgaaaatcagacattattgtttcaaaaatagaaagtgcaagagcaggaaaaatgcagttcaaaccagaaggcaaaaataaactacccagaatttttcagcaggaaagaaagaatattatagtattaccatatagatggcctaaacttttttaaatatattttccctaaaagccaataaaaaagcagtgagctta

SEQ ID NO: 11582 - DNA, 244 bp, Glycine max
  unsure (1)..(244): unsure at all n locations; Clone ID: 701152680H1
gcacaagtgagtntgttgatcganataactagaaacagtgtgatgaaaatgaaggtccttgtntncttcgntgctacaattttngtagcatggcaatgccatgcgtacgatatgttccctctccgaatgaacactggctatggtgcccgtactccggaggtgaaatgcgcaagttggangcttgctgtggaagcacacaacatctttggctttgagaccattcctgaagantgcgttgaagcaa

SEQ ID NO: 11583 - DNA, 211 bp, Glycine max
  Clone ID: 701152681H1
gacggacgagggtttcgtttcgggtttgacgttgttcacaatcactttctgcgcttcactcactcccttcgtgcggttttctttctttgtcgaactcgtgcgaaaatgcgtgagattcttcacatacagggagggcaatgcggaaaccagatcggagcgaattctgggaggtggtgtgcgcggacacgggatcgattccacgggagtacca

SEQ ID NO: 11584 - DNA, 248 bp, Glycine max
  unsure (1)..(248): unsure at all n locations; Clone ID: 701152683H1
ggaacttctctgtgttctgaaacagcaacaatgacaaaaaccatgactatgtggtttctgttggtctctctttccttcatttatgctgttgccactgctaatactcaaatcaaaattactaacaaccctgcggacaagttggtagctgcaatcaacgtaaacagaactgctcacaaggnatcagccttaaccgncaacccggggttgcgtgtattgctctacaatacattaaggctaccagggtgaat

SEQ ID NO: 11585 - DNA, 239 bp, Glycine max
  Clone ID: 701152684H1
gatacccatcacctcttgaaaaccccccccgattgccattcctataaccatattctcccctgccattaaagtcaccacggccatagcttcggccatttccgtaatttccacgccctcttgcaccttcacccctgaagctaggagccctgccagatgagaaacgtcctctacctgaaaagagatagcaaaacagcttacttctaaatgcaacataactaaaacaagtgacaaaaaatgcc

SEQ ID NO: 11586 - DNA, 208 bp, Glycine max
  Clone ID: 701152685H1
gcgacggaggaaaacgacaaggtggaagagcgttgccgccgccgccaagaggccctccgcctcctcccccctctcgccctcgcctcgaacccgtcgatcgcgaaaagacatgtccgttactgctgcgagtgttcactaagattgggagtcaccattccatggaagactttgccgtcagaggcaaagagcccaaagacgaggttcagat

SEQ ID NO: 11587 - DNA, 244 bp, Glycine max
  Clone ID: 701152686H1
gggggacacaatcaaattttcacaactaaaaataataataaacactaaaactttctttttttagtgactataaagagtcccataatacttaacaacatatcatctccgcaagacaaaatgaaactcgaattcactatctatttctccacaacaacaaaatgaattcttctacacttttccttttgtcattcaccctttccttgatcctcatttctcctttgccaaccttaggcacaagcttgta

SEQ ID NO: 11588 - DNA, 205 bp, Glycine max
  unsure (1)..(205): unsure at all n locations; Clone ID: 701152687H1
aagacgacagaagggggcacaagtttnttgagatagctagnagcaataagatgaaaatgaaagtgcttgttttgtttgttgctacagttttggtagcatatgaatgccatggctcagactaccagaagttccctctccaaatgaaaactgggtttggtgggcaatacagcaatgaggtggcatgtgccagttggaggcttggcgt

SEQ ID NO: 11589 - DNA, 236 bp, Glycine max; identical to SEQ ID NO: 10250
  Clone ID: 701152688H1

SEQ ID NO: 11590 - DNA, 65 bp, Glycine max
  unsure (1)..(65): unsure at all n locations; Clone ID: 701152689H1
gttgtttgtgtgttctgtnttttacttctacacctgaaaatgtcttgctgcggnncgtaactgng

SEQ ID NO: 11591 - DNA, 244 bp, Glycine max
  Clone ID: 701152691H1
ggttcatccaaactctcacactgcctcttcctctcagattcagcaattttctattttctcctctcatggcttcagattccaaaaaggatttccctgctgatgacaaagctggaacagaagagagtaaaacatccaaagatgagacttcatctaaagattctccagcagaacaaagagcgacagtacttttggacctagacctggacctgctgggcatccaggcaacccttttgatctctcagca

SEQ ID NO: 11592 - DNA, 236 bp, Glycine max
  Clone ID: 701152692H1
cgaagtggcctgtacccaaagatcttattgagctacaaccttcatataagcaggataattgggatcctgattggcaatctacatctagtagtaaagtctcgtatctcgtcctgaggttgaaagctttgcgaggaaccaaatcagggacaaacttcaatacagaaaatatcattgatgagatgcatattgagaatagtctgcatagaagtgatgacaaatcatcaattcagacatgt

SEQ ID NO: 11593 - DNA, 238 bp, Glycine max
  Clone ID: 701152693H1
ggatccagtacaacaacgttgtcaacgcctacaacaacaaaaactgtgtcacagaggattgcctcatcggcaacgaggatttggaatcagagttctactttggatcccatgtggccagaatgctctacgatgtgagccaatctgtgagtggcaaaacaggcaataaaaataacaaagctgttaattgtccaaataagcaaggctaccgaagctgcttgccttccaaaaacggtggtgg

SEQ ID NO: 11594 - DNA, 240 bp, Glycine max
  unsure (1)..(240): unsure at all n locations; Clone ID: 701152694H1
gacaacaaaatttgccaattgccatttcaatcctcagtttctttcttcaacgtttccatcatacacagatcccaatcctctctcaagccctaatttcccctcatttccatggccacagaagagnccactgtcgcggtggaacccgctcccgaacctgcctccgccgatcctcccccggaggagaaggaggagaccaaacctgaagccaaggctaagaaaaccaaggagcccaaacctaaa

SEQ ID NO: 11595 - DNA, 240 bp, Glycine max
  Clone ID: 701152695H1
atactcaaataatatttcctagactaaaaaagtaacaaacgtccccttagtggattttaccatgatgttctgtgtggatatataaggctttagcttaagccgatgttgtgttatgtttaactccttgcattatcaaaacataatgagtgttgttacgtgcacaactttattacctgtttagcattttttgttaattttaaaattctcctatgttaaaggtatacgagtttgtggttgatc

SEQ ID NO: 11596 - DNA, 169 bp, Glycine max
  unsure (1)..(169): unsure at all n locations; Clone ID: 701152696H1
aaccgaattgggcgaagagatcagcgaaatgtttcgttggctttcaggggtatgattggtaaataaagatgaacagttaattaggntatatttttaattgtgattaattnttttaaaatcattccaaatattccttgctcattggctccacatgaatatttccctcttt

SEQ ID NO: 11597 - DNA, 246 bp, Glycine max
  unsure (1)..(246): unsure at all n locations; Clone ID: 701152701H1
gatgctgagaacgagaagcgagaagctgttcgtcaaacccgatgagatctctgaggtttctgaagtttgcagtgtaagtgagagcctgtccacactcgccgaagaagaagcacgtcaaagggtcaacagatctccggcaaaggtgcgcaaagcacgctccttttccggcgagttcggctgccggnnngaaatgacggcggggaagtctccggcgaggaggccggagcagtctccgggaagaaggaa

SEQ ID NO: 11598 - DNA, 251 bp, Glycine max
  unsure (1)..(251): unsure at all n locations; Clone ID: 701152703H1
gacactaaacaagttaaaagaagagcatcactgaactaacaaagcaaccctatgtcgaaggtggtttgtgtcaccggagccagcggcgccatcggatcatgggtggtcctactcctcctccagcgtggttacaccgtccatgccaccgtccaagatatcaaggatgaaaatgagacgaaacatttggaggaaatggagggagcaaagagtnntctccatttttttgaaatggatcttcttgacatcgactc

SEQ ID NO: 11599 - DNA, 256 bp, Glycine max
  unsure (1)..(256): unsure at all n locations; Clone ID: 701152704H1
gacaacacagaacaaaaacaaagaaaaaaaaaacccttagccaacacaaccatcatggccacctctgctattcagcaatcagcattcactggtcaaactgctctgaagcagctcaatgagttcgtccgcaagaccntggcgccggcaaaggtcgcactaacatgcgccgcaccgtcaagagtgctcctcagagcatttggtaactcaanattacccttcccactccactagttcaacttagtagttactgctttta

SEQ ID NO: 11600 - DNA, 227 bp, Glycine max
  Clone ID: 701152705H1
ggtctcactcactgtatctccggcctcgcttcttctctcagattcagataccaattcggtttcttctgaaccaaacttggtttgagaaattcggccgttaattttccatggccaacaatccatcacagcttctcccatcagagttgattgaccggtgtataggttcaaaaatttgggtgataatgaagggtgacaaggagcttgttggtactcttagaggctttgat

SEQ ID NO: 11601 - DNA, 248 bp, Glycine max
  Clone ID: 701152706H1
gggttggaaagaaaggtatcttcgtttgctttatatctcctgaagcagaacatcacctttcctatttactcactgtgtgatctaatcttcttctatgggttggcttagtcggttcataactgccgtggctttcttagccatcggagtgatattctcaccggagacactggggtcaaaatcaaccacactttccacctacctcaaactcgctcacctcctctgcttctccaccgccttcggcgccgctc

SEQ ID NO: 11602 - DNA, 202 bp, Glycine max
  Clone ID: 701152707H1
gagggagagtgttgacgctccatcaagatggttatttctagggattccatgcacaagaggcgtgccactggtggcaagaagaaggcatggagaaagaagagaaagtatgagcttgggcgtcaggccgcaaacaccaagttatcaagcaacaaaactatccggaggattcgtgttcgaggtggcaatgttaaatggagggcat

SEQ ID NO: 11603 - DNA, 237 bp, Glycine max
  unsure (1)..(237): unsure at all n locations; Clone ID: 701152708H1
gatgtngatgtgagtttggaaggtactatcatactgtgtaggcaggtagatcaaccaggcatgataggaaaggttgggancgttttgggtgangagaacgtgaatgtcagcttcatgagtgtgggaangatcgctccacncaagcaagctgttatngcattggagtggacgaacaacctagcangatcttgaagaggcttggagacntcctgctgtgggaaaattcnntttcctnaa

SEQ ID NO: 11604 - DNA, 222 bp, Glycine max
  unsure (1)..(222): unsure at all n locations; Clone ID: 701152709H1
agggtggttttgatttggagtgcagctatgcgattgtacagagagccaagcagcagttattgtataagcttcgtagatttgagaaactggcggagttggatccagtggaactngttcaaaaagaatgcaggatcaagaagaggacgaggatgacacatttatggaagaggaagatggtcatgatgagaaaaaccaagcatcatgcaaagaaaataactttag

SEQ ID NO: 11605 - DNA, 246 bp, Glycine max
  unsure (1)..(246): unsure at all n locations; Clone ID: 701152710H1
gacactaaacaagttaaaagaagancatcactgaactaacaaagcaaccctatgtcgaaggtggtttgtgtcaccggagccagcggcgccatcggatcatgggtggtcctactcctcccccagcgtggttacaccgtccatgccaccgtccaagatatcaaggatgaaaatgagacgaaacatttggaggaaatggaaggagcaaagagtcatctccatttttttgaaatggatcttcttgacatc

SEQ ID NO: 11606 - DNA, 246 bp, Glycine max
  unsure (1)..(246): unsure at all n locations; Clone ID: 701152711H1
ctataagatctgcaggtactattgcagtttcaagtccatccattccttcccaagaaacctcgtagcattctctcccttgaactcttcggctcttaatgatttctgacacaggacacttcacagggatctgtgatcggatataatataaataagattcttgtatatatccaggttcaaaaataaggagcctgtagataaaatttatgttcacncataatagtaatggcattatagaaactcgatgaa

SEQ ID NO: 11607 - DNA, 88 bp, Glycine max
  Clone ID: 701152712H1
taaagagaaaaatacaaaaatttcatactgatttgtttccactgctaacaatatgtctaattttttaccaatccatcaagttctacta

SEQ ID NO: 11608 - DNA, 246 bp, Glycine max
  Clone ID: 701152713H1
ggcacaagtgagtttgttgatcgagataactagaaacagtgtgatgaaaatgaaggtccttgttttcttcgttgctacaattttggtagcatggcaatgccatgcgtacgatatgttccctctccgaatgaacactggctatggtgcccgtactccggaggtgaaatgcgcaagttggaggcttgctgtggaagcacacaacatctttggctttgagaccatcctgaagagtgcgttgaagcaaca

SEQ ID NO: 11609 - DNA, 255 bp, Glycine max
  Clone ID: 701152715H1
attgcatggtgaagccagaagggattctcagcttgcaaagagtgagaaggatgtgcgagtcgatggcagaggagatgataacaaggatattagatatgaatgggatggccataatgattcgaaaggtgacattaagacagacaaggatggctatggtatggtaagcagcagcggccacttgaattggaaagaatcaaaagagtataggggtaagagattttctgatgcccctggtgggagtttggattcctggca

SEQ ID NO: 11610 - DNA, 257 bp, Glycine max
  unsure (1)..(257): unsure at all n locations; Clone ID: 701152716H1
ggagcgaagaagatattagggtttttgagtgcggtgcggcgatcctagcactctcttctgcagctttcgccgacagcttcattcaccatggctgagcaaaccgagaaggcttttttgaaacaaccaaaagtgtttctcagctcgaagaaaactgggaagggancgagacccggaaagggtgggaaccgcttttggaaatccattgggcttggatttaagactcccagggaagccatcgaaggaacctacattgacaa

SEQ ID NO: 11611 - DNA, 242 bp, Glycine max
  Clone ID: 701152717H1
gacacaccgtttgttctattcttaactccaacttctgctacccactctcttcttccaagtccaaccacgcttttctctacagtcatgggcaaggtcaagatcggaatcaacggatttggaagaattggccgtttggttgccagagtcgctctgcaaagagacgatgtggagctcgttgccgttaacgaccctttcattaccaccgattacatgacatacatgtttaaatacgacagtgttca

SEQ ID NO: 11612 - DNA, 252 bp, Glycine max
  unsure (1)..(252): unsure at all n locations; Clone ID: 701152718H1
gtgttcaaagcgaatgtgatgcatgtaccataacaccaacaaaatggataagccttacaagctgaaactaaacaagtttgctgacatgaccaaccatgaattcaggagtacctatgctggctcaaaggttaatcaccatagaatgttcagagacatgccacgtnnannacgggaccttcatgtatgagaaggttggtagtgttcctgcttcagtggattggaggaagaaaggtgctgtaactgatgtaaaag

SEQ ID NO: 11613 - DNA, 244 bp, Glycine max
  Clone ID: 701152719H1
gatgaaggttatgctatagactggagtcctcttgttcctggaaggcttgcatctggggattgcaataattgcatttatctgtgggagcctacatctgctggaacatggaacgttgataatgctccatttactggacatactgctagtgttgaagatctgcaatggagccctacagaacctgacgtttttgcttcttgttccgtggatggaaacatgcaatatgggatacccgtttggggaagtc

SEQ ID NO: 11614 - DNA, 242 bp, Glycine max
  Clone ID: 701152722H1
gggtggagagcaagagctataactgtgagaagtgattggaaattgttggaacccaccctatcaacaaggagaagctgttttcgttcgtcgccactaacactaatcgtttcttcaatgccttacgagaaggaactcgccgctgcaaagaaagcagtcactctcgctgctcgtctctgccagaaagttcagaaggctcttctgcaatccgatgtgcactcaaagtcagacaaaagtcctgtcac

SEQ ID NO: 11615 - DNA, 216 bp, Glycine max
  unsure (1)..(216): unsure at all n locations; Clone ID: 701152723H1
gacgaccttcccattgtttcctcaccgtgcaacaacanaacaccacccactcacaattcctattttctaaagcctnacgaaccctaattcttgattattcctcaattctttgttcccttcccatcttggggacacaaattcgccttcttcctcatttcgcaaacaaattcctcttccaagcatccccaattttcttttaatctatttttntncctt

SEQ ID NO: 11616 - DNA, 246 bp, Glycine max
  unsure (1)..(246): unsure at all n locations; Clone ID: 701152724H1
gattggcaaagtactcaatcatcancactagcaacagccatgggagaggtagacccagctttcatccaagacctagaacacagaccaaagctctccataatccaagctgaaggaattcccataattgacctctctccaatatccaaccacacagtttcagatccatcttccattgaaaacttagtgaagcagatagggagtgcatgcaaggaatggggtttcttccaagtaaccaaccatggggtg

SEQ ID NO: 11617 - DNA, 251 bp, Glycine max
  unsure (1)..(251): unsure at all n locations; Clone ID: 701152725H1
atcagtggtgccccccaggataacaacataactgctgtggaatgctgtcatatttggtcctgatgatactccatgggatggaggcacgttcaagttgacactccaatttactgaggactatccaaataaaccaccgactgtacgattnntgtctcgcatgtttcatccaaatatttatgctgatggaagtatttgtttggatatattacaaaatcagtggagtcctatttatgatgtggctgctatactca

SEQ ID NO: 11618 - DNA, 250 bp, Glycine max
  unsure (1)..(250): unsure at all n locations; Clone ID: 701152726H1
gtgtgagtgaagaagcagagggagtagcngcattaaaaatgcagatcttcgtgaaaactctgacagggaagactataaccctcgaggtcgagagcagcgacaccatcgacaatgtcaaggccaagattcaagacaaggaaggcattcctccggatcagcagcgtttgattttcgccgggaagcagcttgaagatggaaggaccctggccgattacaacatccagaaggaatcaacccttcatctcgtcct

SEQ ID NO: 11619 - DNA, 241 bp, Glycine max
  unsure (1)..(241): unsure at all n locations; Clone ID: 701152727H1
gcatgtgttgccgatgattcccagtaatggatccttcaaggatgtgataactgagggtgatggtagaacgaggtactgattgcctagaccaaatgttccttgatgcttgttttgtacaatatatataagataatgctgtcctagttgcaggatttggcctgtggtgagcatcatagtctgtagtagttttggtagcaagacatnnnnttttccttttatttaacttactacatgcagtagc

SEQ ID NO: 11620 - DNA, 245 bp, Glycine max
  unsure (1)..(245): unsure at all n locations; Clone ID: 701152729H1
agcaccagttgtctgcattgaagatgcctccaaacgctgttttgagttttcaagtggcttagctgcttggacacctctacttttattggttcctttggttcttggacttgataaagtcaatccaaggtatattccattattgcgctcaacttntaaatttccccaaagccttggcatcatgggtggcaaaccaggtgcttcaacatacattattggtgctcagaatgaaaaagcatctaccttga

SEQ ID NO: 11621 - DNA, 247 bp, Glycine max
  unsure (1)..(247): unsure at all n locations; Clone ID: 701152730H1
ggaatgaggaatttagctggggtcatgggaccatggcacctagatgctggtaacatggatgaaaactttgcttcatcacttttggaagagtttaaaagcaataaaaccaagtgttttgagctttctgaaatttctggtcatgttgttgaattcagtgctgnncaatatgggagccggtttattcaacaaaagcttgaaactgcaactactgaagaaaaaaacatggtttatcaagaaatcatgcctc

SEQ ID NO: 11622 - DNA, 248 bp, Glycine max
  unsure (1)..(248): unsure at all n locations; Clone ID: 701152731H1
ggcacaagtgagtttgttgatcganataactagaaacagtgtgatgaaaatgaaggtccttgttttcttcgttgctacaattttggtagcatggcaatgccatgcgtacgatatgttccctctccgaatgaacactggctaaggtgcccgtactccggaggtgaaatgcgcaagttggaggcttgctgtggaagcacacaacatctttggctttgagaccatcctgaagagtgcgttgaagcaacaaa

SEQ ID NO: 11623 - DNA, 264 bp, Glycine max
  Clone ID: 701152732H1
gggggtcagagtgagaaagagaaagagagaattcgtcaaaccctaatttcggaaagatcggcgatgactgcctccaaggatcgcgagaacttcgtctacatcgccaaactcgccgagcaggccgagcgttacgaagagatggtggaatcaatgaagaacgttgcgaatctcgacgttgaactgacggtggaggagcggaatttgctttctgttgggtacaagaatgtgattggtgctcgcagagcgtcctggaggatcctgtct

SEQ ID NO: 11624 - DNA, 250 bp, Glycine max
  Clone ID: 701152733H1
gcacattagatagggatgcttccctcttatatatattgcagtcttccaattgattctttatccatatcagttgagtacaacaacttgttgctaatttgtactctgcttttacattggacagtgctactaatccttgctttttgctaatccaagtgactaggttttcaccaatgagtggcagcttccactagtgctttttctttcaagtttgtcaccaacatagtcaacatcacagtaactaatcaaccta

SEQ ID NO: 11625 - DNA, 253 bp, Glycine max
  unsure (1)..(253): unsure at all n locations; Clone ID: 701152734H1
gataccaaaaacaaaacacaagccaagngaaagtgagaaaaaataaaaatcaaagagcataatgtcagggatcattcacaagattggggagacccttcatgtgggagggcacaagaaggaggaggagcataagggtgagcaccatgctggagaatacaaaggggagcaccatggtgaacacagtagtgagtacaaaggagagcatcatggtgaacacaannccctgagagtaccatggtgagcntnagccaga

SEQ ID NO: 11626 - DNA, 247 bp, Glycine max
  unsure (1)..(247): unsure at all n locations; Clone ID: 701152736H1
gagggacccaaattttaagaacttggctttgcttccttcaaagtgaggtctctaagtttcactttctttgcatagggcaacctcctttctctgtgactctgngtatcgtatcgttttattattatttctaattctctcttatcaggtccattgaatatgtctccgtcgttggatcttcctcccaagggtggcttcagttttgatctatgccgaagaaacgcaatgcttcaaaacaagggcctcaaag

SEQ ID NO: 11627 - DNA, 205 bp, Glycine max
  unsure (1)..(205): unsure at all n locations; Clone ID: 701152737H1
ggagatacanaaaagaaaaaggaaaccctagctggataggtcaaacatcatcatgtcggacgaagagcaccatttcgagtccaaggcagacgccggtgcctccaaaacctaccctcagcaagccggtaccattcgcaagaacggctacattgtcatcaaaggacgcccctgcaaggttgtggaagtttcgacttccaaaactgga

SEQ ID NO: 11628 - DNA, 242 bp, Glycine max
  unsure (1)..(242): unsure at all n locations; Clone ID: 701152738H1
agcttcaggaattagacaagacgtgagaaggagaagaggatgaaggcgggaacagagcaacaccgtgtttggntnccatcattcgaatgggaggatttcacagaccaggttcaattcagaggacaacaatatatgcaattcccaacttcatctacatctccttcgccgcttgccggtggcacagacaacaaacaacgtaagcacgacgaccaacactctcactctctggatctcaacctcac

SEQ ID NO: 11629 - DNA, 242 bp, Glycine max
  Clone ID: 701152739H1
gacttattaattgtgttaagaaatttaagtgaggagctagagaatgatgatgaagtccgctatgtgtgcagtggtggttgtagcacttcttcttctggcggaggtggggcccatggctgaggctgtgacatgcaccccaacagagttgagtccgtgtcttccagcaatcacttccggtgctaaaccttccaatgcttgttgcacgaagctgaagcagcaaaaaccatgcttatgtggctacc

SEQ ID NO: 11630 - DNA, 240 bp, Glycine max
  Clone ID: 701152740H1
ggacatggttgaaggcgaaggcgtttgaaatcgagtaaatggaagcgacattctcttcaacgacggcaagaggatactggaatcagacacgtggttcgacagaacctttgttgctgagagtagatgaggctcgcgatcggaaaccgagttcactgtccattgcgcggcctagcaagttcgtgcagctgtcacttgctcgaaccaggaagagttctttctttaaggtgttatctgctgaaa

SEQ ID NO: 11631 - DNA, 230 bp, Glycine max
  Clone ID: 701152742H1
agaacatgcctttaccaaaggtgcctactttattgggaagatgatatggagcaaaggctacaaggaactgctccaacttcttaaagatcatgaaaaggaattatctgctcttgaggttgatttatttggcagtggagaggactcagatgaagttcaaaaagctgcagaaaagttggaactagcagttagagtccacccagctcgtgatcatgctgatgctctatttcatg

SEQ ID NO: 11632 - DNA, 246 bp, Glycine max
  unsure (1)..(246): unsure at all n locations; Clone ID: 701152743H1
ggaacacttagagaaaaaaagaaaccaaactcttccggtcccttctctctcttagtcacattcattccnnnnnnnnnnnnnnnnnnnnnncccagcttctacaaataacaagtaacctttttcacttacttttccttcaaaccaccatccccaaaaaactctgaatcctttctctttctcttcatttttttattatctgactagtagtncncatggtccctggaaaattaattactcgatctctca

SEQ ID NO: 11633 - DNA, 243 bp, Glycine max
  Clone ID: 701152744H1
ggcgcacacagttatacagctctagagaattatcataccctttaagatgaaaccgtacctacgtccaatattcctattattccttatccttctcgaccaatccacttcggcgagtgcttctaatagtaggtttatagaattcttttcaaaattaaagaattcttttaatcctaagtctgaagaactaaaatcagaagatataaagaagctcccgagcgtcgaatttttgaagaagaaacatga

SEQ ID NO: 11634 - DNA, 243 bp, Glycine max
  unsure (1)..(243): unsure at all n locations; Clone ID: 701152745H1
ggaatgaggaatttagctggngtcatgggaccatggcacctagatgctggtaacatggatgaaaactttgcttcatcacttttggaagagtttaaaagcaataaaaccaagtgttttgagctttctgaaatttctggtcatgttgttgaattcagtgctgatcaatatgggagccggtttattcaacaaaagcttgaaactgcaactactgaagaaaaaaacatggtttatcaagaaatcatg

SEQ ID NO: 11635 - DNA, 239 bp, Glycine max
  unsure (1)..(239): unsure at all n locations; Clone ID: 701152747H1
gatcacaacatcatngtaagcactatagtnaaaaaaggacattcattcatctatggctacccttattgctcccagcaaccactctccccaagaagatgctgaagctctcagaaaggcttttgaaggatggggaactgatgagaacactgtcatagtaattttgggtcatagaactgtgtatcagaggcagcaaatcagaagagtttatgaggaaatttaccaggaggatcttgtgaagc

SEQ ID NO: 11636 - DNA, 243 bp, Glycine max
  Clone ID: 701152751H1
gggtaaagctaaaaagggaccaaagtttgctgttatgaagaagattgttacttccaaagcaatcaaaagctacaaagaagaggttttgaacccagaaaagaagaatcttatgaaggaaaagttacccagaaatgttccaactcattcttcagcacttttctttcaatacaatactgcactgggacccccttatcgtgttttggtggacaccaacttcatcaatttctcaatccagaataaatt

SEQ ID NO: 11637 - DNA, 242 bp, Glycine max
  unsure (1)..(242): unsure at all n locations; Clone ID: 701152753H1
acccagaaggaatacgtgntggacgtgtggtcggggaaccaccccttgctacctacggaagccggtcggcgtctatggtcagcgacgaccaggtcgagaagttccgcaagaagttcggggagctcaaagagatcatggagattcctgttctcaagggagagattgttatcccctcaaggcgcaagggtgtttccaaaggnggcaagaaaaaataatgctattctactcgaacaggattgtct

SEQ ID NO: 11638 - DNA, 217 bp, Glycine max
  Clone ID: 701152754H1
gacagcaacacacattgttaaaagtttctttatttcaagtgaagttagttagttatatttatatacacaatcatgtcaatgagatcaattggtacaagccttagccttatggtatggcttgtaattgcaacatcagcattagcaaaatctgataaccccccagtcctagacacacaaggcaaccctcttgagcctggcaaagattactacatcaaac

SEQ ID NO: 11639 - DNA, 240 bp, Glycine max
  unsure (1)..(240): unsure at all n locations; Clone ID: 701152755H1
gtccagctcagggacgatgagnatgccgatttccaggaggagatagttcgccggcggtgggcatcactggttacccccatggccaagttcgacccagacatagtcctcgaattttatgccaatgcttggcctacggaggagggcgtgcgagatatgagatcctgggtgaggggtcagtggatcccgttcgatgcggatgctattagccagttcctaggatatcctttagtgctaaaagag

SEQ ID NO: 11640 - DNA, 240 bp, Glycine max
  Clone ID: 701152756H1
agagggcgagttctttgagcgcagaaaaggaggaaaagagtgtgttgccccagcagaagaaagatgaccagaaaactgttgactctgcattgataaaagccatcgggagtgttccagatttgaagacatatctgggtgctaggttttctttaaaggctggcgtgaaacctcatgagctagttttctagaggaaagaatggtgtttttcttgtttgcatatcctgttattttattgatttt

SEQ ID NO: 11641 - DNA, 242 bp, Glycine max
  Clone ID: 701152757H1
gataacacaaacacaaattcacatagcctcagtaatctgagagagaaacaaaaacaatgaaggtttccattgccaagttccactcccttcccctatgttttttccttctcttggccttcaacacaaaacccctcctagcagcagaaccagagccagtggttgataagcaagggaaccctttggagccaggagtagggtactacgtgtggccactttgggctgatgaaggaggcctcacacta

SEQ ID NO: 11642 - DNA, 240 bp, Glycine max
  Clone ID: 701152758H1
gatcaacaagaatactcatcaataatatagtggctagcatagagctagtaataatattaatattgttaagctagctctaagccatggctaatgaacgtgatctgttctcggcggagattgtgaaccgtggaattgaatcgtcaggaccaaacgctgggtcgttgacgttttcggtgagggtgagaaggcgcttaccggattttcttcaatcggtgaaccttaagtacgtgaaattgggtt

SEQ ID NO: 11643 - DNA, 242 bp, Glycine max
  Clone ID: 701152760H1
gataataaactttttttctctctttctctttgttcttctaccttattttctttccctagtcaaggagattcatctctgcagcaggttgttttagaaaagaaaaaatgctgaagatttgctgcattggggctggatatgtggggggtccaacaatggcagtcattgcactgaaatgcccctcaattgaagtggctgttgttgacatctctaaatccaggattgcagcatggaacagtgaccag

SEQ ID NO: 11644 - DNA, 242 bp, Glycine max
  Clone ID: 701152761H1
ggcgctcacatcgtgttctctgcggcgcgagctagctagggtttagaacctcgcagttacagaaaacatggcgactgtggtgccaacctccgaagaagacgctgcactctccgtcgttcgattcgcctctgaacttgcctgggccgatgccggtcccgaggttgctgagccccaagttagcagactctgcgtggaggctgaagaattcattgttatgggaaagtggttggagctagcatcat

SEQ ID NO: 11645 - DNA, 244 bp, Glycine max
  Clone ID: 701152762H1
cagagcaagaagttgttcatcttagatcaccatgactatctcattccatatttgaggaaaataaatgcaactaccacaaagacttacgctacaagaaccatatttttcttgaaaagtgatggaaccttgacgccattggccattgagttaagtaagccgcatcctcagggtgaaggatatggtcctgttagcgaagtctacgtgccttcgagcgagggagttgaagcttacatttggttactgg

SEQ ID NO: 11646 - DNA, 244 bp, Glycine max
  Clone ID: 701152763H1
ggttctagtgtgtgattgttagttgttgtaactcgttcttcttcttttgttgttctgtgtttgtgtttgttttttctctcacctgaaaatgtcttgctgcggtggtaactgtggttgcggaagctcctgcaagtgcggcaacggctgcggaggctgcaagatgtacccagacttgagctacactgagtcaaccaccaccgagaccttggtcatgggagtggcacctgttaaggctcaatttgag

SEQ ID NO: 11647 - DNA, 242 bp, Glycine max
  Clone ID: 701152765H1
catggagaaccagagagcaatgatatggttgagtacttcggtgagcaattgtcaggctttgccttcactgttaatgggtgggtgcaatcctatggttcccgttgtgtgaagccaccaatcatctatggtgatgtgagccgcccaaagccaatgactgtcttctggtcatctctggctcagagctttaccaagcgcccaatgaagggaatgcttaccggtcctgttaccattctcaactggtc

SEQ ID NO: 11648 - DNA, 240 bp, Glycine max
  unsure (1)..(240): unsure at all n locations; Clone ID: 701152766H1
ggcacattcaaccttcactgcttcgttctctttctttctccgatccatccatggattccgattctcagtttctctgattctctcgtcgaaattcgtttcccgaaccgcattcacgcgccaaccttgctcgcttcgcttctctcgcggcttcgtngattccgctttcatggaacgaattgccgcggtttctgttccgttctacaacagcgagaatttccttcttctgaatccgtttggttt

SEQ ID NO: 11649 - DNA, 247 bp, Glycine max
  unsure (1)..(247): unsure at all n locations; Clone ID: 701152767H1
gataggtggcgtttcaatgcgtgcaaccaaactagcaggatgatagtgcctccattaaacacgaaagtcgcaaagagacagtgatcttctcgttcttgtctgaagaagtcgatcatctcccaccgaagaaacagagcagaactgaactagcattgaccaaaaagaaaaatgtgcgctttgagagcgttgactaggtccgtatgcaacnncagctcctatgttaaaacttccaaaccctatctcattc

SEQ ID NO: 11650 - DNA, 238 bp, Glycine max
  unsure (1)..(238): unsure at all n locations; Clone ID: 701152768H1
gggtgcaagagctacanattctgcaagagttatgaagttcactaaggtgctttcagagacaatggttaaattagagaaattgcgtgaatnncgntggagtggtgttccagattatatgcgtcctacagtgtggagacttctcttgggatatgcaccacctaattcagatagaagggagggagttttgaaaaggaagcgccttgagtatctanactgtgtttctcagtattatgatatt

SEQ ID NO: 11651 - DNA, 236 bp, Glycine max
  Clone ID: 701152769H1
ggagacatcgaagaacagcactctggttgccgtgccaccatcttctccaaagttatcatattcgaagagaaaaaaggagtgactgtccaggttgggcaattagggacggaaaaggagaaacacgaaaatgtttttccacatagtactggagcgaaatatgcagcttcatccacgctactttggtcgtaaccttcgcgataatctcgtttccaagcttatgaaagacgtggaaggca

SEQ ID NO: 11652 - DNA, 237 bp, Glycine max
  Clone ID: 701152770H1
ggcatcaattcaaaatatatcatcaattataagcatgggtttgtggaacacaacgaatgcagtgtcttgccgctttcacaagtttggtgatgaccaaaagaatctggtcttccaaggtgatgccacgtcttcttcctggggcatagaactcacaaagttagacggtggaggaaaaccagtgggtggcagtgtggggagagtgttatactcttctccagtgcacctttgggaaagctc

SEQ ID NO: 11653 - DNA, 248 bp, Glycine max
  Clone ID: 701152771H1
gatccaaagaaatttataggcctgcattctgctgcagacgctgttgaatatctccattcaggcaaaagtgttgggaaggttgtcgtctccgtggacccaagcttccttcctcaagtggccaaattgtgaatcaacccatgtcaaatgacctcacagattatattatagctctttcaaattaaaaaggataagttaaacgtgcagctcttgtgcaagtaattttgtcgaatgtttctgaaatttgctgc

SEQ ID NO: 11654 - DNA, 232 bp, Glycine max
  Clone ID: 701152772H1
ggcacaagtgagtttcttgatcgagataactagaaacagtgtgatgaaaatgaaggtccttgttttcttcgttgctacaattttggtagcatggcaatgccatgcgtacgatatgttccctctccgaatgaacactggctatggtgcccgtactccggaggtgaaatgcgcaagttggaggcttgctgtggaagcacacaacatctttggcttgagaccatcctgaagagtg

SEQ ID NO: 11655 - DNA, 211 bp, Glycine max
  unsure (1)..(211): unsure at all n locations; Clone ID: 701152773H1
tcagtattttgtttgntatttcattgtgatggaacttgtctttattttatctcttccagtatgttgtcatgttatttcattgtgatggtttgtttgaaacaagaaaaaactaaacaaaaaggaattgtgtatgntttctttctttcatgcacctttttttgtccctttgatatgtggaatctcgggttataactttgcctaggattcaaac

SEQ ID NO: 11656 - DNA, 236 bp, Glycine max
  Clone ID: 701152774H1
cgaggaaaggttcaacaaagagactcacgttcttttctttttagctacatatggtgatggtgagccaactgataatgccgcgagattttataaatggtttacagaggggggtgagaaaggagaagggtggcttcagaatcttcactatggtgtgtttggccttggaaacaggcagtatgagcattttaacaaggtggcgaaggtagtggatgacatgctcgttgagcaagggggga

SEQ ID NO: 11657 - DNA, 182 bp, Glycine max
  Clone ID: 701152776H1
catgtctcaaaatttgttgcaaagtgtacagttgagggtttggtactttggtttcatttagttaaatttgtttgtgtctggaattgccgcttgtttgaaaatgtctctctttgctgcattttccatttgtaaagttgccaaggatgcagctggagttgcaggaaatgtgtttgcttttgggt

SEQ ID NO: 11658 - DNA, 241 bp, Glycine max
  Clone ID: 701152777H1
ggagaagacaacagatttccttgaatttggaaagaaatctttatctggaaaagtggaacccttgctcctatctttatatttaaagctcacaccgaacgagtttaatggctttgaagaagtgcagagactgtatgatcaagaaggtggcataaagctgcctatatcgaccactatgggtactgaaaatgtccttaagtttccaacacctcatgtaatccaagctagcacatttgcatggacg

SEQ ID NO: 11659 - DNA, 88 bp, Glycine max
  Clone ID: 701152779H1
ataaatgacgaatatgatattaatattatttcagataattcagccatagaaataaaacaataggtcaaataactactcatctagatca

SEQ ID NO: 11660 - DNA, 252 bp, Glycine max
  unsure (1)..(252): unsure at all n locations; Clone ID: 701152780H1
ggtgtattgacccataataacactcaaccctaattctgatccttattctcatgctcctccttcaccttccaaggttttagtctcatcaatcaataagagaggaagagagaaaccccagattccgctttacaaaggatgtcatgagtcttctcctgatncttccttctaaatccatgtcaaatttaactgaagacttcagattttgttcacgtaggctcgatcctgaagctggtgttgagaaaaaattgaagg

SEQ ID NO: 11661 - DNA, 240 bp, Glycine max
  unsure (1)..(240): unsure at all n locations; Clone ID: 701152781H1
gatcgatgcaaaaaactgaaaaaccaaagtgcttctctcctctgtctttttctctctcttgctatccttttggctagtngcactgctgcaagtgcaactccaagaagcgcagtgccaagccaccatgtctcaacattcaacagaagcctttttccttccacttttctctttggaattggttctctgcttaccaggcagaaggagcagctnncgtagatgggagaggacccnncatatggg

SEQ ID NO: 11662 - DNA, 243 bp, Glycine max
  unsure (1)..(243): unsure at all n locations; Clone ID: 701152782H1
gagcgacagatcggagcagaccctgtatggagtggcgaatggcgctgtggtctcaaattttatgcatagtcactctgctgttatgcagcgattgtgcagcatcttttgccaaggagcagcaaaaggaccgggttggtaggctcccaggtcaaggctnccaacatcagcttcgcacactatgctgggtacatcaccgtcaatgagnnagctgggagaacactcttctactggttcatgaggcat

SEQ ID NO: 11663 - DNA, 246 bp, Glycine max
  Clone ID: 701152783H1
ggcatcaattcaaaatatatcatcaattataagcatgggtttgtggaacacaacgaatgcagtgtcttgccgctttcacaagtttggtgatgaccaaaagaatctggtcttccaaggtgatgccacgtcttcttccaggggcatagaactcacaaagttagacggtggaggaaaaccagtgggtggcagtgtggggagagtgttatactcttctccagtgcacctttgggaaagctctacagtggt

SEQ ID NO: 11664 - DNA, 236 bp, Glycine max
  Clone ID: 701152784H1
ggattccggcgagaaaaaaacttggacggtgaaattggaaggttttccgggatcccaaggccgaatcttggttcaatttacgaaaagagaagagagaggaacaacaacacccgttgttgaatcttcaagctgaatcaaatcatatagagagagaaagagagagacccggataggaaaatagcgtttagagagagaaaggtgaagtgaggttgtttaaagtttgggtctggtgggtg

SEQ ID NO: 11665 - DNA, 232 bp, Glycine max
  Clone ID: 701152785H1
ggatgcgacagtgcacttgatgaatgaaattggttttgtatttttattttattcttctttattcagaatattattatattatgcatacacttgtgcgccgaacatttctttttcttttaccttaatttattgttgcgaatctttgttttgggtcatcgtttgttggttgcagagcagcgaggtgtttagtgtgcaattgttgacaaattaatggcggaaattgtagggcctc

SEQ ID NO: 11666 - DNA, 241 bp, Glycine max
  Clone ID: 701152786H1
ggagtttgtatatcttttagattgggcctatgttctccaagagcaaggaaaccttctggagctggtggatccaagtcttggttcaaagtactcctcagaagaggccatgagaatgctgctgttagcactcttgtgcaccaacccttctcccactcttagaccatgtatgtcatcagtagtgagcatgcttgagggaaaaactccaattcaagcaccaataattaaacgcggtgacagtgca

SEQ ID NO: 11667 - DNA, 235 bp, Glycine max
  Clone ID: 701152787H1
ggagaacattaccacacgacaagatccttattaccgagagcatcttcttccatcaccaaattcatggattcttcctccaacgccagcagcattggaggatctcagaggctctttgcgttagcacagcaccttcgccagtacaaggcaccgtctttccccgaagatattgtggaacaaagcattgaagagattggtggcaaggttgtttctcaggtgggatttcaagaatcagcca

SEQ ID NO: 11668 - DNA, 236 bp, Glycine max
  unsure (1)..(236): unsure at all n locations; Clone ID: 701152788H1
gatcgaagcaaaaaatgaaaacccaaagtgcttctctcctctgtctttttctctctcttgctatccttttggctagtngcactgctgcaagtgcaactccaagaagcgcagtgccaagccaccatgnttcaacattcaacagaagcctttttccttccacttttctctttggaattggttcttctgcttaccnnncagaaggagcagcaagtgtagatgggagaggaccaagcatt

SEQ ID NO: 11669 - DNA, 222 bp, Glycine max
  unsure (1)..(222): unsure at all n locations; Clone ID: 701152789H1
gatgantgctgcagaaacaaaggcagttgagccagaacctccagtttatgcaaataagatggaggctaaagatgcattcaaagcactcttggagtctgtaaatgttggatctgactggacttgggatcggtccatgcgtttaataattaatgataaaaggtatggtgccttaaaaacacttgttgaaaggaagcaagctttcaatgagtacttaaatcagag

SEQ ID NO: 11670 - DNA, 123 bp, Glycine max
  Clone ID: 701152791H1
ctaatggactttccccaacttacaatgacattacctgatggtcgtgaagaatctgtcatgaagcgcacaacactagtggctaacacttcaaacatgccagtggctgctcgtgaagcttcaatt

SEQ ID NO: 11671 - DNA, 212 bp, Glycine max
  Clone ID: 701152792H1
tcagatctggagcaggagaatagcgttggcagcgtttgcgtttgctctgctgttccaatcggcctcagcagacgacgtcgttgtgctctctgaagataacttcgagaaggaagttggtcaggacagaggagctctcgttgagttctatgctccttggtgtggacactgcaaaaagcttgctccagaatatgaaaagcttggtagcagcttca

SEQ ID NO: 11672 - DNA, 239 bp, Glycine max
  Clone ID: 701152793H1
acctacaaatagtgaaactttctttcaaaaatccattgcaataataaagaaataatttaactacttaagataagcaaagtttccgttatgtaaagaatcacaagccaatgtagtgaatagttatcaatctttttttgtgttggctatatacatcaaataagttgttcttatactcatccacttgacttctcttccatttcacctccacttcattttccatcttatctctcttttcattc

SEQ ID NO: 11673 - DNA, 241 bp, Glycine max; identical to SEQ ID NO: 8749
  Clone ID: 701152794H1

SEQ ID NO: 11674 - DNA, 260 bp, Glycine max
  unsure (1)..(260): unsure at all n locations; Clone ID: 701152795H1
ggagttgtggtgcttttgaaagatgaggccgattctgatgaaaggtcatgagaggccattgacgttcctgaaatacaacagggacggcgatctcctcttctcctgcgccaaggaccacaaccctaccgtctggtttgccgacaacggcgaacgcttgggcacttatcgcggccacaacggcgccgtttggacctgcgacgtactcaagagattcggctcgactcatncacgggaagtgccgatcagaccgccaagctatg

SEQ ID NO: 11675 - DNA, 255 bp, Glycine max
  Clone ID: 701152796H1
gtggaagaagaggtttgtcaactttctgctcaagcttaaggagaatcatgccaaagaactgactgcattaggctatatcagtggtaatggaaatgaaaagagcaatttggacagtctggtggaggccatagctggagtatctgttactagtcaacctgaacatacaaaggtcagcaaggccaaacagaggcgagacaaaagagctcaacaagaagcagaaagggagcagagaatccaagcagagcagagtgactt

SEQ ID NO: 11676 - DNA, 241 bp, Glycine max
  Clone ID: 701152803H1
ggaggaagccacatagagacacaatacagagtgggttgttgctccttcgccacaactctctgccaacatgggtatctccagagattctatgcacaagaggcgtgccactggtggcaagaagaaggcctggaggaaaaagagaaagtatgagcttggtcgccagcctgctaacactaagctgtcaagcaacaagacagtcaggaggatccgtgttagaggtggaaatgtgaaatggagggca

SEQ ID NO: 11677 - DNA, 241 bp, Glycine max
  Clone ID: 701152804H1
ggtgcaattctttgccaaaatgggcaatgggccctacggttatggtggaatcgaaggaaaaatattgaaatggttctgatttcttacttcttaggaagttgcaaaactttgtttatttctcatttcataccttttctcccgtcgatgtttgtagtcaacctttaggacgtggtactcaaaagagtattatatatttgctgtaatcagattattacatgttttgggtggaaaattgacggca

SEQ ID NO: 11678 - DNA, 238 bp, Glycine max
  Clone ID: 701152805H1
ggcacaagtttgttgagatagctagaagcaataagatgaaaatgaaagtgcttgttttgtttgttgctacagttttggtagcatatgaatgccatggctcagactaccagaagttccctctccaaatgaaaactgggtttggtgggcaatacagcaatgaggtggcatgtgccagttggaggcttggcgtggaagcaaacaacgtagtcaagtggcaaactgttcctgcagcttgcgg

SEQ ID NO: 11679 - DNA, 244 bp, Glycine max
  Clone ID: 701152806H1
ggggcgaggtagccagagagtgatacaatacagggtgcgttgttgctccttcgccacaactccctgccaacatgggtatctccagagattctatgcacaagaggcgtgccactggtggcaagaagaaggcatggaggaagaagagaaagtatgagcttggtcgccagcctgctaacactaagctgtcaagcaacaagacagtcaggaggatccgggttagaggtggaaatgtgaagtggagggc

SEQ ID NO: 11680 - DNA, 244 bp, Glycine max
  unsure (1)..(244): unsure at all n locations; Clone ID: 701152808H1
gcgagggtgatgtttgtgtggctgatccagatcagttctgaagagtgggtgttttcttggaaatagagtatttcaaaatattggggctcaagaatataagccagatgtcagactcggtagtgctgtataaattgaagaaggggctaggatgatgagtttggnngtgaatcacctgatatttgggaggtgaatggctgaaattgctgctcatgctgctaccctgtgctatgctgtggttgttgct

SEQ ID NO: 11681 - DNA, 240 bp, Glycine max
  Clone ID: 701152809H1
gggtgctgtgaatgagattacccatagatagagagcgcggcataacctaaacctacccttcttctctctgtgtgtgtgcgcatcaaacgcaaccagaagcagccatggccactgcaagaactgtgaaggacgtttctcctcatgagttcgtcaaagcttactcttctcacctcaagcgatctggcaagatggagctgccagagtggactgatattgtgaaaactgcaagatttaaggagt

SEQ ID NO: 11682 - DNA, 239 bp, Glycine max
  Clone ID: 701152810H1
ggaagagcatttggctgttaagcacttttctgttgagggtcagctggagtttaaggctgtcctctttatccccaagagggcaccttttgatctctttgacaccaggaagaagcctaacaacatcaaactgtatgtccgccgtgtcttcatcatggacaactgtgaggagttgatgcctgaatatcttagctttgttaagggtattgtggattctgaggatcttcctctcaacatttcta

SEQ ID NO: 11683 - DNA, 237 bp, Glycine max
  Clone ID: 701152811H1
atcacatcatatgtttctctatttactctatgagtagttgtgactttttggccttgttatactaaaagggagataaacattgcattagtattgcattaggaagtattaatgcattgtatacatatattcatacacaactctacctaatgatgatgatgatatgaattaacacttctcttagtattcagaaacttttaggttttctaagaaagtctctaaccttaagactctccaatg

SEQ ID NO: 11684 - DNA, 238 bp, Glycine max
  Clone ID: 701152812H1
gaggaggaattgagttgaaatcgaaagggaagcggtggtttaggttaggatttggtgagtgagtggggatggcgaagttcaatgtggtgcagaagcgaaggagagctctaatagcagagaagaagagacagcttcacggagaccctttaaccggcaagctcaagatcaaggaccaacccctttccctatccggaaaacgcaaacgcaagctcttcaaaaaatggcgtcgggaccaaaa

SEQ ID NO: 11685 - DNA, 239 bp, Glycine max
  Clone ID: 701152813H1
gcactatttttttatgtcttgtttcttgaaactataagaagggtcttttctctctttctatttatctcatctcataccctttaatgtaccccagagagatcagagagaatcaaaataccactttcttagtttcaaactcaactttttgagggtcttttctgtattaaaaacacaagagttagtcttagctaacagtgttcatatgatgaatgcttcaaagttcattaaatgtgttactg

SEQ ID NO: 11686 - DNA, 237 bp, Glycine max
  unsure (1)..(237): unsure at all n locations; Clone ID: 701152814H1
ccaggttaataattgaattgtacgcgcgaaggctttagttaaagctatgtagtttaatttaactgtacttgtgccaaattagttttgtcaatgatattcacnnnnnnnnnnnnnnnnnnnnncgttcagggggatgatggtaaaattgtgatgatgcaatagacttttgtgttccaatttgcattagcttgtaccaaattggatttatgaatgatttttttgtttacacaggattta

SEQ ID NO: 11687 - DNA, 238 bp, Glycine max
  unsure (1)..(238): unsure at all n locations; Clone ID: 701152815H1
ggcacaagtttgttgagatagctagaagcaataagatgaaaatgaaagtgcttgttttgtttgttgctacagttttggtagcatatgaatgccatggctcagactaccagaagttccctctccaaatgaaaactgggtttggtgggcaatacagcaatnnagtggcatgtgccagttggaggcttggcgtggaagcaaacaacgtagtcaagtggcaaactgttcctgcagcttgcgg

SEQ ID NO: 11688 - DNA, 242 bp, Glycine max
  unsure (1)..(242): unsure at all n locations; Clone ID: 701152816H1
ggaagttttgtggtgtggtttagtgtcaaatggcggcgagtagaagcacttttcctctgatgaaatacttgagagtgncgcgtcgacgctcttccctacaacactcccttaaccctcgctcccaactttttgattcgccgcttctgtgaagaggttaggggttgttttctcgacaagtctgaggtcacagatcgcgtcatttcctgcgtcaaaaacttccagaaagttganccctcaaaggt

SEQ ID NO: 11689 - DNA, 217 bp, Glycine max
  unsure (1)..(217): unsure at all n locations; Clone ID: 701152819H1
gaacaatgacaaccttgaagcctctaattctnttagccattattgttatgatttcaataccatcaagccactgcagaaccttgcttccagaaaatgaaaagctgatagagaacacttgcaggaaggcccccaactataacgtttgccttgagtctctgaaggcaagccctgggagctccagtgctgacgtcacagggctagctcaaatcatggtgaa

SEQ ID NO: 11690 - DNA, 242 bp, Glycine max
  Clone ID: 701152820H1
ggcacaagtgagtttgttgatcgagataactagaaacagtgtgatgaaaatgaaggtccttgttttcttcgttgctacaattttggtagcatggcaatgccatgcgtacgatatgttccctctccgaatgaacactggctatggtgcccgtactccggaggtgaaaactgcaagttggaggcttgctgtggaagcacacaacatctttggctttgagaccattcctgaagagtgcgttgaag

SEQ ID NO: 11691 - DNA, 153 bp, Glycine max
  unsure (1)..(153): unsure at all n locations; Clone ID: 701152822H1
atntcagtgtntagtacatatnntacatcactancctacatgtacaagctccttnttcgcncgttactgngggancaaggttcctntgttcatncctgcctgtcaccattatgtttaatttgttggggangtgtnnggnncttattantatgc

SEQ ID NO: 11692 - DNA, 164 bp, Glycine max
  unsure (1)..(164): unsure at all n locations; Clone ID: 701152823H1
angccanggcgggaanttcacgtggatcggncncggctacgngcaagttgagangcngnacggtgctatngacgccaaggacccgaacttcnaggatcctgtggagatcnccaccgtgtgatcncggtggtttccggtngncaagtctntnnatantagtaatt

SEQ ID NO: 11693 - DNA, 238 bp, Glycine max
  Clone ID: 701152824H1
gattggcaaagtactcaatcatcagcactagcaacagccatgggagaggtagacccagctttcatccaagacctagaacacagaccaaagctctccataatccaagctgaaggaattcccataattgacctctctccaatatccaaccacacagtttcagatccatcttccattgaaaacttagtgaagcagatagggagtgcatgcaaggatggggtttcttccagtaaccaaccat

SEQ ID NO: 11694 - DNA, 238 bp, Glycine max
  Clone ID: 701152826H1
ggtattcgttgggggtcctctctccgctctcttgcactctcccttgttgcccgtcttcggacacatgattttccaattgcatacaaatttaccccaacgcttcatccattttctttcgattcacacacaaacagatgagtgttgttaccgattctcctgtgcattcgtccagcagtgatgacttcattgcatttcttgacgctgaactagatgcaagttcactggactcgtcgcctga

SEQ ID NO: 11695 - DNA, 237 bp, Glycine max
  Clone ID: 701152827H1
atctagccccttctttcatctatattagctcctaaagtgtaaagtcctttcgtgtcatgagaagctaaaccccattgttgggagcctagtagggcaacactcttgtaatgtaattgttcttattatttattaaatgtaatttctttttctattgcttcttttttgctcttcatctttattgtatggtctgatcatccatgaattagtttttagggattatacattggaaaatgataa

SEQ ID NO: 11696 - DNA, 237 bp, Glycine max
  Clone ID: 701152829H1
cgcccgcaagacacccagtggacccggagaagtccaacagggccttggggtttccagctcgggttacaggcctttgtcagttctacgaagcgctcgttgcccccagcaaggtcatttggccccccattaaccgggctttgatcaagaagtattgcgcccccaggcaggcgcagggcgagacaccacggcagcctagggatggctgactgcaggcaacaggcacaccgccaccacctc

SEQ ID NO: 11697 - DNA, 236 bp, Glycine max
  unsure (1)..(236): unsure at all n locations; Clone ID: 701152830H1
ccccattaacttcatttgaaaacagaggaactcttttggtgggagctattgggacacttcttctaactcgtcttgatatctttggtggctttagatgtgatgcgagattaggtattccacttgcagcagagaantttcatgagtataaatgtgtcagttttgtgaccaataaaagtgatcttatgctttcataagttatgtaagataacaagtgattatgcattttcaaataccaa

SEQ ID NO: 11698 - DNA, 241 bp, Glycine max
  Clone ID: 701152832H1
gcccttttaatcggaagaagagccacgctgaggcctaagatctccgaattccaagcgcctcttgatagggtctcccaccctaaccaagccagatcccgttttcaattccttctcagtttccttttctctgaaaaaacatgttgagggttgcagctagaaggctctcttcttctctctcatcttcttctccgttgcggcccaatcacgccgcttccgcttttctctctcgaaacgacgtcgt

SEQ ID NO: 11699 - DNA, 242 bp, Glycine max
  Clone ID: 701152833H1
ggcagttcaaagcgaaaagagattcgaatccaaggaagggaaaggaaagtaagagaagagaagaatggccgaagagggacaagtgattggtgtccacagcgtggaggagtgggaggaacatctcaagaagggacaagagtccaagaaattgattgtggtggattttactgcttcttggtgcggcccatgccgtttcattgccccaattcttgcggatatggctaaaaagttgccgaatgtca

SEQ ID NO: 11700 - DNA, 248 bp, Glycine max
  unsure (1)..(248): unsure at all n locations; Clone ID: 701152836H1
accattgtcaaatgttcttacaatgctgtggctctcagtccgagcttaaaatcccaatatgcttcagcacagatgtcaccaattcaacccttgcgattgcttgttcctacaaattatcctaattgttcccccatactcctagacaagtttccagttgaatccagtaaggannatgaagatctttctgtgaaagcgaagtcaaggtttagcatatccttgcgaagtttatcacaacctatgtcccttgg

SEQ ID NO: 11701 - DNA, 234 bp, Glycine max
  Clone ID: 701152837H1
agtgagaaataggaaaggatatttatctatggcgatttgcaagttgaaatctttgctttctctttcgaaatgcaactctgcgttggtctcctcttcaatacgcgctttctcttcggcacagaatgttggattcattgggcttggaaatatgggatcacgaatggcaaataatctgatcaaagctggattcagactcacagttcatgacctaaactctgatgttctcgagatgtt

SEQ ID NO: 11702 - DNA, 236 bp, Glycine max
  Clone ID: 701152838H1
ggcgtcgctccgcaccagtttcaccgcacgaatatcttgttgtttggagcgatccgagaaaaaccctgtaaacatgttggtttaccaggacctccttacaggtgatgagcttctctctgactccttccgttacaaggaaattgagaatggaatgctgtgggaagttgaggggaagtgggttgttaaaggagcagttgatgtagacattggtgcaaacccttctgctgagggtggag

SEQ ID NO: 11703 - DNA, 217 bp, Glycine max
  unsure (1)..(217): unsure at all n locations; Clone ID: 701152839H1
cccagaagatgacacnaagggtgtcaaagagggagacgggatgctgagggaattgtgaagtgttgaccaatgtgttggtccattttgttgccttgtaacacaaacatggtgctcatttgactgtacacggttgcaaaggcaatcatggttgcccaaactgggagcaaatgaattatggatttgagctcctcaacttgtgtcactgtgcacagcctcc

SEQ ID NO: 11704 - DNA, 235 bp, Glycine max
  unsure (1)..(235): unsure at all n locations; Clone ID: 701152840H1
ctaatttatttcaagataatttgtaataaaaaaatagttgataatttataactaatttgtagctaattatttttnaatatatttnnnttgtagtaaggactaanagataattaanataaaanttttagaaactnaaaanattactttcaaactatagggactaanagattattaanatacaaactataaaggctaaaanaaccactnttnaactagggactaanagagattanca

SEQ ID NO: 11705 - DNA, 235 bp, Glycine max
  unsure (1)..(235): unsure at all n locations; Clone ID: 701152842H1
ggaacacttgcagcttcggtttcttaattcatcttcgctagggtttttgaagttgacgatggcttcccctcctcatttcgacgacgactttgattttggaggcggttttagcggaacgcaatcaggtaataagaggnccatctcccgactatgacnaggatgaatatgaaaatgatccttttggacacaagaaggccaaatcaaaagctgaagaagcggcttctggtgtgaccac

SEQ ID NO: 11706 - DNA, 232 bp, Glycine max
  unsure (1)..(232): unsure at all n locations; Clone ID: 701152843H1
ggttgttattgttgttaaaaagcttcattaaagtgccttcaattctcctcctctttcaacgcccctttctcaactcaatccaattttcttctgcttcccttcgaatccgagatccgcttccaatctcattaatgggttcattttatcttggtactttttaatgggttatttctcaatgcaaacaatttattcctcaaggggttctgtttgtcnagancnaggtttggcnaca

SEQ ID NO: 11707 - DNA, 234 bp, Glycine max
  Clone ID: 701152844H1
ggccttccaaacgaatataatcatacatgataccttggaaggaactggtgcatcttggttgcgaaaagtatatggtatttgtgccatcaataagaagagaacctggtatattcacattgtacagccaatagattccttgaattccatgtcttgcaattgagttgtcccttcctattaatccactggtaaatacgggttgtcttgcattggcatcgtttactcgaatcttcacag

SEQ ID NO: 11708 - DNA, 233 bp, Glycine max
  unsure (1)..(233): unsure at all n locations; Clone ID: 701152845H1
ggagcaatcgcgtgaattttcaacgggattttgcagagnttccgcgttgaaaccatccaaccctcttagcctcatattcgtngtctatacttccctccttccttcgtgtaattacatttttttcatcagcagttccaggaccaaattgatacacaagatcactgtttttttagagagagattgagagaggatgtttggttcaaaganaactcctctgagagatgctanaccta

SEQ ID NO: 11709 - DNA, 235 bp, Glycine max
  Clone ID: 701152846H1
gggatacatggggacgatttgttgaaaggagtacagcatatcatccatggttatggtctgctggaaatcacgaaatagactatatgccttacatgggagaagttgttcctttcaaaaactatctttaccgatatactactccctacttggcctccaatagctccagtcccctctggtatgcagttaggcgtgcgtctgctcatataattgtgctatccagctattcaccatttgt

SEQ ID NO: 11710 - DNA, 93 bp, Glycine max
  unsure (1)..(93): unsure at all n locations; Clone ID: 701152848H1
tggtactttgtcgctgcgctcctcaccgtcctcaccagttctcagggaatactaaccaccctctcgnaaagtaaaggagagtacaagtatgat

SEQ ID NO: 11711 - DNA, 241 bp, Glycine max
  unsure (1)..(241): unsure at all n locations; Clone ID: 701152849H1
caagctgagtttttgatccgatctctctcagaaatggctgcggctgccaatcctgtagttgggtcccatatttgggtggaggatcctgatgtggcttggatagatggtgaggtcttggaggttaaaggagaagaaattaaagtcctttgcacttcagggaanncggttgttgttaaagcttccagtatttatcataaagatacagaagtcccaccaagtggagtggatgatatgagaaagc

SEQ ID NO: 11712 - DNA, 239 bp, Glycine max
  Clone ID: 701152850H1
gaaagcaagaatgattttgacctcggcctcaacgcgctcgattatgaggtctggcttggtgatgttagcattggtggtgcagaactcaccaagtctgctaaaattgaaaaaagtggaattagttatattgatattccaattaccttcaggcctaaggattttggctctgcactatgggacatgattagaggaagaggaactgcttacaccataaaaggacatattgatgttgacactcc

SEQ ID NO: 11713 - DNA, 215 bp, Glycine max
  unsure (1)..(215): unsure at all n locations; Clone ID: 701152851H1
gcacaagtgagtttgtngatcgagataactagaaaangtgtgatgaaaatgaaggtccttgttttcttcgttgctacaattttggtagcatggcaatgccatgcgtacgatatgttccctctccgaatgaacactggctatggtgcccgtactccggaggtgaaatgcgcaagttggaggcttgctgtggaagcacacaacatctttggctttga

SEQ ID NO: 11714 - DNA, 232 bp, Glycine max
  Clone ID: 701152852H1
gtctctggatctgtttgtagttggtgtgaaaaatataatatgctgatcttctttctctctctcgtgaatagaggtgaaagttgtgttgcattgtgaaatcttcttatgggtgaatgattggagttcaatttcatttggagtggtaatggctgatgtgactgcagctaaccgggatcaatgaatttagtcttttattatatgcatccatcacttagtaaatcaaaatcagaat

SEQ ID NO: 11715 - DNA, 215 bp, Glycine max
  unsure (1)..(215): unsure at all n locations; Clone ID: 701152853H1
gatcatcggcagcagcaaaatattatttantttattttatttctcgtcattccctccttctttccctcatttttcgattttgctgctctctcttccctttttttctctgctacacttgtgttgtgcaccttanncctctctccagcaacaacaaaccatgaacgcctccataattgggcgatttcccagaagtgatagaggagtatttggaacat

SEQ ID NO: 11716 - DNA, 234 bp, Glycine max
  unsure (1)..(234): unsure at all n locations; Clone ID: 701152854H1
ggtggcagttgtgtgacacagaaattaagctagagcttcatagtttcttcttcttttctcaccttccttctctcccttcagacaaagggacaaaaaatcnnnnnnnnnnnnnnnnnnnnnnnnnttccaaaaccatgtcccacagtcatctaagtttcgcctttgggattctaggtaacattgcctccttcgtgtgctttctggcaccactaccaacattttatagagtttgta

SEQ ID NO: 11717 - DNA, 211 bp, Glycine max
  unsure (1)..(211): unsure at all n locations; Clone ID: 701152855H1
ggggggtagactattctgtatgctggaattgttngatggcacctaatctccttgcaaacatggacaccattggccctgcagctctcaatcctgggaaaggtgtaaaggagttgaacttatgcagctttgctgtgtgatattgatttcccttatcatccttaaggacagtggaatcctctttattgacacaacaattatgtaaattttgagc

SEQ ID NO: 11718 - DNA, 203 bp, Glycine max
  unsure (1)..(203): unsure at all n locations; Clone ID: 701152856H1
gatgcacanngtttanttgagatagctagaagcaataagatgacaatgaaagtgcttgttttgtttgttgctacagttttggtagcatatgaatgccatggctcagactaccagaagttccctctccaaatgaaaactgggtttggtgggcaatacagcaatgaggtggcatgtgccagttggaggcttggcgtggaagcaaa

SEQ ID NO: 11719 - DNA, 233 bp, Glycine max
  Clone ID: 701152857H1
gacatgcataagaacaagcacaaggtctgattcgtgtttccttacatcaacttgtggtctaaaaatgggaaggatgccatgctgtgagaaggtagggttgaacaaaggaccatggaaaaccgaagaagatgagaagctcgtggcttatgttgaatggcatggccctggaaactggcgttcagtgcctgccaaagcgggtcttcaaagatgtggcaagagttgtagactgaggt

SEQ ID NO: 11720 - DNA, 233 bp, Glycine max
  unsure (1)..(233): unsure at all n locations; Clone ID: 701152859H1
atccgtatgtttaaattatacttacggatcaagtttatccatacaaatcatacantttcaatgacgaactcccgtaccttcaatgtaggataattttggaattaatgaaaaatgttgggcgcacaagcaatagagctggtgcacctagcatcactagataacaaaagacaatcttgaatcaaaccatcaaaataactaaatagagctggacattgcgagtttttgtttttttg

SEQ ID NO: 11721 - DNA, 175 bp, Glycine max
  Clone ID: 701152860H1
ttgttgtttgtgtgtttgttttttctctcacctgaaaatgtcttgctgcggtggtaactgtggttgcggaagcgcctgcaagtgcggcaacggctgcggaggctgcaagatgtacccagacttgagctacaccgagtcaaccaccaccgagaccttggtcatgggagtggcacca

SEQ ID NO: 11722 - DNA, 229 bp, Glycine max
  unsure (1)..(229): unsure at all n locations; Clone ID: 701152861H1
gagattatatttggaagttgctgagaacttggctgccatggatgaagcttcaggggctttcctttctcggaggctttaggagacagactggcaattatgctgttgctgcttccattattagtatagagttgcagtgtttttcattccacttgctctattgancatcctgtgatatatatgctgtttactctctttagcagttaaagaacaatatttgagacaggtgact

SEQ ID NO: 11723 - DNA, 233 bp, Glycine max
  Clone ID: 701152862H1
gggaggatgatgatatttacattagcaatcggaaggatgcattgaggacaatgcggtcagcatcacgacattctagggcagcttctagtgcttttcttagaggtgatcatttttctgctcaacatcattcaatgaaagctcgggcggaacggcatactgctgaagaacttaattctgatgcagccaaaaaaattttaagcgtcaggaataatgaaaatgatatctggaaactt

SEQ ID NO: 11724 - DNA, 214 bp, Glycine max
  unsure (1)..(214): unsure at all n locations; Clone ID: 701152863H1
ggcagcagttgagangaggcactgtggcagaagtcctaggagtgtaaaacagagacgcaaaatgaagacgatcttgtcgtctgagaccatgaatattcccgacggcgtgagcatcaaggttcacgctaaggttatcgaggttgagggccctcgtggaaaactcgtgcgagacttccaccatctgaacttggacttccaacttattaccgacgat

SEQ ID NO: 11725 - DNA, 238 bp, Glycine max
  Clone ID: 701152865H1
gggcataagccaacttgagctgaattactactctaaaagctgcccaaaagctgaagagatcatcaaggaacaagtcacataactatataacaagcatggaaacactgccgtttcgtgggtcagaaatctcttccacgattgcgtggttaagtcatgcgatgcatcattactgttagcgacggtgagcgatgtagtgtcggagcagacatcggatagaagttttgggatgagaaacttc

SEQ ID NO: 11726 - DNA, 217 bp, Glycine max
  unsure (1)..(217): unsure at all n locations; Clone ID: 701152866H1
anngatagctacagttaggggcaagctcaagaagggtggaatagttgacattaatgctgctgcaagaatcgttcttcatgattggaatgaaggtaaaattatatattataccattcccccaaatagggatcaaacngnacctgcagaggttaagatagtttctgagtttntcaaaggagtttaacattgatgaagtctacaagagtgaatcttcata

SEQ ID NO: 11727 - DNA, 229 bp, Glycine max
  unsure (1)..(229): unsure at all n locations; Clone ID: 701152869H1
gaggaattggtaactttgcagaattgccccaaccctcccaagaagctgaagccagggacctattggtatgataaagtatctggtctttgggggaaggagggacagaagccttcacaaattataagtccgcatctgaatgttggaggctcntccaacaggatgccagcaatggaaacactcaggttttcattaatggtcgggaaataacaaaagtggagcttcgaatgtt

SEQ ID NO: 11728 - DNA, 247 bp, Glycine max
  Clone ID: 701152870H1
tccaccccaaagattgacgaggtttacctatttaaatttttttaaaatcttttatttattaaatgcctattttgaagttgtgaaattatgtctagatctatgaaagccaaatactcaaattggcaaagtatagtgtcaaatgcatgtctaacaacgatatgcatataatatgccaatttagtttatttttaattttttttaccaacttttgggatacatactcaggtacggtctgagatatgatggc

SEQ ID NO: 11729 - DNA, 230 bp, Glycine max
  Clone ID: 701152871H1
ggaggagatcctgaagtaaagacaataattcagtggcttgcagcttctcaggctctaagacctttcatagcttactacacatttggcttggaggcattgcagagcctagacgaggttgctcattggattttgtctcagagatggacagttggggacctatggaacatgctaattgagtactcaataaatagatcaaaaggagaaactaatgtgggcttccttcaatggct

SEQ ID NO: 11730 - DNA, 234 bp, Glycine max
  Clone ID: 701152872H1
gaacacgcggctgccgccggaggtgaaccgcgtgctgtacgttcggaaccttcccttcaacatcacgagcgaggagatgtacgacatcttcggcaagtacggcgccattcggcagatccgcatcggcaccaacaaggacactcgcggaacggccttcatcgtctacgaggacatctacgacgccaaaaccgccgtcgaccacctctccggcttcaacgtcgccaaccgctacct

SEQ ID NO: 11731 - DNA, 229 bp, Glycine max
  Clone ID: 701152874H1
ggaagcacgttggcgtgaacacgatgatgaggtcaaagatagtgttgtttggagactccataacggagcaatcgatccgagagaatggatggggtgttcctcttgccaatgcctattctcgcagggctgatatacttgttcgtggttatggtggatacaacactgagtgggctatgttcttactggaccatctcttccctctggactcaactaaaccacctattgctac

SEQ ID NO: 11732 - DNA, 208 bp, Glycine max
  unsure (1)..(208): unsure at all n locations; Clone ID: 701152875H1
acactcaaaacacanttaaattgaaaaatgttatatgatacatacaattaattttaattcacaaaactcacattacatgcaattccataaatacttttggtattgcgtttcagtcagaattagagttacacctcgctaattttgaatctcaaattctgattgaagaattagaaaacaacactaaaaaattgcgtctagttttatcata

SEQ ID NO: 11733 - DNA, 209 bp, Glycine max
  unsure (1)..(209): unsure at all n locations; Clone ID: 701152876H1
ggaatcaaaccctantagattcacgacgctaaaccaggtggtggaggagctccaggccaagctcggccacgacctcactcacaaaatcgatttcatcaccgcgcagatcaacctcctcttcggatcccgacaaccgcaacaaccgccgcaaaacccgcataggcagttacaacagcctaaggaccattttgcccctccgccaaacccta

SEQ ID NO: 11734 - DNA, 229 bp, Glycine max
  Clone ID: 701152877H1
ggaaccacacatttttcattaccgccgtgataacacactaacaccaccacttcatcaactttacttgacaacaatattgtaaaactcaaaatctggtttcatactttttttcttcttcttgaaatggctctccaggctgcttctcttgttcctgcttctttctcggttcttaaagagggaaagagtggtgtgtctctcaaggactccaccttgttcggtctttcatttt

SEQ ID NO: 11735 - DNA, 232 bp, Glycine max
  Clone ID: 701152878H1
gagagtggtggggtgtgcagaagagcgtcgcagttgtaaccctaatcagaagaagcgcagttcaagcgagtgacagccaccagccatgggtcgtatgcacagccgcggtaagggtatatcctcttctgctttgccctacaaaaggacacctcctagctggctcaagatctcttcgcaagatgtcgaagaaaatatctgcaagtttgcgaagaaaggtttgaccccgtctcag

SEQ ID NO: 11736 - DNA, 235 bp, Glycine max
  Clone ID: 701152879H1
ggcacaagtgagtttgttgatcgagataactagaaacagtgtgatgaaaatgaaggtccttgttttcttcgttgctacaattttggtagcatggcaatgccatgcgtacgatatgttccctctccgaatgaacactggctatggtgcccgtacttcggaggtgaaatgcgcaagttggaggcttgctgtggaagcacacaacatctttggctttgagaccattcctgaagagtgc

SEQ ID NO: 11737 - DNA, 234 bp, Glycine max
  Clone ID: 701152880H1
ggcctcattcctatctcaagtctcacttttttcagcttctctaaattctctgtcctacttcaccaagcacttttggttgcagctttggttaatttccaatatggtgtttcctctcctatctatctttgctttactcaatcttgcagtggtggcaacccatgcagaaaccttgccccctgaagtttgctggaagtcgaagcttcccaccactccaatgccgaaagccattacaga

SEQ ID NO: 11738 - DNA, 230 bp, Glycine max
  unsure (1)..(230): unsure at all n locations; Clone ID: 701152882H1
ctgggggtttattgtgtatctggaacaataataatttccaggttgaggtcaaaactgctgaaaggggattcattatgttggagggggtttngatggaagaaatgcagagagtcgtggtggccaacatttatgctccttgtgagatagaaagcaaaagacaattgtgggagaagctgtactcaaggaagagccagtcccagattcagtcttggtgcctggtgggagacttt

SEQ ID NO: 11739 - DNA, 239 bp, Glycine max
  Clone ID: 701152883H1
tgactttcaggttaaatgtttcaatgctcctttgcaaccatctgaaattgtgggtgtaaagaaggttgtacaagaaaaattgtctgaaggggtgaatgaacgtggacttactttgactggattcttatttcttcatgcccttttcatagaaaaagggcgtcttgagacaacatggactgtgctcaggaagtttggatataatgatgatatcaagcttgctgatgatctaattccaccta

SEQ ID NO: 11740 - DNA, 236 bp, Glycine max
  Clone ID: 701152884H1
cagaacaagccgcagaaatctagaattccagtcttggagaagcacctcattaatcagctgagttcagatgagcaaaattcaattaattcaaagtttcaagaagcgacagaagctgataagaaggtggaagaacttgagaaggaaattatggagtccagagagaaaatagaattttaccgtgcaaaaatgcaggaacttgttctgtacaaaagcagatgtgacaatcgtcttaatga

SEQ ID NO: 11741 - DNA, 232 bp, Glycine max
  Clone ID: 701152885H1
ggtgtacaagtgagtttgttgatcgagataactagaaacagtgtgatgaaaatgaaggtccttgttttcttcgttgctacaattttggtagcatggcaatgccatgcgtacgatatgttccctctccgaatgaacactggctatggtgcccgtactccggaggtgaaatgcgcaagttggaggcttgctgtggaagcacacaacatctttggctttgagaccattcctgaag

SEQ ID NO: 11742 - DNA, 194 bp, Glycine max
  Clone ID: 701152886H1
tgcaacttcctctgttttgctcccctgtttaagccttatcataagcttagaatggcacacaaggaattttccattgccctagtgactctcattgttctctttgtcaacacgaacctccaaggtgccacggctgactatggtggtggttggcagagtgctcatgccactttctatggtgggggtgatgcttctgg

SEQ ID NO: 11743 - DNA, 205 bp, Glycine max
  unsure (1)..(205): unsure at all n locations; Clone ID: 701152887H1
ggacaccaacaacaaaacaaacccactaagatngcttccttagtatccttcctagtgctgcttcttgcagcccttatcctcatgcctcaagggcttgctacttactacaaaccaattaagaagccaccagtgtacaagcctccagtgtacaagccaccagtgtacaaaccaccggtttataagccaaaaccaccggtttacaagc

SEQ ID NO: 11744 - DNA, 231 bp, Glycine max
  Clone ID: 701152888H1
gaggaaggaatcaaagattgattctgctgtggatgaggattttggctctgacttggcctctgctgcttacatgaatggtgttgaccacgaggggcaccctgtgtgctacaacatctttggtgcatttgaaagtgaagagctttaccagaagacttttgggaccgaggagaagcgcagtgagttcttgaggtggaggtgccagttgatggagaagggtattcagaagctcat

SEQ ID NO: 11745 - DNA, 249 bp, Glycine max
  Clone ID: 701152889H1
ggccgaagaaggaattggttgaggaacaggaagtgccgcaagagccttttgttgctcttacaagtgaggaggaagatgaggttgaatgtgccttttcttccaactggaggaggatcttggttacccacgagaattctaacattgtgatcacgggagagaagtttcagtgccttaggcccactggatggttaaatgatgaggttataaatttgtacctggaattgcttaaggagagggagcaaagagaac

SEQ ID NO: 11746 - DNA, 206 bp, Glycine max
  Clone ID: 701152890H1
aaagagacccggaaagggtgggaaccgcttttggaaatccattgggcttggatttaagactcccagggaagccatcgaaggaacctacattgacaagaagtgccccttcactggcaatgtttccatccgtggccgtatcttggctggaacatgtcacagtgctaagatgaacaggactattattgttaggaggaattatctccatt

SEQ ID NO: 11747 - DNA, 229 bp, Glycine max
  Clone ID: 701152891H1
gattgccttctttttgatttagatgatactttgtatccactaagcactggtcttgcaaaagcatgtggccaaaatattaaagactatatggtggaaaagcttggcatagacaaaagcaaaattgatgacttgtccaacctcctctacaagaactatggaacaactatggctggtttaagggcaattggatatgactttgaatatgatgaatatcacagttatgttcatg

SEQ ID NO: 11748 - DNA, 227 bp, Glycine max
  Clone ID: 701152892H1
ggaaaagctacaaaatgaacagttcttgtgcggacattcttctctttgctgcccatagatggccaatgtcaaagcctagtcttgtaggtgaatctaaggatgtttttgatcagaaggcaagcaataagtactggattgatgttcagctgcgatggggtgattatgactctcatgatattgagcgttacactcgggccaaatttatggactacacaacagataacatg

SEQ ID NO: 11749 - DNA, 159 bp, Glycine max
  unsure (1)..(159): unsure at all n locations; Clone ID: 701152893H1
ggaaaaataaatagtaagctttggttgaaantctgttgtgtaaacttgttgtaggtttattgggccgatttgtctcgttatatatgaatttttgctttgctgtattggttaatattggcactccttcaatgataacatgattgtcctttttgttttgtt

SEQ ID NO: 11750 - DNA, 231 bp, Glycine max
  Clone ID: 701152894H1
aaatcggagcttgcgagagaggaggccaagctggaaagagaagtcatcaagatcgtcctaagcggaaacggcgagtccgtcctcaagcccaattcgggccaggccgtgtcggttcgcgaccaccacatatgtgtcgggtttcaagacgaagaggattctgggtatcgcgtgtgggagtggcatggccacatcatgtcttttgatgaggatttgggtataaccctgagtata

SEQ ID NO: 11751 - DNA, 232 bp, Glycine max
  Clone ID: 701152895H1
gagagaagggaaggaagagtgggtgttggtggttgtcctcctccctcctcatgggtatggcaaccctctcctcctctcttcctcttttccatcgctaccctaaccctaaccctaatccttcgctctttcgcccctccctttccctctccttctccttctctcgcactaaaccccgtcgtgccccctttctcgttctcgcttcctcttcccacgatttcacctccaactccaa

SEQ ID NO: 11752 - DNA, 234 bp, Glycine max
  Clone ID: 701152896H1
gactcataaagatagctaggtaagagggtgtaagggaagagaaagagatcatagaagagatatagtttaattttgctttgctttaatttgtgaggatttgatttgatggaagaacatctcactccattggctgttacccatctccttcaacacactctcagaagtttgtgcagccatgaaaattctcaatgggtctatgcagtcttctggagggatcttgcctagaaactaccc

SEQ ID NO: 11753 - DNA, 272 bp, Glycine max
  unsure (1)..(272): unsure at all n locations; Clone ID: 701152902H1
ggaggcgagggtaaggtcgcgttgtgttgcgtcgtgtcgtgcgctgttcctctgtttctcgtttttgtgttcagaccgaaccctagctccgcatcgcaaccatgtcgaccaagcaaggtggaaaagctaagcctttgaagaaacccaagtctgataagaaggattacgacgagattgatgtggctaacattcagaagaaaaaggangaggatttnngctaaaggntttgaaagcnagggcgaaananaggggantntttgtngnttcgggnc

SEQ ID NO: 11754 - DNA, 245 bp, Glycine max
  unsure (1)..(245): unsure at all n locations; Clone ID: 701152904H1
aggaaggggaagctggccatgacggtggaggtattcgaggtggcgccggaggtcgcggtggtcgagttctccaagtccgccggagacacgcttgaataccttaatttctgtgaggaccaagtcagaccttcgctcagggatattgtgtggagttggcaaggggacgctaattgccaccagtaactattcaattcaatttagattatggcagcacgnaataaatnnctggagtttngggatttgat

SEQ ID NO: 11755 - DNA, 250 bp, Glycine max
  Clone ID: 701152907H1
agggaaacaaaagcattcctccagaattaggagcacagttgcggaagccttggaagacattactgctctcttctatgatgaagagcgcaacgagatctatacaggcaataggcatggtctggttcatgtctggtctaactgatgcattgttgagtttattcttgtctcgtgttttctcattagtattgatccatgggttgcagtcatagttctctcctgatgtaagaacctttgggagagctgtaaccat

SEQ ID NO: 11756 - DNA, 259 bp, Glycine max
  Clone ID: 701152908H1
ggtggtagtgtggcagcgacacgtatcaacttcaataatcgcatcgcagaagcagtttccggtgcatctcatcgtctccgaaaatgaacgacgcagatgtctcgaagcaaatccagcagatggtgcggttcatccgccaggaagctgaggaaaaggccaacgagatctctgtctccgccgaagaggaattcaatatcgagaagctgcagttggtcgaagccgacaagaagaagatcaggcaagaatacgaacgcaaagt

SEQ ID NO: 11757 - DNA, 252 bp, Glycine max
  Clone ID: 701152909H1
atgttctcaaacagcctgttgatgttattacttgcctgcatcagtgcactcccaagccctgaaggaaacaactctaacaaacaaacacaacaatgtaagcttctctttcacaagtactgattgaaggaaacaactctaacaacttacacaaaacaagcacatcattccctcttcatgacaaaaaatttacaacttggacaatcactaccattttatgatcaattcaccacttcttatcttgaatgtaatttt

SEQ ID NO: 11758 - DNA, 248 bp, Glycine max
  unsure (1)..(248): unsure at all n locations; Clone ID: 701152910H1
gggtgtcatctgaaaatctagttccttcgttcttgtgtatttcttctggtatactatctcttcacactctgcagagtgcttgatttttttttgccttgtggcagttaatataaagccacaggtggatcaagtagcaagatgcttgccatgcaattcaatatactttatacacgtctaaggtaatatgaaggagctcttttttatttnctattagctcggtctcnagtattgaagactgaaacctttat

SEQ ID NO: 11759 - DNA, 262 bp, Glycine max
  unsure (1)..(262): unsure at all n locations; Clone ID: 701152911H1
gatcgaagcaaaaaatgaaaacccaaagtgcttctctcctctgtctttttctctctcttgctatccttttggctagtggcactgctgcaagtgcaactccaagaagcgcagtgccaanccaccatgtttcaacattcaacagaagcctttttccttccacttttctctttggaattggttcttctgcttaccagggcagaaggagcagcaagtgtagatgggataggnccangcatagggacacntacactngncngtntnt

SEQ ID NO: 11760 - DNA, 251 bp, Glycine max
  Clone ID: 701152912H1
cacccttttagaatctgattgttccttatctctgttatttttatatttccagttaagttcaatgcattattaattgcactgcgatctcaaattccttatcatgttcatttacttctgtagaaataggctttttttttccttgagattttgttaagtgaacaaggttcacgctagatagagagtatcaagtgatattgttataaattcaactgatccgttgggcattgtaaatttatataatgccaataatt

SEQ ID NO: 11761 - DNA, 248 bp, Glycine max
  unsure (1)..(248): unsure at all n locations; Clone ID: 701152913H1
gatgcagactggttganagctgttgttgagcaaaccggcacccttactcataccagcaatatattccacacaattcctcaggaccgaacttgcaaagcgtcttgtggcttcttcttttgctgatcgtgtattctttgcaaattctggaactgaggcaaatgaagcagctatcaaatttgcaaganagtatcagaggcacacaacttctaacgggaaagttccagcaacagagttcatagcttttagta

SEQ ID NO: 11762 - DNA, 87 bp, Glycine max
  unsure (1)..(87): unsure at all n locations; Clone ID: 701152914H1
aggtatgttttcattagtcatgttttttttttttttnangtatnatncattngccacgncatgtntccncggtnggncaaataaaga

SEQ ID NO: 11763 - DNA, 237 bp, Glycine max
  unsure (1)..(237): unsure at all n locations; Clone ID: 701152915H1
aagacgacagaagggggaggacggccagctgtgcaagcacaaccagagagggaggctatcacacagctactatgcatactggggcaagatttcacccgtgccgctgcaaagagaagagtgcggnccatgcgcaccaacatgaccactcttacncagatatagatgatattgctacttagcaacattctgcccagcgaccgcaacgccaatctccccctggcaaaagtatcagttggt

SEQ ID NO: 11764 - DNA, 259 bp, Glycine max
  Clone ID: 701152916H1
agaaagaatggcacgcatcaaagaggatccatctctgaaacatattttggaggagatagagactggcggtcctgctgctatgatgaggtactggaataatgaggaggttttgcagaagttgggacaagccatgggtcttgccaattcgggagatgcaggtgcctctgctgaaaattctggggcagatgagaccgaagatttgggaaatgaagatgaatcaattgttcatcatactgctagtgttggtgatgtggagggc

SEQ ID NO: 11765 - DNA, 225 bp, Glycine max
  unsure (1)..(225): unsure at all n locations; Clone ID: 701152918H1
cccttagccaacacaaccntcatggccacctctgctnttcagcantcngcnttcactggtcaaactgctctgaagcagctcattganttcntccgcaagaccggtggcgccggcaaaggtcgcantaanntgcgccgcaccgtnangtntgctcctnagagtttnggtatggcctgnccgtccaaantntgngggtccttttngnngcatnttcaatcntncggg

SEQ ID NO: 11766 - DNA, 257 bp, Glycine max
  unsure (1)..(257): unsure at all n locations; Clone ID: 701152921H1
ggcatcaattcaaaatatatcatcaattataagcatgggtttgtggaacacaacgaatgcagtgtcttgccgctttcacaagtttggtgatgaccaaaagaatcncgtcttccaaggtgatgccacgtcttcttccaggggcatagaactcacaaagttagacggtggaggaaaaccagtgggtggcagtgtggggagagtgttatactcttctccagtgcacctttgggaaagctctacagtggtcgcaagctttg

SEQ ID NO: 11767 - DNA, 252 bp, Glycine max
  Clone ID: 701152923H1
gatgataagtaggggtttcctcccaagtgctaccacttataactacttttttaggtacttttcaagatgtagaaaaatcgaggaggggatgaacctgtatacaaagttgattcaatctggttataccccagatcggttaacttaccatcttctggtgaagatgttatgtgaagaggagaagttggacttggcagttcaagttagcaaggaaatgaggcataatggatatgacatggacttggctacgagtac

SEQ ID NO: 11768 - DNA, 251 bp, Glycine max
  Clone ID: 701152924H1
ggaagttttgtggtgtggtttagtgtcaaatggcggcgagtagaagcacttttcctctgatgaaatacttgagagtgcgcgtcgacgctcttccccgcaacactcccttaaccctcgctcccaactttttgattcgccgcttctgtgaagaggttaggggttgttttctcgacaagtctgaggtcacagatcgcgtcatttcctgcgtcaaaaacttccagaaagttgatccttcaaaggttaaccctaat

SEQ ID NO: 11769 - DNA, 249 bp, Glycine max
  unsure (1)..(249): unsure at all n locations; Clone ID: 701152925H1
ggcacacacttcctcttaaggatatcttgatccaattggaattgaaataacaattcaaccagcgatggcttctcacagtttcatcattttggcccttttcatttctatttccttctctagcatggacatgacattagcagcacgccatctccagcagacnncaaggtcatctttgcaactattcccatttctgccaagcatcacccttccaactccacgatgcnaaacatcaccctcacaaacgtcacc

SEQ ID NO: 11770 - DNA, 248 bp, Glycine max
  unsure (1)..(248): unsure at all n locations; Clone ID: 701152926H1
gactcactgttgttctcaagggattcgattctctctgcactcacttctagggttttctctgcgctataagcaatcatggcggatgaaacaccaaatgagatgaaggaggaggttccagaaattgttccttttgatcctaccnnnnnnnnnnnnnnnnnnnnnnttacaattgtagatcctgctgatgaacctgtggagaaattggctgagangacagaaaacntctcagtttccgagggggttgagnc

SEQ ID NO: 11771 - DNA, 246 bp, Glycine max
  Clone ID: 701152928H1
tcacaggagcaaagtaaccatacaaagatactagctacttccaatgcctttgatgctactacccacaatgtcggctctcatttgccgggagatttcatcgaaccatcatctgttccactgtttaaagagtttatgacgaagttcagatcatctttgagaagtcatagcaatctttctctgctccttattactgttgtcgctctgattttcttcattcagtgtagcatacttgtgctgttggctaga

SEQ ID NO: 11772 - DNA, 254 bp, Glycine max
  Clone ID: 701152929H1
gagaggcacaggtgcaagttgagattttgattggtgtttggctcccaaattcccaaaacagtgatggtctcaagtaaaagaaatgtttttggcaccaagggggaaatgggtatagatttcatggttttggtgttatcagtgtcatggttttgtttgactagtatatgtgtctctgctacaaaacaagcatacccgccaacaccacaaccgaaccagaacttaaggtttgaccaaaatggagaattcaagatatt

SEQ ID NO: 11773 - DNA, 244 bp, Glycine max
  unsure (1)..(244): unsure at all n locations; Clone ID: 701152930H1
ggtagtgatgttattatctgttctaaaaatttctgaagngtntgncgtgnnnnngtcttcnggacctttcgaggttgcanntactttcccnancgncttcgaaacgatccaanatactacaaagnnnngcnaccagctaaaaagcaatcacgcccganaacgaaagcatctncctctcccctaagcaaacaactgcacttaaccctcaaaaacaagccacccaaacccatccacttcaaccccc

SEQ ID NO: 11774 - DNA, 230 bp, Glycine max
  unsure (1)..(230): unsure at all n locations; Clone ID: 701152931H1
gggaaatggaaatagcacncactcactngcagcgaagaagaaaanaaataaaaacaccatcagcatcttcactcaccacgaaggttccgttctctgtggatctatatctctagggcacgttacgtggaaggaagctcttncaccgacttcaatcgaagaagatggattacagtgctggttcgagtctgtttccgttgcaccgttgcaaaaccattcacctggtgnggnac

SEQ ID NO: 11775 - DNA, 251 bp, Glycine max
  unsure (1)..(251): unsure at all n locations; Clone ID: 701152932H1
ggattccggacagaaaaaaacttgggacggtgaaattggagggttttccgggatcccaaggccgaatcttgattcaatttacgaaaagagaacaccatccgttgctgantctngaagccgaatcaaatcgtagagagatngncnncnacccanatnggcgcctancgtttagagnnatnaangtgnnntggggttgtctanagttnaactcttaactggtaagnacgncgnaaacttganaggagananga

SEQ ID NO: 11776 - DNA, 264 bp, Glycine max
  unsure (1)..(264): unsure at all n locations; Clone ID: 701152933H1
ggagcgaagaagatattagggtttttgagtgcggtgcggcgatcctagcactctcttctgcagctttcgccgacagcttcattcaccatggctgagcaaaccgagaaggcttttttgaaacaaccaaaaatgtttctcagctcgaagaaaactgggaagggaaagagacccgnaaagggtgggaaccgcttttggaaatccatggggcttnnatttnancactcccagggangccatcganntctccttcttnancaagatgtc

SEQ ID NO: 11777 - DNA, 267 bp, Glycine max
  Clone ID: 701152935H1
gacaacaaaggggtgcatagcagcagtggagggagtcacagaggaaggccttatgtgttggtattgcttatcacatttgggattgcactgcttggtgtcatggtgcttcacaagctcagagagaggcgcatctgcacccttcttgtcaaagagaaagaccaacagattcttgctcttcagcttctcttgcagaaggaaagagatcgcagcaaagagttgagaagcaagaatgaagagatgaaggggaagttatacacactgagaagt

SEQ ID NO: 11778 - DNA, 248 bp, Glycine max
  unsure (1)..(248): unsure at all n locations; Clone ID: 701152936H1
gatgaggtttatacacaagttactttgcttcctcaagctgagttggaagggatgtatttagagggcaaagaacttgaggaattgggagcagaagaggagggggatgatagatcaccaactaaatcaacccctcacatgttctgcaaaacactaactgcctctgataccagcacacatgggggcttttctgttcctcgccnagctgctgaagactgttttcctccttgggattataagcagcagaggcc

SEQ ID NO: 11779 - DNA, 259 bp, Glycine max
  unsure (1)..(259): unsure at all n locations; Clone ID: 701152937H1
gagagaaataatggagaagaaaagcataacaagcagagcacattgtttagtgctagcatttccaggtcaaggccatatcaatcccatgcttcaattctccaagctattggagcgtcaaggggtgagaataacacttgttactactcgtttctattccaagaatttgcaaaacgtgcctccttccattgctcttgaaaccatttctnatgggtttgatgaagttgggccccaagaggctgggagccccaaggcctatatt

SEQ ID NO: 11780 - DNA, 253 bp, Glycine max
  unsure (1)..(253): unsure at all n locations; Clone ID: 701152938H1
gacgccaattctaatcagcaggatcattccaatatgggcaacagaattgttatgggaaattcccttctctttatctctttcttcatcttcagctttagtttcttggaggctcaaaaggctccagcagtttatgtgtttggagactcacttgttgatnttggcaacaacaattacttgagtctctccattgaaaaggcaattcttcctcactatggcattgattttccaactaagaaacccactgggagatttg

SEQ ID NO: 11781 - DNA, 229 bp, Glycine max
  Clone ID: 701152939H1
gggcacaagtgagtacgttgatcgagataactagaaacagtgtgatgaaaatgaaggtccttgttttcttcgttgctacaattttggtagcatggcaatgccatgcgtacgatatgttccctctccgaatgaacactggctatggtgcccgtactccggaggtgaaatgcgcaagttggaggcttgctgtggaagcacacaacatctttgggctttgagaccattcctg

SEQ ID NO: 11782 - DNA, 242 bp, Glycine max
  Clone ID: 701152940H1
caattcatgatgcaatcaataatcatagtaaagatggggctacgatatctggtaatcaggacacttctcaaataaaggaatccaatgactttgggaatttgccactacctgacttaagttcaatagaagaatttggtggtacgcaagatcttagttcttggttgaactttgaagaagatggtttgcaagaccatgattctattggccttgatattccaacggatgacctatcagatttaaat

SEQ ID NO: 11783 - DNA, 250 bp, Glycine max
  unsure (1)..(250): unsure at all n locations; Clone ID: 701152942H1
gatggacagtgtgagagtatcaaatgaacttggagctggtgatttcaaggctgcaaagttttcagtgtgggtggtttccatcacatcagtgtccataggtgttgttgtcatgatcggagtgctattaacaaaggattactttccctacttgtttaccaccagtgttccagttgccaatgaaacaactaggctttctgctttgctagctgtcacagtgcttctaaacagccttcaacnagtcctatcaggg

SEQ ID NO: 11784 - DNA, 243 bp, Glycine max
  Clone ID: 701152943H1
ggttgttattgttgttaaaaagcttcattaaagtgccttcaattctcctcctctttcaacgcccctttctcaactcaatccaattttcttctgcttcccttcgaatccgagatccgcttccaatctcattaatgggttcattttatcttggtactttttaatgggttatttctcaatgcaaacaatttattcctcaagggtgttctgttttgtcagatcctaggttttgctacatttcttcac

SEQ ID NO: 11785 - DNA, 243 bp, Glycine max
  Clone ID: 701152944H1
ggaaggggcttggagaagactgaaattgcgtttgggaaaatcaagcaaacatgccactgtgtgttcactactctccatgcaatagcattggtgttatgccgcaattctgcacccccaggaccaggaccaggaccagccataataggaattgggatttgcagagacttagaattgtcgcaaaatcaaattcagatgcaacccaatccacatccacctcccttctctcatttctctgtcccttat

SEQ ID NO: 11786 - DNA, 242 bp, Glycine max
  Clone ID: 701152946H1
gacaccgtgcaggcccaatgaggatttgaacatttacgtttttgctctgtttaatgagaacatgaagcccggcccagcttccgaaaggaactatgggctttttaagcccgatgggacccctgcttacccccttggcttccctctggcttctgtgccagtcgtcgccggtaataacaataccggcgtcgcaagcacgccgccgcagccaacgtcaccgacttcttccaccggctatttgtcat

SEQ ID NO: 11787 - DNA, 251 bp, Glycine max
  unsure (1)..(251): unsure at all n locations; Clone ID: 701152947H1
gaccacagttttttctctcatgcacctactaatagcaaaaaaaaaagctaagagggataattacattccacctctcctnnnnnnnnnnnnnnnnnnnnnnnnnnnnnnnnnnnnnctccgtgcgtgaccttgaattactgatattttatattttaaccagctatatatattacaagaaaacatagatagtgtgtgttcatcagcttattctcaaacctgatatggagtttgtggataccagaaaactacat

SEQ ID NO: 11788 - DNA, 245 bp, Glycine max
  Clone ID: 701152948H1
gatgcacaagtttgttgagatggctagaagcaataagatgaaaatgaaagtgcttgttttgtttgttgctacagttttggtagcatatgaatgccatggctcagactaccagaagttccctctccaaatgaaaactgggtttggtgggcaatacagcaatgaggtggcatgtgccagttggaggcttggcgtggaagcaaacaacgtagtcaagtggcaaactgttcctgcagcttgcggagagt

SEQ ID NO: 11789 - DNA, 243 bp, Glycine max
  unsure (1)..(243): unsure at all n locations; Clone ID: 701152949H1
accaaggcacagttacctggggcaatgagtcaggactcgaaggcttggaagcacgccgttgaacaattcaaagctggggaacattctgcagcagggatattggtgaacactttggaggagttggagaanngtncgtgagagggtacgacanagtggnaagaattttngggtgtatagncccnctttcttnacatnacantnttcttggangggctgggatatctggtaatcacncncctgntt

SEQ ID NO: 11790 - DNA, 237 bp, Glycine max
  unsure (1)..(237): unsure at all n locations; Clone ID: 701152950H1
gataaccttctttgacacttgtgttgtctattgannttgttcgttccttggaatttttcttcttggaattctaaggtccttgtgacaacaaagttagaagaccttgtaaatgccttttctttatatcttcttcacatgcaccgataggttggagaggcttaactgtctgtttnctgcagaggtaatagcttgggaaatttggtgcagatagcctgctctttattggaaggagtggnt

SEQ ID NO: 11791 - DNA, 251 bp, Glycine max
  unsure (1)..(251): unsure at all n locations; Clone ID: 701152951H1
agaacatgcctttaccaaaggtgcctactttattgggaagatgatatggagcaaaggctacaaggaactgctccaacttcttaaagatcatgaaaaggaattatctgctcttgaggttgatttatttggcagtggagaggactcagatgaatctcaaaaagctgcagaaaagttggaactagcagttagagtccacccagctcgtgatcatgctgatgctctatttcatgattacaattgtttctnaancc

SEQ ID NO: 11792 - DNA, 248 bp, Glycine max
  unsure (1)..(248): unsure at all n locations; Clone ID: 701152953H1
ggagcaaaagccactataaatgtgtgggaacccaagattcagcagactaatgagttcagcttgtctcagctttggatattaggaggctcatttggtcaagatcttaacagcatcgaagctggctggcaggttagcccggatttatacggtgataacaacacacggctattcacctactggacgagtgatgcatatcaagctactggntgctacaatcttctttgctcgggatttattcaggtcaacag

SEQ ID NO: 11793 - DNA, 246 bp, Glycine max
  unsure (1)..(246): unsure at all n locations; Clone ID: 701152955H1
gtcatgtgtaccaaatatctcatggacactaacatcaggggaagaaatatctgcccatgctgtgttttcaaatgcatttattcttcttttaaagctatggagatttaaccgacctcctcttgaatatggaattggagatgtacccactgttggttctcaattaactcccgaatacttactattagtacgtaattcccacttaatgtcagctnntaacatccacaaagatcgcaacaggaggagact

SEQ ID NO: 11794 - DNA, 248 bp, Glycine max
  unsure (1)..(248): unsure at all n locations; Clone ID: 701152956H1
gatggcagctattgtttattttctcctgataaaaagaggaagttgaagttgggttgctgcaacaatggaacctgctactaataacaatccttctccttctgctcatgcttcattacatgaaaccaaatnnattgagagggtgaaacatgccctgatcgactttggagtcccagaagagctaaggttgtctgatcgtagcatctacaaggttccttgctatctccgaaaggtgaaggaagatgcctaca

SEQ ID NO: 11795 - DNA, 243 bp, Glycine max
  unsure (1)..(243): unsure at all n locations; Clone ID: 701152958H1
gacgatctgaggaagacaccaatcttctctccacgcccttcttgggtaaccgtctgaagtgcagcaatggcagatggattgcattcgcagcatccatcggtagttcagaagttatctggacagtcttatcttgtgtccaggcttgctcctaatcactccagaaactgttctaccactggtagttacttcaatggaggtttgcagtcttcaggtttggttcnantcanggcacangcgccggnt

SEQ ID NO: 11796 - DNA, 250 bp, Glycine max
  unsure (1)..(250): unsure at all n locations; Clone ID: 701152959H1
gagagatcaaagaacagaagatggcacaaacgctggcaatgcccgtggcaccttncgctcgctatcatctccaattctcgcctctccaagacactctccgttcccgttctcaacaacccaaagtttcaagggttaagcatcaagtgcgttcgtgttggaggtgtggagattccgaacaacaagcgaatcgagtactcgctgcagtacattcatggagttgnnnggaccagagcaaaacagattctgtgtg

SEQ ID NO: 11797 - DNA, 243 bp, Glycine max
  unsure (1)..(243): unsure at all n locations; Clone ID: 701152960H1
gagataacatcgttgcagtggcgcgcccaatggctctgggaatctctaacatactgcactgccccaaattgagtttctcccacaataattttctccccaaagttccaacctctatcagcctcaggtttccccagacagcagcatggagtgataganagattatctgtgctgctgcatctgcggcaggaagctctaatcccgatggtgaatttaatccttatgaggtgctaggtgtaagcccta

SEQ ID NO: 11798 - DNA, 241 bp, Glycine max
  Clone ID: 701152961H1
gctagatagagagtttcgttcgtcaccatgacttttaagcgcaggaatggaggtcgcaacaaacacggccgtggccacgtcaagttcattcgatgctccaactgcggcaaatgctgtcctaagggcaaggctatcaagaggtttctggtgaggaacattgttgaacaggctgcagtcagagatgttcaggaggcttgtgtctatggaacatacacgcttccgaagctttatgtgaagatgc

SEQ ID NO: 11799 - DNA, 241 bp, Glycine max
  unsure (1)..(241): unsure at all n locations; Clone ID: 701152962H1
agcaaagataagggaagcattgcaaagtgggaaaatttactgcggaaggctattaaattacaagaaggatgggacacctttctggaaccttctcactatttcacccatcaaggatgaagatggcaaagtgctcaaatttattggaatgcaagtggaggttagcaagcatacggaggggtccaaggagaagatgccacgtcccaatggattgcccgantccttgattcgatatgatgcacgg

SEQ ID NO: 11800 - DNA, 224 bp, Glycine max
  unsure (1)..(224): unsure at all n locations; Clone ID: 701152963H1
ggataaccttctttacacttgtgttgtctattgaactttgtncgnncctnggaatntttcttcttggnattctaaggtccttgtgacancanagttagaagaccttctaaatgccttttcnntatatcttcttcacatgcaccgataggntggagaggcttnaactgtctgtttctgcagagtaatagcttgggaaatttggtgcagatagcctgctcttnatt

SEQ ID NO: 11801 - DNA, 251 bp, Glycine max
  unsure (1)..(251): unsure at all n locations; Clone ID: 701152964H1
ggcggcttatgttgttgttggccatggacgaatcaccggcgaacagagagagcaaaagcnnnnnnnnnnnnnnnnnnnnnngctacatgggtgacctttctcagtttcttccttccgatgctctcgaacctgctaagttgtcttcgtccaaaaagatttccagcaagaaagatccttcagtcaactcttccaagaactggttgaaaactcttaactggtaagaacggcgaaaacttgaaagaganaggaag

SEQ ID NO: 11802 - DNA, 257 bp, Glycine max
  unsure (1)..(257): unsure at all n locations; Clone ID: 701152966H1
tttcaagagctggttctgactcgatcaagcttttgactccttaaaagagaaaaattatggagggtgacacattctctggtcttggcaatggtacccagattgatagcaagatcttgctgacatttaagaaaagctttgttcaagtccagaacatcttggatcagaaccgggtactcatcaatgagatanaccannttnntgagtcnaaggnccctgacancctcagnagaancgtngnacttatnggggcccncaac

SEQ ID NO: 11803 - DNA, 252 bp, Glycine max
  Clone ID: 701152967H1
ggaagctgaaccctaactagctgagcagacggaggagaactcgactgaagctgcctctgcgacgccgtttcgattcagcctcagacatttccgttgcagtcatggtgcaagaaaatggcaagaggaagaaaccaaacattctggtgactgaccacaccggggacaggaaagacaactgtgtgcactgctctagctgaagccacccagctctgccacatcaatgtcggagaattagtcaaagaaaagaacttg

SEQ ID NO: 11804 - DNA, 254 bp, Glycine max
  Clone ID: 701152969H1
gagatatggatgggatgcaaatagctctacctattgttggagttattgcggctgcagctgcgaccttctatgcagtaagctttgctgaacttagagagaaatcgtttagagatttggaagaatctgaatatgaagatggggtttataggccatcccctagctcccgagagaggcgtgccagaagacaagctaacaaaaataacaaaagatgaatgacttcattcaatcatctatgcttttcccaaaggtgtggt

SEQ ID NO: 11805 - DNA, 59 bp, Glycine max
  Clone ID: 701152970H1
gcgcttgaagatccgcaagggtgttgagctgacgctgctagggtttgagtttgaggaag

SEQ ID NO: 11806 - DNA, 253 bp, Glycine max
  Clone ID: 701152971H1
gggggttcacagttcacactatcgctgactgatacaataataatgatcttcctcctttccttcctccactgttcttaaactcgttaataaaccaaacacaggcaaaagagtggtattactgtgttagtgttaccttaccactcaggcaaaataatggggagtaagaaaaaaaatggtggaaagggagagattgtggatggttccaagattatggagttagttggaaacgagaaagttttcagcaactttgtgg

SEQ ID NO: 11807 - DNA, 248 bp, Glycine max
  Clone ID: 701152972H1
gcttcttctttttcttcattagtctagtgacgaaccatcttaattttctcgcaattcctctgttctcgaagggcgtaggagaagagggtttcgttccgtttcaatggggagcgaagagcagaacggcgaattctacctgcgttactacgtcggtcacaagggcaagtttggtcacgagttcctggagttcgagttccgcccagacggcaagctccgctacgccaacaactccaactacaaaaacgact

SEQ ID NO: 11808 - DNA, 254 bp, Glycine max
  unsure (1)..(254): unsure at all n locations; Clone ID: 701152974H1
aaaganacccggaaagggtgggaaccgcttttggaaatccattgggcttggatttaagactcccagggaagccatcgaaggaacctacattgacaagaagtgccccttcactggcaatgtttccatccgtggccgtatcttggctggaacatgtcacagtgctaagatgaacaggactattattgttaggaggattatctccattttatcangangtaccagaggtacgagaaaaggcactccaatttcctgtt

SEQ ID NO: 11809 - DNA, 243 bp, Glycine max
  unsure (1)..(243): unsure at all n locations; Clone ID: 701152975H1
cttgactgattcaactgtcttaaggaacatgggtataggtataggtcattctcttcttgcctacaaaagcacacttcaaggaatagggaagcttcaggttaatgaagctcgcttgagtgaagacttgaaccagtgctgggaggtgcttgctgaaccaattcagactgttatgcgaagatatggtgttcctgagccttatgagaagttaaaagactaaccagaggaagagcagttnccaaagag

SEQ ID NO: 11810 - DNA, 239 bp, Glycine max
  Clone ID: 701152976H1
ggcacaagtttgttgagatagctagaagcaataagatgaaaatgaaagtgcttgttttgtttgttgctacagttttggtagcatatgaatgccatggctcagactaccagaagttccctctccaaatgaaaactgggtttggtgggcaatacaacaatgaggtggcatgtgccagttggaggcttggcgtggaagcaaacaacgtagtcaagtggcaaactgttcctgcagcttgcgga

SEQ ID NO: 11811 - DNA, 242 bp, Glycine max
  Clone ID: 701152977H1
ggttgtgatcgtgtgcatggccgtggtgggtgcaccgatgatggcgcaagcatgaacatgcaatgatgtgacggtgaacatggcacagtgcctatcctacctgatgcagggaggaacaccttcaacactttgctgcagcggagtcaagaacattcttggctctgctgtcaccaccgttgacaaacaaactgtgtgcaatgtctcaaggcggatgctgctaggtacaacatcaatgaccagtt

SEQ ID NO: 11812 - DNA, 245 bp, Glycine max
  Clone ID: 701152978H1
gacacaaactttattacagttgttgtaactaagcaagaatattattaggcaatgaagtcttctggaccttcaacaactcttgctctttttttaaccatcaatttgcttgtctttgtcatggcaagtggctgctacacttgcacacagcctaagccaaaccctagccctaacccattcccttaccctaaccccagccctaccgcaaagagctgccccagggacgcacttaagctgggtgtgtgcgc

SEQ ID NO: 11813 - DNA, 256 bp, Glycine max
  Clone ID: 701152979H1
ggattcagtctctcagtatattaattcaccacccacagtttctcacttttccttcttagttcttcccttttcctttgtttctaccaaaacagcaaatcaaaacaaaccccttttgatttgatctctctccatggcttcttctgtatccaccacaccacctttgtactttgatgagaagtggaagctgtcaaagaaagaaggatccaccagaagcaggtcctcaagcacccctttcatcaagaattcttcctcacag

SEQ ID NO: 11814 - DNA, 247 bp, Glycine max
  Clone ID: 701152980H1
gaccaaacaaaggtagttgtgattgcagcaaacaatgggtgtctccttcctctcgacttgcccttccctgcttccactcgttgcttatgatacaccaccctccaccagataccaacctcgttcagtgtccatttgttgtaataaaaccataagcaatgttagtgatgaagagccgttccattggagaaggagagaaattcttaaatgcgctggggcaaccgttggcttggaattgattggaagctcc

SEQ ID NO: 11815 - DNA, 253 bp, Glycine max
  unsure (1)..(253): unsure at all n locations; Clone ID: 701152981H1
ggtacttattaatgcacaaagcagcttaactcaaaagcagaagcagcaacaacaaacatgtccttaggatccgttctgcactcacagtagttaatgcctcattgtgtgtttcattattattccctaaccaactctcttgaccctgacttcttcacttggggctttttttttttagntcancaatttaangtattannnttngagcatcagtttngggnctngaaattaatanggggggggggtgggatttttt

SEQ ID NO: 11816 - DNA, 56 bp, Glycine max
  Clone ID: 701152982H1
ggattcatagccagactgtgctccctttagtcttctataaaactattggcccaaaa

SEQ ID NO: 11817 - DNA, 253 bp, Glycine max
  unsure (1)..(253): unsure at all n locations; Clone ID: 701152984H1
ggagcgaagagtgaagagaatggctcccaagggtttaacctttctggctgtgttaatatgcgtttcagcactgtcactgagtccttctgttgcgggggaagggcaaaataatggccttgttatgaacttctacaaggaatcatgccctcaggctgaagacatcatcacagaacaagtcaagcttctctacaagcgccannngaacactgctttctcctggctcaggaacatcttccatgactgtgctgttcag

SEQ ID NO: 11818 - DNA, 260 bp, Glycine max
  unsure (1)..(260): unsure at all n locations; Clone ID: 701152985H1
gagcgacagatcggagcagaccctgtatggagtggcgaatggcgctgtggtctcaaattttatgcatagtcactctgctgttatgcagcgattgtgcagcatcttttgccaaggagcagcaaaaggaccgggttggtaggctcccaggtcaaggcttcaacatcagcttcgcacactatgctgggtacatcaccgtcaatganaaagctgggagancactcttctactggttcattgaggcatttnaagnncctcattct

SEQ ID NO: 11819 - DNA, 244 bp, Glycine max
  Clone ID: 701152986H1
atctggcttttgcaaaggatcgatgtgctcagctagaggaagaaaataaaatcctccgtgagaatcgggaaaggggagatagccatgatgatgatgatttgatacgacttcaacttgaatctcttctagctgaaaaagctcgcctggcacacgagaactcggtttatgcccgtgagagtcgctttctaagggaggttgtcgagtatcaccaacttacaatgcaggatgttgtctaccttgacga

SEQ ID NO: 11820 - DNA, 241 bp, Glycine max
  unsure (1)..(241): unsure at all n locations; Clone ID: 701152989H1
accataaatttgtgacggagcggactcacctanttgtggagagaacattagnncagtccaaggtgtcactcggagaaatctgtaatctgagagtgacttggttggggttataaaatagaatggcgagtagctttgagaagaacgtttggcaacatgaggtccttcgtaagcaattcgatgggtggtctcaggggcggaagcaaccttgcttcttgggtcgtcgccggaaccctagtttact

SEQ ID NO: 11821 - DNA, 241 bp, Glycine max
  unsure (1)..(241): unsure at all n locations; Clone ID: 701152990H1
gtaatatgcattgtactgtgggactgcgttaaacttaaaccatgcaagacagttaagtactccatcatccctgttatcggtgaataataaagtaatatgcactgtggcacttcagattttcaatcaattttttaaacaattagttaaataattaagtatcatcgtagaattntaatgattagcncaatttttttatagtnggnataantaaccctnaatttcccgcttcngngaggnctgt

SEQ ID NO: 11822 - DNA, 239 bp, Glycine max
  Clone ID: 701152991H1
ggagcaaaagccactataaatgtgtgggaacccaagattcagcagactaatgagttcagcttgtctcagctttggatattaggaggctcatttggtcaagatcttaacagcatcgaagctggctggcaggttagcccggatttatacggtgataacaacacacggctattcacctactggacgagtgatgcatatcaagctactggctgctacaatcttctttgctcgggatttattca

SEQ ID NO: 11823 - DNA, 217 bp, Glycine max
  unsure (1)..(217): unsure at all n locations; Clone ID: 701152992H1
ggctctattctatgacgtgtgatagagtggaagaaccatgagtgtgcttgtagantcacagacactgatataattgtattaggttatgaattctgtaactgtgttttatatgtaacatagctactgaacctgaaattgtctgtaacagtgtaacatgaaaattgtgtgtatctgtccacatctaggattgtttgctttgtgttctatcagtgatcac

SEQ ID NO: 11824 - DNA, 233 bp, Glycine max
  unsure (1)..(233): unsure at all n locations; Clone ID: 701152993H1
atgaagattgatatgcaaaggatcaactactatgcttgtcaatgcagggtggcagtggagtacggaatgaatttagatgggaggttttgattttttcttttaaaattaaaatatgcttcggtggataaaaataataattntatcagtgaatttttaatggtcaactcattaatttggatagtggaatcaaaatcctgnntttatnaaataaaaggantgaaatgtttnaatnt

SEQ ID NO: 11825 - DNA, 247 bp, Glycine max
  unsure (1)..(247): unsure at all n locations; Clone ID: 701152994H1
ggagtatgtaaacacttataagggttgaaataaagtaaatgttgagttttgtactacaaaatctatntgaacataaacagaatatttaaagctataaaaagtgataactatcaagttaaaagggttggggagtgtcctactgaatttctcttgctgtatcaaatgtatttttctctaatattatcatagtattcttataccgagaaactactcaaaccatgattcctcacatgaatgagcctaactc

SEQ ID NO: 11826 - DNA, 240 bp, Glycine max; identical to SEQ ID NO: 11426
  Clone ID: 701152995H1

SEQ ID NO: 11827 - DNA, 245 bp, Glycine max
  Clone ID: 701152996H1
gagaacaaattggagcctgagaggaagacccagttggctaagaagctgggattgcagcccaggcaggtggctgtgtggtttcagaaccgcagggctcgatggaagaccaagcaacttgaaagggattatgatgttctcaagccttcatacgataccctactttcatcctatgattcaattatgaaggagaatgagaaactcaaatctgaggtggtatccttaaatgaaaagcttcaagttcaagc

SEQ ID NO: 11828 - DNA, 197 bp, Glycine max
  unsure (1)..(197): unsure at all n locations; Clone ID: 701153001H1
gatcttcctaattgtgatatacttccaaggatttcgtgtggttttgcctgngagatcanngaatgcccgtggacancaggggtcttatccaatcaagttattttatacctccancatgcccattattcttcagtctgccctgtttccaatctcnncttcattctcagcttctacanagnnngtacagtggcaactnc

SEQ ID NO: 11829 - DNA, 105 bp, Glycine max
  unsure (1)..(105): unsure at all n locations; Clone ID: 701153002H1
cggttataccaattaagattgaggtcgtggaaaatggcctcttccacatagtgtttaacnnccgacaaaatatgggaatccaatgtcgaatacgagatgagtgtt

SEQ ID NO: 11830 - DNA, 109 bp, Glycine max
  Clone ID: 701153004H1
cctgttaccttacatacaacaaaatgattaacacaaaattatatctttattttcatcaaaaccttaagagatgtgtgaatcgtccaatttctaacaaccaacatctcag

SEQ ID NO: 11831 - DNA, 200 bp, Glycine max
  Clone ID: 701153005H1
ggaagaaaaataaagttattattaaaactgaaatatccaaaagtcagaagatggcattgcgaggattgagtgcggtggcggtgacggcgtcaatacgccctcccggtcctcgattcagagtagacagcggcacatcaaggattccctcttccggatgcagaatctcggtgcggtgtaaagctgtcggagaaagccgacaa

SEQ ID NO: 11832 - DNA, 195 bp, Glycine max
  unsure (1)..(195): unsure at all n locations; Clone ID: 701153006H1
gactgaccccatcattagcaattttcaaacacaagatctctctgctgccatcttccccatcatctcttctacctacttcttctccttttgtgcaacttggcctccgctcaataacacagattctatatcctttgtgttgtgttgtgttgctcactctaaaaaagtaagagagagaganagnggggggacancttc

SEQ ID NO: 11833 - DNA, 200 bp, Glycine max
  unsure (1)..(200): unsure at all n locations; Clone ID: 701153007H1
ctccatgcaaaatatacaagaccataaacaagaaaaatacaagaacattgcaccctctatatacaaaaattctttcaacagatctcatgctctagtcagcaacttgcagctctagcaagctatcactatgagcttcaaatgtttccctcanggaggttggtgattcgnagagngncacnttncgcattcacatgctgtgt

SEQ ID NO: 11834 - DNA, 184 bp, Glycine max
  unsure (1)..(184): unsure at all n locations; Clone ID: 701153008H1
gagacgctgaccctctttggctcnccccaccctatttctcaaaacgctgtcgttccccgccacgccatgtcccgtcctccgaaacctcctttcccaccctcactantatntccatctcttctctcaactccaagataagaangcngattgtcattcnagttgaagaaggttngncanngnnggg

SEQ ID NO: 11835 - DNA, 192 bp, Glycine max
  Clone ID: 701153009H1
ggatctgaggaagacaccaatcttctctccacgcccttcttgggtaaccgtctgaagtgcagcaatggcagatggattgcattcgcagcatccatcggtagttcagaagttatctggacagtcttatcttgtgtccaggcttgctcctaatcactccagaaactgttctaccactggtagttacttcaatgg

SEQ ID NO: 11836 - DNA, 195 bp, Glycine max
  unsure (1)..(195): unsure at all n locations; Clone ID: 701153010H1
aacatgatgaaagactcggagagaaagagctatggatcgctgttgaatactttttatgagcttgagggagattatgaggagcattacaagaaggccatnggaactaaaagttggagtgttggaccagtttccttttgggtgaaccaagatgctttggataaggccnncagagggcatgccaaagaagagcaaggg

SEQ ID NO: 11837 - DNA, 192 bp, Glycine max
  unsure (1)..(192): unsure at all n locations; Clone ID: 701153011H1
ggacgtaaacgacgacggtgtcagacaaacggtgccggttggtggtgccgccacgctattacgctaatcgtatccatcaccctcatcaaaacccctncctttctcttaatttagaaaccctaattcagaagaaaaaagtcaccttctccagaatttgcgcggaagggtggagtatattcatgaagtcctgtt

SEQ ID NO: 11838 - DNA, 172 bp, Glycine max
  unsure (1)..(172): unsure at all n locations; Clone ID: 701153012H1
gaacgagacnagataatgggggcgagaagcagagcccgggagtgaaaaacggggtatggcaccaacagtgatgttncgttcgtgctcatctccagcctggactgatccaatttattgaacaactcgtgagangtggggttgaagttccgacgtggtgcaagctcagcattct

SEQ ID NO: 11839 - DNA, 200 bp, Glycine max
  unsure (1)..(200): unsure at all n locations; Clone ID: 701153013H1
ggacgcataggtaacgaatttaccgttacctgtggcgtcgcgtctcagatccctctctctttggagagaacgccccaacaatctaaatctgcatcgnnnnnnnnnnnnnnnnnnnnnnnatacttcatttatggggttttattagctacaatacttgtttgctgcaggctgccaacgaaaaggtcaaggcattttggatc

SEQ ID NO: 11840 - DNA, 207 bp, Glycine max
  unsure (1)..(207): unsure at all n locations; Clone ID: 701153015H1
gaacaacgacttaaggcattctctcttctattctattctaaactncgaaacaatcttagagaaagaagcagaagaaaatgccgatttctagaattgccattggaaattcttcggagttgaaccaatctgatgcacttaaggctgcactagctgagttcatctcaatgctcatctttgtttttgccggggaagctctggatggttata

SEQ ID NO: 11841 - DNA, 150 bp, Glycine max
  unsure (1)..(150): unsure at all n locations; Clone ID: 701153017H1
ctcattggttgtggaatattgttttctttgctgaatctaataaaaatttattactaaccatgtttagttctgcagtcatttcttttttacccctttaacatttgtttattataataaaaaatgttatttatacaataatttatanaccag

SEQ ID NO: 11842 - DNA, 165 bp, Glycine max
  unsure (1)..(165): unsure at all n locations; Clone ID: 701153019H1
gnnggtccaatgtagtgttgcgtaggtgacagtgactggcaatgttggttgttgggtgggatcccaacaacgttatactgaagagaagatgaggaacagacatcactgacagaggaatnatgggagcaggagaagaaggtcgatcttggccactctcgctttcta

SEQ ID NO: 11843 - DNA, 190 bp, Glycine max
  unsure (1)..(190): unsure at all n locations; Clone ID: 701153020H1
atatacattctgttttgcagtcacatgtctggcgatccttaagcactcctcgatcacaatgtatgcttctgtttcctcagtgactaccctcaggttgatcaagcattccaacctttctgttattgcttggcaagcctcctacgacattgacaaggaaaaaagtaaacattaatgcgtgacnctaaattgg

SEQ ID NO: 11844 - DNA, 191 bp, Glycine max
  unsure (1)..(191): unsure at all n locations; Clone ID: 701153021H1
gatggtcaggaggagaacagttccaagacaactcccaaggaaaattcttctccctcaccgatgaaagtcccatcaaaacaatggacaaatgaagattttgccacatggcaaaggataatccgacttgatgcagtacgtgcgaatgcagaatggatnccatactccccttctcaagcaattgtaccagacag

SEQ ID NO: 11845 - DNA, 190 bp, Glycine max
  Clone ID: 701153022H1
ggagccactaagtaatatggtttgttattcaccactctttatatagagaggaatcgaaattggttttgaagaccatgttcaggacgcaacgggggtgatggcatcatggttattacagaataaatgatcgaagagtgatggaaggttcttgctaccctttgtatatatacatactattattgctaggaaa

SEQ ID NO: 11846 - DNA, 193 bp, Glycine max
  Clone ID: 701153023H1
ggggagagaatagagaagagagatggatccagacgcgttggcaaaggcattcgtggagcactactacagcaccttcgacaccaacaggaacggcttagcgaatctctaccaggagggttccatgctcactttcgaagggcagaagatccaaggcgcttccaacatcgttgccaagctcacctccctccctttt

SEQ ID NO: 11847 - DNA, 190 bp, Glycine max
  Clone ID: 701153024H1
aatgatatttatttttatagttacatttttttgaagggcagaaattgtagtgaaagcgataattctagtactagtataataactagtacgaatgatacaaatgatagtgattccactataggagaaagttctaataatctcgatgaaagtcaaaaatataagcatttgcggcttgaatgcgaaaattgtt

SEQ ID NO: 11848 - DNA, 181 bp, Glycine max
  unsure (1)..(181): unsure at all n locations; Clone ID: 701153025H1
ggccattagcagagctggttatgatgagaaaataaagatagctcttgatgttgctgctacagatttttgcataggtaaaagatatgatctggactttcaatctcctcaaaagtctggacagaattttaagtcagcagaggatatgatagacncgtacaaggaactatgctctgaataccct

SEQ ID NO: 11849 - DNA, 180 bp, Glycine max
  Clone ID: 701153027H1
tcaggacatgggtagagacattgagcggcagagatcaccagaagagcccgggaagtgcaagagattatggtcaccaaaagatataattcaagttttaaaacacaacacgggaactagtaaacttgaaatcatatgtctggattcctccatatctgacaaagaagaaacagtggaatggaa

SEQ ID NO: 11850 - DNA, 190 bp, Glycine max
  Clone ID: 701153028H1
agtgttaaaaatagttagttttactttgtttatatttgagtccaaaagtgagaataatttacaatgatgacactcaaattagaacttataatttaatgcattatgatatatcctttttcactaagtcaaacaaacttagttggttatatgatgttttttatcaatatttttatacgaagtaaattccatc

SEQ ID NO: 11851 - DNA, 193 bp, Glycine max
  unsure (1)..(193): unsure at all n locations; Clone ID: 701153029H1
ggatctgactcatgtcaacttcatcgtcctcctcgtacgcatgcgctctgcaaccttaacctaagtacactgtgaggtgagttccttgggtacacgcgggaatggctgctgcatctggcatgccagaggaggagacagcgantttcccgacaaaagtgtccatcccaggttggatgtctacgtgtgggacatg

SEQ ID NO: 11852 - DNA, 129 bp, Glycine max
  unsure (1)..(129): unsure at all n locations; Clone ID: 701153030H1
ggtnacaanaagttcataactctcttggacttgaagcntccatttaaaccaatgaaggatttggacatggacaacgncatctcggaacttcnntggatgcctatatcanatcntnanngattncnncng

SEQ ID NO: 11853 - DNA, 194 bp, Glycine max
  Clone ID: 701153031H1
gaatcatacaataatttcttcatgatgttgtagttgcagaccgtttttcgaagccttgatcgtcatacataaattttggaaaggtttatatgaaaatagagataggaaaattacttgagagaattcaataaagcaatgcatttatggtggtcaaatggtgtgagtgagtttgaagtaaggaaaggttgattgag

SEQ ID NO: 11854 - DNA, 192 bp, Glycine max
  unsure (1)..(192): unsure at all n locations; Clone ID: 701153032H1
ggcacaagtgagtttgttgatcgagataactagaaacagtgtgatgaaaatgaaggtccttgttttcttcgttgctacaattttggtagcatggcaatgccatgcgtaacgatatgttccctctccgaatgaacactggctatggtgcccgtactccggaggtgaaatgcgcaattggaggntgctgtgnaa

SEQ ID NO: 11855 - DNA, 195 bp, Glycine max
  Clone ID: 701153033H1
ggtagtgatgttattatctgttctaaaaatttctgaagtgtttgtcctgtgtcccccttcactttctttcgaggttgcatttactttccctttcgacttcgaaacgatccaaaatactacaaagcaaagcaaccagctaaaaagcaatcacgcccgaaaacgaaagcatctccctctcccctaagcaaacaactg

SEQ ID NO: 11856 - DNA, 192 bp, Glycine max
  unsure (1)..(192): unsure at all n locations; Clone ID: 701153034H1
ggaagagaagaggatgaataagagtgggggaggagagatgagtaagtggccgttcacaatgtctcagtggcaggaacnngaacatcaagctttgatttacaaatacatggtggctggtcttcctgtccctcctgatctagtccttcccattcagaacagcttccatccatttcccaaaccttcttgcaccnt

SEQ ID NO: 11857 - DNA, 191 bp, Glycine max
  unsure (1)..(191): unsure at all n locations; Clone ID: 701153035H1
tgcttacaaatttgtagttacgtttactttaaatattttagataagatgtagatatgtgatgctgaaccaaacaccagctaaaatattacttttctaccacaaagtataaagatccatttaaacttgttaaataattgtatcttagagtatnggaccctgaaaatgactcgagaacaaaaagaaaaatgcc

SEQ ID NO: 11858 - DNA, 195 bp, Glycine max
  unsure (1)..(195): unsure at all n locations; Clone ID: 701153036H1
ggcacaagtgagtttgttgatcgnnataactaganacagtgtgntgnaaatgaaggtccttgntttcttcgttgctacaattttggtagcatggcaatgccatgcgtacgatatgttccctctccgaatgaacactggctatggtgcccgtactccngaggtgaaatncgcaattgnaggcttnngtgaaanccc

SEQ ID NO: 11859 - DNA, 188 bp, Glycine max
  unsure (1)..(188): unsure at all n locations; Clone ID: 701153037H1
ggatggaagaacatctcactccattggctgttacccatctccttcaacacactctcagaagtttgtgcatccatgaaaattctcaatgggtctacgcagtcttctggaggatcttgcctagaaactaccctccacccaagtgggaaggacaaggggttatgntagatcagnggaaacagncgganttt

SEQ ID NO: 11860 - DNA, 205 bp, Glycine max
  unsure (1)..(205): unsure at all n locations; Clone ID: 701153038H1
ctctcaagtataacattaactggttctgaactaagttctgcaaccaaatacaattcaagcaaattagctcagtatcaaacaaagatcattatcaaaatttaagcgaaaacctcatattaaaacaatcgtatttctaacaaagttggatcctaaagtaatgtccgggagtcagattttggangggaaaaaagaanggantntcttc

SEQ ID NO: 11861 - DNA, 191 bp, Glycine max
  unsure (1)..(191): unsure at all n locations; Clone ID: 701153039H1
ggcatcaattcaaaatatatcatcaattataagcatgggtttgtggaacacaacgaatgcagtgtcttgccgctttcacaagtttggtgatgaccaaaagaatctggtcttccaaggtgatgccncgtcttcttccaggggcatngaactcacaaagttagncggtggaggaaaaccagtgggtggcagtt

SEQ ID NO: 11862 - DNA, 75 bp, Glycine max
  Clone ID: 701153040H1
ggattcatgtattttatcgtgtacactgtacatgccatttgcttattcctccttcttttgagttccactatcacc

SEQ ID NO: 11863 - DNA, 188 bp, Glycine max
  Clone ID: 701153041H1
gacagacaaacaaacaatttaccagctatacttgttccttttgaaggttagaagtgctacaatacaaacaatggcagctactcaggaagatgtgaagcttttgggtattgtgggaagcccatttgtgtgcagggtccagattgcccttaagttgaagggagttgaatacaaatttttggaagaaaatt

SEQ ID NO: 11864 - DNA, 188 bp, Glycine max
  unsure (1)..(188): unsure at all n locations; Clone ID: 701153042H1
ggcacaagtgagtttgttgatcgagataactagnaacagtgtgatgaaaatgaaggtccctgttntcntcgtngctacaattttggtagcatggcaatgccatggtaacgatatgttccctctccgaatgaacactggncngggtgccgtantccggaggtgaattgcgcnagtnggangcttgctgt

SEQ ID NO: 11865 - DNA, 193 bp, Glycine max
  Clone ID: 701153043H1
ggtggtagtgtggcagcgacacgtatcaacttcaataatcgcatcgcagaagcagtttccggtgcatctcatcgtctccgaaaatgaacgacgcagatgtctcgaagcaaatccagcagatggtgcggttcatccgccaggaagctgaggaaaaggccaacgagatctctgtctccgccgaagaggaattcaa

SEQ ID NO: 11866 - DNA, 190 bp, Glycine max
  Clone ID: 701153044H1
gaaacaaatggcgagcactctgctgtccgtacaccactttctcccctctcaaaggagggaaaagatcggttgcttgagtggtgtcagaacttcattttgtggtcaagttgtgtgcaattcaagtttctgtgggagacaaataactagaagccatggaaaccgtcttgttgttcactcactgcttggaagg

SEQ ID NO: 11867 - DNA, 189 bp, Glycine max
  Clone ID: 701153045H1
aagtttgtgctataactatgttgttgaccttaaagacaagaaagaaagaataagtgtgtttgtttttagctttgtttggattttggatgaagaggaaagtagtggtatttatacgtggtgatggtcggaaagatagaaggaggaagaatcgttcttggctccagaattttctcggcattaattaattac

SEQ ID NO: 11868 - DNA, 185 bp, Glycine max
  unsure (1)..(185): unsure at all n locations; Clone ID: 701153046H1
gacattaaacttttatttttanatgataaaacttaaatataatatttaagatattttgacagtgttctttagtcaaaattagaatttaatcttggtaatctttataataagtattttcattaaatatcaagatattttattgaagtctaactccaatctactactgatgagaaaacaaaactata

SEQ ID NO: 11869 - DNA, 189 bp, Glycine max
  unsure (1)..(189): unsure at all n locations; Clone ID: 701153047H1
ggaaaatggcatgtaataatggcctgcagggattacctcaaagctgcaaganctgcaaaatccgctggcatggctaaggaaaactacaccatcatgcacttggaccttgcctcgctcgacagtgtccgccaatttgttgataacttcagaagatcggaaatgccgttagatgtgctggtttgcatgctg

SEQ ID NO: 11870 - DNA, 189 bp, Glycine max
  unsure (1)..(189): unsure at all n locations; Clone ID: 701153052H1
gggagctgggtttgttttcggcctttgatcttcgattctctctctttttctctcgcgaaaaccgtatcagcaatgtctggagaatcagccagcgctattcacaagggtcaagtcgatctcttagacttcattgactggtctggggttgaatgcctcaatcaaagctccacccantctctccccaatgct

SEQ ID NO: 11871 - DNA, 195 bp, Glycine max
  unsure (1)..(195): unsure at all n locations; Clone ID: 701153054H1
gagaatcacgggttttgagcaaaatgggtgttgtggagggtctcttggcattgggtttgattctgaatgtgtgtgttgtgtgcaatggaggcacaagcagccccttcgtcaggaaagttgagaaggctgtagatatgccacttgacagcnatgtcttngccattcctcctggttataatgccccccagcaggtnt

SEQ ID NO: 11872 - DNA, 201 bp, Glycine max
  Clone ID: 701153055H1
gaggaaaaagggttttgttttcatttcgttcttttttttccttccaaactcactcatctcacacttcctcttcctctctcactcagattcagcaattttctattttcttctctcatggcttcagattccaaaaaggatttccctgctgatgacaaagctggaacagcagagaataaagcatccaaagatgaaacgtcatct

SEQ ID NO: 11873 - DNA, 76 bp, Glycine max
  unsure (1)..(76): unsure at all n locations; Clone ID: 701153056H1
gggaaccaccggagaggagggcttcacacaggganttacgcngttgcngcngtcaacgcccnnnnttcccacntcc

SEQ ID NO: 11874 - DNA, 187 bp, Glycine max
  Clone ID: 701153059H1
ggtggtggcacttctcgtgttgctcaacacagacaacaatggcgtcggtttcagtaatggctacgaccagcaacaacaggtggtccatggcttccttgcgctctgctttgccctctcattctccttctgtttcctcttcattgcgcttccctgtattgccatcttcctcttcatccaagctccgaat

SEQ ID NO: 11875 - DNA, 188 bp, Glycine max
  unsure (1)..(188): unsure at all n locations; Clone ID: 701153061H1
gggtgagtggtgacataaataagcatttgcctacgttgttcgtgttggatgcttccaacttctcattgcgccaaattttccgaatttgcattatggtattgctagttggaattgcattgcttctgggtctcttcctcgctgttcttntattcaacccacgacaccgtaaatctgggcacaagggaaaa

SEQ ID NO: 11876 - DNA, 170 bp, Glycine max
  unsure (1)..(170): unsure at all n locations; Clone ID: 701153062H1
gcantccaaagaaaagaaaatcctcaattttctgagcagccaaacactctntctctgtctctcganaattctcagtttgcagagnaaatctgaatcatgtcgtggcaagcgnatgtcgacgatcaccttctgtgtgacatcnanggtnaccanctcactcacgctgctat

SEQ ID NO: 11877 - DNA, 203 bp, Glycine max
  Clone ID: 701153063H1
gggaagaagcctatcaacgtgaacttgagcagcgaagagtagatgaaatgttcatgaaggaagcacttttggaagccaagaaggctgctgatacatgggaggtacctgttggagctgttcttgtgcagcatgggaaaattattgctcgaggctgcaacttagtagaagagttacgggactccactgcccatgcagagatgatt

SEQ ID NO: 11878 - DNA, 194 bp, Glycine max
  unsure (1)..(194): unsure at all n locations; Clone ID: 701153064H1
ggtgagttcattaacatatacaaattctctgtgttgtgttgtgtacttgtgttaattgtgttgttgttgtaggaaatttaagtgaagagagaatgatgatgaagtctgctatgtgtgcattggtgcttgtggcactggttgtggttgcagtgnggcccatggctgnggctgcggtgacttgcaacccaacacaa

SEQ ID NO: 11879 - DNA, 87 bp, Glycine max
  unsure (1)..(87): unsure at all n locations; Clone ID: 701153066H1
gaggntagagatcaccaacaaaatatttgctttttgttggatttcattgcanncntgtttggctatgcngcnncnancnttgcagca

SEQ ID NO: 11880 - DNA, 184 bp, Glycine max
  unsure (1)..(184): unsure at all n locations; Clone ID: 701153069H1
ggcgcacacagttntacanntcnagagnattancnnaccctttaannttnaaccgnacctacgtccnatattcctantattccttaatccttctcgaccaatccattcggngagtggttctaatagtaggttatagnattctttcaaaattaaagaattctttaatcctaagtctgaagaacta

SEQ ID NO: 11881 - DNA, 106 bp, Glycine max
  unsure (1)..(106): unsure at all n locations; Clone ID: 701153071H1
gaccatcttgctactgcgtgcgattcaaggagagtaatttgnaatttcaatgttttgctattgtggagaaagacttatggtgctgtatgatgccgtagtggattcc

SEQ ID NO: 11882 - DNA, 210 bp, Glycine max
  Clone ID: 701153074H1
ggatattgggctgtataatgtgcattgctggtagtatcattattgttattcatgctcctaaggaacaacctattacatctgttctggaaatatggaatatggccactcaaccagcttttctggcatatgtgggctcagtaatagtgttggttttcattctggtcttccattttgcaccaagatgtgggcatacgaatgtgcctagttttt

SEQ ID NO: 11883 - DNA, 185 bp, Glycine max
  Clone ID: 701153075H1
ggaagctgaaccctaactagctgagcagacggaggagaactcgactgaagctgcctctgcgacgccgtttcgattcagcctcagacatttccgttgcagtcatggtgcaagaaaatggcaagaggaagaaaccaaacattctggtgactggcacaccggggacaggaaagacaactgtgtgcact

SEQ ID NO: 11884 - DNA, 186 bp, Glycine max
  unsure (1)..(186): unsure at all n locations; Clone ID: 701153076H1
ggaagaaaataatacgtgcatacatagctatctatttatctatagcaagtgcgtcaagagacacgtggtaccctagctagagtgccattctgtggnnnnnnnnnnnnnnnnnnnnngcatcacatcacaatttgcattgcctcgtgtcctttttcttctttgctctccaaaaatctcacacacaca

SEQ ID NO: 11885 - DNA, 192 bp, Glycine max
  unsure (1)..(192): unsure at all n locations; Clone ID: 701153077H1
gaaattgttcctcatcaattgttcganaaacttccatttcttagatatgtgatatacacaccgacatatcaccacctacaccactctgataaggacactaatttctgcctcttcatgcctctctttgattcacttggcaataccctcaacaaaaattcatggcaatcacacaaactactaagttcaggttca

SEQ ID NO: 11886 - DNA, 192 bp, Glycine max
  unsure (1)..(192): unsure at all n locations; Clone ID: 701153078H1
aggccacggcnggaagttcacntggatcgnccacggctacnagcaagtngatatgccgcacngtgcnatngacgccaaggacccgaacttcgaggatcctgtggagatcgccaccgtgtgatcgcggtggtttccggtggccaggtctgncgatagtagtaattggcgaaacgtgttttttcgtgttcaata

SEQ ID NO: 11887 - DNA, 191 bp, Glycine max
  unsure (1)..(191): unsure at all n locations; Clone ID: 701153079H1
cttcgtttttctttgacgaaaaaaaaataaattcgtaaacgtagaaaaaaattcatcaaaganaatactctatccatagtagagganaaaaatgaattgcagggatggaaaagccgtatgcatcaatacgcagaaaatgcttgtacggttatttantattatttttgcccatttttttattttcttatttg

SEQ ID NO: 11888 - DNA, 176 bp, Glycine max
  unsure (1)..(176): unsure at all n locations; Clone ID: 701153080H1
tccagagagaagaagaaacttaatgcgatcatcacttcacttcactaatacatcatggcagacgatnccccagaacaagtatgagagctctgaggttgaggtccaggatcgtggtgtttttgactttctcggtaagaaaaaggntgaagaagacaagcctcatcntcgggnggngg

SEQ ID NO: 11889 - DNA, 153 bp, Glycine max
  unsure (1)..(153): unsure at all n locations; Clone ID: 701153081H1
tcagatctggagcaggagaatagcgttgngcagcgtttgcntttgctctgctgttccaatcggcctcagcagacgacgtcgttgtgctctctgaagataactttcgagaaggnagttggtccaggacagaggggctctcgttgagttctatgc

SEQ ID NO: 11890 - DNA, 142 bp, Glycine max
  Clone ID: 701153082H1
gggatcagcagggagaattaggtttttagggtttacaccgagcagccacacctcccgcagcagccatggttctcaaaactgaactatgccgattcagtggtgccaagatctacccaggaaagggcatcagatttgttcgtgg

SEQ ID NO: 11891 - DNA, 184 bp, Glycine max
  unsure (1)..(184): unsure at all n locations; Clone ID: 701153084H1
ctggacagaganctgtatacactactggtnaaggggcttctgccgtnggncttacagctgccgttcataaggatccantcacaaggnnntggactcttgaanggggagcacttgttctanctgacaaaggnatttgtcnattgatnantttgacnagatgaatgctcagggtagggtcagtatc

SEQ ID NO: 11892 - DNA, 182 bp, Glycine max
  Clone ID: 701153085H1
aactaattattaactaaaaatgcaataaattgaataaaatgatggaaaaaaaaacatcatatcctctttcttctaagaggattccaagaaaacacagtggttaggttatccaaagtctgtagtatgattattcaaagctggaaatatgggcttaataatctttgacacctcccttactaagt

SEQ ID NO: 11893 - DNA, 85 bp, Glycine max
  unsure (1)..(85): unsure at all n locations; Clone ID: 701153086H1
ccaacactcactacacctcttcccccaccacatngtgacatgccagtcattgatttctctangcttagcaaggggaacaangngg

SEQ ID NO: 11894 - DNA, 189 bp, Glycine max
  unsure (1)..(189): unsure at all n locations; Clone ID: 701153087H1
ggtgcaattgaaagagagatttgatagcctcaactcaagtaaggnttttctctttgagaaaatcgtatcttacaccttttggtgaccactttgagtgagagaagagaaattaagagggatactcaaattagattcaagagagatggccatcaaccatgaaacttgggctttcattttcggtcttctagg

SEQ ID NO: 11895 - DNA, 186 bp, Glycine max
  unsure (1)..(186): unsure at all n locations; Clone ID: 701153088H1
gatccacgtcttaaaattaactactagcgagtctcagtccagttagcacaccaaccccaaatccaaaggttcatttcaatatgaccatcatgtcaagttttggacctttgaccattcttagtatagtcttgtnagtggttggtgtcattgtctntggggctgannctnggngnggttttntttgtt

SEQ ID NO: 11896 - DNA, 186 bp, Glycine max
  Clone ID: 701153090H1
gggtaccccttgtacccgttatttatatagttatgatcttattggctaataaaaaaaaaattggtaattgatgtgtttggaaaagctatttataggacttatcttatgacataagtaattatgtaagtgtttggagtaacttatgaaaataatttatgatctgctcatactgttttcaacttattt

SEQ ID NO: 11897 - DNA, 115 bp, Glycine max
  unsure (1)..(115): unsure at all n locations; Clone ID: 701153091H1
taccccctcgttacccaagacggttcgtcactactcattactatctttctattatatccactttagactttttctatcgttggtaagctagtttnanttttgntantnancggaa

SEQ ID NO: 11898 - DNA, 185 bp, Glycine max
  Clone ID: 701153092H1
ggacaagccagtgatagttgctttcagataactgatagttgtgtgcaattatttgaattcaagaatgtctcaacccgactcgttggtggctgagattgaggtgaaaacctctgctgatcacttttacgacaccttgaagggtaagaaacagcatcgtattcatgatgttgcccctcatcatatcc

SEQ ID NO: 11899 - DNA, 187 bp, Glycine max
  unsure (1)..(187): unsure at all n locations; Clone ID: 701153093H1
ctggccgtttaaactattaagaagataatttctgattatgctatcttatgcaatgacaattaacaagtcacagggacaatcactatccatggttggattttatttgccgaaacccatattcactcatggccaattatatgttgcnntgtcatgggtcaactcagcaaaaggattaaaaattttgatt

SEQ ID NO: 11900 - DNA, 188 bp, Glycine max
  Clone ID: 701153094H1
gaatggcatggttgcagttgcagagaaccatcaccaataccaagggaggtgctaatttgatctcaccgctcccacgattcttctcgaaatgttccccctatgttttgaaagttggaataccagagtttctaaacgggattgggaagggggttgagtcccacgttcctaagcttgaatctgaaatcggt

SEQ ID NO: 11901 - DNA, 136 bp, Glycine max
  unsure (1)..(136): unsure at all n locations; Clone ID: 701153095H1
ttggctatgangtgctggtggctttggtgacccttttggttttctcatttgcttgtgncactgcttcatcatcaggaccaacaaaantccaccaccgtgtggagcaattcaggnggaatctgcttgctaatggcnt

SEQ ID NO: 11902 - DNA, 235 bp, Glycine max
  unsure (1)..(235): unsure at all n locations; Clone ID: 701153101H1
ggcacaagtgagtttgttgatcgagataactagaaacagtgtgatgaaaatgaaggtccttgttttcttcgttgctacaattttggtagcatggcaatgccatgcgtacgatatgttccctctccgaatgaacactggctatggtgcccgtactccggaggtgaaatgcgcaagttggaggcttgctgtggaagcacacaanatcttnggctttgagaacccatncctgaagagt

SEQ ID NO: 11903 - DNA, 106 bp, Glycine max
  unsure (1)..(106): unsure at all n locations; Clone ID: 701153106H1
ggaggaagccacatagagacacaatacanagtgagttgttgctccttcgccacaactctctgccaacatgggtatctccagagattctatgcacaagaggcgtgcc

SEQ ID NO: 11904 - DNA, 233 bp, Glycine max
  Clone ID: 701153110H1
atcagtggtgccccccaggataacaacataatgctgtggaatgctgtcatatttggtcctgatgatactccatgggatggaggcacgttcaagttgacactccaatttactgaggactatccaaataaaccaccgactgtacgatttgtgtctcgcatgtttcatccaaatatttatgctgatggaagtatttgtttggatatattacaaaatcagtggagtcctatttatga

SEQ ID NO: 11905 - DNA, 232 bp, Glycine max
  Clone ID: 701153111H1
gaatgaaggaaaaacgcataactgaatcgacgaaactgaggcaaaacctacatagggaaggttgccccaatatcagcatgcttcccattgcactgcactcatcccatgcgaattaagctttccgattcgttattactacccttctcttgtgaattggtcgaatatatgctccaactatggataatatgaagaaagatgaaccccaaaatcggaagcaagatgaacttgctga

SEQ ID NO: 11906 - DNA, 236 bp, Glycine max
  unsure (1)..(236): unsure at all n locations; Clone ID: 701153112H1
ggcacaacatcttcagcctttccctcgttgaaatgaaaatgggttcttctttgtggactttgtgtctaattttggcttcactagcctcttctgcattctgtgcctttccacggaggccagtggatgttccattcggcagaaactacgttcccacttgggcttttgatcacatcaaatacttcaatgnnggttctgagattcaacttcatcttgacaagtacactggtactggcttc

SEQ ID NO: 11907 - DNA, 214 bp, Glycine max
  unsure (1)..(214): unsure at all n locations; Clone ID: 701153113H1
gatcaattcaaaatatatccatcaattataagcatgggtttgtggaacacaacgaatgcagtgtcttgccgctttcacaagtttggtgatgaccaaaagaatctggtcttccaaggtgatgccacgtcttcttccaggggcatagaactcacaaagttagacggtggaggaaaaccagtgggtggcagtgtggggagantnnnatactcttctc

SEQ ID NO: 11908 - DNA, 231 bp, Glycine max
  unsure (1)..(231): unsure at all n locations; Clone ID: 701153114H1
ggaagcacaagagaagagaagagaagagaggagagggggggagaaggggttncagagaganannnagagagatgtcatcatcttcagacctggatntgcaaatagagcagttgaagaggtgtgancctcttaaggagtctgaagtgaaggcgctttgcctcaaagccatggaaatcctgtcgaagagatcnacgttacaaagggtcnacgcccctgtnaccatatgtggtg

SEQ ID NO: 11909 - DNA, 229 bp, Glycine max
  unsure (1)..(229): unsure at all n locations; Clone ID: 701153115H1
gntgttataacanatggggttnccctccnagtaagttcccatggacatatnaagccnaagngncttnctatcntctggaangaaaagtgaaggtcttcctagtgggtcgaatnagtcanttgaaattgcgnctggtgacttggttntgtttcccaaagggatgagttgcanttgggatntgtctgttggngttgacaagcnctanaattttgaataaatcctacaaggg

SEQ ID NO: 11910 - DNA, 199 bp, Glycine max
  Clone ID: 701153116H1
gcagttctacaatagcttgaaggcttaattgagttattaccaatgctaccacatccctagccgcaatggctattaagtcagcacaggaaaccgtgcgagggcaagctttctcaagcttggccttggcttcatcaataacatagaaagcatggacagagagattaggaggaccatctttctcagccaggtttttgggtgt

SEQ ID NO: 11911 - DNA, 235 bp, Glycine max
  unsure (1)..(235): unsure at all n locations; Clone ID: 701153117H1
tgggtcactcattattttggtcattggaagcctggtaaattttggcaatgtcgcccatgcagcaatctcaacagtatgcgttgtggtttatttctgctgctttgcgatgggttatgaaccaattccaancatcctttgctcagagattttccccactagggtgcgtggcctctgcattgctatctgtgcattagtgttctggattggagaatcatcatcacaaactcgctgnccg

SEQ ID NO: 11912 - DNA, 318 bp, Glycine max
  unsure (1)..(318): unsure at all n locations; Clone ID: 701153118H1
tggttggnncaattacagaatnaattttntcaaaagtttcgtgancaagnatacattttgggaacanatatccattctgcttgggaantatatncaanantccagaaacganccccgggcatgttcagcanntggcccaccantccttgctnggccaaattnctancgttcggggnagtccnttcccccgttcgttncgccgtttagnnnaggttatgccccaancccctngntntggaatntttnctagngcangggttncccacnggttcgcaaaaccttgngccaaaaaaaagngcgaatngangacggttccta

SEQ ID NO: 11913 - DNA, 177 bp, Glycine max
  unsure (1)..(177): unsure at all n locations; Clone ID: 701153119H1
tattgtatggccgccaattccagtagccgagggatcaccgccttagggaagcgagtcgccaaccggatctggacttccaacgcacctcctctcacttcaaggaggggagcatacagtagcggctcagtgtacgacaagaaccctgatgatgagatccagtctgggcangtcccanac

SEQ ID NO: 11914 - DNA, 232 bp, Glycine max
  unsure (1)..(232): unsure at all n locations; Clone ID: 701153120H1
gataaagagtggatctcttaatacggattggaattggtgccaagtantctactccanaggntcccctgaangttcaagtaaccaaaatcanatgtcttgntgcagaagacacttgtaatattaatatcagtctcnccagtctgtgtctgcnttggngcatngcccactggatgggcncaaacanggaaatgcccttncccaagttntgggggagcnnangantnnaancccc

SEQ ID NO: 11915 - DNA, 231 bp, Glycine max
  unsure (1)..(231): unsure at all n locations; Clone ID: 701153122H1
ctagtgagaaaatcacaggtatagtggctgatgtgaacatggcatgggccntggaactgcacagataagctaggaatcaaaggtgctgtcttctgccctgnttcagcagcngntttagtcttgggtganancattccaaacctcattcaagatgggatcataaataccgaaggttccccgattataaaagggaaatttcaactatccccaganatgccaattatggacaca

SEQ ID NO: 11916 - DNA, 68 bp, Glycine max
  unsure (1)..(68): unsure at all n locations; Clone ID: 701153123H1
tagtttcgggtatttggacccgngagtactaacatgagtctttggttgactcagaaatccccgacgtg

SEQ ID NO: 11917 - DNA, 236 bp, Glycine max
  unsure (1)..(236): unsure at all n locations; Clone ID: 701153124H1
atcagtggtgccccccaggataacaacataatgctgtggaatgctgtcatatttggtcctgatgatactccatgggatggaggcacgttcaagttgacactccaatttactgaggactatccaaataaaccaccgactgtacgatttgtgtctcgcatgtttcatccaaatatttatgctgatggaagtatttgtntggatatattacaaaatcagtggagtcctatttatgatgt

SEQ ID NO: 11918 - DNA, 231 bp, Glycine max
  unsure (1)..(231): unsure at all n locations; Clone ID: 701153126H1
gnattttaatccaaataaagacngagtcttcgagcactaggatcaaccttcatttgtcttgttactanctactataactatttctctntntcacttgntgnaggnacttnattggaagttgaanatcaacangaacttatcaatctctctttttctctttctctctccggcacctcttgttaaaaaattgtncttttcaccgaaacccgtaaagggtcctgagctagcttc

SEQ ID NO: 11919 - DNA, 59 bp, Glycine max
  unsure (1)..(59): unsure at all n locations; Clone ID: 701153127H1
gcatngtnatatttggataatggngagtatgntttaaaagggnatgcttaaagggncnc

SEQ ID NO: 11920 - DNA, 234 bp, Glycine max
  unsure (1)..(234): unsure at all n locations; Clone ID: 701153131H1
ggcgngattttcccatctgcttcctcactgatctccattcncattccatggnttccactgaatcatnccctttcnannnaattcagattcanagggntgacactacatttgacgcatatgtggttggaaaanangatgctcctngaattnnngtgatncaggagtnntggggtgngganccncgagttaagaaccatgccgtgangacnnctcagcntggnagngggtctaaag

SEQ ID NO: 11921 - DNA, 121 bp, Glycine max
  unsure (1)..(121): unsure at all n locations; Clone ID: 701153132H1
cccancatggtggaaganacantcnagaccacagtcttttagctaaataataccctgngcctcnatatntccttcatttacttcgcaccatggttcnaaangtcnacaccacnnnccnaca

SEQ ID NO: 11922 - DNA, 230 bp, Glycine max
  unsure (1)..(230): unsure at all n locations; Clone ID: 701153134H1
cgcctaatgattagtagattgatttccatagctttcaggtaactttctgcctcccataccagctaactaacactggattcaatgattttagctgtctagatcaaaactgccctatgtaatgttgttacaatacntgaattttgaatctagtttagtagaggaatttcatggtgtaacgttttcgtgtgagccgcagattctgggatggaagtaaggaactgtcangacgc

SEQ ID NO: 11923 - DNA, 226 bp, Glycine max
  unsure (1)..(226): unsure at all n locations; Clone ID: 701153135H1
ggctggactctttcagattctctatctcatggtcaagaatattcccaaagggcaagggagcagttaacccccttggggttaaattctacaacaatgtcatcgatgagatcctagcaaatggtttaaaaccttttgtcactctttttcattgggactttccacaagctcttgaagatgagtatggaggattccgtagtcctaaagtngtggcggattttcgtggcta

SEQ ID NO: 11924 - DNA, 212 bp, Glycine max
  unsure (1)..(212): unsure at all n locations; Clone ID: 701153136H1
agggaaattgagaatcggattgcttcacaacagctgaaaattactgctttgagacgggagattgatgatcttatggacttgattgatgagatatgatacgtgactatgctgctcgagatgatgataatatggctctcatttnnncccttgttttatagttgcaaagngattancgataacttctgacggttggaattttggtcgcagccatt

SEQ ID NO: 11925 - DNA, 240 bp, Glycine max
  unsure (1)..(240): unsure at all n locations; Clone ID: 701153137H1
gggggggaataggagggggcaaattgagttgggtgttggaaaggcagagcaagaggagtaacataatcaaanatggnggttaggcaaagagccgtgtctgcacttccagcncttctacgcactctccgcaaagaacctttgaagcctcggaaccacgcanacgtcaatgccttgccctctcttcgacngcgctttcnctttgtaggatcnganaaacctcagngtacaggncccngaanc

SEQ ID NO: 11926 - DNA, 227 bp, Glycine max
  unsure (1)..(227): unsure at all n locations; Clone ID: 701153138H1
gctgaagcgaaagttgaagttgatctaccaaggtgaggccttcaatgggaaactcaccaagacagcaaggtctcatggcaagaagttccaagtttctatcaaacaagaaacttcaagattactgggaaacctgggctgggcctatatgcaaaagatgaactanaatgatggctgaggtggtgtatcggaaagcccaaataattgatccggattgtaacaaggcctgt

SEQ ID NO: 11927 - DNA, 227 bp, Glycine max
  unsure (1)..(227): unsure at all n locations; Clone ID: 701153143H1
gggttcagattcttggaatggctgctgtgactattntttttgcagccctgggtttcatgtcaccagcttccaggggtatgctgcttaccgggatgataattttatatcttttcctgggaattgctgctggatatgtcagtgtacgtctatggaggaccattaagggaacctcggaagggtggagatccatttcctggttatctgcatgcttcattcctgnnatgctt

SEQ ID NO: 11928 - DNA, 229 bp, Glycine max
  unsure (1)..(229): unsure at all n locations; Clone ID: 701153144H1
ggcggcacaaagcattcactgtgtcggaaaaagaagangannnaaaagatgagcgacggaggaaaacgacaaggtggnagancgttgccgccgccgccaagaggccctccgnctcctcccccctctcgncctcgcctcgaacccgtcgatcgcgaaaagacatgtccgttactgctgngagtgttcactaagattgggagttcaccattccatggaagactttgccgtc

SEQ ID NO: 11929 - DNA, 226 bp, Glycine max
  unsure (1)..(226): unsure at all n locations; Clone ID: 701153145H1
gatcgaagcaagnaatgaaaacccaaagtgcttctctcctactgtctttttctctctcttgctatccttttggctagtngcactgctgcaagtgcaactccaagaagcgcagtgccaagccaccatgtttnaacattcaacagaagccttntccttccacttttctctttggaattggttcttctgcttaccaggcagnaggagcagcaagtgtagatgggagagg

SEQ ID NO: 11930 - DNA, 233 bp, Glycine max
  unsure (1)..(233): unsure at all n locations; Clone ID: 701153146H1
gctgtacccaggtggcagttacttcgacccgctgggcctggcctcagatccanagaagaaagccacccttcaattggcggagatcaagcacgcccgtntcgccatggtgggcttcttgggctttgcagtccaagctgccgccactggcaagggcccgctcaactnctgggccacccacttgagtgacccactccacacaaccatcattgacaccttctcatcctcctcttaag

SEQ ID NO: 11931 - DNA, 226 bp, Glycine max
  unsure (1)..(226): unsure at all n locations; Clone ID: 701153147H1
gaagagacccggaaagggtgggaaccgcttttggaaatccattgggcttggatttaagactcccagggangccatcgaaggaacctacattgacaagaagtgccccttcactggcaatgtttccatccgtggccgtatcttggctggaacatgtcacagtgctaagatgnacaggactattattgttaggaggnattatctccattttatcangaataccagaggg

SEQ ID NO: 11932 - DNA, 227 bp, Glycine max
  unsure (1)..(227): unsure at all n locations; Clone ID: 701153150H1
tacggcgcagttaagatggatctcaatcgaaaagtcattactaatgacaataatnnagaaattccttacgttgttaatacattaatatttacaatagcccaacatttcattggagacccatctctctggaaagataggtctgcagaattattgtcanntcntaagtgtagaactttagctgattttaggtggtncagagataccttcctaaccagggtctacactag

SEQ ID NO: 11933 - DNA, 222 bp, Glycine max
  unsure (1)..(222): unsure at all n locations; Clone ID: 701153151H1
gagagaaagagagaganagatgtcgaagcgtggtcgtggtggttcggcggggaacaagttccgcatgtcgctgggtcttccagtggcggcgacggtgaactgcgccgacaacacgggggcgaagaacctctacatcatttcggtgaaagggatcaaaggcccgtttgaacgtcttccctcggctgcgttgggcgaatggtgatggccanggnaannncngaa

SEQ ID NO: 11934 - DNA, 252 bp, Glycine max
  unsure (1)..(252): unsure at all n locations; Clone ID: 701153152H1
gacaccaacaccaaaacaaacccactaagatggcttcctttgtatccttcctagtgctgcttcttgcagcccttatcctcatgccncaagggcttgctacttactacanaccanttaagaagncaccagtgtacaagcctccagtgtacaagccaccagngtacaaaccaccggtttataggccaaaaccaccggtttacaagccgaaaaccaggggtttaaangcccaccntgtagggngccnccatacaa

SEQ ID NO: 11935 - DNA, 54 bp, Glycine max
  unsure (1)..(54): unsure at all n locations; Clone ID: 701153153H1
gacttggatgttctntataattngacgaatgtttatanntcttacactntagag

SEQ ID NO: 11936 - DNA, 233 bp, Glycine max
  Clone ID: 701153154H1
ggtcaggaaagatagtaatttgtgatagaggccttagtcctagagtgcagaagggtaatgtggtgagaagtgcaggaggggtgggaatgattctcacaaacacggaagccaatggagaagaactggttgtagattctcacctccttccagcagttgcaataggagagaaagaaggaaaagagctcaaaagttatgtcctatcaagtaaaagttctactggcaactctagcttt

SEQ ID NO: 11937 - DNA, 101 bp, Glycine max
  unsure (1)..(101): unsure at all n locations; Clone ID: 701153156H1
ggaagatactgaggntgctagntatcgnntnactcggatangnangagcatctcnatnntgcgcgtcccaaattacccgtgaatgtgtctggantcaatct

SEQ ID NO: 11938 - DNA, 206 bp, Glycine max
  unsure (1)..(206): unsure at all n locations; Clone ID: 701153158H1
gggtgggcgaggtacccaganagtgatacaatacngagtgtcgttgttgctccttcgccacaactccctgccaacatgggtntctccagagnttctatgcacannaggcgtgccactggtggcnagaagaaggcatggaggnanaagaganagtatgagcttggtcgccagcctgctaacactaagctgtcaagcnacaagacagt

SEQ ID NO: 11939 - DNA, 77 bp, Glycine max
  unsure (1)..(77): unsure at all n locations; Clone ID: 701153159H1
ggagcgaagaagatattagggtttttgagtggcggtggcggcgattcctnagncacttctctttctggcagctttcc

SEQ ID NO: 11940 - DNA, 199 bp, Glycine max
  unsure (1)..(199): unsure at all n locations; Clone ID: 701153162H1
cccttagccaacacaaccatcatggncacctctgctattcagcaatcagcattcactggtcaaactgctctgaagcagctcaatgagttcgtccgcaagaccggtggcgccggcaaaggtcgcactancatgcgccgcaccgtccaagagtgctcctncagngcatttggtatggccctgaccgtcccaagtacttggg

SEQ ID NO: 11941 - DNA, 206 bp, Glycine max
  unsure (1)..(206): unsure at all n locations; Clone ID: 701153166H1
gggtgggcgangtcanccagagagtgatacaatacagagtgcgttgttgctccttcgccacaactccctgccaacatgggtatctccagagattctatgcacaagaggcgtgccactggtggcaagaagaaggcatggaggaagaagagcaagtatgagcttggtcgccagcctgcttaacactaagctgtgcaagcaacaagaca

SEQ ID NO: 11942 - DNA, 222 bp, Glycine max
  Clone ID: 701153167H1
ggagcgaagaagatattagggtttttgagtgcggtgcggcgatcctagcactctcttctgcagctttcgccgacagcctcattcaccatggctgagcaaaccgagaaggctttttgaaacaaccaaaagtgtttctcagctcgaagaaaactgggaagggaaagagacccggaaagggtgggaaccgcttttggaaatccattgggcttggatttaagactc

SEQ ID NO: 11943 - DNA, 194 bp, Glycine max
  unsure (1)..(194): unsure at all n locations; Clone ID: 701153170H1
cccttagccaacacaaccatcatggccacctctgctattcagcaatcagcattcactggtcaaactgctctgaagcagntcaatgagttcgtccgcaaaaccggtggcgccggcaaaggtcgcactaacatgngccgcaccgtcaagagtgctcctcagngcatttggtatggccctgaccgtcccaagtnttg

SEQ ID NO: 11944 - DNA, 227 bp, Glycine max
  Clone ID: 701153172H1
gcccaccatggtggaagaaacaatcaagaccacagtcttttactaaataataccctgagcctcaatatatccttcatttacttcgcaccatggttctaaagtcaacaccaccacccaacaacataagcagacattctaagaaacaaaaagcatgtgatataagagatgagaaaatattcactccaaatattagcatacctcaccatatccacaggcaaaatgcaaag

SEQ ID NO: 11945 - DNA, 249 bp, Glycine max
  unsure (1)..(249): unsure at all n locations; Clone ID: 701153173H1
gacaccaacaccaaaacaaacccactaagatggcttcctttgtatccttcctagtgctgcttcttgcagcccttatcctcatgcctcaagggcttgctacttactacaaaccaattaagaagccaccagtgtacaagcctccagtgtacaagccaccagtntacaaaccaccggtttataagccaaaaccaccggtttacaagccgaaaccacggtttacaagcccaccatatangagcccccatacaa

SEQ ID NO: 11946 - DNA, 180 bp, Glycine max
  unsure (1)..(180): unsure at all n locations; Clone ID: 701153176H1
ggaagcaaaaaatgaaaacccanagtgctnctctcctctgtctnntnctctctcttgctntccntttggctattngcactgntgcaagtggaantccagnggagcgcagtgctcangcccaccatgnttcnncattnaacggaagcctttcgccttcnnngncatgctcgttgganttgg

SEQ ID NO: 11947 - DNA, 64 bp, Glycine max
  unsure (1)..(64): unsure at all n locations; Clone ID: 701153177H1
gggatagggatngggaaaaggagccgcgananccngcatataaggatangcgacncgacgagac

SEQ ID NO: 11948 - DNA, 86 bp, Glycine max
  unsure (1)..(86): unsure at all n locations; Clone ID: 701153178H1
gatgcgtggcaantgctatgntatacttaagataagctgggaaagganaaggctcnctangtgagngcnacncgtgnaggttanag

SEQ ID NO: 11949 - DNA, 232 bp, Glycine max
  unsure (1)..(232): unsure at all n locations; Clone ID: 701153179H1
ggggaaatctagaaaatactccaaaggttatgctactggcttcgttcctgattttcggcatgctgttgagactattgatgaatcagaagggctgggtagcttgggaagggttgatatggaantgacggctttggcagattcttgtgcaccaaaaaggaaacgccctggcttgaatacctgtggtggngattatgctggtagtttcaatgtaccatttcgacatttctcatat

SEQ ID NO: 11950 - DNA, 224 bp, Glycine max
  unsure (1)..(224): unsure at all n locations; Clone ID: 701153182H1
gaaggtcaaaaacttgcatgcatgctctgtctgttcttattcgttgcaaatgggacaatgaaattcattccagggcgtcatcattgtataatctcatagatattcacagcaaagctgttgcatctatagtgaacaaggcagaaccattagaagnaaccttaattcatgtaccgatttggaaggattccctcgtttgtgttggtgttaaaaggnagaatcagtgt

SEQ ID NO: 11951 - DNA, 226 bp, Glycine max
  unsure (1)..(226): unsure at all n locations; Clone ID: 701153183H1
aatcatagtaatgatcatcaacaaaaactaatagtaatgatcatcaagatggacataatatgtcaaaatgctttttgaacaaaagtatactccattattgccttaattctaagctaaggcaactccttaactacacagggcatgcaacangacttaacagtagccaaaatctaagcnaaggctaagctaaagtgtaaatccgcgtccaaatagtttngatcccana

SEQ ID NO: 11952 - DNA, 227 bp, Glycine max
  unsure (1)..(227): unsure at all n locations; Clone ID: 701153184H1
gatatccaaaggaacaaaaatattattaagatgatcaacattattggagcacttgttctactctttgcatttctcttcctcagttgtgtgtatgcacaagacacaacaacccttgtgcctgcaatcataacttttggtgattctgctgtggatgtagggaacaatgactatcttcccacccttctcaaggntgntnacccccctnatgggagggcctttgtaaancc

SEQ ID NO: 11953 - DNA, 200 bp, Glycine max
  Clone ID: 701153188H1
gatggtgggaccagtgagacctcagtttgtgctctttggttcttccattgttcggctcagttactctctccaaggttggggcgctattcttggctcatttgtatgctcgcaaggcggatataattctgcgaggatactctggttggaattcaaggcgtgctgtgcaagttctggatgaaattttccctaagaacgccact

SEQ ID NO: 11954 - DNA, 225 bp, Glycine max
  unsure (1)..(225): unsure at all n locations; Clone ID: 701153189H1
gatcatcanccacaccaacaactcaattcctaacttgcctccatagcaatctttgcttaattcttctgttcaattaccacattcattatagctctctcatttcacanactttcaatttctgcntccnaatctgaattcaacccatttggcnttanngnnacatataattaattaaggaagatcgaatggagagggtgacaaagatggtatcaganaggccagtgg

SEQ ID NO: 11955 - DNA, 224 bp, Glycine max
  unsure (1)..(224): unsure at all n locations; Clone ID: 701153190H1
ggctgcagcaagggctcaacgcacgcaggaggaggagattgatcgagagaaganaagntgactacacgcttcaagaagancaggnagaagagaggccacgtgagttccggncatggccgcattcgggaagcaccggaagcaccctggtggacgcggtaatgccggaggtttgnaccaccancggatcctctttgacaagtatcancctgggttcttcggnaagt

SEQ ID NO: 11956 - DNA, 62 bp, Glycine max
  unsure (1)..(62): unsure at all n locations; Clone ID: 701153191H1
gagacgtaaaacattctttttgtttatgtngcataatatgtgaacgngttgaactagttcaa

SEQ ID NO: 11957 - DNA, 62 bp, Glycine max
  unsure (1)..(62): unsure at all n locations; Clone ID: 701153193H1
gagagagagtggtgtgttgncgaattgccaatggcagttaacngtcctgttcctttcgtgtt

SEQ ID NO: 11958 - DNA, 153 bp, Glycine max
  unsure (1)..(153): unsure at all n locations; Clone ID: 701153194H1
ataagtgnaagaccccacttcttgttcnacagtgatatggtantccagtgacatntcgtgcatcctggtcatcaaacattcattggcattcacaaacttccaacgtgcctgnacaagagcaagttcagggttnttgacaaggaatgggacagt

SEQ ID NO: 11959 - DNA, 229 bp, Glycine max
  unsure (1)..(229): unsure at all n locations; Clone ID: 701153195H1
ggcaggcgaaagagaagatggccaccgttccagggcagcttcgtgtgggagatcgtgaagaaaaacaactcctttttggtcaagcagttcggaagggggacccagagcgtcgaattcagcagagagagcnacaatctctacaaccttcaattcgttcaagtactctggtttggcaaacaagaaaactgttacggtacagcctgagggtaaagatcaggctgtgttgttt

SEQ ID NO: 11960 - DNA, 227 bp, Glycine max
  unsure (1)..(227): unsure at all n locations; Clone ID: 701153196H1
gggatatattgctagaatattgggacaaccatcattgatccgagagtcatccagagggaaatacccatggtctggcatgttttctcgcaccatgagctccctatcacgacatactaatccaggatctgctttgaaaaatggaaatggttttggtgatgtgattttgcatccttctcttccaaaaaagattcagcagttgtcttctgctacggcaaatacaaaagcnc

SEQ ID NO: 11961 - DNA, 259 bp, Glycine max
  unsure (1)..(259): unsure at all n locations; Clone ID: 701153202H1
catcataagaaggagtcagaccttgtcgttccaaccgataaactaagtttcctgaatagagcctgtgttatcaaagatcgggaacaagaaatagcctcggatggttcagcatcaaatccatgganactctgcacagtagatcaagtagaggaactaaaagccattattaaagtgattcccttgtggtctacagggatcatgatgtcagttacattggagggctcatttggnttgctgcaagctaagtccctggacagac

SEQ ID NO: 11962 - DNA, 51 bp, Glycine max
  unsure (1)..(51): unsure at all n locations; Clone ID: 701153203H1
ggtggcaanaannncnggactctcttggacttgcnagcgtccatttaaacc

SEQ ID NO: 11963 - DNA, 251 bp, Glycine max
  Clone ID: 701153204H1
ggtgcgatcccagcgttagtgtgtatttcctctcttctcactccgggatcgatattttcaagaacagatcgaaaagccgttcattgatttgttggatctgtgagtgagaagatggttactaagacagaggagactcaattgaacaggctcgaaaaccaggtcgataacggcggcggcggcgcgtgggagtacctctgcctcgtgcggaagctcaaagttcggcggtcggagaaagttctgaagcacggtct

SEQ ID NO: 11964 - DNA, 248 bp, Glycine max
  unsure (1)..(248): unsure at all n locations; Clone ID: 701153205H1
ggtcgtctgatgatatagcatttctctgatgaagtgcgtttcttggtgcttggtataaagcgcaacnnntttgggttcgggaaaagaaggaatgaagagaagggtctagaacaacacaacactacggattgaatattgaattaaacgacgctcatggctacggtgccggagaagaaagcgaagaagncttcttcgacgacantcgctctggccgttggagctctactntgaagccatacggttggacc

SEQ ID NO: 11965 - DNA, 233 bp, Glycine max
  unsure (1)..(233): unsure at all n locations; Clone ID: 701153206H1
agtttgttgatccgagataactagaacacagtgtgctgaaaatnaaggtccttgttttcttcgttgctacaattttggtagcatggcaatgcnatgcgtacgatatgttcccctnngaatantggctggctatggtgcccgtactccggaggtgaaatgcccnaattggnggcttgctgtgggancaacanaaaatctngggnttgnnanacttccccggagngngcntaaaa

SEQ ID NO: 11966 - DNA, 252 bp, Glycine max
  unsure (1)..(252): unsure at all n locations; Clone ID: 701153209H1
ggcacaagtgagtttgttgatcgagataactagaaacagtgtgatgaaaatgaaggtccttgttttcttcgttgctacaattttggtagcatggcaatgccatgcgtacgatatgttccctctccgaatgaacactggctatggtgcccgtactccggaggtgaaatgccgcaagttggaggcttgctgtggangcacacaacactttggctttgagacnattcctgaagagtccctngaancaacaaaggg

SEQ ID NO: 11967 - DNA, 252 bp, Glycine max
  unsure (1)..(252): unsure at all n locations; Clone ID: 701153210H1
aaaganacccggaaagggtgggaaccgcttttggaaatccattgggcttggatttaagactcccagggaagccatcgaaggaacctacgttgacaagaagtgccccttcactggcaatgtttccatccgtggccgtatcttggctggaacatgtcacagtgctaagatgaacaggactattattgttaggaggaattatctccatttatcaagaagtaccagaggtacgagaaaaggcactccaacattccg

SEQ ID NO: 11968 - DNA, 250 bp, Glycine max
  Clone ID: 701153211H1
ggagatgaatatgctgaagcagtagctgaattgctgaagtgaggatctgtgcttcttgctgaagattaatcctcaacaatttgaccatcgatcagctacagacttttacccaaatggaaggacaaataagtgattcattaagtaaacaacaatgtttgaagacaaaattaaccaacgagcttcaaaatgtccaacctccagaatgtatgcattcgatatgcaatgcatttatagagtaccaccagtcttc

SEQ ID NO: 11969 - DNA, 246 bp, Glycine max
  Clone ID: 701153212H1
atcagcggtgccccccaggataacaacataatgctgtggaatgctgtcatatttggtcctgatgatactccatgggatggaggcacgttcaagttgactctccagtttactgaggattatccaaataaaccaccaactgtgcgatttgtgtctcgcatgtttcatccaaatatttatgctgatggaagtatttgtttggtatactacaaaatcagtggagtcctatatatgatgtggctgctatac

SEQ ID NO: 11970 - DNA, 219 bp, Glycine max
  Clone ID: 701153213H1
ttgagggaggatgtggctcgagattatcttcggtttggtcatttacagattgttccggcgcttcttctacgacgacgacgttttggacatcgaaggatcggattcttctgctcttttctccgccgcggataggcttaaaaaactttacggagcaaatgtgtatgtgggtcttcggattcccgatgccgatactgcttctcgacagagcattgatatggt

SEQ ID NO: 11971 - DNA, 227 bp, Glycine max
  unsure (1)..(227): unsure at all n locations; Clone ID: 701153215H1
gcattgggtgttcctgctcttcccctgacatacgtggctcacgttctggcacttgttgccagcatcttggtcgtgctctgggtcctcaattttaggggtggcttggcttgggattctgataacaaggccctcatncttcaatcttcatccagttccttattgtcattgggcttactagtcttgggggtnaagctattataanctacaangcattncccctgangagg

SEQ ID NO: 11972 - DNA, 256 bp, Glycine max
  unsure (1)..(256): unsure at all n locations; Clone ID: 701153217H1
gggagttcaacgagatggagcaaataaagcacagaacagttgaagtgaatgggcataaaaatgcatgttgcagagaaaggagagggtccagtggtgttgttcctccacggcttccctgagctctggtactcatggcgccatcagattctctctctcagctccctcngctaccgcgccgtcgctcccgatctccgtggctacggtgacccgaagcaccaccttcaatcagcagctacaactgcttccacatagtggg

SEQ ID NO: 11973 - DNA, 251 bp, Glycine max
  unsure (1)..(251): unsure at all n locations; Clone ID: 701153218H1
gacagcatatatatcaataatctattttatactatacctacattttgataattttctttgtagttgatagccatggctacccgtggaaagcttgaggttgacattgatctcaagtccaacgcagacaagtactggcaaacccttaggattctactgaantannccctnaggccttcccacatgattanaaaagcatngnggtnctgngggtaatggaaactcnccgggttnnncccccnanngngttgggg

SEQ ID NO: 11974 - DNA, 249 bp, Glycine max
  Clone ID: 701153219H1
gttttgagggtgacaacatgattgaggggtccaccaaccttgactggtacaagggaccaactctccttgaggctcttgaccaaatcaatgagcccaagaggccctccgacaagcctctaaggcttccattgcaggatgtctacaagattggtggtattggtactgtgccagtgggacgtgtagagactggggttgtgaagcctgtatggtggtgacttttggtcccactgggctgacaactgaggttaa

SEQ ID NO: 11975 - DNA, 248 bp, Glycine max
  Clone ID: 701153220H1
ggaacctttgcattctattcattcaagattcagcaagtgcgttttggaagcagagaccgaaatacttcgagatggcccgtacaaagcaaactgctcgtaagtcaactggaggaaaagctcccaggaagcagcttgcaaccaaggctgcacgtaagtctgcaccaacaactggtggtgtgaagaagcctcatcgttatcgcctggaactgttgctcttcgtgagattaggaaataccagaagagcactg

SEQ ID NO: 11976 - DNA, 84 bp, Glycine max
  Clone ID: 701153222H1
agaggaaattgaggaaactaggacaaatgtgtgtctcactttcaaaatgagccttgctagctagaggtccggccctgcttccag

SEQ ID NO: 11977 - DNA, 245 bp, Glycine max
  unsure (1)..(245): unsure at all n locations; Clone ID: 701153223H1
ggcgaaagcaaagttagttgagagagagaggagctgaggagaatcaatcgagagaaatatgtctggtatcgctcgtggacgccttgctgaggaacgaaagttcatgacgcaaaaaccatccacacggtttcgttgccaagcccgagactctacctgatggcaccgtaaatttgatggtctggcattgcactattcctggcaagaccgggactgattgggagggtgggnatttcccatgacaatgc

SEQ ID NO: 11978 - DNA, 255 bp, Glycine max
  unsure (1)..(255): unsure at all n locations; Clone ID: 701153224H1
gacgcaatgactctcccttcacacgatgcttggattcacacttgcacacacactncctccccagatggaaatctctttccctccctcatcagtcaactcttccaatttctatatcaagagttaaccaagttgatgcagcgagattggacgttgaaatgtcnagccatgttgaaagaacagttggttaaaagtgttctcattaatgagccagggaatgtaattncnntatgaggcgganttnggggctttccctng

SEQ ID NO: 11979 - DNA, 251 bp, Glycine max
  unsure (1)..(251): unsure at all n locations; Clone ID: 701153225H1
ggaggtaggaggaaaacgtggtgttgggatagagaagcgaaagaaaccaaaccacaatgaaataaaaagccccttttgtagaacagtgatacattcgctttctatttcttcctcatctcgtacgtttngtggatccttactcaacgcaacacaacacaacacagtagaaaaattatgagttccaaaggtgttggtgaagattgcctgggatnnnnngcaagagatgcatccggagttctatcaccttacaa

SEQ ID NO: 11980 - DNA, 244 bp, Glycine max
  Clone ID: 701153227H1
aatgccaataactaaataagttaagcaggaaatgtgtcaggcaatatgtgaatacttcagaagaatcagagggacaatcagatctctgttttactgcttcgcagtcaatttactaggtagcagcacgtgacaggcaaaaattaatggattcaaagtacaactatgtctctacaattaaaccatcattaatggccagcaggctaagaacaagaacaccatcttgtaagctagagcgttaaaatcg

SEQ ID NO: 11981 - DNA, 265 bp, Glycine max
  Clone ID: 701153228H1
ctacttctttgtacttgggattgttgcactttcggcaacattattaccatttattaaacgttttctgccaaagcattggaacgatgacgttatagtctggcattttccatatttccgttctttggagattgagtttacaaagtcacaggtcgttgctggaatccctgggacttttttttgtgcatggtatgctttgcggaagcattggctagcaaatatatattgggtcttgccttctgtattcagggaattgaaatgctttctc

SEQ ID NO: 11982 - DNA, 243 bp, Glycine max
  unsure (1)..(243): unsure at all n locations; Clone ID: 701153229H1
ggagaacaaaacaagtgtttcgaatagattatcctaagtctttgggaatagtgctgcaatggcttcaagtcaggaggaggtgacccttttgggagctactggaagcccatttgtgtgcagggttcatattgccctcaagttgaagggagttcaatacaaatangtcgaagaaaatttgaggaacaagagtgaactgttctcaaatccaacccagttcacaagaaggttccagtgtttattcac

SEQ ID NO: 11983 - DNA, 244 bp, Glycine max
  unsure (1)..(244): unsure at all n locations; Clone ID: 701153230H1
gagcgtcgtgcggtaatacgacacatttgttgtttgatcatgttagccaagagattaagctctttcttcaaactctccccaaaacctcagatttccacttccatgaagaaagtggatgaagagactggcaaatactatggtagaaaggctgtgtcatttgtcttgattactattacaggtggtgttgctttgagtgcccngatgaccttgccatctatcatggttgtngcagcaggcaanggng

SEQ ID NO: 11984 - DNA, 151 bp, Glycine max
  unsure (1)..(151): unsure at all n locations; Clone ID: 701153232H1
aaaaaagttacctcggggaaagaaggcaccccctgggaaaaaaggcagttgccctgctgcatggaggacccgaagttttatggggggtccttggagggtccatgggccggttaatggaacccccatncttaaatgaaaagggctctggagg

SEQ ID NO: 11985 - DNA, 250 bp, Glycine max
  unsure (1)..(250): unsure at all n locations; Clone ID: 701153233H1
ggcatcaattcaaaatatatcatcaattataagcatgggtttgtggaacacaacgaatgcagtgtcttgccgctttcacaagtttggtgatgaccaaaagaatctggtctccaaggtgatgccacgtcttcttccgggggcatagaactcacaaagttagacggtggaggaaaacnatgggtagnattgtggggagagtgtnatactcttctccagggcctttgggaaacctcaacaggggncgaatttt

SEQ ID NO: 11986 - DNA, 252 bp, Glycine max
  unsure (1)..(252): unsure at all n locations; Clone ID: 701153234H1
ttcctgattttcaaaataancaagcgaganacaagnncagtnanancacgagnaccactccaaataaaaagttatcccaggtatttataatgctcctaattgatttntccaatttttccgaagccttgacctctacatatttntantnttctctcttnaatccacttgactatancatattacataatcagctaaattannaanctattattantngttattcanctantangattgcactctaattttaat

SEQ ID NO: 11987 - DNA, 194 bp, Glycine max
  unsure (1)..(194): unsure at all n locations; Clone ID: 701153235H1
caaccatctccacccaaaacgacttcgttttcctctcttcctcagcccaaatccttcnntctttcaatcccttcctcaacccanatcctctcntttttcttctctntttcaatntcttcctccacccaaacaaccttccagcgaagcgcttcactccctaaccctaaccctaaccctaaccctaaaccccaaat

SEQ ID NO: 11988 - DNA, 249 bp, Glycine max
  unsure (1)..(249): unsure at all n locations; Clone ID: 701153236H1
aaaganacccggaaagggtgggaaccgcttttggaaatccattgggcttggatttaagactcccagggaagccatcgaaggaacctacattgacaagaagtgccccttcactggcaatgtttccatccgtggccgtatcttggctggaacatgtcacagtgctaagatgaacagggctattattgttaggaggaattatctcattttatcaagaagtaccagaggtacgagaaaaggcatccaacattc

SEQ ID NO: 11989 - DNA, 243 bp, Glycine max
  unsure (1)..(243): unsure at all n locations; Clone ID: 701153238H1
ggatcatctagagttgagaatggaaggagggaaacgaggcacgattctggtncaccaacgacgacggaatcgatgctcctggcttaagggcattggttcactccatcgtcaacgccaaccttttcaangttctagtgtgcgctcctgatagcgagaatcggctgttanccanggnatcantgggcccnaccngaanctttaaannanntagagtcggnggnnacccncgtttnncttttgggg

SEQ ID NO: 11990 - DNA, 241 bp, Glycine max
  Clone ID: 701153239H1
ggtgctctgctcgtgcctctagggttatcatttctccatttccattttctctctcacttttcaagaatcgtaagctatgggaaagtcttacccaactgtgagtgctgattaccagaaggccgttgagaaggcgaagaagaagctcagaggcttcatcgctgagaagagatgcgctcctctaatgctccgtttggcaggcactctgctggaacctttgacaaggcacgaagaccggtggacc

SEQ ID NO: 11991 - DNA, 221 bp, Glycine max
  unsure (1)..(221): unsure at all n locations; Clone ID: 701153240H1
gagaacagagtgnngataatagtaagacagagcacntactcactcgtaaatggcgaggaagaagatcagagagtaccactccaagaggcttctcaaggagcatctcaaacgtctcgcctctatcgacctccaaatcctctcagctcaggtgacagaatctacggatttcactgagtgacagaccagnatccatggtttcgtcaaccagatggtcgtcaggc

SEQ ID NO: 11992 - DNA, 233 bp, Glycine max
  unsure (1)..(233): unsure at all n locations; Clone ID: 701153241H1
aatccagatgccgaacaatctactggtccagaagttggtgctccacaatcaggctttgtttgggatgaagcatcgggctattactatgatgctgcttctgggttttactatgatggaaatactggtctttactatgatggtaataatgggatttggtattcatatgaccaccaaactcagcagtaccaccttgcactgatcaaatcagattaaaacgtctaataacgngtccg

SEQ ID NO: 11993 - DNA, 243 bp, Glycine max
  Clone ID: 701153242H1
gacaccaatttatctaaacaattgctttaattttcaacaaagaccaaatcttcatcatgatcaatcctttgtcttcttctcatatggttaacatggagtttatctctaatgcaatgatactttcattctcaatactattgttgctaccaagtgcatcatattcactatatcaaaagcctgaaaatcatatcaagacagctatttttgtaatagggagttttgaaatgggacccggatcaattg

SEQ ID NO: 11994 - DNA, 243 bp, Glycine max
  Clone ID: 701153243H1
ggaaaaaataaagaagaaaaagcaacgtctggctgctattggtgaagatttattatctattgcagcagaccagcccttccgatttcctgctacattcacatttgttgttagagccttctcagtgttggatggcattggaaaggggtttgacccacgttttgacatcactgagataccaaacctatgccctggagttgctcaggtttcgtgaagctggggttgaagttgtcctaaaggacttca

SEQ ID NO: 11995 - DNA, 240 bp, Glycine max
  Clone ID: 701153244H1
ggaagcatttcccattaaagtatattatgtcttcaccaaagaaccaccctcaagttagaagcatctctttgctgtagctgtagccaatagtaatacctttccagctggtatacgtaccctccattctatctttatataccctccttccattctcattcctcgtccttcacattctcctctcagaattcctcttatcaggaatttggagagtattgatatatcaaggtaggataaaccagt

SEQ ID NO: 11996 - DNA, 250 bp, Glycine max
  unsure (1)..(250): unsure at all n locations; Clone ID: 701153246H1
atccatgtctgaaaggggaaaagagataaaaaaatttaaaatttctgcaaggnaaaaaattaggcataacctccttaggaaacataacaccactagctttctttatagctttcgcccaatgtttcatcaatgatatatttaaaacaatgttaacaacacaatttattaaaataaccangtgaaagantatnganccatngngngtaacctagtacaaaggctgagaaaagaaacttacatgtctccagcc

SEQ ID NO: 11997 - DNA, 258 bp, Glycine max
  unsure (1)..(258): unsure at all n locations; Clone ID: 701153247H1
atgcagaatcaaagtacctagcaggccttggagtttctcgtcagcgccaagccatagttgatgggctaagagacagtgttctagcattttctggtaatgtgcctggaacatcatcaaaggatatcatggacatggttctcatgactcaatattttgacacaatgaaggagattggtgcatcctccaaatccaatgctgttttcattccacatggactggtgctgtgatgagtngctcacaagtaaggatgnncccnca

SEQ ID NO: 11998 - DNA, 253 bp, Glycine max
  Clone ID: 701153249H1
gatccacatcattaacacgtttccattctatctctatcttcacatatctctacctccctcaaacagtttatgctagctcttgttccaatggcttcctcagttaaactcttatttttgtgctttctctcattgttcatctctttctccatagctcaaccctctttcagaccaaaggcacttgttcttcctgtcaccaaagatgttctgcctcagttcctcagtatgttacacagatcaaacaaagaaccccact

SEQ ID NO: 11999 - DNA, 231 bp, Glycine max
  unsure (1)..(231): unsure at all n locations; Clone ID: 701153250H1
gccgaggaaaagaaacaaaganaaaaaaaaacagcgccctngatttgctcttctttgcttcggaagaaagngaaaaacaaatancaatggncgttcgcttctttcctccggcagagttctcttggcttccgtcttcatactctctgcttaccangaatttaacgaatttggagttgatggggacctgccagcaaaagcactcagacctaagtttgatgcctttacacatng

SEQ ID NO: 12000 - DNA, 244 bp, Glycine max
  Clone ID: 701153252H1
gggaaaaaaggaagaggaacgaagcaatcgcaagtcgtctgttctgtcccgcgggagccgacgacctgtcttcatcgccaaacaacctcaaaaacattcatcaacgttcactattaatccatccatcattaagtaagaaaataaggttcgatttttttatctttgttttgcttctgatccatcatggaggtgccgagtcctgggatgcccttcgcaaacaggcaagaaaacttgaagctcagtt

SEQ ID NO: 12001 - DNA, 219 bp, Glycine max
  unsure (1)..(219): unsure at all n locations; Clone ID: 701153253H1
agagaganagagaaatggagaagacananagtgttatcggcgaaggaggcattcgagaagcttgaaaaggtgggagaagggacatatgggaaggtgtacagagcaaganagaaggcaactgggaagatcgtggctctgaagaagactcgtcttccacggggacgaagaagggtccctccnannactctccgtggggttnncattctggcnaatgtctcc

SEQ ID NO: 12002 - DNA, 245 bp, Glycine max
  unsure (1)..(245): unsure at all n locations; Clone ID: 701153254H1
gcttccatatatacaacacaataacagaaagaataacaactaaattgaatcctacacagctcacgaattcagagttttagatttttgncaaaagtgatggatatgacggaaacaaatcacctaagcaatgaacanccaaacatctattcnggagcacatggnttgantcctaancncgcacatanctggngcctnaatatttttgggcaggaaacncaattntttcnaccccggntttttttncg

SEQ ID NO: 12003 - DNA, 216 bp, Glycine max
  unsure (1)..(216): unsure at all n locations; Clone ID: 701153255H1
gcaattgggaaggnatttgccatcggttctgcngcccttgtatctctggccctctttggtgcctttgtgagccgagctgctattacaactgttgatgtgttgactccaancgttttcattggtttgattgtgggtgcaatgcttccttactggttttctgccatgaccatgagagtgtgggaagtgctgctctgaagatggttgaggaatacnnag

SEQ ID NO: 12004 - DNA, 237 bp, Glycine max
  unsure (1)..(237): unsure at all n locations; Clone ID: 701153256H1
gggaatgnagtgggtgctcccaatatcacttgctagtaacncttatnccttctgcttagtttanagagnccagttttnttatgctcgagtgaagaaagagagagagaaaagagagagtttggtttgcttgttttgttggtgtgagnaagaanaacctgcgngagtnancaacaaaaaccaagtctcattggtacaagangatnnnngggnccccatgatggttantatcgcccatgg

SEQ ID NO: 12005 - DNA, 248 bp, Glycine max
  Clone ID: 701153257H1
ttgttcccaaagtaccaattctaggttacgttcttggtactgacgacgacggcgtaggtgttggggtgagcctgaaggatgtcttttgcgaggtcaacggtgatgacgcgccggcgcttcagcccatgccgccaaggttgaagcttttggcgttaccgcggacttgtacttgttgacgatcatggaagagaaggaaggggtgggttgaagaggctgtattgacgacaaggatgccaatgtctttgggg

SEQ ID NO: 12006 - DNA, 247 bp, Glycine max
  unsure (1)..(247): unsure at all n locations; Clone ID: 701153258H1
gaggtcaaagataattgagattgtagcagcacgtgacattgtttttgcacttgcacnatccggtgtttgtgctgcatttagccgagagaccaatgaaagaatatgcttcttgaatgtcagtcctgatgaagtcataaggagtttgttttataataaaaataatgactcacttatcacagtctctgtctatgcatcagacagtacagttctttaaaatgccgaagcacaaggatcgaatatataagga

SEQ ID NO: 12007 - DNA, 237 bp, Glycine max
  Clone ID: 701153259H1
ggataagcatgggaatgcttgcttgggagatatgggtatagtcactgcctgcaagagtgttggagaagcaatggagtatgaaactgatggttataggtggctagctccagagataattgcaggggatccagagaatgtgacagagacatggatgagtaacgtttatagttttgggatggtaatttgggagaggtaactggtgaagcagcttattcttcattttcacctgtacaagca

SEQ ID NO: 12008 - DNA, 217 bp, Glycine max
  unsure (1)..(217): unsure at all n locations; Clone ID: 701153260H1
ggcgcattgaaanaaaattagggtttgtagtgtagcaggaagaagcagcaatggcgccgaagataacacgtaaggttagcagaaaccctgaattgataaggggaatcggaaagtactcgaggtcgcagatgtaccacaagaggggcatttgggctatcaaggccaaaaacgtggcgttttacctcgccacgaccctaaacccaagcctgaagctctg

SEQ ID NO: 12009 - DNA, 138 bp, Glycine max
  Clone ID: 701153261H1
aacaggtggcatgagtgtttccctttctagtcctgatggtcatattattggtggtggtgttactaggcttgttgcttcaagcccagtgcaggtggtagcatgcagtttcgtatatgggggctccaagccaaagactaa

SEQ ID NO: 12010 - DNA, 245 bp, Glycine max
  unsure (1)..(245): unsure at all n locations; Clone ID: 701153263H1
gtaaatggatttatgatatgaatccctttgagccactgaagtatgagaagcctcttcaagacctaaaatctagaatagcaaaggagggctctaaatctgtgttttctcctctaatagagaaattcatcttgaacaaccctcatccaagttaccgtggaaatgcagcctgatcctgaaaaagctgctcgtgatgaagtcgcagagaaacagatattgcagaaagtnaaagctagtatgacaacnga

SEQ ID NO: 12011 - DNA, 249 bp, Glycine max
  unsure (1)..(249): unsure at all n locations; Clone ID: 701153264H1
tgnggggatgttaagcaantngcaacctagcaatngaggcgattaggnngagtacgattcttatatttggaggaactggttacatagggaagtatatggtgaaggcaagcgtcacgttaggccatccaacttttgtctacactcgccctcttgatgcacaaactccttcctctanggcacagctttgcaatggggganctctngggggtcacacttgtccatggagaattgagcatgaccagattctgg

SEQ ID NO: 12012 - DNA, 245 bp, Glycine max
  unsure (1)..(245): unsure at all n locations; Clone ID: 701153268H1
gacaatagagactagagaagagagaggtgttggtgccctaattcgtgagaagaaaggaaagggaaaagaggaaaatggtgtgcataaggaaggcgacggtgaagggccttctggcgatgcaggcgtgcaacctgttctgcctccctgagaactaccanatgaagtactacctctatcacatcctctcctggccccactcctnctacgttcgccgaagactacaacggccgcatcgtcggctactt

SEQ ID NO: 12013 - DNA, 240 bp, Glycine max
  unsure (1)..(240): unsure at all n locations; Clone ID: 701153271H1
ggaaaggaaggcccagccaaaaacgcataaattaggtgcgtgttgtgaattgtgtgagccannnnnnnnnnnnnnnnnnnnnnnnnnnnnnnnnnnnnnnctctggattccacctcttcccgtccttcgagacggttgttgtgctgcttgctcttcagacaaatctgacatggatttactaagatttgtccatgtcttgcgttctaggttgacctgggattgaatctaaagaatcttgat

SEQ ID NO: 12014 - DNA, 249 bp, Glycine max
  Clone ID: 701153272H1
ggaagtgaagggaactggaactgctaatcagtgcccaaccattgaaggtggagtggactcatttgccttcaaggcagggaaatacaaggcccagaagttgtgcctggaaccaacttccttcacggtgaaggcagagggtgtggccaagaatgccccgctcgaatttcagaacaccaagctcatgactcgtctgacctacacctggacgagatcgagggtcccttcgaggtttcatccgatggaacggtg

SEQ ID NO: 12015 - DNA, 259 bp, Glycine max
  Clone ID: 701153274H1
gatacaccgtatatggaatgccacctccttcatctggaacacttgctctttctctggttctgaacatcttggacagttatggaggtcctgatgctgcaaggggaaatcttggtctacatcgactaatagaagctctgaaacacatgttggccgttcgaatgagcttgggtgaccccaactttgtaaacattgatgatactatatacaaaatgcttccccatcttttgcaaaagatattcagcacatgatatttgataat

SEQ ID NO: 12016 - DNA, 240 bp, Glycine max
  Clone ID: 701153275H1
gatgtcatagtattatcattcattctgcatcctttctgctcttctctctccacccaaaccctaactcccgaccctgttcccctctcgtatccgtcatgaaaggaggaaagtccaagaccgaatctaagagagccgatcccaaacttgctgtgaataagaagggagccgccaccaaggctaggaaacccgccggcaaggggaaggcagcgaaagaccctaacaagccaaagaggcctccaa

SEQ ID NO: 12017 - DNA, 237 bp, Glycine max
  Clone ID: 701153276H1
gggtgagccttttgctcaaggagcttttgggaaactttaccgaggtacttacaatggtgaagatgttgcaatcaaaatcttggagaggcctgaaaatgatccagcaaaggctcaattgatggaacaacagttccagcaggaggtcacaatgttggccacactaaagcattctaacatagttcgtttcattgtgcatgccgcaagccaatggtatggtgcattgtaactgagtatgcc

SEQ ID NO: 12018 - DNA, 235 bp, Glycine max
  unsure (1)..(235): unsure at all n locations; Clone ID: 701153278H1
ggtacgcagcttcatccctaacgcgtgcatagcagagttcagagacagagacgcagccatggggcggagacctgcgaggtgttataggcaaattaagaacaagccataccccaagttcacgtttctgccgtggtgttctgatcccangatcaggtttatgatgttggtatgaaaaanaagggtnttgatgnttccttnnggtgccnnancngntnnnngggganaagnaantnnt

SEQ ID NO: 12019 - DNA, 237 bp, Glycine max
  Clone ID: 701153279H1
ggaacaactcaattccaaaccagttcaatctttaattttcagtcatcactttatattggtcacattttcaaagtaacaaatataagatattctgtgaaaagatggcaaaacttgctggctgtgtagctcatttttttattgcagcaatggttttgagcacgttttacgtgaccaaaactgtggcacaatcgagatagctcctacttcacaaatggagactggagaagagtttgcttt

SEQ ID NO: 12020 - DNA, 229 bp, Glycine max
  unsure (1)..(229): unsure at all n locations; Clone ID: 701153280H1
attctcagattncaaagagtnngaaggatgtgcgagttgatggcagagaagacgacaacaaggntatcncgatatgaacgggatagccataatgattncaaaaggtgacattaagacagacaaggatggctncggtatggtaagcagcagcagccacctgagttggaaagaatcanaagagtataggggtaaggttttnngatcccccggtggganttggttccnncac

SEQ ID NO: 12021 - DNA, 236 bp, Glycine max
  Clone ID: 701153282H1
ggtggcaagaagttcataactctcttggacttgaagcgtccatttaaaccaatgaaggatttggacatggacaaggtcatctcggacatcattgaggaaatatcaaagactagttgatttcagctgttttgcaagagccttttatggctgacttacagtgaagctagatatattttgttcacatggtagaatcctacaatggaaactgttcaaaacgtgttatagccatgtatggg

SEQ ID NO: 12022 - DNA, 229 bp, Glycine max
  unsure (1)..(229): unsure at all n locations; Clone ID: 701153283H1
gacggacgagggtttcgtttcgggtttgacgttgttcacaatcactttctgcgcttcactnactcccttcgtgcggtttncctttctttgtcgaactcgtgcgaaaatggcgtgagattcttcacatacagggagtccaatgcggaaaccagatcggagcgaagttctgggaggtggtgtgcgggacacgggntcgattccacngggaggtaccancggacnacgagtt

SEQ ID NO: 12023 - DNA, 240 bp, Glycine max
  Clone ID: 701153284H1
aggtatcatacttttatattcaattgaatcttgcttacattttctatagcctatttttcccttaagaaaggaatccctagaggtgattttggaacattataatcaccattaacagtaatactccaaagtgtgtattaactagatttcatgaacattttcatcgtgtccctctaataaggatttttatattcaagaatgttatagaatgttttttaggagccaattaaagtacaaatgata

SEQ ID NO: 12024 - DNA, 240 bp, Glycine max
  unsure (1)..(240): unsure at all n locations; Clone ID: 701153285H1
ggatgcacaagtttgttgagatagctagaagcaataagatgaaaatgaaagtgcttgttttgtttgttgctacagttttggtagcatatgaatgccatggctcagactaccagaagttccctctccaaatgaaaactgggtttggtgggcaatacagcaatgaggtggcatgtgccagttggaggcttggcgtggaagcaaacaacgtatcaaagtggcaaactgtncggcagntggggg

SEQ ID NO: 12025 - DNA, 233 bp, Glycine max
  Clone ID: 701153289H1
gatttcactgagctacaagagaaggaaccctggctttcatcttctaaattggttgttaaacctgacatgttatttggaaagcgtggcaaaagtggtttggttgccttgaatttggattttgcacaagttgtttcatttgtgaaggagcgtcttggaaaagaggttgagatgagtggatgcaaaggaccataacaactttcatgttgaacctttcatcccacacaatgaagagt

SEQ ID NO: 12026 - DNA, 237 bp, Glycine max
  Clone ID: 701153290H1
gggatttgctgacactgaatatctaaggagaacattggctaaagaatttcagctgatggaattaagctttaaagaggcttttgaaatgccttttaccacaatatcaagaaagatactttgtgaggatatactacctctgtttcctcttccatctttgccaaaatcatcttcttccatgtggattcccacttcagtatcatattatgaggatccctctagagcttcagtgccacctta

SEQ ID NO: 12027 - DNA, 237 bp, Glycine max
  Clone ID: 701153291H1
ggcgggttgtttgttgttccaattcaggcgtgagtgctttccctagttgtcttagattccctccactgatcgcaatttcaacaacaccctcttcgatccgctttctaaattctccacccctccgttccactgcttcgtcgcaacacgttacaataatggcttcgaagaattctcaacaagacacgcgcttacgagaatcgcctctgcaatccgagtcatccccgactttcctaagcc

SEQ ID NO: 12028 - DNA, 236 bp, Glycine max
  Clone ID: 701153292H1
gacagcaacacacattgttaaaagtttctttatttcaagtgaagttagttagttatatttatatacacaatcatgtcaatgagatcaattggtacaagccttagccttatggtatggcttgtaattgcaacatcagcattagcaaaatctgataaccccccagtcctagacacacaaggcaaccctcttgagcctggcaaagattactacatcaaacctgccataaccgacgttgg

SEQ ID NO: 12029 - DNA, 231 bp, Glycine max
  unsure (1)..(231): unsure at all n locations; Clone ID: 701153293H1
gaatacactaaagatcaatttaagaacaagtttaattagctgagaggaaagaggaaagatttcactaatttgataaaaatggatactggattagggtattgtcagaccctaatttcgtctggggactatcattcactgatgtttngattctcatagctgaattgcggtgttcgacaccagttnccgcacaaagcaanggntcactcagttttttgatcaagaatacaaagg

SEQ ID NO: 12030 - DNA, 217 bp, Glycine max
  unsure (1)..(217): unsure at all n locations; Clone ID: 701153294H1
gganttcgccgtttgtttacttttcgttcgcatcttctacnctctctcagaaagatgaaggtggtcgccgcgtatttgctcgccgtcctcggtggcaacaacagcccctccgccgatgtncatcanggaaatcttggctccgttggagtagaagcagatgaagataggnttgaacgtttttntntgaattangggnaaggatatatngacttatcnc

SEQ ID NO: 12031 - DNA, 239 bp, Glycine max
  Clone ID: 701153296H1
gatatctggcagcagaagaacaagtagttgagaactaagaaggagaagcaaatggcttcctcaatgatctcttccccagctgttaccactgtcaaccgtgccggtgccggcatggttgctccattcactggcctcaagtccatggctggcttccccaccaggaagaccaacaatgacattacctccattgctagcaacggtggaagagtgcaatgcctgcagtgtggccaccagttggc

SEQ ID NO: 12032 - DNA, 238 bp, Glycine max
  unsure (1)..(238): unsure at all n locations; Clone ID: 701153302H1
gataccaaaaacaaaacacaagccaagtgaaagtgaganaaaataaaaatcaaagagcataatgtcagggatcattcacaagattggggagacccttcatgtgggagggcacaagaaggaggaggagctcaagggtgagcaccatgctggagaatacaaaggggagcaccatggtgaacacagtagtgagtacaaaggagagcatcatggtgaacacaaagctggagagtaccatggt

SEQ ID NO: 12033 - DNA, 238 bp, Glycine max
  unsure (1)..(238): unsure at all n locations; Clone ID: 701153303H1
tatatcaaaatcataggtcaaaatatacaaatatcaagaacacaatttatcaagcaattttctttaggacatcaatattttatttataatcataaaggaaaaattgcaatttaataaacatctcaaaataaaaccccaatttaatcctctaaggatccctacacatgttctcactaatccccaactgtgaataactcatcccttacctctgnntntnctcacgtgtcttcagccaggg

SEQ ID NO: 12034 - DNA, 232 bp, Glycine max
  unsure (1)..(232): unsure at all n locations; Clone ID: 701153306H1
gaccttgcgttgttcgtgttcattttttcattctcaaacccaggataggaccgagtccaagagtttcttcttcggttgtgtgtacgtttgtttttgtttcctcaacaaccattgttttttctccagaacaaagtggctttgacatcttttctgataatcttttctgggtttgaatggtgcatgtaaaatggtgtaggnattagagggacctgagtgaaacaagtgtggcgga

SEQ ID NO: 12035 - DNA, 236 bp, Glycine max
  Clone ID: 701153307H1
gagctcgagcaggaaacaagaaccacaaccttcagcctgtgtcagttgagggaaaatgggcacttgtgggattgtacttgttgaccaaaccttcccctaagccatggccacttcggacatcctcacgacgcacttcttccccgcattcgctgctgctctgcttcttctacttcagagctttccccagataagcttccaactagtattgatttgtctgtaactggtggtgcctatga

SEQ ID NO: 12036 - DNA, 231 bp, Glycine max
  unsure (1)..(231): unsure at all n locations; Clone ID: 701153309H1
atcctcctccatacactgaacaaaatatgaagccaaattattggattccgcatttactcactgaggacattggttgttggcctgttaaaagttcagcaagaactacaaaactttagacatcacttttttctgtaaattgnctagtgtaaaaatattcgggatccaagtatccaaaggtaccttgaacgactgtggtgagatgagtatcttcaatggaaatcattcgggttg

SEQ ID NO: 12037 - DNA, 201 bp, Glycine max
  unsure (1)..(201): unsure at all n locations; Clone ID: 701153310H1
ggangttcaaagcgaagaaagantcgaaacgacgaaagaaagcgttgtgaagaatggcggaagagggacaagtgatcggtgtccacagcgtagaggagtggaaggaacatctcaagaagggagaagagtccaagaaattgattgtggtggattttactgcttcttggtgcggtccatgccgtttcattgccccaattcttg

SEQ ID NO: 12038 - DNA, 219 bp, Glycine max
  unsure (1)..(219): unsure at all n locations; Clone ID: 701153311H1
caaagacattgccttcctccatcttctgtaattaatgcttctccgtcntcaaccttaaccgtaaagtaaagctttgacaggagtcgaagtccaaactccgaaatatatataggctgttagaatcatgtaaccaaccaaagaggggtagagaagcaactttttcatctgccctgtctttctgttctgttgtatgtatacctttagttgtgaggcaatggc

SEQ ID NO: 12039 - DNA, 230 bp, Glycine max
  Clone ID: 701153312H1
ggaggcttgaaaacggtgttggttagaacctcaacaagaagaaagagactcttcagtgaatatgatccttgcggtgctgtttgccaacgctgagggcaatatactcatcgaacgttttcatggagttcctgcagaggagcgcctgcactggcgttcattctagtcaaactaggagctgataatctaagggtgtcaaaaacgaagagctcctagttgcttgccacaagtca

SEQ ID NO: 12040 - DNA, 227 bp, Glycine max
  unsure (1)..(227): unsure at all n locations; Clone ID: 701153314H1
gatgttataacagatggggttgccctccaagtaagttcccatggacatatgaagccaaagagacttgctatcttctggaaggaaaagtgaaggtctttcctagtgggtcgaatgagtcagttgaaattgctgctggtgacttggttgtgtttcccaaagggatgagttgcacttgggatgtgtctgttggtnttgacaagcactataattttgaataaatcctacaa

SEQ ID NO: 12041 - DNA, 235 bp, Glycine max
  unsure (1)..(235): unsure at all n locations; Clone ID: 701153315H1
ggttctcatggacctccgaaccgggcaccatggacagcgtccggtcccgggccgtacgggcagatcttcangtcccgacaactttgtgttcgggcagtncggggcaggaaacaactgggccaaggggcactacactgagggtgctgaactcattgattctgntctcgatgtggtgcgcaaggaggctgagaatgcgattgcttgcaaggttttcccccnngnattgtgtgggagg

SEQ ID NO: 12042 - DNA, 232 bp, Glycine max
  Clone ID: 701153316H1
taccattgccagagcaaacagaggaagaggctactgctggctccttacttttttcagcagctgtctgtcctttagtgccattgtcaccaggaacttgattgggaattagatcaatcttagcggcactctctttaccagcaggctctgactgcttagaaggcacagcattctgttcaacagattttggcagcaaagagttcacatcagccttggattgctccacaacctgctg

SEQ ID NO: 12043 - DNA, 235 bp, Glycine max
  Clone ID: 701153318H1
ggcagttcaaagcgaagaaagattcgaaacgaagaaagaaagcgttgtgaagaatggcggaagagggacaagtgatcggtgtccacagcgtagaggagtggaaggaacatctcaagaagggagaagagtccaagaaattgattgtggtggattttactgcttcttggtgcggtccatgccgtttcattgccccaattcttgcagagtttgctaaaaagttgccgaatgtcacctt

SEQ ID NO: 12044 - DNA, 233 bp, Glycine max
  Clone ID: 701153320H1
ggagtcgaaaaatgtcagacggaacattgcaggtactggacggaacgcacctgagaggcgtcgatctgtccttaggcgacgacggtccattcaccggagctaacatactcgacattgcccattcccgagcctcttcttccctcttcggtctctcattacccgattatctcaaagcctctgctctcacgcgcctccgcactccagacgccgatgttttccgctccgccgagtac

SEQ ID NO: 12045 - DNA, 224 bp, Glycine max
  unsure (1)..(224): unsure at all n locations; Clone ID: 701153321H1
tacnatattgtcatccgnacctntcatnaaccangggcaaacgagcccgttgacgcgcaaagactaacatcgtcttctgcaccttctgtcatcctgacccatgaagtcaggtgncatgcgggggtaccgtatngttatccgaacctttcgtcaaccgaggcgaacgaattcnntggtatcaggatgatgttggncgttcgattctgattattntcaaaatttct

SEQ ID NO: 12046 - DNA, 247 bp, Glycine max
  Clone ID: 701153322H1
ggaatttagtttagatatggaagaggaggaagaaggtggacctagcacacgccttaggaagagagccacaaaagctcaggaatctgagggaaaattgaaagacaagcaaacaaaaaggatgaaggtgaagaatgctgcagctgcaaaggtttcggttggcgatgccagaatgcaggatggggaagcagaatatcagtgtgatattgatgggtgcactatgagttttgggtcaaaacaggagctgatg

SEQ ID NO: 12047 - DNA, 230 bp, Glycine max
  Clone ID: 701153324H1
ggatcacacacaacataaaaacaaactcttaattaattgcttcacctccaaaaaatggccaccaccaccacctatgcttatggttcctcttctcaaagatcactgggcatggtgctggctctagtctcagcagtggtgttgtctcccttatatgccaattcaaagagtgataggaggtactatgagtcaaaatggagctctggtgggtttgttctgcctatggttcttgc

SEQ ID NO: 12048 - DNA, 204 bp, Glycine max
  Clone ID: 701153325H1
tcagatctggagcaggagaatagcgttgggagcgttcgcgtttgttctgcttttcctatcggcctcagcagacgacgtcgttgtgctctctgaagataacttcgagaaggaagttggtcaggacagaggagctctcgttgagttctatgctcctggtgtggacactgcaaaaagcttgctccagaatatgaaaagctggtagca

SEQ ID NO: 12049 - DNA, 226 bp, Glycine max
  Clone ID: 701153326H1
ggagcaaaaccctaatccctatttttcttcctcagtagtgtcatttacgcttctcttctctgcagcaactatgcctaaccctaaggtcttcttcgacgtgaccatcggcggtcaatctgctggccgcatcgtgatggagctctacgccgacgtcactccccgcaccgccgagaacttccgcgcgctttgcaccggcgagaagggcgtagggcggagggcaagcccc

SEQ ID NO: 12050 - DNA, 227 bp, Glycine max
  unsure (1)..(227): unsure at all n locations; Clone ID: 701153327H1
gatatccaaaggaacaaaaatattattaagatgatcaacattattggngcacttgttctactctttgcatttctcttcctcagttgtgtgtatgcacaagacacaacaacccttgtgcctgcaatcataacttttggtgattctgctgtggatgtagggaacaatgactatcttcccacccttttcaaggctgattaccctccttatgggaggggcttgttaaccac

SEQ ID NO: 12051 - DNA, 238 bp, Glycine max
  Clone ID: 701153328H1
ggggcaccaccttgatgagatgctcccacgcaaacgctctcttcagagctctcaaacccaaaccccgcaattcttcactgccactttcttcaatggccatcaacaaaggtaatagtaataaggcatatgatgcattgctgttggatgctgggggcaccctattgcaattggcaaagccagttgaggagatttatgccactattggatccaaatatggtgtgactgtggatccagctat

SEQ ID NO: 12052 - DNA, 227 bp, Glycine max
  Clone ID: 701153330H1
gaagagactcgaggtaatattcataatccactctaaacgacttgttcttctaagccacaatattggtttaagaaatttcagttcatatgatgattttagttaacatctgtcttaatttagtcaaataattagttaggtttgattacttttttatcttttaatacattttttaggtttagtttaatttttcatatttcaaggtttaattaggtcttattttaatagtt

SEQ ID NO: 12053 - DNA, 220 bp, Glycine max
  Clone ID: 701153332H1
aatcaaaccatgataagataaagtaatatggtaattaattctaggagataatctaaagatattctaagatatggtaagatattttcatatattctaacaatcctaaataccccttccccccgttcctaacaggttcaatgtttttctttcttgctcaaggattatcatttcagtagtagtatatttgggttgccggtattaagtttccttcgctgtgcat

SEQ ID NO: 12054 - DNA, 239 bp, Glycine max
  unsure (1)..(239): unsure at all n locations; Clone ID: 701153333H1
ggttccaaaagcaacttgtgaagcagttggacagagaaagaagaataaaacagtttttagaacattgcattcagtcactttgttgcacagcttaaactattttgaaagaaacgaatcctgaagcgtgtcactcccactctcactcaatcgttcagccccttctctccaattttagggttttatcacaaactaaaaggtnnncacatgggcnccaaggttaggagaccctcccatgctgg

SEQ ID NO: 12055 - DNA, 216 bp, Glycine max
  unsure (1)..(216): unsure at all n locations; Clone ID: 701153334H1
tgcgacattcnccattgactgcgccaagccagtggaggacaagatcatggacatcgcgtctctcgagaagttccttcaagagaggattaaggttggtggcaaggccggtgctctcgccgacaccatcaccgtcacacgtgagaagaccaaaatcatagttacttcagacagcaacttncttccaaacggtatctcaagtacttgactaagaagtac

SEQ ID NO: 12056 - DNA, 231 bp, Glycine max
  Clone ID: 701153336H1
gagacacgagtggcttttgttactgcgctgcgtgcagaaacagagaaggagagaagaatggacgaggagaatggttacagtgggagtagcagctcaaacttggagactacaaaagcagagagatctgtgtggctgatgaagtgccctttggtggtggctaagtcatggcaggctcatcctccttctcaacctctcgccaaggttgtgctctccctgatcctctccaccctg

SEQ ID NO: 12057 - DNA, 233 bp, Glycine max
  unsure (1)..(233): unsure at all n locations; Clone ID: 701153337H1
gagcgtcgtgcggtaatacgacacatttgttgtttgatcatgttagccaagagattaagctctttcttcaaactctccccaaaacctcagatttccacttccatgaagaaagtggatgaagagactggcaaatactatggtagaaaggctgtgtcatttgtcttgattactattacaggtggtgttgctttgagtgcnnttgatgaccttgccatctatcatggatgtagcag

SEQ ID NO: 12058 - DNA, 236 bp, Glycine max
  unsure (1)..(236): unsure at all n locations; Clone ID: 701153338H1
ggacattgctaaaccttaaaccctaatttttacaatccgagggtgaagagtttgatgggtcagcgaaagaacgacaacaacatcaatcagtgctcctcaagcaaggaagacgctgacatgaataacaaccaccttcgctttgaagaggctgtcgacgnnagttccaacctcgaccaatccatgtgcgacatcgaagaatccgatgataaaaccagcgccgattattacttcgattc

SEQ ID NO: 12059 - DNA, 246 bp, Glycine max
  unsure (1)..(246): unsure at all n locations; Clone ID: 701153339H1
ggtcgcagtctctgccaannactcgctcatccaaaattatgatcatttctgtgccgtaaattcgccggtaacacgagatctcaacttctcgcgccgtnttcntttcccccttnaananaagtncaagtnnnggtnaagttanggtnccatggnttcggagacgnaggncgtgaatcnngctgangaagccaagctcgncaganaaggngtaacgactccctcatatgctntancaccatctgcaat

SEQ ID NO: 12060 - DNA, 235 bp, Glycine max
  Clone ID: 701153340H1
catccaggttttatgaccagcttgttattgtgtaatgaatgataaataaggcaaactacaaacggcatctatactcggcttagaatgtaatttacaaataaagaataaagtaaaaaatcaaagcatgtctgtaaactgtaaagagcaattgtgggaggaaaataaaaatgaaaaacaaaggggggagggggaggccacagttttcttaacagcatcatatacgagcgacgtagga

SEQ ID NO: 12061 - DNA, 72 bp, Glycine max
  unsure (1)..(72): unsure at all n locations; Clone ID: 701153341H1
gaccaacaacacgtagtcattgatttcnttgatttctaccctccttcgntcctgctgctcagtgaccagagt

SEQ ID NO: 12062 - DNA, 239 bp, Glycine max
  Clone ID: 701153342H1
ggctgcagcaagggctcaacgcacgcaggaggaggagattgatcgagagaagagaagatgactacacgcttcaagaagaacaggaagaagagaggccacgtgagtgccggccatggccgcatcgggaagcaccggaagcaccctggaggacgcggtaatgccggaggatgcaccaccaccggatcctctttgacaagtaccaccctgggttcttcggcaaggtcggaatgcgctatttt

SEQ ID NO: 12063 - DNA, 50 bp, Glycine max
  unsure (1)..(50): unsure at all n locations; Clone ID: 701153343H1
gatcaaattatatctggttttgttnccacataancaaannattaggncna

SEQ ID NO: 12064 - DNA, 227 bp, Glycine max
  Clone ID: 701153344H1
accccttttaatgttcagaatttttagtgcactattaataaccaagttaaaaacattttgatgcaatccaaatatggcccattcatcagtctaactatggaacttagcgattaaaaagttggaactaagtattgtatttgactccttttcatcaataaaaatataagccaaagaaaatgttgaagttacatagcctgaggatagaatgcaggatttctaacaaactc

SEQ ID NO: 12065 - DNA, 222 bp, Glycine max
  unsure (1)..(222): unsure at all n locations; Clone ID: 701153345H1
ggcacaagtttgttgagatagctagaagcaataagatgaaaatgaaagtgcttgttttgtttgttgctacagttttggtagcatatgaatgccatggctcagactaccagaagttccctctccaaatgaaaactgggtttggtgggcaatacagcnngaggtggcatgtgccagttggaggcttggcgtggaannnaacaacgtatcaagtggcaannnctc

SEQ ID NO: 12066 - DNA, 227 bp, Glycine max
  unsure (1)..(227): unsure at all n locations; Clone ID: 701153346H1
ggcacaagtttgttgagatagctagaagcaataagatgaaaatgaaagtgcttgttttgtttgttgctacagttttggtagcatatgaatgccatggctcagactaccagaagttccctctccaaatgaaaactgggtttggtgggcaatacagcaatgaggtggcatgtgccagttggaggcttnnnccccccncngaacaacgtatnccccctgaaaactgttcc

SEQ ID NO: 12067 - DNA, 231 bp, Glycine max
  Clone ID: 701153350H1
atattagaaatctcaagtgggttgcttgagtactggacgtaggcacgggaagtggccgaactagtataaaattgtgtttgcattctctcttcccttatcttatttattttgttgcaatcaattgtgtctgcatgtttaaagaacattgttaaattgattgttgttgcttcttctgcattgtaagcctatccctcttaagattattgaggccacaaggtctaactctttggg

SEQ ID NO: 12068 - DNA, 231 bp, Glycine max
  Clone ID: 701153351H1
ggaatgggatttggctatgagtgtgatacgaccgaatacgctgcgtttggtggacttttcgatcattcggatttgtattatgactcgtggcggcacgagaccttgccaacacaatagaagatttaatgaaaacaaaaggaaaaaaagggttttagagatgtaaatattttcttctctctcagctttttctttttcttttttgttcccttctcttgatgaagggaattacag

SEQ ID NO: 12069 - DNA, 243 bp, Glycine max
  unsure (1)..(243): unsure at all n locations; Clone ID: 701153352H1
taacaataatattactagtttcattgatagttgcattgagagtttcaatttaggtgatattgacaaatacaatgatatttatttttatagttacatttttttgaagggcagaaattgtagtgaaagcgataattctagtactagtataatnactagtacgaatgatacaaatgatagtgattccactataggagaaagtgcctaataatctcgatgaaagtcaaaaatataagcatttgtggc

SEQ ID NO: 12070 - DNA, 238 bp, Glycine max
  unsure (1)..(238): unsure at all n locations; Clone ID: 701153353H1
agggaatgaagtgaacacacatgggaaggttgtaagtnaagagttaaccaaatccagtctaaaagaacaacatgaagagganaaattcaaaggattctttccaataccaattccaattattaaacctatttcaaagcccattcccattattaaacctattccaaagtcaattcctattgttaaacctattcctattccagtttataagcctatatcannaccaattcccatcgttaag

SEQ ID NO: 12071 - DNA, 233 bp, Glycine max
  Clone ID: 701153354H1
gacacacaaactttattacagttgttgtaactaagcaagaatattattaggcaatgaagtcttctggaccttcaacaactcttgctctttttttaaccatcaatttgcttgtctttgtcatggcaatggctgctacacttgcacacagcctaagccaaaccctagccctaacccattcccttaccctaaccccagccctaccgcaaagagctgccccagggacgcacttaagc

SEQ ID NO: 12072 - DNA, 231 bp, Glycine max
  unsure (1)..(231): unsure at all n locations; Clone ID: 701153355H1
cctagctcattcattatatttagaaaattagatagtattactattggaatctcattacttttcaaagtgttccgatacgtactgcacttatagctctcagctgaaataatgacaaaactgaacaaatnccaatttttaatctgttcacatactgatatgtgtcaagggtgatgtgtagccgtttggtgattaagtgaataaattaaaatgtgtactttcccctggtaattc

SEQ ID NO: 12073 - DNA, 238 bp, Glycine max
  Clone ID: 701153356H1
gctgctgacaaggcaaaattcaacaatgtttttgtgaagaatctatcagaatcaaccaccgatgatgagttgaagaacacttttggtgaatttggaactattactagtgctgtagtaatgagggatggggatgggaaatcaaagtgttttggatttgtgaattttgagaatgctgatgatgctgctagggctgttgaggctctcaatggcaaaaattttgatgacaaagaatggtatg

SEQ ID NO: 12074 - DNA, 227 bp, Glycine max
  Clone ID: 701153357H1
atcctttggatggcttgtcatgagagaatggcaactaaagatagattaatgcgatttggaatgctcaatgatgatacttgttactgtaaagaaaaagagatcattcaacatattttcttccaatgtaatgtgttgagtcattttggaaacacatccttaaatggctagaggttccacattctccgggtggttggaatgaggagttggattggatattaagaagtgca

SEQ ID NO: 12075 - DNA, 225 bp, Glycine max
  Clone ID: 701153358H1
ggggtctatgatcaagatagggagtgtgggtgtggccgttaccaggaagaaacaaacaatgtttctcaaagtccagctgcactggaatgtcatcatcgctgctgaaaatctgcaaccggaaggtctgatgcttcatagggcaatcattgtccgccttctgagtgactttgctgtgaagaaggccaccaaagatctgggatactttcttgcagtgaccacactgga

SEQ ID NO: 12076 - DNA, 225 bp, Glycine max
  Clone ID: 701153359H1
gaggaacagcagagaaacaaagttagaagtaaagaagatcatggcttctctagcaaccttggctgctgttcaaccagctacgatcaatggccttgctggaagttccctctctggaactaagctctctttcaagccctctcgccacagtgtcaaatccaagaacttcaggagtggtgccgtggtagcaaagtatggtgacaagagtgtgtactttgatttggagga

SEQ ID NO: 12077 - DNA, 236 bp, Glycine max
  unsure (1)..(236): unsure at all n locations; Clone ID: 701153360H1
ggggcctccaaattcatcacgctttcgttaaattcactgccatctgcatttacctccaatacgacgccctttccttcctctccgttaagtggaaaaccaagtctgctcaccagttaacggaatccgaccaattcttctcagatatcgttacaggtccattcgagaaatttatgcaggtgacaatgatcaaacccttgacggggcagcaatactcagagaaagtgggcagnanattg

SEQ ID NO: 12078 - DNA, 226 bp, Glycine max
  unsure (1)..(226): unsure at all n locations; Clone ID: 701153361H1
gcattgtatttccttcaacacaatgtaagccatacnacaatgatggcccaacaaacttgtttagtacccatgaaatgatgcanatantttaaatttacacactgcnagttaggggaaagagagggagctagctagagagaggngtntgtangaggtggntgggatgagagtttttacagaganaatatgcaaanngatggttaagttgatggttggnnagttgttt

SEQ ID NO: 12079 - DNA, 226 bp, Glycine max
  Clone ID: 701153362H1
gatactgaacaaaaacaaaaagagagttcagaatttttagatctcacctatttaactacctcgtaacattctcttctgtgtcctaatcggaactcgcaaagattttgttatagtgatctgatgccatcttagggtttttgaattgcgatgggtctgggaaacgatgacgatgacggagacacgctcaagtcctcggttcagtgtgttgttcgatttgcctcgaggc

SEQ ID NO: 12080 - DNA, 230 bp, Glycine max
  unsure (1)..(230): unsure at all n locations; Clone ID: 701153364H1
actccagataacagctggagatccgtggtgctccagcggaggggttgcacctgatggtacctttgtgagtgcnggtggttttgacaccggagcaagaagcgttagatatatgggtcctaattgccaaaattgtgaatggagggaatacgacaacatattcggagcagacagatggtatgcaactcaacaaatccttccaaacggagaattcattttggtaggagggcgta

SEQ ID NO: 12081 - DNA, 232 bp, Glycine max
  unsure (1)..(232): unsure at all n locations; Clone ID: 701153366H1
gatccatagctaagatagatctcgagatgggtcgtggcaagattgagataaagttgattgagaaccccaccaacaggcaagtcacctactccaagcgaaggaatggtatcttcaagaaagctcatgaactcagtgttctctgtgatgccaaggtttcactcatcatgttctctaaaaacaacaagatgcatgaatacattagccctggcctcacgacaaaaaagatcntgat

SEQ ID NO: 12082 - DNA, 232 bp, Glycine max
  Clone ID: 701153368H1
gggcgctgattagttgcattgcatcaaaccctggcagtggcaatggcagctgcgacgacggcaatacagaggttcccccaacacagatacgtcgacgcagttcgctggcttcctctacaatccgcattcgaccgattcgcagttctggctctcttcgacttcgattccgatgcttcctccatcgaaatccacgctctcaaccaaaaccccttctccttggagccccactctt

SEQ ID NO: 12083 - DNA, 233 bp, Glycine max
  Clone ID: 701153369H1
gcaacccatgaatgacacctttgtattggatctcaattctagtaatcctgagtggcaacacgtccaggtaagctctcctcctcctggtcgttggggccacacgctttcttgtgttaatggttctcatttggttgtatttggaggctgtggaaggcagggcttgctcaatgatgtgtttgtcctggacctggatgcaaagcctccaacttggcgtgaaatttctggattggcac

SEQ ID NO: 12084 - DNA, 228 bp, Glycine max
  Clone ID: 701153370H1
gggattagatatgatatgatgattttttctagaacagaggcagtttctcaaactcgttgcctccgaactttcactttctctgaattttagctcaaaaagttcgcaaaaaagttccctacctctgttgggtctgtttcaaatctgcaattttcatacgtgtggagccataagcttgctatcattgaataattctgctgggagcatcatctcaaagactggaacattgga

SEQ ID NO: 12085 - DNA, 231 bp, Glycine max
  unsure (1)..(231): unsure at all n locations; Clone ID: 701153373H1
ggagaaagttgttatccacaagacaacgtcatcaacattacacaaggcgcagggtggtctctgtgatggcaacctctttctctccgacagcctctgtcggctccatcatcttccaaaaccctcccaaaggccttcttcttctctcccagcagcagcaacnnacgctccttcgcctcttctgcaagctatgcaactctcaagctccctcgcgccttcgcactttctccaaga

SEQ ID NO: 12086 - DNA, 101 bp, Glycine max
  unsure (1)..(101): unsure at all n locations; Clone ID: 701153374H1
ggaccatnnatantgtattttttttcatgcccctaatggngaatcttcattcatatttnatgtgatcnagcctactcttgcncgntntctancgcgntata

SEQ ID NO: 12087 - DNA, 183 bp, Glycine max
  unsure (1)..(183): unsure at all n locations; Clone ID: 701153375H1
ctcacacctncgacactgaaacgacaatgcgtttaagctttggaaatgcagaagantaagaagatgcgactctgctacttcttctacctctaccgtgttactgttagggcttactgagttgcaagattcacttcaaattatgcgtttcgctgatcggttcctcatcacatcaaacgangtcgc

SEQ ID NO: 12088 - DNA, 219 bp, Glycine max
  unsure (1)..(219): unsure at all n locations; Clone ID: 701153376H1
ggagagaaaagtgaattggattgcatctctcgctttgtgttggaagaggggaatcgtagatctgannnnnnnnnnnnnnntaataataattttgtgatcagaattattgagctgaagaaaagacaatgggattgtgggaagctttctcaattggctacgcagcctttctcaagcaggaaatggagttatctctaataggactcagaatgctgggaagac

SEQ ID NO: 12089 - DNA, 227 bp, Glycine max
  unsure (1)..(227): unsure at all n locations; Clone ID: 701153378H1
ggcacaccaacaccaaaacaaacccactaagatggcttcctttgtatccttcctagtgctgcttcttgcagcccttatcctcatgcctcaagggcttgctacttactacaaaccaattaggaagccaccagtgtacaagcctccagtgtacaagccaccagtgtacaaaccaccggtttataagccannntcaccggtttacaagccgaaaccaccggtttacaagc

SEQ ID NO: 12090 - DNA, 227 bp, Glycine max
  unsure (1)..(227): unsure at all n locations; Clone ID: 701153379H1
gctacgtggatgctggaggctacttcttcagttgaagaaaacagactgggagtggactttgcagaaatctaccgaaaatcaagtttatatcaatataacctagagttggttgaaaggttgagcaagcctagtggtaattcaaaagaattgcattttccaacaaagtattgccggtcatctttgagcagttcctaacttgtctanntccgaaaaatctttgttactgg

SEQ ID NO: 12091 - DNA, 232 bp, Glycine max
  Clone ID: 701153380H1
gatagtattatcattcattctcatctttctctcttctctctccacccaaaccctaactcccgaccctgttcccctctcgtatccgtcatgaaaggaggaaagtccaagaccgaatctaagagagccgatcccaaacttgctgtgaataagaagggagccgccaccaaggctaggaaacccgccggcaaggggaaggcagcgaaagaccctaacaagccaaagaggcctccac

SEQ ID NO: 12092 - DNA, 234 bp, Glycine max
  Clone ID: 701153383H1
cagatatacacacaccactgttgactgaatgcatcattcagcaacactccaacgtgtttgtttgatgcagaaaacaaaatgacaagataacatgccataatctttataattaggcatagctcaagagtgttgttcctaaagctaaaccatagtgttcacagaaagggtccctctcattagtcattagtcgttttctttttttaagaaaatactcaaatgaaaaaggggcatgag

SEQ ID NO: 12093 - DNA, 228 bp, Glycine max
  Clone ID: 701153384H1
ggtggcaagaagttcataactctcttggacttgaagcgtccatttaaaccaatgaaggatttggacatggacaaggtcatctcggacatcattgaggaaatatcaaagactagttgatttcagctgttttgcaagagcctttttatggctgacttacagtgaagctagatatattttgttcacatggtagaaatcctacaatggaaactgttcaaaacgtgttatagc

SEQ ID NO: 12094 - DNA, 228 bp, Glycine max
  Clone ID: 701153385H1
ggtccaaaggcttttgtaagtgagtatgctgtgactggaaaagatgctgggacaggaagcctcttggcagccctagctgaagctgggttccttattggactggaaaagaacagtgatgttatccaaatggccagctatgctccactttttgttaatgccaatgataggaggtggaacccagatgcaattgtattcaactccttcagctctatggaactcctagctatt

SEQ ID NO: 12095 - DNA, 98 bp, Glycine max
  Clone ID: 701153388H1
gtagaaatagtgtataatgtgtaatacgcctttaatttgtacgtgcatgtgtgatcagtttaagagcaaattaacgtgatgaacatcatctattgtgc

SEQ ID NO: 12096 - DNA, 227 bp, Glycine max
  unsure (1)..(227): unsure at all n locations; Clone ID: 701153389H1
gggggaggagaagnttctctttcgaggaatggggtggtggagaaggtggcaaatgacaattcaagtgaataatggnnnnnnnnnnnnnnnnnnnnnnnnnnnnngtccctaatcctcaagattcactgtggatgatgaatttgaggactggggaaacaatggattctggatcttatccggagcgtccaggggagccggattgttcatattacatgagaacaggcctt

SEQ ID NO: 12097 - DNA, 223 bp, Glycine max
  Clone ID: 701153390H1
gtcaggcaggaaacatggaagtggagactcagagggagaattctgatactgataagagcgacaatccagattataagcccagtggcagaaggaaccaacgcatgtagcaccagttatctcaaagaatttccagaatgaagaacacaagtgaactgggaaattttgcattctttgagcttctgtaagttctgatgcgcctgccactttttacatgaaaaacatg

SEQ ID NO: 12098 - DNA, 223 bp, Glycine max
  Clone ID: 701153391H1
gtgtcgagctgagaataccagttgctccagtagccggcactaaacaacatggcggacaaggcagtcaccatccgaaccaggaagtttatgacaaacaggcttctctccagaaagcagttcgtcgttgatgtccttcatccagggagggctaatgtttccaaggctgaactgaaggagaagctgggaagaatgtatgacgtgaaagacaccaacactgtatttg

SEQ ID NO: 12099 - DNA, 224 bp, Glycine max
  unsure (1)..(224): unsure at all n locations; Clone ID: 701153392H1
gtcaggcaggaaacatggaagtggagactcagagggagaattctgatactgataagagcgacaatccagattataagcccagtggcagaaggaaccaacgcatgtagcaccagttatctcaaagaatttccagaatgaagaacacaagtgaactgggaaattttgcattcttttgagcttctgtaagttctgatgcgcctgccactttttacatggnnnccatg

SEQ ID NO: 12100 - DNA, 231 bp, Glycine max
  unsure (1)..(231): unsure at all n locations; Clone ID: 701153393H1
tggggcataacaatatcatgttcaatgtaatagagaactgaaactgaatgccgtcactaattaatataaaaagaaatgaaaaatcacagtgtagtatgaatgctatattcagagaaaatgtggaaatgtaatctaaataaataactcatcatgccacatcagaaatagaagctttatcctaacaaattaagcttctgttgtcagagctatgcacntttaacccaaatcagg

SEQ ID NO: 12101 - DNA, 228 bp, Glycine max
  Clone ID: 701153394H1
ggttgatcaaattaatttaactcatcattaatcaacttcgcattgattatttaaatagcgatggcaatgacaagggtgatgcagggtcttgttctctgcacacttttgttgtcggcggttttggtccaagaagttgaggcaagagtaatcagcaaagaagcaatgcagcgtaacaccattcctggatgcagcaaagtacaccccaatgtcgccgcttgtcatctgcca

SEQ ID NO: 12102 - DNA, 231 bp, Glycine max
  Clone ID: 701153395H1
ggagggaggcattttttgtaacgagatgcgcattaatgaaaaatgaataatgaataagaacacgaggcagggcagaggagaaggccttgtgattcatcatgacgaatgaacccaacaacaagtacgatgtttttctgtgtttagttggcccagatacccgctacaccttcgctggtaatctctataatgcttgcgccgcaacagaatcaatacctttttcacagaagataa

SEQ ID NO: 12103 - DNA, 230 bp, Glycine max
  Clone ID: 701153396H1
gaagatattagaccatattgatagaaacactcccacacctaaagagaaatctgctgagctcaagctggcaacgaaatggaagaaccctgaatcttctattgatttcagtactatctggtcaaatgaagataatggtttgcttaaattagatgatgttagcccttataaatatgatgggcttgaaggaaaggaatctactctatggaatgaaagtaaggggagtaccatgt

SEQ ID NO: 12104 - DNA, 254 bp, Glycine max
  unsure (1)..(254): unsure at all n locations; Clone ID: 701153401H1
attggatttttggttatactatgctacatacttctgtggaggtacacttggtctagtctatagcaataatctgggacagattgcacaatctgtgggccagagttcaaatacttctacacttgtcatgctctatgcatccttttcttttngtggtcgcttgctttcagttggaccggactacattcggaataagatctactttgccaaggactggtnggcnaacatgngctttannccccccccnggggctcccc

SEQ ID NO: 12105 - DNA, 248 bp, Glycine max
  unsure (1)..(248): unsure at all n locations; Clone ID: 701153402H1
gataccaaaaacaaaacacaagccaagtgaaagtgaganaaaataaaaatcaaagagcataatgtcagggatcattcacaagattggggagacccttcatgtgggagggcacaagaaggaggaggagcataagggtgagcaccatgctggagaatacaaaggggagcaccatggtgaacacagtagtgagtacaaaggagagcatcatggtgaacacaaagctggagagtaccnggtgagcacaagcc

SEQ ID NO: 12106 - DNA, 245 bp, Glycine max
  unsure (1)..(245): unsure at all n locations; Clone ID: 701153404H1
gactgcagaggtgtattttctcacttctcagcactncagcagcgatatcagttgaagaaacagaaacaaacaaaagaggcagaagatgttgtgggtggacaaatatcgtcccaaaaccctcgaccaggttatggtccacaccganatcgctcgaaatctcangantttggnngcggaacggntttcccccnnttanactctntagggcccattngggcnncggaaaagaaaacctaatcatggct

SEQ ID NO: 12107 - DNA, 246 bp, Glycine max
  unsure (1)..(246): unsure at all n locations; Clone ID: 701153406H1
ggaacctttgcattctattcattcaagattcagcaagtgcgttttggaagcagagaccgaaatacttcgagatggcccgtacaaagcaaactgctcgtaagtcaactggaggaaaagctcccaggaagcagcttgcaaccaaggctgcacgtaagtctgcaccaaccaacnggtggtgtnaaaaaagcctncatcgtnaacccccnngaactntagctcttcgtgnaaattaggaaataccagang

SEQ ID NO: 12108 - DNA, 197 bp, Glycine max
  unsure (1)..(197): unsure at all n locations; Clone ID: 701153407H1
gagggagagtgttgacgctccatcaagatgggtatttctagggattccatgcacacgaggcgtgcctctggtggcaagaagaaggctggagannnangagaaagtatgagcttgggcgtcaggccgnaancaccannttatcaagcaacaaaactatccggaggattcgtgttcgaggtngcatgttaaatggaggg

SEQ ID NO: 12109 - DNA, 233 bp, Glycine max
  Clone ID: 701153408H1
cattctgggagctggtatctttgtgaagactcagtaccttccgagactctccgagatctctcatcttttcattctgaaatccatttggagccgcactcaggaatcagctacagctgccgtagacatagctcgtaagcattttccccaagtagagactaagtggggagataacggttttgatgacatcattcacgatggatcaatcgatgctgttgccgtggtcttgggctgga

SEQ ID NO: 12110 - DNA, 236 bp, Glycine max
  Clone ID: 701153410H1
gaagttgttgtgagccctccttttgtgttccttcctgttgtaaaaagtttgctgcgccctgatttccatgtttcggcacaaaactgttgggttcgcaaaggtggtgcttataccggtgaggttagtgctgaaatgctgttaatttgggaattccttgggttattattggtcactctgaacggaggcagcttttaaatgaatcaaacgagtttgtgggagataaagttgcctatgca

SEQ ID NO: 12111 - DNA, 229 bp, Glycine max
  Clone ID: 701153411H1
agacaggagtgttatcggcgaaggaggcattcgagaagcttgaaaaggtgggagaagggacatatgggaaggtgtacagagcaagagagaaggcaactgggaagatcgtggctctgaagaagactcgtctccacgaggacgaagaaggtgtccctcccaccactctccgtgaggtttccattctggcgatgctctctcgcgatccccatgtcgttaggttaatggatgt

SEQ ID NO: 12112 - DNA, 241 bp, Glycine max
  unsure (1)..(241): unsure at all n locations; Clone ID: 701153412H1
ggaagagaaaaatgggggtgttagggtgttgattctctgcgacgctcttncgcattgcggtaccctgcaccttcctcgcggtattgcgcgcctgtctcactcccattccgtttttccgctcccctctctgtgttgcgaaaataagggttcattggtttggggctaattcttcttccgatttcgagccgagtgaaatcgttaagagagaaaatgtacgctgatcgtatggagggtggagcca

SEQ ID NO: 12113 - DNA, 242 bp, Glycine max
  unsure (1)..(242): unsure at all n locations; Clone ID: 701153413H1
ggaggaaagcgcgatcctcgtgactcgcgacccctcgggtttaaatcccctgcgacgcagcacaggctactacttcaccatcgccggataaaatggtcnacgacggagcaacctcggcggcgacgagccggagaaagccgtcgtggagagaaagagaatcggacaggagaagagaacggaggagaagagcaatagctgcgaaaatatactctggacttcgagctcaggggaattcaacttgc

SEQ ID NO: 12114 - DNA, 255 bp, Glycine max
  unsure (1)..(255): unsure at all n locations; Clone ID: 701153414H1
gacgagaaaatagattgaaaatggcaatagctcacatgacataatagtcccgggttatttggaatgaggtagcgcttagtatnnnnnnnnnnnnnnnnnnnnnnnnnaacataattaagatggcaacgttcacataccacgtagaaacagttcaatcattctcagccctaagcggacttcacatactcatccacttagtggcagtgttgtctctctgttactaccgcatcacccacttcttcctccaacctccaa

SEQ ID NO: 12115 - DNA, 258 bp, Glycine max
  Clone ID: 701153415H1
gaggaacagaaggagaaaggaaaggaagagaagagaagagaaggagaaggagaagggttcggtagttggttacttagtttgtttgattaacgacggcgcactacacgatccccacaatccagaggcttgttattatctccatccatttaatttaattcccacaaccacgctcacctaagtttcaatttcaatccctttctttttcttttttatttaaaattccaatttcgcgaaccccaaattccctccctccttttc

SEQ ID NO: 12116 - DNA, 247 bp, Glycine max
  Clone ID: 701153416H1
ggataaggtcagatgtttcgaatgttgttcacggtgatgaatttgagtacaatgatcctgtggatggttccatctcatcacatcagggaatccgatatttgtttgaggatggatcacgattgattttccgcctatctggaactggatcagaaggtgcaacaattcgactatacattgagcaatatgagaaggatccatcaaagattgggagactttcaaatgaagcccttgctcctcttgtggaagt

SEQ ID NO: 12117 - DNA, 248 bp, Glycine max
  unsure (1)..(248): unsure at all n locations; Clone ID: 701153417H1
gacctcacagcagagcaaaagaaagaaaganactgcaacttcctctgttttgctcccctgtttaggccttttcataagcttagaatgacacacaaggaattttccattgctctagtgactctcattgctgttctctttgtcaacatgaacatncaaggtgccactgctgactatggtagttggcagagtgctcatgccactttttatgggcgggggtgntgcttctggcacatgggtggagnntgtng

SEQ ID NO: 12118 - DNA, 88 bp, Glycine max
  Clone ID: 701153419H1
gaaaaaaaaaataccattttgataaataaaattcatggtatccttatttctaataatacttataaaaaaaataatagtaattatccag

SEQ ID NO: 12119 - DNA, 251 bp, Glycine max
  unsure (1)..(251): unsure at all n locations; Clone ID: 701153420H1
gacaacaaaaaactacttctcaattcagttaacacaccaaccccacatccaaagcttcagttcaatatggcaaccttgtcaagttttgctcctttggccattctaagtttagttctagtaattagtgccattgtctttgaggctgaagctaggccaaggacatnctttgtatttggangatccacttgtggatantggaaacaacantacttggctaccanggcactgccgatgctcccccttatggnatt

SEQ ID NO: 12120 - DNA, 238 bp, Glycine max
  unsure (1)..(238): unsure at all n locations; Clone ID: 701153421H1
gataacacaaacacaaattacatagcctcagtaacctgagagagaaacaaaaacaatgaaggtttccattgccaagttccactcccttcccctatgttttttccttctcttggccttcaacacaaaacccctcctagnagcaganccagagccatggttgataaggcagggacccttgggagcnaggtttagggtccaagtgtgggccatttggggctgntgcaggaggcctcacata

SEQ ID NO: 12121 - DNA, 239 bp, Glycine max
  unsure (1)..(239): unsure at all n locations; Clone ID: 701153422H1
gatccccaatcagagagaaaagttagggttcacaacttttccttttccttttgcttgcgaatctgaatcaaataatcaatcatccattcattattcatcatgtcgtcggcgaagaaaatcacgctgaagagttcggancggcgaggctttcgaggtggaggaggcggtggcgctggagtcgcagacgataaagcacatgntctcggacgatgcgccgacagnggcatccctctgccgaa

SEQ ID NO: 12122 - DNA, 249 bp, Glycine max
  Clone ID: 701153424H1
gaccacattccaaaacacaaacacatacattgtagtatcacttttgtctcggaatttgttcttttgagttatggcaagcttaaaggttgcatgtgtggttttgatgtgcatggctgtgatgagtgcaccaatgatggtgcaagccgtgtcatgcaatgatgtttctgtgaacctagcaccgtgcctatcttacctgatgcagggtggagatgttccagaatcgtgctgtagcggagtgaggaacatctg

SEQ ID NO: 12123 - DNA, 208 bp, Glycine max
  unsure (1)..(208): unsure at all n locations; Clone ID: 701153425H1
tcagatctggagcaggagaatagcgttgggagcgttcgcgtttgttctgcttttcctatcggcctcagcagacgacgtcgttgtgctctctgaagataacttcgagaaggaagttggtcaggacagannagctctcgttgagttctatgctccttggtgtggacactgcaaaaagcttgctccagaatatgaaaagcttggtagcagc

SEQ ID NO: 12124 - DNA, 247 bp, Glycine max
  Clone ID: 701153427H1
ggcacggcaataccattcattcagcaacagcgatatgccgccaatgaagtttgtggtgaagaaggcatggagcagtggtggatgtggtcgggtaggagcactagagatgggaagctgcccgggacccatagagacacccgctcttctcctatctactcgtaaagggcttcctcactttatctcccctgacctactcacttctctcccttcccccgattcccatctccttcaaatttctccactccac

SEQ ID NO: 12125 - DNA, 240 bp, Glycine max
  Clone ID: 701153428H1
caaagagatagaagcaaataaagcattggagatttcaaggcttgtgttatgcattgtgggaatcatcatgggagtagttagtaatgagtactcaaatggatctgttcaaggctgcaatagtttagaggagaagctcgatgatcttcgtggcctacttggcaaggctgatggtgatccttgagaattgtgagtgttggtgctggtgcttggggcagtgtttttgcctgctttgctgcaaga

SEQ ID NO: 12126 - DNA, 217 bp, Glycine max
  unsure (1)..(217): unsure at all n locations; Clone ID: 701153429H1
gacccctctctcgagggcctctggatcgaacccagcagaagtggtccttggatgatcgtttcgaaccttannnnnnnnnnnnnnnnnnnnnnnttcaatttcagaaggattcggtggtaaaatcccatctgcataagcattgttctgattcagagatgcagctgcagtggcggcagtatgggcagacaacaatcccgctgcgtacgttttcgccatt

SEQ ID NO: 12127 - DNA, 252 bp, Glycine max
  Clone ID: 701153430H1
caccaagagtaattataaacattaacatattataaacaaaaatttacaaattgataaaatattagagtagtaatgtactttaattgcaaacaaagtcagaataaaacaaagttagaagttgcatctaatttgatttccaagaagcaaattctgtgtttgtgcaaaagtccttcatccatttctaatttttgcagtcttcctatgatgattataaactattctacacttcatccttccaagttcagatggata

SEQ ID NO: 12128 - DNA, 245 bp, Glycine max
  unsure (1)..(245): unsure at all n locations; Clone ID: 701153431H1
ggcacaagtgagtttgttgatcgagataactagaaacagtgtgatgaaaatgaaggtccttgttttcttcgttgctacaattttggtagcatggcaatgccatgcgtacgatatgttccctctccgaatgaacactggctatggtgcccgtactccggaggtgaaatgcgcaagttggaggcttgctgtggaagcacacaacatctttggctttgagaccattcctgaagagtgcnttgaagcaa

SEQ ID NO: 12129 - DNA, 246 bp, Glycine max
  Clone ID: 701153432H1
tgataatggtcgtattggtggaaagatgaaaaagacattgagggaggttattgagaaatataatttgaatgcaagaatcactccaaatcagaatatcatcttgactgatgttcgtgctgcatggaagcgtccaattacaaccactcttgctcaagctggtttgctgcaacctagatttgtagatcccctcaacataacagcaatggcatgccctgctttcccattatgtcctctggcaattactga

SEQ ID NO: 12130 - DNA, 251 bp, Glycine max
  unsure (1)..(251): unsure at all n locations; Clone ID: 701153433H1
gacactaaacaagttaaaagaagagcatcactgaactaacaaagcaaccctatgtcgaaggtggtttgtgtcaccggagccagcggcgccatcggatcatgggtggtcctactcctcctccagcgtggttacaccgtccatgccaccgtncnagatntcaagtatgacnatgagcncgatnnctttggnaggnatggaaggnccaaagnactcctccccttttttngaaaanttgntttctnccccccccc

SEQ ID NO: 12131 - DNA, 254 bp, Glycine max
  Clone ID: 701153434H1
gatcactgattagacaactctcttccaaccaccatggccaatttcaaaactttcttcatttcccaaaccctaaccctaaccctccttttctccaccctagtgactgccacttaccaccacaacatctctccaagtcttgtacgttctcgtgagaagctgacccaccttcacttctacttgcatgaaatttttactagcgaaaaaccctcgaacatcgtaatcgacccccccaaggtggtagccagctctccact

SEQ ID NO: 12132 - DNA, 228 bp, Glycine max
  unsure (1)..(228): unsure at all n locations; Clone ID: 701153435H1
ggttcccaaatcattacaaatccctaccgtaaatccttagagcgaagaaattggcgtctgacattctccctcactctcttttcagttagggtttgcagaacggtggtgaggttgtggcncccccattttgtganggtnatttctcagaagcagaagaagtagnnggcncttgnatntcgctngaaggttntttnttgctaaaaanatanttancgggcggtgganggc

SEQ ID NO: 12133 - DNA, 243 bp, Glycine max
  unsure (1)..(243): unsure at all n locations; Clone ID: 701153436H1
gaattcaaaatatatcatcaattataagcatgggtttgtggaacacaacgaatgcagtgtcttgccgctttcacaagtttggtgatgaccaaaagaatctggtcttccaaggtgatgccacgtcttcttccaggggcataganctcacaattttnagcggggggggnaacccccngggggnnccnttgggggnagngtntaaaccccttccccaggcccccttgggaaaacccnctanngggg

SEQ ID NO: 12134 - DNA, 239 bp, Glycine max
  Clone ID: 701153438H1
ttcatcaatgaagtctgcacggtgctcagcgatcccgtccaacgcatgatttatgatgaaattcatggctactctttaacttcaatcaatcctttcttggatgattcaagcccaagggatcatgcctttgttgatgaattcagctgcataggctgcaaaaattgtgccaatgtagcccctggtgtgtttgcaattgaggaagactttggaagagccagagcatacaaccaatgtggggc

SEQ ID NO: 12135 - DNA, 237 bp, Glycine max
  Clone ID: 701153439H1
ggcacaagtgagtttgttgatcgagataactagaaacagtgtgatgaaaatgaaggtccttgttttcttcgttgctacaattttggtagcatggcaatgccatgcgtacgatatgttccctctccgaatgaacactggctatggtgcccgtactccggaggtgaaatgcgcaagttggaggcttgctgtggaagcacacaacatctttggctttgagaccattcctgaagagtgcgt

SEQ ID NO: 12136 - DNA, 254 bp, Glycine max
  unsure (1)..(254): unsure at all n locations; Clone ID: 701153440H1
ggacacaccgtttcatagtttttaagattgaggagcagcagaagcaggtcattgtggagaagcttggtgagcctgcccagggctatgaagatttcactgccagccttcctgctgacgagtgccgttatgctgtttatgattttgagtatctgactgaagggaatgtccctaaaagcagaatttttttcattggcgtggtccccctgacacatctagggtgggggnncagantgntttngncncccccaaananc

SEQ ID NO: 12137 - DNA, 219 bp, Glycine max
  unsure (1)..(219): unsure at all n locations; Clone ID: 701153441H1
ttcttaaaagatataagatggaagaangcaacctagctaagagtccaattgattttggattaaagctaggtgctggtcttgatgaaaagccagtggatgccacattgttcaagcaaatggtgggaagctgagataanggaanacatagtaggccagatattgcttatggtgtaggtctggtaagcagatatatgaatgatccaaggacttctcatatgg

SEQ ID NO: 12138 - DNA, 235 bp, Glycine max
  unsure (1)..(235): unsure at all n locations; Clone ID: 701153442H1
cctactgctggagactcaaagacaaagacactcatcctcataggaagggcggaattattttttgtacccacgctatcttttttacgttactttcaaatattttattttcaaagagttattatcacgttctttagtattagttttaaatgagtatttttaattctaatttttgaatgtattaaatatntttccgtanaattattttaggaaagtgattataaaacatntccgatag

SEQ ID NO: 12139 - DNA, 255 bp, Glycine max
  unsure (1)..(255): unsure at all n locations; Clone ID: 701153443H1
ggatgcaaaagttagtagtagtgaagaaaatgaaagtccntgttttctttgttgctatagttctagcagcatggcattgccatggctcagaccatgnccatgaccatggccacacctacnaaattnncccnctgngaatnanaactggccatggtggccactacatttccggcggtatncatccccaaganttggangnttggngtngangccnanngcgtcatnantggnaaanngttcctctagatagngnnc

SEQ ID NO: 12140 - DNA, 239 bp, Glycine max
  Clone ID: 701153444H1
cctactgctggagactcaaagacaaagacactcatcctcataggaagggcggaattattttttgtacccacgctatcttttttacgttactttcaaatattttattttcaaagagttattatcacgttctttagtattagttttaaatgagtatttttaattctaatttttgaatgtattaaatatttttccgtaaaattaattttagaaagtgatttataaaacatttcgaatagtgt

SEQ ID NO: 12141 - DNA, 241 bp, Glycine max
  unsure (1)..(241): unsure at all n locations; Clone ID: 701153445H1
ggaagagggttgagttcagagttgaaacttgagagagtntcgttgattccaatttacgacggaggagtgaggnatcacaatctccaccggcgaaacctgtaactgttggcgacgctcaacactcgcactacgccgatagtgatggagagtgcttttgcaagcgcctctgcgattactgaccagaggcagaagatagagcagtataagcaaatacttgctgctgtcatttcatctaatgaca

SEQ ID NO: 12142 - DNA, 262 bp, Glycine max
  Clone ID: 701153447H1
gaagagagttggaaaacaaagtatagagtgaaagaatgggtgagaaaagcaagattttgatcataggaggcaccggctacatcggcaaacatatagtggaagcaagcgcaaaggctggaaatcccacttttgctttggtgagggaatccacactctctgacccctccaaggcacaactcatccacaattttgaggctttgggcgttaatttggtccgcggggatctgtacgatcatgagaagttggtgaaagctatcaagca

SEQ ID NO: 12143 - DNA, 255 bp, Glycine max
  Clone ID: 701153448H1
gaccacattccaaaacacaaacacatacattgtagtatcacttttgtctcggaatttgttcttttgagttatggcaagcttaaaggttgcatgtgtggttttgatgtgcatggctgtgatgagtgcaccaatgatggtgcaagccgtgtcatgcaatgatgtttctgtgaacctagcaccgtgcctatcttacctgatgcagggtggagatgttccagaatcgtgctgtagcggagtgaggaacattctgggttc

SEQ ID NO: 12144 - DNA, 247 bp, Glycine max
  Clone ID: 701153449H1
catcaaaagatcgattcagaaacgcacctgagtcgggcatttccttttattattcgatcaaattttaaatatttgtagtcatgcaactgcgcaacacaagatttaacccaaaaacaaaacatatcagtaaagagctgagaaaacgagtacaatatttgcttgtgaattgttataaaggtaagtggaaatttaaatagtcaaacatcagctctgcttcttaatattgcccttaaaaagaaggtacacc

SEQ ID NO: 12145 - DNA, 242 bp, Glycine max
  unsure (1)..(242): unsure at all n locations; Clone ID: 701153450H1
gagagaaagagagagaaagatgtcgaagcgtggtcgtggtggttcggcggggaacaagttccgcatgtcgctgggtcttccagtggcggcgacggtgaactgcgccgacaacacgggggcgaagaacctctacatcatttcggtnaaaggtntctaaggccgtntgaaccntcttccctcggcctgcgttagcgacatggtncnggccaccgtgaagaannnnaaacccgatctgaggaagc

SEQ ID NO: 12146 - DNA, 242 bp, Glycine max
  unsure (1)..(242): unsure at all n locations; Clone ID: 701153453H1
ggcactctcacatatgaatatgaactgtttagaatgaatcaatatgagaccatacaagatatgcaaaaaatatttactcatatagttaatcatcttgcatcattgggaaaaatatttcctaatgaagatctcattaacaaagtgctgagatgtttaagcagncantgaccanccaaaggtaccngccatngccagantcaaangatctcancaacatgtctcttgccactttctttgggaaa

SEQ ID NO: 12147 - DNA, 239 bp, Glycine max
  unsure (1)..(239): unsure at all n locations; Clone ID: 701153455H1
gatcaattcaaaatatatcatcaattataagcatgggtttgtggaanacaacgaatgcagtgtcttgccgctttcacaagtttggtgatgaccaaaagantctggtcttccaaggtgatgccacgtcttcttcaaanccgcatagaactcacaaagttagacggtggagnaaaaccagtgggtggcagtgtggggagagtgtnataccctgtccagggcacctttgggaaagctctacc

SEQ ID NO: 12148 - DNA, 239 bp, Glycine max
  unsure (1)..(239): unsure at all n locations; Clone ID: 701153456H1
gaccacattccaaaacacaaacacatacattgtagtatcacttttgtctcggaatttgttcttttgagttatggcaagcttaaaggttgcatgtgtggttttgatgtgcatggctgtgatgagtgcaccaatgatggtgcaagncgtgtcatgcaatgatgtttctgtgaacctagnaccgtgcctatcttacctgatgccagggtggagatgttccagaatcgtgctgtagcggagtg

SEQ ID NO: 12149 - DNA, 237 bp, Glycine max
  unsure (1)..(237): unsure at all n locations; Clone ID: 701153457H1
gacacaaagacaaagacaaagactccaacactccatcttcccggacttcacttcactgcggctcctcaaaaaggtaaaaccaactctgctattcgcgcttagttagttacattcgaggtgtgctgcacattcatgacttggtggtgctcatagtcatagatggggaagggaaaacctaggtctgttgaaaaaggtgtggtaggacctagttttnntgttacatcctcgactatacct

SEQ ID NO: 12150 - DNA, 235 bp, Glycine max
  unsure (1)..(235): unsure at all n locations; Clone ID: 701153458H1
ggagagggaagagggaatgctatgaatctctcttatcttactcgcttccccgagcgtctcgttgctcctctttatgccacacttcccactacagctactactagtggaaataggcctgagaattttgcgattgaagggcgtaatttgaaattctcattcacgacgaggcaaacacaggatgtnccggttcttaaggattgttcgactcgcattcctgcgggcagttttggatgct

SEQ ID NO: 12151 - DNA, 227 bp, Glycine max
  unsure (1)..(227): unsure at all n locations; Clone ID: 701153459H1
gacatgacaaaagcggtgttaaattttctttaaaattttaaagaaacatagcactgtccctgtctttatgtctttttttcttcctttgctttcctttttctgtttttttgcaggatttgttttcnnnntttgtttgaagttccttccatttagatctaagaccagcacagtttcctcaaccttagaactagttgcgccagaagggcatcactcaaagctcaantttg

SEQ ID NO: 12152 - DNA, 243 bp, Glycine max
  unsure (1)..(243): unsure at all n locations; Clone ID: 701153460H1
ggaagcgaaacggggttgcctcaacaattcgccgttgttgttctcttctcttctctttgacatgaatactctttcttccacgctccatggcgggnggcttccccgctcagcttcgaaaaccaaaaccgcatctctctccaaatggccatcgcatttgggtntgnaaagcttctgttgccgttgagcaacaaactaaggtcgctctcatcagaattggtaccagaggaagtccactagctctag

SEQ ID NO: 12153 - DNA, 241 bp, Glycine max
  Clone ID: 701153461H1
ggatgctaactctacaagcttcgtctcgtaaagaaaattcgaaagctcaatagagagaactcaattgaatcatcaaatgaggacagtgatttcgcgcttgatccattccacgccttccatttccaggctcaatgccacggtagtgtcaatcagcgggagaaatctctgcacagattctaacaaagttgatgggccattcaaagttgaagaagcagagactgtaaatgtgcctccacttcca

SEQ ID NO: 12154 - DNA, 246 bp, Glycine max
  Clone ID: 701153463H1
tacctataacactgtgagcaggttcagaaccatggagaattgctgctagacccaggtcaccaattttcacttgtccaagatggccattaacaaaaatgttaccacatttgaggtcctatgaattactagatgatcatgttcatgtagataaacaagaccctgtaagatttggcaagtccaactctttattgcttgtaggcctatgtgcttgtatttcttcctgtatttgcacaagtcacaaactta

SEQ ID NO: 12155 - DNA, 246 bp, Glycine max
  Clone ID: 701153464H1
tacggcgcagttaagatggatctcaatcgaaaagtcattactaatgacaataataaagaaattccttacgttgttaatacattaatatttacaatagcccaacatttcattggagacccatctctctggaaagataggtctgcagaattattgtcaaatcttaagtgtagaactttagctgattttaggtggtacagagataccttcctaaccagggtctacactagagaagacatcaacaacctt

SEQ ID NO: 12156 - DNA, 227 bp, Glycine max
  unsure (1)..(227): unsure at all n locations; Clone ID: 701153465H1
ggacactaatttaantgaccattttatccgcttantatctctcagtttatcaaaactcagcacaaagttagtttgaaaagaaatcctaccaacaccccccatttaccttagcctatcgaacttacttctactttggtccattctcatacctcaagaaaagcaaaaacagagtcctctgtttactctgtttttcccactctacatattcctacacctatttgtgttag

SEQ ID NO: 12157 - DNA, 244 bp, Glycine max
  Clone ID: 701153466H1
gaaggtcaaaaacttgcatgcatgctctgtctgttcttattcgttgcaaatgggacaatgaaattcattccagggcgtcatcattgtataatctcatagatattcacagcaaagctgttgcatctatagtgaacaaggcagaaccattagaagcaaccttaattcatgtaccgatttggaaggattccctcgtttgtgttggtgttaaaaggcagaatcagtgtgaaagtagtagctgctttgc

SEQ ID NO: 12158 - DNA, 220 bp, Glycine max
  unsure (1)..(220): unsure at all n locations; Clone ID: 701153467H1
ggaagctggaaangttagaagtagtgaagaaaatgaaagtcattgttttcttcgttgctataataattttaggtgcagaatggcaatgcaatgggtcagagcatgagcatgancatggccacagctacnaantttccccttnggnaaataaaaacgggccccggtggccaanaactnncnggagtntcgtgcaaaagttggaggcttggtgtggaagcac

SEQ ID NO: 12159 - DNA, 228 bp, Glycine max
  unsure (1)..(228): unsure at all n locations; Clone ID: 701153468H1
gcaaaaacaataatnnatatccgtttttctagtnncctagttctgcaagctctctcctacttttgacacgtgagagaggaggaaagaaagatgttttttaacggatatgggtatcangggacatcatcatttgagcaggccattnccgatgttnacccggctgcgttnntngaaaaccccnnaatattnaaaagggnggataaatttaataatnccncccnncagtcc

SEQ ID NO: 12160 - DNA, 140 bp, Glycine max
  unsure (1)..(140): unsure at all n locations; Clone ID: 701153469H1
aacaggtggcatgagtgtttccctttctagtcctgatggtcatattattggtggtggtggtaactaaggcttgttggcttcaaggcccattncagggggtagcnggcagttcngtanntgggggcncaagccaaanacta

SEQ ID NO: 12161 - DNA, 244 bp, Glycine max
  unsure (1)..(244): unsure at all n locations; Clone ID: 701153470H1
gatcgaagcaaaaaatgaaaacccaaagtgcttctctcctctgtctttttctctctcttgctatccttttggctagtggcactgctgcaagtgcaactccaagaagcgcagtgccaagccaccatgtttcaacattcaacagaagcctttttnnttccactttnccctttgggaatnggttcttcggnttnacccnggcagaaggaggcancaaagtgtagatgggagaggnccaagcatatgg

SEQ ID NO: 12162 - DNA, 236 bp, Glycine max
  unsure (1)..(236): unsure at all n locations; Clone ID: 701153472H1
gggaaaggaaggatgttgcagatcttgatatggtgcataaaatagcacaaactgcacactgtattgcacaggggaaagttggcagtgggtttgatgtcagttcagctgtgtatggcagtcagcgctatgtgcggttttcaccagaagngatttcttccactaaggtangagntatagcagtgcctttgccagatagtatcactgaaattataaaaaggaattgggaccatgacaca

SEQ ID NO: 12163 - DNA, 227 bp, Glycine max
  unsure (1)..(227): unsure at all n locations; Clone ID: 701153474H1
ggaaaggggangatagccatgatgatnntgatttggtacgacttcaacttgaatctcttctagctgaaaaagctcgcctggcacacgagaactcggtttatgcccgtgagaatcgctttctaagggaggttgtcgagtatcaccaacttacaatgcaggatgttgtctaccttgacgagagcaatgaggaagtcactgaagttaaccctcttaaccttcccccagtg

SEQ ID NO: 12164 - DNA, 252 bp, Glycine max
  Clone ID: 701153475H1
ggtagattaaaataataatggtaatatttatgaagagggtctgaggtccctaaagggaggagaaaagaaaagattgggaagggagaagcatgaaaatcggagacaggaagaagaagaagagcatccccagcgacgaatgaatgggcaattgcggaagcagagaggaatctgccgtagtttccaaggctcaagttgttcagcagcttcaccatgcgacgtcgttgggcgccatgccaggaccgacaagaagca

SEQ ID NO: 12165 - DNA, 238 bp, Glycine max
  Clone ID: 701153476H1
ctattagagtattgaacatacttctttaaagatatttatgtttttttaattatttaaatgctttaattttaaacacttatccatgattgttatcaaattctagagtcaacttataaactcttactaatttatacgaattcatcccgtcaaaaacaaatttgctaccaagtcaacttagaaataaattcttaaactagtatactctaaagtttgacaatcactcttgatttttttttta

SEQ ID NO: 12166 - DNA, 238 bp, Glycine max
  Clone ID: 701153477H1
gaaggtcaaaaacttgcatgcatgctctgtctgttcttattcgttgcaaatgggacaatgaaattcattccagggcgtcatcattgtataatctcatagatattcacagcaaagctgttgcatctatagtgaacaaggcagaaccattagaagcaaccttaattcatgtaccgatttggaaggattccctcgtttgtgttggtgttaaaaggcagaatcagtgtgaaagtagtagctg

SEQ ID NO: 12167 - DNA, 240 bp, Glycine max
  Clone ID: 701153478H1
gtcagaacaatactgcaatagagaaagaggcagatagaaaaaaagagcgacttttgagttcaaaagatgactaacttcccattgatcaacttggagaagctcagtggtgaggaaagaaacgataccatggaaaaaattaaagatgcttgtgaaaactggggattctttgagctggtgaatcatggcattcctcatgacatattggacactgtggagaggttgaccaaagagcactacagg

SEQ ID NO: 12168 - DNA, 243 bp, Glycine max
  Clone ID: 701153479H1
gaggaaaacagagtactaaacggaatttgaaaaccaaggctgaagaagttttaagagacatggagctctccgtggttgcaagagacatggaagaagttgtattgctggttgatgatttgagatcactttctgggatttctcgctgtagaatatgtcatgaagaagaatttgagagctccaaaaccttggaagctcctgtgcttgttctgggacagttaagtttgctcacagagattgcattca

SEQ ID NO: 12169 - DNA, 186 bp, Glycine max
  unsure (1)..(186): unsure at all n locations; Clone ID: 701153480H1
gacaacgtcaccttcataaatggaaggacacgcctttcccagaacctgcatggtccatcttcttgttccatagtttcttagctanccaaaaatttacacaaactagtgtccctccgacagcactttcttccttaataactccaaaaactttggtacctttcaatcaaccaccgaaaagttagggac

SEQ ID NO: 12170 - DNA, 222 bp, Glycine max
  Clone ID: 701153481H1
gggtggcatatatgctagtatgcagcagagccagaatatctccatcaatcaagtgatccgattccatgtttgaattttgattttgagtataaaatcaattatattttttaaaaaaatatttgttttataggtgtttaggatatttgataaaaataagtcagtgtttttaatattaaatactttgtaccaatgttgataaagattaaaaaaaaatacaatcac

SEQ ID NO: 12171 - DNA, 240 bp, Glycine max
  unsure (1)..(240): unsure at all n locations; Clone ID: 701153483H1
ggaagaccaaagatgaactggggaattgactagtgcggcgcgttcctattatcaccgtagacggcggaggtggcggtggtggtgtagacacggcgtgacggcgatctcttgagataaatgttggttgaaagaggattagaagaagagtngtattgtagaatgagcccacccaacggggaancttnncccnnggggtntgtgnaccccctnntcntttttgggggnccccaaaatngncct

SEQ ID NO: 12172 - DNA, 238 bp, Glycine max
  unsure (1)..(238): unsure at all n locations; Clone ID: 701153484H1
accttaccttaagagagaagaaatgggggtatgaagcgtgggaaagaatgagaatgtttaaactgatgaaaaatatatataanaaaatctttaaattataaagaagaaattatacatntnnccaattataattcangtgggcgacttaacttccangcctangtattgccaagattngatccttggncgnatcanangnnnctaccgggatatgncaanatggcantatnnancngnc

SEQ ID NO: 12173 - DNA, 183 bp, Glycine max
  unsure (1)..(183): unsure at all n locations; Clone ID: 701153485H1
aagaagatggctctgcaactatgggagacattgaaggaggccatagttgcctacacggggctctccccgcccaccttcttcacccttnctggccctgatcctngccctatactacntcgtttctgggctctgcncctnttncgaccncngccanaanacngcttcgggcgatttggngcccca

SEQ ID NO: 12174 - DNA, 232 bp, Glycine max
  unsure (1)..(232): unsure at all n locations; Clone ID: 701153486H1
ggaaaaggaattgaacaaaacaaaatcgttcacaaacacaaaggcaccaaccaacctcttcgaattcgcgttttcttctctcttcgcctcgcagtgtatgtactgcaatcctcccaattnggttgagactccacatntgcgacaaggactgcatctgttctagactttgtttgaaattanacattttnccttnncttggtcattgatgtggcccatatgcttgctantcaac

SEQ ID NO: 12175 - DNA, 236 bp, Glycine max
  unsure (1)..(236): unsure at all n locations; Clone ID: 701153487H1
taatatattttttacagtcaattttctttttgatacatgtaccgaaagaaacatgttttaaaataaacaagttttacccttatactaaattactaatgcattattatattatttaatgaatttaattttttaacataattaaagtcattaagtaattntccataanagtatttatagtaaccaatgcatcaaattagttaaaannaggtttaggaagtcagattgagtcattgacc

SEQ ID NO: 12176 - DNA, 72 bp, Glycine max
  unsure (1)..(72): unsure at all n locations; Clone ID: 701153489H1
agaaaaaannnttgtggtgttcaaataggaaaaaaaaagggactgttaacagtaaaaaggggtgccaaaaaa

SEQ ID NO: 12177 - DNA, 233 bp, Glycine max
  unsure (1)..(233): unsure at all n locations; Clone ID: 701153490H1
gacacagagcggttctcatattttggagaatccganaaacacgttaaagnaagtcccattcccactaccgaagcaaattaagangntgnagcagcagagagtggagtttatgggcatgggcatnggcatgggcatgggcctgggccttttggtggtggtgatggcatntgagtcggcgagtggtgcggatgatttggcaacnagtgttcancggtgnttcaganggtnnaccg

SEQ ID NO: 12178 - DNA, 234 bp, Glycine max
  Clone ID: 701153491H1
gcaccccctttagatcctttctttgctttaccggtggcaaaagttcgttggcatgcaaccccaactacctctttggtggtaagaatgtgtctaatatacctggcacggttcattgccatgacgttcttctgaaagattcagacaaatttatttcacttcagggtggaacacaactatatagaagaataactcgatatgaatacatgtacagatctacattctaccctgtgtcag

SEQ ID NO: 12179 - DNA, 243 bp, Glycine max
  unsure (1)..(243): unsure at all n locations; Clone ID: 701153494H1
ggacacaatcaatcccattattaaagggataagccttcaaccttgcaacacaacactacaacctaaggtctgcactacgagaatgtctcagggaagagncagtgcatctttacctattgtggtcactgtggtttcactactgtgccttttggttcttttggaacgtgctgatgcagcaacttacaccgttggaggacctgggggatggaccttcaacactaatgcttggcccaaaggaaaaag

SEQ ID NO: 12180 - DNA, 247 bp, Glycine max
  unsure (1)..(247): unsure at all n locations; Clone ID: 701153495H1
atagctctaatggtgcagcggacttgacatcatcagaacaaaaacctacgaaaaaaaaaagtgattatttctcatgaaaacatttccaataactcatttagtaatgtcnnnnnnnnnnnnnnnnnnnnnnnngtcattaccacaataataacggtggggcagtatgagtcaaatttaaggttttgtatcgcttgtccctgcgcattatgttatttgaaacacaaacttatcatatggccctccaagt

SEQ ID NO: 12181 - DNA, 257 bp, Glycine max
  unsure (1)..(257): unsure at all n locations; Clone ID: 701153501H1
gaagaagaagggagcgagcttcgtgatcgattgcgcgaancggtggaggataagattatggacattgcttctctggagaagttccttcaggagaggattaaggtcggcggcaaggccggtgcactcggcgattccattaccgtcaccagggacaagagcaagatcaccgtcacctccgacagcaacttctctaaacggtatctgaaatatttgaccaagaagtacttgaaaaagcacaatgtgagggattggcttcg

SEQ ID NO: 12182 - DNA, 263 bp, Glycine max
  Clone ID: 701153502H1
ggtaccaaagctgaatagccattcgtattgtcgcagagaaagaaaaccctagctcaccgtttcaagatgcaaatcttcgttaagaccctcactggtaagaccatcactctccgaagtcgagagttcagataccatagacaatgtaaaggccaaaattcaagacaaggaagggatcccaccagatcagcaacggctcatttttgctggcaagcagcttgaggatggacgtacccttgctgattataacatccaaaaggagtcca

SEQ ID NO: 12183 - DNA, 254 bp, Glycine max
  Clone ID: 701153503H1
ggttgctgatgtggggctctgaatcccaaggccgattactgtctatcccaacaaaacctaacccagatgatgctcctgcctctgctcgttggctcgactccctcaatttctggggagtcttgaatactatctcatctgatttgggtggagctccctttgggaatgtggtatcatatagtgatggactacctaacgaaagcactggaatcccatacttttacttgacaactctagacccgacagcaagaaatgca

SEQ ID NO: 12184 - DNA, 255 bp, Glycine max
  Clone ID: 701153504H1
agaagaaggagaagaaaagggaaaagaaagagaggaaaagagagaagaaggagaagaaagagagaaggaaagcggagaaagaaaggaaacttaaagaaggagcaagtgcctcccctggcactgatgatggcaaaaagtttaagctcatcaacgaactaaaggaaaccaaagtagatggaaaattgcaaaagggtgaagacagtgagaatgaacaacatgagaggagtggaattacagaggaacttgacctacctg

SEQ ID NO: 12185 - DNA, 257 bp, Glycine max
  Clone ID: 701153505H1
ggatgagaaagttcccatcccaattcggtggtttatcgcgttaagcaaaaaacccaattcaaaattcaaagtctctttgtttaccttgtttccctcattgctttgctcacattcaatttcgaaggcgtagagtgagatccgaacgatgaagagagtattcggcgtcaagaagaacaaggatccacccccttccattcaggatgcttccgaaaggattacaaaacgaggtgacacggtggatgacaagattaagaagc

SEQ ID NO: 12186 - DNA, 228 bp, Glycine max
  unsure (1)..(228): unsure at all n locations; Clone ID: 701153506H1
ggagaacgtcgaagttccgttttctgggagaacactatcccgaagctgtcaacaatggcgatttccggcgatctcagagtctctgnaanacttcctctctatcgctcccactcgcctccacttcgaacctcttctctcnttcccccaaggtagattttcatcctttcttgaaaggggcatgtagcatctctgaattcaccccaaaatgcccttgcctaacaattgtac

SEQ ID NO: 12187 - DNA, 252 bp, Glycine max
  Clone ID: 701153508H1
ggcatcaattcaaaatatatcatcaattataagcatgggtttgtggaacacaacgaatgcagtgtcttgccgctttcacaagtttggtgatgaccaaaagaatctggtcttccaaggtgatgccacgtcttcttccaggggcatagaactcacaaagttagacggtggaggaaaaccagtgggtggcagtgtggggagagtgttatactcttctccagtgcacctttgggaaagctctacagtggtcgcaag

SEQ ID NO: 12188 - DNA, 220 bp, Glycine max
  unsure (1)..(220): unsure at all n locations; Clone ID: 701153509H1
gaagaaaggcggtggcagtttgttctctgcctcggcttttgatgctattgatgacgatgcggatggtgaggtggtggatgataagannnnnnnnnnnnnnnnnnnnnngcctgttattgctttcactgggaagaagaagtcttccaaaggaggtaagaagggtggttcagtgttttcagctgctgttcttggtgagattgatgatggagaggagaataag

SEQ ID NO: 12189 - DNA, 244 bp, Glycine max
  Clone ID: 701153510H1
gattgtaaagaagaaatgtgaaagagttatttctcttgaatagtagtatacagcagagaactctgaagtttggggggctcctcgggatacggatcaccctgaactcagacaaccactagccatggaagtttgggactctgtattgcaaagaactaaaccaaggtctaagattacagtattgactaatggacccttgactaacctggcaaaggttgtatcggtgaaaaacataagctcaagaatt

SEQ ID NO: 12190 - DNA, 217 bp, Glycine max
  unsure (1)..(217): unsure at all n locations; Clone ID: 701153512H1
gagggacantaatnctaagaacttgggctttgcttccttcaaagtgagggtccattgaatatgtctccgtcgttggatcttcctcccaagggtggcttcagttttgatctatgccgaagaaacgcaatgcttcaaaacaagggcctcaaagccccaacctttctcaaaactggcaccactattgtcggtttagttttccaggatggtgtcattcttg

SEQ ID NO: 12191 - DNA, 263 bp, Glycine max
  Clone ID: 701153513H1
ggaagagggttgagttcagagttgaaacttgagagagtgtcgttgattccaatttacgacggaggagtgaggaatcacaatctccaccggcgaaacctgtaactgttggcgacgctcaacactcgcactacgccgatagtgatggagagtgcttttgcaagcgcctctgcgattactgaccagaggcagaagatagagcagtataagcaaatacttgctgctgtcatttcatctaatgacattgttcgggctaggaaattcat

SEQ ID NO: 12192 - DNA, 249 bp, Glycine max
  Clone ID: 701153514H1
ggatgcaaaagttagtagtagtgaagaaaatgaaagtccttgttttctttgttgctatagttctagcagcatggcattgccatggctcagaccatgaccatgaccatggccacacctaccaaattttccctcggagaatgaaaactggccatggtggccactacattccggaggtatcatgccaaagttggaggcttggtgtggaagcacacaacgtcattgactggaaaaccgttcctcaagattgcg

SEQ ID NO: 12193 - DNA, 261 bp, Glycine max
  unsure (1)..(261): unsure at all n locations; Clone ID: 701153515H1
gacacaccgtttgttctattcttaactcaacttctgctacccactctcttcttccaagtccaaccacgcttttctctacagtcatgggcaaggtcaagatcggaatcaacggatttggaagaattggccgtttggttgccagagtcgctctgcaaagagacgatgtggagctcgttgccgttaacgaccctttcattaccaccgattacatgacatacatgtttaaatacgacagtgttcacggacactggnngcatcacg

SEQ ID NO: 12194 - DNA, 269 bp, Glycine max
  Clone ID: 701153516H1
ggcgaaagttgaaagcacgaaaatggggtgggtttggaaggatgacaacagcgacgatgttcgacgcgataactcttcggaacgatgcgccaccaccaaggtcgtcaaatctcagtgcagaacagaggaggtcgaaactggaaagttcgtcagaaagtgcgagaaaaccgaagagattctcaggaattgcatcggaaagcccgccgaagtgttgcaatcaaacaaagagtatactgaagaggatatcacagatgaagtacttaaaggaa

SEQ ID NO: 12195 - DNA, 257 bp, Glycine max
  unsure (1)..(257): unsure at all n locations; Clone ID: 701153517H1
gagtgagaagaagagggggtcagagtgagaaagagaaagagagaatccgtaaaccctaatttcggaaagatcggcgatgactgcctccaaggatcgcgagaactncgtctacatcgccaaactcgccgagcaggccgagcgttacgaagagatggtggaatcaatgaagaacgttgcgaatctcgacgttgaactgacggtggaggagcggaatttgctttctgttgggtacaagaatgtgattggtgctcgcaggg

SEQ ID NO: 12196 - DNA, 252 bp, Glycine max
  unsure (1)..(252): unsure at all n locations; Clone ID: 701153518H1
gatcaattcaaaatatatcatcaattataagcatgggtttgtggaacacaacgaatgcagtgtcttgccgctttcacaagtttggtgatgaccanaagaatctggtcttccaaggtgatgccacgtcntcttccaggggcatagaactcacaaagttagacggtggaggaaaaccagtgggtggcagtgtggggagagtgttatactcttctccagtgcacctttgggaaagctctacagtggtcgcaagct

SEQ ID NO: 12197 - DNA, 71 bp, Glycine max
  unsure (1)..(71): unsure at all n locations; Clone ID: 701153520H1
atatactaagtatanatatatagaaattctagtgattatngactatctttatatanatnatatgaataaga

SEQ ID NO: 12198 - DNA, 257 bp, Glycine max
  unsure (1)..(257): unsure at all n locations; Clone ID: 701153522H1
gacccatttcctcactctttcactcttcttgtatgatggagaagatccagcacagtgaggtggaagtgaagggactgaagcttcacgtggcagagattggaagtggctccaaaacagtggtattcttgcatggattcccagagatctggtacacatggaggcaccacagnatttctgtggcaaacgctggttatagggctattgcctttgatttcagaggctatggactttctcagcaaccagcagagcctgaaaag

SEQ ID NO: 12199 - DNA, 251 bp, Glycine max
  unsure (1)..(251): unsure at all n locations; Clone ID: 701153523H1
gatataaaaatattctctttgaattttttgtaaagagaaaatatgcatagatagagaggatttgattcggcgcgtgttgggataatccaatataatctagagggtgcagagtagagtaaaaaagataaagatgatcgatatgaaatnnnnnnnnnnnnnnnnnnnntggggctctgaatcccaaggccgattactgtctatcccaacaaaacctaacccagatgatgctcctgcctctgctcgttggctcg

SEQ ID NO: 12200 - DNA, 258 bp, Glycine max
  unsure (1)..(258): unsure at all n locations; Clone ID: 701153524H1
atctgtgtttggtgttactaagtctccaacaagcaaagtacatggttgatttggaaatccaggtccccaccccattcgacccgtttgccgaggcgaganaatcggatgcccccggagcaaaggagtatgtgcatattcgaattcagcagaggaatgggaagaagagtctgaccacagtgcaagggctgaagaaggagttcagctacgagaagatcctcaaggacctcaagaaggagttctgctgcaacggaaccgtgg

SEQ ID NO: 12201 - DNA, 251 bp, Glycine max
  unsure (1)..(251): unsure at all n locations; Clone ID: 701153525H1
gagggtaaataaacaaaagactgatagataaacggtgaattgcgagattaaacgacaccactgaagcgaagaaaggggcgtacggttctgttgtggttggagatccgaattttgattatcgaatcgcaaaattcnnnnnnnnnnnnnnnnnnnnnnnnnnntcagagccatcaacgactgcaatggtctgcgagaagtgtgagaagaaatcatcgaaggtgatagtaccagacaagtggaaagaaggggcc

SEQ ID NO: 12202 - DNA, 243 bp, Glycine max
  Clone ID: 701153526H1
gtccatttatgtatgcatcaacatcgttcgcctggaccaataatgaagaaactaactggtcagaaattgtaaatttttcatgcaacgatttcaaccattacaagggaattagagttttaacatggtctcagctaatttacttatgaaacctggttaacttacctagttagaccatgtaatatgtatcatctttaacaaatactgaagggggcattggtaattatattataagatatcttggtg

SEQ ID NO: 12203 - DNA, 244 bp, Glycine max
  Clone ID: 701153527H1
gatcacaaatctttcgctaacactcattaattgcaagaatggcacttcgttgcttggtgatgtccctttctgttctcttcactcttggtcttgcgagagaaagccatgccagagacgaagatttttggcatgctgtttggccaaacactcccattccaagttcattgcgagatcttctaaagcctggccctgcaagtgttgaaatcgatgatcaccctatgcaaattgaagaaacacagtaccc

SEQ ID NO: 12204 - DNA, 245 bp, Glycine max
  Clone ID: 701153528H1
atctatcagcatgatccatgggacttgcctggtttggcaaaggttggggaaagagagtggtacttcttcgtgccaagggacaaaaagcacggaagcggaggaaggccaaaccgcacaactgaaaaagggttctggaaagccaccggttcagaccggaaaatagtgaccttatctgatccaaagcgcataattgggttaaggaagacactggttttctatcagggaagagctcctaggggatgcaa

SEQ ID NO: 12205 - DNA, 209 bp, Glycine max
  Clone ID: 701153529H1
ggacacaccgtttgtactattcttaactcaacttctgctacccactctcttcttccaagtccaaccacgcttttctctacagtcatgggcaaggtcaagatcggaatcaacggatttggaagaattggccgtttggttgccagagtcgctctgcaaagagacgatgtggagctcgttgccgttaatgaccctttcattaccaccgatta

SEQ ID NO: 12206 - DNA, 250 bp, Glycine max
  Clone ID: 701153530H1
ggaggaaaataggtgaaggcctgaagggtgaatcacttctcatctgttctccattggaagccttcgtccattctgagtcagatcgaaagctcacaagcattacgagttgaaatcgttggaacctcgtcgaacaaccgttcaaatcgtcaaagacaaacgagctctgactcgccggaatctcaccagaaagcaagtctttctgaacctgtcgtgctcggaactcagttggcgaacttgaaattgacgctta

SEQ ID NO: 12207 - DNA, 253 bp, Glycine max
  unsure (1)..(253): unsure at all n locations; Clone ID: 701153532H1
ggaaggatcagcagggagaattaggtttttagggtttacaccgagcagccacacctcccgcagcagccatggttctcaaaactgaactatgccgattcagtggtgccaagatctacccaggaaagggcatcanatttgttcgtggtgattctcaggttttcctgtttgcaaactcaaaatgtaagaggtatttccacaatcgcctgaagccttcaaagctcacctggactgcaatgtacagaaagcaacacaa

SEQ ID NO: 12208 - DNA, 254 bp, Glycine max
  Clone ID: 701153533H1
acgcttgttcttgttcactcctttccttggtagtgttgttagtagtcattgttgaaaggaaattatgcttttctatcatggctcccttgtataacttagtaaatgaatgatgttgaaactatttaaaaaaaaacaaaataattacaaattaaaacagagataagcataaatcaatgccataagaaagtaaaaatgtaataaaaccatttctccagtattcctaaaccaaatgtacacagaatttctaaaatttt

SEQ ID NO: 12209 - DNA, 259 bp, Glycine max
  unsure (1)..(259): unsure at all n locations; Clone ID: 701153534H1
gagggtaaataaacaaaagactgatagataaacggtgaattgcgagattaaacgacaccactgaagcgaagaaaggggcgtacggttctgttgtggttggagatccgaattttgattatcgaatcgcaaaattcnnnnnnnnnnnnnnnnnnnnnnnnnnntcagagccatcaacgactgcaatggtctgcgagaagtgtgagaagaaatcatcgaaggtgatagtaccagacaagtggaaagaaggggccagcaatac

SEQ ID NO: 12210 - DNA, 120 bp, Glycine max
  Clone ID: 701153535H1
ccaatccgtggggaccgagaagcacccactgtagttggttttttgaatgcacttttcatcttagggcttgtaccatcttgtaaaatgcctaaatcccttgatgaagatttaagagtaatt

SEQ ID NO: 12211 - DNA, 249 bp, Glycine max
  unsure (1)..(249): unsure at all n locations; Clone ID: 701153536H1
gtatctgtgcacggataatgcgagcggtgggacgtacgcgtgcaagtcgatactgaagaggaagctggtgtcgaangcggacagggaggacatgaagagggagattcagatcatgcagcatttgtcggggcaacccaacattgtcgagtttaagggcgcctacgaggacaggttttccgtccaccttgtcatggaactctgcgccggcggggagctcttcgatcgtatcatcgcccagggtcattactc

SEQ ID NO: 12212 - DNA, 250 bp, Glycine max
  Clone ID: 701153537H1
ggtggtcgtcgaagcgcgagcaagcatcccaaaaccctagcttcgcgttctgctttcgtcttttacatcaggatggagtctcaggtgaagcacgcacttgttgtcaaagttatgggtcgtactggatccagaggacaagtaacccaggttagagtgaaatttttggatgatcagaaccgtcacatcatgaggaatgtgaaaggacctgtgcgagaaggagacattctcaccctactcgagtctgaaaggg

SEQ ID NO: 12213 - DNA, 242 bp, Glycine max
  unsure (1)..(242): unsure at all n locations; Clone ID: 701153538H1
tcttgagctagtttcttggaagactgtgtctgaagtaactgatgacaagaaggtcattaagaagatcctcaaggaaggggaaggatatgagcatccaaatgaggganccattgtgaaattgaaagtaattggtaaactgcaagatggtactccngctttgaaaaagggtcatgatgatgaaggagggctgtttgaattcaaaactgatgaggagcaagtaattgatgggcttgacagagctg

SEQ ID NO: 12214 - DNA, 249 bp, Glycine max
  unsure (1)..(249): unsure at all n locations; Clone ID: 701153539H1
gacggagattattataaaagataaaactccctttataacttctgagttactgatacaaatccacaactcttcatccatgaaaatcagttttgtttanacgncatatacaaataattaggtggtgaaattgaaacaagtaaacctccaaaaaccagtaaccactccgtatattatcttattggcaaagtactcaatcatcagcactagcaacagccatgggagaggtagacccagctttcatccaagacc

SEQ ID NO: 12215 - DNA, 217 bp, Glycine max
  unsure (1)..(217): unsure at all n locations; Clone ID: 701153540H1
gataagcanngaagactcaaaagaaaaaagagaaacaaatggcancactgggtggctttaccgacatcaccggagcacagaacagcatcgatatcgaaaatctcgctcgctttgctgttgatgaacacaacaaaaaagagaatgcagttctggagtttgtgagggtgattagtgcaaagaaacaagtggtttctggcaccttgtactatatcacttt

SEQ ID NO: 12216 - DNA, 256 bp, Glycine max
  Clone ID: 701153542H1
gataccaaaaacaaaacaagccaagtgaaagagagaagaaaagtcaaggacaatgtcagggatcattcacaagattgaggagacccttcatgtgggaggccacaagaaggaggaggagcacaagggtgagcagcaccatggtggagaatacaaaggggagcatcatggtgaacacagtactgaatacaaaggagagcatcatgttggtgagcacaagccggagcaccatggaggagaagagcacaaagaggggttc

SEQ ID NO: 12217 - DNA, 241 bp, Glycine max; identical to SEQ ID NO: 8749
  Clone ID: 701153543H1

SEQ ID NO: 12218 - DNA, 244 bp, Glycine max
  Clone ID: 701153544H1
ggattaagtgagcaacacaacacaaccacacccatcattatctccttctccatctccatggcttccttacccagttttgctccttttgtatttctattgcttgtaattgggagcaatgcaaggactttgtatccacttcccagcaaaggtggtaatgggagtaggaagcccctacaaacttttcgcccttataacattgctcatcgcggttcaaacggagagcttcctgaagaaacgcgtcctg

SEQ ID NO: 12219 - DNA, 246 bp, Glycine max
  Clone ID: 701153546H1
ctgctattatatatttataaagacttgtgtaagtctccaacattcccatacccaccttgctctcattttttggtgttccattaattttcctttggaagaagaagctataggcgatgggaaattgccaagccatcgatgcagcaacattagtgattcagcacccgaatgggaaagtagacaagttctatgcacctttgagtgccacacatgccatgaaaaccaaccctggtcactatgttgctcttc

SEQ ID NO: 12220 - DNA, 233 bp, Glycine max
  unsure (1)..(233): unsure at all n locations; Clone ID: 701153547H1
ggagagagagtgagatactggtgccagcttatgtgagtgcagtatattgctattgctgctgctatctcttcctctctccgcactctccatcgttttaggaatatcacaccaattcgtgaaatcgaaggattccgacagaatcgtacganttattgttcattgtttgcctctactgttgtgctccaacttggtaaactagaagtacagatttatttcttcaatgggggatgctg

SEQ ID NO: 12221 - DNA, 242 bp, Glycine max
  Clone ID: 701153548H1
acatggctccctgcatggacatgtagaagatacattcattcccgggatttttttctttaatttgtttttatcttctttcctaagtattgttcaatgaatatgaatttgatcgacaacgtttacctatactataactataagccgcccctaaaattcttttcttggacaatgcaaagttaaagtcatcatttctaaccattagtatacataacatttttttataagaggttatattgactact

SEQ ID NO: 12222 - DNA, 254 bp, Glycine max
  unsure (1)..(254): unsure at all n locations; Clone ID: 701153549H1
gatggaaggttctgtcaacgaacgtcttgattttgggaagatgggatatgggtgcaatcattaccggagaagatgcaggattcgtgctccctgctgcaacangatctactcatgccgtcactgtcataacgacgctgcgagcttgttgaagaatccctttgatcgccacgagctcgttcgccaagatgttaaacaagttgtttgttcagtttgtgacactgagcaacctgttgctcaagtttgcacaaactgtg

SEQ ID NO: 12223 - DNA, 257 bp, Glycine max
  Clone ID: 701153550H1
ggagacattttcataatcgaaattggaagcgaggaaggaaaacccaaatcgaaaatgggcagtgatggagaggttgaagatgttcgtcgttcaagagccagttgttgccgcttcctgtctcatcgctggcttcggtctttttcttccagcttttgtgaggcccatgttggattcatatcaggcaaccaagcaacctccccagcctgctttaagtgacgtggttgcaggaatgactggtaaaaagtaaaggtgattac

SEQ ID NO: 12224 - DNA, 180 bp, Glycine max
  unsure (1)..(180): unsure at all n locations; Clone ID: 701153551H1
ctcagtcatcagaatgattagatttgacaaagtggtggttcactgacgccatgtannagaagttagtttaaattggaataaaaaggncacattccttcttttttccttttcattgtaccattaaattaacaccgaaatcgccgaatacgactaaaatcaaaatcacaacactgatccttt

SEQ ID NO: 12225 - DNA, 250 bp, Glycine max
  Clone ID: 701153552H1
ggaagggaaaaatggtgtcgctgaaactgcagaagcgcccctccgcaagcgtgctcaagtgcggcagaggaaaggtttggcttgaccccaatgaagtcaacgaaatctccatggccaattctcggcaaaacatcaggaagttggttaaggatgggtttatcatcaggaagccaaccaagattcactcccgctcacgtgctcgtaggatgaaggaggcaaagaggaagggccgccactccggttatggtaa

SEQ ID NO: 12226 - DNA, 228 bp, Glycine max
  Clone ID: 701153554H1
tcactcactagtcactatggaaatgcatagtagtataattttttgcatgttcttccttccgtggctctccatggttggtgctaaggttccggcaatgatcgcgttcggggactcgtcggttgatgctgggaacaacaattacatagcaacggttgctcggagcaatttccagccatatgggcgtgactttgtgggtgggaagccaactgggagattcagcaatggccg

SEQ ID NO: 12227 - DNA, 247 bp, Glycine max
  Clone ID: 701153555H1
ggcttctaacgtgagatctcagattgcaattgcctcttctcttctcccagaatcggtgtaggttacaggtttaagggttttgttttcatttaggtcactaatccgatatcatgaagctcgatacgactagtctcgaatcgtttcccacactgattgcacctcaaaacgacgtcgccggagaactctccgccgctccgttctttgaccttccgaattccaatgacttcgatgggttcttgaaagacgc

SEQ ID NO: 12228 - DNA, 247 bp, Glycine max
  Clone ID: 701153556H1
gggagagaatagagatccagtcaaaacaatatctttctctctctgtttggtttggcctcttgctgtaagaagccagccacagtactgttgcgctcctgtggaaccatcgatgggctttaacaggttccacatcggttgagctttgtgtcagatatgccaatagtgttatccttattcttgtgatatactagtttgtatgatcatattttctcggattgtctagcaagtttagctcaattggacgttg

SEQ ID NO: 12229 - DNA, 242 bp, Glycine max
  unsure (1)..(242): unsure at all n locations; Clone ID: 701153557H1
gggcaattaaaagttgcattgaaatagtgagatgtattgcagaagaatttacaaaaaagaatatagaaagaattacttcttcctgctacaaaacatggaatagaagtaataatatcaggcaaatgaaccctaataataagggggaaaacctaaaaatatgatgttcaataagcaacaacttatttctactacaaaggattacttttcacacaaagcaagcagncagatgaaatagcaatgaa

SEQ ID NO: 12230 - DNA, 242 bp, Glycine max
  unsure (1)..(242): unsure at all n locations; Clone ID: 701153559H1
ggagcagattcagagtgcaaagtgtgagagaaagacaatgccgaagtctcaatttcgaaccccatttctggtttctcttccccttttgttattcatcttcaacctcaccccttcgcacgcactctatggagcatcctcacccgtncttcaactcactccctctaacttcangtncaaggttctnanttcanatggngttgttcttgtnganttctnngnnccatggtgtggacactgtnagg

SEQ ID NO: 12231 - DNA, 243 bp, Glycine max
  Clone ID: 701153560H1
gacagcagtaaagtgagttaaaagaaccgataatagttgttccttcactctccgctctctctgccactgagccaagaagatggcctcacaggtttgcaaatctgcttccagagccgcgaggtcccttctatcctctcgttttcactctcaaggacgtgcgcttggggctgctgcggctgtttcattgagcagcaaagtgcctctttttttacggaaagaacggttctggaaatggatccgctt

SEQ ID NO: 12232 - DNA, 100 bp, Glycine max
  Clone ID: 701153561H1
catggcaaactaacactgccaacaagggtgttgtggccttcaggcttctttcaaatggtaacatggtccttcttgatgcacaaggcgggttcgtttggca

SEQ ID NO: 12233 - DNA, 255 bp, Glycine max
  Clone ID: 701153562H1
ggtgagttgtaattaagcacactatttccacccacaccacaagctccttatcgtgtttgcattgcagagagagagagaatggcgaccacacccggtttgtgtggcagtgtgttgttgagcacctcgttcctgaggaagcaggcaatggcatcagtgaacatgagaatgctgaaggctaatgctggtgtttttggcttaaagggagggcgtggagggcgtgtgagtgcgatggcaagttacaatgtgaagctgata

SEQ ID NO: 12234 - DNA, 260 bp, Glycine max
  unsure (1)..(260): unsure at all n locations; Clone ID: 701153564H1
gattgctctgaattttctgcatcatattgcacacagagatcgtganccgaaaatggcgacgttgaaggttcctgcacaacttccttctccattggaagacagtgagcaattgtgaaaagcttttcaagggtggggaacgaatganggattgataatatcaatcctgggtcacagaaacgcggctcagcgtaagttgattcgtgaagcttatagtacaacccatggagaagatcttcttaaagatttagacaaagaacttt

SEQ ID NO: 12235 - DNA, 251 bp, Glycine max
  Clone ID: 701153565H1
gattgaatttgtagtatctgacaatcatctgctgaaaaagccacatattctctaagggtccgatcaatcgttagagaaaaaaaatgggaatgagagattttcatatcaagcttaaggcattccgggtgaaacgttttttctttggaagaaggagaaatagatggagtgcaaacaagccttcatggatgattccaatatcacatggtcatcatgtggtggagcatcatgtaatcaaaggtggttctgatgac

SEQ ID NO: 12236 - DNA, 249 bp, Glycine max
  Clone ID: 701153566H1
gggaagaggaaaagaggattagagggtcgccacgtttagcaataaccaaaccccctctactcttttttcttctccttctcttcgctagggttttagcttcttcctcttcacttcgttctttttcgcctctacaatgagcaacgacaaggacacattcaacgtcgccgatctcacttctgctctcaacgaggacaatagagcagaccttgtcaatgctcttaagagcaagatacagagtttggctggaca

SEQ ID NO: 12237 - DNA, 226 bp, Glycine max
  unsure (1)..(226): unsure at all n locations; Clone ID: 701153567H1
ggagattaagattggnaatgggagtgggagaaagatcaatgtggcatattcatgtcttcccctcaccattctttctttggagtcaaggactggggggttaggnttgtacttaattacgcttcttaatttcttctttatcgatcacccatgatctacctggctagctagctagggttgcttctgctgcatctcgaccgccaatcaaggattcttctgcgcttccatc

SEQ ID NO: 12238 - DNA, 235 bp, Glycine max
  unsure (1)..(235): unsure at all n locations; Clone ID: 701153569H1
gcacctgaacatgancatcntagctgcgtttgtggttcatntgaatctgccctgtaagnatcatatcatggcaaccttaacttgacaacatattcctacgatcagtttccaaatggaagcgttttacacaactctcacctgccctgcgtccacgtctgttctcaatttncanggctctgaattgcctagaagaaatctttgtaagaaatcttcacacactatttntgcatcacct

SEQ ID NO: 12239 - DNA, 251 bp, Glycine max; identical to SEQ ID NO: 11768
  Clone ID: 701153572H1

SEQ ID NO: 12240 - DNA, 240 bp, Glycine max
  unsure (1)..(240): unsure at all n locations; Clone ID: 701153573H1
ggcacaagtgagtttgttgatcgagataactagaaacagtgtgatgaaaatgaaggtccttgttttcttcgttgctacaattttggtagcatggcaatgccatgcgtacgatatgttccctctccgaatgaacactggctatggtgcccgtactccggaggtgaaatgcgcaagttggaggcttgctgtggaagnncacaacatctttggctttgagaccattcctgaagagtgcgttga

SEQ ID NO: 12241 - DNA, 240 bp, Glycine max
  Clone ID: 701153574H1
gacatctatgagggactttctttctcccacgctgcatttctggtacatgtacttttgtatatgtttggtttctgctttgactacttcacatgtagaggcaagcactataagtgtgctgatcaaacctgaataatataagtggctcttccattttcactcttgtttagagattgttcaagagaaacaaaccatggtagtgaaggtttacggtccccactgtgcttccacaaagcgggtgct

SEQ ID NO: 12242 - DNA, 256 bp, Glycine max
  Clone ID: 701153577H1
ggacaacaagaagctcactctctctatctcttctctctgtgtgtgtgttatgtgtgaatacacatgaaaatgcagaagttcaaattgcttctagtgctattcttcgctacttgccactcctctttgtccatcacagatggtttgttgccaaatggagacttcgaggttggtccaaaaccatcagagttgaaaggttcaatagtgactacccccaatggcattccacattggacaatctcaggaatggttgaataca

SEQ ID NO: 12243 - DNA, 246 bp, Glycine max
  Clone ID: 701153579H1
ggtggcactcaaacattgtttgttgtaggaagaggaatcttgagaaatggcaggggacagcaagagcaagattctgttcatcggagggactggttacatcggaaaattcatcgtggaagccagcgccaaagctggccacccaactttccttttggtgagggagtccactctctccaaccccgcaaaatcacccctcatcgacaatttcaaaggcctcggtgtcaatcttgttttaggagatctata

SEQ ID NO: 12244 - DNA, 255 bp, Glycine max
  Clone ID: 701153583H1
gaatatattgagaaaccatgtgggggaaaaccggatggacccatttgcataacttgagctctaagattgtctaaaacaattatggtgatagttgaatcatgatagttgggtgcttcctcacttgtctctttttcattttattttatttttctaaaatacggtgtttattttttccccctaaagggaggtgacgtagagtaatgtatcagatgaatatgtttctaccaatagttgaactccacttaatgaataata

SEQ ID NO: 12245 - DNA, 246 bp, Glycine max
  Clone ID: 701153584H1
gtgtccaccaattccacatttgggaggttgtctgtttcttgtcagcagtcgacatactcgttcgtattcttgtggttgaagttgttcatcaggaacaagttgctattcttggacaaagtcattagtgaaagaactcccaataatactttgatgaaaggatgcaaagaaaggtataaatatacattgcatgtacacataagcatactctagtgtttgaagatttgtacctatgaggttgctcataaa

SEQ ID NO: 12246 - DNA, 251 bp, Glycine max
  Clone ID: 701153585H1
ggatgcaaaagttagtagtagtgaagaaaatgaaagtccttgttttctttgttgctatagttctagcagcatggcattgccatggctcagaccatgaccatgaccatggccacacctaccaaattttccctctgagaatgaaaactggccatggtggccactacattccggaggtatcatgccaaagttggaggcttggtgtggaagcacacaacgtcattgactggaaaaccgttcctcaagattgcgag

SEQ ID NO: 12247 - DNA, 244 bp, Glycine max
  Clone ID: 701153586H1
ggcctgcaagtgtgagtgatatttgagcttaaaccctagccgctcttctcttcattcttcactttggaaacaatcataatggcgttctgtaatgcaggttggaaatgtcttgaggcagggtgctgctcgcagcacacatgcccctgttgcgtccatgcttaattacatccgctgcatgtcttcaagcaagcttttcattggaggcctttcatatggagttgatgaccagtctcttaaggatgca

SEQ ID NO: 12248 - DNA, 241 bp, Glycine max
  Clone ID: 701153587H1
atcagtggtgccccccaggataacaacataatgctgtggaatgctgtcatatttggtcctgatgatactccatgggatggaggcacgttcaagttgacactccaatttactgaggactatccaaataaaccaccgactgtacgatttgtgtctcgcatgtttcatccaaatatttatgctgatggaagtatttgtttggatatattacaaaatcagtggagtcctatttatgatgtggctg

SEQ ID NO: 12249 - DNA, 238 bp, Glycine max
  Clone ID: 701153589H1
ggcacaagtgagtttgttgatcgagatagctagaaacagtgtgatgaaaatgaaggtccttgttttcttcgttgctacaattttggtagcatggcaatgccatgcgtacgatatgttccctctccgaatgaacactggctatggtgcccgtactccggaggtgaaatgcgcaagttggaggcttgctgtggaagcacacaacatctttggctttgagaccattcctgaagagtgcgtt

SEQ ID NO: 12250 - DNA, 239 bp, Glycine max
  Clone ID: 701153590H1
gcacaagtgagtttgttgatcgagataactagaaacagtgtgatgaaaatgaaggtccttgttttcttcgttgctacaattttggtagcatggcaatgccatgcgtacgatatgttccctctccgaatgaacactggctatggtgcccgtactccggaggtgaaatgcgcaagttggaggcttgctgtggaagcacacaacatctttggctttgagaccattcctgaagagtgcgttga

SEQ ID NO: 12251 - DNA, 233 bp, Glycine max
  Clone ID: 701153591H1
tacataatgaaatctaatgaagaagggaccttctcaaatggagatctcgtaccatttggaaccgttcaaatcgaaccacattctactgttttaaattacggacaaggattatttgagggcatgaaggcctacagaagagcagatggtgaggtgcagatatttcgaccagaacaaaatgctatgcgcatgcagatgggagcagagaggttgctaatggtggcaccttctgttga

SEQ ID NO: 12252 - DNA, 242 bp, Glycine max
  Clone ID: 701153592H1
gctgctgtgcctgtgaatgtcatatgattgggttgggttgctttttttcaaaactcattcattatttctgttccaagaatcggaaggaccaatgttttttgcattggatgcttttcaccattcaaccaaatttgtactgtaattctgtgtcattaatactttaactaatacggaacttttgctgtagtcctaatctattctttattttggacaatgttgtcttcatcctttaatattcttct

SEQ ID NO: 12253 - DNA, 247 bp, Glycine max
  Clone ID: 701153593H1
ggggtggagttatataatgaaacatcgtttaataaatgggttgaccttggcgaggcaccggcactgccagagagtctcaaattgtacaagaaactgttgtctcttggcatcaagattgtattcataacaggaagaccaccggatcaaaaggctgtaactgctaccaacttaaagcttgctggatatcacacatgggaaaagttaattaccaagaatacatctgaataccatggtaagacagcagtta

SEQ ID NO: 12254 - DNA, 254 bp, Glycine max
  Clone ID: 701153594H1
actgattgcatcattacaaaaataaaagttcagaagatttaaatgttctaaatgctctgaactcaactttattcacatgctctttataaattacaagatgtgcaatgtgaaatgtaatagtaatagaaaggagttttgtagcattattttcaatacacccaagaaaactatcaaaatattgaaataagagctctaagcttttataacaaagaaaataaaaagtcaatttaaacatgaaagtagatcaggaaaat

SEQ ID NO: 12255 - DNA, 255 bp, Glycine max
  unsure (1)..(255): unsure at all n locations; Clone ID: 701153595H1
ggagctggtgttcaaggaggacgggcaggagtacgcgcaggtgctccggatgctggggaacgggcggtgcgaggcgatgtgcatcgacgggacgaagaggctctancacatccgcgggaagatgcacaagaaggtgtggatcgccgccggagacatcatcctggttggactcagggactaccaggacgacaaggctgacgtcatcctcaagtacatgcccgacgaggccaggctcctcaaggcctacggcgagct

SEQ ID NO: 12256 - DNA, 257 bp, Glycine max
  unsure (1)..(257): unsure at all n locations; Clone ID: 701153596H1
ggaactccaaaacacaaacaaaaactcccgttttctctctctgtntttccatggccatctgatcaaacttttcttgattctctctcagtttttgcnattctgantgatgggtatgccctgccgctgttcccacacctcccacatcancgaaatcanccatcaccagcttcttccgccacaagtcttaagacacaacaatttccctcaattattcatcaaccaaccaccttaatagccttttccaatggttccttaaa

SEQ ID NO: 12257 - DNA, 253 bp, Glycine max
  unsure (1)..(253): unsure at all n locations; Clone ID: 701153601H1
ttttagagaccattcccggggtgaagattgtatatagaacaagggagttagaggagcagcaagctaaaagccgaatatggaatgagacatggttggcaaccttcttctacaaaccatgtaattatgagttgtttgtgaagcaatctttgaacatggaaatggctattgtcatggcaagggattctggaatggattggataattnattccgatactgatgagctgatgcatccagcaggaacgcaagagtattc

SEQ ID NO: 12258 - DNA, 246 bp, Glycine max
  unsure (1)..(246): unsure at all n locations; Clone ID: 701153602H1
ctttcatttaatgagctttgactcatgaccaaaacatcgacttttatattttccacatcatagaaagttcttcattgctcataagaatcacatctctgtcctccgttgtgtatgtataatcacccttttgttaggcattaatgttatgctcgcaatttctttttgaataactaaaaaatgtttttttaacatanaataatgattgggctataatagtataaaatattcgttttccttaccataata

SEQ ID NO: 12259 - DNA, 223 bp, Glycine max
  unsure (1)..(223): unsure at all n locations; Clone ID: 701153603H1
tagctagtaanttatgtgaggaaagtcatatnagtctgagttcaagtttggagcaatacaacctaccattttnngtngtagtttggattaggtaactctagaggtatataactggaggtggaacggcctaangtcgaatggctaaaaggagttgaacanatgctaataattgtgcagtaatttttngagtttaatagtcatatnattcgtttctanaaacata

SEQ ID NO: 12260 - DNA, 243 bp, Glycine max
  Clone ID: 701153604H1
gagagaaagagagagaaagatgtcgaagcgtggtcgtggtggttcggcggggaacaagttccgcatgtcgctgggtcttccagtggcggcgacggtgaactgcgccgacaacacgggggcgaagaacctctacatcatttcggtgaaagggatcaaaggccgtttgaaccgtcttccctcggcctgtgttggcgacatggtgatggccaccgtgaagaagggaaaacccgatctgaggaagaa

SEQ ID NO: 12261 - DNA, 243 bp, Glycine max
  Clone ID: 701153605H1
tccctaacctaaccaagtgctttcgttaatcgtttcagttaattcactataggaatggattttcaaatattatatgcaatcatcaagtgcaaagtttgtgtctaatatcttcggaaacgaagtaataatgcgcggttatgaacaaacacaacacaaacagcattcaacatcgatagcacaaatttcgaaagtcaaaattgacgaaaagagaaagaaaaacagatcgatgagtgaataatcaag

SEQ ID NO: 12262 - DNA, 250 bp, Glycine max
  Clone ID: 701153606H1
gggggcgggtgttacttggttgccgtctctgaggcataggaaattgcaatgcttcatcccggcggcaggcagagtgacagtctgaacgggaattctgaggggcaaaggcaaagcgtttaataatggtggccaagcaaattaggagagagctttctcatatgcttccagttagggaagcgtatcaagttgcgcttaactcctgaggatgaccatgctttcctagctccacctcaccgcttcatattttcag

SEQ ID NO: 12263 - DNA, 235 bp, Glycine max
  unsure (1)..(235): unsure at all n locations; Clone ID: 701153607H1
ctttgttgcagttgcagtggaaantgatgagtgacaagcctaaagaggaccaagaagtgaattcaaaacaggttgacttgtgtttgaatctatttgtctgtgtccgtcttcaaatggatgccatatttgctcattttcatgttgggttacctttggtagtttggtttgacatattacatttatcatttggtaggcacagttggggaaatgagaagacatttgttgtatacctaaa

SEQ ID NO: 12264 - DNA, 242 bp, Glycine max
  unsure (1)..(242): unsure at all n locations; Clone ID: 701153608H1
tgccacaacaacagatgccctagcatgtacagccatcactctgatccctaattttattgcacaattgtttgttaggtgcactccaacaccagcaattgcagcaagcaacanacaccttccaaaagatttcttattaaccattaggtanaacccacagaacttgagaagctaaaacttttgaaagagtaagagatagnaagangtanaacattacttcctccccgagtgcaccgacatgtttg

SEQ ID NO: 12265 - DNA, 242 bp, Glycine max
  Clone ID: 701153610H1
ggcagcatcgtagagaaataagggaaaaatggtgtcgctgaaactgcagaagcgcctctccgcaagcgtgctcaagtgcggcagaggaaaggtttggcttgaccccaatgaagtcaacgaaatctccatggccaattctcggcaaaacatcaggaagttggttaaggatgggtttatcatcaggaagccaaccaagattcactcccgctcacgtgctcgtaggatgaaggaggcaaagagga

SEQ ID NO: 12266 - DNA, 241 bp, Glycine max
  Clone ID: 701153611H1
gataccaaaaacaaaacaagccaagtgaaagagagaagaaaagtcaaagacaatgtcagggatcattcacaagattgaggagacccttcatgtgggaggccacaagaaggaggaggagcacaagggtgagcagcaccatggtggagaatacaaaggggagcatcatggtgaacacagtactgaatacaaaggagagcatctgttggtgagcacaagccggagcaccatggaggagaagagc

SEQ ID NO: 12267 - DNA, 241 bp, Glycine max
  Clone ID: 701153612H1
cagcatgaaaagaagagagcagctgtttcaacaaatgacgataaaaaggaaggaacggaagatgatgatgattcatatgaagtgactcttgatgatgactttctcacagctttggaatacggaatgcctccagcttctggaatgggacttggaattgataggctggtgatgcttttgacaaattctcccagcattcgagatgttattcccttcccagtactcaaggtccagcaatagtgat

SEQ ID NO: 12268 - DNA, 238 bp, Glycine max
  Clone ID: 701153613H1
ctgaatgttaagacccaacttcctttcagtagaaatctcaacagaatcacttggtcatttttttcacacagaataattctattgaccaatctctgacaggtggaataaaaaaatagaaatcattcattactcaggccatcctctagaactctaactaacaaaagtacagaaaacaacttcaccttatgggtatcagaaggattggcagtcattgggttacttgacataagcacggcaa

SEQ ID NO: 12269 - DNA, 256 bp, Glycine max
  Clone ID: 701153614H1
ggcaacacaacaaaaaaagacaacccagagagcgcgtcttaataaacgctcttctctgaaaacccccatttcttttcttctttcttcttctctttcgcttcttcgatcttcgatcttcgtcgctgaaaatgagagagtgcatttcaatccacatcggccaggccgggattcaggttggaaacgcctgctgggagctttactgcctcgaacacggcattcagcctgatgggcagatgccaagtgacaagaccgttgg

SEQ ID NO: 12270 - DNA, 244 bp, Glycine max
  Clone ID: 701153616H1
ggcacaagtgagtttgttgatcgagataactagaaacagtgtgatgaaaatgaaggtccttgttttcttcgttgctacaattttggtagcatggcgatgccatgcgtacgatatgttccctctccgaatgaacactggctatggtgcccgtactccggaggtgaaatgcgcaagttggaggcttgctgtggaagcacacaacatctttggctttgagaccattcctgaagagtgcgttgaagca

SEQ ID NO: 12271 - DNA, 250 bp, Glycine max
  unsure (1)..(250): unsure at all n locations; Clone ID: 701153617H1
ggatagagatcaccaacaaaatatttgctttttgttttatttcattgcaaccatgtttggctatgcagcagcaataattgcagcaatcctcttcttccaatacttcttccataggagacgatgttnccaaacaccccattttgacagaataccctatcattggcatgctaccacaattactcttcaatttatggcgtgcccatgattattcaactcaggtgttgcaacgacatggtggcncccgtgagtt

SEQ ID NO: 12272 - DNA, 246 bp, Glycine max
  Clone ID: 701153618H1
gaccacactgaggagggagacagtggaaggaaggaacactcaaatcactgaaccagccatggctaccttctccaaggaacgcgagaactttgtatacgttgccaagttagctgaacaagctgaacgctatgatgaaatggtggaggccatgaagaaggtggcgaactgggacgttgagttgagtgtggaagagaggaacctgttctctgttgggtacaagaatgtggtggggtcacggagagcttc

SEQ ID NO: 12273 - DNA, 78 bp, Glycine max
  unsure (1)..(78): unsure at all n locations; Clone ID: 701153619H1
gcaacaaaaantaaaaaaataaacagcaaataaaacagcttctttctccacaaacctagcgggtctctccacttatat

SEQ ID NO: 12274 - DNA, 243 bp, Glycine max
  Clone ID: 701153620H1
ggaaaacttagtggaggtataaatcgagaaggaataaattattacaacaatctcatccatgaattgcagactaaaggtttaaaaccttttgtgaccctttttcattgggatctcccccaagctttagaaaatgagtataaaggcttcttatccgagtccattatagatgattttggagactatgcgaaattttgtttcgaagaatttggagatagggtgaagcattggattacttttaatgaa

SEQ ID NO: 12275 - DNA, 242 bp, Glycine max
  Clone ID: 701153621H1
tttctattagaatcaccaaattcttttgatgaactaaaccaccctcaaagaaaccattttttcttgacactcaacaattatttgatcaattattcatgactaagattaaacatgatccttttaaaactacatcaggctcatatgagaattatgaacaatttgaagcttaagatgagagtctagatcaatctgaattagaaaactctagttattctgaatcagaaatttcaaatcctagttca

SEQ ID NO: 12276 - DNA, 228 bp, Glycine max
  Clone ID: 701153622H1
ggatggagtgagggttttacgccaaagaagcaccgcgacgctgtctctcccactcttctccgccgccgcatgtgaattagaagaagaggaggcgaatttgttaatttgttgtgagtgtgttcgaaatgggtgaaatctggtggtcccttttgggggcggcgatccccgtggtggtggcagggcaagcgtttcgcgtgaagaagcggcgtgcagaggagcagagactgc

SEQ ID NO: 12277 - DNA, 256 bp, Glycine max
  Clone ID: 701153623H1
aaaaactgatgacaatattccaatgcctacctattttcgtttccttgctttagttgccttcaagatatttgcagcagagcaggtcgatgttgctataatggaggtaggattaggtggaaaatacgatgcaacaaatgtggttcagtcacctattgtatgtggaataacttctcttgggtatgaccacatggagattcttgggaatactctgggagaaattgctggtgagaaggctggcatcttcaagaatcggatt

SEQ ID NO: 12278 - DNA, 184 bp, Glycine max
  Clone ID: 701153624H1
ggggattaggacaaaggaaggtaaagtcgaaaactttccagtaaaaaaaccggtgcgattcgcccattccattcgtgttgcttatcagtattttactattgttttttcaactcacgattcttgagtgatgacaaattgaagaagcactaccattagtcttaaactcttaattaaagagacacac

SEQ ID NO: 12279 - DNA, 253 bp, Glycine max
  Clone ID: 701153625H1
ggatgaagcccaagtaagcaagcaaaacctcactctctcttaagtcttaacgatttagatattttggttctcaaaacttgtttgttacagaaccatgtgggagaaggagctgttgaagaactcattgattccatagcagagtcaaaaacaacaaatgaagagcaattgaataagagtgttgaaaccaaggatgatcggaaagaggaagcacctcaaatagatgagacaataaaagatcgcatcaagaagagtc

SEQ ID NO: 12280 - DNA, 240 bp, Glycine max
  Clone ID: 701153626H1
gggggaaattgatatgatatgcgaaatattatcatgtcatgtgtgggtggcatggcactctcattctcatcttaatttatttaagagacacactcactatatataaagagaaccaatgcacaccaattctcataattccccctcacttttgcctttgcacaacatacacgttctcctatcctagctacttactctctcttccttcaattcctcaactctctagctcttatggaaactcaa

SEQ ID NO: 12281 - DNA, 219 bp, Glycine max
  unsure (1)..(219): unsure at all n locations; Clone ID: 701153627H1
tggtgtganaatgttagatgtgtggatatgaacgtgaattagaatagtgtggctttattgtatgnnccattgtgnaagtcaagtgtggcannnnnnctctnangccaggagcttgctntcctactttccncaanctgtanatcgcnctncaattacnggtggtcngcccctaaanatccctgaganttgacgacnggaggntaacttgtnnagagcttg

SEQ ID NO: 12282 - DNA, 243 bp, Glycine max
  Clone ID: 701153628H1
ggaggaattgaagctaacgggaaatcacctacaaggttcgcgtccaattttgacattttcagcaaattttgaaaaagatgcacattggaaactattaaaggagatgttgttacagatatttgaaacaccaaaggaccacagaaaggccaagcctttccatgatcacgtttttgttttctcaatagttgatgaccatatatggttccggaattatcagatctctgctcatcataatgagtcggg

SEQ ID NO: 12283 - DNA, 241 bp, Glycine max
  unsure (1)..(241): unsure at all n locations; Clone ID: 701153629H1
gggaaaaagtgtgagaacgaaaatggagcattgtaactgctacatgttcacgctgagcnnnnnnnnnnnnnnnnnnnnnnnnncgccttctctctccgacgatctcggattcgattttccggcgaagaagctgataagagaccttaacctttttccttctgaagatgtcaacatcgttcctcgccactccaattctcacgccaacaaaatcgtcgagaaaccgcttaggttcccaaactta

SEQ ID NO: 12284 - DNA, 249 bp, Glycine max
  Clone ID: 701153630H1
tggtaatatggcttagcgtaatcgtttaggtttcttctttcttctagttctgacgcttttgtctgttgctcttcatcatttcggttacctctggttgattttttcgatctgctcccgtaatcgagttgtggtattggttttggtttgtggattgttatgcttcttccgatcttaatcgagtttgtgtagggtttttgccgattgatatgcttttaccggaatgaagatcttgaagaaattgatagtcta

SEQ ID NO: 12285 - DNA, 174 bp, Glycine max
  unsure (1)..(174): unsure at all n locations; Clone ID: 701153631H1
gcgtgancgatgccttcggcgaggctttcagggtcaccaaggctcgacgttgctattgacatgggcaatccatttctcaatctcactgttgatggtttccttaagatcggagctgtcgcagccacgcgatacagctgctgaagatacttatcatattatccgaaacgggaatat

SEQ ID NO: 12286 - DNA, 241 bp, Glycine max
  Clone ID: 701153632H1
ggcatatccaaaggaacaaaaatattattaagatgatcaacattattggagcactcgttctactctttgcatttctcttcctcagttgtgtgtatgcacaagacacaacaaccctgtgcctgcaatcataacttttggtgattctgctgtggatgtagggaacaatgactatcttcccacccttttcaaggctgattaccctccttatgggagggactttgttaaccaccaacctactggg

SEQ ID NO: 12287 - DNA, 243 bp, Glycine max
  unsure (1)..(243): unsure at all n locations; Clone ID: 701153634H1
ttccctttcccaatctttagtattctctctctgctgccgtttggcaattgtaaaatcttcacgtgtccgtacaaatcatatgggatctttatcttggtggataatattgtttacttatgactaaatatttttnaacacaattatttggatcatatggctaacactcctaagttttgtccagtcaatgaatctcaactataagttgaaggacaagcctagcttaacgccatattttttgtttac

SEQ ID NO: 12288 - DNA, 250 bp, Glycine max
  Clone ID: 701153636H1
atagtgggctattttcacgcgaatgggagatctgatgacagtgagcttggtagtgtggcgaagaatattggtgaccacatttgccgctactttccccaagccgccgttctattgttagataacaagaagctcgatgctttgaaaaagagcaaggaccgtagtgccataatgcagctttatgttagggatacatctaagaactggaagttggttcagtcagatgggaacaatcgattttctctcaaagagc

SEQ ID NO: 12289 - DNA, 258 bp, Glycine max
  Clone ID: 701153637H1
actgttggttgggttctgaatgcaatagacaagcaaaattttgtttctcctcccccagttgctattcttcctgctggtacaggaaatgatcttgctagagttctctcctggggaggtggcttgggtccagtggagaggcaagggggtcttactacatttttgcaacacatagaacatgctgctgttacggttcttgaccgttggaaggtaacaattagtaatccacaaggaaagcaacagctgcaaccaacaaagttt

SEQ ID NO: 12290 - DNA, 235 bp, Glycine max
  Clone ID: 701153639H1
gacattaaacttttatttttaaatgataaaacttaaatataatatttaagatattttgacagtgttctttagtcaaaattagaatttaatcttggtaatctttataataagtattttcattaaatatcaagatattttattgaggtataactccaatctactactgatgagaaaacaaaactatatataattccaatcccatttttaatcaattaggagttacatccctttaaaa

SEQ ID NO: 12291 - DNA, 242 bp, Glycine max
  Clone ID: 701153640H1
ggcagcagcaactttaaacgccgaagaaagttcatccaatctccgaagcccttcaccgcattgcaaccatgtcgagaagaaaggttagagagccaaaggaagaaaacgtgactctgggcccagctgttagagatggcgaacatgtctttggcgccgctcgcatctttgcctccttcaatgataccttcattcatgtcactgatctgtccgggagggaaacacttgtccgcatcacaggtgga

SEQ ID NO: 12292 - DNA, 222 bp, Glycine max
  Clone ID: 701153641H1
gttgtgaataaaccatgccccccaaaggaaaaaacaccttctcccactcccatttacaagccacttccacctcccactcccatttacaagccacttcctcctcctactcccatttatgagcctactcctaccgcgccgtcgccaccatattttaaatactttcctcctttccatttcaagaagccgtgtccacctcttcccaagatggaactccaaagttct

SEQ ID NO: 12293 - DNA, 238 bp, Glycine max
  unsure (1)..(238): unsure at all n locations; Clone ID: 701153644H1
gattcggaacaaaacctagtcttgtccctggtgaggaaagagcggcatggaagtagcgaaagaccctaactcacaggcggattcagattcggaactggaactctacaccatcccaagctcttcaagatggttcgcgtgggaagaaattcacgaaacggagagagcagcattcaaggaatacttcgacggaagctcgatatcgcgaanccgaagatatacaaagagtaccgagacttca

SEQ ID NO: 12294 - DNA, 244 bp, Glycine max
  Clone ID: 701153645H1
gttcgggtgtgagagcgagaatcagaagatgaagaaggaagacacagtgaagctgattcagtgccgaaggttttgaatttgtggtcgacaaagaagctgcaatggtttcacagaccatacataacatgcttacttctccagggagtttcgctgagaggcagcacggcgaagttacctttcctgagatcagcaccaccattctcgagaagatttgccagtacttttattggcatctccaattcgc

SEQ ID NO: 12295 - DNA, 228 bp, Glycine max
  unsure (1)..(228): unsure at all n locations; Clone ID: 701153646H1
ggtgttgaattaaaaaaaanggaagactaaaactaaaactaaaaccccactcagtcttccagtgaaaaaagaaaggcagcgatggaagaagacttcgacatccccggcggcgaggaaatggatctcggcgaagacaaggtcggcgaggngcgggagatcggctcccgcggcctcaagaagaagctcctcaaagaaggtcaaggctgggaaacccccgaagtcggcgac

SEQ ID NO: 12296 - DNA, 258 bp, Glycine max
  unsure (1)..(258): unsure at all n locations; Clone ID: 701153647H1
cactaggaaagttttatccccttaaatgggtccacctaacctgagttggattagttagagctccttgcggttncacatatcanagantcncggaacaggaaataagataaaataaaataaattaaaatttagtgcagtgttataggaaactttggttgtcatgtttgatatacaaaatgctataggttttctttgctgcacttgtcaacacttaaaattagaattttttcaaacataatacattcaatgtataacttt

SEQ ID NO: 12297 - DNA, 240 bp, Glycine max
  unsure (1)..(240): unsure at all n locations; Clone ID: 701153648H1
ggatcgtcgatggtagtagtatgttgagggggctgtttgtgtttggtggcacgtgctgcaggagattgacgttggcacgacagtccacgcagaaacggaaacagtggtgggnnnnnnnnnnnnnnnnnnnnngctccaaaaaccttcattgggcaggtctcatggagagtaatgggaactcggtgaaggatgctgagaaacaaatcacccgtgttttgttttgtggaccccgtttccctg

SEQ ID NO: 12298 - DNA, 222 bp, Glycine max
  unsure (1)..(222): unsure at all n locations; Clone ID: 701153649H1
ggtcgcgtgggnaggtcccaaaataaattaggtttgattattaggggagggaaaatggatgaatcaacgaagaaggggtctgtgacctcactcgcctccctcttcccagtagaggaggcgcaaagggcggccaagcgcgtcgaagacaccattgccgacaagcagagcgagctcgaccgcctacgaggtttcgccaccgncaacaacagcctcatcaacctc

SEQ ID NO: 12299 - DNA, 221 bp, Glycine max
  unsure (1)..(221): unsure at all n locations; Clone ID: 701153650H1
gatacgcatcaatttccaaccatgacggactacaaacaagaacaggatatggaaattgaagcattagaagctatacttatggatgagttcaaaganatacattctggtgaaagcggcctaagtacttccaatcgatgcttccaaataaaggttgttgcgcaggatgacgatgcagatgggccaataactaatccagctcaactggctttgatcttttcaca

SEQ ID NO: 12300 - DNA, 109 bp, Glycine max
  Clone ID: 701153651H1
gaagaagttatatttgtagctttgtaatgtatgtgtcacgggttcatatatcttagcaatcccttgtgtcgtttattgaagttgattgaattgataatgacttcacacc

SEQ ID NO: 12301 - DNA, 240 bp, Glycine max
  unsure (1)..(240): unsure at all n locations; Clone ID: 701153653H1
gggcgatcccttgcaaccctagtcttcgaattgccccatatcacaaaccacattaaaaaaagactaccacgtattctnnnnnnnnnnnnnnnnnnnnnnnnnnnnnnntcacagtgccaatggcggatccaatcgcgaaggttctgatcgcgtttgcgctcttagcttccctcttgctgtgttcgcacgcttcctccgacgttcccttcatcgttgctcacaagaaggcctccctcaaca

SEQ ID NO: 12302 - DNA, 238 bp, Glycine max
  Clone ID: 701153654H1
aatccgtagagctacagtgaacacttttggatatattgcaaaagccattggaccacaaggtgtcttggcaaccctattgaataatctcaaggtgcaggagaggcagaaccgtgtttgcacaaccgtagccattgcaattgttgcagaaacatgttcacccttcacagttttaccagcattgatgaacgagtatcgcgtgccggagcttaatgtgcaaaatggtgtgctcaagtccctc

SEQ ID NO: 12303 - DNA, 239 bp, Glycine max
  unsure (1)..(239): unsure at all n locations; Clone ID: 701153655H1
gtgtacaaattcatcttttatttctgtgcatattagaccttaaaaaaactacatattagtaatcgttaaccagaaacaaacaagtttaatttcagtcagtaacctcgtctggatgaagatcanatatagtttgaagagggcctggcttttgatggactacagtgggccactgtctttccaagggaggcatccttcttcgagggttggctcccccataaccattatcctatcagaccagt

SEQ ID NO: 12304 - DNA, 238 bp, Glycine max
  Clone ID: 701153657H1
gattttgaaccagttcaaactgaacggccaggagagttaactgcttactacaaaattgcacgtcattacaagtgggctctagatcaactgttctacaagcataacttcagccgtgtaatcatccttgaagatgacatggaaatagcacctgatttctttgattattttgaagctgcagcgagtctccttgagaaggataaatccattatggctgtttcctcatggaatgacaatggac

SEQ ID NO: 12305 - DNA, 223 bp, Glycine max
  unsure (1)..(223): unsure at all n locations; Clone ID: 701153658H1
ggaagcaaaaaatgaaaacccaaagtgcttctctcctactgtctntttcnctctcttgctatcctttnggctagtggcactgctgcaagtgcaactccaagaagcgcagtgccaagccaccatgtttcaacattcaacagaagcncgtttccttccacttttctctttggtattggttcttctgcttaccaggcagaaggagcagcaagtgtagatgggagag

SEQ ID NO: 12306 - DNA, 237 bp, Glycine max
  Clone ID: 701153659H1
ggaaaccaaattttcttccttcgttggcatctgtgatctcttctcctcacaatgagcagatcagggcaaccaccggatttgaagaagtacatggacaagaagcttcagatcaagctgaatgcaaatcgcatggttgttggtactctccgtggcttcgaccagtttatgaatttagttgttgacaacactgtggaagtgaatggcaatgagaaagatgacatagggatggtggtaatc

SEQ ID NO: 12307 - DNA, 185 bp, Glycine max
  unsure (1)..(185): unsure at all n locations; Clone ID: 701153660H1
aagaagatggctctgcaactatgggagacattgaaggaggccatatntgcctacacggggctctccccgcccaccttcttcacccttctggccctgatcctagccctatactacgtcgtttctgggctcttcccctcttccgaccaccgccacaacaccgcctcgcgcgacttggagccccagat

SEQ ID NO: 12308 - DNA, 243 bp, Glycine max
  Clone ID: 701153661H1
ggtagctgttggatgagatgatagacaatggcttccccttaactacagaacctagtatcctgcgagaaatgattactccgccgaatatggttgacaaagccttgagcatcgtcactggtagcagttcaaatgtgagtgatacccttcctggggctgcagcatcttgtgttccctggagaacggcagagccaaagtactccaacaatgaagtctatgtagaccttgttgaagaaatggatgcaa

SEQ ID NO: 12309 - DNA, 247 bp, Glycine max
  Clone ID: 701153662H1
ctaatacttcatctaccgatctctatattctggatgaaggtttgcttttgatccggcttgggagttttgatcgacttgattttaactccaacttttaagaaatgtcattccgcagcatagttcgtgatgtaagggatagtttcgggagcttatctaggcgtagttttgatgtcagacttactgggcatcatagaggaaaatctcaaggatcagtgcaggatttgcatgaccagcctctagtaattca

SEQ ID NO: 12310 - DNA, 238 bp, Glycine max
  Clone ID: 701153663H1
ggagggttggttcatttgatctgcgactgagagaagagaagagaattgtgatggggggaggacagggtcacggcacaacctacaaaggtgttaccattcatcagccaaagcgctggcacactatcaccggcaagggtttgtgcgcggtcatgtggttttgggtattctacagggcaaagcaagatggtcctgttgtattgggctggagacatccttgggagggtcaccatgatgatca

SEQ ID NO: 12311 - DNA, 238 bp, Glycine max
  Clone ID: 701153664H1
ggtgttaagaaatttaagtgaggagctagagaatgatgatgaagtctgctatgtgtgcagtggtggttgtagcacttcttcttctggcggaggtggggcccatggctgaggctgtgacatgcaccccaacagagttgagtccgtgtcttccagcaatcacttccggtgctaaaccttccaatgcttgttgcacgaagctgaagcagcaaaaaccatgcttatgtggctacctcaaaaa

SEQ ID NO: 12312 - DNA, 216 bp, Glycine max
  Clone ID: 701153666H1
ggactagagacaagggcggacgaaggctgttttgtgcatcaacaaaaccagctcctggacttgcttgcatactctctctgttctttctattcaaagatctgtaaatttatatattatcttttatcatatatagtattagtatagtccacttgtttaaaccacctgtgttgcatattctgaatcctatcatcttgtggctttgatgtctagagcatg

SEQ ID NO: 12313 - DNA, 249 bp, Glycine max
  Clone ID: 701153667H1
gagagatgtggatattaaaaattatatcaaagttgagaaggtcccaggtgggcagctagaagattcaagagttctcaagggagttatgataaacaaagatgtggttgcccctggcaaaatgaggagaaagattgttaatccacgtatcattcttctagtcagtccccttgagtataaaaagggtgaaaaccaaacaaatgctgaactgctcaaagaagaagactggagtctcttattgaagatggaaga

SEQ ID NO: 12314 - DNA, 237 bp, Glycine max
  Clone ID: 701153668H1
gaccacattccaaaacacaaacacatacattgtagtatcacttttgtctcggaatttgttcttttgagttatggcaagcttaaaggttgcatgtgtggttttgatgtgcatggctgtgatgagtgcaccaatgatggtgcaagccgtgtcatgcaatgatgtttctgtgaacctagcaccgtgcctatcttacctgatgcagggtggagatgttccagaatcgtgctgtagcggagt

SEQ ID NO: 12315 - DNA, 241 bp, Glycine max
  Clone ID: 701153669H1
gacaacactcatagtagagtaaccaaaaggagagtgcaataactcgttgtacattcctagtgtgtgggagagacatggctaagatgtgtgttttggtgttggttcttgctctggctgtggccacaagtgccagaaacgttcccaaccccaaggatgctggtcttaaggaccagaagaacttcatcagctatggtggagctggtggttattccgggattgggaacaatggactgccttttgg

SEQ ID NO: 12316 - DNA, 238 bp, Glycine max
  Clone ID: 701153670H1
ttggggttccacttttggcattctccaatttaagattcgatattccagatgaacaatcccaggaaaccgtgggcagtaactcatcaggttcaagatcggctattgcttcccaatctgtaataaaaattcacaatatcattcacattgcacgagtacaataactaaggccattgatataatgaatacaattactcagaagacgtctttcaatcaaagcaatggaattacaatatccatt

SEQ ID NO: 12317 - DNA, 238 bp, Glycine max
  unsure (1)..(238): unsure at all n locations; Clone ID: 701153671H1
ggagaagaaaaaggcaaatttcttgtcttctgaggactttgagcctcctcttatcccttccaagacaatccctgatncctgatgataagaaacctgaggactgggacgaaagagccaaaatcccggacccaagtgctgtgaagccagatgactgggatgaggatgcacccacggaaattttagatgaagangcagagaaacctgaaggatggttggatgacgagccagaggaaattga

SEQ ID NO: 12318 - DNA, 237 bp, Glycine max
  Clone ID: 701153672H1
cctctatgttgatgatttactcatcacaggaaacaacaaggtagagattgacaagattaagcaactgctgaagaatcaatttgaaatgactgacttaggatctctctcatacttccttggaattgagttcaaggaaactgaagctgcaattgtgatgcatcaaagcaaatatgctacagacctgttgaagaagtttcgaatgactaactgtaatgcagcagccaccccagctgaaac

SEQ ID NO: 12319 - DNA, 253 bp, Glycine max
  Clone ID: 701153673H1
gagggagtgaggatccaaatccaagtacggttgggttggagagaaaatgcgtccctgctgaaaacaccaaaccctaaaacgcgaaaagggttctaagaatttgcgaaggaaagagctagcggagatggagattcactacagtaacagctatttcgagaggcgccccatcctcaagtccaaggctgccgctgtcaaatgggtcaaagaatgggttccccaagatcttgtggcaacaggagggaagtgcatgatc

SEQ ID NO: 12320 - DNA, 235 bp, Glycine max
  unsure (1)..(235): unsure at all n locations; Clone ID: 701153675H1
ggtactaacacaattcacacccaccattggattncaccaattctccaaccttcttctccactgttccgtttctctccccaacggagagtcttttgttttttgtggcgagtttgttgcacgtttaagaagcaatggcacgcaagaagatcagagagtatgactccaagaggttgttgaaggagcactttaagagaatctctggccaggagttgcccatcaagtctgcacaggttac

SEQ ID NO: 12321 - DNA, 248 bp, Glycine max
  Clone ID: 701153676H1
atcctatttcacatgatggtaataaaatatatatataaactcaattcagcttcaagtgggctggattgggctacacgactctagaacgttaaagcaattctaggcttttccctctataggtcagatggtacagattttaatattttataaggaaattgtagtaaagatgtctttaagttttaagccatgttccaaagattatgcaccaagatgtacatagacaaattggtaaaaacataaggaaataa

SEQ ID NO: 12322 - DNA, 237 bp, Glycine max
  Clone ID: 701153677H1
gattgtcaacagaaagcattagaagtgacttaagttctctaaggaatactgaaacatcaaatttaactacgaccactttggttcaggatgcttcacataaccttgctgggagccatgaagtctcaagaaattcagatttatttttgacttttccattggatgagcggcacaagttgaacaaaattcttaatacccagaaacagagattggtcactgcaaaagctgatgttgaagatc

SEQ ID NO: 12323 - DNA, 223 bp, Glycine max
  unsure (1)..(223): unsure at all n locations; Clone ID: 701153679H1
acgcggtagtttgncaganacacgtatcttcatcaatanatcgcagaagcagtttcncgtgcatctcatcgtcttccaaaatgaacgacgcagatgtctcgaagcaaatccagcagatggtgcgtttcatccgccaggaagctgaggagaaagccaacgagatctctgtatctgccgaagaggaattcaatatcgagaagctgcagttggttgaagccgaaaa

SEQ ID NO: 12324 - DNA, 238 bp, Glycine max
  Clone ID: 701153680H1
ggattcttctttgtgggtcttacgttgatgttggtcggtgtggcaaatgctatggctaactcttccaacaaatttgatcaactcttccaaccaagttgggcttttgaccactttattcatgaaagggatcttctcaaactcaaacttgacaaattttccggggctggttttacttccaagagcaagtatatgtttgggaaagttaccatccagcttaagctcgtggaaggtgactctg

SEQ ID NO: 12325 - DNA, 239 bp, Glycine max
  Clone ID: 701153681H1
tagccgataacttatagataacgttacagataacattagcttaaagataattgtaccttgtagataatgtgtagtcctgtagataattgaatatatatcaagagataaagggatgacaacatattcaaataataaaagttagagataacttgtggtttggggagttcaactgcgaagggttggacgtctgtgctcctacaccaggattgacatggaggattgacgtatgtcttggagtg

SEQ ID NO: 12326 - DNA, 256 bp, Glycine max
  unsure (1)..(256): unsure at all n locations; Clone ID: 701153682H1
ggttctagtgtgtgattgtttgttgttgtaactcgttcttcttcttntgttgttctgtgtttgtgtttgttttttctctcacctgaaaatgtcttgctgcggtggtaactgtggttgcggaagcttcctgcaagtgcggcaacggctgcggaggctgcaagatgtcacccagacttgaggctacactgagtcaaccaccaccgagaccttggtcatgggagtggcacctgttaaggctcaatttgagggtgctgaa

SEQ ID NO: 12327 - DNA, 238 bp, Glycine max
  Clone ID: 701153683H1
ggagttgagaatggaaggagggaaacgaggcacgattctggtcaccaacgacgacggtatcgatgctcctggcttaagagcattggttcactccctcgtcaacgccaaccttttcaacgttctagtgtgcgctcctgatagcgagaaatcagctgttagccacagcatcacttggctccatccagtagctgttaagcaagtacagatcgagggaaccaccgcatttgctgtttctggg

SEQ ID NO: 12328 - DNA, 242 bp, Glycine max
  unsure (1)..(242): unsure at all n locations; Clone ID: 701153684H1
gatatataaactaacgtattgttttttaggtaattttgaggagaaaganatatatganaaagaagtgagagagaatgaacttttttgttgtataggacagaggaggggagagaaacggtacaagtttagtgaaactcgtattaaaaaaatctctccacaaatgaccaaaattacatgggaggnagacccgttaaaaaagatgaaatgatgaatctaacctttttgttttggactaagcttat

SEQ ID NO: 12329 - DNA, 216 bp, Glycine max
  Clone ID: 701153685H1
ggagtgttagtgtacctcaagccaccgtaccgtgttgcctctctgcaatctacagccaaaatgcctttcaagaggtacgttgagatcgggagggttgcccaaatcaactacggcaaggaatatggcaggctcgtcgtcattgtcgacgtcattgatcagaacagagctcttgtcgatgcccctgatatggtgaggtcccaagtcaatttcaaaagg

SEQ ID NO: 12330 - DNA, 237 bp, Glycine max
  Clone ID: 701153686H1
tcttggttttgtttattaactttcgatctctttaaagacaactttacaacactagtgatcgattaagattgaaatttacaaagaaaacaagatcaccgatgatagatggagatgatgaatgtgcacaaaacacaagggggacccctaagggtgcatagatcacattcaaatatcaaaagcaaaactaaccaacggtcacttgaagaacaccgaacaaggaacgatgtaggcttcgat

SEQ ID NO: 12331 - DNA, 174 bp, Glycine max
  unsure (1)..(174): unsure at all n locations; Clone ID: 701153687H1
ggattgggtttggttctcagtgtacncaaaaacagaggnagnaggaggnagaagtanaagnanattagagagagtgagtgngtgagcgagggntaattggcgagttagggtttngaattgacncactgagttttgcattgtgtngnggttnnncnnttcgcnggagaaanatcg

SEQ ID NO: 12332 - DNA, 234 bp, Glycine max
  Clone ID: 701153688H1
ggagtcgcgtctgataataaaaatacacagtgagctctcgcttctagccctagggcgctgctcccgattttctctcttcggattgagtgaattgtgaaatgggttggaaagctgctgagaaactcattaggcactggaaagttgtcagaggggataatgttatgataataaggggcaaagataagggcgagactgggactattaagcgtgtcattcgctctcagaatcgtgtca

SEQ ID NO: 12333 - DNA, 234 bp, Glycine max
  Clone ID: 701153689H1
ggcctgcagagttgattgccaagtttttggatgagaaacttcgtgcaggtaacaaaggcacttcagaagaagagttggagggtacacttgataaagtcctggttttattcaggttcattcagggcaaggatgtgtttgaggcattttataagaaagatcttgcaaaaagactactgttaggaaagagtgcttctattgatgcagagaaatctatgatctccaagttgaagaccg

SEQ ID NO: 12334 - DNA, 232 bp, Glycine max
  Clone ID: 701153690H1
gagagaagtatcaagaaaagcaaaagggaaggattgggatcctcttggattttgtttggtatgagcctcttacaagatcaaaggccgacaatttagcagctcaaagagccagagactttcatgttggatggttcattcatccccttgtttatggagagtatccaacaaccattcaaaatattgttgggaatagactccccaaattcactagtgaagaagttaaaatcgtgag

SEQ ID NO: 12335 - DNA, 123 bp, Glycine max
  Clone ID: 701153691H1
gccttgtagtcgctgccggggttgaggcgaggaggccctacgccgttgtccgagatgaatgcttcggttattgctggcatggttgcatattcccctcatcatactgcaattggtggtgtgata

SEQ ID NO: 12336 - DNA, 226 bp, Glycine max
  unsure (1)..(226): unsure at all n locations; Clone ID: 701153692H1
cttgacttaaattttccttttctnncattttatnatngttgtttgagataatcctncactaaatttttnacttaactaatgataaatttntttnatagataagatatgagggatgntcagaaatcangaaatttcataaaaatatacntcaantanttacaatngatatacancatnnaaaaataaagtngaattgaatgataattttgatgacaccattcaaagg

SEQ ID NO: 12337 - DNA, 234 bp, Glycine max
  unsure (1)..(234): unsure at all n locations; Clone ID: 701153693H1
ggtactattgtagtgttccagagtgatgatggaagtgatgatctgtgagaatttccggtattcaccactctccatcttatcttcttctccttcacctcgttgccatctctctgttccatcttcttctttgaggattaannnnnnnnnnnnnnnnnnnnnnnnnnnnnntgtgtcttgttctctcatggagaatcaggagacccaacgcagcaaattcaggactttccgttcgtt

SEQ ID NO: 12338 - DNA, 100 bp, Glycine max
  unsure (1)..(100): unsure at all n locations; Clone ID: 701153694H1
cgccttcaaagggaagccagctggattcaaacaaggangnnatgtcngntcnagntatangggtgcttgtantctcctcacagnntctngttttattttc

SEQ ID NO: 12339 - DNA, 160 bp, Glycine max
  unsure (1)..(160): unsure at all n locations; Clone ID: 701153696H1
gataanaataatacctttacantntttctcctttacattctgctacnaaccncaatnattncantnncntaaacctctcagacttcatntgtcagctttgagnccaatctgtgatggtgattctccgnagccggcanccntccgctncttncttntgaca

SEQ ID NO: 12340 - DNA, 263 bp, Glycine max
  Clone ID: 701153701H1
gaacacaaaacacaacaaaaatttacaagcaactatggcttcaagcaatggccgaaaagcaactgagatcttccaaggacaagctatcttatacagatgcatgtttgccttcctagattccatgtgtctcaaatcgattattgagcttggcataccagacataatccacaagcatggccaacccattactctttctgagttggtgtcaatctgaatgttccaccagctagagttggtccacgtgcaaagtctcatgcgctact

SEQ ID NO: 12341 - DNA, 251 bp, Glycine max
  unsure (1)..(251): unsure at all n locations; Clone ID: 701153703H1
gaccacattccaaaacacaaacacatacattgtagtatcacttttgtctcggaatttgttcttttgagttatggcaagcttaaaggttgcatgtgtggttttgatgtgcatggctgtgatgagtgcaccaatgatggtgcaagccgtgtcatgcaatgatgtttctgtgaacctagcaccgtgcctatcttacctgnngcagggtggagatgttccagaatcgtgctgtagcggagtgaggaacattctgg

SEQ ID NO: 12342 - DNA, 247 bp, Glycine max
  Clone ID: 701153704H1
gattcaccaaagaattggaaagcttaaggatgctgctgctgatgctttgaaagaacatgggtcctctacaagagcactttcccaatttggcactgaattggagaactgaatttcaagatggccattcaagtaaattgattggttttcttaaatataagtagaataaaaagctaggaagcatcatcaaaagaaaaatattggttgaacttgctaagggtaatattttagttatgcacgaataagttgg

SEQ ID NO: 12343 - DNA, 251 bp, Glycine max
  Clone ID: 701153705H1
gagagaaaatagaaaaggtgaaaaatcgaaggtcggagatgcaaatggaagctagggttggtatggcggtggatggtggtggtgtacggaagttggtgcagccgccgccgaagcagattggaactgtttctcagcttctcgccggaggagtcgccggcgcgttcagcaaaacctgtacggcgcctcttgcgagacttaccatcctctttcagattcagggaatgcattccaatgttgcagctttgagaaaa

SEQ ID NO: 12344 - DNA, 244 bp, Glycine max
  unsure (1)..(244): unsure at all n locations; Clone ID: 701153706H1
gtcatgagacaccaacaactagttgaattggcctggggcctagcaaatagcaagaaaaagttcatgtgggtgattaggcctgatttagttgagggtgaggcctcaattttgccaccagaaattgtagaagaaaccaaagacagaggcctanntggtgggttggtgtcctcaagagcaagttttgaagcacccagcagtggctgggtttttgactcactgtggttggaattccacgcttgaaagc

SEQ ID NO: 12345 - DNA, 247 bp, Glycine max
  Clone ID: 701153707H1
atgtatgatcctgttatcattgcttctgggcagacttatgaaagggtttgtatagagaaatggttcagtgatgggcacaacaactgcccaaagacccagcagaaactttcacatctttgtttgactcctaattatcgtgttaagggccttgtttctagttggtgtgaacaaaatggagttcctattcctgaaggccctcctgaatctcttgatcttaactactggggattggtattatcagagtctg

SEQ ID NO: 12346 - DNA, 259 bp, Glycine max
  Clone ID: 701153708H1
agagatggaaaccttagggaagatcaagcacagaaatcttgtccctttgttggggtactgcaaagtaggggaagagaggctccttgtgtatgagtacatggagtatggaagcctagaagagatgcttcatgggagaatcaagacgcgtgatcgacgaattttgacatgggaagaaaggaagaagattgcaagaggtgctgctaaaggactttgtttcctgcaccacaattgcatccctcacatcatacacagagacatg

SEQ ID NO: 12347 - DNA, 260 bp, Glycine max
  unsure (1)..(260): unsure at all n locations; Clone ID: 701153709H1
ggacgtcgtggtgaatgaattattcgaaacctttcatcttccataatcccgcaaggtaaacgacggtgacgattggtggntggcgccgtacgcctcatcccatccatcgccatcggcaccttccttaaacgacatcgcgtccatcaccccttttctcttcctcacagtcncagcagtggtagcttcccaaaaaagagtgccaatggcatcttcttcagactcatgggtgaaggaatataatgaagcactgaaacttgctg

SEQ ID NO: 12348 - DNA, 199 bp, Glycine max
  unsure (1)..(199): unsure at all n locations; Clone ID: 701153710H1
atccataaaattncttgaatctgttcaaggtccaatgccttaatggcctttttttacttatatcagtttaaatgaaccttttaaaagtctaaaatcaaccctacgcgtaactttattgctttcaaagaactacataggtctgagttcctcatcgcaattgaggatatgtaggagcaagagccacactcttgtcgacctc

SEQ ID NO: 12349 - DNA, 242 bp, Glycine max
  Clone ID: 701153711H1
gataaccagagagtgcatttatcctttagcaaaagaaaaaaagaaaaaaaagagtgcatcagattaattcagaagaatgggtgaagaggtgaaaagcttggttgttgaagaggaaatgggggtggtggaaagcaaagaatggtacttggtatcttatgctccacacggtgttccaaccaccgatcatcttaaactccgcaagttcgtctatcaattgcacctgaatcaatccctgacgccca

SEQ ID NO: 12350 - DNA, 245 bp, Glycine max
  Clone ID: 701153712H1
gacccaacaacaacttaacaactcctccaaccctccgaggaggctttgctcaatttgacaagatgggtaatcgttttatttgcatgacgaagaaggagtccaaagatgttggatcgagaggtagcaagagaatgggtagatcacagaggaagcttgtgacagtgagtgaggaagagctgcatcttcaggcactttctatggcgcttcaacagcatcaattgtctcagaggtttgaaggctccatg

SEQ ID NO: 12351 - DNA, 244 bp, Glycine max
  Clone ID: 701153713H1
aagataccaaataactaacctttaagaaggcttcaaaatcaatgtcattggtaaaatcagtgcctgattcacccaagatacccctaatctcatcctcactgtacatatctctgaatgcgtttagcttcaccatcaaaggcggcaaatctccaaatgtaactttaccattctgattctttaaagagacaaactacaacaccagatagaagggccatataaggtaaaaaaaaagagcatgaaagac

SEQ ID NO: 12352 - DNA, 247 bp, Glycine max
  Clone ID: 701153714H1
gactgttcctcctactttccaagcttcctggcacactttgataagttttttgtgcagctccaatggcaacctcttcaaatcacttcatcattgaggaacttgcctgcatttgaaaggtttcaaccttcaacgcttcgatttccttctgctgggcacgtcagaattgggacactgacacaaacctcgtttccctctttcgttgtcaaagccgccactgttgtcgcccccaagcacaccactgttaagc

SEQ ID NO: 12353 - DNA, 250 bp, Glycine max
  Clone ID: 701153716H1
gataccttaatatttcaaatatccccagcagagagtaacctctcaatcctagcttcaattatattgattttttcacatttctaaatccacctctaccatatatatctccctctaattaaacctctctatccatatctaaaatttcaaaaagatctcaattaattagatttccctctctctttctctctctaactatattgcaaacctttccctctgctttcaaaatcagcaaattcatgggtcttagaga

SEQ ID NO: 12354 - DNA, 258 bp, Glycine max
  Clone ID: 701153718H1
ggaagaagaagagtgaaacgcaacgcaacgcaacgctagcagagcagtgtcaaacgaacgacggtttcgttgaaccttgcagaatttgcctttcatctagagattgttgattaattaaaccccaagacttcttcactccaactaccacatctgtttcaaaatcctctggatgaaaaatggatgatggccgccaacacgaaaatggcaggcataagatggaatactatagaggagcacattccctgtggaatactgatt

SEQ ID NO: 12355 - DNA, 239 bp, Glycine max
  unsure (1)..(239): unsure at all n locations; Clone ID: 701153719H1
ggaagagtatgcaaagaaagggagcnacagaattgaccacactccaacattaaagtttcttgacaaggcatgtgtgaaaacagattcgaacactagtccatggacgctatgcactgttactcaagtagaggagaccaaacaaatgataagaatgattccgatcttggttgctacatttgtgcctagtacaatgatggctcagataaatatncnttttgtgaagcaaggtactactcttg

SEQ ID NO: 12356 - DNA, 243 bp, Glycine max
  unsure (1)..(243): unsure at all n locations; Clone ID: 701153721H1
ggcacaagtgagtttgttgatcgagataactagaaacagtgtgatgaaaatgaaggtccttgttttcttcgttgctacaattttngtagcatggcaatgccatgcgtacgatatgttccctctccgaatgaacactggctatggtgcccntactccggaggtgaaatgcgcaagttggaggcttgctgtggaagcacacaacatctttggctttgagaccattcctgaagagtgcgttgaagc

SEQ ID NO: 12357 - DNA, 222 bp, Glycine max
  Clone ID: 701153722H1
ggaatatgatcataattcagcaatgttcaagttggaggttagtgtcactaggttgacaagggaatgattgttactagcgtaacagtttctgaaattggattcgattcctacaaccctctttcgttctcaagttgataccatttactattttgaatcaaatgtatgaaaagtgtactttcaaacatatccatattcattagtaatcaagcgtttaggtctgat

SEQ ID NO: 12358 - DNA, 247 bp, Glycine max
  Clone ID: 701153723H1
gactactgattagtttctcactgcttaactatactaacttcaggcataatcaattgaattgtgatgtaagaaaattcaattccttccttctaggacatccaatgatataagaaagcaacattaattacaccgcatgaaaatcaaccttcttataagaagaagcgtatactacatacaattacgtcattgtgaggtatttcagcacttatagtaaccttcttctttaatttgtttatttaattactta

SEQ ID NO: 12359 - DNA, 242 bp, Glycine max
  unsure (1)..(242): unsure at all n locations; Clone ID: 701153724H1
ggtgagggacatgaaccacacactcagagagttccatnaangnaggantnggnncaaagcccatcttcctgctcttactagaaccttcccaatcaanttnctctaattagggtttatntnnggtttaattactcatcccaattccccaaaccccaatcctagtttctncttctcaatacccaaatggttcgctcccatggcgtcaccctcattaatcgccttgctcgtcgatctntctgtca

SEQ ID NO: 12360 - DNA, 248 bp, Glycine max
  Clone ID: 701153725H1
ggggttttgaatgtttgagcaggttgatgctgtacattctgctttgagtgccatgggattccaggacgtggagattgtggttgctgagactggatggccctcacgtggtgacagcaacgaattgggacccagtgttgaaaatgcaaaggcctataacgggaacctgatttctcatcttagatcattggttgggacacctttgatgcctgggaagtctgtggacacttacattttcgcactctatgatg

SEQ ID NO: 12361 - DNA, 246 bp, Glycine max
  Clone ID: 701153726H1
agggtaaagagtatgtgtttgttgccaattccggataacttgggagctatagttgacttgaaaatcttgaatcatttgatccagaacaagaatgaatactgtatggaggtgactcccaaaacattggctgatgtaaagggtggcactttgatttcttacgaaggaagggttcagctcctggaaattgcacaagtccccgatgaacatgtcaatgagttcaagtcaatagagaagttcaaaattttc

SEQ ID NO: 12362 - DNA, 247 bp, Glycine max
  Clone ID: 701153728H1
gcagaattggtgtctttatgctcagagtttcttaacggtggcacagacacaacagcaacagcggttgagtggggcatagcacagctcatagcgaaccctaacgttcagacaaagctgtacgaggaaataaagagaacggtgggagagaagaaggtggatgaaaaggacgttgagaaaatgccatacctacacgctgtggtgaaggagcttctaagaaagcaccctccaacacactttgtgctaacac

SEQ ID NO: 12363 - DNA, 247 bp, Glycine max
  Clone ID: 701153729H1
ggaagcggagaagaagctgagcgaattgcaatatgaaattgaaagcggttccatggtggcataattggttagtagcatggtggtactagtggccaaaagcaagaagcagactcaggattctgaatccactcctccaataatcacatccaacgtcaaacaaaacctccgcttcctaaagctatggaaggttgcagctttaaaggaggatggttgccccaaagtctgggtagtcacttctgatcactgt

SEQ ID NO: 12364 - DNA, 222 bp, Glycine max
  unsure (1)..(222): unsure at all n locations; Clone ID: 701153730H1
taatggcaatggcaacaatgggagagagtccacnaagcccagaagcgaagttggggatgcgagtggaggatctttgggacgttcaggagccacagttgagtcccactgagaagctcaacgcttgttttgaaagcatccctgtctctgcttttcctttggatccttcaaacacagaaattgagnttaaatcagacgcgaccctagcagatgctgttaagatat

SEQ ID NO: 12365 - DNA, 224 bp, Glycine max
  Clone ID: 701153731H1
ggcatcaattccaaaatatactcatcaattataagcatgggtttgtggaacacaacgaatgcagtgtcttgccgctttcacaagtttggtgatgaccaaaagaatctggtcttccaaggtgatgccacgtcttcttccaggggcatagaactcacaaagttagacggtggaggaaaaccagtgggtggcagtgtggggagagtgttatactcttctccagtgca

SEQ ID NO: 12366 - DNA, 256 bp, Glycine max
  Clone ID: 701153732H1
gggcatcaattcaaaatatatcatcaattataagcatgggtttgtggaacacaacgaatgcagtgtcttgccgctttcacaagtttggtgatgaccaaaagaatctggtcttccaaggtgatgccacgtcttcttccaggggcatagaactcacaaagttagacggtggaggaaaaccagtgggtggcagtgtggggagagtgttatactcttctccagtgcacctttgggaaagctctacagtggtcgcaagctt

SEQ ID NO: 12367 - DNA, 260 bp, Glycine max
  unsure (1)..(260): unsure at all n locations; Clone ID: 701153733H1
ggaagaaggttggttgattggtcccattgattccgaagagaaaagaaaagatgtttgagccacaacagctatacactcgcgcgaagaccgaggaattcgacctcgaatcaggagaaaccctctacccagggctgagcgtcggcgagaaccagctccgatggggtttcatccgcaagtctacggcatctctccgcgcagatcgtcctcaccaccctcgtctctgngaccacgttttctatactccatcatgactcctcaag

SEQ ID NO: 12368 - DNA, 236 bp, Glycine max
  unsure (1)..(236): unsure at all n locations; Clone ID: 701153736H1
acttctcaataagatgnatgctcggagccttgctatggaaatggcacctgttattatgtggcaaaaggaacggagacctgaattttatcatcaatattggaatcaggtgtcaaaaagtctttccaataagactgtggatccaacacctggctcatatactgcctgggacatgcttgctgatggtggtgaagccacagatgcatcatctcctattccttggatgacggcacaccagt

SEQ ID NO: 12369 - DNA, 247 bp, Glycine max
  Clone ID: 701153737H1
ggtgagtgaaaatggcggtacccttgctctccaagaagatcgtgaagaagcgcgtcaagaagtttatacgcccccagagtgatcgcaagatctccgtcaagccaagctggcgcagacccaagggtattgattctcgtgtcaggagaaagttcaaaggatgcactttgatgcccaacattggttatggctcagacaagaaaacccgccattatctaccaaatggtttcaagaaatttgtcgtgcacaa

SEQ ID NO: 12370 - DNA, 236 bp, Glycine max
  unsure (1)..(236): unsure at all n locations; Clone ID: 701153738H1
acttctcaataagatggatgctcggagccttgctatggaaatggcacctgttattatgtggcaaaaggaacggagacctgaattttatcatcaatattggaatcaggtgtcaaaaagtctttccaataagactgtggatccnacacctggctcatatactgcctgggacatgcttgctgatggtggtgaagccacagatgcatcatctcctattcctttggatgacggcacaccag

SEQ ID NO: 12371 - DNA, 226 bp, Glycine max
  unsure (1)..(226): unsure at all n locations; Clone ID: 701153739H1
catcattccaaaaaccacagtacctnctctcaatttcaatgctcctcgcttgcattcctctcagaagaaatcaccgggaagtcccagcaatagtacgggatctattgatgcggaaatggggtcaatgagtttgaccggaggagaagttaaagagcagcattcttcttcacaaggccccacgcggaggaatcttggcagaaagcacaccacactagtagtaggaaac

SEQ ID NO: 12372 - DNA, 222 bp, Glycine max
  Clone ID: 701153740H1
aaccctaggtaagaagaaaagatgccggctggtcatggtttgagatcccgcaccagagattccttctctcgtcctttcaggaagaagggaaccatcgccctcaccacatacctgagaacctaccacgtcggcgactatgttgacgtcaaggttaacggtgccgttcacaagggaatgccccacaaattctaccatggccgcaccggacgcgtctggaatgtc

SEQ ID NO: 12373 - DNA, 261 bp, Glycine max
  unsure (1)..(261): unsure at all n locations; Clone ID: 701153741H1
ggacgtcgtggtgaatgaattattcgaaacctttcatcttccataatcccgcaaggtaaacgacggtgacgattgngggtggcgccgtacgcctcatcccatccatcgccatcggcaccttccttaaacgacatcgcgtccatcaccccttttctcttcctcacagtcncagcagtggtagcttcccaaaaaagagtgccaatggcatcttcttcagactcatgggtgaaggaatataatgaagcactgaaacttgctgat

SEQ ID NO: 12374 - DNA, 257 bp, Glycine max
  Clone ID: 701153742H1
ggcacaagtgagtttgttgatcgagataactagaaacagtgtgatgaaaatgaaggtccttgttttcttcgttgctacaattttggtagcatggcaatgccatgcgtacgatatgttccctctccgaatgaacactggctatggtgcccgtactccggaggtgaaatgcgcaagttggaggcttgctgtggaagcacacaacatctttggctttgagaccattcctgaagagtgcgttgaagcaacaaaggaataca

SEQ ID NO: 12375 - DNA, 232 bp, Glycine max
  unsure (1)..(232): unsure at all n locations; Clone ID: 701153744H1
ggacacaccgtangttctattcttaactcaacttctgctacccactctcttcttccaagtccaaccacgcttttctctacagtcatgggcaaggtcaagatcggaatcaacggatttggaagaattggccgtttggttgccagagtcgctctgcaaagagacgatgtggagctcgttgccgttaacgaccctttcattaccaccgattacatgacatacatgtttaaatacg

SEQ ID NO: 12376 - DNA, 238 bp, Glycine max
  Clone ID: 701153745H1
ccatgttgggagccttggactgtgttttccctgaactcttgtctcgcaacggagtcaagtttggtgaggccgtgtggttcaaggccgggtctcagatattcagtgagggcgggcttgactacttgggcaacccaagcctgatccatgcacaaagcattcttgccatctgggccacccaagttatcttgatgggtgcagttgagggttaccgtattgctggtgggcctcttggtgaggt

SEQ ID NO: 12377 - DNA, 254 bp, Glycine max
  unsure (1)..(254): unsure at all n locations; Clone ID: 701153746H1
ggcagcgaaaccaaaatgtctttcactgcaactaagtttgcaccttctcctctccctctcaattccaccacccccagatccnctgacaagcctctctctttctccttcgatcactccaagcccaacccttcttcctctttccttggatccactcgcaagcttcttcgcttcaatgctctcgctaaacctcatgctcacacacgtgcttcttcttcccctgttgctgctgttcttctcgaacgaacctccaatct

SEQ ID NO: 12378 - DNA, 253 bp, Glycine max
  Clone ID: 701153747H1
tacctccctggtgataaagtatgatcagaataatatcaatgctatgcattaacatctattccttttctatgtataaaatgtaatttattaaaatataaattactaataaacaaattaatgaaatataaagcatagaaaaatagtaattgatattactataagatgttactgtacactattgcacttcataattttccccctacaatattcatattttgtttaaatgtcgtttaacatattgtaagtaaagaaa

SEQ ID NO: 12379 - DNA, 257 bp, Glycine max
  Clone ID: 701153748H1
ggaagaaaaagaaaacagaggcttaggcaactaagaaagaaagatgaagctgaaggtatatgcggaccgcatgtcccagccatcccgtgcggttctcatattttgcaaagtgaatggaatagattttgaggagatcaaagtcgatttatccaaacgtcagcagttatctcccgaattccgagcggttaaccctttaaggaaagtccctgctattgttgatggaaggttcaagctatttgagagtcatgctattctca

SEQ ID NO: 12380 - DNA, 262 bp, Glycine max
  unsure (1)..(262): unsure at all n locations; Clone ID: 701153749H1
gggatcgatggaggaaattaccttgccagagaaagttgatgtgatcatctctgaatggatgggttattttcttctgcgtgaatctatgtttgattcagttataaatgctcgtgaccgctggctcaaaccaacaggagtgatgtatcctagtcatgctcgcatgnggatggcncctatccggactgggatagtagatcacaaattgggcgattacgagtcgactatggatgattggcaccactttgttgatgaaacaaaaact

SEQ ID NO: 12381 - DNA, 259 bp, Glycine max
  Clone ID: 701153750H1
aaacgctcttcgttatcttttctcagactccgcggcgtagatccgaggagttcgggaaatcctaactcatcatctcaactcaagtcatggctggacttgcacctgagggatcacagttcgatgctcgtcaatatgattctaaaatgagtgacttactttcatctgatggacaggacttcttcacatcctatgacgaggtttatgatagttttgacgctatgggtttgcaggaaaatcttctcaggggaatttacgcata

SEQ ID NO: 12382 - DNA, 239 bp, Glycine max
  unsure (1)..(239): unsure at all n locations; Clone ID: 701153752H1
gatcacttattaattgtgtnaagaaatttaagtgaggagctagagaatgatgatgaagtctgctatgtgtgcagtggtggttgcagcacttcttcttctggcggaggtggggcccatggctgaggctgtgacatgcaccccaacagagttgagtccgtgtcttccagcaatcacttccggtgctaaaccttccaatgcttgttgcacgaantgaagcagcaaaaaccatgcttatgtgg

SEQ ID NO: 12383 - DNA, 237 bp, Glycine max
  unsure (1)..(237): unsure at all n locations; Clone ID: 701153753H1
gctgcaaatgccaaaaagcaaagaacgattcaagtgatggatctccatgagttaccgaaacccaagaatgccttccttggaaaaaacaaaggcggcactggtcagggaaggcactggtgagtggtgacccataatgtacgtggcntttcttgtaaaaaggctttttatgggtgggtgatgccgcatagtcctaaaaacccgcttgatccctttacaattttactccccaaaataaaa

SEQ ID NO: 12384 - DNA, 242 bp, Glycine max
  unsure (1)..(242): unsure at all n locations; Clone ID: 701153754H1
ggagagcaattgcatcaacaacaaattgaaaggatgtcgatcttcgagtacaacggaagcgccgtngtggctatggtcggcaagaactgcttcgccattgccagcgaccgaaggctcggcgttcagctccaaaccatagccacggatttccaacgcatttccaagattcacgacaagctcttcatcgctctctctggcctcgccaccgatgctcaaacattgtatcagcgtcttgttttccg

SEQ ID NO: 12385 - DNA, 245 bp, Glycine max
  Clone ID: 701153755H1
cctcttgtgcattttatgctcaaagttgctctctcctttaccatccttgtctgagctctagcttttttctcgaaagcttccttttgggctatatgttcacaaaaaccatttcccctgaacaccccattcctgtctaaaacacacttctctcaatatctatctctagaactagaatggtaagccactaagcctagtgactagtgactagtagtgactcattcattcattcggttcaagtgttcagc

SEQ ID NO: 12386 - DNA, 244 bp, Glycine max
  unsure (1)..(244): unsure at all n locations; Clone ID: 701153756H1
ggtgagggacatgaaccacacactcagagagttccatnaangnnnganttncnncaaagcccatcttcctgctcttactagaaccttcccaatcaatttcctctaattagggtttatctnnngtttaattactcatcccaattccccaaaccccaatcctagtttctccttctcaatacccaaatggttcgntcccatggcgtcaccctcattaatcgccttgctcgtcgatctttctgtcacg

SEQ ID NO: 12387 - DNA, 253 bp, Glycine max
  Clone ID: 701153757H1
gtgatttgtggtggtatcctctatattgctaaccttggtgattcccgtgctgtgcttggccgggtggtcagagcaactggggaggttttggcgatccagctttcgtcagagcataatgtggccatagaatctgtgagacaagagatgcattctttgcatccggatgactcaaaaattgtggttctaaagcacaatgtatggcgggtgaagggtctgatacagatttctagatccattggcgatgtatacctaa

SEQ ID NO: 12388 - DNA, 252 bp, Glycine max
  Clone ID: 701153758H1
ggaaacagcacaactcaattcttcagtcagatatggatgatgcagttgacagacttacagttggacctaaacgtgttggaatagaattaggttaccaagggcaatgtcgtagagctactactgaattgggacttgcattaacttctcatctgcttcggcgatatgagcatgcaaaagttgaatgctgtgatcgcatctcaatagtacctcgtggtcagacattgtctcaattggtatttcatcgacttgatg

SEQ ID NO: 12389 - DNA, 253 bp, Glycine max
  unsure (1)..(253): unsure at all n locations; Clone ID: 701153759H1
ggagaataggcctttcaatgaccaaaggtacttcttggatgatgagaagctcaaggatttggggtggtctgagggcactacttgggaagagggtctaaggaaaaccatgnnttggtatgtcaagaatcctgattggtggggtgacgtttctggtgctttgcttcctcatccaagaatgctcactatgccaggagttgagaagtactatgatggctctgataatgtgaccggaaccgcttccaatggtgatgtt

SEQ ID NO: 12390 - DNA, 248 bp, Glycine max
  Clone ID: 701153761H1
tgcggagagtacatagctgactacgttctaggagaccaatatagatcagattccaaaacagttaaccaacaagcttatttctatgctaaatccctcaaactcaccaacaaagatgtctttgtcttggacgttgacgacactactctctctaatctccagtattttgctaaccatggatttggtgtggaaccacacaatacgacggcgtttaagaactgggttcttgatggcgaggcattcgcactgcc

SEQ ID NO: 12391 - DNA, 250 bp, Glycine max; identical to SEQ ID NO: 9698
  Clone ID: 701153762H1

SEQ ID NO: 12392 - DNA, 256 bp, Glycine max
  unsure (1)..(256): unsure at all n locations; Clone ID: 701153763H1
caacgtgaagcagattgcaaagtttgtcgttgggctgggcgacaaagtttcacccaccgacattgaggaagggatgcgtgttggggttgatagaaacaaatatcagattcaaattccantgcctccaaaaattgacccaagtgttaccatgatgacagttgaagagaagcctgatgtgacatataatgatgttggtggttgtaaggagcagattgaaaagatgcgagaagttgttgagcttcccatgctccaccct

SEQ ID NO: 12393 - DNA, 248 bp, Glycine max
  unsure (1)..(248): unsure at all n locations; Clone ID: 701153766H1
gaagaagaagggagcgagcttcgtgatcgattgcgcgaancggtggaggataagattatggacattgcttctctggagaagttccttcnnganaggattaaggtcggcggcaaggccggtgcactcggcgattccattaccgtcaccagggacaagagcaagatcaccgtcacctccgacagcaacttctctaaacggtatctgaaatatttgaccaagaagtacttgaaaaagcacaatgtgaggga

SEQ ID NO: 12394 - DNA, 253 bp, Glycine max
  unsure (1)..(253): unsure at all n locations; Clone ID: 701153767H1
ggatgcaaaagttagtagtagtgaagaaaatgaaagtccttgttttctttgttgctatagttctagcagcatggcattgccatggctcagaccatgaccatgaccatggccacacctaccaaattttccctctgagaatgaaaactggccatggtggccactacattccggaggtatcatgccaaagttggaggctnnngtggaagcacacaacgtcattgactggaaaaccgttcctcaagattgcgaggga

SEQ ID NO: 12395 - DNA, 248 bp, Glycine max
  unsure (1)..(248): unsure at all n locations; Clone ID: 701153768H1
gctggtgcacgttttgccaaatggcgtgcngtgctgaagattggtcccaacgagccatctgagctgtctatccatgagaacgcctatggcttggctagatacgctgtcatatgccaggagaatggcctggttcccattgttgagcctgagatccttgttgatggacctcatgacattcacaagtgtgccgccgtcaccgagcgtgtccttgcagcatgctnncaaggctttgaatgatcaccatgtcc

SEQ ID NO: 12396 - DNA, 246 bp, Glycine max
  unsure (1)..(246): unsure at all n locations; Clone ID: 701153769H1
ggtggtagtggggtaacgatacgtaataagttctatcattgaggaagtttcctgtgcatcgtctccgaaaatgaacgacgcagatgtctcaaagcaaatccagcagatggtgcagttcatccgccaggaagctgaggaaaaggccaacgagatctctgtctccgccgaagaggaattcaatatcgagaagctgcagttggtcgaagccgacaagaanaagatcangcaagaatacgnncgcgcana

SEQ ID NO: 12397 - DNA, 57 bp, Glycine max
  Clone ID: 701153770H1
tacggctggcgagaagacgacagaagggtacggctgcgagaagaccgacagaaaaaa

SEQ ID NO: 12398 - DNA, 255 bp, Glycine max
  unsure (1)..(255): unsure at all n locations; Clone ID: 701153771H1
gnntcanacgcacttccatagaagtttaattanccagcttctgagttctaagctaagtctgcttttattcttttctctcccgttatatatacagnattcgcctatatatananatatacnactcattnggnantgtgattgcagttcnnaatgcagatttnnacgcngngccaaggagcattttcngtgctgctggttgtnngtgcttcagntggtagnanacnnntgctatggngnccatagagcagtcggngt

SEQ ID NO: 12399 - DNA, 268 bp, Glycine max
  unsure (1)..(268): unsure at all n locations; Clone ID: 701153772H1
aactgttgttgagggaactatacagaagctatttgaagggcatcatatgaattatatcgaatgcatcaatgtggactanaaatcaactagaaaggagtcattttatgaccttcagcttgatgtgaagggctgtcctgatgtttatgcttcctttgacaagtatgttgaagttgaacgtctgaaggggataacaaatatcatgcggaacaatatggtttgcaggatgctaagaagggtgtcctgttcatgatttccctcctgttcttca

SEQ ID NO: 12400 - DNA, 255 bp, Glycine max
  Clone ID: 701153773H1
gggaggatggcaaacacaaacagcgacaccaaagaagaaagcaaaaaaatggatgaaagagagacaatacctctcctcacctcatacaagatgggaaattttaatctatcccacaggattgtgttggcaccgttaacacgatcaaggtcttacaacttcgttcctcagccgcatgctgctctgtattattctcaaagaactactaagggtggcttcttgatcggggaagctgctggtgtatctgatacggcaaag

SEQ ID NO: 12401 - DNA, 251 bp, Glycine max
  Clone ID: 701153774H1
gacgcagctgaataaagaaaaaagcctttcatagtgagatagccctagaaatgtttcgtgaatctttgtttgctctctttctactttctgccttctcctcctcactcctacctttaaccactgctcaagattacgttctcgacacggacggtcacgcggttgaaaatcacggtacatactatttgttgccagcgaaatcaggaagcggcggtggtggaatagaggtagccgcaactggcaaagaaagttgc

SEQ ID NO: 12402 - DNA, 201 bp, Glycine max
  unsure (1)..(201): unsure at all n locations; Clone ID: 701153775H1
gatccataaaattgcttgaatctgttcaaggtccaatgccttaatggcctttttttacttatatcagtttaaatgaaccttnntaaaagtctaaaatcaaccctacgcgtaactttattgctttcaaagaactacataggtctgagttcctcatcgcaattgaggatatgtaggagcaagagccacactcttgtcgacctc

SEQ ID NO: 12403 - DNA, 257 bp, Glycine max
  unsure (1)..(257): unsure at all n locations; Clone ID: 701153776H1
gggtatagggtacaacaggtggagacgcgtgttaggcatgcagagaatcataggttgtaatcaaataaatcagatgtgtgtgtatgcaaatactatactgtgtgtatatattatttctaaaggctttggggaaaatcagaaaaatcaatgatgtttgccaacgcggtcttagctggaccctaacactgtacactctcttaccaatctacctcaccatacacaacatacatacnactacgtcgttttgaaggttcaac

SEQ ID NO: 12404 - DNA, 250 bp, Glycine max
  Clone ID: 701153778H1
ggagtaacatgcaatgcatcatcacatctgagggagaggagagcattttcatttttcaacttgagagaagaagagaaggggaaaaggaaaaaaaggcaaaatgggtaaggatctgagcgatgagcaagtgtcttcaatgaaggaagctttctctttattcgacacagacggtgacggtcggatcgcgccgtcggagctggggatcctgatgaggtctctgggagggaacccgactcaggcccaactcaaa

SEQ ID NO: 12405 - DNA, 260 bp, Glycine max
  Clone ID: 701153779H1
ggcactgcaaatcacttttctactttgagtcttcttgatccttctttttctccttgaactcaaacatggcagatgaggtggttctgctagatttctggccaagtccatttgggatgagggtcaggattgcacttgctgaaaagggtatcaaatatgagtacaaagaagaggacttgaggaacaagagtcctcttctcctccaaatgaacccggttcacaagaagattctggttctcatccacaatggcaaacccatttgt

SEQ ID NO: 12406 - DNA, 250 bp, Glycine max
  unsure (1)..(250): unsure at all n locations; Clone ID: 701153780H1
gatccatcacacctcaaacccatttccttgatatcttagttatctaattacctcaattaatcccttaattgcaagcatcatggctgaggagannnnnnnnnnnnnnnnnnnnnnnnnnaagggcgatgatgtgcctggcgaggttgattataagaaggaggagaagcaccacaagcatcttgagcacttggggaattggtgctgcgggttgccggtgcnttatgcttgcatgagangcatgnggccanga

SEQ ID NO: 12407 - DNA, 249 bp, Glycine max
  unsure (1)..(249): unsure at all n locations; Clone ID: 701153781H1
ggccgcaaacagagatgacgacccgattcaagaagaaccgcaagaagcgcggccacgtgagcgccggtcatggccgtatcggaaagcaccgtaagcnccccggcggccggggaaacaccggtggcatgcatcaccacaggatcctgtttgnnaagtaccatccgggcttcttcggtaaggtgggaatgaggtacttccataagcttcgcaataaattctactcccccatcgtcaacgtcgaaaagtatg

SEQ ID NO: 12408 - DNA, 245 bp, Glycine max
  Clone ID: 701153782H1
ggaggaagccacatagagacacaatacagagtgagttgttgctccttcgccacaactctctgccaacatgggtatctccagagattctatgcacaagagacgtgccactggtggcaagaagaaggcctggaggaaaaagagaaagtatgagcttggtcgccagcctgctaacactaagctgtcaagcaacaagacagtccaggaggatccgtgttagaggtggaaatgtgaaatggagggcttga

SEQ ID NO: 12409 - DNA, 231 bp, Glycine max
  unsure (1)..(231): unsure at all n locations; Clone ID: 701153783H1
ggaggaagccacatagagacacaatacagantgagttgttgctccttcgccacaactctctgccaacatgggtatctccagagattctatgcacaagaggcgtgccactggtggcaagaagaaggcctggaggaaaaagagaaagtatgagcttggtcgccagcctgctaacactaagctgtcaagcaacaagacagtcaggtngaatccgtgttagaggtggaaatgtga

SEQ ID NO: 12410 - DNA, 218 bp, Glycine max
  Clone ID: 701153786H1
aaaccattctcagctatgccattgccatattttgaatcagaattatttcccaaaagaaccctcagaggaaacctcaaagtaaaagggctgtgatctgaagaacccctcgtatccaaatcttccttttccgttttatctttagattgggagtcccacaagtcatcatggccactctcagggaccctaaccccacctgacacacctctttgcagaggcct

SEQ ID NO: 12411 - DNA, 257 bp, Glycine max
  Clone ID: 701153787H1
ggcgaaagcaaagttagttgagagagagaggagctgaggagaatcaattcgagagaaatatgtctggtatcgctcgtggacgccttgctgaggaacgaaagtcatggcgcaaaaaccatccacacggtttcgttgccaagcccgagactctacctgatggcaccgtaaatttgatggtctggcattgcactattcctggcaagaccgggactgattgggagggtggatatttcccactgacaatgcacttcagtgaa

SEQ ID NO: 12412 - DNA, 250 bp, Glycine max
  Clone ID: 701153788H1
ggcatcaattcaaaatatatcatcaattataagcatgggtttgtggaacacaacgaatgcagtgtcttgccgctttcacaagtttggtgatgaccaaaagaatctggtcttccaaggtgatgccacgtcttcttccaggggcatagaactcacaaagttagacggtggaggaaaaccagtgggtggcagtgtggggagagtgttatactcttctccagtgcacctttgggaaagctctacagtggtcgca

SEQ ID NO: 12413 - DNA, 231 bp, Glycine max
  unsure (1)..(231): unsure at all n locations; Clone ID: 701153789H1
ggatgcaaaagttannagtagtgaagaaaatgaaagtccttgttttctttgttgctatagttctagcagcatggcattgccatggctcagaccatgaccatgaccatggccacacctaccaaattttccctctgagaatgaaaactggccatggtggccactacattccggaggtatcatgccaaagttggaggcttggtgtggaagcacacaacgtcattgactggaaaa

SEQ ID NO: 12414 - DNA, 252 bp, Glycine max
  Clone ID: 701153790H1
ggccctaatcgtgagaagaaaggaaaggcaaaagggaaagatggtgtgcataaggaaggcgacggtgaaggaccttctggcgatgcaggcgtgcaacctgttctgcctccctgagaactaccagatgaagtactacctctatcacatcctctcctggccccagctcctctacgtcgccgaagactacaacggccgcatcgtcggctacgtcctcgccaagatggaggaagagaccactgactgccacggcca

SEQ ID NO: 12415 - DNA, 271 bp, Glycine max
  Clone ID: 701153791H1
gtgtggcactcaaacattgtttgttgtaggaagaggaatcttgagaaatggcaggggacagcaagagcaagattctgttcatcggagggactggttacatcggaaaattcatcgtggaagccagcgccaaagctggccacccaactctccttttggtgagggagtccactctctccaaccccgcaaaatcacccctcatcgacaatttcaaaggcctcggtgtcaatcttgttttaggagatctatacgatcaccaaagtttggtgagtgc

SEQ ID NO: 12416 - DNA, 248 bp, Glycine max
  Clone ID: 701153792H1
gatggctgcaaatgtggaccaaactgctcctgcaacccctgcacttgcaagtgaggtgttgggagagcaagcttcaagcagagatagcccttaattaggaataatgataaactattaatgtgtagctaaaaacttatgtattatgtctgtgatggttttcgtgcactctggtgttttgtgttaaacaaacatccttagaataaagtggtcatgtcttgcccttcagcaagttcaagtgttttggactt

SEQ ID NO: 12417 - DNA, 229 bp, Glycine max
  unsure (1)..(229): unsure at all n locations; Clone ID: 701153794H1
taccctatataccaacttgagaaaacnatngtcatnaacatnatatcatcgtagttttgatggagagtattcattaattttattaataactaatttctaataaaaaatttaattatatttagtgntatttttttaattatattttttttcatccaaaaactgaaatcaacaacttactagatcaccacatttgttaaaagttaagaataaagagacaaagatatgatta

SEQ ID NO: 12418 - DNA, 249 bp, Glycine max
  Clone ID: 701153795H1
gatgaatggatgaagctggattctggtgagattgatgatatagataatatcagtgagcacacttccaaacttcttgcagcccatcatgccaactcttttgacttcattcgtgggagttcaaagggagagaagagacgaggcaaaagcagaagatgtggtttgctaggaaacaatttcacagtagcattaatggtgcaactccgtgatcctctgagaaactatgagccggttggaacaccaatgcttgct

SEQ ID NO: 12419 - DNA, 234 bp, Glycine max
  Clone ID: 701153796H1
gaggttttagcctaggaaacgtgttcaactactctgagccgcatcacttcccggaatcgtgcatccctacgttcaatatgccgctggtggcaaacgaggatttccagcacatacttcgtgttttgaacacgaacgtagatgggaagcagaagataatgttcgctcttacctcaatcaaaggtattgggaggcgatttgctaacatttgctgcaagaaggctgatgttgacatga

SEQ ID NO: 12420 - DNA, 254 bp, Glycine max
  Clone ID: 701153801H1
ggatcaagagtttggtaatattgatcagtacaacatctatgctcctccatgcaacaactctgatggtagtagtagctctgccacccgccgcaccatgcgtttacctcaccgaccccatgtggattttaggcattggtctggttatgatccatgtacggaaaagtatgcagagatttactacaacaggcctgatgttcagaaagcattcatgccaacaaaaccggtattcctataggtggactgcttgcagcgag

SEQ ID NO: 12421 - DNA, 241 bp, Glycine max
  Clone ID: 701153802H1
gggacgtgggggttcttcacttctcttcttcaattcattctagttctggattccgactcgccgcattgactcggtccgggttggggtcgactcagttcggtttttcattctctcgcgaatctaatctataggaaaagctaagggcacatcacaatgaaggcattgattctggttggggggtttggaacaaggctgaggccactgacactcagttttcctaagcctcttgttgattttgcta

SEQ ID NO: 12422 - DNA, 233 bp, Glycine max
  Clone ID: 701153803H1
ttaggctttaaagtgaatctgaagcataagaaaattaacatttccaatccccgagtagcttgggagcatgaacagttttcaaggctgagagttactgcggccaccctctctgaactctctacagcacctgaatttctagagaagactggtggctggttgatggaaggcattttgtcaatgaagcgggctattgtcagaagtgtgaaattaattgctgagagtcttgcgaggcc

SEQ ID NO: 12423 - DNA, 235 bp, Glycine max
  Clone ID: 701153806H1
gcccatgtctatttttatctttttgttcagatacactataagtattggtttttattttcaataaaaagaaacttttggcattttgatcaaatttggtgagagtttctctccgggttccttgttgaaccaattatcagacttatcaaggtaatccttgtggcgtctactctgacttatcttccttcactggaagtggcgtcatccaaaacctccgtagcctgtatcaaacgatccg

SEQ ID NO: 12424 - DNA, 242 bp, Glycine max
  Clone ID: 701153807H1
gagggaaaacgcaaaagacaaaagaagggtgttccgtcgtggcggcgtggtggaacttcattcacagtgggtggcttgcgttttggaaaaacggtgtcgtgcggaaacagaggctacgtttacgactctcatcatatggacagcttacgccaggagaaagttcaaagatttgaagaatttgttgacaaacgcctgaaacctgatcttgttcatgctattgctcagcgggacaaggtatttga

SEQ ID NO: 12425 - DNA, 258 bp, Glycine max
  Clone ID: 701153811H1
ggaaatccatcgcagcataaaatgtcaaatacaagtttgcttgatttccaatacagcctctcaaggaaaaaatacccgaggaagccatcacgtctgttctcctgggaccggcagaactcggggtcgaagaatgtatttcctcagcctaaggctgatgagatgaagcaggtgtttgacaagtttgattccaataaagatgggaaaatttctcaacaggagtacaaagccaccatgaaggctctaggcatgggggactcg

SEQ ID NO: 12426 - DNA, 273 bp, Glycine max
  Clone ID: 701153813H1
gtggagagatgacccaacttgaatattacaatttcctaaaggcagaggagacattctagtctagtatggatgcatcatgtatagatcttcagtggcagttgctgtgaatactatttgaattttctgtttacctcgtatttataacgcgtaaactgtaaatatgagtattgctaaatccaccaatattatcctgttcactctgttggcttgtatagattaacaccttattgtaaattagaatgaactgtcagcagcattcgctccaaattcatc

SEQ ID NO: 12427 - DNA, 250 bp, Glycine max
  Clone ID: 701153814H1
gcacaacctccattgcatttagcagatgcacttcctgtcgtcattgccaatgaccctactactgcacaaccgcaaccacaactctcagcaaacaccatgggcatgcctgcccagaattccttgttacaggcctcctccgcaaccgtatcacaactcttgggaagatcagcagcatctccttctgctgcaaccaccaccaccacttcttttgacaatataacagcttccccaatcccatatgccaattcac

SEQ ID NO: 12428 - DNA, 253 bp, Glycine max
  Clone ID: 701153815H1
ggcagcatccattcttgttctcttctttctttcgatcagcgcacgcggtagccagagggatcatgatcgcgaaagggctcaggctagaactggtgctaaaggcaagcagaaagatgatggattgacccctgaacagcgcagggaaagagacgcaaaggcgctgcaggagaaggccgcaaagaaagcggcacagggtgcaggagggaataatgcagctggaagcaaaaaataggcaataattcaatgagtagtt

SEQ ID NO: 12429 - DNA, 244 bp, Glycine max
  unsure (1)..(244): unsure at all n locations; Clone ID: 701153816H1
cagcacccatttggatcctctcttctcttctttgatctccgttaccctttttgttttctcannnnnnnnnnnnnnnnnnnatctttcgaagttcgtttgcgtgtgttgtgtggtcagtcaccgatggcagcaccacctgcgagggcacgtgccgattacgattacctcatcaagcttcttcttattggcgatacggtgtgggaaagagttgtctgcttttgcgattttctgatggttcctcaca

SEQ ID NO: 12430 - DNA, 256 bp, Glycine max
  Clone ID: 701153817H1
gggtgatctaaagaagcaaatctgaatagagaggagagagcagagacagctaaaatgcaaggaggaatgagatcatttttgtcacatgggaatgtcatcagaaatgctgttctacaacgcgtgcgcatggtgaaccccctgctacagacaattgcctcttcgcggtttgaatctgttacgcctgctcgcattgaggagcatggttttgagagcaccacaatttcagacatcttgaatgataaaggcaagggtgctg

SEQ ID NO: 12431 - DNA, 244 bp, Glycine max
  unsure (1)..(244): unsure at all n locations; Clone ID: 701153818H1
ggcacaagtttgttgagatagctagaancaataagatgaaaatgaaagtggcttgttttgtttgttgctacagttttggtagcatatgaatgccatggctcagactaccagaagttccctctccaaatgaaaactgggtttggtgggcaatacagcaatgaggtggcatgtgccagttggaggcttggcgtggaagcaaacaacgtagtcaagtggcaaactgttcctgcagcttgcggagagt

SEQ ID NO: 12432 - DNA, 239 bp, Glycine max; identical to SEQ ID NO: 6183
  Clone ID: 701153819H1

SEQ ID NO: 12433 - DNA, 236 bp, Glycine max
  Clone ID: 701153822H1
atacttatttctaatatttagttgccatcgtattttttatttaaaataaataattaaaactatgcgaatatttcgttgttttaccagcaatattttttcccctaaggaaacaaacttatgtcatgttattaataatcaaggaaggaatacaatgaggcatatagtgacaaagatggagataagataagatggtatttctctaaccaggacatgtacaatgaggcatatagtgacaa

SEQ ID NO: 12434 - DNA, 239 bp, Glycine max
  Clone ID: 701153823H1
gacggaatggggagacatgactttgacagccgcgttttcttgttctctcgccgctgcttctctctccgccgccgccggtttccgccggaataaatgcttcccctccaagttttttcattcctcttccacgtgcatgccctcttccttgcatgatcaccactaccactctttcttattgcgagttgccaatgatgctgataggagtgaaatgtcatctgataccgcaaccgaggcatcgt

SEQ ID NO: 12435 - DNA, 247 bp, Glycine max
  Clone ID: 701153824H1
gatcctcatccaaattatcccatcatacctttactttaccccacccaaagcgaaaaaaaaaaggattcaaacatatttgccttatacaattcaaatggcacacacaaaagtggatatgggtttggttttggtggtaatggccatgctatgcgcaggagctgcagctcaatctcaatcgagttgcacaaatgtgttagtgagcctgtcaccgtgccttaactatatcacagggaattcttcaacccca

SEQ ID NO: 12436 - DNA, 220 bp, Glycine max
  unsure (1)..(220): unsure at all n locations; Clone ID: 701153825H1
catctgtcttttttactantacatcttttttnttgttttcatatttttttataaaaaatatatatcctcattttggaaattaattttgagattttaacactncagaacattaatttctggaagccttggaaattttaacacccttttttctctttgctgttttatctttatctttaccaatcataaaacccaattcactaatccccttcacctccaaacc

SEQ ID NO: 12437 - DNA, 257 bp, Glycine max
  Clone ID: 701153827H1
ggatgaaaaacgtgatcaaagctgtgaagaaactcaagttgtggtccaaaaagaaaaggaagaaaaagacccatggccatgagcatcctcctcactattgctgcagctgctattgttcctcatccatccaaccatcagctccacccttaccttcatcctcatgccttgattttgaatacagcaactatggaacattcttaccaaccccggagccggagccggagccggaaccgcaaccacaagagattgccagccta

SEQ ID NO: 12438 - DNA, 245 bp, Glycine max
  Clone ID: 701153828H1
ggaagaaaatagacggaaaaaatggcgtgcaggagcatgcttcgttcctcgattctggtggaacccttccaattgcaacctcttcattttagtaacagacccgttagggcttgtccgtttcgccgtggcaaaggagtgaccctccgttgctccagcaatgagacgccgtcgtttcaggacgatcaaggtccacctcaagaagccgtgttgaaggccattccgaggtatctaaggcagaagggagg

SEQ ID NO: 12439 - DNA, 216 bp, Glycine max
  unsure (1)..(216): unsure at all n locations; Clone ID: 701153829H1
tgcaacttcctctgttttgctcccctgtttaagccttatcataagcttagaatggcacacaaggaattttccattgccctagtgactctcattgttctctttgtcaacacgaacctccaaggtgccacggctgactatggtggtggttggcagagtgctcatgccactttctatggtnngggtgatgcttctggcacaatgggtggagcatgtggg

SEQ ID NO: 12440 - DNA, 247 bp, Glycine max
  Clone ID: 701153830H1
gggtccagtgaagaaggctatggaagatgctggattacagaagagtcagattgatgagattgttcttgttggtggaagcacaaggattccaaaggtacaacagcttttgaaggactactttgatggaaaggagccaaacaagggggtcaaccctgatgaagcagttgcctatggtgctgcagtgcaaggaagcattttgagtggagagggtggtgaagaaaccaaagatatccttctcctggatgtg

SEQ ID NO: 12441 - DNA, 251 bp, Glycine max
  unsure (1)..(251): unsure at all n locations; Clone ID: 701153832H1
gattgggaacttgaacctggtgtcacatgtggtgactacttgtttggtatgctacagggaacaaggtcggctttgtatgccaataaccgagagtccatcacagttactgtacaagaagggacaccaagaacagttggtgctcttattgggctctatgaacgagcagtaggaatttatgcctcccctgtcaacataaatgcttatctnaacctgcgtgtggaagntgacganatnagcagcagngaagtact

SEQ ID NO: 12442 - DNA, 221 bp, Glycine max
  unsure (1)..(221): unsure at all n locations; Clone ID: 701153833H1
ggcccaccactgntncttccggttaaaaaccttngggtgggtggcanacttcttccctacaggcagcgtacagctaggacntaagccanaatanttaattanttcttggcnaaatcacatggncgcngccgcagatgggctcttccggccgatctacgaanggntgnatttncnactangncanngagtcgaagngcngcncctatccncnanaactgcgg

SEQ ID NO: 12443 - DNA, 232 bp, Glycine max
  unsure (1)..(232): unsure at all n locations; Clone ID: 701153834H1
acctggtggaggacncacttcacactgttctatcaccttcactgtcactgtgtcagccatggattatntatggagttcaacttgggtatnattccagagctagacaagaacaaacaccacacggcaattnttgtatattgatataaganacaaataggggctcanataagnggcagcgtctattaanaaaatgtacatatgcntaacttcaacgntgcattgagnattcnat

SEQ ID NO: 12444 - DNA, 251 bp, Glycine max
  unsure (1)..(251): unsure at all n locations; Clone ID: 701153835H1
cattttctttgagaattagggattgaacagttttatgtaggtgttattataaatgttttgattatgtagaaatcactcaatcatgtttttgtcattttgagaacatccatttttctctaatttttatttnntcttttatttcttccttctagattgtaattagatgcaatttagttatttggatgtcactactaatgataatcccgattagaactagtgagaatccaagtacaatagaaaagttcatggag

SEQ ID NO: 12445 - DNA, 250 bp, Glycine max
  Clone ID: 701153836H1
aagataccaaataactaacctttaagaaggcttcaaaatcaatgtcattggtaaaatcagtgtctgattcacccaagatacccctaatctcatcctcactgtacatatctctgaatgcgtttagcttcaccatcaaaggcggcaaatctccaaatgtaactttaccattctgattctttaaagagacaaactacaacaccagatagaagggccatataaggtaaaaaaaaagagcatgaaagacaacaaa

SEQ ID NO: 12446 - DNA, 259 bp, Glycine max
  unsure (1)..(259): unsure at all n locations; Clone ID: 701153837H1
ggactcattctttcttgcaaaatagcaactgatgcttctggtctgtctaagggctatggttttgttcaatttgacaatgaagaggctgcacancatgctattgacaagttaaatggcatgctgatcaatgataagcaggtctatgtaggccatttcctgcgaaagcaagatagagagaatgctctcagcaagacaaaatttaataatgtctatgtgaaaaacttatcagagtcaaccacggatgaagagttgatgataa

SEQ ID NO: 12447 - DNA, 263 bp, Glycine max
  Clone ID: 701153838H1
ctatctcccttacttaaactaagagaagatcattgtaacaataacaagacaaaagtggttagttccctttaccgaaacgaaagagggtttctctcgaactttggcgacgaggttacaccatgatctggaagtatgtcttataacgacgtagttcaaccaactttcccttttctttttggctgtctttacttgctttaaagaatatatgtcaatttctaataaattctttcacgtctcgtgtggagattcattaactagataaa

SEQ ID NO: 12448 - DNA, 259 bp, Glycine max
  Clone ID: 701153839H1
cagaacttgttattgcaacatcagattttcagagagatcttgtaagctggggtattggtcctatcaaaggtggagtggacgcaaaagagttgttccatttgtatattcttgtttggatccaagataaacgtctatctttgctggagtcatgcaaattagataaggtgaaatggtcaggagttagaacacaacattctactactccctttgttgatgatatgtatgagcggctgaaggagacgttgacagactacgaggt

SEQ ID NO: 12449 - DNA, 241 bp, Glycine max
  unsure (1)..(241): unsure at all n locations; Clone ID: 701153840H1
gtaatatcacaggttaaaagagatttgttctaacatttggtatcagagcaagaattgcctctgccttgtccattttcgtttttcggtattttccgatttgattttgtttatggtatgaagggccttgtttcttaaaaaataaaattagaaatatgtatttcgtttgatttcctaattttggcttttgaatcgtgaaaaatggtgtccgatantatganaaacgaacgggtctgcgtatggg

SEQ ID NO: 12450 - DNA, 243 bp, Glycine max
  Clone ID: 701153841H1
gccagcgcctctctctctatctttttcttttccttctcctagccctcttccctataggagaaggaataacaaaaacaaaaatacacaatggctttcactttcaccagaatcctaattctctttgtctccctctcctctctcatcctcgacacccacgcagcccgtgcgccccgcaccatccagacccgcctctacagcctctgcaagcccaccaccaacatggacctgtgctacaagaccatc

SEQ ID NO: 12451 - DNA, 241 bp, Glycine max
  Clone ID: 701153842H1
gaaggaggaggaggttctggtcttctttcttttttgtctggttccctttcttccttcaaccaatttcgagatccgaaaccggcatcagatccgatccgaaatgtacggattcgaagctctcaccttcaacatccacggcggcttcctagaggccatcgtccgcggccaccgcgccggcctcctcaccaccgccgattacaacaacctctgccaatgcgaaaccctcgacgacatcaagatg

SEQ ID NO: 12452 - DNA, 240 bp, Glycine max
  Clone ID: 701153843H1
ggttctagtgtgtgattgtttgttgttgtaactcgttcttcttcttttgttgttctgtgtttgtgtttgttttttctctcacctgaaaatgtcttgctgcggtggtaactgtggttgcggaagctcctgcaagtgcggcaacggctgcggaggctgcaagatgtacccagacttgagctacactgagtcaaccaccaccgagaccttggtcatgggagtggcacctgttaaggctcaatt

SEQ ID NO: 12453 - DNA, 242 bp, Glycine max
  unsure (1)..(242): unsure at all n locations; Clone ID: 701153844H1
ggccgcaaacagagatgacgacccgattcaagaagaaccgcaagaagcgcggccacgtgagcgccggtcatggccgtatcggaaagcaccgtaagcnccccggcggccggggaaacaccggtggcatgcatcaccacaggatcctgtttgacaagtaccatccgggcttcttcggtaaggtgggaatgaggtacttccataagcttcgcaataaattctactcccccatcgtcaacgtcgaa

SEQ ID NO: 12454 - DNA, 244 bp, Glycine max
  Clone ID: 701153845H1
gacacaccgtttgttctattcttaactcaacttctgctacccactctcttcttccaagtccaaccacgcttttctctacagtcatgggcaaggtcaagatcggaatcaacggatttggaagaattggccgtttggttgccagagtcgctctgcaaagagacgatgtggagctcgttgccgttaacgaccctttcattaccaccgattacatgacatacatgtttaaatacgacagtgttcacgg

SEQ ID NO: 12455 - DNA, 248 bp, Glycine max
  Clone ID: 701153846H1
caccaacaagtgacaagaacgttaaagaaaaataatgtagaactgttggaagcatgtaggaattgtttgttgctcagatgactcggatttagatcttgattctccgtttaccttagacattgaagagcaatattcctgaagaaaccatcacattttttttctgcagatccgtatttaacacgagacagtcctcacatgcttaaccatctttttcctctttactaacacaataagaacatgacagaacg

SEQ ID NO: 12456 - DNA, 251 bp, Glycine max
  unsure (1)..(251): unsure at all n locations; Clone ID: 701153847H1
gaagaaaacacaatacgaatttcattgcagagtgttattttgagtatcagcatcaatggctccaattgcagtgggaaacgtgattccagacggcattttggcttacttggatgaagaaaacaaaccccaaactgtctccattcactctctcgccaccggcaagaaagtcatcatctttggggttcccggtgccttcactcctacttgnagcttgangnacgttcctggcttcattgaggagagcagaagag

SEQ ID NO: 12457 - DNA, 212 bp, Glycine max
  unsure (1)..(212): unsure at all n locations; Clone ID: 701153848H1
ccacaaacccaanacagaacagcttaagcngtnctcaactcaaggcacatnagnttctgaatgacntntggggnnntncganaganctagtnagaaaacctgtccctgtcgtggatnaggatcccgagagcnatgaatgcngcattcgcttgtttaaacatgctcagccaggaatagtgtttgatcacgtagatgaactccaaccaccaagg

SEQ ID NO: 12458 - DNA, 250 bp, Glycine max
  Clone ID: 701153849H1
ggatcaagagtttggtaatattgatcagtacaacatctatgctcctccatgcaacaactctgatggtagtagtagctctgccacccgccgcaccatgcgtttacctcaccgaccccatgtggattttaggcattggtctggttatgatccatgtacggaaaagtatgcagagatttactacaacaggcctgatgttcagaaagcacttcatgccaacaaaaccggtattccttataggtggactgcttgc

SEQ ID NO: 12459 - DNA, 238 bp, Glycine max
  Clone ID: 701153850H1
ctctaggcatgggggactcggttcatgaagtgccaaatattttcagggtggttgatttggatggagatggattcatcaacttcaaggaatttatggaagctcagaacaagggtggtggggttaggacgatggatatacatagtgcatttaggacgtttgataggaatggcgacggtagaataagtgctgaagaagttaaagaaacgctaggaaggctgggagaaaggtgcagcattga

SEQ ID NO: 12460 - DNA, 258 bp, Glycine max
  unsure (1)..(258): unsure at all n locations; Clone ID: 701153851H1
atatcatcatatataatagataattaaaaaatcatttaatatgaatttataatattaacacattagaaaaccgatacataaaactaattaaaanagtaatatttttgaatcacatatcacattttaatataaataananataatacataaaataaaataaaatgataagttcaattatttataaaaacaatatggagtatcacaaaattataaaatgaaccccttttaattcagagtcattgcacttccagatggatt

SEQ ID NO: 12461 - DNA, 247 bp, Glycine max
  unsure (1)..(247): unsure at all n locations; Clone ID: 701153852H1
ggaagcatgaagttttctcattcagtgggcggctcgtaatttagaggtgtggaaagttctccaagcacacgacacatagtataagtcatatattgtttctttctagatacacgcacgcgccctgtgtgtctgttttcgacatcgcatctcacacaatcatcaaatntctctttatatataaccctcacaatgcggaaatatgctgcagacagattcaggctannattcaaccgttcactccttcttc

SEQ ID NO: 12462 - DNA, 260 bp, Glycine max
  Clone ID: 701153853H1
gtcatggtgatttaaactatggatatttgaaggttgaggagagtgtggagaatgagacaagtagagggtattattcttctttgatgttgtaagaatgatagtgaagcaacacaattttttatcaaataaagtatgaaaaatgaaaatccaagaagcaaccgtaatgggtgattgtgctgccggagaatggtgccacttaaaagatgcagacaaagatttgaggttcttatactgattttttgtaggtttggtaagctgaa

SEQ ID NO: 12463 - DNA, 251 bp, Glycine max
  Clone ID: 701153854H1
ggaagttattagggtttttgagtgcggcggtccaaacactcttctctgcagcttttgcctacaactcccttcaccatggctgaacaaaccgagaaagcttttctgaagcaaccaaaagtgtttctcagcacaaagaagactgggaagggaaagagacctggaaaaggtgggaaccgcttttggaagtccattgggcttggatttaagactcccagggaagccatcgaaggaacctatattgacaagaagtg

SEQ ID NO: 12464 - DNA, 239 bp, Glycine max
  Clone ID: 701153855H1
gatccacataaacatcaacatcgaaaggttgttaattttcaactcaatggttcttccctcaggttttgtttccatgttgatactttttggcatggttttggtagttggggtgaatattgtcccaggggttgaggcaaaggcaagggctttctttgtatttggagactcactggttgacagtggtaacaacaattacttagcgaccactgcacgggctgattcccctccttatggcattg

SEQ ID NO: 12465 - DNA, 245 bp, Glycine max
  Clone ID: 701153856H1
gatccacataaacatcaacatcgaaaggttgttaattttcaactcaatggttcttccctcaggttttgtttccatgttgatactttttggcatggttttggtagttggggtgaatattgtcccaggggttgaggcaaaggcaagggctttctttgtatttggagactcactggttgacagtggtaacaacaattacttagcgaccactgcacgggctgattcccctccttatggcattgactatc

SEQ ID NO: 12466 - DNA, 151 bp, Glycine max
  Clone ID: 701153857H1
acaaacaactcgttgggcgagcttgcggcgcgttgaacacgggcatctgtgactgatcctcttctagggttttctcacgcactaagcgggctgagtgcctcgcttagcggatgtaatcgctaagcgcatgtgtctcgcttagtgagacatc

SEQ ID NO: 12467 - DNA, 243 bp, Glycine max
  Clone ID: 701153858H1
tgttccgtcgtggcggcgtggtggaacttcattcacagtgggtggcttgcgttttggaaaaacggtgtcgtgcggaaacagaggctacgtttacgactctcatcatatggacagcttacgccaggagaaagttcaaagatttgaagaatttgttgacaaacgcctgaaacctgatcttgttcatgctattgctcagcgggacaaggccagatacacaacacatatttgtggatgtaggatttg

SEQ ID NO: 12468 - DNA, 241 bp, Glycine max
  Clone ID: 701153859H1
gacagttaatttatcataacatttgtttttggtgcattcaaaaaatggctgggattgtagtgatttttgactttgactcaacaatcattgagtgtgatagtgataattgggtgctgatgagaccggtttaactgaaaagttctatcagcttcttcctagcacgcattggaaccctctaatggataagatgatgaatgaacttcattcacaagggaaaaccatcaagacttgtacaaattct

SEQ ID NO: 12469 - DNA, 237 bp, Glycine max
  Clone ID: 701153860H1
ggttatggcagggtgtacagagaacggcttttgcgccagtggggaatagttgatgttaatgactgttgtagttgtgctacatatttggtggacagtggaaaggtggataaggagcggctatgtattatggggggctctgctggtgggtataccaccttggctgtccttgctttcagagatacttttcaggctggggcttctttgtatggtatagctgacttgaacttgttgagagca

SEQ ID NO: 12470 - DNA, 238 bp, Glycine max
  unsure (1)..(238): unsure at all n locations; Clone ID: 701153861H1
ggaggtgaggtgaactcgtgtggggtgtggtagtgtggcagcgacacgtatcaacttcaataatcgcatcgcagaagcagtttccggtgcatctcatcgtctccgaaaatgaacgacgcagatgtctcgaagcaaatccagcagatggtgcggttcatccgccaggaagctgaggaaaaggccaacgagatctctgtctccgccgaagaggantcaatatcgagaagctgcagttggt

SEQ ID NO: 12471 - DNA, 224 bp, Glycine max
  unsure (1)..(224): unsure at all n locations; Clone ID: 701153865H1
ggcccaccactgatcttccggttaaaaaccttngggtgggtggcacacttcttccctacaggcagcgtcagtaggaattaagccaaaataattaattaattcttggcaaaatcacatggccgccgccgcagatgggctcttccggccgatctacgagggctgcatctccgcctacgacaagacgtcgagcgccgccctaccacaagaactgggctgcgtctgca

SEQ ID NO: 12472 - DNA, 248 bp, Glycine max
  Clone ID: 701153866H1
gaagcggatggagtcgaaccgcgagtccgcacggcgatcgcggatgaagaagcagaagctgctcgaagacctatccgacgtagcgagtcgccttcaaggcgagaacgtgcgcttagcgcagagcataaaggcgaaggaggaagcgtacgttgagatcgaagccgcgaacgacatcctcagagcacagaccatggaatcgccgaccggttaaggtttctgaactccattctccgagatcgccgatgagg

SEQ ID NO: 12473 - DNA, 251 bp, Glycine max
  unsure (1)..(251): unsure at all n locations; Clone ID: 701153867H1
gcaaagcaaagacaaatctttctcacaacctacaaactatcttctttgaacagcaatacttttgttgagccacaaaagcctaagctgaagctgaagaaggttgctgttaaggtcaagaagattgtcacctcggttttgatgttcacgcgagttggttctttcaggtcctgcggttctaggtctcagatttcttccacctcaccaaataggaagaacttttgaggatgttgttctgtcatgggtttangatg

SEQ ID NO: 12474 - DNA, 248 bp, Glycine max
  unsure (1)..(248): unsure at all n locations; Clone ID: 701153868H1
gacaacaaaaaaattcttcagttcactatatctatggcaatgttttaccaatttaggaatgctggtgtcttttttttcctttgtgttcttctcttatctggtgtgtgtgttttgggtcgaccagccacttttctacaagactttcatgtcacgtggtctgactcccacatcaggcaatttgatcaaggcagggcaatccaactcagacttgaccaaagcttanatatgtgggtttgcttccaaggtga

SEQ ID NO: 12475 - DNA, 248 bp, Glycine max
  unsure (1)..(248): unsure at all n locations; Clone ID: 701153869H1
gtcagaaatagatttataacttctaaaaaacaatagatgaaaatagggaaaaaaaatgaaagaatgatttacactaatttaagtgtatttttcttgacattattttgacatattaattgtattttatattttacgatacataatttatattgtgctaaatgtatttttaactattactcatttcaatttcaattaaaaacaaatttatattagaantcanggatgaaaaaagaaaacttcaaagagat

SEQ ID NO: 12476 - DNA, 255 bp, Glycine max
  unsure (1)..(255): unsure at all n locations; Clone ID: 701153870H1
ggcgcattgaacgaaaattagggtttgtagtgtagcaggaagaagcagcaatggcgccgaagataacacgtaaggttagcagaaaccctgaattgataaggggaatcggaaagtactcgaggtcgcagatgtaccacaagaggggcatttgggctatcaaggccaaaaacngtggcgttttacctcgccacgaccctaaacccaagcctgaagctcctgctgaaaaaccacccaaattttaccctgctgatgata

SEQ ID NO: 12477 - DNA, 107 bp, Glycine max
  unsure (1)..(107): unsure at all n locations; Clone ID: 701153871H1
gagatnacacaatagcgaattacattgnagagtgttatntngagcatcagcatcaatggctccaattgcagncgganangtgcttncagacggnantttggcttatt

SEQ ID NO: 12478 - DNA, 237 bp, Glycine max
  Clone ID: 701153872H1
ggacgtaagattttagtattgtcaggggtagtgtcggtgatgaagtaactagaataaatatagttacaacatcaacttccatgttcttcatgtttcacttctgctttaagtttgtggctttctactttctctttctagagtaggactaaactcatacactgatcatgggagtggatttaagacaagtggtggcgggtgtcctcaccctcacaatgttcgtcatgcttatacacatga

SEQ ID NO: 12479 - DNA, 239 bp, Glycine max
  unsure (1)..(239): unsure at all n locations; Clone ID: 701153875H1
gagcctcagcagaagcagaacgaggagaagcagaaggagcaaaagcaatggcgccgaagaagccgagaaccacgacaaggaaccctgatttggttagggggattggcaagtattcgaggtcgcagatgtaccacaagaggggcatctgggccatcaaggccaaaaacngtggcgttttgccccgccacgatcccaagcncaagcccgaggccccggcccagaagncggcnctngttcta

SEQ ID NO: 12480 - DNA, 235 bp, Glycine max
  Clone ID: 701153876H1
gacaacactcatagtagagtaaccaaaaggagagtgcaataactcgttgtacattcctagtgtgtgggagagacatggctaagatgtgtgttttggtgttggttcttgctctggctgtggccacaagtgccagaaacgttcccaaccccaaggatgctggtcttaaggaccagaagaacttcatcagctatggtggagttggtggttattccgggattgggaacaatggactgcc

SEQ ID NO: 12481 - DNA, 236 bp, Glycine max
  Clone ID: 701153878H1
gatccacataaacatcaacatcgaaaggttgttaattttcaactcaatggttcttccctcaggttttgtttccatgttgatactttttggcatggttttggtagttggggtgaatattgtcccaggggttgaggcaaaggcaagggctttcttgtatttggagactcactggttgacagtggtaacaacaattacttagcgaccatgcacgggctgattcccctccttatggcatt

SEQ ID NO: 12482 - DNA, 238 bp, Glycine max
  Clone ID: 701153879H1
ttcatcgatgcgattgtggaaggagaaaggctgattgtggatgtggattttagatctgagtttgagatagcgcgatcgacgggaacgtacaaggcgatgctgcaatcgctgccgttcatcttcgtcggaaactcggagaggctgacgcagatcttggcgattgtttccgatgcggcgaacagagtctaaagaagaaagggatgcacgttccgccgtggaggaagcgcgattacatgct

SEQ ID NO: 12483 - DNA, 241 bp, Glycine max
  Clone ID: 701153880H1
ggagcgtgtgaacaaccttgatctttcaaagggccccattgaaacaaggtcaagggataaatttgggttccaggaagagaacaaatttgattctcttaacttaagcatgttgaacctggactctaaatttactgagaatgtgagcaaaagctcgcttcgaaatggtgtttatggtatgaatgcagtgtatcagaaaaacaatgcaaacttggtgagtaatgtgatcagtaacaagtacaat

SEQ ID NO: 12484 - DNA, 246 bp, Glycine max
  Clone ID: 701153881H1
tgacctaaaataagaatcagtcagatagaattaatatatcagccattaaatgatggatgtcagagtaagtgttctcacttggaatgatcatttgagcttttatccctaagctctgccttcaaggacagtgactcatctcttccatttgaagcctccataactttgaatcaaacaagtgaattttgttaaggctaaactaaagagacattttgaattagaaaccattaaccagcaacaaaaccgaaa

SEQ ID NO: 12485 - DNA, 248 bp, Glycine max
  Clone ID: 701153882H1
atgttggcatgggagtgtgtgctgagctatgtgcagataaccatgcattaacaagagacgaccaggataactatgcaattcagagttttgaacgtggaattgctgcccaagaaagtggtgccttttcatgggaaattgctccagttgaagtctctggtggaagaggaagaccatcaacagttgttgataaggatgaaggcctaggaaagtttgatgctgccaagttacgcaaacttcggccaagtttc

SEQ ID NO: 12486 - DNA, 241 bp, Glycine max
  Clone ID: 701153883H1
ggtagccatagaatttcacattttatcttttgcattgagcaactaactcactcgcgccatggctgctaccatcatcaccacatgcaagctctcactgcttttgagtcttctctcagtttcacttttgctgggtgtgaggtctgatacccttcagaatgtaggcgcaattccccccacatgcaagcgcatagagtgtcccagctatgatgtcattcacgtaggcaacggctacgaaatccgt

SEQ ID NO: 12487 - DNA, 242 bp, Glycine max
  unsure (1)..(242): unsure at all n locations; Clone ID: 701153884H1
ggcatttaagaaactcaagagatagaaagaaaataaagagaaggagaagagaagaagagaaaggttgtgagagatntggggaggggtaagattgagatcaaaaggattgagaactcaagcaacaggcaagttacctactcaaagaggaagaatgggatcctcaagaaggcaaaggaaattagtgttctatgtgatgctcaagtttcccttatcatctttggtgtctccgggaagatgcatga

SEQ ID NO: 12488 - DNA, 196 bp, Glycine max
  Clone ID: 701153885H1
tcgagattggttgaaattatcttattcgcttaacatattaaaatgcgtcatttttaatgatattattggtctatagtttttatgaattatatttaatgtttttatatatttgtatataaataactttaatctattatttcgccctagcctatgaagtgtaagcacagatttgtcaatgagtagcacatgtatagtt

SEQ ID NO: 12489 - DNA, 239 bp, Glycine max
  Clone ID: 701153886H1
gccccatttggagaaatgaattgattcttgtaataatctgtgatctgatgagcagatagaaagagaagagaagttgatgtcaacagcagaagctcctcctccgttccaagaagcagcgcgatgcgttgtgtgcaattgcagtttcaacaccttcagaagaaggcatcactgtcgatcctgtgggagaacattgtgcaatgaacattcatcagatcaaatggctttaccacaatttggca

SEQ ID NO: 12490 - DNA, 236 bp, Glycine max
  Clone ID: 701153888H1
caggctggattgttaaagcatagaggtacatatgaaatattgtctcccgaagatattggccatgaaaagtccaatggagttaatatggtactagggaagctaagtggacgccaagctttgaaaagtcgactcaaagagcttggctatgaacttagggatgaagaagttgaaagtgtgtttaggaacttcaaagcaatagctgagaaaaagaagagagttaccgacgttgatctcaa

SEQ ID NO: 12491 - DNA, 231 bp, Glycine max
  Clone ID: 701153889H1
gacctcacccagttgcagaaagaaaagaccatcaaagtttcacttcagccttatccggtttagggtttcggtttttgacccaacctttgacgtatcgaaaccttaagtttcggatcaggtctgagcaatctggttggtagaacctttggtcttagagagtcaagttttatgtctgaattagacgatcaaattcctactgccttcgatcctttgctgatgcaaatgctgatg

SEQ ID NO: 12492 - DNA, 231 bp, Glycine max; identical to SEQ ID NO: 7222
  Clone ID: 701153890H1

SEQ ID NO: 12493 - DNA, 227 bp, Glycine max
  Clone ID: 701153891H1
ggtcacattggagtgatggatgtactacttgagcgtggtgctgacattgatgccagaactaagggtgcctgtggctggacaccgctccacattgcagccaaggaaaggaggagggatgctgtgaaattcttgttagagaatggagccttcatgccacctgatatcagtgatagcagatttaacccaccgcttcattactgtcccgggctggaatgggcctacgagga

SEQ ID NO: 12494 - DNA, 238 bp, Glycine max; identical to SEQ ID NO: 11678
  Clone ID: 701153892H1

SEQ ID NO: 12495 - DNA, 235 bp, Glycine max
  Clone ID: 701153893H1
ggcacaagtgagtttgttgatcgagataactagaaacagtgtgatgaaaatgaaggtccttgttttcttcgttgctacaattttggtagcatggcaatgccatgcgtacgatatgttccctctccgaatgaacactggctatggtgcccgtactccggaggtgaaatgcgcaagttggaggcttgctgtggaagcacacaacatctttggctttgagaccattcctgaagagtgc

SEQ ID NO: 12496 - DNA, 241 bp, Glycine max
  Clone ID: 701153895H1
gtagattggactggcctgagggtgcaacctcaagggagagtatcaaagctgtaatgaagcttcctaggcttcagaaccttgtaatgcagcatgtagatcattcagctggcgatctcatacatctcttgcaggggttacttagatatgacccctctgaaagacttacagccaaggaagctcttagacattccttctttatgagagatcaatttagaagataattcactttctaagctgctgc

SEQ ID NO: 12497 - DNA, 240 bp, Glycine max
  Clone ID: 701153896H1
ggccatcgcaaagtttgtggttttagtttctgaatcaatttcgaagtcatccaaccagccactggattcttggagagcatggacactcagaaaagtcaacctgagaagcagtcttcatccactgcaactgccccatctgttacttcatgtcgaaagaagaagaatgaagaagctgctttcttggacgatttgaaggaccacattgatgagtttattaatgcttctatggatgaacacaaa

SEQ ID NO: 12498 - DNA, 271 bp, Glycine max
  unsure (1)..(271): unsure at all n locations; Clone ID: 701153902H1
tgtattgacaaaacattatttttnttttctgacacacataccaaccaaattaaatatngacatagtcctaaatcgtctatattgncggaccaaagccatagcattttcctttaccctgataatctctacctctaaagctatatctatttgagccacctctantttggtaaccactgagagttcccaccacctactccaatggaattttcattggaaccttcatcgcttgaggcattgctatgttccagntactatttcttctccaaatggg

SEQ ID NO: 12499 - DNA, 265 bp, Glycine max
  unsure (1)..(265): unsure at all n locations; Clone ID: 701153903H1
caattaaggtgagtgttgctgangacaggccaaggcgtggctccttttgagcgttagcatatgtagttccccatgtccagctgctggagttctcttgcatttttttaatagctgaggatatactatagtgtcaattnntgtttaaaggaaaatcctttcttggggcgccaatttcagattagatttaagtatttcgttgttattaatttaatgtccagatgaaagttaagttgtaattcctgactccggagattggagataagta

SEQ ID NO: 12500 - DNA, 260 bp, Glycine max
  unsure (1)..(260): unsure at all n locations; Clone ID: 701153904H1
atctaggaccaacataatacacatttttaaaaacaaatataaacccaaaaggcttacctggaagcatttccagatagttttattgtttttataagaagacaaacctgacattcaattacatattaaaaatgatatttttgagacataaaaaagtattagaactaaaaaagncaaacaaaaactttgannccaaacaaaatttcttctgacngcagggattacctgccctgatgggctatccaaagtatgccacactgcac

SEQ ID NO: 12501 - DNA, 259 bp, Glycine max
  unsure (1)..(259): unsure at all n locations; Clone ID: 701153905H1
ggagacaacacttgataatctgaagcctttatgatgggagcatagaagagagggtttgttggccantgatgactattgagttgagggtctgatagaaggaggtggcaagctgtggcgagtagatngagatgtgngtcatttgtactaagtctttgttgttgcattaggaaaagggttgaagaaggaaactccaacagtagctgatcaatggagatggaagtagaactttcttcagctcaacccaaaatgggttctcagc

SEQ ID NO: 12502 - DNA, 268 bp, Glycine max
  unsure (1)..(268): unsure at all n locations; Clone ID: 701153906H1
ggagagtcagattcgctcgccttgcttcgccacacaacagcaactgcagcaatggctcccaaacnaggtggaaaggctccggctcttgccgctaagaagaagcctgagaaggtttncgaatccgttgttcgagaagcgtccaaagcagttcggaatcggaggggcgttgcctccgaagagagacttgactcggttcgtgaagtggccaaagaatgttcaaattcagaggnagaagaggattctgaagcagaggttgaaggttcctcca

SEQ ID NO: 12503 - DNA, 259 bp, Glycine max
  unsure (1)..(259): unsure at all n locations; Clone ID: 701153907H1
tgctgctccccccgncacaaactgctggtgaatcaagatataatttgagacgacccaaaattggagcaacaacttcatctgttagagctatgtctggtncgtggcaaagaaagtcanggagaggttgatcgtgtaaaagatacaggagaggggattgttgactcaaaaacttctcattcacattcggtgggcattactaatgagaatggtggaagcatacatcttgagcagtctctgaaaggtgcggagacaagggacg

SEQ ID NO: 12504 - DNA, 260 bp, Glycine max
  unsure (1)..(260): unsure at all n locations; Clone ID: 701153909H1
ggtagttccaccgagtagcaacaatgtcgaagcgaggtcgcggaggatcggcgggaaacaagttccgcatgtcgctgggtctnccggtggcggcgacggtgaactgcgccgacaacaccggcgcgaagaacctctacatcatatcagtgaaggggatcaagggtaggctgaaccggttgccgtcagcttgcgtcggagacatggttatggccaccgtcaagaagggaaagcccgatctccgtaagaaggtgctgcccgcc

SEQ ID NO: 12505 - DNA, 257 bp, Glycine max
  unsure (1)..(257): unsure at all n locations; Clone ID: 701153911H1
tgganatcggtgactgangaatacancgacaaagtaatgggtctagcttgcaagctcatggaggtgttntccgaancaatggggttagagaaagagngttgnaagcaaagnatgtgnngacatggaccanaaggtggnggntaattataccccaaatgnnctcaangtganctnactcttggnntgaagcgccatacggatccgggaactatcagcntncngtttcaagacnaangggtggattnaagcnacnangg

SEQ ID NO: 12506 - DNA, 122 bp, Glycine max
  Clone ID: 701153913H1
catacaaaagggtggctcatatgtgaattattacatgtaccatggaggaactaactttggacgatcagctggaggcccattcataactacaagctatgactatgatgctccaattgatgaat

SEQ ID NO: 12507 - DNA, 262 bp, Glycine max
  unsure (1)..(262): unsure at all n locations; Clone ID: 701153915H1
tacagagacattgccaattataatcagctagaaacccaagatgagggcccaagaagaaacagggtggaaacttgttcatggngatnttttcaggccancagtcaattcanatntgcnttgtgttatgtcgnncangctcgtcaagatcttngcaanncantgtgncaatgcnatttgcttgcagggtttngtctccatctaatcgtggaggtctcatgntgctatggtccnttgtnggttttaggggctnattgcggctacc

SEQ ID NO: 12508 - DNA, 270 bp, Glycine max
  unsure (1)..(270): unsure at all n locations; Clone ID: 701153917H1
caatggaaagggaatcaagttccaaatcctttcaaaccctgaattccttgctgagggaactgcaatccaagatcttttcaacccggatcgagtcctaattggaggcagggagaccccagaaggccaaaaagcaattcaaacattgaaaaatgtgtatgctcattgggttcctgagaagaaaattctaaccacaancctctggtctgctgagctatccaagcttgctgctaatgcctttttggcacagagaatttcatctgtgaatgctat

SEQ ID NO: 12509 - DNA, 258 bp, Glycine max
  Clone ID: 701153918H1
gggtgttgtccttgcagttgaaaagcgcatcacttcgccgcttctggagccaagtagtgttgagaaaattatggaaattgatgagcatataggttgtgcaatgagtggattgattgctgatgctcgaagcacttgttgagcatgcacgggttgaaactcagaatcataggttctcatatggtgaaccaatgactgttgagttcacaacccaagctctttgtgatctagccttgcgttttggtgaaggtgatgaagaat

SEQ ID NO: 12510 - DNA, 257 bp, Glycine max
  unsure (1)..(257): unsure at all n locations; Clone ID: 701153919H1
ggttgtgaatcaacataaatattccgttttgcgtttctctgcctaaaaggattgaaagatgggtcaagcactaggttgctatcaagttgatcagtcaaatgtggctatcaaggagcattttggaanattgcntgatgtcctagaacctggatgtcattgcctgccttggtgtcttgggtaccagattgctggtagtttgtcactgcgtgtgcagcaacttgatgttcgatgtgagacgaaaaccaaggacaatgtct

SEQ ID NO: 12511 - DNA, 264 bp, Glycine max
  unsure (1)..(264): unsure at all n locations; Clone ID: 701153921H1
gaaagaacaaagagagtgaattgactcggggtgagttgactcagcgatggcggaagaggtgactcgggtgatggtggcagtgaacgagtcgagcatgaagggataccctcatccttcgatcagcagcaaaggggctttcgaatggaccatcaacaagntcgttcgcaacaacgtctctgccttcaaccttctttttcttcacgttcaagtccccgatgaagatggttttaatgacatggatagtatctacgcattgcctgacga

SEQ ID NO: 12512 - DNA, 257 bp, Glycine max
  Clone ID: 701153923H1
gaggagaggatgaaagtgttggcaatgagtacaacagaagatgaagaaatgggagacacatttgctgatagagcagaaacttactaccaaaagaggcctcagctactgtcccttctgcaggacttgtacaatggctacataaccttatctgaccgttacatccaaacactggccaaacacaagcaccatagtagacactcttctcaagtttcaactgtagatgaaggcttctctgaccaagaagaagaagctagtgg

SEQ ID NO: 12513 - DNA, 227 bp, Glycine max
  unsure (1)..(227): unsure at all n locations; Clone ID: 701153924H1
gacgtacacaagtactttaactttttgggttttantttccggtttggtcaggcccgagacactcctctgtagcattttcttgaagaaaggaaagganacggcatcagttcagagagatcagagatgtgtgggagagcacgttgtactctgagagcggatgatgtcccaagggcttgtcaccnnnnttttcccctactcgnnctcttcatatcgaccggtataggcca

SEQ ID NO: 12514 - DNA, 142 bp, Glycine max
  unsure (1)..(142): unsure at all n locations; Clone ID: 701153925H1
gacagtagagagagtgttggtacgaaaaatgtcgaagctgatctncgnggtccttngcntattnctctnctntgnanctccntctcnccagaganaccncagatacgagngcgtcctcgtnntgnttcgatgacttcgccat

SEQ ID NO: 12515 - DNA, 252 bp, Glycine max
  unsure (1)..(252): unsure at all n locations; Clone ID: 701153926H1
ggtggttcaaaagaagaagcgcaggatagtgtttagttggtcatctgtggatgggcatattgcattccaaactcaccatcactccagggttgncagacaggtccatgttgtntattcggctggaacataggcaagaatagagttaatggcaaacctcagattaagtaccatgatattgatcttacattcccaacttctctggtcgacaaaacatttttgagagggaaggagctcaaatgctgctatagggct

SEQ ID NO: 12516 - DNA, 251 bp, Glycine max
  Clone ID: 701153927H1
tagccattctataacacttgaatttggttttaaaaggattaaaagtttaaaaccatttcttaatttctccaacggacagaattgacaaatgctctatagaaagagtgatggtagcttgagtcttcatacgccgagaatatttttctcttcttttcatctcttctcccttctattctctatattttgtgggtattgtttgaggttgcaatgtatttaccttgagtgcacaggttcaaacacgacgctgtata

SEQ ID NO: 12517 - DNA, 263 bp, Glycine max
  unsure (1)..(263): unsure at all n locations; Clone ID: 701153929H1
ggcacaagtgagtttgttgatcgagataactagaaacagtgtgatgaaaatgaaggtccttgttttcttcgttgctacaattttggtagcatgggcaatgccatgcgtaacgaanatgttccctctcccgaatgaacactggctatggtgcccgtactccggaggtgaaatgcgcaagtgggaggcttgctgtggaagcacacaacatctttggcttgagaccattcctgaagantgcgttgaagcaacaaaggaatacatcc

SEQ ID NO: 12518 - DNA, 276 bp, Glycine max
  unsure (1)..(276): unsure at all n locations; Clone ID: 701153931H1
atatgaatgattgacctttcaatcaaacggtatgtaaaatatatacacataaaattacaacttttttgcatcaagtcatcatgttctccaactttccttcataattgtatancactattggtatccaatttttaagtactgtggggtacccccgtatcctagaaaaagcctgcaaaaggttagaagtcatggcggactatatttngattcaaggcttcaaacacctttnattaatggattgactggttgagttcataacaaacctggtacttgggg

SEQ ID NO: 12519 - DNA, 252 bp, Glycine max
  unsure (1)..(252): unsure at all n locations; Clone ID: 701153932H1
aacgtaggatttaatgngaagaatgttgcagtcaaggatctcaagcgtggttttgtngcctcanactctaaggatgatcctgccaaggaggctgccaanttcacatcccaagtcatataatgaaccatcctgggcaaattgggaatagnatgcgcctggcctgatgccanactctcacaatgccgtcangttggcgnggtgtnccaagatggcagggnctgtaagagatgagagggccaatctgaaatgggg

SEQ ID NO: 12520 - DNA, 251 bp, Glycine max
  unsure (1)..(251): unsure at all n locations; Clone ID: 701153933H1
gagagtagagcctaagcacacacctnttcagtagccaagtccacacactctctcattctcatctctctctccgtaccccaagaaattaaagagcaaaanaaatatggtttcccttgaacctattgagggcaacctcagatctagtgatgcaccttcaagtcctagaatatctttcccagcagagttcttagatgngaacaacttcatctccatcagtccaaacgctgagtatgaggggccagatcaagaga

SEQ ID NO: 12521 - DNA, 277 bp, Glycine max
  unsure (1)..(277): unsure at all n locations; Clone ID: 701153936H1
caggaaaacaaggaaggtttggaattgctgaaaactgccattgccaaagctggttacacaggcaaagttgtcattggaatggatgttgcagctttctgaattctacaaggaagataaaacatacgatttgaacttcaaggaagataacaatgatggctcacagaagatcnctggagangcnttgaaagatctatacaagtcatttgtgacagagtatccaattgtttcaattgaggatcctttgancaggatgactgggagcactatgctaagctta

SEQ ID NO: 12522 - DNA, 256 bp, Glycine max
  Clone ID: 701153937H1
ggaacaaaacaagtgtttcgaatagattatcctaagtctttgggaatagtgctgcaatggcttcaagtcaggaggaggtgacccttttgggagctactggaagcccatttgtgtgcagggttcatattgccctcaagttgaagggagttcaatacaaatatgtcgaagaaaatttgaggaacaagagtgaactgcttctcaaatccaacccagttcacaagaaggttccagtgtttattcacaatgagaagcccat

SEQ ID NO: 12523 - DNA, 252 bp, Glycine max
  unsure (1)..(252): unsure at all n locations; Clone ID: 701153938H1
atgaacttcaatagttcaactaccatttgatgaatgtgtccatgatcatatcataacttatatcacgcaggctttagagattattatcttttttttgnttctcattgnattccacaccaatgaggtaaggcgtgatgaaacataatcatccatngtttgtcacttgtcagatcacctcttgtaggctgcagattagaataattgacaagatncncgtagcaatcaattgtcnagcatcaatcttccaatcaa

SEQ ID NO: 12524 - DNA, 241 bp, Glycine max
  unsure (1)..(241): unsure at all n locations; Clone ID: 701153940H1
gaagcgagggtaanatctnagttaggtgtttggagggttacatgtnctatgctcgnatcacttcgatctctgattggtttctctnccctttggtcgatccagagntcgatccctccgattcnccttttgcttcccaccaaaggctccgatgagtttcaaaacccntcattcgccgcctccccgagttcaagttctggtatttctttcaacgaaggcttctctggcatagcatttgtgatgg

SEQ ID NO: 12525 - DNA, 269 bp, Glycine max
  Clone ID: 701153945H1
ggtgatttgagaggatcgtgagagggacggtagcagagattccgtgagttgcaaaaatgaaaacaattctttctgcagagaccatgaacatcccggacggcgtgagcgtcaaggttaatgccaaggtcatcgaagttgaggggcccccgcggaaaattggtgcgagacttcaagcacttgaatcccgattttcagctcatcactgacgaaaacggtaaaaggaagctgaaggtggaggcctggttcggttctcggaaaacatccgccgc

SEQ ID NO: 12526 - DNA, 264 bp, Glycine max
  unsure (1)..(264): unsure at all n locations; Clone ID: 701153946H1
gggtgcaggaagagagggcttgttggtggatccgattcagaaaaaatgggttcaaacccgtcgtttgtcccggagatcggatccgatggtcttcccagacaatcttccgttatcacttacaccgaacagataatcgaagcagaacagcttcaattgaagaagtacattcaagaaaactatactaaaattcgtgatgncggagcgtgagttgcaaatcttggattagagatgaagcttacatctggaccaaagaaagcagcgctg

SEQ ID NO: 12527 - DNA, 266 bp, Glycine max
  Clone ID: 701153947H1
gatgttaaaaaccaatataaatatggtgaagaagggtttaggtgggttttgagcacttggcacagaagagcacgctgagagaaaggaagatgatcatcccccgttcgttgtttcacctgcggaaaggtcttggaaacaaatgggatacctatttggacccttctggcagtcagattacagtgaaggagatgcactggatgctttgggactggttcgatattgctgtaggcgcatgcttatgacccatgtcgatctcattgagaatt

SEQ ID NO: 12528 - DNA, 272 bp, Glycine max
  unsure (1)..(272): unsure at all n locations; Clone ID: 701153948H1
gggtggaagatggattatcatcaggacaaccctgcagttttcttcactaccatcaagaacaccaagcaactgaaagtccccagaggagtttctgaagcatttgaataagactgtggagtnattcaggtcctcantaagnccctctgggtggtaagtnggnagttaacantntganagaaagnaattaanggtntatgggacatggtnggtcccattccgnaagancatccanggtgcttggangattctggcttttanatanccatggagga

SEQ ID NO: 12529 - DNA, 254 bp, Glycine max
  unsure (1)..(254): unsure at all n locations; Clone ID: 701153949H1
attccaatatgtcggagcatcaatgtgatggaatganantgtnnagaggtnnaanaccntgccacagatgtatanngtatgggcncatnatacntngaacaccgggaccacntacaataattcaataggaggagtatgatatntcaggnaaattnnnattatatattccatactttacattatggccatgtgaagntatngtgncacggnattngaactcncaaacgnttttgttgttgaacngcangtctgtg

SEQ ID NO: 12530 - DNA, 252 bp, Glycine max
  Clone ID: 701153951H1
ggcgtttgtaagagcatataaataacatagtcctccttcctttgttttttccacatcacgacatcacatcgcagagaagaacagagagagatccatccatcaattccaatggccgatcagctcaccgacgaacagatctccgagttcaaggaagccttcagcctcttcgacaaggacggggatggttgtattaccaccaaggaattgggaccgtgatgcggtcattggccagaacccaactgaggcagagct

SEQ ID NO: 12531 - DNA, 257 bp, Glycine max
  unsure (1)..(257): unsure at all n locations; Clone ID: 701153952H1
ggagggaggcattttttgtaccgagatgcgcattaatgagaaatgaataatgaataagaacacgaggcagggcagaggagaaggccttgtgattcatcatgacgaatgaacccaacaacaagtacgatgtttttctgtgtttagttggcccggatacccgctacaccttcgctggtaatctctataatgctttgcgccgcaacagaatcaataccttnttcacagaagntaatcatctgatgagctactactcatga

SEQ ID NO: 12532 - DNA, 243 bp, Glycine max
  Clone ID: 701153953H1
ggtggtaggtgagttgggacttgtggcggcgagattgctgctgctccaaacgttacaggagagaaagccttctttgccgtgaattcggatcgagatcaatgggttcagcggagaaagagccactgttaacagcggagggaactcgatcaaactcaaagcacgagtcctcctcccatgggcaacttgagagaattctctccgacgacaccctacccttcctcaaccgtgtgggacccgccacct

SEQ ID NO: 12533 - DNA, 221 bp, Glycine max
  unsure (1)..(221): unsure at all n locations; Clone ID: 701153954H1
ggcctagganncgtantcatctactctgagccgcatcacttcccggaatcgtgcatccctacgttcaatatgtcgctggtggcaaacgaggatttccagcacatacttcgtgttttgaacacgaacgtagatgggaagcagaagataatgttcgctcttacctcaatcaaaggtattgggaggcgattgctaacatttgctgcaagaaggctgatgttgac

SEQ ID NO: 12534 - DNA, 253 bp, Glycine max
  Clone ID: 701153955H1
ggagctatttcaagatcttgctccgttgctatggaattcttttggtactattgctgcacttttgcaggaaatagtttcaatataccctgttctttcaccaccaaatcttactcctgcacaatcgaaccgagtatgcaatgctcttgctcttcttcagtgtgtagcatctcaccctgatacaaggatgctattcctcaatgctcatatacctctatatctgtatcccttccttaatacaacaagcaagtcaaga

SEQ ID NO: 12535 - DNA, 258 bp, Glycine max
  unsure (1)..(258): unsure at all n locations; Clone ID: 701153957H1
gntccatctttttcttcttactcnagactcttccttttctcttctctgtctaaggggtgccctgagatcacattgaacaatggtgaangctgtggncgtntcttggcagcngtaagggtgtcactggaactattcacttcgttcaggagggaantggtccaaccancgtaactggatctcttgctngtcttaagcctggtctccanggnttccatgtccatgccttcggggncataccaatggttncnnctcaactgg

SEQ ID NO: 12536 - DNA, 265 bp, Glycine max
  unsure (1)..(265): unsure at all n locations; Clone ID: 701153958H1
ggaatccgagaacgtggttgtgacaggatcattgagctcggcaagaatggaagaacacaggttgagcttgagaattagnacgcttntcttcactcttnccanaaaangnacatcgtactctcttacccagcanaaccacttgcgttgaaccattctncgaaattcctaggaaaattcgcagcaacagcacgaacccattcaaattccgagccancgccgcaattccatacgaaaaaaganattccaacagcgcctcgaccattca

SEQ ID NO: 12537 - DNA, 98 bp, Glycine max
  unsure (1)..(98): unsure at all n locations; Clone ID: 701153960H1
cttgactcacttggcaggccaagcaatgctgantaacttgttgcccccatcatttatttgtgggtgctgtgatgaaaatagaaactgagatgatatca

SEQ ID NO: 12538 - DNA, 267 bp, Glycine max
  unsure (1)..(267): unsure at all n locations; Clone ID: 701153961H1
gggncgaagagtattaggtttgagtgcggcgtcaaacactcttctctgcagcttttgcctacaactcccttcaccatggctgaacaaaccgaganagttttctgaagcaaccaaaagtgtttctcagcacaaagaagactgggaagggaaagagacctggaaaaggtgggaaccgcttttggaagtccattggggcttggatttaagactcccagggaagccatcgaaggaacctatattgacaagaagtgccccttcantggcaat

SEQ ID NO: 12539 - DNA, 261 bp, Glycine max
  unsure (1)..(261): unsure at all n locations; Clone ID: 701153962H1
ggcacttcaattgcaatcaaattagttcattctctttgcgcagttccctacctctcctttcaagatgcagatcttcgtcaagacccttcaccggaaagaccatcaccttgaggtggaaagctctgacaccatcgacaacgtcaaggccaaggaccaggancaggaaggaattcccccggatcagcaagtctcatcttcgccggaaagcagctcgaggaggccgtaccctcgcngantacaacatccagaaggagtcaaccc

SEQ ID NO: 12540 - DNA, 184 bp, Glycine max
  unsure (1)..(184): unsure at all n locations; Clone ID: 701153963H1
ggaacgnangtttntcgagagantaatatggtgantgttggatgtcaagcaagtaagaaacgatgcttcatgtcgtctancgngttggtgaacntgnatcgnaccatnaagtttttananctggacncttgggggaccaataaagnttggggggcnaaaggnngatgggnttnaagggtttgaa

SEQ ID NO: 12541 - DNA, 253 bp, Glycine max
  unsure (1)..(253): unsure at all n locations; Clone ID: 701153965H1
ggggtggaaaccgatgaaaaccgcaacacccttccctctcctctcccacataaaacccacaagccccttcttcccattgggtaccgcagaggcatggccaagaagaganaatccatatccacaagcctcgacgaggtggatcgaaccatctactcttccttctcnagtgccgccaattccctctctcacctctacactctctccatgaaccaccagaaatctccttccaagccggtgaagccatccttgaaaa

SEQ ID NO: 12542 - DNA, 251 bp, Glycine max
  Clone ID: 701153966H1
ggaatttgatttctcagggaggttatctttatgtttgtggtgatgctaagggcatggcccgagatgttcatcggactcttcataccattgtccagcagcaggaaaatgtggactcttcaaaggcagaggctatagttaaaaaactccagatggatggacgttatcttagagatgtctggtaaattttctgattattcatctttctgggttgtgccttccttgctatttggtctgttaagttcaagattggt

SEQ ID NO: 12543 - DNA, 199 bp, Glycine max
  unsure (1)..(199): unsure at all n locations; Clone ID: 701153968H1
gtttccagctctncattacgggcctctgtnagttctacagagtgcctgtnacccccaacaggggtcaattaggcccccaattaaccaggctttcatcnaagaagtnttgcaaccccnaggcagggcntaggggcnaannaccancagnnggctnaggntggcgggnantgggnaagcagacggnntgnngctaacccna

SEQ ID NO: 12544 - DNA, 255 bp, Glycine max
  Clone ID: 701153971H1
ggctgtgagtgagattacccatagatagagagcgcggcataacctaaacttacccttcttctctctgtgtgtgtgcgcatcaaacgcaaccagaagcagccatggccactgcaagaactgtgaaggacgtttctcctcatgagttcgtcaaagtttactcttctcacctcaagcgatctggcaagatggagctgccagagtagactgatattgtgaaaactgcaagatttaaggagttggctccttatgatcctg

SEQ ID NO: 12545 - DNA, 256 bp, Glycine max
  unsure (1)..(256): unsure at all n locations; Clone ID: 701153972H1
aggaccaactcgaactgaaccctaactcggtcaccagactcagtgagtcctcggcgccgtccgacgacgacgaaccggctctgagctcccacacccttgccgccctcaaagaantcctggccgagcagcagcagcgcggcttccgatgccgccggagagtccgaggtttctctagtgtccgaggattggaggctgagccagttctggtacagccccgaaaccgccacaaccgtcgccgaagaagttctcgctctgt

SEQ ID NO: 12546 - DNA, 256 bp, Glycine max
  Clone ID: 701153974H1
ggaaaaagggagtgcctgataacccataaccgaccgcaccaccgttttcctttgctttgcgttctacaatgtcgaaaacctcagagattattacatgcaaagctgctatttgctggggaataggaaaacctgtgactgtggaagagatacaagtagaccctcccaaagccaccgaagttcgagttaagatggctttgtgccagtatatgctccacagacatctctagcacaaaaggattcccacataccattttcc

SEQ ID NO: 12547 - DNA, 239 bp, Glycine max
  unsure (1)..(239): unsure at all n locations; Clone ID: 701153975H1
catgtgtcacaattgcatgacacagcttctccattcatgctcaattgaaactagcctttgcttagaatatcttggtttcatatatttcattagcatgatgctgcctaaagttcataaccgtaactagtttatacaggaatgccttgcagcaaactaagcagttcatcaggtttgtgtgatatatgattagattctatcgcagcacagtgttggaagttaatcatgtagttacaagcnac

SEQ ID NO: 12548 - DNA, 252 bp, Glycine max
  unsure (1)..(252): unsure at all n locations; Clone ID: 701153976H1
aaagatggaaaagacggaaaagaaacagcatctaaagccaatggatctgcaccagacgccgcacctggatcacaaccaaaggatgccaccactaataacggtactgcagatttaccccagaaagaagtccaccactcctgaggagcagtcttctacataactcctgctttcatgcatacttaagctctcacaatcttctgcgatnactttgccccccgcagtctttacggatcttttgccatgctattagtt

SEQ ID NO: 12549 - DNA, 168 bp, Glycine max
  unsure (1)..(168): unsure at all n locations; Clone ID: 701153977H1
gcacacatgacacngagagnttggacatacatnacntantaggcctatancgggntntgtncaccatagggagtggngtcgatctatgatcatgntggnctctgaacgcttgatngcacagngctcgcatagagtttcnnncttgtgacnaangtngtggagtcctac

SEQ ID NO: 12550 - DNA, 268 bp, Glycine max
  unsure (1)..(268): unsure at all n locations; Clone ID: 701153978H1
gcacacatgacacctacacttttgcacatacattgagatattaggccctatacccgggtttgtgtgaaccatagggagtggaggtcgatctatgatcatgttgggtctctgactcgcttgatagcagtgaagcctcacatagagttttcctcttttggncgaggcattgtcgctggtagtccctactaccacaatgttgttacctaagaggatgatatctataggagccagtgaagttacatgaaaccacccttgggagttgtcacta

SEQ ID NO: 12551 - DNA, 264 bp, Glycine max
  unsure (1)..(264): unsure at all n locations; Clone ID: 701153979H1
tgatcctgagtatgctaagcagctggttgaagaaacatggggcaagcacaaggatgctgagaaggcagcatttgaggaggccgagaagaagagggaagaggaggaatcaaaggatgacccagttgactctgatgctgatgaggaagaggaaatgctgatgaagctggccatgactccgctgcngatccaagacgggaacttggagaagaccaccaaggaagaaggtntaattgttgactctaggaanttgccaaacggttaaga

SEQ ID NO: 12552 - DNA, 249 bp, Glycine max
  Clone ID: 701153981H1
tgcccaaaataccagcagcagcaagccgagctccgcgagtagcaacaatgtcacacagttcaacaacgatcttcctcattttaagggatgtgtttgagatctctaatatatcctttaacttgtttccaaccactttcagatcagaacttgtgtcatggtgcatggctgacatgtccaggcgtcctaaagaaaattatgtcagaactccaaaagctctatttcaacaaaaggtaatgtgttcaaatgaag

SEQ ID NO: 12553 - DNA, 257 bp, Glycine max
  unsure (1)..(257): unsure at all n locations; Clone ID: 701153983H1
gatccacaacaaaaaactacttctcaattcagttaacacaccaaccnccacatccaaagcttcagttcaatatggcaaccttgtcaagttttgcttcctttggccattactaagtttagttctagtaattagtggccattgtctttnagggctgaagctaggccaaggacattctttgtatntggagattcacttgttgatnatggnaacnacaattacttggctaccacggcacgtgccgatggntcccccttatg

SEQ ID NO: 12554 - DNA, 250 bp, Glycine max
  Clone ID: 701153984H1
gatagcaaaatcgtttctccaatttaatcaccattgtacaacccaattcccttcgtcgttttcgattaagagagcaatggcacgtaccaagcaaaccgctcgcaagtccaccggaggaaaggctccgaggaagcaattggcaaccaaagccgctcgcaagtcagccccggcgaccggcggagtgaagaagccccaccgcttcaggccaggaacggtggctctgagggagattcgaaagtaccagaagagc

SEQ ID NO: 12555 - DNA, 251 bp, Glycine max
  Clone ID: 701153985H1
gactgagagtggaaatggttctcttgcaactggttcaccactgaatccatcctcaggtgactcctcaagcagtccatctgaagcctcaactcctcgcaattaaaatgtgccttctttctgtgagaaattgcctcacagaatgagcaaatagagctcttttgagagcagtgttaggtgaaactatttgttgtaggtttatatataagctcttatagaataagcttgctagctactttctcaagtcacataat

SEQ ID NO: 12556 - DNA, 250 bp, Glycine max
  Clone ID: 701153986H1
ggagttctccaatggcagttcctgcaccattctctctttcttctgatccctttgcttccaaatctgccacatcaacgatccttggtcctgccgtgctgaaaatagggaactttgagcaaactcatttcggattgttcacggcattaaggagaaatcaaggtttcactttaaaggcctcaatggggcctgcgggatttacagagaaacttaacaacaacaggctaaagactttagctgacgctgaagatgg

SEQ ID NO: 12557 - DNA, 257 bp, Glycine max
  unsure (1)..(257): unsure at all n locations; Clone ID: 701153987H1
ggcccccaccatttatatttgctctcaatcttttttaccacttccatttttcttttccaaaacctcttcatacacacaccttctttttcttttttctttctatatatagtaacaaacaaaattggagtanggtttgatttcgatggagaattattctatgttgttccctatttccaattcctcgagctacccaatttcaacgagtggtgttggaagctctcaaatcggctataatggtcaaagctccaatgcgtttc

SEQ ID NO: 12558 - DNA, 264 bp, Glycine max
  unsure (1)..(264): unsure at all n locations; Clone ID: 701153989H1
ggcacaagtgagtttgttgatcgagataactagaaacagtgtgatgaaaatgaaggtcctgttttcttcgttgctacaattttggtancatggcaatgccatgcgtaacgntatgttccctctccgnatgaacactngctatgggtgnccgtactccggaggggaaatgcgcaagttggaggcttgctgtggaagcacacaacatctttggcttngaganccattcctgcaagagtgcgttgaagcnacaaagggatacatcct

SEQ ID NO: 12559 - DNA, 263 bp, Glycine max
  unsure (1)..(263): unsure at all n locations; Clone ID: 701153991H1
cctctctattcccatttacttttaactccaccccacatttttttntctgcttcttcacngtccacaccacaagtgcttngtttgtttagttggtnacttgcacatnacaatncaactttcaccacatnnaancccangacccaagcncaaacccannaaaacacagncanaanacancacaacacaaaccnttcagtttctccttcatgggccctcctcacatcccaacntanaaacnccattctccatcgcttcaccaccct

SEQ ID NO: 12560 - DNA, 254 bp, Glycine max
  unsure (1)..(254): unsure at all n locations; Clone ID: 701153993H1
gagcagcagagcnancganaganaganaganagtgcancttcctctnnnttgctcccctgtttaagccttatcataagcttagaatgggcacacaaggaattttccattgccctagtgactctcattgttctctttgtcaacacgaacctccaaggtgccacggctgactatggtggtggttggcagagtgctcatgccactttctatggtgggggtgatncttctggcacaatgggtggagcatgtgggtatg

SEQ ID NO: 12561 - DNA, 160 bp, Glycine max
  unsure (1)..(160): unsure at all n locations; Clone ID: 701153994H1
cagtacacagcgtcttaacaatgccagcattgatgttaagaagatctcnngagtcantccangttnctnggcanncnagcnggcagtntatnnacatcggcancctnanagctttccangtcgtcatcacttggtacccactntctgcnatccaattagc

SEQ ID NO: 12562 - DNA, 273 bp, Glycine max
  unsure (1)..(273): unsure at all n locations; Clone ID: 701153995H1
gatcccaagctcacacaccaaaccagagcaagaatagtgttctaagagtgagcaacaacttcaaacaccattgtgagaaatgngcntccaagggtgcattctccngtgtctcaacattctctncttcactgtggtaagcntccacatatgtnccntgcaancggccccctataattcnaaacaagacactggtnccnangcanctttcccnaagngaataagtgcnnccanggngtgataaagttgggggcgannggntgggctgggtgcngt

SEQ ID NO: 12563 - DNA, 257 bp, Glycine max
  unsure (1)..(257): unsure at all n locations; Clone ID: 701153996H1
gcactacattatgaatatagtatacaaatgtactgnatgtatactctaatattagtatattacnaaactaaacaaaatgtggtttgaaatgctatnatgtgcctgaaagattttanggtgatgcaacaatcaacnagatgtagccaaacaatcagtacaaatattagngccaatatggaactngaggtnccccgctacnggncatcctgaangaaatncaggttngncggagtatnaaaaatcnggtgaatcccnaa

SEQ ID NO: 12564 - DNA, 265 bp, Glycine max
  unsure (1)..(265): unsure at all n locations; Clone ID: 701154001H1
gaaggttaaaaaccctcaaatccccttttcccaccaaagcatcttcttagacaaccccaattgcaaaaccatcaacaaccatcacttcaaaaatctgcagtttccccaaaccagcttccctgacaattcaattcaggaacttggttcaaccattaaganttcactctntcttggacaaccctctttggaattgagctccaatgggaaaagtcctcttcacctcacacagcaggcttcatcaaatcactatcattctttcagcagc

SEQ ID NO: 12565 - DNA, 111 bp, Glycine max
  unsure (1)..(111): unsure at all n locations; Clone ID: 701154002H1
gggaganttaggtttttagggtttacaccgagcagcgacacctccctcccgcagtagccatggttntcaaaactganntatgcngattcagtngtgccaagatctaccncg

SEQ ID NO: 12566 - DNA, 257 bp, Glycine max
  unsure (1)..(257): unsure at all n locations; Clone ID: 701154003H1
gggaaagatatcagaaacaagtgagagagtgggaactagccatgaccaagaacaatgccccttctaatggatgcctggacaaggttacaactttggagaagccggccatgtttgctttctgtttgaaacctaggggtctggaatcactgaacaagggattgaaacatcgatcccaaaagaagatttcagtctctgggaatgcaaacagtaatctagatcaggatggcttccacactttcagaagaanacagaatgct

SEQ ID NO: 12567 - DNA, 233 bp, Glycine max
  Clone ID: 701154004H1
gacggacagaaatggcggcaggtagtgacggggtggacataaacgacgccgcttcgcccaaaacaaccaccagcaagagggggcgattcaccacctccaccgaatcacgccgacaaaccctaacatcatcttcttcacacactcacacccttcctatcgagctcatccaggaaatcctccagcggctccctgtgaaattccttttacgacttcgatgcgtatgtaagtctgga

SEQ ID NO: 12568 - DNA, 255 bp, Glycine max
  unsure (1)..(255): unsure at all n locations; Clone ID: 701154005H1
gtatcaccattacttcaaggggaaactgagaagaatgaaaaggtacctgcaaattaatgaggctgccaaggaatgtattaagaagttgaatgttgagtttcaaacaaaaatgtcagatgacttgcagacaccagtgatactaactggtgctctccaagaggccttgaaatttgtgaacacttctttgaagatgttgaagtntnanaatgcagannnngagcacagttgcaattgattcaatccttattggaggtt

SEQ ID NO: 12569 - DNA, 250 bp, Glycine max
  unsure (1)..(250): unsure at all n locations; Clone ID: 701154006H1
atctgtactgttgacatactcaantattaagctaggagttttagagtgctgatctctgacaatatcaagaagcttgacaatatttgggccaccacaaaggttctgaagtatttttatctctcttttaatctgcaaaatgatgttgaagatctcagaaggtacgacaaaaatctcacaagaactgaatgcagtagtacaagaaacaccatataaccaaaaacaaaatcannttaacacaagncttcaacca

SEQ ID NO: 12570 - DNA, 249 bp, Glycine max
  unsure (1)..(249): unsure at all n locations; Clone ID: 701154007H1
gctcaccaaatatcatgaaaaaatttagcagtaaaagaggctggctggtccatgcatctctctaggtaaatgtggagtggccaagaaattatgttaagatgattgtaagtttttattagtgccgaagaatctgattccaccaaaggctatcccaactcttctcctttgttgcttccaacactaaaaggactgtaagagcttattataatttaaaaataaatacaatcatatttaccctcttcagantaa

SEQ ID NO: 12571 - DNA, 248 bp, Glycine max
  unsure (1)..(248): unsure at all n locations; Clone ID: 701154008H1
gatcccaagctcacacaccaaaccaaagcaagaatagtgttctaagagtgagcaacaacttcaaacaccattgtgagaaatggcttccaagggtgcacttctcttgtgtctcaacattctcttcttcactgtggtaagctccacatatgtcccatgcaacccgccccctaaaantcctaaacacacacctgtcccaaagnnnccttccccaaagcaactaagttgccccaaagacaccattaagtttg

SEQ ID NO: 12572 - DNA, 251 bp, Glycine max
  Clone ID: 701154009H1
ggccgagaaaaccctagttcgcttgcagtcacacaagaggccaatgcctattgcatagctgcgagatgggtgaagaagtgaaggtagttgttccagaatcagtgttgaagaagcgcaagagggaggaggaatgggcgttggccaagaagcaagaactcgatgctgccaagaagaagagagccgagagccgcaaactcatctacaacagagctaagcagtacgctaaggagtacgatcaccaggagaaggaa

SEQ ID NO: 12573 - DNA, 237 bp, Glycine max
  unsure (1)..(237): unsure at all n locations; Clone ID: 701154010H1
ggattccattctttcattgataatgcttttcttgctgtgaagttctggattgnnnnnnnnnnnnnnnnnnnnntgtccttttggttttaggtgcctgtgtcagtattttttcctttaatccttttacacttaaagtgtgttatttggcgctaactttcatatttatttagctttttcaggcttaggtttttaataaggtgtgtagaatgtgttacgacgtgagtttgctcagtgata

SEQ ID NO: 12574 - DNA, 246 bp, Glycine max
  unsure (1)..(246): unsure at all n locations; Clone ID: 701154012H1
cttgcagtgcgtacaataatcaaaatcaagccaagcacaaaacatgcaaaaagtgcacaaacatatacaatgaaaaacaaaaacattaaaaaacccaaaaacagcctgtaccgtgaacaggtgttctcgcnctccaaacctccaaacagcgattcaananngcaattgattggaagtggcggatgaacctgattgggccaagaatggctatacggtacatgttgagtgaatttggttggacttgcc

SEQ ID NO: 12575 - DNA, 248 bp, Glycine max
  unsure (1)..(248): unsure at all n locations; Clone ID: 701154014H1
gaggataaagaaggagagactggactagctgagttagggtgagttgcaggcagtgtcatctctcctttgacgacaagatgagcatcccaattccccatcggcagttattcatagacggagactggaaagtccccgtcctcaagaatcggattcccatcatcnncccttccacccaacanatcatntnggatatcccagcagctactaaggaagacgttgatctcgctgtcgctgccgccaaagctgcc

SEQ ID NO: 12576 - DNA, 151 bp, Glycine max
  unsure (1)..(151): unsure at all n locations; Clone ID: 701154015H1
ggtgaaaaatttagataattaancttggagaataatggcattcttccaagtnagtgtcaggcgttggattttaacctttgctatcctttacgtttgtntatttgggaaaaactttggaaatgctgatgaggatgagtccgaggcacagaca

SEQ ID NO: 12577 - DNA, 258 bp, Glycine max
  Clone ID: 701154016H1
tactaagaacccaaaagatctgcaagatcagggcaggattactattcttcattgctgttttctggggattttttcctgttttcactgcaatattcacatttcctcaagagagagccatgctgagtaaggagagagcagcagacatgtacagattgagtgcatacttcctggctagaaccacaagtgaccttccactagacctcattttaccagtgctttttctacttgttgtttatttcatggccggcctcagactca

SEQ ID NO: 12578 - DNA, 277 bp, Glycine max
  Clone ID: 701154017H1
gggtaagtgatgaagtttatccctatgcaatacactagtgtgctcactgaatcaccaattcaccagccatggaaaaggttgaccaagctttcatccaatacccacaacacaggccaaatctcactattatccaacctgaacacattcccataatagacctctctccaataaccaaccacacagtttcacatccatctcccattgaaggcttggtgaaggagataggaaatgcatgcaaagagtggggattcttccaagttatcaaccacggggtgtc

SEQ ID NO: 12579 - DNA, 257 bp, Glycine max; identical to SEQ ID NO: 12374
  Clone ID: 701154018H1

SEQ ID NO: 12580 - DNA, 261 bp, Glycine max
  unsure (1)..(261): unsure at all n locations; Clone ID: 701154019H1
ggaattatattgcagcgaatcacacacactctgaacaacgcccaccatgcaggccagtgataggtttaacatcaattcccagcttgagcatctccaagccaaatatgttggaactggccatgccgatttgaacagatttgagtgggcagtgaacattcaacgagatagctatgcatcatntattggacactaccctttactgggattctttgctnttgctgaaaatgantctattggaagagaacgctacagctttatgca

SEQ ID NO: 12581 - DNA, 252 bp, Glycine max
  unsure (1)..(252): unsure at all n locations; Clone ID: 701154021H1
gggatcgagagtggcccagctcgcaagcaagtagaccacactgagctgtttaagtacaagcaaatggctgaaaagctgaaacaagatgagaaggaaacaaagaaattacaggatagcttgcaaatcatgcaactgcaggcttgctgcaagagaacatcnttgtagaacccttcaggaaaaggtccgggaacttgagaaccagattgcagaagaaaggaaaaccagactaaagcaaganagtagatctcttgc

SEQ ID NO: 12582 - DNA, 251 bp, Glycine max
  unsure (1)..(251): unsure at all n locations; Clone ID: 701154023H1
gagggaaggaggagaagacaaattaaccaccaacaacagcagaagaaaataaaggagcaaactaaaatggcagcaaataaatacgttgcattgttgttggtggtgttccttatcgctggaagtgctaatnccagaccaaaagaagtcagctgcgcaagtatttgcatcgacaaagaatgcaaaagtgactttaacagttggtgtgcaatattcaattgtggtatcaaatgtgcactcataggaccacaaaa

SEQ ID NO: 12583 - DNA, 246 bp, Glycine max
  Clone ID: 701154025H1
agttcaattccaatatattccattctctctgtgtatttccctacctctgcccttcaagatgcagatcttcgtcaagaccctcaccggcaagaccatcacccttgaggtggaaagctctgacaccatcgacaacgtcaaggccaagatccaggacaaggaaggaatccccccggaccagcaacgtctcattttcgccggaaagcaacttgaggacggccgtacccttgctgactacaacattcagaa

SEQ ID NO: 12584 - DNA, 203 bp, Glycine max
  unsure (1)..(203): unsure at all n locations; Clone ID: 701154026H1
gagggagagtgttgacgctccatcaagatgggtatttctagggattccatgcacaagaggcgtgccactggtggcaagaagaaggcatggagaaagaagagaaagtatgagcttgggcgtcaggccgcaaacaccaagttatcaagcaacaaaactatccnnnnngattcgtgttcgangtggcatgttaaatggagggcatt

SEQ ID NO: 12585 - DNA, 244 bp, Glycine max
  unsure (1)..(244): unsure at all n locations; Clone ID: 701154028H1
aaagananccggaaanggtgggaaccgcttttggaaatccattgggcttggatttaagactcccanggaanccatcgnaggnacctacattgacaagaagtgncccttcactggcaatgtttccatnnntggccgtatcttggctggaacatgtcncagtgctangatgaacaggactattattgttaggnggaattatctccattttatcaagaagtacnagaggtacgaggaaaaggcnctc

SEQ ID NO: 12586 - DNA, 249 bp, Glycine max
  Clone ID: 701154030H1
tggagatcggtgactgaggaatacagcgacaaagtaatgggtctagcttgcaagctcatggaggtgttgtccgaagcaatggggttagagaaagagggtttaagcaaagcatgtgttgacatggaccagaaggtggtggttaattactaccccaaatgccctcaacctgacctcactcttggcctgaagcgccacacggatccgggcactatcaccttgctgcttcaggaccaagtgggtggacttcaa

SEQ ID NO: 12587 - DNA, 249 bp, Glycine max
  Clone ID: 701154031H1
accgaatttaagtttcctcagataaaagcacacccatggcataaggtttttcacaagaagatgccttcagaagcagtggatctagtgtcaaggatgcttcagtattcaccgaatctacgatgcactgctttggaagcatgtgcacaccctttctttgatgatctgcgagaaccaaatgcatgcttgccaaatgggcgaccattgcctccattgttcaacttcactgctcaagaactggcggatgcaccc

SEQ ID NO: 12588 - DNA, 260 bp, Glycine max
  Clone ID: 701154033H1
gataaccatggcgtctaactctgcttccgctctttacttccttttatgcctatcgcccatcactttgcttctttctgcgtttcgtgctcaagctcaatctcatgctccagctcccactttcaagtactgtgaaaagaatgcagactatgctgtgaaggtgagtggagtggaaatattgcctgaccccgtggagagaggagtgccattcacctttaagatcccagcttatactcctgaaccaattcaaagcggggattgtt

SEQ ID NO: 12589 - DNA, 240 bp, Glycine max
  unsure (1)..(240): unsure at all n locations; Clone ID: 701154034H1
gaggaaaagcatcaaagatgaaacccaacttttcatttttgtttaagcttttgatactgcaatatctagcagttctatccatttctcaggantttgatttcttctactttgttcagcagtggccaggagcatactgtgacacaaagcagagctgctgttatcccaagactgggaaaccttcagcagatttcagcatcatggactttggcctaactacaatgatggatcatggccctcaaa

SEQ ID NO: 12590 - DNA, 255 bp, Glycine max
  Clone ID: 701154035H1
gctgccaagaattacagggaaaaaggttctgattatgctaagaacgaaattcagcgcctacagcgcattcttgacaagtccattagccctgcgaaggccgacgagttaactctaaagaaaaatatcttgtcgacatatgctgcttgacttattggtgaattgttaaccaactctcatggaagctcgtgatccaccgcagctgccgatgattgtttgactttgatatcgaaattgctgggagatattcaacgtgga

SEQ ID NO: 12591 - DNA, 256 bp, Glycine max
  Clone ID: 701154036H1
tgggccggtaccacatgcacctgtttatcatgccatgatattatgcataaggaacaaccttaagatttaggcagggagcatataatcataaagtcgtgtggctacctcatccatgaggagcagtccccattctctgtttcttatttcttcaatgatcttttcagattcttcagaccgcttaccaccaaaagcaaccatattatatgttgtcgcaacaactccagcattaccacggaatctctctttgctatcagac

SEQ ID NO: 12592 - DNA, 220 bp, Glycine max
  Clone ID: 701154037H1
gagggagagtgttgacgctccatgcaagatgggtatttctagggattccatgcacaagaggcgtgccactggtggcaagaagaaggcatggagaaagaagagaaagtatgagcttgggcgtgcaggccgcaaacaccaagttatcaagcaacaaaactatccggaggattcgtgttcgaggtggcaatgttaaatggagggcttgaggttggataccggc

SEQ ID NO: 12593 - DNA, 93 bp, Glycine max
  Clone ID: 701154038H1
ataaatgacgaatatgatattaatattatttcagataattcagccattagaaataaaacaataggtcaaataactactcatctagatcagata

SEQ ID NO: 12594 - DNA, 244 bp, Glycine max
  unsure (1)..(244): unsure at all n locations; Clone ID: 701154040H1
gacagatattttctcaaagggaaatagcaccatttggcattttacaatttccaagctatggccaaatcaactgggtcacttgtctttctctctattttcactttgctcctttcttgcaacttaggagggcacttaaagtttgctaatggaatgctagaccaggaaagttggtgcgtanaaaaccttcaacaagtnnnnntagcactgaatgataacattcaatatggttgcattgccttgggtg

SEQ ID NO: 12595 - DNA, 251 bp, Glycine max
  Clone ID: 701154041H1
ggggaacatcgcagcaatcgggcaagatagttcagtgctacgaacctgcaactatgaaatatttgggatatgttcctgcattgacgcatgaggaggtcaaagatcgagtgtcaaaagtaaggaaggcacaaaaaatgtgggcaaagtccagcttcaagcaaagacgcttatttttgcgtatacttttaaagtatataattaaacatcaagcgctatatgcgaaatatcttcacgtgatactggaaagacaa

SEQ ID NO: 12596 - DNA, 243 bp, Glycine max
  unsure (1)..(243): unsure at all n locations; Clone ID: 701154042H1
ctctcactttctagcaacaatttctttttccatatactaattttaaattttgaccatgtaagtaattagcataaattgccaacataagaataattgctgtgtgtcagcaagcagtgtcattgtctgcttaataagatttgaaacagaagatttttaagtatgatatattanttacacaaaaaaatggaagtaagatgaggtgtttgacaggcaaatcctaatgtataacagaagatttttaaa

SEQ ID NO: 12597 - DNA, 245 bp, Glycine max
  Clone ID: 701154043H1
gtacatatatacatatatttctaagaaacatgccagagggattggaaacaggtttgtgattttaatgacaagaaaagccataacttcacagaacttcctgaaaattttgccagataaagtaactatgtcaaagcaaatttggtgttactcggttcctgtgaaataatcagtgtacagtccatagaaaccttcagacttcgggtatcttaatttaactaacttttagccttgtactaattcttctt

SEQ ID NO: 12598 - DNA, 245 bp, Glycine max
  unsure (1)..(245): unsure at all n locations; Clone ID: 701154045H1
tattcctttcacatcaatattaaagagtacacaaataaaggaatattttgctaataaatatttaaaaagtagataagaaatatgagatagaaaataataaataataacaacattttatttaaattnctaaaagacttttctataaataacatttgaagtcatatttgtattatttctattattaataaaaatntttttgttaatagaatattattagaaaagatatganacatttttattattaa

SEQ ID NO: 12599 - DNA, 239 bp, Glycine max
  unsure (1)..(239): unsure at all n locations; Clone ID: 701154047H1
gattcacacaaacacaaacacaaacatcattatgcctccatcatcactgttttcaaacatgcatttnttgttcttttttcttctctcctccatacacctctctgtacaactnnnnnnnnnnnnnnnnnnnnnnnnnnnnnnnnnntcattattctcactctctttccctctcacatcactctccctctccaccaacaccgctctcnagatgatgctacgcaactcactcattgcaaaca

SEQ ID NO: 12600 - DNA, 248 bp, Glycine max
  Clone ID: 701154048H1
cttgtagttacttaaccacaagattcatggcctttgctattgagattgccattagaatctttcaagtgttgctcaagtagttttggggtttgaggagtatcagctggagaaagagaaaaaaagaaaataatcaataaattttgtggtgcaatgatgataatgaaactttttaatattttaggcttaaataattttttggtacttataagatcggggtgtttggattttggtatctaactttatttttg

SEQ ID NO: 12601 - DNA, 260 bp, Glycine max
  Clone ID: 701154049H1
ggaataatatctagagaagaagctatatagccatggcctctaagtgtgaaagttggatgattttgggtttgttgattgctatttcgttctcaagcatgcatatggacatggcattcgcagcaaggaatctcctgcagacagaattgatacctgagctgcagccagtagtgccacctgtcatacagcctagagagatagacatctctgacttgccgccactgctaccagtaccatcaccaccaattacccttcccatcccc

SEQ ID NO: 12602 - DNA, 180 bp, Glycine max
  unsure (1)..(180): unsure at all n locations; Clone ID: 701154050H1
atggaaacaagcttcctcactcattcagctgntacactacactccacttaacacctcctttatcaacggtcattccacagggacgtttcggtagattcctctccctccttcgttccacggtcgctttcaactgtttcacactgaactctcttgttcgttttcacaccattttgcttccac

SEQ ID NO: 12603 - DNA, 229 bp, Glycine max
  Clone ID: 701154051H1
ggatgttgcagcttctgaattctacaaggaagacaaaacatacgatttgaacttcaaggaagataacaatgatggctcccagaggatctctggagatgctttgaaagatctgtacaagtcatttgtgtcagagtacccaattgtttcaattgaggatccatttgaccaggatgactgggagcactatgctaagctaactgctgaggttggagccaatgtacaaattgtt

SEQ ID NO: 12604 - DNA, 258 bp, Glycine max
  Clone ID: 701154052H1
gaagcctcgcgagattccaaaccctgaatactttgaactcgaaaaacctgattttgagcccattgctgctcttggcattgagatttggacaatgcaggatggcatcctatttgacaatattctgatagctagcgatgataaagttgcagaatcctatgcgggagaccacatggaagcccaagtttaccattgagaaagaaaaacagaaggctgaagatgaggctgcaactggttcagatggtattgcaggcttccaga

SEQ ID NO: 12605 - DNA, 252 bp, Glycine max
  Clone ID: 701154053H1
gctacaaaaatccattctcaattgagaaagcgaaacgcatagaatgcgaaagaggggaaaagaaaaagaaaagttagggttagggattttgagagatggcatcgactaagaagatcaccctgaagagttcggacggtgaggccttcgaggtggaggaggcggtggcgctggagtcgcagacgattcaagcacatgatcgaggacgactgcgccgacagtggaatccctctccccaatgtcaccagcaagatt

SEQ ID NO: 12606 - DNA, 248 bp, Glycine max
  Clone ID: 701154054H1
gactgcagaggtgtattttctcacttctcagcactgcagcagcgatatgcagttgaagaaacagaaacaaacaaaagaggcagaagatgttgtgggtggacaaatatcgtcccaaaaccctcgaccaggttatggtccacaccgacatcgctcgcaatctcaagaaattggtaacggaacaggattgcccccatttactcttctatggcccatctggctccggcaagaaaaccctaatcatggctctt

SEQ ID NO: 12607 - DNA, 247 bp, Glycine max
  Clone ID: 701154055H1
agcaaccatcatgataagagttctgttgacaagagtggcaacatattgcctggcactgttgttgactccaaaatctgccatcccaccgaatttgacttttatctctgcagccatgctggaatacagggtacaagccgtcctgctcactaccatgtgttgtgggatgaaaacaattttactgctgatgccttgcaaacactcaccaacaatctttgctacacatatgctcggtgcacccggtctgttt

SEQ ID NO: 12608 - DNA, 242 bp, Glycine max
  unsure (1)..(242): unsure at all n locations; Clone ID: 701154056H1
attgcagttaatagattgaccaaaaggtattttgtagacttgtaaactatttcaatcaaatgaacaactgatgatgacagcagacacaaacagttaaacacacatgcgtacacaattggtgacaaatgacaattcatctttgcctctctgctgattccaaaataggtagaataaaaacacaagtggacatctggatgtttagcccaaataaaatgataagannnagactacctgtgagtgcc

SEQ ID NO: 12609 - DNA, 242 bp, Glycine max
  unsure (1)..(242): unsure at all n locations; Clone ID: 701154057H1
ggcacaagtgagtttgttgatcgagataactagaaacagtgtgatgaaaatgaaggtccttgttttcttcgttgctacaattttngtagcatggcaatgccatgcgtancgatatgttccctctccgaatgaacactggctatggtgcccgtactccggaggtgaaatgcgcaagttggaggcttgctgtggaagcacacaacatctttggctttgagaccattcctgaagagtgcgttgaa

SEQ ID NO: 12610 - DNA, 239 bp, Glycine max
  unsure (1)..(239): unsure at all n locations; Clone ID: 701154058H1
gatgacagtttgtttgttctgtatgggggctactcttgctttgcttggaaaagggtcatttgcgattgcattgtctattctgtttgtttgcgggaatgtagcattcttctcagttggattaggccctgtgtgctgggttttgacttctgaaatcttccctttgcgtgtgcgtgctcaagcatctgcacttggagctnnnacnaatagggtctgcagcggccttgtggccatgtctttct

SEQ ID NO: 12611 - DNA, 264 bp, Glycine max
  unsure (1)..(264): unsure at all n locations; Clone ID: 701154059H1
gaattgttttttgaaaattaataattgattcctaagaggcaactttcgtaggatgaacaggagcatttgattcccaacaggnagccagagaagagagaganagagtgagggaantgcntacatcattcataagaggtggtccttgtnggtttccccctagganaaggctggccntntgttctggcntgaagtgtgngnggnatctgtttatgannctttatnattgttatctaccgttattaactcagcctttggaatctctat

SEQ ID NO: 12612 - DNA, 243 bp, Glycine max
  unsure (1)..(243): unsure at all n locations; Clone ID: 701154060H1
ggaaatgaaaaaagtgacaagaagtgaagagaatgcgggttgtgtgttgttccaattcaggcgtgagtgctttccctagtcgtcttagattccctccactgatccgcaatttcaacaacaccctcttngatccgctttctanattctccanccctccgttccactgcttcgtcgcaacacgttacaataatggcttcgnagaattctcaacaagacacgcgcttngcnagaatcgcctctgcc

SEQ ID NO: 12613 - DNA, 249 bp, Glycine max
  unsure (1)..(249): unsure at all n locations; Clone ID: 701154061H1
ggcacaagtgagtttgttgatcgagataactagaaacagtgtgatgaaaatgaaggtccttgttttcttcgttgctacaattttggtagcatggcaatgccatgcgtaacgatatgttccctctccgatnngaacactggctatggtgcccgtactccggaggnncnatgcgcaagttggaggcttgccgtggaagcacacaacatctttggctttgagaccattcctgaagagtgcgttgangcaaca

SEQ ID NO: 12614 - DNA, 243 bp, Glycine max
  Clone ID: 701154062H1
gggaccgagttgttgaagctagagatgagttgcatagaatgttgaatgaggatgagttgagagatgccgtgcttctagtttttgccaacaagcaagatcttcctaatgctatgaatgctgcagagataactgataagcttggtcttcattccctccgtcagcgccactggtatatccagagcacatgtgccacatctggtgaagggctctatgaaggacttgactggctctcaaacaacattg

SEQ ID NO: 12615 - DNA, 263 bp, Glycine max
  unsure (1)..(263): unsure at all n locations; Clone ID: 701154063H1
ggggatcagcagggagaattaggtttttagggtttacaccgagcagccacacctcccgcagcagccatggttctcaaaactgaactatgccgattcagtggtgccaagatctacccaggaaagggcatcagatttgttcgtngtgattctncaggttttcctgttcgcaaactcaaaatgtaagaggtatttccacaatcgcctgaagccttcaaagctcacctggactgcaatgtacagaaagcaacacaaaaaggacattg

SEQ ID NO: 12616 - DNA, 251 bp, Glycine max
  Clone ID: 701154064H1
gaggaatatattaccaaggcacttgattatctacatgaaaacaagactgagacagagatcattagtatcctgcacaacacttgccaccagcttccttctttcaagcagaagtgcgttgctttggtggactattatgttcctcttttcttctcggaagtagctacaattcagcctggagaattctgccacaaagtcaatctctgtcaggacattgcacatatttccttgaaagttcaagaagatagctgtga

SEQ ID NO: 12617 - DNA, 229 bp, Glycine max
  unsure (1)..(229): unsure at all n locations; Clone ID: 701154065H1
gacacaccatgaaggaaagtggtttcgagaataatgacacaaagcaagctgctgctgatgtgttgtttctatattcanaatttgcaatggcatgcattggatgtaaggctcgtccatgtgatttgaggtttcatttgatgaaggagatttcaggtatgccctcttctctaaatagggatcaccacagaatgcagcatctcctgatgcaatgggtgagtcatccagcaca

SEQ ID NO: 12618 - DNA, 140 bp, Glycine max
  unsure (1)..(140): unsure at all n locations; Clone ID: 701154067H1
ccctccccccatcctttgaaagagaactttgcgaaagaacattaaattaggaatcgatcccttttggaaagagtccccttttcttaactcgcatgagaaaggaagaaggaaagaagtgatcaangaatataatttgcacc

SEQ ID NO: 12619 - DNA, 247 bp, Glycine max
  Clone ID: 701154068H1
ggcacaagtgagtttgttgatcgagataactagaaacagtgtgatgaaaatggaggtccttgttttcttcgttgctacaattttggtagcatggcaatgccatgcgtacgatatgttccctctccgaatgaacactggctatggtgcccgtactccggaggtgaaatgcgcaagttggaggcttgctgtggaagcacacaacatctttggctttgagaccattcctgaagagtgcgttgaagcaaca

SEQ ID NO: 12620 - DNA, 251 bp, Glycine max
  Clone ID: 701154069H1
ggcacaagtgagtttgttgatcgagataactagaaacagtgtgatgaaaatgaaggtccttgttttcttcgttgctacaattttggcagcatggcaatgccatgcgtacgatatgttccctctccgaatgaacactggctatggtgcccgtactccggaggtgaaatgcgcaagttggaggcttgctgtggaagcacacaacatctttggctttgagaccattcctgaagagtgcgttgaagcaacaaagg

SEQ ID NO: 12621 - DNA, 245 bp, Glycine max
  unsure (1)..(245): unsure at all n locations; Clone ID: 701154071H1
ctatctaaacgctattagacaatattttcaaatcaaaagtgacgcattttattaaaatcaaatttaaaaaaaaaattggagagaataattttttaaaaaaggaaacagataccttcaacaaagaactccagacatgaaagatccctcttatctcttccataacataattccagactcgtgaacaggatttgaggctaactctaatattgttacntaattttcaatcagcttgagaaccttagaat

SEQ ID NO: 12622 - DNA, 241 bp, Glycine max
  unsure (1)..(241): unsure at all n locations; Clone ID: 701154074H1
atcattatctactacacttactttggacttgcacaattgcacaacccgccgcgatttgtgcaacaattcttcgggcacaatgtcaacgagaggcctactagatttaccttctgtcaggacacgaccgttgaagtttatgaggatgtgggagatttttagtgatgataaggatctcacgtcatccgagattgcctattactgngatgttattagtgaagagatacttgagggagagatgctt

SEQ ID NO: 12623 - DNA, 244 bp, Glycine max
  Clone ID: 701154075H1
aggtaagagaattctatataaaaaagaatgtgatggagtcatgtgtatgttatttttaatatatcagctaatgttaatttattagtttgtttagaaatgttaattgaaaaattcgaacgtgtgatttttttttcttttctcctttaccatttttcatccacaagaccaacctcatgtcttctgaataaaaatggaaggcaagaaaattcacaaagaaaatgttgatgagagccaaaagtgacat

SEQ ID NO: 12624 - DNA, 199 bp, Glycine max
  Clone ID: 701154078H1
tgttccatgtggatgtgggttgtccttgtggccattgctggtgcccttttagtcctaagatctatcctcaagaatgtaaattggtggctctatgaatccaaattgggtgtgaagcagtactctttgccaccaggtgacatgggatggcccttcattggcaacatgtggtccttctcagtgctttcaagtccaaggaccc

SEQ ID NO: 12625 - DNA, 254 bp, Glycine max
  unsure (1)..(254): unsure at all n locations; Clone ID: 701154079H1
ggagagtcagattcgctcgccttgcttncgccacacaacagcaactgcagcaatggctcccaaacgaggtggaaaggctccggctcttgccgctaagaagaagcctgagaaggtttcgaatccgttgttcgagaagcgtccaaagcagttcggaatcggaggggcgttgcctccgaagagagacttgactcggttcgtgaagtggccaaagaatgttcaaattcagaggaagaagaggattctgaagcagaggt

SEQ ID NO: 12626 - DNA, 246 bp, Glycine max
  Clone ID: 701154080H1
ggtctcgtggaagtgtaagcaagcaaaaccctagcggcgcctgctttctttgttcgtgttttgcatcaggatggagtctcaggtgaagcacgcacttgttgtcaaagttatgggtcgtactggatccagaggacaagtgacccaggttagagtgaagtttttggatgatcagaaccgtcacatcatgaggaatgtgaaaggacctgtgagagaaggagacattctcaccctactcgagtctgaaag

SEQ ID NO: 12627 - DNA, 258 bp, Glycine max
  Clone ID: 701154081H1
atcagtggtgccccccaggataacaacataatgctgtggaatgctgtcatatttggtcctgatgatactccatgggatggaggcacgttcaagttgacactccaatttactgaggactatccaaataaaccaccgactgtacgatttgtgtctcgcatgtttcatccaaatatttatgctgatggaagtatttgtttggatatattacaaaatcagtggagtcctatttatgatgtggctgctatactcacatctatc

SEQ ID NO: 12628 - DNA, 248 bp, Glycine max
  Clone ID: 701154083H1
taagaagggagacaaggttggatcttctgaagctgcattgcttgccaagctagggataaggcccttctcgtatgggcttgtggttctttctgtttatgataatggttcagtgttcagtcctgaggttcttgatcttactgaggatgaccttattgagaagtttgctgctggtgtctcaatggttacttcactttcattagctatctcatacccaacacttgctgctgcaccacacatgtttgtcaatg

SEQ ID NO: 12629 - DNA, 258 bp, Glycine max
  unsure (1)..(258): unsure at all n locations; Clone ID: 701154084H1
gaagcctcgcgagattccaaaccctgaatactttgaactcgaaaaacctgattttgagcccattgctgctcttggcattgagatttggacaatgcaggatggcatcctatttgacaatattctgatagcnngcgatgataaagttgcagantcctatncgggagaccacatggaagcccaagtttaccattgagncaatnnaacagaaggctgaagatgaggctgcaactggttcagatggtattgcaggcttccaga

SEQ ID NO: 12630 - DNA, 247 bp, Glycine max
  unsure (1)..(247): unsure at all n locations; Clone ID: 701154085H1
tgaagagaggctggccaagggtcaaagaattatcaatgaaaganagcaaagggctaatgagaatgacagactatgcagacagaaagggaaggaccttgaagaggcacagaagaagattgatgaaactaatataacactgagaaataaagaagatgatgttaacaataggattgtgaatattactctaaaagagaaggaatatgattctctgagaacaaacttggatctcaaagagaaggagttatct

SEQ ID NO: 12631 - DNA, 242 bp, Glycine max
  unsure (1)..(242): unsure at all n locations; Clone ID: 701154086H1
tctagcgtgttgtcgtactattgcattgtgatggtttgtctgaaaaaaaaaatagggtcttgtgtatggtttcttttcattcacacgccttttgttcctttgataaagtgtcatctcgggtaataactttgcctaggttacaaactttttcttaaaaaaactgaaaagaaaaactaaaaaccaacatgcttttgaaaaagatgaccgccantattatttggaaaattcataaatcanaacgc

SEQ ID NO: 12632 - DNA, 242 bp, Glycine max
  Clone ID: 701154087H1
ggcctcatcgatagtttcaagtctcgttttgacaatggtgagggttagtgtgttgaatgatgctctgaagagcatgtacaacgccgagaagcgcgggaagcgccaggtcatgattaggccatcctccaaggtcatcataaaattcctattggtcatgcagaagcacgggtacattggtgagttcgagtatgttgatgaccacagggctgggaaaatcgtggttgaattgaatgggcggctga

SEQ ID NO: 12633 - DNA, 240 bp, Glycine max
  unsure (1)..(240): unsure at all n locations; Clone ID: 701154089H1
ggaatgaagcaagaatgaagcaagaatgaagcaagatttccgttggtactgtgttcctccctttggactgacttcaaagactcgctgaattgatttccgcctatggcacgagtgatgaatgnataagaaaaattataaagcgctgtttgtngattgtcatttcttacatggagggaacgggntttggtgcagcggcaccgacgccattggttaggttgtggagaactgcgtttttgacgc

SEQ ID NO: 12634 - DNA, 239 bp, Glycine max
  Clone ID: 701154091H1
gacaacaacacattccaatcacaaagccagccattgcaacatttgataattcttttgaagtcccagaaaatgcaagcaacctttctatgctcccatatgtttctatcataccctcttccagtcaaattgttgcagcgtagttcaccacacaagttgttcagtgatggcaccaccactcgtaggagtttaatctatgcatcaaaaagagaccttttgggcaccattatgatggaaatttg

SEQ ID NO: 12635 - DNA, 241 bp, Glycine max
  Clone ID: 701154094H1
gacacaatgataatctattcatacaattcttgattaatataataaaagaatgcttttctctttttgcatgactaatctcaaatttgcaaatgtattaactttgcttgttcctgtcagatttgtgaatgttcactgctatttgctcgactagaagtgcttaacatttctggaaaccgtcttactgatgcatgtggatcttatctttcaacaatcttaaaaaactgtacagctctttgtagct

SEQ ID NO: 12636 - DNA, 251 bp, Glycine max
  unsure (1)..(251): unsure at all n locations; Clone ID: 701154095H1
ggaaaaagggagtgcctgntaacccataaccnaccgcaccaccgttttcctttgctttgcgntctacaatgtcgaaaacctcagagattattacatgcaaagctgntatttgctggggaataggtnaacctgtgactgtggaagagatacaagtagaccctcccaaagccaccgaagttcgagttaagatgctttgtgccagtatatgctccacagnacatctctagcacaaaaggattcccanataccat

SEQ ID NO: 12637 - DNA, 244 bp, Glycine max
  Clone ID: 701154096H1
gggtgtttatttggaggaagcaattgagtgatgagtgatggcgaaaggcgtaatcggagaagaaacgcgactcaaattagcggagggtcttctcagccaatccgcagttccatccgaggtgggtcttctaatcggcaagttcagctcctccttgggccgggccttcctcttcgacctcatcccaccccacacaacgactctgccgagcccgcctgcgccctcacgaccccgacaagaagaaggg

SEQ ID NO: 12638 - DNA, 262 bp, Glycine max
  Clone ID: 701154101H1
ctacgaaggttatgccctcccacatgcaatcctgcgtttggaccttgcagggcgtgatctcactgatgccctcatgaaaatcttgactgagcgtggttacactttcaccacatctgcggaacgggaaattgtgagggacatgaaggagaaactggcctacattgctctggattatgagcaggagttggaaactgccaagaccagttcagctgttgaaaagagctatgagctacctgatgggcaggtgatcacgattggcgct

SEQ ID NO: 12639 - DNA, 252 bp, Glycine max
  unsure (1)..(252): unsure at all n locations; Clone ID: 701154102H1
cgccgcgccggagggtattcttggccgcagagaacctcggagaggaggaaagagaagagagaaaaagggaagagngaanagagaagagagaganaagcttttaaaaaatgggaaaaaaccggccccgagcccttatatagaggtcggaccggttcggtttttnttccttgaaccaaaccggtccggttctcccttttttggcccgctggactcacctctggcccatttttnntcttttctctttttcttctt

SEQ ID NO: 12640 - DNA, 248 bp, Glycine max
  unsure (1)..(248): unsure at all n locations; Clone ID: 701154106H1
agataatggcgaaacggtttcagcctcacaaaagttccgacggtttatgatttatgtacatgccaaaggaatgattgtggatgatgaatatgtaattcttgggtctgccaatataaatcaacgatctttggctggatccagagatactgagatanaaatgggtgcatatcaaccccatcatacatggagtcaaaaaaagggacatccacatggtcaggtatatgggtatagaatgtctttgtgggcag

SEQ ID NO: 12641 - DNA, 250 bp, Glycine max
  Clone ID: 701154107H1
agaaaaaggaataggagatggcacagttagttatggaatggatgatggtgatgacatttacatgcgctcttggactggaaccattattggtccctataatactgtacatgaaggaagaatttatcaattgaagctgttttgtgataaagactaccctgaaaagcccccgagcgtccggtttcattcacggatcaatatgacttgtgttaatcatgaaactggagtggttgaatcaaagaaatttggtctt

SEQ ID NO: 12642 - DNA, 249 bp, Glycine max
  Clone ID: 701154108H1
atgaagaaaattgtgttttcttccttccacatcgtccaaggagccgaattaatgaacctccttttttccttttcatgaaaggaacaggttggtgcggtgctggagctgaccactatgagcccctgattgctcatccttccgcgtttggttcccaagaaaaggttgctgtggtactgtgaggtttccccggcctgcaattttgtggagtagaaattgagggcaattagaaattttattcgccctatttta

SEQ ID NO: 12643 - DNA, 249 bp, Glycine max
  Clone ID: 701154109H1
gagagaaagagagagaaagatgtcgaagcgtggtcgtggtggttcggcggggaacaagttccgcatgtcgctgggtcttccagtggcggcgacggtgaactgcgccgacaacacgggggcgaagaacctctacatcatttcggtgaaagggatcaaaggccgtttgaaccgtcttccctcggcctgcgttggcgacatggtgatggccaccgtgaagaagggaaaacccgatctgaggaagaaggtctt

SEQ ID NO: 12644 - DNA, 248 bp, Glycine max
  Clone ID: 701154111H1
gggggaagaaggaaagaaagatgagcgtgaagttgaattgcgtgggtggtggcgagactcacaacgtcttcgtttacggtagtctgttagccgatgaggttgtccataccctattgaagcacgtccctccaaccgcacccgccatccttcacgactatcacaggtttaagatcaaaggtcgcgtttatcccgctattctccccgtccaaaacaacaaagttaatggcagggtgcttcttggtatctcc

SEQ ID NO: 12645 - DNA, 247 bp, Glycine max
  unsure (1)..(247): unsure at all n locations; Clone ID: 701154112H1
ggcatatccaaaggaacaaaaatattattaagatgatcaacattattggagcacttgttctactctttgcatttctcttcctcagttgtgtgtatgcacaagacacaacaacccttgtgcctgcaatcntaacttttggtgattctgctgtggatgtagggaacaatgactatcttcccacccttttcaaggctgattaccctccttatgggagggactttgttaaccaccaacctactgggaggtt

SEQ ID NO: 12646 - DNA, 191 bp, Glycine max
  Clone ID: 701154113H1
ccgatcgcatagctcgctcgcaaccaccatgccttcccgaagaagaactctcttgaaggtcatcattctcggtgacagtggggtggggaagacatctttgatgaaccaatatgtgaataagaagtttagtaatcagtacaaggcaaccattggagcggattttttaaccaaagaagtgcaattcgaagata

SEQ ID NO: 12647 - DNA, 250 bp, Glycine max
  Clone ID: 701154114H1
gaacaacaaaagaattgtcttgggctcttcaaagtggtctgaagaatgagctaacatgggctttgaatacacttacgctgctctcctttaaagaaaaggatgacatgcgcaaggatgcgactccccttgcgaaaattcccggcttgcttgatgcgctcctacaagttatagatgattggcgtgatatagcactcccgaaggaatttgccaagacaacgaggatcaggactttaggtgcaaattctgttgt

SEQ ID NO: 12648 - DNA, 151 bp, Glycine max
  unsure (1)..(151): unsure at all n locations; Clone ID: 701154115H1
ggtgaaaaatttagataattaancttggagaataatggcattcttccaagtgagtgtcaggcgttggattttaacctttgctatcctttacgtttgtgtatttgggaaaaactttggaaatgctgatgaggatgagtccgaggcacagaca

SEQ ID NO: 12649 - DNA, 251 bp, Glycine max
  unsure (1)..(251): unsure at all n locations; Clone ID: 701154116H1
aactgttgttgagggaactatacagaagctatttgaagggcatcatatgaattatatcgaatgcatcaatgtggactataaatcaactagaaaggagtcattttatgaccttcagcttgatgtgaagggntgtcctgatgtttatgcttcctttgacaagtatgttgaagttgaacgtcttgaaggggataacaaatatcatgcggaacaatatggtttgcaggatgctaagaagggtgtcctgttcatga

SEQ ID NO: 12650 - DNA, 177 bp, Glycine max
  Clone ID: 701154118H1
atctgtgacgagcatcatggcctcgagagcagtgctattgttggctatgtgtgtgcttccggccatggttgtggccattcgcccagcaaagaaccctttttgcgtgaagggtcgcgtctactgtgacccttgccgtgctggttttgagacctcagcaaccacctacattgccggtgc

SEQ ID NO: 12651 - DNA, 249 bp, Glycine max
  Clone ID: 701154119H1
gatactcaattcattttcttcttctgcttcaccttctcttctcttctctcatagggttagggtttttttctcttcattgctctctctgtcgttttatttccatggctcagcaagatgctcagaatggtgggtcggagaatgccgctgctgcggtgtcgtttgtcgctttgaagccgcagctcctcatcgaagctcccaaagcgaacgacgccgttctgttctacaaggccgcgtttgccgctgaggagg

SEQ ID NO: 12652 - DNA, 247 bp, Glycine max
  unsure (1)..(247): unsure at all n locations; Clone ID: 701154120H1
ggtgcacaagtgagtttgttgatcgggataactagaaacagtgtgatgaaaatgaaggtccttgttttcttcgttgctacaattttggtagcatggcaatgccatgcgtacgatatgttccctctccgaatgaacactggctatggtgcccgtactccnnaggtgaaatgcgcaagttggaggcttgctgtggaagcacacaacatctttggctttgagaccatccncaagagtgcgttgaagcaac

SEQ ID NO: 12653 - DNA, 249 bp, Glycine max
  Clone ID: 701154121H1
gatatgtaaacagtaaaccaaactggactgaggcgagaaggagtagagcatagtatggagcacacagtctcaaactcaagcagtgtcgagcagattctgaatcttctctacgcagccggctacgtcgacgccacaaatcccgatgcgccgccgtcttcagaaaatcgccgccggcctctcctggtgcatcgccgccataacgcaaaggcgacgacaacacacgtgacatcgaggaatcgtttggattag

SEQ ID NO: 12654 - DNA, 250 bp, Glycine max
  unsure (1)..(250): unsure at all n locations; Clone ID: 701154122H1
ggagggttggttcatttgatctgcgagtggagaagagaatcgtgatgggaggaggacacggtcacggcaccacctacaaaggagttaccgttcatcacccaaagcgctggcacactatcaccggcaagggtttgtgcgcggtcatgtggttttgggtattctacagggcaaagcaagacggtcctgttgtattgggctggaggcatccttgggagggtcatcacgncgatcatggcaagggccattaagc

SEQ ID NO: 12655 - DNA, 262 bp, Glycine max
  Clone ID: 701154123H1
gatccctgagcgcaacaataagaaaatccccaaaaggaaccctaggtggcggaaattcaagtagcatagttatagcaagagtaataatactaaaaaaagactcaataatcgtcatcactcaaacatcgatttagaaagaaagaaaagaaaagacaaaaaaaggagatagaaatagatccttcctagcacaagaaagaaaacaccaagtttatatccgagggattgattaaccgacttatctgcaagggtgaaatctcaatcc

SEQ ID NO: 12656 - DNA, 260 bp, Glycine max
  unsure (1)..(260): unsure at all n locations; Clone ID: 701154124H1
ctccaccctctgctataattacatgactagattatttgacccgctgctattgcctattctttggattctttcgattgctgctctttctctctttacgtggattctttaaaaaaacgttgtacttcagtcacaaagtcttattagcatttttaccaaaagaaaaaaatatcttatttgcatagtttttttttttatatataaatagtatagtattgatatatattnctgggnncgactgacggtataatttgtgacgcgtt

SEQ ID NO: 12657 - DNA, 264 bp, Glycine max
  Clone ID: 701154125H1
acctccacctattgaagctccagccttatctttagatgagctgaaggagaagacagacaactttggttcaaaggcattaataggtgaaggatcgtatggaagggtgtattatgcaaccttaaacaatggaaaagcagtggctgtgaaaaagcttgatgtttcatctgaacctgaatcaaataatgagtttttgacccaggtttccatggtctcaagattgaagaatggcaattttgttgagttgcatggttactgtgttgaagg

SEQ ID NO: 12658 - DNA, 246 bp, Glycine max
  Clone ID: 701154126H1
gactcaaattttttctagagcgagaaagtgagaggggagagaaagtagcagatcctccatggcctccaccaaggaacgtgaaaacttcgtctacgtcgccaagctcgccgaataagccgaacgctatgaagaaatggtggaagcaatgaagaatgtggcgaactaaacgtggaattgacggtagaggagcggaaccttctgtcggttgggtacaagaacgtggtgggtgctcgtagggcttcgtgg

SEQ ID NO: 12659 - DNA, 256 bp, Glycine max
  Clone ID: 701154127H1
cctccatcaggatcttcacaatatctgcaacaagaaaaactgttattatgacaagtacaaaaataataaaaaaagaaaaggccaatgtgacctctacatccacggacagtcagagagattcaatttcttttaagagaacaaatacaaagagtctctatcaatgatacaatcaacaacccatcccctattttaccctaattgcaacccaataaactgattcacattccaaggaagtacaaaaaaacaaatctttaga

SEQ ID NO: 12660 - DNA, 117 bp, Glycine max
  Clone ID: 701154128H1
agaccagcacaaattatccacttgttaatttcttgatggctgctgactcagatttttacgttggggcattgggttcttcctggtcctttcttatagatggaatgagaaatactgggg

SEQ ID NO: 12661 - DNA, 248 bp, Glycine max
  Clone ID: 701154130H1
ggctgacaagccaatcctttgtgtaggtgctcaaccctagtaagccgcaatggtgaagtactcaagggagcctgacaatccaactaagtcttgcaaggctagaggcgccgaccttagggttcattttaagaacacaagggaaactgcctttgcaatcaggaagttgccccttggtcaaggctaaaagtattggaagatgttcttgcccacaagcaggcaattccattcagacgtttttgtcgaggtgt

SEQ ID NO: 12662 - DNA, 265 bp, Glycine max
  unsure (1)..(265): unsure at all n locations; Clone ID: 701154131H1
ggtgttaagaaattnaagtgaggagctagagaatgatgatgaagtctgctatgtgtgcagtggnggttgtagcacttctncttctggcggaggtggggcccatggctgaggctgtgacatgcaccccaacagagttgagacnnngtcttccagcaatcacttccggngctaaaccttccaatgcttgttgcacgaagctgaagcagcaagaaccatgcttatgtggctacctcaaaaacgcnagcntgaaacaanangttaactc

SEQ ID NO: 12663 - DNA, 256 bp, Glycine max
  Clone ID: 701154132H1
agtgtgttaagtactactactacgcattgttataaattaatctatatcttcttgatatgtattatgtaattatatatgagaatttgtgaatttgttatctgtcagagactgcattattgagatgagcagtccgttgaagaatcatttgcaaagagtgatgaagatggctacgtttgcaatgaaaacctcaatttttctagcactaataataaatggaaagctatgatatatggccaacaaaagaaagagactatga

SEQ ID NO: 12664 - DNA, 248 bp, Glycine max
  Clone ID: 701154133H1
ggcgtgagtcgagggtgttcaccacagtttacactcacgagagtacccattttctcttctcaatttctcaagtgtgccgagaaaatcatggtggacgcagcagaacgtagatacttggaggatgatgattcatctctcatgaaaactatcaagggcgcaacaactggtttagtggctggaactatctggggtactgtagttgccacctggtatgatgtcccccgtgtcgagagaaatgttgctctcca

SEQ ID NO: 12665 - DNA, 206 bp, Glycine max
  unsure (1)..(206): unsure at all n locations; Clone ID: 701154134H1
gaaaccatgcctgtccacaaacacaacaacacctacagtggcagaacacatcncatggagaaggcccagaaaccaattcannnnnnnnnnnnnnnnnnnnnnnnaccccatttcagnaacagatccaaaccctcaaatcccttccataatccaatccactaggtgcaagtccaccatttcctccctgctcctctccatttctccaa

SEQ ID NO: 12666 - DNA, 248 bp, Glycine max
  unsure (1)..(248): unsure at all n locations; Clone ID: 701154136H1
ggggtgccattgttgctgtcatcatccgcagctgctgttattcgcaccgcaaacaaacagtgagccatggccgtcggaaagaacaagcgcatctccaaagggaaaaagggtggcaagaagaaggcagctgatccctttgccaagaaggattggtatgacattaaggccccttctctttttcaagtgaaaaatgttggccaaaacccttgnggcctcgtacgcaggtnncaagattgcttctgaaggac

SEQ ID NO: 12667 - DNA, 247 bp, Glycine max
  unsure (1)..(247): unsure at all n locations; Clone ID: 701154137H1
ggcatcaattcaaaatatatcatcaattataagcatgggtttgtggaacacaacgaatgcagtgtcttgccgctttcacaagtttggtgatgaccaaaagaatctggtcttccaaggtgatgccacgtcttcttccaggggcatagaactcanngagttagacggtggaggaaaaccagtgggtggcagtgtggggagagtgttatactcttctccagtgcacctttgggaaagctctacagtggtc

SEQ ID NO: 12668 - DNA, 246 bp, Glycine max
  unsure (1)..(246): unsure at all n locations; Clone ID: 701154138H1
ggagggaggcattttttgtaccgagatgcgcattaatganaaatgaataatgaataagaacacgaggcagggcagaggagaaggccttgtgattcatcatgacgaatgaacccaacaacaagtacgatgtttttctgtgtttagttggcccanatacccgctacaccttcgctggtaatctctataatgctttgcgccgcaacagaatcaatacctttttcacngaagataatcatcatgntgagc

SEQ ID NO: 12669 - DNA, 250 bp, Glycine max; identical to SEQ ID NO: 12641
  Clone ID: 701154139H1

SEQ ID NO: 12670 - DNA, 247 bp, Glycine max
  unsure (1)..(247): unsure at all n locations; Clone ID: 701154141H1
ggaacggaaaagcactggcgcantaaccctgaggcttctcttctcttctcttctctgtcgtgagtcaccatggtgagggttagtgtgctgaacgatactctgaagagcatgtacaatgctgagaaaaggggaaagcgccaagtcatgattaggccatcctccaaagtcattatcaaattccttttggtgatgcaaaagcacggatacatcggagagtttgagtatgttgatgaccacagggctggta

SEQ ID NO: 12671 - DNA, 247 bp, Glycine max
  Clone ID: 701154143H1
gacactcatttctttttctctatcttttgttctgctcagctcgatctacctaccttggttcttctctgttctgttatttcagtgcagcagcagaaaatgaccatcctcattgagcaacctgcccttgagttacaagttgaaggcaacaatgtgcatgctgaagaaaccaatgagcttgtattggatggtggatttccattgccaaaggatggatatatggccccagaaatcaattcatttggccact

SEQ ID NO: 12672 - DNA, 253 bp, Glycine max
  Clone ID: 701154145H1
ggtgcaattgaaagagagatttgatagcctcaactcaagtaagggttttctctttgagaaaatcgtatcttacaccttttggtgaccactttgagtgagagaagagaaattaagagagatactcaaattagattcaagagagatggccatcaaccatgaaacttgggctttcattttcggtcttctaggcaacgtgatctcctttatggtgttcctcgctccattaccaactttttaccaaatctacaagaaa

SEQ ID NO: 12673 - DNA, 246 bp, Glycine max
  Clone ID: 701154146H1
cagtatgtactgaatcagtagtattcattagaagtttaagccattttgattcttttatcatggaagtaacttccatctggtattcaaaaccaatttgaggatttgaccttggggctccaactatgttgcttttatcaagagaacttggaggaattagctgcctattagattcatgctccataatattgtgattacaatactctggctaatgaaagctaggatattggaatatggaatgaaaatcat

SEQ ID NO: 12674 - DNA, 249 bp, Glycine max
  unsure (1)..(249): unsure at all n locations; Clone ID: 701154147H1
gactcgcagttgtattgttgaacaagggtttctctgtctgcttcttcactttctctcgtttcaatcgaaaccaaaacaaaaacatgggcagaaaattcttcgtcggtggcaactggaaatgcaatgggaccactgaggaggtaaagaagattgttactactttgaatgaggctaaagtccctggagaagatgtcgtagaagttgttgtgaacccnccntttggggttcctccnggtggtaaaaagttng

SEQ ID NO: 12675 - DNA, 249 bp, Glycine max
  Clone ID: 701154148H1
gagcgtcaagtatcctcttccttcttctgcatcaactcatcttattagagtttttgactaatcaattatggcctatgagataactgagataaagaagattggcataggcctaattggtttcggcatatttttcgcatttcttggcataattcttttctttgaccgtggtttgcttgctctgggaaatattttttccttggcaggggtagccattttgcttggttggcgttccacgtgggcactcttcac

SEQ ID NO: 12676 - DNA, 247 bp, Glycine max
  Clone ID: 701154150H1
cacttattaacttaattgattgagtaatttatagtctaacctccaaaagaattcttcaacttattgaccgaacaatttataatccacgacgaaactctttaacttattaactgcatcatattccattaataatattttattgattgttttgaacaatttttagtcaatgctttatgcctttatcttcatcattttaaaataaatattgattttgcaataataataaccaagtaaaaacaaatgcaag

SEQ ID NO: 12677 - DNA, 252 bp, Glycine max
  unsure (1)..(252): unsure at all n locations; Clone ID: 701154151H1
atcgactcaacgaacacttccaagagttgggaaacgcgttagatcctgatagaccaaagaatgacaaggcaactatcctcactgagaccgtccaaatgctaaaggacttaaccgctgaagttaataggcttaaaacagagcataaaacactttctgaagagtcacgcgaactaatgcaaganaagaatgaactcagagaagagaagacatctcttaaatctgatatagaaaatcttaatgtgcagtatcagc

SEQ ID NO: 12678 - DNA, 247 bp, Glycine max
  unsure (1)..(247): unsure at all n locations; Clone ID: 701154153H1
gatcgaagcaaaaaatgaaaacccaaagtgcttctctcctctgtctttttctctctcttgctatccttttggctagtngcactgctgcaagtgcaactccaagaagcgcagtgccaagccaccatgtttcaacattcaacagaagcctttttccttccacttttctctttggaattggttcttctgcttaccaggcagaaggagcagcaagtgtagatgggagaggaccaagcatatgggacaccta

SEQ ID NO: 12679 - DNA, 245 bp, Glycine max
  unsure (1)..(245): unsure at all n locations; Clone ID: 701154154H1
ggaagagatagaagcttacttggagagctaagttgggttaaaaagaggcgattccaggtggagagatcgtatgctgcaagcgcaccgtatcgattaccgatgacgtcagcgttaacaacgaggactcgatctctgggtgggtcaatggcgatgcccaatgacgcatttccggccaagtgtgcatctctgaccaccgtgacttccacacaacatacgacncgacatngnnagngccattangcatt

SEQ ID NO: 12680 - DNA, 257 bp, Glycine max
  Clone ID: 701154155H1
gaaaataaatcttttgaattgattgttgtaagactttgtaattgaggtgctgcaatggcttcaagtcaggaagaggtgactcttttgggagtaattggaagcccatttgcttgcagggtgaagattgcccttaagttgaagggagttgaatacaaatatgtggaagaaaatttggccaacaagagtgatttgcttctcaaatccaacccagttcacaagaaagttccagtttttattcacaatgagaagcccatagc

SEQ ID NO: 12681 - DNA, 248 bp, Glycine max
  Clone ID: 701154156H1
caatggagatggattcaaactatcgattccctcaaagtggaacccaagcaaagaggttgagtacacaggtcaggttgttagatatgaggataactttgattcaaccaccaacgtggttgtcaccatcactccgactgataagaagtctatcactgactatggttcacccgaagagttcctctctaaggtggattatttactaggaaaacaggccttcttcggcgaaacacaagccgagggtggttttg

SEQ ID NO: 12682 - DNA, 228 bp, Glycine max
  unsure (1)..(228): unsure at all n locations; Clone ID: 701154157H1
gaaaaagcttgaanntattgttccatcatcccacaactgtgatgttccacatgtgaatcgcactgactatcagcttattgatatctctgaagacggctttgtgagtctgttgactgataatggaaataccaaggatgatctgaagcttcctactgatgaggcattgcttgctcagattaaagatggattttctgaaggaaaagatcttgtggtttctgttatgtctgc

SEQ ID NO: 12683 - DNA, 235 bp, Glycine max
  unsure (1)..(235): unsure at all n locations; Clone ID: 701154158H1
ganttttcagctttcacncgaagaagaagctgtaaagaaacgatgaatgcttcagactcagagaaagaagacgcagaaattgaagcaacagaaactgcacccgatgaagagaatgcgaaattgaagaagnnnnnnnnnnnnnnnnnnnnnnnagcttcgtccgaaggatgcagagaagaagcgcggcgtgtgctatatgagtcgaatcccccctcacatggaccacgtcaagctt

SEQ ID NO: 12684 - DNA, 246 bp, Glycine max
  Clone ID: 701154159H1
gaccacagagagagaggttttgatgcaacgctgtcactgagaaaggatctctatctacgaaggagcggaataaaacccttctctctgtgattaagagaatggcttcagatcggaaacttcacacttttgaggaggtggcaaagcacaaccagaccaaggattgctggctcatcatttctggcaaggtgtatgatgtcacccctttcatggaggatcatcccggaggtgatgaggttttgttatctg

SEQ ID NO: 12685 - DNA, 248 bp, Glycine max
  Clone ID: 701154161H1
gtgaagagaggctggccaagggtcaaagaattatcaatgaaagagagcaaagggctaatgagaatgacagactatgcagacagaaagagaaggaccttgaagaggcacagaagaagattgatgaaactaatataacactgagaaataaagaagtcgatgttaacaataggattgtgaatattactctaaaagagaaggaatatgattctctgagaacaaacttggatctcaaagagaaggagttatct

SEQ ID NO: 12686 - DNA, 257 bp, Glycine max
  Clone ID: 701154162H1
ggatctcactgtacagtatcaaccaaaccaacaatccaacaccatgaaactctctgtgttccaccatcagcaccatcctatgattctcaattgccccctcaccttgacaaggacacacaaaagactttacaacaatggttcatataggtggttaccatgccactgctcacattcttcccacaagtaaaactgctgcagaaccagttacagtttctttaagtattgaaggaaggagagcattactcagttgtctcctc

SEQ ID NO: 12687 - DNA, 106 bp, Glycine max
  unsure (1)..(106): unsure at all n locations; Clone ID: 701154165H1
ggcgcattgnacgaaaattngggtttgtagtgtagcaggatacaagcancaatngcgccgaangtaacacgcatggttagcnnaaaccccgatttnataaggggaa

SEQ ID NO: 12688 - DNA, 178 bp, Glycine max
  unsure (1)..(178): unsure at all n locations; Clone ID: 701154166H1
atctgtgacgngnatcatggcctcnagagcagtgctattgtnggctatgtgtgtgcttccggccatggtngtggcnattcgnncagcaaagaacncttttngcgtgaagggtcgcgtctactgtgacacttanccgtgctggttttgagacctcagnaancatctacattgncggtgc

SEQ ID NO: 12689 - DNA, 243 bp, Glycine max
  Clone ID: 701154167H1
ggctgcgaaacagaaatcgaatcagagacggtggtctggtgtgtgtgggcgcagtgtagagacgaaggtgtggcctgagtattggaatgaaaatggaattgagaaatgtggtgaaggacaagaaattctggatggcatctttccttattgcctgggccgctgctcttcagggtcacatgatgtggttacagcgccaggattcctcaaacataaattcggtaaccccgacgaccatcctcataa

SEQ ID NO: 12690 - DNA, 244 bp, Glycine max
  Clone ID: 701154169H1
ggatttcatttcgtttgcaattgaatttcaatttccctaggggcttaatatctcccctcacttgtgcctagccttatgtcatagtattatcattcattctcatctttctctcttctctctccacccaaaccctaactcccgaccctgttctctctcgtatccgtcatgaaaggaggaaagtccaagaccgaatctaagagagccgatcccaaacttgctgtgaataagaagggagccgccacca

SEQ ID NO: 12691 - DNA, 247 bp, Glycine max
  Clone ID: 701154171H1
cacacacaaaaggctattatttatccaaattaaaataagttgaaccaaaacgaaaaattaatctcataaagatacctacttatgaaattacaaatcctaaataatgtaatagaacccccatcaaaactaaactactacaaaagccttaacccactaggtgaggttggctataaggaacacatgacatcattcagctctttgtcgtgagtgatcaatgtttggtatattagagagttttacattgatt

SEQ ID NO: 12692 - DNA, 251 bp, Glycine max
  unsure (1)..(251): unsure at all n locations; Clone ID: 701154172H1
gggtgagtggcgacataaataagcatttgcctacgttgttcgtgttggatgcttcccacctctcattgattggattaagcgccaaagtttccgaatttgcataatggtattgctagttgggcttacattgcttttgggtctcttcctcgctgttcttctattcaacccacgacaccgcaaatctgggcataaggcaaaagctcaagccagtttaaacgnggnnaagcatcaaaatcctacagtaaaacaga

SEQ ID NO: 12693 - DNA, 242 bp, Glycine max
  unsure (1)..(242): unsure at all n locations; Clone ID: 701154173H1
catgctcaaacagagaatcccagtatggtggaagtggtacanttgggcaaatccaatttcttggagttgatggattggtggnttcacaatatggcnatatacagcnaagcattgaatccactgatgggagtngtacgacagtggaggactttgtaagangttactttggttncacgcncgattttctgngggtggttgcagctntgatngtggccttccccgtagtcttngcatngatgttt

SEQ ID NO: 12694 - DNA, 251 bp, Glycine max
  Clone ID: 701154174H1
ggagagaagttattagggtttttgagtgcggcggtccaaacactcttctctgcagcttttgcctacaactcccttcaccatggctgaacaaaccgagaaagcttttctgaagcaaccaaaagtgtttctcagcacaaagaagactgggaagggaaagagacctggaaaaggtgggaaccgcttttggaagtccattgggctggatttaagactcccagggaagccatcgaaggaacctatattgacaagaa

SEQ ID NO: 12695 - DNA, 257 bp, Glycine max
  unsure (1)..(257): unsure at all n locations; Clone ID: 701154175H1
ggaggcaacaaaggagttgtaaattaagagcatggctgcacaagctcttgtaccatcatcatctcttaccttctcagccgaggctacaagacaaagtcttggaccaagancactccaatctccatttggcttctcaagaaaagcctcctttcttgttaaggcagctgctactccccctgtcaagcaaggatcagacagacctttgtggtttgcatcaaagcaaagtctttcctacttggatggcagccttccgggtg

SEQ ID NO: 12696 - DNA, 162 bp, Glycine max
  Clone ID: 701154177H1
ctagtatacctatataactcctaaaaagagagagataaaaaaaggtgaagcgagaagcgatgtcgcacagaacagatattggaacaactccacagaacgtagcaaccaaatcaaggcacccagggctcctggtagatttggaagatttaacaccaaaaaaaa

SEQ ID NO: 12697 - DNA, 250 bp, Glycine max
  Clone ID: 701154178H1
ggttttgttctgtttcgcgtgaacttaaacaatgaagactgcaaagggcaagggagcagcgaggccctcaaaagaatcaccgaagcctgttgatgaccgaaaggttggaaagcggaaggcttctggtaagcctgagaaaagcagagcaccaaagaaggagaagaaggccaagaaagaccccaacaagctaaaagaccaccgagtgctttcttcgtgttccttgaggagttcaggaagacctttaaggctg

SEQ ID NO: 12698 - DNA, 252 bp, Glycine max
  unsure (1)..(252): unsure at all n locations; Clone ID: 701154179H1
gaagcaggcggtggagccggagcttgaggatgaggacgtggaggggtatgttccggaggcgatgttcgacgaggcggacactggaaggaagaggaagaaggggaaggagggtgggagtgggaagaaggancaagaggatgaagggggagaagagttttgggagcagcggtgggaagagtgggtccaaatttgggagtggaaagaaaaggtttggtgggaaagccaggaaggatccagantgttgaanttaag

SEQ ID NO: 12699 - DNA, 249 bp, Glycine max
  Clone ID: 701154180H1
gaggatgatagagttgaaaatgaacaagaacatagcaggggacatggtggagatgttgatagagatcacaacatagatttgaatgtagacaggaaaatggataggaccagtgatcctgatagaagttttggtgaggatagaaaagatcagtcaaggagaaacaatgacttgaatgttacaaatcaacatatcatggatcttcatcagattcagctggtactcacaatgagcagttagaagctcattaga

SEQ ID NO: 12700 - DNA, 260 bp, Glycine max
  unsure (1)..(260): unsure at all n locations; Clone ID: 701154181H1
ggcccaaattttttcatagcactttcagaggaacaatggcgggtagggtttcgacgtgcttcttcttcgtgtttgctctttctctccttcttccttttcagatctccgctgaggaatcatcggagaaagagttcgtactcacattggatcactctaactttcangacactntcagcaagcacgatttcatcgtcgtcgagttctacgctccatggtgtggccatgtaagaagcttgctcccgagtatgagaaagctgctt

SEQ ID NO: 12701 - DNA, 246 bp, Glycine max
  unsure (1)..(246): unsure at all n locations; Clone ID: 701154182H1
ggagaaggctcattgaacaagcaaaattaagcacaaaagcccaaccctctctctcgctggctggtctcccccatttggcattcgcagatcgaatacgagtaatttcactgaatcttattgaagatgtttctcacaagaactgagtacgaccgangngtcaacaccttttctcctganggccgtttatttcaggttgaatatgcaatcgaagccgtcaagctgggatcaactgcgattggattgaag

SEQ ID NO: 12702 - DNA, 243 bp, Glycine max
  unsure (1)..(243): unsure at all n locations; Clone ID: 701154183H1
tcccctatttctatttgttgtatttctttccctcctaccaaatggagaatataggattctgaatcaaaagatttcacattaaataaaattgaacaaaaaattaaaaaagaaaaaaaaccatgactgacaatataaaattaataaatttaaactctaatttaattataagattattatatatgataatttttnnctttttacannnnnacttctttagtcacatattaataatttatgattaaa

SEQ ID NO: 12703 - DNA, 227 bp, Glycine max
  unsure (1)..(227): unsure at all n locations; Clone ID: 701154184H1
gaaaaagcttgaanntattgttccatcatcccacaactgtgatgttccacatgtgaatcgcactgactatcagcttattgatatctctgaagacggctttgtgagtctgttgactgataatggaaataccaagncatcatctgaagcttcctactgatgaggcattgcttgctcagattaaagatggattttctgaaggaaaagatctgtggtttctgttatgtctg

SEQ ID NO: 12704 - DNA, 243 bp, Glycine max
  Clone ID: 701154185H1
cattctggaatgtgatcaatataacaaagctgattttccagaagaatatactgatgccaaattttttgtcatcaagtcttacagcgaggatgatatccataagagtattaagtataatgtgtgggctagtacacaaaatggcaacaagaagcttgatgctgcatatcaggaggcacagcagaaacctggcggcacccctgtttttctctttttctcagttaataccagtgggcaatttgtggg

SEQ ID NO: 12705 - DNA, 248 bp, Glycine max
  Clone ID: 701154186H1
ggaaaaagggagtgcctgataacccataaccgaccgcaccaccgttttcctttgctttgcgttctacaatgtcgaaaacctcagagattattacatgcaaagctgctatttgctggggaataggaaaacctgtgactgtggaagagatacaagtagaccctcccaaagccaccgaagttcgagttaagatgctttgtgccagtatatgctccacagacatctctagcacaaaaggatcccacatacca

SEQ ID NO: 12706 - DNA, 246 bp, Glycine max
  unsure (1)..(246): unsure at all n locations; Clone ID: 701154187H1
gagagtggtggagtgtgcaaaagagcgtcgtagttcgcaaccctaattcagaagaagcgcanttcaagcgagtgacagccaccagccatgggtcgtatgcacagccgcggtaagggtatatcctcttctgctttgccctacaaaaggacacctcctagctggctcaagatctcttcgcaagatgtcgaagaaaatatctgcaagtttgcgaagaaaggtttgaccccgtctcagattggtgtcatt

SEQ ID NO: 12707 - DNA, 248 bp, Glycine max
  Clone ID: 701154188H1
agggttcaaaagaattcaagatgagcatgataagcacgaagaaagtattatgtaattacaagataaacttggcgtgactagtaaagaaaataagctatgaaagtaagcaagaaattaaaatgcaagaaatgtaaactaggcggatcctaggagtgtttagatgactgcatttaaggttcccaacagaacactcattatccttagggaaaattgcctaaaattatttgacacaaatggaagtttggaaa

SEQ ID NO: 12708 - DNA, 246 bp, Glycine max
  Clone ID: 701154189H1
tccgacctgaaagttttcttggtgaaggtgggtttggttgtgttttcaaggggtggattgaagaaaatggaactgctccagtgaaacctggcacaggacttacggttgctgtaaaaaccctaaaccatgatgggctccagggtcataaagaatggctggctgaagtgaattttcttggtgacctagttcatccaaaccttgttaaacttgtaggttactgcatgaagaggatcaaaggtcgctagt

SEQ ID NO: 12709 - DNA, 240 bp, Glycine max
  Clone ID: 701154190H1
gagacacagtccaacgttgtaggtttggtgtttgtcatgtcataagacgaagaaaggcatgggtgatagggtggagacgcttgccagattagcccagtggaaaatcgacaactttggaccttgttcctacaaaaaatctgaccccttcaagctcggaatctggaactgtgaggaataagtacctctacatacatctttttcctgaaccttcgcagttttgaaggataatccaccctttct

SEQ ID NO: 12710 - DNA, 244 bp, Glycine max
  Clone ID: 701154193H1
ggcacaagtgagtttgttgatcgagataactagaaacagtgtgatgaaaatgaaggtccttgttttcttcgttgctacaattttggtagcatggcaatgccatgcgtacgatatgttccctctccgaatgaacactggctatggtgcccgtactccggaggtgaaatgcgcaagttggaggcttgctgtggaagcacacaacatctttggctttgagaccattcctgaagagtgcgttgaagca

SEQ ID NO: 12711 - DNA, 245 bp, Glycine max
  Clone ID: 701154194H1
atcagtggtgccccccaggataacaacataatgctgtggaatgctgtcatatttggtcctgatgatactccatgggatggaggcacgttcaagttgacactccaatttactgaggactatccaaataaaccaccgactgtacgatttgtgtctcgcatgtttcatcccaatatttatgctgatggaagtatttgtttggatatattacaaaatcagtggagtcctatttatggtgtggctgctat

SEQ ID NO: 12712 - DNA, 221 bp, Glycine max
  unsure (1)..(221): unsure at all n locations; Clone ID: 701154195H1
gacacaccatgaaggaaagtggttncgngaataatgacacaaagcaagctgctgctgatgtgttgtttctatattcaaactttgcaatgtgcatnnnntggatgtaaggctcgtccatgtgatttgaggtttcatttgatgaangagatttcagtatgccctctttcctctaaataanggagtcaccacagaatgcagcatctcctgatgccatgggtgag

SEQ ID NO: 12713 - DNA, 223 bp, Glycine max
  Clone ID: 701154196H1
gagcgcagagacagatacaaaaattgatacgaggctgaacagaattaagaagagtgtttcgtttctcgtctgatggtcgtgagtggttccttcccactaacttcgaagcggagaagggtcaccagcttttgttccaccgacatggatgctgaaactgctaaggccaagcttgctgctgtgaaagaaagatttggacgagagatccagtttttgaaacatcagt

SEQ ID NO: 12714 - DNA, 237 bp, Glycine max
  unsure (1)..(237): unsure at all n locations; Clone ID: 701154201H1
gacattccaaaacacaaacacatacattgtagtatcacttttgtctcggaatttgttcttttgagttatggcaagcttaaaggttgcatgtgtggttttgatgtgcatggctgtgatgagtgcaccaatgatggtgcaagccgtgtcatgcaatgatgtttctgtgaacctagcaccgtgcctatcttacctgatgcagggtgganatgtnccaaatccgtgncttagnggtngaga

SEQ ID NO: 12715 - DNA, 232 bp, Glycine max
  unsure (1)..(232): unsure at all n locations; Clone ID: 701154202H1
gtcctccatgctcttttgttattctgcttcctttttattaataatactctagttgtgctgcttttggttgatggttccgatgtgtcaacttagtncagatcgttgtaacattcacatgcagtatcaactccgtttttatcacacaaaaaaagtttatgattttatgcattttctttaaaggttttnttaattaagtataatttatatattccttaaagtgtacatttttttg

SEQ ID NO: 12716 - DNA, 243 bp, Glycine max
  Clone ID: 701154204H1
ggatgcacaagtttgttgagatagctagaagcaataagatgaaaatgaaagtgcttgttttgtttgttgctacagttttggtagcatatgaatgccatggctcagactaccagaagttccctctccaaatgaaaactgggtttggtgggcaatacagcaatgaggtggcatgtgccagttggaggcttggcgtggaagcaaacaacgtagtcaagtggcaaactgttcctgcagcttgcggag

SEQ ID NO: 12717 - DNA, 204 bp, Glycine max
  unsure (1)..(204): unsure at all n locations; Clone ID: 701154205H1
aanctgtantaagcagctcctaacttaaacacctgccttatgggtgggtatttttaatcaactggtttttgtagcttgttggtaacacctaacatatatgtccaaggggaataaactgaaatgaattttttaatatccacagatctctatgttgaaaagatgcgctataaggctgtgaactgcatgtgccggtcatatcgtcca

SEQ ID NO: 12718 - DNA, 236 bp, Glycine max
  unsure (1)..(236): unsure at all n locations; Clone ID: 701154206H1
gacgtacataaatataaagatgttgatagcatattataaatcatagagttcattccatacacagaaagaagacgcaacactaagaaagcagaatagggaaaaatacatcgatagaggaaaattaattgaagggtgctactactacgaccttctatatcattaatgattgaaattcgtgttggaattgtctgtaggtgtagtagtgataatngagaggatcatatatatattagtag

SEQ ID NO: 12719 - DNA, 243 bp, Glycine max
  unsure (1)..(243): unsure at all n locations; Clone ID: 701154207H1
ggacaaagttgtgtttcaatggacaataataatattctgggtcttctcaagcttcgaattaaaagaggcattaatcttgccattcgcgatgctcgtgccagcgatccttatgtcgttgtcaacatgggcgatcagaagctgaagactcgtgtcataaaaaaaaactgcaatcctgactggaatgaagaattgaccctctctgtaaaggacttaaaaccccaatacatctgacggtntttgaca

SEQ ID NO: 12720 - DNA, 250 bp, Glycine max
  Clone ID: 701154208H1
ctgtttcacaaaatgtacttctaagtaattgctccatagatcctatttctatctatatgaagaagaaatcatgtgacgggggggattcttatttgtacaaatggtacttcgaacttggaacgagtatgaagaaattaacgatacttctttaccttttgagttgttctgccggatcggtcgctcaagacctttggtctctacccggacctgatgaaaaaaatgggatcacatcttatggactcgttgagaa

SEQ ID NO: 12721 - DNA, 239 bp, Glycine max
  Clone ID: 701154209H1
agaggagcacttgtgcttcagaacacttcagcgcttcactgctgctacacttgagcatggaatgcaccctcctgtggcaccaaaaccagagtggcgtgccctcatggatgagatggctgtcattgctacagaggagtatcgctccattgttttccaggaaccccgtttcgttgagtacttccgatgtgctacacctgagctggagtatggaagaatgaacattggcagtcgtccgtcaa

SEQ ID NO: 12722 - DNA, 235 bp, Glycine max
  Clone ID: 701154210H1
atcagtggtgccccccaggataacaacataatgctgtggaatgctgtcatatttggtcctgatgatactccatgggatggaggcacgttcaagttgacactccaatttactgaggactatccaaataaaccaccgactgtacgatttgtgtctcgcatgtttcatccaaatatttatgctgatggaagtatttgtttggatatattacaaaatcagtggagtcctatttatgatg

SEQ ID NO: 12723 - DNA, 238 bp, Glycine max
  unsure (1)..(238): unsure at all n locations; Clone ID: 701154211H1
gtaacaaaatggatgctactacacccaagtattccaaggccaggtatgatgaaattgtgaaggaagtctcttcctacttgaagaaagtaagatacaaccctgacaagattccttttgttcctatctctggttttgagggagacaacatgattgaganattccacaaaccttgactggtacaagggtccaactctgcttgatgcacttgaccagattagtgagcccaagaggccctctg

SEQ ID NO: 12724 - DNA, 231 bp, Glycine max
  Clone ID: 701154212H1
cacaatacagagtgagttgttgctcctttcgccacaactctctgccaacatgggtatctccagagattctatgcacaagaggcgtgccactggtggcaagaagaaggcctggaggaaaaagagaaagtatgagcttggtcgccagcctgctaacactaagctgtcaagcaacaagacagtcaggaggatccgtgttagaggtggaaatgtgaaatggagggcattgagatt

SEQ ID NO: 12725 - DNA, 234 bp, Glycine max
  Clone ID: 701154213H1
ttcctctttctgttagttatatattttgttgtataattataatttctctaataaaaatttgaatcttaatgtcgctattttagagaaaactaattacttacccgtcatctctaatcttctagtgtttacatgcaggacttcctattaaaaaaagattgtgaagacggccactaataaaaaattaaaaagataaattgataattgttatacatatctaatttaaatatttatatc

SEQ ID NO: 12726 - DNA, 216 bp, Glycine max
  unsure (1)..(216): unsure at all n locations; Clone ID: 701154214H1
gggaggnganaagagaaagaaggaaggagacatttataaaaagctctttcccttcccctaaatccctcacactcattccatttttacctttctctctcgctcgcaaacgcaaataataaaaaacaaggttttagccatggcatcgaagcggatcttgaaggaactcaaggatctccaaaaggatcctcctacctcatgcagcgccggtcctgttgc

SEQ ID NO: 12727 - DNA, 193 bp, Glycine max
  Clone ID: 701154215H1
tgcaacttcctctgttttgctcccctgtttaagccttatcataagcttagaatggcacacaaggaattttccattgccctagtgactctcattgttctctttgtcaacacgaacctccaaggtgccacggctgactatggtggtggttggcagagtgctcatgccactttctatggtgggggtgatgcttctg

SEQ ID NO: 12728 - DNA, 237 bp, Glycine max
  Clone ID: 701154216H1
acaagtcaatttctaatataatgtagaagcttcattgttgagttttgagtcattaaatttacaaataaatgaattgtgtgtataaaatggaaaaaaaataatcattaaggatctgtttgtttgctttaatttgataacattagatgtttttgatgaagtttgtgaagtgtgtaaatgggtgcagatgggctgctatagcttcctaccttccacaaaggacagacaatgacataaaga

SEQ ID NO: 12729 - DNA, 212 bp, Glycine max
  unsure (1)..(212): unsure at all n locations; Clone ID: 701154217H1
ggtactttgtagtagcaagcgagcatggctccgaagaaggttcttctcctttgcggggacttcatggaagactatgaagccatggttccatttcaggncttgcaagccttcggtctcgccgtcgacgccgtctgtcccggaaagaaatccggcgatgtctgccgcaccgctgtccatgtacttgccggcgcccagacttatagtgagacggt

SEQ ID NO: 12730 - DNA, 244 bp, Glycine max
  unsure (1)..(244): unsure at all n locations; Clone ID: 701154218H1
atatttgatcttggttctgcacagcttgcagaggtnttctctaaggatggaatgtcctntntggctagttgtcaaaatctcgttcctcgaccttgggncattgatgatcttgacactttcaaattgaaatggagcaaganttnatggaagaaggttatcatatttgttgataactctggtgcagatatcattttgggtattatgccattgcaagagaatacttcggcgtgggagtcagttgnaa

SEQ ID NO: 12731 - DNA, 232 bp, Glycine max
  unsure (1)..(232): unsure at all n locations; Clone ID: 701154219H1
caagaagagcaaaacaatacacttatgagaccagcacttgcaagtagancactaggaagtctcaagaatttcaatgatccagtgagtggtggtggatggtgcaaagaccaacaaataaattcagctaaaccactcgctgagaacaacatcttgaaaccttgtatacccttttctacaatggagagctccatcaagtgcattgatcatgctgagaaagaaaacaatcctgaca

SEQ ID NO: 12732 - DNA, 235 bp, Glycine max
  unsure (1)..(235): unsure at all n locations; Clone ID: 701154220H1
caatgaagggaggctcaatatttgtccataccatgattatcttaaatcttctcatggatgcaatctttgtccaccaaacatgtgcaagggattggtgatagaaaggatccaaaattcccttgcagcagcaggaaagaagaaaataatctatcttggagatggaaatggagatttttgcccaagtttgaggctcaaagatagtgactatttgatgcctagaaaggnctttccattg

SEQ ID NO: 12733 - DNA, 236 bp, Glycine max
  unsure (1)..(236): unsure at all n locations; Clone ID: 701154221H1
gccagctgggctacatcctttaaattcaacattttcgcacccaacaaatcaaactcagctgacgggctngccttcttcttggcacccgtcgggtctcatcnccaatccgacgatggatttcttggtcttttcaacagtcccttaaaggacaagtctctccaaaccgtggcgattgagttcgatactttctcgaacaaaaaatgggatcctgnnaaccgacacatcggcattgacgt

SEQ ID NO: 12734 - DNA, 238 bp, Glycine max
  unsure (1)..(238): unsure at all n locations; Clone ID: 701154222H1
gaggaagacacggtagtagaaaagttaagcggtgcactggttttgttttaggagaagactgannnnnnnnnnnnnnnnnnnttgagggaggatgtggctcgagattatcttcggtttggtcatttacagattgttccggcgctccttctacgacgacgacgttttggacatcgaaggatcggattcttctgctcttttctccgtcgcggatnncntaaaaaactttacggagcaaatg

SEQ ID NO: 12735 - DNA, 238 bp, Glycine max
  unsure (1)..(238): unsure at all n locations; Clone ID: 701154223H1
gatcatggatttggggtggagctatataatgcaacagcgtttaatgaatgggttgaccttggcgaggcaccggcactgccagagagtctcaaactgtacaataaactgtagtctcttggcatcaaaattgtattcataacaggaagaccactgtatcaacaggctgtaactgctacccaanttaaagcttgctggatactacaatggggaaagttaattaccnaggntacagataaat

SEQ ID NO: 12736 - DNA, 248 bp, Glycine max
  Clone ID: 701154224H1
ggtagtggttgggtttgaggatgagtttcagggaagagagtggcgatgcgaggggtcttcagaaaccgttcctccacacggggagttggtacaagatgggttccaggcagtccagcatcatgggatcctccactcatgtcatccgcgacggcgccgtctccgtcctcttctgcgtcctcatcgtcgcattgggtcccatccaattcggcttcacgtgtgggtattcttctccaacccaaggggctata

SEQ ID NO: 12737 - DNA, 239 bp, Glycine max
  Clone ID: 701154225H1
gacattccaaaacacaaacacatacattgtagtatcacttttgtctcggaatttgttcttttgagttatggcaagcttaaaggttgcatgtgtggttttgatgtgcatggctgtgatgagtgcaccaatgatggtgcaagccgtgtcatgcaatgatgtttctgtgaacctagcaccgtgcctatcttacctgatgcagggtggagatgttccagaatcgtgctgtagcggagtgagga

SEQ ID NO: 12738 - DNA, 251 bp, Glycine max
  Clone ID: 701154226H1
tatttcgtcttttgcaagtatcaattcaaaatttcattcaaaaactaaattaaattaaagataatatttgctgattttgggttccctcatacgactcttcaccaacaagggttgcaatgatttcttccccattattgtaaccaaaaagcttcatctttgatttgaactgatgaaaccaaaagcaataaaacatagctagctccaattaaaggatctaaaatcgacaataatcagaagataggttcagcaat

SEQ ID NO: 12739 - DNA, 234 bp, Glycine max
  Clone ID: 701154227H1
ggtggtggcaatgatatgataggcgcagagcagagagagagagaaggcaaaggcatttggatccgacgacctcgttggttttcctttgtaagttgtaagcatttggcaccagcaagccctgtcttcttcttcgatcagattagggcatttcatttctgcgatggccgcagcacccgctagagctcgtgccgattacgattacctcatcaagcttcttcttatcggcgacagggt

SEQ ID NO: 12740 - DNA, 233 bp, Glycine max
  unsure (1)..(233): unsure at all n locations; Clone ID: 701154228H1
ggacgcttctgagcattttctcgttccaaagaattgtgaatatttgaattgattccccaatttcattcaatctttccctcatcagttttagggtttcgcctcgcttccctttctcacccataattgagtctatatttgannnaaacttctctctttcaactctcggctttncgttctcggcacgataatactcattttaggatttcattgattttnctcggatctttctggtc

SEQ ID NO: 12741 - DNA, 239 bp, Glycine max
  Clone ID: 701154229H1
gcagttgtttttttagggtagttgtgttatttcttttctttacttatgattttatgcattttaatttcagtagtttaaattcagttattgaataaaaattgcatgatatttgtgaagtcactatttaggctttttctgaagaattcaacacttgaaatgctacatgacaattgtgaaaatactggtttcctggaagcaagagtcagtcaaacagtgagacatgaatcacaaagagagaa

SEQ ID NO: 12742 - DNA, 236 bp, Glycine max
  Clone ID: 701154230H1
ggaagacgctcaaatttcccattaacaaaaaacacagcaaagtgatggaagtgacaagtgctgttcaccttcactcagttgggtttctgcatttacagacacacgttgaaaggctcaacggtagagctttcttcctctccacaagaccaagaaaagtgaaggttcatcttccttgtcatcaccatcatcatctaaaccacttaagcaataccaacggtattggtgcttgcagtgat

SEQ ID NO: 12743 - DNA, 210 bp, Glycine max
  Clone ID: 701154232H1
gattgttggatgcattttgatggattcgatcccatgccttcagggccttcaattcccaatcccaggttcccagttcgtggtcctcgctttcgtgcccttctgagcctccggatattgggaattggttctcaagctatgaatatcgatcacccggtccggattcgaattttagtgtcgaagattctgctttcagcgaagaggaaacccaga

SEQ ID NO: 12744 - DNA, 233 bp, Glycine max
  unsure (1)..(233): unsure at all n locations; Clone ID: 701154233H1
gggagaacgcgatgctttgttcctcttttgttcttccccttcccaatcttcaactttagggttcctttaatctcgttattcctcttcantcccaagctccgttcactccaacaacactncggttgaaattggagcttgagaccctcactagctgggtgttggacatgaagctcctatttaaaattgggcactctgctcctttaatatcctggttttcaagagtggattacctc

SEQ ID NO: 12745 - DNA, 250 bp, Glycine max
  unsure (1)..(250): unsure at all n locations; Clone ID: 701154234H1
gcaggttataccaatcaaattacttttnntttcttctaatgtaaatccanaatgttagtganaataaanagaacattactagaaagaaaaaaaatggatcncttgaattggagttagagnctcgaaatcgggcaaaagcngagacncngatcaacgaaatcttgaatcatctatctcaaaccaagaaaaagatattgaaaacgattatgtaggatcagacagtgaaaagatagtaaggtataaaggaaaa

SEQ ID NO: 12746 - DNA, 231 bp, Glycine max
  Clone ID: 701154235H1
aaagagacccggaaagggtgggaaccgcttttggaaatccattgggcttggatttaagactcccagggaagccatcgaaggaacctacattgacaagaagtgccccttcactggcaatgtttccatccgtggccgtatcttggctggaacatgtcacagtgctaagatgaacaggactattattgttaggaggaattatctccatttatcaagaagtaccagaggtacgag

SEQ ID NO: 12747 - DNA, 225 bp, Glycine max
  Clone ID: 701154236H1
agccaccaccagagggtcgcttgcccgatgccactaagggttctgaccatttgagagatgtgtttggcaaagctatggggcttagtgaccgagatatcgttgctctgtctgggggtcacactattggagctgcgcacaaggagcgttctggattcgagggtccctggacctctaatcctcttattttcgacaactcatacttcaaggagttgttgagtggtgaga

SEQ ID NO: 12748 - DNA, 232 bp, Glycine max
  Clone ID: 701154237H1
gaccacattccaaaacacaaacacatacattgtagtatcacttttgtctcggaatttgttcttttgagttatggcaagcttaaaggttgcatgtgtggttttgatgtgcatggctgtgatgagtgcaccaatgatggtgcaagccgtgtcatgcaatgatgtttctgtgaacctagcaccgtgcctatcttacctgatgcaggtggagatgttccagaatcgtgctgtagcg

SEQ ID NO: 12749 - DNA, 242 bp, Glycine max
  Clone ID: 701154238H1
gaacacaaacagcagcgtcttggtttgtgagagagacagaggcacagagagaaaatggtttcggggtcaggaatctgcgcgaagagggtagttgtggacgcgcggcaccacatgctggggaggctggcatcgatcgtggcgaaggaacttctgaatgggcagaaggtggtggtggtgcgctgcgaggagatttgcatctccggtgggctcgtcatggtcaagatgaagtacttgcgtttccc

SEQ ID NO: 12750 - DNA, 136 bp, Glycine max
  Clone ID: 701154241H1
cccaaagaccataaaagatgtgaagttaattaacgcaggaaaaattttggagaacaacagaacagttggggaatgccagagtccgttatgtgatacccctgatactgttacaacaatgcatgtggttgtgcaacat

SEQ ID NO: 12751 - DNA, 229 bp, Glycine max
  Clone ID: 701154242H1
cttgcaaaatgggagaaattcattatggtggaactggaaccattgctattcataggtggatcacacttctgcacctttgcgttagaaaaatcacttgaggaagatagaatatgagtaattttgccataagacgcatcctggtttgcattactcgtattgttattttcagttatatctgatgctctggatctagacgaaacaaaagatgtttgacactgatgcaatgatg

SEQ ID NO: 12752 - DNA, 239 bp, Glycine max
  Clone ID: 701154244H1
gaccacactcatcacaaccactcttaatttctctctgccttgctcatttacacacctctccaacctttcactttcagctttatttgaatccctctctctcctttccaaatggccagcgttgaggttgcacatcaaacaccaacaacagttccagaaaatgaaacaaccgaggtaatcaagacccaggaaacaaccccggaaccagtaccagccactgaggctcctgcaacagaacaagc

SEQ ID NO: 12753 - DNA, 212 bp, Glycine max
  unsure (1)..(212): unsure at all n locations; Clone ID: 701154245H1
gaaaatcgnngaagaagaanaagaagaagatggagaagtatcagatctggagcaggagaatagcgttggcagcgtttgcntttgctctgctgttccaattcggcctcagcagacgacgtcgttgtgctctctgaagataacttcganaaggaagttggtcaagacagagggagctctngttnattctatgccccttggtgnggacacagcaa

SEQ ID NO: 12754 - DNA, 233 bp, Glycine max
  Clone ID: 701154246H1
cagactcttacttttgcttgggtgaactttttcttttctggatttgtagcagccaagataccctttccattgacacagaggtttaggtcaatgctacagaacggaatagaccttagcacagtagatgttagctatgtcagcagtcgctcttggtacttcctcaatctgtttggattaagaggattctttagtctcatcttgggtgaagaaaatgctgtagatgatacacaacg

SEQ ID NO: 12755 - DNA, 236 bp, Glycine max
  Clone ID: 701154247H1
ggtttcatatatgagccaaaaaatttaagccaaatagggacatttaaatatgatatgaaagagggttggggtctggcaactgatggaaaagtcttgtttggaagtgatggcagttcaacattgtatcaatttgagcctcaaccatttaaagttgtatcaaaacaagttgtttactacaagggtcatcaagtgcacaatctcaatgaattggaatacataaatggtgaagtttgggc

SEQ ID NO: 12756 - DNA, 236 bp, Glycine max
  Clone ID: 701154248H1
agaggagcacttgtgcttccagaacacttcagcgcttcactgctgctacacttgagcatggaatgcaccctcctgtggcaccaaaaccagagtggcgtgccctcatggatgagatggctgtcattgctacagaggagtatcgctccattgttttccaggaaccccgtttcgttgagtacttccgatgtgctacacctgagctggagtatggaagaatgaacattggcagtcgtccg

SEQ ID NO: 12757 - DNA, 226 bp, Glycine max
  unsure (1)..(226): unsure at all n locations; Clone ID: 701154249H1
taatttgggaattattgctcccatcgccattggtttcattgtcggcgctaacattttgttgggtggggccttctctggagcggccatgaaccccgctgtgacatttgggcctgctgtcgtgagctggacctggaccaaccantggatctacngggcngtcccctcgnggggaaacccnccccctttnaaagggnntttnnancnaccccgggngtnccccnccttt

SEQ ID NO: 12758 - DNA, 233 bp, Glycine max
  Clone ID: 701154250H1
gggtggagagaggggcactgactcacacccacaatagtcgggggcagcttcaaagtacctccacattggctcctactcttactgttctcttctcttctcatcatttttattttttccaatcaaaccaaacaaaacataagcaccgctcttttctctccgaaatccccatctcccttcacttctgagctctggacgagatcccagatctcaccatctttcacgcactcttccat

SEQ ID NO: 12759 - DNA, 231 bp, Glycine max
  Clone ID: 701154251H1
gcccattgcctccgggctatctcctcttggaactccacattctcctcgtccctcagttggactcgcctctctctaaggaatgaccagcctttgatggcctcaaactgttgctggtgttccgcactctggaaccggtgtctatcaaagtccatctctgcctgcagggacacactagaaccctctcaagtggcatccttcctagacctcttggccgggagtttctttggagcc

SEQ ID NO: 12760 - DNA, 209 bp, Glycine max
  Clone ID: 701154252H1
gcattgggtgttcctgctcttcccctgacatacgtggctcacgttctggcacttgttgccagcatcttggtcgtgccctgggtcctcaattttaggggtggcttggcttgggattctgataacaaggccctcatcttcaatcttcatccagttcttattgtcattggcttactagtccttgggggtgaagctattataagctacaaagc

SEQ ID NO: 12761 - DNA, 233 bp, Glycine max
  Clone ID: 701154254H1
gttcccagcatcaataagacggacagagcggcgatgcttgatgaaattgttgactatgtgaagttcctaaggctccaggttaaggtcctgagcatgagtagactgggaggagctggtgcagttgctcagcttgttgctgatgttcccctttctgcagtggagggggatcaggacatagaaggtgtatccaatgagcaagcctgggacaagtggtccaatgatggcacagaaca

SEQ ID NO: 12762 - DNA, 238 bp, Glycine max
  Clone ID: 701154255H1
ggagaagagagatggatccagacgcgttggcaaaggcattcgtggagcactactacagcaccttcgacaccaaccggaacggtttagcgaatctgtatcaggagggttccatgctgaccttcgaagggcagaagatccagggcgcttccagcatcgtcgctaagctcacttccctccctttccagcagtgccaccactccatctccaccgtcgactgccagccctccggtgtcaacgc

SEQ ID NO: 12763 - DNA, 249 bp, Glycine max
  unsure (1)..(249): unsure at all n locations; Clone ID: 701154256H1
atccactgagattattatctcattaaaaatgttatcataattgaagaaagaagcttttgagatgaaaaaattgaagactttgttcattattagttaaactttgtagatgctcatatttgagaataaaattatttatactcttatttataatatttaaagtattttaaaccattacaatttttaaatttttattttatgaatgttttaaagtatatttttattatagattgtnattgtaacaaagtgcca

SEQ ID NO: 12764 - DNA, 203 bp, Glycine max
  unsure (1)..(203): unsure at all n locations; Clone ID: 701154257H1
cgannnaangggtgaaaaatttaatacgaactgaaaaatctttcaanaatatcgcatattataaacactaaaatgagaaatcaagcatccttattatactatatggatatactcttcactgtttcttatctcttgaatctgttatactttccaactgagacttaggcctgattcctgataagtgcacgagtccttcctatctt

SEQ ID NO: 12765 - DNA, 234 bp, Glycine max; identical to SEQ ID NO: 8093
  Clone ID: 701154258H1

SEQ ID NO: 12766 - DNA, 206 bp, Glycine max
  unsure (1)..(206): unsure at all n locations; Clone ID: 701154259H1
gtagnccaattgcgtatttttantttgatccttatagtcgtcctgctgaaaaaaggcaaggtgcatggatgaatgaagtctttgctcgtagtcgtgtattatcgcgtgatggcacctcagcaagattgcctgttgctcacatggtgtgcaatcaaactcctccagtaggaaacaagccaagtctaatgacattccgtgagttgaga

SEQ ID NO: 12767 - DNA, 231 bp, Glycine max
  Clone ID: 701154261H1
ctgtctttgagaataaggcagacacacttcttgttggtcttcatggcttgtgtgagacaactgcaacaatctgctgtgggtgctttcgcgtcagcacccaaatatggcagacacgttgcaacacctgtcagggattctgcacatttctgtttgtcttagctgaatctcccattgcatgactaaccaataccaatgttattgctaacactagcaagtgtggtagacaagcat

SEQ ID NO: 12768 - DNA, 244 bp, Glycine max
  Clone ID: 701154262H1
ttgtgactcctaagatcaaaatcgccctttcccgaagcagagaacgccgcaagagacattctcaaaatcatgctgaaccacaaatgtctatacattctgttggcttactattggaagctgtattcctaaaagcaaaatctttgcaggttcttgaaaggtttaaagaggctgcccaatcttgcaaagttattctggatatagtggagtcttcatgcctgaaggcatgcctgataactttggtgct

SEQ ID NO: 12769 - DNA, 216 bp, Glycine max
  unsure (1)..(216): unsure at all n locations; Clone ID: 701154263H1
gatcgaagcaaaaaatgaaaacccaaagtgcttctctcctctgtctttttctctctcttgctatccttttggctagtggcactgctgcaagtgcaactccaagaagcgcagtgccaagccaccatgtttcaacattcaacagangcctttttccttccacttttctctttggaattggttcnnctgcagngcaggcannnangagcagcaagtgta

SEQ ID NO: 12770 - DNA, 233 bp, Glycine max
  unsure (1)..(233): unsure at all n locations; Clone ID: 701154264H1
ggtgaagacagacagtgagaaatgatgatgaagcgtcggttccttttggttctcttggntctctatgtcacagtggagcagagtaagctactccaccacgtagaagccgatggtgggtttgtaaaaacaagaggagtgcagcttatgctgaatgggagtccctactatgctaatggctttaatgcctattggctatgtnaccttgccctgatcctttntagagaaacaagncc

SEQ ID NO: 12771 - DNA, 237 bp, Glycine max
  unsure (1)..(237): unsure at all n locations; Clone ID: 701154265H1
ggttgcacaggagcaccgtttggctctacaagtctttccttttctatttaattcctaaaatcccattcttcttcgctcattcctctgcactgccatcatccccaacttcctcacaaggttacaatnntaaagagttgtgccaccatgtcggacgatgaaagggaggagaaagagttgggtnctcttctggccgaattgcnaccaaatanaaacggtngcnnanatcgtaaaaagggc

SEQ ID NO: 12772 - DNA, 228 bp, Glycine max
  Clone ID: 701154267H1
tatgtttgtttgttttccctttattcattcaacatagacttcaaagtctgataaatctaaaagttcaagaatttcatccgacacaagtctctaaattctctgtttagagatatgacctaagtgtttgcgccataaagtggttgaattctcttttaatttcctttttgtaccacgtgaatttgtttgcagtatttcattataggaacaataacatccaacatatataga

SEQ ID NO: 12773 - DNA, 232 bp, Glycine max
  unsure (1)..(232): unsure at all n locations; Clone ID: 701154268H1
gttgttgcaacaagangtgggtcttgttganaggatgcaaagggaggggaagattttggtggggattatccgatggattactatgctcaagatggcggggagtggaattcatcttatgtgaaaaagtctactcgtcctgccagaagagtttccgtgtcgtctgttgctgatactgccatttcccaacagccttagatttgctgcttagttacnagtccaaggttttaaaaga

SEQ ID NO: 12774 - DNA, 235 bp, Glycine max
  Clone ID: 701154269H1
atcaatccctacgtcgtttcttgctccgtgttcttcgtgcgacagtcaattagttttgcttatttttttttgaaagatttatatgtgatctatgtacccttaggggtccccctttgttattttgtgcatattcatctcctccatctatcatcggtaatctcatttttttgtgaagtttaatcttaaccaatcattagcgccgtaaagttgtcttttaaagagattaaaagttaat

SEQ ID NO: 12775 - DNA, 246 bp, Glycine max
  unsure (1)..(246): unsure at all n locations; Clone ID: 701154271H1
ggtggtatccgcgcatattctcatttcaatttgcatttgcatttcatttggcgttttgtttctttctggaagcttcacttcggcatccatggcgtcgttcgaagaagctcctcccggaaactccaagaacggcgagaagatcttcaagaccaagtgcgctcagtgccacaccgtggacaaaggtgccggtcacaaacaaggacccaatctgaatggtttgtttggaaggcatctggcatnactcct

SEQ ID NO: 12776 - DNA, 235 bp, Glycine max
  Clone ID: 701154272H1
ggaaggagtgaggtaacaacagcactgccactgccactaccaatagcagaatgggaaccttgggcagagctttctacgccgtcggattttggatccgcgagaccggccaagccatcgatcgcctcggctctcgtctccaaggcaactacctctttcaagaacagctatctaggcatcgacctctgatgaatctgttcgacaaagctccctcggttcacagggatgcatttgtggc

SEQ ID NO: 12777 - DNA, 243 bp, Glycine max
  Clone ID: 701154273H1
gaagcttagtgaggtgcaagttaatttacttgaacaaaactttggaaatgaacgcaaacttgagtccgaaagaaaggataggctggcaatggagcttggtttggaccctcgacaagttgctgtgtggtttcaaaacagaagagcccgttggaagaacaaaaagttggaagaagagtactccggccttaaaaaaaatcatgaagccaccttgcttgagaaatgttgccctggagagtgagtgtt

SEQ ID NO: 12778 - DNA, 233 bp, Glycine max
  Clone ID: 701154274H1
ggcacaagtgagtttgttgatcgagataactagaaacagtgtgatgaaattgaaggtccttgttttcttcgttgctacaattttggtagcatggcaatgccatgcgtacgatatgttccctctccgaatgaacactggctatggtgcccgtactccggaggtgaaatgcgcaagttggaggctgctgtggaagcacacaacatctttggctttgagaccattcctgaagagtg

SEQ ID NO: 12779 - DNA, 226 bp, Glycine max
  Clone ID: 701154276H1
cttggtcctcatactgctgtccaccgttggaccggtgatccaagacaacctaacaaagaggacatggggaggttctattctgctggaagagaccccgctttctattctcaccatgccaacgtggatcgtatgtggaatatatggaaaacaataccaagtggaaaaagaagggatttcaaaaaccgtgattggctggaaacctcctttttcttctacgatgagaaca

SEQ ID NO: 12780 - DNA, 167 bp, Glycine max
  unsure (1)..(167): unsure at all n locations; Clone ID: 701154277H1
tcagatctggagcaggagaatagcgttggcagcgtttgcgtttgctctgctgttccaatcggcctcagcagacgacgtcgttgtgctctctgaagataacttcgagaaggaattggtcaggacagaggantctcgttgattctatgcncctggtgtggacactnnaa

SEQ ID NO: 12781 - DNA, 241 bp, Glycine max
  Clone ID: 701154278H1
ggtcacaactcagaaaggaaagctttgaggtttcttccgcattttagagtggtgagaggatggtgggtgttatttcgttggtaacagggatggctggtcctagtgggtttggatcagcttccactgcagaacaggttactgatggaattgatgccagcaacctcactgcaattatcacaggaggagcaagtggtataggcttggagacagcaagagtgttggctcttcgaaagtccatgtg

SEQ ID NO: 12782 - DNA, 220 bp, Glycine max
  unsure (1)..(220): unsure at all n locations; Clone ID: 701154279H1
ggcgtctgtaaattgtaaattgcatcatccctgaagctgaacctcaaaaccctagctgtccgcctgtctgcaacggcgtcgttatgatcagttgagaatccaaaggaatcgagtcgaatcatctgaccggcgacagttatgtacagagagcgaggaggcgtcggatccaaatcggaggtaacttccgttgntaanaaagcgaatcaacgacgtcctcgnt

SEQ ID NO: 12783 - DNA, 223 bp, Glycine max
  Clone ID: 701154280H1
aatttttgcttgatggagaggtgactattgacacaattacggcgtttgggaatgatttccttgaagacaaactaaaacctttcctcaagtcagatccagttcctgaaagcaatgatggtgatgtgaaaatagttgttggtaataactttgatgaaattgtctggatgagtcaaaggatgttctgcttgagattatgctccctggtgtggccatgccaagctct

SEQ ID NO: 12784 - DNA, 210 bp, Glycine max
  unsure (1)..(210): unsure at all n locations; Clone ID: 701154281H1
gggaaaaagtgggagaagttcaacagtgaaaaggttgcttcactggcatatgcacggatacaaggaaaggctgcgcttgtgatgcatttccagaattcaggcttaatgnatgaggacaaacggtgccggccaattctctttcattcagagggccaagatactggtgaccaggaacatttnctatccagcaatttgaatatttgcatcgcc

SEQ ID NO: 12785 - DNA, 236 bp, Glycine max
  unsure (1)..(236): unsure at all n locations; Clone ID: 701154282H1
ggcacaagtgagtttgttgatcgagataactagaaacagtgtgatgaaaatgaaggtcctgttttcttcgttgctacaattttggtagcatggcaatgccatgcgtacgatatgttccctctccgaatgaacactggctatggtgcccgtactccggaggtgaaatgcgcaagttggaggctgctgtggaagcacacaacatctttggnttgagaccattcctgaagagtgcgttg

SEQ ID NO: 12786 - DNA, 229 bp, Glycine max
  Clone ID: 701154283H1
gatgctaagcttgtaaggtttgttgcctgcagcattgaaggattcaatgaattcaacattgttttcgaatatcaggaaacgtttttgcatatttttccatccactgctcatgtctttcgtacatggatgcatcatggagtttgcgggactttacttgggaagtgcaaattgagagaaggagaagtagagctaaaactttcaggtttttgccaatggaaatcatctcttg

SEQ ID NO: 12787 - DNA, 240 bp, Glycine max
  unsure (1)..(240): unsure at all n locations; Clone ID: 701154284H1
gaacactaattttctctttccctttttttggacttatcnttctttctgcaactccaaaatgggttccaaaggggcaaaaaatctagcactctcttcagccttgttgctccttttggtcggttttgcaacctcagacatcaatcaagacaaagcagaatgtacggataaacttcttggtctagctggttgtctttcctatgttggtggcgaacaaagtccccaccatggattgttgctctg

SEQ ID NO: 12788 - DNA, 233 bp, Glycine max
  Clone ID: 701154286H1
gggtttagagcaacggcagcgcagggttgggctatccatttgtttcgagaatgcggtctctctcagccaacccttccttactgcgacaagctgttccagttttggtcaaaccctacaaatccattctctctcgagcattcctcttcagctcccctgcctccacatctcattctcacaatactcaatttcttagatccgtcacgtttttctctactacttctcttcgtaacttt

SEQ ID NO: 12789 - DNA, 239 bp, Glycine max
  unsure (1)..(239): unsure at all n locations; Clone ID: 701154287H1
ctggtccatatggattctgtggtcatgtttaaattgaatagtgcaataaaataaaataactcagagtgatctaattaatggagtcttcataagttcnnnnnnnnnnnnnnnnnnnnnnnnttaaactttnccctcctagatatgggtttatttgggnctttggtttancaatagaagtgtggatataganctcaaaagctgncataganctcttagtgcaaagccagantgagatggat

SEQ ID NO: 12790 - DNA, 235 bp, Glycine max
  unsure (1)..(235): unsure at all n locations; Clone ID: 701154288H1
tagaccccaagtgggannattattagagttttgcggttttagttcctttgtctcacatcgcttggtttgtaaaaacttgtgtctcattagtgttatatatagagacaccttataaaagttctcttagtgtagtcgtggacgtaagtacatacattgtgtgctgaaccacgttaaaactttgtgtcttttctctttctccttattcatttctcttcttcttattgctctatactaa

SEQ ID NO: 12791 - DNA, 236 bp, Glycine max
  unsure (1)..(236): unsure at all n locations; Clone ID: 701154289H1
gatcgaagcaaaaaatgaaaacccaaagtgcttctctcctctgtctttttctctctcttgctatccttttggctagtngcactgctgcaagtgcaactccaagaagcgcagtgccaagccaccatgtttcaacattcaacagaagccttttccttccacttttctctttggnnttggttcttctgcttaccaggcagaaggagcagcaagtgtagatgggagaggaccagcatatt

SEQ ID NO: 12792 - DNA, 230 bp, Glycine max
  unsure (1)..(230): unsure at all n locations; Clone ID: 701154290H1
gaagaagaagaaggagcatggccatgagcatggccatgacagcagcngcagcagtgatagtgattaaactgctgcatcacctatatatttaaaaggtttatgggaccatagtagcgagggctgtgccttaannnnnnnnnnnnnnnnnnnnnnnnnnnnnnnnnnnnnnnnnnnnnctttntccctatcttgngatctatttntgagtgagaaanacaanagtgagattt

SEQ ID NO: 12793 - DNA, 229 bp, Glycine max
  Clone ID: 701154291H1
aaagagacccggaaagggtgggaaccgcttttggaaatccattgggcttggatttaagactcccagggaagccatcgaaggaacctacattgacaagaagtgccccttcactggcaatgtttccatccgtggccgtatcttggctggaacatgtcacagtgctaagatgaacaggactattattgttaggaggaattatctccatttatcaagaagtaccagagtacga

SEQ ID NO: 12794 - DNA, 230 bp, Glycine max
  Clone ID: 701154292H1
ataggcgatgtgaaaaatggatgcggaatgacattgtagactcaaaagaatccaagacaacatcatggttcaagcggtttataggacgtaagcagaagccagaagtgacctggccatttccttttgcagagggtagaatgtttgtccttactttacgtactggtgttgatggataccatattaatgttggggggcgccatatgacttcattccatatcgaacaggcttta

SEQ ID NO: 12795 - DNA, 234 bp, Glycine max
  unsure (1)..(234): unsure at all n locations; Clone ID: 701154294H1
gggagaagaattaagcactcggttgcagancagancanacttctttcactctttcgnttctgaatcntcaacaatggtgctcgaggcgacgangatctctatcgacaattctgaatggatgcgtaacggagattactctccttctcgatttnaagntcaagcagangctgtcaatctcatatgcggtgctannacgcatctaatccggaaaatncagtgggagntctcacaatg

SEQ ID NO: 12796 - DNA, 240 bp, Glycine max
  unsure (1)..(240): unsure at all n locations; Clone ID: 701154295H1
gagtgttgggaatggcgggcaaaggtggatcaactccggccacatattcgccgtctccgacgaccgataagangaaaccatcgcttttcaatgaggatttggctcgacctgntggccgcagtttccaccagtgcagacccgcatttttcaggactggtgctgtgaatgctgcatctggatctgcttatgctgaggttngaaataccaangtcatngtatcagtatttggggccaagagaa

SEQ ID NO: 12797 - DNA, 239 bp, Glycine max
  Clone ID: 701154296H1
gatgtgaaatttggcaggtaatggatatgttgttgttattatgtgttctcttggttgcattgccaaacctggctgtagtagagagtcgcagggctcctgttctggactactttgagtattgtgctatgagctgcagagcttacagtgcctcattggaagaatttggaggggttggtgatggaacaactttgaacacaaaagcttttcaggcagccatagatcatctgagtcatatgcat

SEQ ID NO: 12798 - DNA, 199 bp, Glycine max
  unsure (1)..(199): unsure at all n locations; Clone ID: 701154301H1
ggcagtggcaaagtgagagtcagagatggtagctattggctttggagcccctccttctccacttccgtttcatcttcgccnggcttcctctccttctcctttggccttcccaataatccacaaattccaaaacgcaggcaagtcagtgataacaatctgttcaaaganaaatgcaaaatcnngggtggtcactcnctgt

SEQ ID NO: 12799 - DNA, 195 bp, Glycine max
  unsure (1)..(195): unsure at all n locations; Clone ID: 701154302H1
ggaaggagaaaggggaagcagaatcagcgtgatggcgagaaactgggtggttcgatccttggcgcttcgtcacgcaatgaagaatagggttctcacactctccttcaaccgaattcttccctcactcccatcanaatcctctctcttagccaccaccgcggccgcaanggcctcctctnagctntcctncttccc

SEQ ID NO: 12800 - DNA, 263 bp, Glycine max
  Clone ID: 701154303H1
ggcacaagtgagtttgttgatcgagataactagaaacagtgtgatgaaaatgaaggtccttgttttcttcgttgctacaattttggtagcatggcaatgccatgcgtacgatatgttccctctccgaatgaacactggctatggtgcccgtactccggaggtgaaatgcgcaagttggaggcttgctgtggaagcacacaacatctttgggctttgagaccattcctgaagagtgcgttgaagcaacaaaggatacatccatg

SEQ ID NO: 12801 - DNA, 250 bp, Glycine max
  Clone ID: 701154304H1
gggtgtgggcatttcaatccataaagtcccaaaaacactgacagcgagaccaactcaaccacctcttccagttgcagacttgagttccttatgatgggaaccgcgtgtttcccaactactaatgttgttctcaaacctcaaaacttatctgggaatttctctaccctctgtgataactttcggtgtctgaggttcctcactccgaaaccgccccacctgcgatcctctcactctaagttgggaaatagag

SEQ ID NO: 12802 - DNA, 248 bp, Glycine max
  Clone ID: 701154305H1
ggcacaagtgagtttgttgatcgagataactagaaacagtgtgatgaaaatgaaggtccttgttttcttcgttgctacaattttggtagcatggcaatgccatgcgtacgatatgttccctctccgaatgaacactggctatggtgcccgtactccggaggtgaaatgcgcaagttggaggcttgctgtggaagcacacaacatctttggctttgagaccattcctgaagagtgcgttgaagcaacaa

SEQ ID NO: 12803 - DNA, 229 bp, Glycine max
  unsure (1)..(229): unsure at all n locations; Clone ID: 701154306H1
gcaacattataacatgnaaaggaccaaagcaacaaanacaaaaatgacatgtattcataacaattggaatcctattttatagctacaccatttttttctaagttatcagtagtagttaatgataccccactcactttgacactattactgtgtactctatcctctatattcggaaatcagaatccaactttgtgcagtctcacttcccccatttttttctcttatttct

SEQ ID NO: 12804 - DNA, 243 bp, Glycine max; identical to SEQ ID NO: 10863
  Clone ID: 701154307H1

SEQ ID NO: 12805 - DNA, 243 bp, Glycine max
  Clone ID: 701154308H1
gaccacactcatttctttttctctatcttttgttctgctcagctcgatctacctaccttggttcttctctgttctgttatttcagtgcagcagcagaaaatgaccatcctcattgagcaacctgcccttgagttacaagttgaaggcaacaatgtgcatgctgaagaaaccaatgagcttgtattggatggtggatttccattgccaaaggatggatatatggccccagaaatcaattcattt

SEQ ID NO: 12806 - DNA, 245 bp, Glycine max
  Clone ID: 701154309H1
ggggagagaatagagaagagagatggatccagacgcgttggcaaaggcattcgtggagcactactacagcaccttcgacaccaacaggaacggcttagcgaatctctaccaggagggttccatgctcactttcgaagggcagaagatccaaggcgcttccaacatcgttgccaagctcacctccctcccttttcagcagtgccaccactcaatctccaccgtcgactgccagccctccggcgtca

SEQ ID NO: 12807 - DNA, 187 bp, Glycine max
  Clone ID: 701154310H1
cgaggtcttagatctctgctctgtctctatctctacttgaggcctttccctctgttccgttggcgggtgggtctttcttctctcaaaatggccaccggagtgaccagaaaaatttctgctgcatcagctcgggcccacaccagaagggcgaagaaaaccaattctctaccccttccttcaggaatct

SEQ ID NO: 12808 - DNA, 247 bp, Glycine max
  Clone ID: 701154311H1
gggtgaaaattagggtttgaggtatttatttaattggcaaaagacggtgtttgggtttcacagacagacacacactcggttctgccttcacaaaaaattatcgagatcccctttttctcctaagaaaagccatggctaagggtcccggtctctactctgacatcggcaagaaagccagggatctgctgttcaaggactaccacagtgaccagaagttcaccatcaccacctactcacccactggagt

SEQ ID NO: 12809 - DNA, 242 bp, Glycine max
  Clone ID: 701154312H1
tcatactatgattcatagagactaggtgactttgtttaaaatttgatagagttgatttcgaatcattgaacatgattgaaatgtgtgtccaaattaattacagtcacaagttttgttacatcaagcgttaaggcaggaaaaattgatttttccctaaatgaattatgtgctaaaacatatagcaaaacttaggacatgaaattattagatcagtcaagggcttacggccattgaattctcct

SEQ ID NO: 12810 - DNA, 214 bp, Glycine max
  unsure (1)..(214): unsure at all n locations; Clone ID: 701154313H1
ganctttttagggtttacaccgacggagacacaccttcagcagcagcagccatggttctcaaaaccgaactatgccgattcagcggtgccaagatctacccagggaaaggcatcagatttgttcgtggtgattctcaggttttcctgtttgctaactcgaaatgtaagaggtatttccacaacaggttgaagccatcaaagctcacctggactg

SEQ ID NO: 12811 - DNA, 256 bp, Glycine max
  Clone ID: 701154314H1
gtagcacaaaccatccaatctctactccctgtgccagaacccaagatgcacgaatcagtaagaaaagaactcgaagaattggagaaagagaaagcaacaattgacaacaaagcaaacacaatggttcgacgtgagctttgggccgggttgggcttcctagtggtgcaaacagcagcattcatgaggctaacattttgggaactttcttgggacgtgatggaaccaatttgcttctacgtgacctcaatgtacttca

SEQ ID NO: 12812 - DNA, 249 bp, Glycine max
  Clone ID: 701154315H1
ggagcatgaaaaagaaagggaaagctgggagactgcttctcaggcacttaaagcaaaacttgaaattgcagagagcaactgcatacgtgcagaagttgaagtagcaaaaataagaagtcagctggaatcagaggtatccacccaaacaagaatcctcaatatgagagatgccgaattgttggctgccaaagaagagatcagctctcttgagaaggaattttcttcatacaaagttcgtgcacatgcact

SEQ ID NO: 12813 - DNA, 244 bp, Glycine max
  unsure (1)..(244): unsure at all n locations; Clone ID: 701154316H1
gggggaanatttgtcaaataaatncatctaaccccaaacaaaaccctagcacacttttatcgcttagtggcagcagcagtggcggcaagcaactccatccgcaatgggaatcgatttgaaggcaggaggtaagtccaagangaccaagcnaaccgcccccaaatccgatgatatctacctcaagcttctcgtcaagctgtaccgttttcttgttcggaggactgggagtaacttcaatgctgtt

SEQ ID NO: 12814 - DNA, 252 bp, Glycine max
  unsure (1)..(252): unsure at all n locations; Clone ID: 701154317H1
gtccttttgaagaaggagatgctgggaagtcttctgaaagacgcagttatggtggaccacgagttccttaccgtggtggtcgtcgtggaggtttcagcaatggtgaaactggtgaaggtgaagacggacgacctcgaagagcatttgatcgtcgcagtgggactggacgaggaaatgaattcaaacgtgaaggttcaggacgaggnaactggggaaccaaactgntgaacttgctcaggtaatgatgaggtt

SEQ ID NO: 12815 - DNA, 240 bp, Glycine max
  Clone ID: 701154319H1
gaagggaaaagcgaagtgtgaagacagacacagtgagaatgatgaagcgtcggttccttttggttctcttggttctctatgtcacagtggagttctacgtagaagcagatggtagtggtgggtttgtgagaacaagaggagtgcagcttatgctgaatgggagcccccactatgctaatggctttaatgcctattggctaatgtatcttgcctctgatccttctcagagaaacaaagtct

SEQ ID NO: 12816 - DNA, 243 bp, Glycine max
  Clone ID: 701154322H1
gggttttcgcttgagctctgcgagatcttgagtcgccgatttgaaaagatgagtaagcttcagagtgatgctttgcgtgaagccatctcaggaatcatggccgattccaaggagaagaatcgcaaatttgtggagaccatcgaactccaaatcggtttgaagaactacgatccacagaaggacaagcgtttcagtggctccgtcaagttgccccacatccctcgccccaagatgaaaatttgc

SEQ ID NO: 12817 - DNA, 247 bp, Glycine max
  Clone ID: 701154323H1
ggcacaagtgagtttgttgatcgagataactagaaacagtgtgatgaaaatgaaggtccttgttttcttcgttgctacaattttggtagcatggcaatgccatgcgtacgatatgttccctctccgaatgaacactggctatggtgcccgtactccggaggtgaaatgcgcaagttggaggcttgctgtggaagcacacaacatctttggctttgagaccattcctgaagagtgcgttgaagcaaca

SEQ ID NO: 12818 - DNA, 242 bp, Glycine max
  Clone ID: 701154324H1
gggtgctggcgatggaaactatgctcacaacaagtgacagagacagagtagaaccaaaagattcataataactaacattagaaactaggtgaaagtaactgcacagacacacaacacatcttccttaatttctccgtccatttccctcccataaataaatctttcatttccatctttcttgggtgatccaatggcgacccttttccagggattgggagttgtgaacccatcattggcttctt

SEQ ID NO: 12819 - DNA, 242 bp, Glycine max
  Clone ID: 701154325H1
acgtacgcaactgaaaaggaaaaccctaagagatgaagagaactcctatcttgttccctctcttctttcttctttgtgccttcacctcatatctaccttcagccaccgctgatgatgatcatgtgtacgacactgacggcgataagcttcaatacggtgtcaattatttcgtgttgccagtgataagaggaaatggcggtggaatacaagtagcaaaagcaggaaacgaaacttgccctctg

SEQ ID NO: 12820 - DNA, 239 bp, Glycine max; identical to SEQ ID NO: 6183
  Clone ID: 701154326H1

SEQ ID NO: 12821 - DNA, 237 bp, Glycine max
  Clone ID: 701154328H1
gggtatgcaactctttcgctcttttctctattcttaaatttcacttataataatatgccgtcttcgctggaacttgtaacttgtagctgtcgtgccttttattttattcaagagtttagagcttccttttcccctctaaatgatgactttatcttacgatcctcgctcagtctggatgttagggttgctaattcatgaaatatgtgttattgattaagtttggactttgtttaatca

SEQ ID NO: 12822 - DNA, 241 bp, Glycine max
  Clone ID: 701154329H1
ggagcaagggaaagcaaaaggagaaggtgaacaatatggtgctgtttgatcagggcacctatgacaagctcctttctgaagctcccaaatacaggctcatcactccttccattctctctgatcgtttgaggattaatggatcacttgcaaggaaggctataagagaattgatggcaagaggttctatcaggatggtgtctgcccatgcaagtcagcaaatttataccagggcaacaaacac

SEQ ID NO: 12823 - DNA, 94 bp, Glycine max
  unsure (1)..(94): unsure at all n locations; Clone ID: 701154330H1
caatatntgtaaattcaatgttacactgccatcttgcaactaaanggttaacaacaanaccannttcnagtnntngccaagacagcaagcacac

SEQ ID NO: 12824 - DNA, 246 bp, Glycine max
  Clone ID: 701154331H1
tatgatgatttcgctgccagtcttcctgccgacgagtgtcgatatgctgtttatgattttgattttgtcactgaagagaattgccaaaagagcagaattttcttcattgcttggtcccctgatacatctagggttaggagcaagatgatttatgccagctccaaagatagattcaagagggagcttgatgggattcagattgagctgcaagcaactgatcctactgagatgggtctgatgtgttca

SEQ ID NO: 12825 - DNA, 182 bp, Glycine max
  Clone ID: 701154332H1
gcgacggaggaaaacgacaaggtggaagagcgttgccgccgccaccaagaggccctccgcctcctcccccctctcgccctcgcctcgaacccgtcgatcgcgaaaagacatgtccgttactgctgcgagtgttcactaagattgggagtcaccattccatggaagactttgccgtcagaggc

SEQ ID NO: 12826 - DNA, 251 bp, Glycine max
  unsure (1)..(251): unsure at all n locations; Clone ID: 701154333H1
gcccatacactagataacctgattttgctgcttcgagattgaggaaagagtaggatatttctacttaaatggtactccatcctccttccatccattctcctagaaaatgattaccccatttagttcatgaaaaacaaaatgagtaaatacccataatttgatcctaaaaaagtaccccatttagttcatgaaaaaacaacaaataattctaaaaaatataaatgagacattttaacctttctngtncattt

SEQ ID NO: 12827 - DNA, 125 bp, Glycine max
  unsure (1)..(125): unsure at all n locations; Clone ID: 701154334H1
gangaatcacgattncaacggcacatgtggantatnacnacttgcannacgacatnatgctcatgtggatctgccccgtacacgcggattatgttaaaaatatgnttcccggagctgcccagatg

SEQ ID NO: 12828 - DNA, 218 bp, Glycine max
  unsure (1)..(218): unsure at all n locations; Clone ID: 701154335H1
gaccacattccaaaacacaaacacatacattgtagtatcacttttgtctcggaatttgttcttttgagttatggcgagcttaaaggttgcatgtgtggttttgatgtgcatggctgtgatgagtgcaccaatgatggtgcaagccgtgtcatgcaatgatgtttctgtgaacctagcaccgtgcctatcttacctgatgccagggtggagatgtncca

SEQ ID NO: 12829 - DNA, 251 bp, Glycine max
  Clone ID: 701154336H1
ggaaacgaagaagccctaactacgcacgcattcgtgagaaaactcaatattcgtcgctcatggcactctcttctcgtctcttttccaaatccaaattgatctatggcagtcaaatacttctacaaaaggagcatgctattccagttcgtcactttgctaaagagtctgcccctcctgcccttaagggagacgagatgctgaagaacatttttgtggaggtgaagaacaaatttgagaccgccataggaata

SEQ ID NO: 12830 - DNA, 254 bp, Glycine max
  Clone ID: 701154337H1
ggaaacttgaaacttgaaaagcggcgtttgctccgaccgagtgcttcagaggagaagtaatgactgcgatcgcgggaacgcacgtttttggtgttgtgagttttcagctcaaacaagctgaaatgccttttgcatgttcttgcttaatccgcaagcgtattggagattctcctcagcgcaatgtggctctaagacgcagagtaaatggaacaattcttccccaaatcagagcccagaatcttccagattatgtt

SEQ ID NO: 12831 - DNA, 248 bp, Glycine max
  Clone ID: 701154338H1
ggccacagacaaaatgaaagtccatttggtcctcttcttgctcctaattcttgtcagcttcactagcaatgttaacactctctcaaccaattccaaatccaactcttcaattcctcaattaacctaacagaaaaggcctgacaatgagacaatatatagagtatcaaagcagctatgttggggttgcattgcagagtcactggagtttgttcaggcacaacttggtgagagcagccaagtgggaactc

SEQ ID NO: 12832 - DNA, 239 bp, Glycine max
  unsure (1)..(239): unsure at all n locations; Clone ID: 701154339H1
gggcataacagaatcatgattaccaagtccaaacagagtctaactctgttcctactttgcacccttttactcaccatagcagaaacctcggcatcagtgttcaacaacgttagctgcacgagcaacaagactttcactccaaacagcaccttcaacaccaacctcaacanccttctctcctacctttcctcaaacgtaaccaacaacgttagattcttcaacgcaaccgtaggganaga

SEQ ID NO: 12833 - DNA, 238 bp, Glycine max
  Clone ID: 701154340H1
gattgcaaattggcacgaaatccatcatatattaaaccaaactcgataaatctctatctctcccgtttcttccttatgaatattttaaccgtaagagcaatcgaggaaactcctaagctcctccatggaacaattgaagctaccatcttcaatgccacaccttactcacctttgtttcccttcaatcgtttttcttgttttcagtgcatatgtgcaaatggaaatcctgcttacgtga

SEQ ID NO: 12834 - DNA, 246 bp, Glycine max
  unsure (1)..(246): unsure at all n locations; Clone ID: 701154341H1
ggactctgacttctcaatgcaaaaacatcatcatgggcatggcaacggcgtaggagccatgcacatgaacatgaacaggcatggtggcaagttaggaggcatgtttcaagaaggcatgcacagtgaccaccatggtggcagaaagttcccttttggtggtcatcatcatggnaataataacgcctctcaacatcattttccaaaccatggtgggcaccatgagtatttttcggaggaatccgagga

SEQ ID NO: 12835 - DNA, 240 bp, Glycine max
  Clone ID: 701154342H1
ggcaggaagggcagggaaaacggcaatttaagagagacccttttcctctttctctccacattccaagtttccaacctaacaagaccttgtccatctaaaatatgagttccaaagcgtggcttgcgttccttctcctggcactggccatggtcgctgaaacatatgccacaatagatgaatttgcaactacgttagaagaatttgaccctattatctctgatggtgatgctggtctcattg

SEQ ID NO: 12836 - DNA, 93 bp, Glycine max
  Clone ID: 701154343H1
gggagtaatttgcttctttgcactgacacagtgacacagtggttctctcacatctctttctctgtgtaactctgccaccactcttcactttcc

SEQ ID NO: 12837 - DNA, 238 bp, Glycine max
  Clone ID: 701154344H1
ggagctggtgttcaaggaggacgggcaggagtacgcgcaggtgctccggatgctggggaacgggcggtgcgaggcgatgtgcatcgacgggacgaagaggctctgccacatccgcgggaagatgcacaagaaggtgtggatcgccgccggagacatcatcctggttggactcagggactaccaggacgacaaggctgacgtcatcctcaagtacatgcccgacgaggccaggctcctt

SEQ ID NO: 12838 - DNA, 243 bp, Glycine max
  Clone ID: 701154345H1
catgtgacatgcatgacagacaaatatccaaaagttagtggagtgattttttttcctgggaaacactgtgattacaaagttgtgcatccttcccaaatagttatcattggcttggcttcactggaaggaagtgccaaatagtagccttaagacttgaaaggatggagctggatagacacattccataataatctaaaacacaagaatcaagtagtgagattctaccttccccattgtcatcag

SEQ ID NO: 12839 - DNA, 247 bp, Glycine max
  Clone ID: 701154347H1
ggcacaaggtgggtgggaaaacaccgacaacccaaacaaacactcacagcagcaagcacgcgacaaactttaaacgggttttctttgaccgtccgcaacacttctactaaaatcctccttcacttcaatctttttccactttccaccgaatccaagtcaagtctagaatttccaacgaaccgaacaaaggaaaatcccctcttagatccaatccaaattaatatttgtacatctagtcaagacccaa

SEQ ID NO: 12840 - DNA, 246 bp, Glycine max
  unsure (1)..(246): unsure at all n locations; Clone ID: 701154349H1
gtagcccagtaacgtggctactttgatccattgggtaataagaggtcacaatctataaannnnnnnnnnnnnnnnnnnagttgttgtaaccttaaacggatgtatgttcaaacgtaccaagaaatatattttgttgatgcagtctcaaacgattaaccaaagtgtcaaaaggcatgattctgggcttgaatgtataggaatatgtgcaaaccaagaaccagacacagctctaatatatccatgact

SEQ ID NO: 12841 - DNA, 159 bp, Glycine max
  unsure (1)..(159): unsure at all n locations; Clone ID: 701154350H1
ttgagaagatggtgtttgaggaaactgagctgaggctgggntgggactatgtctccctggaaatggaaccacggcaacaactgaagctgctgctgcggaattaggagtgaggaagagagggttctctgagactgaaaccgatgaaacagccaccgttgt

SEQ ID NO: 12842 - DNA, 246 bp, Glycine max
  Clone ID: 701154351H1
gaggtgtagaaatattatggggaggggaagagtggaactcaaaaggatagagaacaagataaacaggcaggtaacgtttgcaaagaggagaaatgggcttctcaagaaagcctatgagctttctgttctctgtgatgctgaggttgccctcatcatcttctctacccgcggcaagctttatgaattctgtagcaccaacagcatgctcaaaacacttgaaaggtaccaaaagtgcagctatggtgc

SEQ ID NO: 12843 - DNA, 239 bp, Glycine max
  Clone ID: 701154353H1
gggacaacatcaacctaatccagtttcgttattcgcccgacacattttttctccgatcccctattcctctccattctccgttgtgtcgatttttgttactcaaaagggaaattgatttgatagatagacagatagatcgtttctatgggttaaagtgaaatccgaatccgaatctgaatctgaatctgatccaatcattttcatgttagggcgtgcgatctccaatcaagcgcggttgt

SEQ ID NO: 12844 - DNA, 239 bp, Glycine max
  unsure (1)..(239): unsure at all n locations; Clone ID: 701154354H1
atataatctccaatccnatgaatcngnttcctccagaatctttctgtcctctctgcaacagcccantcgncaagagtgagattactgnttggngtaatattgntagccacagnagtagtgntattttttanaatacctgntgntcaagttgtcggnttcagatacttccaagtgnttccatggnaatggnacaattttatatggntttgcctcagtcggtggttngccgagcaaancaa

SEQ ID NO: 12845 - DNA, 208 bp, Glycine max
  Clone ID: 701154355H1
ggcatcaattcaaaatatatcatcaattataagcatgggtttgtggaacacgacgaatgcagtgtcttgccgctttcacaagtttggtgatgaccaaaagaatctggtcttccaaggtgatgccacgtcttcttccaggggcatagaactcacaaagttagacggtggaggaaaaccagtgggtggcagtgtggggagagtgttatac

SEQ ID NO: 12846 - DNA, 210 bp, Glycine max
  Clone ID: 701154357H1
tgctttgttctctttctctctcctcaaattttttcctctctctctagggttccaagagtgtcttgaactactccagaaccctctcttgtttttcacaaatttgggtttagtagagtactgacccagaaaagaaggttcaacaggtacctaagagaggggatagaaagaaaaaaatagaaactgtacgtataaaagaagaaagaaacaaag

SEQ ID NO: 12847 - DNA, 235 bp, Glycine max
  Clone ID: 701154359H1
ggtcctaaaacttacttgcttggaccccagtagttgagttgaggaagtgatggaagcagtttacaggttgaaacctcttttggatgtggttagagttgggaacgctaccacttctgagatgcgtcttgaatcaacggctaattgttacctgcagctagaagctcctcaacctcaagagaataataatgtaaccgactcatcatcagatatgtcggatcggataatcaagatccag

SEQ ID NO: 12848 - DNA, 235 bp, Glycine max
  unsure (1)..(235): unsure at all n locations; Clone ID: 701154360H1
ggactcaacgtcctttgctttatgttttcataggactcaacatcctcacctttaagtttcacaggacttaacgttctttgctttttagtttcataggattcaacgtcttctgtctttatgtttcataggactcaacgtcctttgtatttatgttgncataggattcaacgtccttgcttttatgtttcccaggattcaatgtcctttgctttatgttttcataggactcaacatc

SEQ ID NO: 12849 - DNA, 235 bp, Glycine max
  Clone ID: 701154361H1
gacaagtgagtttgttgatcgagataactagaaacagtgtgatgaaaatgaaggtccttgttttcttcgttgctacaattttggtagcatggcaatgccatgcgtacgatatgttccctctccgaatgaacactggctatggtgcccgtactccggaggtgaaatgcgcaagttggaggcttgctgtggaagcacacaacatctttggctttgagaccattcctgaagagtgcgt

SEQ ID NO: 12850 - DNA, 239 bp, Glycine max
  Clone ID: 701154362H1
ggaagcagggtggattgaaaagcacgaacaggagcgatggccgcggcaacgttgtacttggcaaagccgccttcgtcttttactcccaaaattccgtttccaagagtgagggacagtggaattggaactgtaaagtgtcaagttaaaacccaagtgaaagcgggtatcctgggactgggtctgggtctgttccacttccttaacttcgtcgaacccggttcatgtctccaactgcaatt

SEQ ID NO: 12851 - DNA, 243 bp, Glycine max
  Clone ID: 701154363H1
gactattactggcaagaaagagaccctcattgaccttacaattatagaaattttatcaaggcacgcatctgatgagttctaccttgggcagagagatggcggtgactactggacttctgatgccgggccattagaggcctttaagaggtttggaaagaatcttgaagagattgaaaagaagcttatagagaagaacaataatgagacattgagaaaccgctatgggccggctaaaatgcctta

SEQ ID NO: 12852 - DNA, 247 bp, Glycine max
  unsure (1)..(247): unsure at all n locations; Clone ID: 701154364H1
atggaaacacattcaggcctaattctcatttcggatctgctgcgtatggatctagaatgggctctttcgatagcaaacataatggtgcagggtatggctgcggtcttaaccattttaaaaaaagtatggatggtttcagcgagctaaataagggacccagagctgccaagagttctgataataaaaacatcaaaagtcttngacctgtcacattattacacaagggacagaacctttcagtgaagag

SEQ ID NO: 12853 - DNA, 234 bp, Glycine max
  unsure (1)..(234): unsure at all n locations; Clone ID: 701154365H1
tagtatactatataagagtgtcantgtaatgttttcaaacatnnnnagagtgttagtgcagcatataactataaggggttgtcattgtaatgttttcaaacataaaggggagttagtgtaggnatagacaaaaagantggagttatgtctaatttgaaaaaagcctatggagtgcaagtgtaacttgttctaatatctaataataagtggnccaacctgccaaagtttgtcatg

SEQ ID NO: 12854 - DNA, 243 bp, Glycine max
  Clone ID: 701154366H1
gaccacacgacaaacaaatattattattcaatagaaaagaaagatgagtccaacatgggtttttgtgttaggtgttgcagcaatgttggtggttgtgagtggacaatcatcagtgaagcctttggtgaagacagtgaaggggaagaaggtgtgtgacaaagggtgggagtgcaaaggttggtctgcatattgctgcaatgagactatctccgactacttccagacataccagtttgagaacct

SEQ ID NO: 12855 - DNA, 187 bp, Glycine max
  unsure (1)..(187): unsure at all n locations; Clone ID: 701154367H1
gactgagaaaaaggagcaagcttaagctgttttctctgctctttgatcccgtgaaaaaaaaaaatggctggagatgaagaaaagcttcgaatagtgtgatgtttccatggctagcctttggtcacatgntcccaaaccttgagctggccaaactcattgctcaaaagggtcaccacgtgagtttcgt

SEQ ID NO: 12856 - DNA, 238 bp, Glycine max
  unsure (1)..(238): unsure at all n locations; Clone ID: 701154368H1
gaccccaaaataaaataaaataaatctatcatctcctctttctccgggccttgttgccatcctggatacatatggacggcgaaaggttgagggagatggaggagatggggtgtggtcattatgtgggtcgggnctacgtgagcaattggggcatgcaatgcaacagcatgcgtcgtcgtcaccatacgggtgaagcaccactgtcgacgacggcggtttccagctacagaaaatattt

SEQ ID NO: 12857 - DNA, 74 bp, Glycine max
  Clone ID: 701154369H1
gcgaacatgattgaattcagaaaatatgtttgtagaattttttttgtaggtttaaggaaatggtttatttgtta

SEQ ID NO: 12858 - DNA, 175 bp, Glycine max
  Clone ID: 701154371H1
tcttagatctcttctttctctacgccgcacgccgaaaccatggccggaaaaggagagggtcctgctatcggaatcgatctcggaaccacctactcttgcgtcggtgtgtggcaacatgaccgcgttgaaatcatcgccaacgaccaagggaacagaaccacgccgtcttacgtcg

SEQ ID NO: 12859 - DNA, 236 bp, Glycine max
  Clone ID: 701154372H1
gggttaatgcagatgatgtgatacggaggataaggtctgataaaatagtgaagcaaggttttttgttggtctatctgtgttttcgaaatgagtttgtcatgactttccacgtatgcactgttattatgttgttaataaatgcttgcttgataatgataacagggaatggagacaggcaggtggccatcagcctggtgtacttagtactggtcaaggtcttcatgattcaattccca

SEQ ID NO: 12860 - DNA, 226 bp, Glycine max
  Clone ID: 701154373H1
gaccattaataagaaatcattccgttactatataggcatggcctatccaaattttattcttctattcggagatcgaactctggaagaattagattgatggctgttaactgtacttcctcaattcaaatcccaattcagaaatatggatcatttctcaagtaccccaacaaaaaattgatgcccagacgcagctatgtcccactgaaaaaggcatcggtactgagga

SEQ ID NO: 12861 - DNA, 233 bp, Glycine max
  unsure (1)..(233): unsure at all n locations; Clone ID: 701154374H1
cagcgcagatagtattgataaatcagatgaattgctcaatcttgctttcgcattattgccacctgaatttttgtattcattgcaaacatcaggtatacctaatcataaattaaaacttaaggtcaganctccaatcatgctaatacganatcncgaccagactgatggcctgtgcaatggaactaggctcattatcaccaaactcggatctaatgtgattgaggctgaagtaa

SEQ ID NO: 12862 - DNA, 232 bp, Glycine max
  Clone ID: 701154375H1
gatagttgaagggtgagtgtcaccttggaaatccatccatggctcccactcttacatccaattcatcttttataactagcactcctcattcaagggtgaccctccggaatccaaggctgagagtctttgccaagaagtctggatcattcccatcttttgggctaggcaagcccaaagatgattcttcttcttcaactgaagaaaaagatggctcatccaattccaacccctt

SEQ ID NO: 12863 - DNA, 242 bp, Glycine max
  Clone ID: 701154377H1
ggattactaccaagtgaaaaagcaattaactaagcatatatagcgtgtaagacagtgagaaaaaaagtgttgtgtagagagaaatggctaggtggtgcatcttggtggttcttgcccttgtcgtggttgcaagtgccagaaacatgcccaatgacgcaggtttggaggaccagaagaacttcctcgggtatgggttctctggagttggcaataatgggctcccttggaggagtgggttctgg

SEQ ID NO: 12864 - DNA, 235 bp, Glycine max
  Clone ID: 701154378H1
gggagaaaaaggaattgttgaggcagcgattagtattggaaggaaagttagagattttcagtttgatgctatgaaagactttgaaaattttatgtctctttgtagaggtggaaaaaaactgaaccatgcgtctacaattgcagggtcgccaaagcttggaacatatgagactgattttgggtggggaaagcccaagaagtgtgaaatacttcacatagaatattcaagaactatc

SEQ ID NO: 12865 - DNA, 238 bp, Glycine max
  Clone ID: 701154379H1
ctacatcatcggctactatgacacgtcaaaactgatgtaaaaagtcttgtagaaccgatgtagaaagcctactttgtaatagtgttatcaatattttggttgtataattatgtttcttgtcagaacttcggtttgttgtataatactttggttgcttccaaactttctggttgttgtttaaattctttttgttggctgaattgttgttattattcatgtatgaagttatacttttaaa

SEQ ID NO: 12866 - DNA, 248 bp, Glycine max
  unsure (1)..(248): unsure at all n locations; Clone ID: 701154380H1
gggagtggaggagcgtgaggtgagtgtctgttctgagaaaaaaataaaaggcaaagaaacaagaaaacaaaggaaagaaaagatgttacagttcccggcgtatatgactcagtacccattgtcgacgaggactattccgacgtcgtttctgctnccnctctcagtggcctcagccccaaaacgaagaactccttctcgccatggaagagtccgatttcgaagaaaaatgcaacgagatcaggaagatg

SEQ ID NO: 12867 - DNA, 243 bp, Glycine max
  Clone ID: 701154381H1
ggcccttctagctttttcccagtccaagcagcctccaattcgtgccactctcttcaaaatggccgttaccttctcaaatctccacacagaatcaggtctcaagtccctcgacgacttcctctctgggaaggtctacgtttctggggatcagttcacaaaggacgacatcaaagtgtatggtgctgttttggagaagccaggtgactcttttcccaatgctgccaagtggtacgaggttgtctc

SEQ ID NO: 12868 - DNA, 204 bp, Glycine max
  unsure (1)..(204): unsure at all n locations; Clone ID: 701154382H1
ctataactaatttgattgagaaaaaaatttccacactattctctcataacctgatccctatcagtgttatgtgataaagccatcacaactagagtcatttaagattccgtaagtgttttttagatgtttcaatctattaaagaaagtagatctcaatacgacactangatatcaattggctacaatatttcgagacatactggt

SEQ ID NO: 12869 - DNA, 242 bp, Glycine max
  unsure (1)..(242): unsure at all n locations; Clone ID: 701154383H1
gaaggaagagaatggataacatcacagcaagtgaagtagctggtttcggagtgggtgctgtgctcctctgtaccactgttgctgccaccaaagtcgatgctttcttctcttcttctcagcgcantcattagggatgtgcaagcgatgtggcaatcttaggcgattggcttgctcgacatgcaaaggaactgggtctatcagagaagggggaatacttggtattaaactcgtagaagatttgt

SEQ ID NO: 12870 - DNA, 237 bp, Glycine max
  Clone ID: 701154384H1
gagtgtgaattaaaaacactttcttgctacattatagagtttaccttttcttctccacaacctctccatttttaaaaccacaaataaataccaccattcttcccctgcctaacccataatctaacatcaacagcatctcttcaccaacatgacgcggtcaacgcttccaccctcatctccgatctccctcttcgtgtcgctcatgtgcgttgctttcgcgtgcgccacatcgttgaa

SEQ ID NO: 12871 - DNA, 220 bp, Glycine max
  unsure (1)..(220): unsure at all n locations; Clone ID: 701154385H1
gggcgaagaatttgcataangcaagcaaagcgggggagaaagagaggcagcaaacaaaaacaatggcgacgtcgctnnnnnnnnnnnnnnnnnnnnnnnncaacactctcttcatcgccaaagcgcttccactatctcgcccctcctttctctctctccctctccccaaatccctactctctctctccacgcgccgccgcaccttcatcgtccgcgccga

SEQ ID NO: 12872 - DNA, 233 bp, Glycine max
  unsure (1)..(233): unsure at all n locations; Clone ID: 701154387H1
caacactttgccatctacatacaacccaccaccattgagctcttgttattgtccatcattatctacttagatgcatgacatggatgatgaggatgaggaggaagatgatnnnnnnnnnnnnnnnnnnnnnnnnnnnnnnnnnnnnnnnnnnnnnnnnnnnnnnnnncaacaacaaacagttacatatgattatcctagantaatagaagaaagaagtcgcataacaaaaagat

SEQ ID NO: 12873 - DNA, 178 bp, Glycine max
  unsure (1)..(178): unsure at all n locations; Clone ID: 701154388H1
ggaggtgggtcaactgcaaccttaaaattcctttagcatgtttctccctctgtaactgctacactttctggtcttcaaagagcaacataaatttgtgtaaggttgttcttaatttttattttatctncntcctctttcacttcccctaggtgccactcttttttttttttngccctta

SEQ ID NO: 12874 - DNA, 233 bp, Glycine max
  Clone ID: 701154389H1
gggagatagctgtgagtagtgagagggaggaagacatagacataaagaaggagaagtgaagtgatgaatgccccagatcgttacgagcgtttcgtcgtccctgaaggcaccaaaaaggtttcttatgagagggacacaaagatcatcaatgccgcgtccttcaccatcgagagagaggagcacactattcggcaacatcctccgcatgcagcttcacagagaccccaatgtgt

SEQ ID NO: 12875 - DNA, 232 bp, Glycine max
  Clone ID: 701154390H1
ggcacaagtgagtttgttgatcgagataactagaaacagtgtgatgaaaatgaaggtccttgttttcttcgttgctacaattttggtagcatggcaatgccatgcgtacgatatgttccctctccgaatgaacactggctatggtgcccgtactccggaggtgaaatgcgcaagttggaggcttgctgtggaagcacacaacatctttggctttgagaccattcctgaagag

SEQ ID NO: 12876 - DNA, 236 bp, Glycine max
  Clone ID: 701154393H1
gaatactttctcgtattttcccctcttcttcccctctctcgtgttatccgctttagttttctcgggaaaatcatggtgaaaggtccaggtctctactccgacatcggcaagagagctcgcgatcttctgttcaaggattatcagaatgaccacaagttcaccatcaccacttacacttccactggagtggaaatcacttcaactggagtcaggaaaggtgaaatatatttggccga

SEQ ID NO: 12877 - DNA, 243 bp, Glycine max
  unsure (1)..(243): unsure at all n locations; Clone ID: 701154394H1
gaacacgatcttttcttacaccccctcaactacactacaatccacacttatagtcatgactcccccaccttcaccactctttataactcctctctccctcacattctnnnnnnnnnnnnnnnnnnnnnntactactccttccccttattgacgacaccacattcatttaccatatccaacatggccgaggaagctccaaaccagacaaccacaccaccgcctcctcaagagtcagtggcgcaa

SEQ ID NO: 12878 - DNA, 239 bp, Glycine max
  Clone ID: 701154395H1
ggaggtgaagtctggaaagaccagcgtgcaggttcttcaatcttctagagagagaaagttaaagattgaaatttggatcggagagagagagagatggcgttgaatcctcaattgtttcctaatggaatgcccgttcctttcgtgaacgagatgtttgtgttggccagagacggcgtcgaattcgaggtcgataagattcctgcctctggaaatcatgggggtcatctcaaaacaaaggg

SEQ ID NO: 12879 - DNA, 244 bp, Glycine max
  Clone ID: 701154396H1
gatgcacccaaaggtgcaaaaatattaagatgataaacattggagcacttgttgtactctttgcatttctcttcctcagttgtgcctatgcacaagacacaacaacccttgtgcctgcaatcataacttttggtgactcagccgtggatgtagggaataatgactatcttcccacccttttcaaggctgattaccctccttatgggagggactttgctaaccaccaacctactgggaggttttg

SEQ ID NO: 12880 - DNA, 238 bp, Glycine max
  Clone ID: 701154401H1
gagggtgaccagtgaacacaatacagggcagcatcgccatgggattgagtattctgagaagcacttccatttccactcctatctcttcctccaaatccaaatccattttctcaactcttgttcgttcatctttcgcctccatttcccccacaaagtgtgttactcccaccactcttttcgtttctgccacccccttcttcaccgcctcatccaagcgcggtttcgtggtgggattgtg

SEQ ID NO: 12881 - DNA, 238 bp, Glycine max
  Clone ID: 701154403H1
gggaagaggagtgaagcagcagagggaggagcggcattaaaaatgcagatcttcgtgaaaaccctaacggggaagaccataaccctcgaggtcgaaagcagcgacaccattgacaatgtcaaggctaagattcaagacaaggaaggcatccctccggatcagcagcgtttgattttcgccggaaagcaacttgaagatggaaggaccttggccgattacaacatccagaaggaatcaa

SEQ ID NO: 12882 - DNA, 224 bp, Glycine max
  Clone ID: 701154404H1
ctttgttgcagttgcagtggaaagtgatgagtgacaagcctaaagaggaccaagaagtgaattcaaaacaggttgacttgtgtttgaatctatttgtctgtgtccgtcttcaaatggatgccatatttgctcattttcatgttgggttacctttggtagtttggtttgacatattacatttatcatttggtaggcacagttggggaaatgagaagacatttgtt

SEQ ID NO: 12883 - DNA, 214 bp, Glycine max
  unsure (1)..(214): unsure at all n locations; Clone ID: 701154406H1
gggacattcattcanntcagtctcaatcacatggnntcttcttctccctctcactcatatctcacacatcttcctcttcatccctctcaccaaggtgatagtgagaagcgcgtggaggacgatgaatcgcgcgttccgattcacatcgtgacggcggcgtcgcaacttcccgtcgaatttctggaaccctcgcctcaatcgaagctcgtcatcg

SEQ ID NO: 12884 - DNA, 244 bp, Glycine max
  unsure (1)..(244): unsure at all n locations; Clone ID: 701154407H1
ggaaggagtgaggtagcaacagcactgccactgccactaccaatagcagaatgggaaccttgggcagagctttctacgccgtcggattttggatccgcgagaccggcnaagccatcgatcgcctcggctctcgtctccaaggcaactacctctttcaagaacagctatctaggcatcgacctctgatgaatctgttcgacaaagctccctcggttcacagggatgcatttgtggcccccagtgc

SEQ ID NO: 12885 - DNA, 238 bp, Glycine max
  Clone ID: 701154408H1
gacaacaaaaaaattcttcagttcactatatctatggcaatgttttaccaatttaggaatgctggtgtcttttttttcctttgtgttcttctcttatctggtgtgtgtgttttgggtcgaccagccacttttctacaagactttcatgtcacgtggtctgactcccacatcaggcaatttgatcaaggcagggcaatccaactcagacttgaccaaagctctggtaatataacaacat

SEQ ID NO: 12886 - DNA, 211 bp, Glycine max
  unsure (1)..(211): unsure at all n locations; Clone ID: 701154409H1
gttgataccacgtttctctagaacagatattcganataagtcagtccctgaaggatcaggggtggacgttcaaaatgcaggcttcagtattggaaatatataacgagaccctcagggatttgttatcatcaaatcggtcaagtggtattgactcaacacgaatagaaaacggtgttcctgtttctggaaagcagccatacactattatgca

SEQ ID NO: 12887 - DNA, 229 bp, Glycine max
  unsure (1)..(229): unsure at all n locations; Clone ID: 701154411H1
cttgatacaagcatgttcatttttttaaaatagaaagaaaataatgataaacaaaatgcaaactcacaaatcacagaggggttcatggtctggtcagacgcacaacaaataacagaggacgaaggttttccttcttgccgttgacgggacatggtatcgccggcggngccaatattgaatgatgacagcataggaataagaatgtgtgttgctttcattagggtttaga

SEQ ID NO: 12888 - DNA, 242 bp, Glycine max
  Clone ID: 701154413H1
gaccaacacaactaccacttgtcgacgaaccaccttaacacttgcaccctcgaccaaagctgacacaacaacaaaggacctctcctcttacaagaatgaatcaatgaatgaaaagaaagcaacataatgaatgactgaagaaggcaaaaggaagaagaagaaataactagggatattttcagaatttcaaaatacgctgggtgcacaaacagaattctaggtgcacaaagcgaaaagcctaa

SEQ ID NO: 12889 - DNA, 247 bp, Glycine max
  Clone ID: 701154414H1
ggtctcgtggaagtgtaagcaagcaaaaccctagcggcgcctgctttctttgttcgtgttttgcatcaggatggagtctcaggtgaagcacgcacttgttgtcaaagttatgggtcgtactggatccagaggacaagtgacccaggttagagtgaagtttttggatgatcagaaccgtcacatcatgaggaatgtgaaaggacctgtgagagaaggagacattctcaccctactcgagtctgaaagg

SEQ ID NO: 12890 - DNA, 234 bp, Glycine max
  Clone ID: 701154415H1
ggcccttctagctttttcccagtccaagcagcctccaattcgtgccactctcttcaaaatggccgttaccttctcaaatctccacacagaatcaggtctcaagtccctcgacgacttcctctctgggaaggtctacgtttctggggatcagttcacaaaggacgacatcaaagtgtatggtgctgttttggagaagccaggtgactcttttcccaatgctgccaagtggtacga

SEQ ID NO: 12891 - DNA, 53 bp, Glycine max
  unsure (1)..(53): unsure at all n locations; Clone ID: 701154416H1
ggctcatgagcgcttggaaaatgcaaaanaaaaanaaatnnatnaaaaaaaaa

SEQ ID NO: 12892 - DNA, 235 bp, Glycine max
  Clone ID: 701154417H1
ggcagccaagaaaagaaaatcctcacccattttcttcgtagccaaacactctgaaattctcagttatgtcgtggcaagcgtatgtggatgatcacctaccgtgtgaaatcgaaggtaaccacctcactcacgccgctatcatcggccaagacggaagcgtttgggctcagagcaccaacttccctcagttcaaacctgaggaaatatccgccatcaataatgactttaatgagcc

SEQ ID NO: 12893 - DNA, 235 bp, Glycine max
  Clone ID: 701154418H1
ggacaacaagaagctcactctctctatctcttctctctgtgtgtgtgttatgtgtgaatacacatgaaaatgcagaagttcaaattgcttctagtgctattcttcgctacttgccactcctctttgtccatcacagatggtttgttgccaaatggagactcgaagtttggtccaaaaccatcagagttgaaaggttcaatagtgactacccccaatggcattccacattggacaa

SEQ ID NO: 12894 - DNA, 240 bp, Glycine max
  Clone ID: 701154419H1
gacgccgcaagacacggtttctgaagtgaaaaaaaatatagaaactgttcggggtgcagatgtctatcctgctgcacagcaaatgctaattcatcaagggaaagttcttagggatgctactaccttggaggagaataaagtagccgaaaatactttcattgtaattatgctatcaaagagtaagagcacatctggtgaaggatctactacttcaactgcattatcaaccaaggctccaca

SEQ ID NO: 12895 - DNA, 231 bp, Glycine max
  Clone ID: 701154420H1
atcctatatgatgcctatgaagaaattgagttgtggtgctgagttgtggctggatttgtgaatcaaaataagtcttaagctctcttgaatttttttattcaagaaatttgagcataagaaaccaaaaattgtaattatccaagcctaagcaacataaacactactcttgatttctaggttgaaatcattggtgctggcagcttgaacatatgtacttgtaaaaattactgg

SEQ ID NO: 12896 - DNA, 235 bp, Glycine max
  Clone ID: 701154421H1
cctctacctattctctgcctctctcttctctccatcccctgggcttattggcatacaagttcaaatttccctcttgatagcctttcatgtgattaggtacattaagcatttgattctctttgttcttccctaatataaataaactttagtaatatgtgattgcttaataaagacccactaattaaaagggtctaacttaggaaataagaggaatactaggggatttggacccaat

SEQ ID NO: 12897 - DNA, 235 bp, Glycine max
  unsure (1)..(235): unsure at all n locations; Clone ID: 701154424H1
catcgttttcttcgttgctataataattttaggtgcagaatggcaatggcaatgggtcagagcatgagcatgagcatggccacagctaccaaattttccctttgcgaatgaaaaccggccccggtggccactacattccggaggtatcgtgcaaaagttggaggcttggtgtggaagcacacaacgtcattgactggagaaccattcctcaagattgcgagggatatatangnaa

SEQ ID NO: 12898 - DNA, 228 bp, Glycine max
  Clone ID: 701154426H1
gaagcacttagtgtgagtgtgaggaggcagactattgaaggtgctagaagaaatcttaataggatgcgtcaggaaattgacaagttcaaggccactgatgcaggtagactccgtgctgaatacaacaggcttgtcgaaggtttggcactaagaggagacctgcctgctactgatgcctggcttgcaaatccggccttgcctgatgatatactaaaggaggctgtacct

SEQ ID NO: 12899 - DNA, 228 bp, Glycine max
  Clone ID: 701154427H1
gacagaaacatattcttcaatggaatttggcaaaaagtagccatcgccccaacgatcccatttcccttgacttctctacgtgaagatccttgtgtcacatagagctagttaaaatgtcagagggaaatgcagggaaaggaaagagaatcgccatcattggcgtctcaaccttattgttggtggctatggttgtggcggtcacaattggggtcaatctcaatgagaatg

SEQ ID NO: 12900 - DNA, 242 bp, Glycine max
  unsure (1)..(242): unsure at all n locations; Clone ID: 701154428H1
ggcacaagtgagtttgttgatcgagataactagaaacagtgtgatgaaaatgaaggtcctgttttcttcgttgctacaattttggtagcatggcaatgccatgcgtacgatatgttccctctccgaatgaacactggctatggtgcccgtactccggaggtgaaatgcgcaagttggaggcttgctgtggaagcacacaacatctttggctttgagnccattcctgaagagtgcgttgaagc

SEQ ID NO: 12901 - DNA, 212 bp, Glycine max
  unsure (1)..(212): unsure at all n locations; Clone ID: 701154429H1
ggatccacataaacatacaacatcgaaaggttgttaattttcaactcaatggttcttccctcaggttttgtttccatgttgatactttttggcatggttttggtagtncgggtgaatattgtcccaggggttgaggcaaaggcaagggctttctttgtatttggagactcactggttgacagtggtaacaacaattacttagcgaccactgc

SEQ ID NO: 12902 - DNA, 232 bp, Glycine max
  Clone ID: 701154430H1
ggcgcaagcaaagatgaatgaagcggaggagcaactttgcgaggcggccagaaaaggtgacacggagaaagtgaggtctctcatagactccggcgctgacgtcagccacttcgacggcgagggcctcaatcctctgatgcacgccgcaaagcacggccatgcacccgtcctcaccctcctcctctccgccggcgctccctggaacgctctttccccctccaacctctccgcc

SEQ ID NO: 12903 - DNA, 230 bp, Glycine max
  Clone ID: 701154431H1
ggggaagtggtaaccgacacagcagaaatgatatgatgggttgtggcggtgcattctcagtgtggctgccagtgtttgtgtcttgttttacagcaatagcattggctgggactgggtgcgataaggcaccggtggtgttcgtgttcggcgattcgaactcggacacgggtggactcgcttccggtctgggtttccctatcaatcttcccaatggccgcaatttctttcac

SEQ ID NO: 12904 - DNA, 235 bp, Glycine max
  Clone ID: 701154432H1
ggcactgcaaatcacttttctactttgagtcttcttgatccttctttttctccttgaactcaaacatggcagatgaggtggttctgctagatttctggccaagtccatttgggatgagggtcaggattgcacttgctgaaaagggtatcaaatatgagtacaaagaagaggacttgaggaacaagagtcctcttctcctccaaatgaacccggttcacaagaagattccggttct

SEQ ID NO: 12905 - DNA, 237 bp, Glycine max
  unsure (1)..(237): unsure at all n locations; Clone ID: 701154434H1
ctgcacctaaaagtctagttgaaaggtattatttgtaccttgtgatgagcaaactcaatgtgagaaggatcagagacattctccatgagagtatcgtaaccatagaacagatcacgctgaatgttgaccgtggcaaactccggtttgtcaaagtcatcagcncaacctaaacaaacacaaatttaccatccaggtcaataanacacaaaacaaaacactccttagccaacataaaat

SEQ ID NO: 12906 - DNA, 213 bp, Glycine max
  Clone ID: 701154435H1
ggccgaaaaccctaacaacacaggcgcagagcgtgatccattgacgaagatggtgcagcgtctcacctaccgcaagaggcacagctatgccaccaaatccaaccaacacagggtcgtcaaaacccctggtgggaagctcgtttatcagaccaccaagaagagggccagcgggcccaagtgccccgtcactggcaagaggattcaggggattcc

SEQ ID NO: 12907 - DNA, 242 bp, Glycine max
  Clone ID: 701154436H1
ctttgaaaaccgggttgatgccctgaggactttgcgcgaactcaagcttcttcgccaccttcaccatgagaatgtgattgctttgaaggacatcatgatgcctgttcacaggaatagtttcaaggatgtctatctggtttatgaactcatggacacggatttgcatcagattattaagtcttctcaagctttgtctaatgatcactgccagtatttcctctttcagttgctccggggcttga

SEQ ID NO: 12908 - DNA, 230 bp, Glycine max
  Clone ID: 701154437H1
gactgaactaaaaaatgaactgtcttcagaatctttctcgattctctgttttgcccttcgatacacttgttacgcgccaccgcaagaaccttcccctttccctgggtttcgtcaataattctcatcaaaatctaactatggcactcaaggctgcctcaggttctataccgagtgcagacacaagtagtgccgataaggaggaagaaaagtctgagacatatagtcatagc

SEQ ID NO: 12909 - DNA, 129 bp, Glycine max
  Clone ID: 701154438H1
gaaagctgcaaaaactgctatgaacctattcagccacatgtcagaagcaacaacccgggagaaggagttgatgaaagcctgtacagatccagagctagttgctgcaattgttggtaatgtgaaaatatc

SEQ ID NO: 12910 - DNA, 52 bp, Glycine max
  unsure (1)..(52): unsure at all n locations; Clone ID: 701154441H1
atgagaattaatttaaatgatttcccacgaaaaanatnnnaangnaccaaaa

SEQ ID NO: 12911 - DNA, 201 bp, Glycine max
  unsure (1)..(201): unsure at all n locations; Clone ID: 701154442H1
ttcgcaaaccctaatttcggaaagatcggcgatggctgcctccaaggatcgcgagancttcgtctacatcgccaagctcgccgaacaggccgagcgatacgaagagatggtggaatcaatgaagaacgttgcgaatctcgacgttgaactgactgtggaggagcggaatttactttctgttgggtacaagaatgtgattgg

SEQ ID NO: 12912 - DNA, 229 bp, Glycine max
  Clone ID: 701154443H1
gggttagcagttgaatctcctgtttctggttttgtgatctcttctgaggttgttgtggcatggcttacaggagaaggcaaggtatatccaggtcttccaccttcaaggaagaatttcatgatccatcattggaagatgtacatgttaaggattctaatcatgacaatgcttctccttcaatcttctcatcttcttcttcaacaccagcttcatctcttgctgctcaagc

SEQ ID NO: 12913 - DNA, 202 bp, Glycine max
  unsure (1)..(202): unsure at all n locations; Clone ID: 701154444H1
gtagagtggataatggcttcgttatcgctttgcatagccatgagagcacccactccctcagcttctctcattctcactaccccaaaaccatcttcactctctttgaaccttacccgcacttgctccangntcgctctccgctcctccattgctccttcctctcttctccttcccatctctcttccccttcctccgtttcagg

SEQ ID NO: 12914 - DNA, 229 bp, Glycine max
  Clone ID: 701154446H1
gacatttaagccgattcatcaaccttttcaacttgagatgccccttttctccactcactttgtttcacattgctgctaaagcaaaattcttttttttttggttcacctcagcatacatacaatagcatatgatgaagaagaacaacctcagttgctgtgtgttgttgcacttcctttgctgttgtctccttttgccagctcttgttctctcccaccacatccatggaaa

SEQ ID NO: 12915 - DNA, 233 bp, Glycine max
  Clone ID: 701154447H1
cgtggtttcaccttacaaaatgcagagataatcttgtcaacttcaagaattgcagtttgcagcgatgtagcttttgcagattcaaacaagcgttttcttcaatttcattgaagagtgtatggttattgttcatggagtgtaaatagttcaaatcagaaatcaagatgatacatctacttgtgcaatcttatttcatttgttaattgctacttgctgggaaacggggcaatcat

SEQ ID NO: 12916 - DNA, 233 bp, Glycine max
  unsure (1)..(233): unsure at all n locations; Clone ID: 701154448H1
gactctactactccaggtgatggccttgccttcttcattgcaccatttgacactaaaatccctccaaactctggtgggagcaaccttggactcttcccatcagacaatgttgttgctgtcgagtttgacacctaccctaatcgtgataagggggatccagattatagacacattggtatcgatgtcaactctatggtctccaaggcaactgctaggtggnngtggcaaaatgg

SEQ ID NO: 12917 - DNA, 212 bp, Glycine max
  unsure (1)..(212): unsure at all n locations; Clone ID: 701154449H1
gggaaggtatagtggcagtccaattgtaatttgcaacaagggcatctaaacccagaacccaatcatcttttattgcaaacttttgtgcattggaatttggaggccataaaaaagatgcgatgctacacgcaaacaagtagtacaagtccaataagaaaagcnagatagaaagattggctagttcacacacctcattaatacaacaacaccct

SEQ ID NO: 12918 - DNA, 230 bp, Glycine max
  unsure (1)..(230): unsure at all n locations; Clone ID: 701154450H1
gatcccataaaacgaagaacaaatggcatctatgtgacgtgccttgcagataacaagtgataaaacaagtgacaacgtggcaccttagctacccgatttcttgttcacaatattcaaaattggaaaaaaaaaaanaaanntcccccatttaaanttcccnccttggcatatnacacctangccatgataangcatccatccngngccctaaaancaattcccatttncng

SEQ ID NO: 12919 - DNA, 213 bp, Glycine max
  unsure (1)..(213): unsure at all n locations; Clone ID: 701154451H1
aatcgttgttgaggtcctattcgtcttggatattcacgagtgaggaagtcatagtaatagatccacaagaaagatatagaaganactatagtgggttgtgtgaaaatgcggagagatgtcgaacaatgattctgtgatgctaaagggacctagaaaaacagaganacaaaaatattgaaaccacacgcatagcgacgtcgttttttacttttt

SEQ ID NO: 12920 - DNA, 229 bp, Glycine max
  Clone ID: 701154452H1
ggatattggtttcgttcaatattctatgacttttctctttaagaaattctagatctgctttatatgaaggcatatatagcttgaagttcaccatcaagcttacacatagagagaaaagaggctaatttattgtgttcatagatacaagacaatgaagaacctttcatagagttgaacaaggtggatcgaaggcatgggaagaggcctctcccttctgatcatgcatcaa

SEQ ID NO: 12921 - DNA, 235 bp, Glycine max
  Clone ID: 701154453H1
ggagcaagagtgaagagcgaagagaatggctcccaagggtttaatctttttgggctgtgttatgcttctcagcactgtcactgagtcgttgtcttgcggaggataatggacttgttatgaacttctacaaggaatcatgccctcaggctgaagacatcatcaaagaacaagtcaagcttctctacaagcgccacaagaacactgctttctcctggctcagaaacatcttccatga

SEQ ID NO: 12922 - DNA, 238 bp, Glycine max
  Clone ID: 701154454H1
atagtgggctattttcacgcgaatgggagatctgatgacagtgagcttggtagtgtggcgaagaatattggtgaccacatttgccgctactttccccaagccgccgttctattgttagataacaagaagctcgatgctttgaaaaagagcaaggaccgtagtgccataatgcagctttatgttagggatacatctaagaactggaagttggttcagtcagatgggaacaatcgatttt

SEQ ID NO: 12923 - DNA, 180 bp, Glycine max
  unsure (1)..(180): unsure at all n locations; Clone ID: 701154455H1
agcaaggatgctttcggtaagcaaaatgaattgagtgacacaaagtacactgaaggaggatacaactccatggagaatcagnnnnnnnnnnnnnnnnnnnnnnnnaacgacaatgctgccaatgggaagtacttctacaacaacaatgatgctgccaacaacaggtactacaaaaccaaa

SEQ ID NO: 12924 - DNA, 230 bp, Glycine max
  Clone ID: 701154456H1
aaagagacccggaaagggtgggaaccgcttttggaaatccattgggcttggatttaagactcccagggaagccatcgaaggaacctacattgacaagaagtgccccttcactggcaatgtttccacccgtggccgtatcttggctggaacatgtcacagtgctaagatgaacaggactattattgttaggaggaattatctccattttatcaagaagtaccagaggtacg

SEQ ID NO: 12925 - DNA, 229 bp, Glycine max
  unsure (1)..(229): unsure at all n locations; Clone ID: 701154457H1
ggacaactgacaaggaggcagttccttctacaaacaaaatagtatatggggcggtagatagataggctacaagtaaacgaagcaagataatttcttcctacttaacaaaagatagtaagagccanacggtatcttatcccataggtcaccatgatccttccattagaagttgcaataacgtgatagaaatggctttgagatacactttcttttatggttagctatatat

SEQ ID NO: 12926 - DNA, 206 bp, Glycine max
  unsure (1)..(206): unsure at all n locations; Clone ID: 701154458H1
gcatgccaaagttggangcttggtgtggaagcacanaacgtcattgactggaaaaccgttcctcaagattgcgagggatatattgggaactacatgcttggcgaacaatatagatcagactccaaaatagttaaccaacaagcttatttctatgctaaaaccctcaatatcactgccaaaaccgcatgggtgttcgacatagatga

SEQ ID NO: 12927 - DNA, 233 bp, Glycine max
  Clone ID: 701154459H1
ggaagagtgaagagaatggctcccaagggtttaacctttctgggctgtgttaatatgcgtttcagcactgtcactgagtccttctgttgcgggggaagggcaaaataatggccttgttatgaacttctacaaggaatcatgccctcaggctgaagacatcatcatggaacaagtcaagcttctctacaagcgccacaagaacactgctttctcctggctcaggaacatcttcc

SEQ ID NO: 12928 - DNA, 73 bp, Glycine max
  unsure (1)..(73): unsure at all n locations; Clone ID: 701154461H1
aattggtgttttnttgtattttttttaacattttctttttcctgtaaagaaagaaagttccgagccaaaaaat

SEQ ID NO: 12929 - DNA, 234 bp, Glycine max
  Clone ID: 701154462H1
gtggtggtaggtaccgagcaaatctttgctgagagatgactgagagattttattatttttgacggtgacaattataatgatgtgaattttgaaaacatcatatattgggcacgtactggcattaaaaatatatccaggatataattatttgggagcaatgaaactcagtagaaaaaataatgacgccaattttttttatggccaattataaagtgttacttgccatttgtcaag

SEQ ID NO: 12930 - DNA, 227 bp, Glycine max
  unsure (1)..(227): unsure at all n locations; Clone ID: 701154463H1
ggatgacggaganntgtgagcaacgactgctctangantctcaccncctggnccttaagtaattagccaacatggcgctgggaaagaattcccgaggtgaggggaggaagttgtcgaactactgttcaacggtctctgtcgctgtgttcgttgcattttgtttagttggtgtatggattgtaatgtcatccattgttccaattcagaattcagtcatcaggtatctg

SEQ ID NO: 12931 - DNA, 235 bp, Glycine max
  unsure (1)..(235): unsure at all n locations; Clone ID: 701154464H1
gactacagccacttctatagcttcaatttataagaatggcactttctcctattcgnnnnnnnnnnnnnnnnnnnnnagctattgttgcattggctgtgttactgcttcttacagggacctcttcagctaacctctcaaagaacttctattccaagacatgtcccaacgttttcaacactgtaaaatctgtagttaaatctgctgttgtcagagaacctcgcattggggcatctat

SEQ ID NO: 12932 - DNA, 204 bp, Glycine max
  unsure (1)..(204): unsure at all n locations; Clone ID: 701154467H1
ggatcattctctcancgtancaatccatctanatcttaaattgatggcacttccaccctgccacatgtttgcacagttctatgtagctaatggggagctatcatgtcaaatgtatcagcgatctgccgacatgggcctgggtgtcccatttaatattgcatcttatgcactcctgacatgcatgatcgctcatgtttgtgacct

SEQ ID NO: 12933 - DNA, 232 bp, Glycine max
  Clone ID: 701154468H1
atcagtggtgccccccaggataacaacataatgctgtggaatgctgtcatatttggtcctgatgatactccatgggatggaggcacgttcaagttgacactccaatttactgaggactatccaaataaaccaccgactgtacgatttgtgtctcgcatgtttcatccaaatatttatgctgatggaagtatttgtttggatatattacaaaatcagtggagtcctatttatg

SEQ ID NO: 12934 - DNA, 227 bp, Glycine max
  Clone ID: 701154469H1
atttcttagtgactcccagtcttcagtttcaccaggaaagtcatcttctaccgccgagttctcttggcaagttggttcggataccagttcattgcaaggttttcatagagtcagaggatgtgggacggacccttgacttgtcctgtcttggttcatatgaagagttgtacatgagactggctaacatgtttggaatagaaaggtctgagatgttgagtcatgttctc

SEQ ID NO: 12935 - DNA, 227 bp, Glycine max
  unsure (1)..(227): unsure at all n locations; Clone ID: 701154472H1
ggcacaagtttgttgagatagctagaagcaataagatgaaaatgaaagtgctgttttgtttgttgctacagttttggtagcatatgaatgccatggctcagactaccagaagttccctctccaaatgaaaactgggtttggtgggcaatacagcaatgaggtggcatgtgccagttggaggcttggcgtggaannnnacaacgtagtcaagtggcaaactgttcctg

SEQ ID NO: 12936 - DNA, 227 bp, Glycine max
  Clone ID: 701154473H1
gatacaccataatattatgaatatgtctttctagctccaaaattcctatgcatgatggcaattgataccctcatgccagccacaatgagcagcagtcctgcaccttgcagccgatcctggtcaattagtgaggactccctaagaaggtatgtgcagtttgcgagtgaaagctgcatacaagagttattggcagcttcggtcacaaacaaaggaaatggcaacgatgg

SEQ ID NO: 12937 - DNA, 233 bp, Glycine max
  Clone ID: 701154474H1
tacctctattcaattgaagagaaaatacataccaacattaacttcatgcttcttcttaacgttagggacagtgtcaattgtaacactagcctccaagttctgcggaaaagtgagaaaattagacacttaatattaagatcttgtgggaatcaacaaaagttacacaatgtaacatatgattaataggataggatgaatttctggttcaggaggttacatctaggttaatgctt

SEQ ID NO: 12938 - DNA, 223 bp, Glycine max
  Clone ID: 701154475H1
aacgttggagtggaacaaaaatatgatagaagacaagcagatgtgaactcacttatgctgttgttgggattgttgtgctacttgcttccaatgctgttcaaatacagtggtgcctcagctgctctcactgtagacccttcactacacttgtcaagagctctagcattgtgatgttgattgcatatgttgtctacattgtctttcaactgtggacacacaggga

SEQ ID NO: 12939 - DNA, 224 bp, Glycine max
  Clone ID: 701154476H1
ggcacaagtgagtttgttgatcgagataactagaaacagtgtgatgaaaatgaaggtccttgttttcttcgttgctacaattttggtagcatggcaatgccatgcgtacgatatgttccctctctgaatgaacactggctatggtgcccgtactccggaggtgaaatgcgcaagttggaggcttgctgtggaagcacacaacatctttggctttgagaccattc

SEQ ID NO: 12940 - DNA, 240 bp, Glycine max
  unsure (1)..(240): unsure at all n locations; Clone ID: 701154477H1
gacaacataaaagggttctctctcacgttctctttcacacactaagcgtgaactaatatcgaaattcaattataccctgaccctgtgttagtttcgtgtgttgagaagcagagagaggcagagatgcaaggaagcgcantgacggtgaagccttggatttcgagcctgaggacgatgacttgatggacgaggacggcgcccccgacgccgacgcttctccgcctcaacctaagctcaaat

SEQ ID NO: 12941 - DNA, 239 bp, Glycine max
  Clone ID: 701154478H1
ggagagaaaaaatggccaaatcaatcaaattctttgagttgaacacaggggccaagattccttctcttgggttagggacttggcaagctgaacctggtgttgtagctgaagctctcaccacagccattcaggttggatacaggcatattgactgtgctagtgcgtataagaatcaagcagagattggttctgctcttaagaagctttttgatgatggtgtggtgaagcgtgaggactta

SEQ ID NO: 12942 - DNA, 232 bp, Glycine max
  Clone ID: 701154480H1
ggtttgagcgaagagaaacatttgaacatggctgccacattcttctctcacttgtcgcttcttcaatccaacaacaacccttctctctctcacacaccctctcgcctccctcattctctcaccaaccgtgtcaaaccctccctcggtgtggtatctgtggccaaaagggtaagtggagtggtgccaaaggccaatttgaatgccttggaggccaattcgggtttccccattt

SEQ ID NO: 12943 - DNA, 230 bp, Glycine max
  unsure (1)..(230): unsure at all n locations; Clone ID: 701154481H1
gaccacttaatcatatgccacagacagttgtagtgcaccctattggcaactcgatccttttgtaccatagagccctcttaatacatccaatttcaaatattaatactactactcaaaaacaaggaacaacaacaatagattattggccatgaagaagatgggtttttggattattgaccctgactttggattgntgaaatagaagactcccaatgttgaatttaacaaca

SEQ ID NO: 12944 - DNA, 229 bp, Glycine max
  unsure (1)..(229): unsure at all n locations; Clone ID: 701154482H1
tccacaactgctacacagtcagacttgcattccacagatttatagactncggtcccaagtataattgagaccatgctcaattgcaaggagtttagccagcaaggggtcgccctcattcctgtggcaatagaaaccacctagccaacatctcacttggttacatatcacaccaccaaaacccataaccatggcattcatcttatagctaccatccacgttgactttgaca

SEQ ID NO: 12945 - DNA, 206 bp, Glycine max
  unsure (1)..(206): unsure at all n locations; Clone ID: 701154483H1
gtgtacatgatgaacnctaggaagtttgcaaaacggntaaagagtgagcggaagttatattccggaaagttatatctttttcagttgtagtgtttttttgtttttatttttccctagataagcagaccgtggaaaactgcaagtgaaagctggagcttttgcttcaatcacatttgactatttcactgattagaacaggcaaagat

SEQ ID NO: 12946 - DNA, 227 bp, Glycine max
  Clone ID: 701154484H1
agttacatatattagatagagaattaatgtatataatctttgttttacaaaaattaaaattaaggtgaatgcatattaatcataagttatacactaatactggattgaggaagcatcttaccatgtgaacctcattcacttctcaaatgcaattgacaagaatatgtaatatttaatgaaatccaatatctattatataaaaaaaatataaaacagttttatactgt

SEQ ID NO: 12947 - DNA, 240 bp, Glycine max
  Clone ID: 701154486H1
atagttaataaaaatcatttcatgagactcaagaatcttctcactgagccaagggtcaaagaatcggtggtttatggtggttcaatggatgaaaatgacttatttattgaaccgacaatattgctggatccgccacttgattcagcaatcatggctgaagaaatctttggccctgtacttccaattatcaccgtggagaagattgaagagagtgttgagttcataagctcaaggcctaaa

SEQ ID NO: 12948 - DNA, 194 bp, Glycine max
  Clone ID: 701154487H1
aaaccttcgatacgcgttggtagatagagattgctgttgggattttcagagaaccgttgattgacaaatgaacggtggtgatgaggtcgtggcagctccggcgggtccaccgcagccgctggagtggaagttctcgcaggttttcggggaacgtacggcgggggaggaagttcaggaagtggatataatttctg

SEQ ID NO: 12949 - DNA, 226 bp, Glycine max
  Clone ID: 701154488H1
aggatagggtttttgaggagcagtggcaattaaaggtaccaaccaaaggtgcagtatttgcttggaggttactaagagataggttgcctactaaagcaaacttgcataggagacaaatagaggtcgcgaataggagttgtccattctgcggtaatatggaagaggaagtagggcacttgttttttcactgcagcaaaattctccctatttggtgggaatcatcatc

SEQ ID NO: 12950 - DNA, 204 bp, Glycine max
  Clone ID: 701154489H1
gggaaaagttagaagtagtgaagaaaatgaaagtcattgttttcttcgttgctataataattttaggtgcagaatggcaatgcaatgggtcagagcatgagcatgagcatggccacagctaccaaattttccctttgcgaatgaaaaccggccccggtggccactacattccggaggtatcgtgcaaaagttggaggcttggtg

SEQ ID NO: 12951 - DNA, 227 bp, Glycine max
  unsure (1)..(227): unsure at all n locations; Clone ID: 701154490H1
ttaccccatatttttgttagaattaataaaagaaccaaataaatgtgtatgatgaactttattgaaaataagttttgaaaagattgaggacactgacatttctaatttagacatatagttaaattcacataattcctctggtagcatgaagtgaactgtgaacgtttttcttacaaaaattaactggcaccagcgcagcacctnncttgacacctcaggagagataa

SEQ ID NO: 12952 - DNA, 227 bp, Glycine max
  unsure (1)..(227): unsure at all n locations; Clone ID: 701154492H1
gagaaatggaaaagtataagaaattaagaaacagctgtcactaacacaacacaatccctaaaaacatgttcaaaatttgaaattctgaattgaaacccttaacacactcattcagacattgctnnnnnnnnnnnnnnnnnnnnnnnnnnnnngctgccaattgctacacacaattgcacaatacagctctacaatgggaangagtctgagtccaatgctacggagag

SEQ ID NO: 12953 - DNA, 228 bp, Glycine max
  unsure (1)..(228): unsure at all n locations; Clone ID: 701154493H1
gacaacaaaatttgccaattgccatttcaatcctcagtttctttcttcaacgtttccatcatacacagatcccaatcctctctcaagccctaatttcccctcatttccatggccacagaaganngncactgtcgcggtggaacccgctcccgaacctgcctccgccgatcctcccccggaggagaaggaggagaccaaacctgaagccaaggctaagaaaaccaagga

SEQ ID NO: 12954 - DNA, 231 bp, Glycine max
  Clone ID: 701154495H1
ggaagaggaaaatacattacagcagcaaaggaaggttgtggtaagtaaatagtagtaacctaacccttgcgtttgcgagtgaggctgaggttgggtttggaaggcaaaggctggtgttgtcccaatccaagagagaagtaaagtaaagcaaaggaatggcgaacatagacatcgaagggatcttgaagcagcagcctgatgatgggcgcgttccgaagacgaaaatagtgt

SEQ ID NO: 12955 - DNA, 232 bp, Glycine max
  Clone ID: 701154496H1
gaaggtgttaacatcttggctgtcagttatggtgccccaggggcttgccccttatccccgacaactgaagcttcctggaaagtggtctttcaagtcacacacagttctaaaaagcagtgaacaggtaccaagagctccaatatttactgaagaggcacttggcgggctggagggagacggtgaggctgtacagccaatagaaaggtccttttgggctaaatactggatgtac

SEQ ID NO: 12956 - DNA, 251 bp, Glycine max
  Clone ID: 701154501H1
aaagctgtgcagaaattacttgatgagcatcgcaaccaagctgatccttttaatcaaattgagcaaggatggtgtgatattcctggaactgtggatgaggttaaagcaaagctacaaatgaggcaagaaggagccatcaagagggatagagcaatgggcatactctctctccacacagtcaagactgtgtgctagtccaaacccaaaagccactaaggcaatgactcctctcaagaattaacaacctaagc

SEQ ID NO: 12957 - DNA, 243 bp, Glycine max
  Clone ID: 701154503H1
gagggccattttgcaattaaaaagtcctctctacccagcgagaaccgcttgagagcagcagtgaggtagaaaggaaatggtgagagtaagcaaagaggttctgcaaaaagcagccaaaaccctatccgacatcctcgtatgccctctctctaagcaacctttgaggtattgtcaggaatcaaattccctaatcagtgacgctattggcgttgccttccctataaaaaatgggataccatgctt

SEQ ID NO: 12958 - DNA, 238 bp, Glycine max
  Clone ID: 701154504H1
ggcacaagtgagtttgttgatcgagataactagaaacagtgtgatgaaaatgaaggtccttgttttcttcgttgctacaattttggtagcatggcaatgccatgcgtacgatatgttccctctccgaatgaacactggctatggtgcccgtactccggaggtgaaatgcgcaagttggaggctgctgtggaagcacacaacatctttggctttgagaccattcctgaagagtgcgttg

SEQ ID NO: 12959 - DNA, 243 bp, Glycine max
  unsure (1)..(243): unsure at all n locations; Clone ID: 701154505H1
gggggcgggtgttacttggttgccgtctctgaggcataggaaattgcaatgcttcatccggcggcaggcagagtgacagtctgaacgggaattctgaggggcaaaggcaaagcgtttaataatggtggccaagcaaattaggagagagctttctcatatgnttccagttagggaagcgtatcaagttgcgcttaactcctgaggatgaccatgctttcctagctccacctcaccgcttcatat

SEQ ID NO: 12960 - DNA, 238 bp, Glycine max
  Clone ID: 701154506H1
gaccacattccaaaacacaaacacatacattgtagtatcacctttgtctcggaatttgttcttttgagttatggcaagcttaaaggttgcatgtgtggttttgatgtgcatggctgtgatgagtgcaccaatgatggtgcaagccgtgtcatgcaatgatgtttctgtgaacctagcaccgtgcctatcttacctgatgcagggtggagatgttccagaatcgtgctgtagcggagtg

SEQ ID NO: 12961 - DNA, 245 bp, Glycine max
  unsure (1)..(245): unsure at all n locations; Clone ID: 701154507H1
aattcgtgtgccaggaataggacacagggtaaagaataaggacaacaaagataagagagtagagctactacaaaagtttgcacgcacacatttcccttgcgtgaagtacatggaatatgctattcaagttgaagactacaccctctcaanggcaaataatttantncnaaccgtgggntggngnatggncccnctttccngggnncttttggttggcngtggnctgttccagcaaacaagngnnt

SEQ ID NO: 12962 - DNA, 249 bp, Glycine max
  Clone ID: 701154508H1
ggagacaatgcctagtgaattagctatgaacaatgatgagctacatgtggttatgttcccattccttgcatttggccacattagtccatttgttcagctctccaacaagttgttctctcatggtgttcatgtcactttcttgtcagctgcatccaacattcccagaatcagatcaactcttaatctcaatccagccatcaatgttatctcactaaagttcccaaatggtataaccaacactgctgaatt

SEQ ID NO: 12963 - DNA, 241 bp, Glycine max
  unsure (1)..(241): unsure at all n locations; Clone ID: 701154509H1
gattggattggattcgtaaagaatattaaaaagcggaagaaagcagagcagagagggaggtggaaaaagaaaaaggaagaaggaatgagtgcaacagtgactctaactctaaacctatgccgttcttccatcgtcgcttcttgtccacattatagccacaaaccaaaccctaatttcaatgcttttttagcttcccttggtcntgtctctgtctcaccacagaggcntcgttatctanaaa

SEQ ID NO: 12964 - DNA, 243 bp, Glycine max
  unsure (1)..(243): unsure at all n locations; Clone ID: 701154510H1
ggctgttgacatgtcatatcgcctaggttggattgatgattctctagtgaagagagttggagatattttaaaacaggctaagttaccttcagcccctcctgagaccgtgactgtggacatgtttaaatctgtcatggcagtggataagaaggtagcagatgggttgctaaggcttatccttctaaagggcctctaggcaattgcgttttcacaggggtttttgacnagaaaggnccntagacg

SEQ ID NO: 12965 - DNA, 240 bp, Glycine max
  unsure (1)..(240): unsure at all n locations; Clone ID: 701154511H1
accctcatttcttggaaatgtaagaagcaggatcgtgtttctaaatcttctactgaggctgaatatcgttcaatgtcttctgcttgttctgaaattgtgtggttacgtagtattttggaggagcttggattttcacagcctaactctacccctctttntgctaataatgcagtgctattcagattgctgcaaatcccagtttcacgaatgacccaagcatnttgaggtgtttgncattat

SEQ ID NO: 12966 - DNA, 249 bp, Glycine max
  Clone ID: 701154513H1
ggcaagaaaaaatgaccaagatcttctttgtattgctgctatgtctaatcatagcatcttcttctgggtttgtgaattgctctgatgttgagaaggaggaaaagattggaatatttgagctcaagaaaggtgacctttctttgagggtcaccaactggggtgcttcaattttgtccctggtgattcctgataagaatggaaagttgggtgatgttgttcttggatatgattctgttaaggattacagta

SEQ ID NO: 12967 - DNA, 259 bp, Glycine max
  Clone ID: 701154514H1
ggacatggatggaccttggacttgacacagaaacaattggttttgagatgggtgaggccattcttgctgaactgatggaagacaccattttgagccttgtgattgaaagtccagaaagtaaatgtttctctgcttcaatttgagttgaagaacaatgagagcagctccacttaaaagacaactcactgccttttgatcatgcaagatgttaaaggaattcacatgtgtgaggtggaaggaaagtagagaggtgatgaaa

SEQ ID NO: 12968 - DNA, 249 bp, Glycine max
  Clone ID: 701154515H1
aaagagacccggaaagggcgggaaccgcttttggaaatccattgggcttggatttaagactcccagggaagccattcgaaggaacctacattgacaagaagtgccccttcactggcaatgtttccatccgtggccgtatcttggctggaacatgtcacagtgctaagatgaacaggactattattgttaggaggaatatctccatttatcaagaagtaccagaggtacgagaaaaggcatccaacattc

SEQ ID NO: 12969 - DNA, 65 bp, Glycine max
  unsure (1)..(65): unsure at all n locations; Clone ID: 701154517H1
gnaagcaagcaatccnttcttcgnttcttttcgtganacaagaagaaaacaancncctangtttt

SEQ ID NO: 12970 - DNA, 244 bp, Glycine max
  Clone ID: 701154518H1
ggtggcaagaagttcataactctcttggacttgaagcgtccatttaaaccaatgaaggatttggacatggacaaggtcatctcggacatcattgaggaaatatcaaagactagttgatttcagctgttttgcaagagcctttttatggcttgacttacattgaagctagatatattttgttcacatggtagaaatcctacaatggaaacttgttcaaaatgtgttatagccatgtatgggagtt

SEQ ID NO: 12971 - DNA, 239 bp, Glycine max
  unsure (1)..(239): unsure at all n locations; Clone ID: 701154519H1
gagggtttttgtcgttgcgactaaganttgctgcttcttccgccactncagcacttcgctccctctgtgcttcaccaaccatggccgaaatcgaagctaccgttccagatccctctcaaatcgacgtcaaacttttcaaccgctggagcttcgacgacgttgaggttactgatatgtctctggctgattacattggagtgtccccgtcaaagcatgctacatatgttcctcacactgct

SEQ ID NO: 12972 - DNA, 219 bp, Glycine max
  unsure (1)..(219): unsure at all n locations; Clone ID: 701154520H1
ggatccacataaacatcaacatcgaaaggttgttaattttcaactcaatggttcttccctcaggttttgtttccatgttgatactttttggcatggttttggtagttggggtgaatattgtcccaggggttgaggcaattgcaagggctttctttgtatttggagnctcactggttgacagtggtaacaacaattacttagcgaccactgcacgggctg

SEQ ID NO: 12973 - DNA, 242 bp, Glycine max
  Clone ID: 701154521H1
tacccatttgatctataggttgttggacaaaagctaccgtctacattaactttaatcaccgaaattggaggagggcaccattgtgagtgacttgcgtcctgcggttcaaaagcttatggttttcaacaaccatcacattaaccatatgacaaatattggttggtgtccatttattatcctcaaatatatggttatttcgaaacctccatatccaccaaagcacgatccatcaacctagtggg

SEQ ID NO: 12974 - DNA, 235 bp, Glycine max
  unsure (1)..(235): unsure at all n locations; Clone ID: 701154522H1
gggactcggatgaatcatgtttggttaggacaaaattgccctccatcactttccttgttagagttggtttctgcaacctaccatgcaattcctcacctnaatccgttttctattgccacgttggatcgaaaagtctagtttaaccacacgtttgtggttgtagtggaagcgtaacgaagatgaatggcatgggaaactcaaatcgtcgagttctgaattggaccttcacattgaa

SEQ ID NO: 12975 - DNA, 237 bp, Glycine max
  Clone ID: 701154523H1
ggaggcaagaagttgtattttggcatccccgtggcttcaagaagagaatctcaatggaggcccaggagctgaagcgcgtgttccagatgttcgaccgcaacggcgacgggagaataacgaagaaggagctgaacgactcgctggagaacctgggcatcttcatctctgacaaggacctgagccaaatgatccagaggatcgacgtcaacggcgacggttgcgtggacatggacgagt

SEQ ID NO: 12976 - DNA, 237 bp, Glycine max
  Clone ID: 701154524H1
gaaagcagataaagaaatggcttcttctaaatcaaaggtcagaagggcatgttccttcaccaacctcctccttagctgtttgaatttctcaatcttcatactttctgcttcctcatttgcaccaactattctcctaaagatgcccccaacatcatttggcatggctctcctaatggtctctggcatctcactccgctcatcttttgtgggcttctattcccaactcacacacttctg

SEQ ID NO: 12977 - DNA, 238 bp, Glycine max
  unsure (1)..(238): unsure at all n locations; Clone ID: 701154525H1
gacttcaaaatcctctagtaacccttcttttctctctctctctcgtgttctgagctgctagaagcaatggagaggaaaagaagccatgcttctttcaccatgtttgcaatgcttgttggattgctctctcagagccttgtcattcctgtaatatccaccactgttgcagatcagaagaactactacaccccagatccacatgctggaagtccccccanaggttncnnnatacnctgtg

SEQ ID NO: 12978 - DNA, 140 bp, Glycine max
  unsure (1)..(140): unsure at all n locations; Clone ID: 701154526H1
acactcantctttgactcttctancgtctcaaatcncttngttcctttcgattcgttccanttcttccaaaatggccanagacccagttcgcgttctcgtcactggagctgcagggcaaattgggtatgctcttgnnccc

SEQ ID NO: 12979 - DNA, 228 bp, Glycine max
  Clone ID: 701154527H1
ggatcctttgtattctattcttcaagattcaggtactgcgtttcggaagcagacacagatggctcgtacgaagcaaaccgctcgcaagtccacaggaggaaaggctcctaggaagcagcttgcaaccaaggctgcacgtaagtctgcaccaactactggtggtgtgaagaagccccaccgttatcgtcctggtaccgttgctcttcgtgagattaggaaataccagaa

SEQ ID NO: 12980 - DNA, 244 bp, Glycine max
  Clone ID: 701154528H1
ggcacaagtttgttgagatagctagaagcaataagatgaaaatgaaagtgcttgttttgtttgttgctacagttttggtagcatatgaatgccatggctcagactaccagaagttccctctccaaatgaaaactgggtttggtgggcaatacagcaatgaggtggcatgtgccagttggaggcttggcgtggaagcaaacaacgtagtcaagtggcaaactgttccggcagcttgcggagagta

SEQ ID NO: 12981 - DNA, 249 bp, Glycine max
  unsure (1)..(249): unsure at all n locations; Clone ID: 701154529H1
gattcatattttccttgcgtttccctttcattttccctcactttctcgctcgccaaacgcccctctctctcctccaatggccgaccagctcaccgacgaccagatcgccgagttcaaggaggccttcagcctcttcgacaaggacggcgatggttgncttactactaaggaacttgggactgtgatgcggtcactagggcaaaacccaactgaggcagaactgcaggatatgattaatgaggttgatgc

SEQ ID NO: 12982 - DNA, 251 bp, Glycine max
  Clone ID: 701154530H1
gataccaaaaacaaaacacaagccaagtgaaagtgagaaaaaataaaaatcaaagagcataatgtcagggatcattcacaagattggggagacccttcatgtgggagggcacaagaaggaggaggagcataagggtgagcaccatgctggagaatacaaaggggagcaccatggtgaacacagtagtgagtacaaaggagagcatcatggtgaacacaaagctggagagtaccatggtgagcacaagccag

SEQ ID NO: 12983 - DNA, 250 bp, Glycine max
  Clone ID: 701154531H1
tctgaacatacagggaattggaggtagcattttattgatgttaagtcatggactggtttcttcagccctttttctatgtgttggtgttctatatgaccgacataagactcgacttgttagatattacggagggttagtgagcaccatgccgaatttctctaccattttcttctttttcactttggccaatatgagtttacctggtactagcagctttatcggggaatttcttatcttagtaggagctttc

SEQ ID NO: 12984 - DNA, 250 bp, Glycine max
  unsure (1)..(250): unsure at all n locations; Clone ID: 701154532H1
gaatatactatcctcttgaactagggttcaacatcaaagaacaaagttccaacgaggagacgacctaaaaacacacaaaaaatggcaaggaacgtgnctttaaatatgataggatactccaccattgcagaggttttcataattggtgtaataaagcaacagaatatatggttggtgacaacttcggatggaacgttcccnccatgagagcttctaaaatgganngggctagaaccaggggntccatgtg

SEQ ID NO: 12985 - DNA, 239 bp, Glycine max
  unsure (1)..(239): unsure at all n locations; Clone ID: 701154535H1
ggggaaccctaattctgcgaggtgagtgaaaatngcggtacccttgctnctccaagaagatcgtgaagaagcgcgtcaagaagtttatacgcccccanagtgatcgcaagatctccgtcaagccaagctggcgcaganccaagggtattnantctcgtgtcaggaganagttcaaaggatgcactttgatgcccaacattggttatggntcagacnagaaaacccgccattatctanca

SEQ ID NO: 12986 - DNA, 237 bp, Glycine max
  Clone ID: 701154536H1
gagaccctgtactcatgggaccccaagtcaacatatattcatgaacctccatacttcaagggcatgaccatggatcctcctggagctcatggtgtgaaagatgcctattgtctgctgaattttggtgacagtataacgaccgatcacatttctcctgctggtaacattaacaaggatagtcctgctgcaaaataccttctggagcgaggtgtggaacaaaaggacttcaactcttat

SEQ ID NO: 12987 - DNA, 239 bp, Glycine max
  unsure (1)..(239): unsure at all n locations; Clone ID: 701154537H1
gttcgggtgtgagagcgagaatcagaagatgaagaaggaagacacagtgaagctgatcagtgccgaaggttttgaatttgtggtcgacaaagaagctgcaatggtttcacagaccatacataacatgcttacttctccagggagtttcgctgagaggcagcacggcgaagttacctttcctgagatcagcaccaccattctcgagaagatttgccanacttttattggcatctccaatt

SEQ ID NO: 12988 - DNA, 249 bp, Glycine max
  Clone ID: 701154538H1
atcagcggtgccccccaggataacaacataatgctgtggaatgctgtcatatttggtcctgatgatgctccatgggatggaggcacgttcaagttgactctccagtttactgaggattatccaaataaaccaccaactgtgcgatttgtgtctcgcatgtttcatccaaatatttatgctgatggaagtatttgtttggatatactacaaaatcagtggagtcctatatatgatgtggctgctatactc

SEQ ID NO: 12989 - DNA, 50 bp, Glycine max
  unsure (1)..(50): unsure at all n locations; Clone ID: 701154539H1
ataaatgncnnttatgatattnatattatntcagataattcggccattng

SEQ ID NO: 12990 - DNA, 245 bp, Glycine max
  unsure (1)..(245): unsure at all n locations; Clone ID: 701154540H1
ccatcatatatatgataatcattttaaaagtaattcaagaataacctgtgattgaacgatagcgtaaaattattttacccaacaactgcataaacattcaattcaaatatttattacacattgttacacacataaggaacatgtaaganatatttattttactttgaagtgtgacaagacaatgcatgcntgcaagactctagatagagtttttgtctgtgatatattnactcnctctcccttcg

SEQ ID NO: 12991 - DNA, 237 bp, Glycine max
  unsure (1)..(237): unsure at all n locations; Clone ID: 701154541H1
gagaccctgtactcatgggaccccaagtcaacatatattcatgaacctccatacttcaagggcatgancatggatcctcctggagctcatggtntgaaanatgcctattgtctgctgaattttggtgacagtnnaacgaccgatcacatttctcctgctggtaacattaacaaggatagtcctgctgcanaataccttctggagcgaggtgtggaacnaaaangacttcaatctatg

SEQ ID NO: 12992 - DNA, 238 bp, Glycine max
  Clone ID: 701154542H1
gatatccaaaggaacaaaaatattattaagatgatcaacattattggagcacttgttctactctttgcatttctcttcctcagttgtgtgtatgcacaagacacaacaacccttgtgcctgcaatcataacttttggtgattctgctgtggatgtagggaacaatgactatcttcccacccttttcaaggctgattaccctccttatgggagggactttgttaaccaccaactactgg

SEQ ID NO: 12993 - DNA, 241 bp, Glycine max
  unsure (1)..(241): unsure at all n locations; Clone ID: 701154543H1
ggaaagggtgtggacgaaataatctgtatcagcgtgaatgatccctttgtgatgaactcatgggccaaaacgttcccagagaacaagcatgttaagttccttgctgatggtgcagccaaatacaccaatgccctcggtcttgagcttgacctcaccgacaagggtctcggcgtccgctcaaagaggtttgctttgctggtggaagacctcaaggtgaangttgcaaatgttgaaatggagg

SEQ ID NO: 12994 - DNA, 253 bp, Glycine max
  Clone ID: 701154544H1
aaagagacccggaaagggtgggaaccgcttttggaaatccattgggcttggatttaagactcccagggaagccatcgaaggaacctacattgacaagaagtgccccttcactggcaatgtttccatccgtggccgtatcttggctggaacatgtcacagtgctaagatgagcaggactattattgttaggaggaattatctccattttatcaagaagtaccagaggtacgagaaaaggcatccaacattcttg

SEQ ID NO: 12995 - DNA, 236 bp, Glycine max
  unsure (1)..(236): unsure at all n locations; Clone ID: 701154546H1
aagacgacagaagggggactccaaactgaacaataggagccagagattggaaaaggatgcacactgatagatatatcagagttacccattagagaccaaccaaacatcattcattttcatttcccttctcttttagctgccattaacgtattaaggaatcaggaatcattctagtatccatttctggactctaatacaagcaagaggaagaatntgacgagaaagaagatcccaat

SEQ ID NO: 12996 - DNA, 266 bp, Glycine max
  unsure (1)..(266): unsure at all n locations; Clone ID: 701154547H1
ggcactaatatgaccattcctaaggaagaggaagttaaaatatcagntcaaacaaagcaatcaagagcaccaaagggncttgtcaagaacaagaatgcnaaggctccaagttccagtggtgttcatgcaagtttggtgaataagagcaaaattggagaagntaaagaagcatcttcatctgtttcaaatggtacttcagctttagactctcgcccaagacagtctactaaaagcngcagatctttcaatgaccggcagacacaatt

SEQ ID NO: 12997 - DNA, 128 bp, Glycine max
  unsure (1)..(128): unsure at all n locations; Clone ID: 701154548H1
gaacggaaaagatattgtaaaaagagcatctgcaaaagataaggagacactcactgccattcctactcttacaaaccttcttcagaacttcaactcttcgatctcctccactttgcgcatcgtactng

SEQ ID NO: 12998 - DNA, 47 bp, Glycine max
  unsure (1)..(47): unsure at all n locations; Clone ID: 701154549H1
caccgtgtcaggcccactgaggatttgaacntttaantttttgntct

SEQ ID NO: 12999 - DNA, 251 bp, Glycine max
  unsure (1)..(251): unsure at all n locations; Clone ID: 701154550H1
ggacacacttcatgttcctctacccaacaggagttcccatcagttcttctgttcaggttgtggagaaaaacaaggttgatgctgcncggtttgcccccttttggaatgaggtcataaggaatctaagggaggaggattacgtaaccaacttcgaaatggagttgcttttaatgcctaagaattctggggatcttcctttggttcaatggccactttttctacttgcaagcaagatatntttggctagggat

SEQ ID NO: 13000 - DNA, 236 bp, Glycine max
  unsure (1)..(236): unsure at all n locations; Clone ID: 701154551H1
cattcatatatagagagatgttaatgttaatgtccgtcaaatatttttttaaagtaaacnnnnnnnnnnnnnnnnnnnnnnnnnnnnnnnnnattctaaaacacccacacacatacaaatcnnaaattatatataaatggtaaagattaganaattaaaagttacattgttcacacattcacttttcatctcctttatatcatattttttaatctatttcttcttttcttattaca

SEQ ID NO: 13001 - DNA, 236 bp, Glycine max
  unsure (1)..(236): unsure at all n locations; Clone ID: 701154552H1
tccttcttcgttccttcancgttccttcttcattcttcaaccaataagtgttcgaatgtgagactttcaattcatttcatgttttgtttgctttcatcttcatcttgttcactttcaatttttttcctctanttttaatgtgttttaactgtttatttaagccgtcatctcacctaataaatgataaaatgaatttcaaccgatcatttatattgtaatcncgtttaatcactgtt

SEQ ID NO: 13002 - DNA, 241 bp, Glycine max
  Clone ID: 701154556H1
ggatcgaaaggcgaggcggaccttcgggcgttgctcgctctcgacaccagcactctctctgtgagaaggaacacaaggaatcaacaaccatggattcacagggccagacaacttcattgcagagacttcagaatgtagaaaagagaattgtgaaggttttggagcttgcaggaggagtcatggatgagcttgcaagccctgttggtcctaggaaggatgtggtccaaaaccactgccttga

SEQ ID NO: 13003 - DNA, 224 bp, Glycine max
  unsure (1)..(224): unsure at all n locations; Clone ID: 701154559H1
gaacnaagggtagctatgaanngaccattagggtcttgacnacaaggagcaggacccaacttgttgcaactttcaaccgctacagagagatccatggcacttccatctctaagaaattggtggatgaaggatctgatgagtttcagagggcattgtacactgccattcgtgccatcaatgatcctattaagtactatgaaaaggtggtgcgcaatgcaatcaaa

SEQ ID NO: 13004 - DNA, 230 bp, Glycine max
  unsure (1)..(230): unsure at all n locations; Clone ID: 701154560H1
gaccgccgttctcatctctcttcccagccctcacctcaacgctgcatcttcacgtcgtctcacgaggtgcatatagtagagagggaaaatgagtcgaggaggcgcagtagcagcagcgaagggaaagaagaagggtgctacattcaccattgactgtgcaaagccagtggaagataagatctggacattgcttctctcgaaagtttttccaganaggntcaggttggtgc

SEQ ID NO: 13005 - DNA, 246 bp, Glycine max
  Clone ID: 701154561H1
ggagactcaactcaacaatggcttcttctattcagtgttcagtttgggttccttcccttcccaacactaacaccattcgctttctttctgttaacccaaactctgttactttctcttcttcttcccttaccagaatcagagcctcctcttcctccccaaccgtcgaagaagccgctatgaacatcgacaacctccgacgtttcatcaaccttaactccggaaagtggaaggctcctttctatgtga

SEQ ID NO: 13006 - DNA, 249 bp, Glycine max
  unsure (1)..(249): unsure at all n locations; Clone ID: 701154562H1
ggtggcagaagtcctaggagtgtaaaacagagacgcaaaatgaagacgatcttgtncgtctgagaccatgaatattcccgacggcgtgagcatcaaggttcacgctaaggttatcgaggttgagggccctcgtggaaaactcgtgcgagacttccaccatctgaacttggacttccaacttattaccgacgatggcggtaaaaggaagctcaagattgattcttggtttggttctcgtaaaacctccgc

SEQ ID NO: 13007 - DNA, 256 bp, Glycine max
  unsure (1)..(256): unsure at all n locations; Clone ID: 701154563H1
gaccgaagaaggcttcaggaatctacatagctttttcctcagagcgttgaaaattcccacactcgctcgcttccccaaaatttcacccctttcattcaattcttccctcttctctgctactgatccatccctngttttctccgaacaatggctgctggtgtcactgtcaagtccgaggttctagaatcttctcctcctgaaggagtttgttccaacacggtggaaaaccacctggtccagaccaatttgtctgatg

SEQ ID NO: 13008 - DNA, 243 bp, Glycine max
  unsure (1)..(243): unsure at all n locations; Clone ID: 701154565H1
gatacaatctcaaagcaaattccctctagctctaaaaaacacactagcttccaaagtcttctaatctcttgcaagttgnaactcatcaancatggcctcatgcnaatccttcatcacagcnttctncttcgtgcaaccntctnatcaagcatgagtttgagtnagcatgcatctcgntcacctcttgcaaanaaccataanaggcatttgctcggnatcagtnccacntnggcntnancctng

SEQ ID NO: 13009 - DNA, 243 bp, Glycine max
  unsure (1)..(243): unsure at all n locations; Clone ID: 701154567H1
ggttctggttnggcgttctttgtctcgcaatcttcactattttcaccgagcatttgcattccacattgaatatggctggggctacacaatctaatgctgagttattggagtggcctaagaaagataagcgccgcttcctgcatgttgtgtgtcgtgttggtgatctgatcgcaccattaagttttatactgaatgttttgggatgaagctttgaggaaaagagatattccagaagagaaatct

SEQ ID NO: 13010 - DNA, 248 bp, Glycine max
  Clone ID: 701154568H1
gattcatcgctaaagagtacaagaaaataaagtttatcaataacaacatggacatgaagttgaatattccagcaattaatgttttattcttattgctagctatttctagtacaactcaatcggttgacattaatataaaaaaatttggcggaggtgcagatataacacaggctttgacaaaagcttgggaagaggcatgcgcacaacaagtgcaagcaaaattgtgattcctggtgggtcatacaaga

SEQ ID NO: 13011 - DNA, 231 bp, Glycine max
  unsure (1)..(231): unsure at all n locations; Clone ID: 701154569H1
ggaaccatttaagtcagaaagagtttggggtgtgcttgagcttgatgtaggagcttctctctcgcgattgttctgaccctttgctggtttcccagcttgggtacatgcagttgcagattggggacttggagggtgcgaaagtttcgttcttgaaggtggaggagttggggaagagtaatgggtcttgagcgaggttnatttaggancctggtgatagggaacaaggcttgg

SEQ ID NO: 13012 - DNA, 237 bp, Glycine max
  unsure (1)..(237): unsure at all n locations; Clone ID: 701154570H1
ggaagacaattggaggaggaaagcgcgatcctcgtgacttcgcgacccctncgggtttaaatcccctgcgacgcagcacaagctactacttcaccgtcaccggagaaaatggccgacgacggagcaacctcggcggcgacgagccggagaaagccgtcgtggagagaaagagagaacaacagaagaagagatagacgaagaagagnattagcagcgaaaatatactcaggattcggg

SEQ ID NO: 13013 - DNA, 240 bp, Glycine max
  unsure (1)..(240): unsure at all n locations; Clone ID: 701154571H1
atagaagagatgaacaaactaaaagttctgatagtcacaagttacagtttccatccttctgaaatgagcaactttgagctatttggctcttttccaacctgaaaagaatacgactagagtggatttttgttcctcctttgttgcaatgaagaatcttaaaaagttatccctctacacgngtaatatgaagcaggcatttgaaaacaatcacatgctaattccaaacgcttttccgaatct

SEQ ID NO: 13014 - DNA, 235 bp, Glycine max
  unsure (1)..(235): unsure at all n locations; Clone ID: 701154572H1
gggtcgcaactgcactttcacttttgctttgagatggcaaagtcgaagaatcacacagcacacaatcagtcctacaaggcccacaaaaacggcatcaagaaacccaagaggcatcgccacacttccaccaaagggatggatcccaagtttctgaggaatcagaggtacgcgaggnagcacaacaagaagagtggtgaaacagccaccgaggaagagtgaaatggcatttctaacg

SEQ ID NO: 13015 - DNA, 94 bp, Glycine max
  unsure (1)..(94): unsure at all n locations; Clone ID: 701154573H1
ggtttaagngaattaagcactcggttacagancaaacntctttcactctttcgcttctgaatcttcaacaatggtgcttcgaggcgacgatgat

SEQ ID NO: 13016 - DNA, 164 bp, Glycine max
  unsure (1)..(164): unsure at all n locations; Clone ID: 701154574H1
ataacatacctgcaattcaaaattgaacatggattgcctgctccgcatatctaatagcatctccaaggccaaacctataaactataattatagaaaaccncacnccaaggnngaaaagcttaaaaaggcgttatgtttgccccaatctttncncagnttcnttt

SEQ ID NO: 13017 - DNA, 246 bp, Glycine max
  Clone ID: 701154575H1
ggagagaagttattagggtttttgagtgcggcggtccaaacactcttctctgcagcttttgcctacaactcccttcaccatggctgaacaaaccgagaaagcttttctgaagcaaccaaaagtgtttctcagcacaaagaagactgggaagggaaagagacctggaaaaggtgggaaccgcttttggaagtccattgggcttggatttaagactcccagggaagccatcgaaggaacctatattga

SEQ ID NO: 13018 - DNA, 240 bp, Glycine max
  unsure (1)..(240): unsure at all n locations; Clone ID: 701154576H1
gacatttaagccgattcatcaaccttttcaacttgagatgccccttttctccactcactttgtttcacattgctgctaaagcaaaattcttttttttttggttcacctcagcatacatacaatatcatatgatgaagaagaacaacctcagttgctgtgtgttgttgcacttcctttgctgttgtctccttttgccagctctngttctctcccaccacatccatggaaaccctgcaagta

SEQ ID NO: 13019 - DNA, 54 bp, Glycine max
  unsure (1)..(54): unsure at all n locations; Clone ID: 701154577H1
cgtataaacgttacgggtttcnacattcacaacccgaatggactctttccgggg

SEQ ID NO: 13020 - DNA, 197 bp, Glycine max
  unsure (1)..(197): unsure at all n locations; Clone ID: 701154578H1
ttgttgtttgtgtgtttgttttttctctcacctgaaaatgtcttgctgcggtggtaactgtggttgcggaagcgcctgcaagtgcggcaacggctgcggaggctgcaagatgtacccagacttgagctacaccgagtcaaccaccaccgagaccttggtcatgggagtggcacnnctcaaggctcaattcgagagtg

SEQ ID NO: 13021 - DNA, 245 bp, Glycine max
  unsure (1)..(245): unsure at all n locations; Clone ID: 701154579H1
ggttcttcttaataattgctctcttttcattcatagtaaatccttttttaaggttctggtttgtctcaactcaagttttcattttattttatttttcagtttgtaactatgactgctgaggttatggctcaagaggagacacaagcannnnnnnnnnnnnnnnnnnnnnnnnnnnagccccagaaagagaaggatgctgaagaaaatgtggaaccaagagagccatcatcagtggatgaaaccaa

SEQ ID NO: 13022 - DNA, 237 bp, Glycine max
  unsure (1)..(237): unsure at all n locations; Clone ID: 701154581H1
gaagcccgaagattgggatgatgaggaagagggtgagtggacaccccctaccattgccaaccctgattacaagggcccatggaaggcaaagaaaatcaagaaccccaactataaaggaaaatggaaggcaccattgattgataacccagnnttcaaggatgaccccgacctatatgttttccccaacttgaagtacgtgggcattgaattgtggcaggtgaaatctggtactttgtt

SEQ ID NO: 13023 - DNA, 234 bp, Glycine max
  unsure (1)..(234): unsure at all n locations; Clone ID: 701154582H1
aagccaaatggaagattcttcagctataatccagcaacaaagaagacaaccctgcttgcncaagacctctactttgccaatggggttgcagtttcagcagatcnacaatttgtggtcttctgtgaatctgtcttgatgagatgcaataaatatttcgncctgggccctaaaanaggaaccntagagaagttctgtgacctgcctggcatgcctgntaacatcattangatggnc

SEQ ID NO: 13024 - DNA, 242 bp, Glycine max
  unsure (1)..(242): unsure at all n locations; Clone ID: 701154583H1
ggagagaaataggttagggaccaaagcaaagcnaagagagaaaaatagaagaaagagagatcaaatattcattttcataatggtgagagacatgatgggcnnnnnnnnnnnnnnnnnnnnnggagggtgtggtgggggaggagacatgaatatgaatatgaatgagaagcctgcatggctagagaggttgatggctgagacattctttggtgcttgtggggtccaccaggatcgcatgaaga

SEQ ID NO: 13025 - DNA, 215 bp, Glycine max
  unsure (1)..(215): unsure at all n locations; Clone ID: 701154585H1
gnnttaccgttcagaacncaagacagttccaaagatgannacagagtttggaatcctttccgttcgaagttggccgctgccatccntggtggtgttgacaacatatggantaaacctggtgccagagncctttacctangagctgcttccggcaccactgnttctcacgtntcagatgttgttggcccaactggagntgtctatgcagtagagnt

SEQ ID NO: 13026 - DNA, 233 bp, Glycine max
  unsure (1)..(233): unsure at all n locations; Clone ID: 701154586H1
gatcgaagcaaaaaatgaaaacccaaagtgcttctctcctctgtctttttctctctcttgctatccttttggctagtngcactgctgcaagtgcaactccaagaagcgcagtgccaagccaccatgtntcaacattcaacagaagcctttttccttccacttttcctctttgganttggttcctctgcttaccaggcagaaggagcagcaagtgtagatgggagaggaccaac

SEQ ID NO: 13027 - DNA, 241 bp, Glycine max
  unsure (1)..(241): unsure at all n locations; Clone ID: 701154587H1
agtttgttgatcgagataactagaaacagtgtgatgaaaatgaaggtccttgttttcttcgttgctacaattttngtagcatggcaatgccatgcgtacgatatgttccctctccgaatgaacactggctatggtgcccgtactccggaggtgaaatgcgcaagttggaggcttgctgtggaagcacacaacatctttggctttgagaccattcctgaagagtgcgttgaagcaacaaagg

SEQ ID NO: 13028 - DNA, 236 bp, Glycine max
  unsure (1)..(236): unsure at all n locations; Clone ID: 701154589H1
gactgcaaatcacttttctactttgagtcttcttgatccttctttttctccttgaactcaaacatggcagatgaggtggttctgttagatttctggccaagtccatttgggatgagggtcaggattgcacttgctgaaaagggtatcaaatatgagtacaaagaagaggncttgaggaacaagagtcttttcncccnnaaaatnanccggttcaaagnctnccgtttcnnatccna

SEQ ID NO: 13029 - DNA, 235 bp, Glycine max
  Clone ID: 701154590H1
aactgttgttgagggaactatacagaagctatttgaagggcatcatatgaattatatcgaatgcatcaatgtggactataaatcaactagaaaggagtcattttatgaccttcagcttgatgtgaagggctgtcctgatgtttatgcttccatgacaagtatgttgaagttgaacatcttgaaggggataacaaatatcatgcggaacatatggtttgcaggatgctaagaaggg

SEQ ID NO: 13030 - DNA, 207 bp, Glycine max
  Clone ID: 701154591H1
tggcgtcggggtggggaatcacaggaaacaaaggtcgctgctacgatttctggatggatttcagcgagtgcatgtctcgctgccgagagcccaaggactgtgctcttctccgcgaagactacctcgagtgcctccaccattccaaggagtttcaacgacgaaaccgaatttacaaggaggagcagcgcaaactaagggctgcttcca

SEQ ID NO: 13031 - DNA, 221 bp, Glycine max
  unsure (1)..(221): unsure at all n locations; Clone ID: 701154592H1
ggaacggaaaagcacactgcgcagtaaccctgaggcanctcttctcttctcttctctgtcgtgagtcaccatggtgagggttagtgtgctgaacgatgctctgaagagcatgtacaatgctgagaaaaggggaaagcgccaagtcatgattaggccatcctccaaagtcattatcaaattccttttggtgatgcaaaagcacggatacatcggagatttgt

SEQ ID NO: 13032 - DNA, 268 bp, Glycine max
  unsure (1)..(268): unsure at all n locations; Clone ID: 701154593H1
gatccattgaactgaaccttaaattaattatagaaccatgtttgcaactacnaattcctccgctttgtcacctttattctctttcagtagaacaacagcaacctctctgccttccaaacccacattctggnatttggttccaatgaaacaatcttcttctccggggcacttggccttagccttagacaatccacgtagaacacttcacgtgtcttgtggctccacatcaccacatgcttcccagagatcatcaattcaggggggtgaa

SEQ ID NO: 13033 - DNA, 247 bp, Glycine max
  unsure (1)..(247): unsure at all n locations; Clone ID: 701154594H1
ggagtgagggcattgttgtttaggtacagaaaaatggcatcatctcagtcgaagaagagagttgacgctgtcgattctcgcgctgcttccgttctccttcgcgccaaagatggaagtgcttttgctcgatgcgacgactgcaagaagaatgtnccggttgcactcatcgacatgcacagttgcagccttgaagctaaaattaaaatgaacctagatgctcaagttgtggaacaggctgctgaagcta

SEQ ID NO: 13034 - DNA, 246 bp, Glycine max
  unsure (1)..(246): unsure at all n locations; Clone ID: 701154595H1
gggtggagtgtgcagaagagcgtcgcagtcgcaaccctaatcagaagaagcgcagttcaagcgagtgacagccaccagccatgggtcgtatgcacagccgcggtaagggtatatcctcttctgctttgccctacaaaaggacacctccnagctggctcaagatctcttcgcaagatgtcgaagaaaatatctgcaagtttgcgaagaaaggtttgaccccgtctcagattggtgtcattctcagag

SEQ ID NO: 13035 - DNA, 247 bp, Glycine max
  unsure (1)..(247): unsure at all n locations; Clone ID: 701154596H1
gactgcaaatcacttttctactttgagtcttcttgatccttctttttctccttgaactcaaacatggcagatgaggtggttctgctaganagntggccaagtccatttgggatgagggtcaggattgcacttgctgaaaagggtatcaaatatgagtacaaagaagaggacttgaggaacaagagtcctcttctctccaaatggaacccggntcacaagaagattccggttctcatccacaatggna

SEQ ID NO: 13036 - DNA, 248 bp, Glycine max
  unsure (1)..(248): unsure at all n locations; Clone ID: 701154601H1
ggaacaagaaagaaaagaaaagaagaggaaaaggagagtggagaggaagaaaaggattgaagttgttgctgtgagaaagagaaagagtgaaatcggagtttgggaaggaattgcaatcaatggatgtgataaagacgcagcaaatctcatctcgaccaatcgagaaggtggtggttcaccctctcgtgcttctcagcatcgtcgacaactacaacagntcgccaagaccctcgnaagcngtctcggnt

SEQ ID NO: 13037 - DNA, 247 bp, Glycine max
  unsure (1)..(247): unsure at all n locations; Clone ID: 701154602H1
gatccaaaccaaaacaaaatccctttaaaaccctagtctcgcaatttcgaaatttatcactcactcagtcactctcatcatccactcatcttattctcaggccagaaaagagaagaagaaatggtgttaggcgtgagagagataagctgtagcggagagcctgtccttgacagtgataacggggaggagttgatgcaggtgcaacngggcatagacatagtcctcggcgatcttcctcgccagtccc

SEQ ID NO: 13038 - DNA, 240 bp, Glycine max
  Clone ID: 701154604H1
ggtgtttggaggtggaaacttagggtatgatttctgattccccttccttctcgctcgttctctgctttaatccatcaactatccttctaactcatatttcttcactgattcaagatacgatcaagtttccttatcatttgctcctaattacgtttaccctatacacacttttccagttattcaccaaaaccaacaaataacaaatttcaggttgttggagaaattgttctgttgggggga

SEQ ID NO: 13039 - DNA, 225 bp, Glycine max
  unsure (1)..(225): unsure at all n locations; Clone ID: 701154606H1
ggataacagaaaagagaaatggacacagaaacaaaagtggcantnttaggtggcatcaccgaagtgcagggagctgccaacagcgtcgagatcaacaatctcgctcgctttgctgtagaggaacaaaacaaaagagagaattcagttctggagtttgtgagggtgattagtgcaaagcagcaagtggttgctggagtgaattactacataacattggaagcaaaa

SEQ ID NO: 13040 - DNA, 241 bp, Glycine max
  unsure (1)..(241): unsure at all n locations; Clone ID: 701154607H1
ggcattatatttgagttcaaacaaatcaaagccatggccacctccaacttctctattgttctctccgtctccctagccttctttttggtgctacttaccaaggcacactcgaccgataccgtttctttcaccttcaacaagttcaacccagtccaaccaaacattatgctccaaaaagatgctagtatttcatcctctggggtgttacaactcaccaaagttggcagcaacggnnncccca

SEQ ID NO: 13041 - DNA, 234 bp, Glycine max
  Clone ID: 701154608H1
gggagaagaaggagaaggtgaagaagggaaggaagagtattagcatgacggagaggtttaattgcagagctaaagatttgtttgagattttgatggatgagaataggtggaagggttttacacagagcaatgcgaggattagtaaggaggttgggggtgaatttagcattttcgatgggtcggttactggaactaatttggagttgcaggagggtaagttgattgttcagagat

SEQ ID NO: 13042 - DNA, 237 bp, Glycine max
  Clone ID: 701154609H1
cgtgtcccttgtgtcgctaccctatgccctctgtccacgactagttcatcttttattatgtttataaatcttatcattatcttatgttgaatattgtgtggttgatgactgtgttagaattcgatatctttcgaagacatgtgataacattgttctaactttgtttaatttctttagtttatctctcttttagaacaagaatcacaatgaattaatgcctgcttaattggatcaatt

SEQ ID NO: 13043 - DNA, 243 bp, Glycine max
  unsure (1)..(243): unsure at all n locations; Clone ID: 701154610H1
ggtcggatagaatgattcttaactttgtttaaggccttgtttgtttacttatttcaanaatagcttttgtttttttaaatttgtttgtcccagcccctaatcacattgggaagtgtttgtcccatggacatatttcactnttttttaaaagtttgattttatagtacatggatagagagtacttgaagaaaacaaaaaagatggggaaacatttcctagtttttgcctttgattctgaaactc

SEQ ID NO: 13044 - DNA, 239 bp, Glycine max
  unsure (1)..(239): unsure at all n locations; Clone ID: 701154611H1
atttcagatataggtgcttttccctacttcatgctaaaattatgttgtaacttgtaagtaacttgaaacagataatttacgcgaatgttttcaggtcatcantacatggcacacctgcttgactgaaaaagttataatcatttcattgaatatatactaaggtttgtaattttgaataataaagatcaattactatattaagattgatagaagtattcaaatcatacaagatattgttt

SEQ ID NO: 13045 - DNA, 243 bp, Glycine max
  Clone ID: 701154612H1
ggagcaagggaaagcaaaaggagaaggtgaataacatggtgctgtttgatcagggcacctatgataagctcctttctgaagctcccaaattcaagctcatcactccttccattctttctgatcgtttgaggattaatggatcacttgcaaggaaggctataagagaattgatggctaggggttcaatcaggatggtgtctgcccatgcaagccagcaaatttacaccagggcaacaaacacct

SEQ ID NO: 13046 - DNA, 256 bp, Glycine max
  Clone ID: 701154613H1
acaggtgatcatgcccccttagatgatgtttttgatgtctgctgcaaagctcctgtagcctaatgtactttataaaatttaaatggcataaccttagggatgttcaatttaagaatatttgtgttagtagattagatttctgtgaatcatattagtgacaacatctatcatgaagtccaatctacaaatatgtagtctatagtatatagagtgcacttgtgaattcaatttcacaaatctatagtaacaatacttc

SEQ ID NO: 13047 - DNA, 255 bp, Glycine max
  Clone ID: 701154614H1
gagagaaagaggcagatagaaaaaagagctgagttttgagttcaaaagatgactaacttcccagtgatcaacttggagaagctcaatggtgaggagagaaacgacaccatggagaaaataaaggatgcttgtgaaaactggggattctttgagctggtgaatcatggcataccccatgacttattggacactgtggagaggttgaccaaagagcactacaggaaatgcatggaagagaggttcaaggatttatgg

SEQ ID NO: 13048 - DNA, 254 bp, Glycine max
  unsure (1)..(254): unsure at all n locations; Clone ID: 701154615H1
gacccaaaaagaaaaagaaaaaaattctcaccataacaccatcccctaacatatatcaattatgtatacttcattcaagcccaattctcacaatcacaaacnccagaaagaccacaatgtaacaacaaccacaacaaccaacaccaaatacagcgagatatcacacttcagccacaaacaacacaagctagcgtttgactactctgaatcccccttcaaatgtgacgggtgcaaggaactaggcatagggtcag

SEQ ID NO: 13049 - DNA, 264 bp, Glycine max
  unsure (1)..(264): unsure at all n locations; Clone ID: 701154616H1
atttgttatctattttatatatttatatatacgtatctcaaataaaaaaatattgttgaagtttttgctcaaaacatttttccgatgcattcaacattgatatgtcacaaccacaactcagcttttataatatgtatacatttgtgtttttaaattgtgacaaacaacagtcatttcattagtgctttttttaacagaattaatttnnnatccttaaatataattagaagtgtaattacattaatttcaactataaattttata

SEQ ID NO: 13050 - DNA, 242 bp, Glycine max
  unsure (1)..(242): unsure at all n locations; Clone ID: 701154617H1
ggcatcaattcaaaatatatcatcaattataagcatgggtttgtggaacacaacgaatgcagtgtcttgccgctttcacaagtttggtgatgaccaaaagaatctggtcttccaaggtgatgccacgtcttcttccaggggcatagaactcacaaagttagacggtggaggaaaaccagtgggtggcatgtgggganatgttatactcttctccagtgcacctttgggaaactctacatggt

SEQ ID NO: 13051 - DNA, 245 bp, Glycine max
  unsure (1)..(245): unsure at all n locations; Clone ID: 701154618H1
acccaaacaaaaaaacaaacgcacgcttctcattctctctctactcgttcagaagatgtttctcacaaggactgagtatgaccgaggagtcaacaccttttctcccgaaggccgtttgtttcaggttgagtatgcaatcgaagccatcaagctgngatcaactgcgattgggttgaagaccaaagaaggagttgtccttgcagttgaaaagcgcatcacatcgccgctcctggagcctagtagtg

SEQ ID NO: 13052 - DNA, 245 bp, Glycine max; identical to SEQ ID NO: 9422
  Clone ID: 701154619H1

SEQ ID NO: 13053 - DNA, 240 bp, Glycine max
  Clone ID: 701154620H1
gaattcaaaatatatcatcaattataagcatgggtttgtggaacacaacgaatgcagtgtcttgccgctttcacaagtttggtgatgaccaaaagaatctggtcttccaaggtgatgccacgtcttcttccaggggcatagaactcacaaagttagacggtggaggaaaaccagtgggtggcagtgtggggagagtgttatactcttctccagtgcacctttgggaaagctctacagtgg

SEQ ID NO: 13054 - DNA, 238 bp, Glycine max
  Clone ID: 701154621H1
ggagagaaagtgagagagaattacagagcattttccaacacgattacacgaccgaatcaaacccctctttctctccgaagctgcttttaatatcgtactggccttcgattgttctcctctttaatacatactgttctctcttcgatttgagggaacagtacaagagtctgagcatcggttaacccaactgcacaggtagtctccaaataatggagcctcatgatgagactggatgcca

SEQ ID NO: 13055 - DNA, 240 bp, Glycine max
  Clone ID: 701154624H1
gggaggaaatagggagatggcaccacacgttttcatctcatctttctaacaaaatgggaaacacttaacaaaaagagggcaagctacatctataatgattgaagaggtgtatagatgaatgtttctgggtaagaggctagtaattggaagaatgtttctcaagttttggggcttcagccattccaagcacacaagttcctctcagagaaagtatccaacaataatagaagagctgtgtca

SEQ ID NO: 13056 - DNA, 232 bp, Glycine max
  unsure (1)..(232): unsure at all n locations; Clone ID: 701154625H1
gggatgcacaagtttgttganatanctagaagcaataagatgaaaatgaaagtgcttgttttgtttgttgctacagttttggtagcatatgaatgccatggctcagactaccagaagttccctctccacatgaaaactgggtttggtgggcaatacagcaatgaggtggcatgtgccagttggaggctggcgtggaagcaaacaacgtatcaagtggcaaactgntcctgca

SEQ ID NO: 13057 - DNA, 248 bp, Glycine max
  Clone ID: 701154626H1
gtagggggtttgataaaggttgacattgaaatttgaagccatggttcttgactccattctgacatctcctcgtctcaagtctccatctttcaggagacagtttaaaaaggatgaactgggcagttggtccacacttttccagaggcatcgcttcctcttatctgctcttgttctgctaactctcctctgcactgtttatctttactttgctgtcactttaggggctagtggcacttgttctggtttga

SEQ ID NO: 13058 - DNA, 246 bp, Glycine max
  unsure (1)..(246): unsure at all n locations; Clone ID: 701154627H1
gatgctttcggtaagcaaaatgaattgagtgacacaaagtacactgaaggaggatacaactccatggagaatcagnnnnnnnnnnnnnnnnnnnnnnnnaacgacaatgctgccaatgggaagtacttctacaacaacaatgatgctgccaacaacaggtactacaaaaccaaagctgtcaacaacaattacaatgatgagaggcagggtttgagtgacacgaggtttatggagggtggaaaatac

SEQ ID NO: 13059 - DNA, 242 bp, Glycine max
  Clone ID: 701154628H1
aaccaaagtgagactaaggctaaaatcaattcataagtcaagcttttgtcatcacctaaaaaagccattttttaaggtccaacgcctttaaatggtcttttccgcttttattggttaaatgtagatttctagaggcctaaaatcaacatgtaattttattacctctttcaaaaatatagagatcattaatggtccaatgccttaatgttttatctcttttcaaaaaaatcgaaagattgttt

SEQ ID NO: 13060 - DNA, 224 bp, Glycine max
  unsure (1)..(224): unsure at all n locations; Clone ID: 701154629H1
gtgctctgagaagnaacggccttctccaccttacattttgtggatgaaagaccaatggaatgagatcaagaaagcgaacccagaggctgaatttaaggaaatttcaaccatgctaggtgctaaatggaagactgttagtgcagaagagaagaagccttatgaggggatataccatgcggagaaagaagcttatttgcaggtgattgcaaaggaaaaacgtgaaa

SEQ ID NO: 13061 - DNA, 254 bp, Glycine max
  unsure (1)..(254): unsure at all n locations; Clone ID: 701154631H1
ggaacaagtttaagatagtagcaaagtccttcattaattttattttctagaaaganagaaaaaaaaaactcagtcatcagaatgattagatttgacaaagtggtggttcactgacgccatgtaatagaagttagtttaaattggaataaaaaggacacattccttcttttttcctttcattgtaccattaaattaacaccgaaatcgccgtttacgactaanatcaaaatcacaacactgatcctttcatttgc

SEQ ID NO: 13062 - DNA, 148 bp, Glycine max
  Clone ID: 701154633H1
acagcaccattggctgacaaaatgcatacaactctaggtccctgctgagaaaatgccatgatttttgttgcaatgtcttctccacttgcaatgttgatgatatgaggagtgaatcccatcccagctgaaccagacatcaattcaccaa

SEQ ID NO: 13063 - DNA, 242 bp, Glycine max
  unsure (1)..(242): unsure at all n locations; Clone ID: 701154634H1
gaggaatcacgattgcaacggcacatgtggagtatgagactggcaaaacnacattatgctcatgtggactgccccggacacgcggattatgttaaaaatatgattaccggagctgcccagatggataanngtatacttgttgtatctgcaanggcnggaccgatgcctcaaaccaaggagcacattcttcttgctcgccaanttggtgtgccatctctggtgtgnttctgaataaagtgang

SEQ ID NO: 13064 - DNA, 233 bp, Glycine max
  unsure (1)..(233): unsure at all n locations; Clone ID: 701154637H1
ggacgcattcgacgggaatacttcgggagaatatgaacatttggtttggaaattaaccccgcggcgcctgcaatgattattgtcaaaccaacaatagagaatccgactcaccccgttgtatttgccctttttttgtcttgaaaaggtgaagctcaagtcttcagttcaatccaagtctaactatagagtagctatctaagagctttggnnctggttcttctttggactgaaat

SEQ ID NO: 13065 - DNA, 234 bp, Glycine max
  unsure (1)..(234): unsure at all n locations; Clone ID: 701154638H1
ggaagctgattttccggagcaaaatgtccctgaggtggcacctgaagcaaaaaagagagcagcagaagcaaagtcaagaggggatggggcttttaaanggaatgaccatcatatggctatagatttttatacccaagcaattgatctgaaccccattgatgctactttgctatccaatagaagtctctgttggattaagttgggccaagctgagcatgctttagctgatgcaaa

SEQ ID NO: 13066 - DNA, 247 bp, Glycine max
  unsure (1)..(247): unsure at all n locations; Clone ID: 701154639H1
gacagaagaaagaagaaaaagaagcgaaactaaagtcagcattcgaaaaagatgagtagcatcggtacaggttacgatctatcggtcaccactttctcccctgatggccgcgttttccagatcgagtatgccgctaaagccgttcgacaacagcgggactgttattgggatcaagtgcaaagatggggttgtgttgggcgttgagaagcttattccgtcgaaaatgatgcttccgggttccaatnnt

SEQ ID NO: 13067 - DNA, 241 bp, Glycine max
  Clone ID: 701154640H1
gacagcacagcactctttgcaacacaacaaaaaaagacaacacagagagaagcgtcttaataaacgctcttctctgaaaaacctgatttcttctcttcttctcttctctttcgtttcgatcttcgatctctgaaaatgagagagtgcatttcaatccacatcggtcaggccggtattcaggtcggaaacgcctgctgggagctctactgcctcgaacacggcattcagcctgatgggcaga

SEQ ID NO: 13068 - DNA, 205 bp, Glycine max
  unsure (1)..(205): unsure at all n locations; Clone ID: 701154642H1
gacaacacagcagaatgtacccattagcttgcgatctaaattcacaatgacaatgtggtgaaaaacnctcggatttgaagatggncatggncgtcgnagangcttctgcacctaaagaganccgcccgttttggtgatcttggtgggcgctccagggancgggnntccaccttctgcnaagnagttatgngttcctctgctcgcc

SEQ ID NO: 13069 - DNA, 238 bp, Glycine max
  unsure (1)..(238): unsure at all n locations; Clone ID: 701154643H1
gacacgaggactatttaaaaacccggaccgtcgtatcgttccgccggcgccgtcaacctccaaggctcgaaccaccatccttccactcaaccgcgcactanccactcgtcggctcaagctaccaccgcagcacgcctcagccgccgccagttaacangcatttgctcataaagaaggagggaagatggtgtttgggcaagtagtggttggtcctcctggctctggaaaaacaattact

SEQ ID NO: 13070 - DNA, 224 bp, Glycine max
  unsure (1)..(224): unsure at all n locations; Clone ID: 701154644H1
angaagaagattaacgaangatggaatctgggtctagacgaaggagaagaggtgcagcaacgcgtgccgttgagggagagagtggagtggtcagatgttactccggttcctcaaaacgacggccctaaccctgtcgttccgatccagtacactgaagagttttccgaagttatggattactttcgcgccgtttacctcaccgatgaacgctcccctcgcnccct

SEQ ID NO: 13071 - DNA, 239 bp, Glycine max
  Clone ID: 701154646H1
ggaagaaaaaaagaaaaaaagatgtaagcggtaccacaaaactactaacagagaaaactttcaatttctggttttctgaatttcggatggttgactctaattttaggagctggaaaaggtactaaatctaaagttggacgaaatgtggatccaaggattcagtttttggatcaaaggtttctctttgctggcctaatatctgtaatttccgctctggaacccgaactgggatcgacccg

SEQ ID NO: 13072 - DNA, 210 bp, Glycine max
  unsure (1)..(210): unsure at all n locations; Clone ID: 701154650H1
gagggaccantattannagaacttggctttgcttccttcaaantgagggtccattgaatatgtctccgtcgttggatcttcctcccaagggtggcttcagttttgatctatgccgaagaaacgcaatgcttcaaaacaagggcctcaaagccccaacctttctcaaaactggcaccactattgtcggtttagttttccaggatggtgtca

SEQ ID NO: 13073 - DNA, 238 bp, Glycine max
  unsure (1)..(238): unsure at all n locations; Clone ID: 701154652H1
gatattctacttgctgataaagaacagaaaggtaaaaagagaaccagaaagtcagtccctagcaaatctcctggggaagcatctacagagacacctgccaagaagcaaaaacaaacttcccaatctgggaaaaagcaaaaaccgtcttctgatgatgaggaggatgataaagctgaactttcagatgcaaaagatgtttctcaggaagatgaagnnnctgcagtaccgaacaatgaaa

SEQ ID NO: 13074 - DNA, 235 bp, Glycine max
  unsure (1)..(235): unsure at all n locations; Clone ID: 701154653H1
tctcctcattgtcgtgtcgtgttgttaggcgaaacaacagaagccaaaataaattccttcaaacttgcaganaaccttgtgagancacactaataaagtatagagcgcaaaatagaaattaaaaacaaaatagagacataatttatttaacatgaaaaaccccttaatacaaaggtaaaaaccatatgtcatttagaccacataaattaactccactataatanataaaaataca

SEQ ID NO: 13075 - DNA, 235 bp, Glycine max
  unsure (1)..(235): unsure at all n locations; Clone ID: 701154654H1
ggcatcaattcaaaatatatcatcaattataagcatgggtttgtggaacacaacgaatgcagtgtcttgccgctttcacaagtttggtgatgaccaaaagaatctggtcttccaaggtgatgccacgtcttcttccaggggcatagaactcgacaagttagacggtggaggaaaaccagtgggtggcagtgtggggagagtgttatactcttctccagtgcacctttnnncaagc

SEQ ID NO: 13076 - DNA, 228 bp, Glycine max
  Clone ID: 701154655H1
gggaacaatgggtgttgctctgactgtgtgcacaattcctggtcaagttgcatcagatcgtttgggaccaggaaagatggaacttggtcttggaattcatggagaacctggggcagctgtggctgatattcagcccgtaaatgtggtggtgcctcatgttctgcagcaaattttgtccacggaaacaaactatgttccgataactcgaggagaaagagtggtcctatg

SEQ ID NO: 13077 - DNA, 226 bp, Glycine max
  Clone ID: 701154656H1
aaccagactaaaaactttaggtggacagttgcaatggaccattggcttggaaagattcttgtagaccaagtgaggaaagggcttaaagtagataaagtttttctgacagaagcatataacacagctgtttcagccgtaaatgcaaaatttgggctgcatctaacaaaattcaatgttaaaaatcgacttaaaacttggaagaaacagtttgaacagttaaaggaaa

SEQ ID NO: 13078 - DNA, 233 bp, Glycine max
  unsure (1)..(233): unsure at all n locations; Clone ID: 701154657H1
ggatgcacaagtttgttgagatagctagaagcaataagatgaaaatgaaagtgcttgttttgtttgttgctacagttttggtagcatatgaatgccatggctcagactaccagaagttccctctncnnatgaaaactgggtttggtgggcaatacagcaatgaggtggcatgtgccagttggaggcttggcgtggaagcaaacaacgtagtcaagtggcaaactgttcctgca

SEQ ID NO: 13079 - DNA, 239 bp, Glycine max
  Clone ID: 701154658H1
ggtctccgtccaccagaccgaggatgcgaggattctgttcgaatttgaatgccccaagcctgttctctgtgctacacctgctaagaatggacttctttatactggtggggaggaccgaaatatcacggcatgggacattaagactggaaaagttgcatattgcttggaagaagcacatactgcccgtgtgaaaggtattgttgcgctcacagatagtgatggtgctacaggggatgata

SEQ ID NO: 13080 - DNA, 236 bp, Glycine max
  unsure (1)..(236): unsure at all n locations; Clone ID: 701154659H1
gaggtacatgtttattcactttaatgatactgatgccctttccattcatcttgtacttcattgtatgaaacatgtcctaatgcttgtgataagtttcgtttgtgaggngtgtggctaagttggccacacttcacttgtcttgagcaccatgatttgcatacagttatgatactgatgctttgtctttctgaaatttctagtttcgtaaaacaatattaagatcttctttaccataa

SEQ ID NO: 13081 - DNA, 247 bp, Glycine max
  Clone ID: 701154660H1
tacctctattcaattgaagagaaaatacataccaacattaacttcatgcttcttcttaacgttagggacagtgtcaattgtaacactagcctccaagttctgcggaaaagtgagaaaattagacacttaatattaagatcttgtgggaatcaacaaaagttacacaatgtaacatatgattaataggataggatgaatttctggttcaggaggttacatctaggttaatgcttggatgcaaccagcc

SEQ ID NO: 13082 - DNA, 242 bp, Glycine max
  Clone ID: 701154661H1
gaaataaaattcaagtatcgaagaagaagatggctttaggtgttcctgctcttccgttgacatacgtggctcacgttctggcagttgttgccagcgtcttggtcgtggtctgggtcgtcaatttcaggggtggcttggcttgggattctgataacaagtccctcatcttcaacattcatccagttcttattgttattggcttactagttcatgggggtgaagctattataagttacaaagct

SEQ ID NO: 13083 - DNA, 264 bp, Glycine max
  Clone ID: 701154663H1
gaggaatggcaagtgagatatttcttgcccttctgatcacaacctttgtggttgcagcctctgctggtaacttcaaccaagactttgagataacatggggtgatggtcgtgccaaaatcctcaatagtggggaacttctcaccttgtccctagacaagacctctggctctggatttcgttctaggaatgagtacttgtttggaaaaattgacatgcaactaaaactcgtgcctggtaactctgcaggcacagtcacagcttatt

SEQ ID NO: 13084 - DNA, 262 bp, Glycine max
  Clone ID: 701154664H1
atttgttatctattttatatatttatatatacgtatctcaaataaaaaaatattgttgaagtttttgctcaaaacatttttccgatgcattcaacattgatatgtcacaaccacaactcagcttttataatatgtatacatttgtgtttttaaattgtgacaaacaacagtcatttcattagtgctttttttaacagaattaattttaaatccttaaatataattagaagtgtaattacattaatttcaactataaatttta

SEQ ID NO: 13085 - DNA, 65 bp, Glycine max
  Clone ID: 701154666H1
ttatatacaaagtcaacaaagttatcacaatttaaattacaagaaacacatgttaccattgcatg

SEQ ID NO: 13086 - DNA, 241 bp, Glycine max
  unsure (1)..(241): unsure at all n locations; Clone ID: 701154667H1
ggaaatggagaggcgtggtgaagtgagggttacagaaggaaatttggaagtaataatggcaaagctaactgatgttgatgggttggagaaagcatttcagggctgtcgtggcgtctttcacacttctgcatttacagaccccgctggtttatnnggctacacaaaatccatggccgagattgaagtaagggctgctgagaatgtgatggaagcatgtgcaagaacaccttccataacaaga

SEQ ID NO: 13087 - DNA, 185 bp, Glycine max
  Clone ID: 701154668H1
catagagcacagaacggtggaagtgaacggcataaagatgcatgttgcagagaaaggagaaggagcagtggtgttgttcttgcacggcttcccagaactctggtactcatggcgccaccagattctagctctgagctccctcggttaccgtgcggtggcacctgatctccgtggctacggtgaca

SEQ ID NO: 13088 - DNA, 237 bp, Glycine max
  Clone ID: 701154671H1
ggcatcaattcaaaatatgtcatcaattataagcatgggtttgtggaacacaacgaatgcagtgtcttgccgctttcacaagtttggtgatgaccaaaagaatctggtcttccaaggtgatgccacgtcttcttccaggggcatagaactcacaaagtagagacggtggaggaaaaccagtgggtggcagtgtggggagagtgttatactcttctccagtgcacctttgggaaagct

SEQ ID NO: 13089 - DNA, 240 bp, Glycine max
  unsure (1)..(240): unsure at all n locations; Clone ID: 701154672H1
ggaagaaagacccaccaaattaatcctcattttttcctttttatttcgttttcggcttcaaagcatgaataagcctccaactcagacctcttccactttttttttcagttntcatttccctttacactttctttctctcttctccatctggctacctcattcttaataagnacaattaccaaaagtgggggctgttttctgaatcacaagtgaacctgtctagtgagagagttatgcaag

SEQ ID NO: 13090 - DNA, 233 bp, Glycine max
  Clone ID: 701154673H1
gtggaccaagaagaagaaacaacctcaaaatccctttcttgtgtcgattagattactttcacaccagagtcgttcgagtacttcaccttctttctctctaagcgcaaaacctcgtactgtttttggcggttaaggatgtcggggaaaggagcgaaggggttgatcacaggcaaaacctccgccgccaacaaagacaaggacaagaagaaacccatctcgcgttcttctcgtgc

SEQ ID NO: 13091 - DNA, 236 bp, Glycine max
  Clone ID: 701154674H1
gcctctcagagtggatatatagtgtgtcttgataaccttcaaagctacatttgtaaaacactgataagtctgatccagaacgcaaaatgctacagcttggtggttttttgcaccagcagtgttcctgaatgtgatacttgagctataaatccgtccccaactacagctgcaaaattttatttatagttaagtctctttaagtgtaataaaagtttcttgtcaaatacgcaagatag

SEQ ID NO: 13092 - DNA, 247 bp, Glycine max
  unsure (1)..(247): unsure at all n locations; Clone ID: 701154675H1
gattcaagagaagcgcaaaaatagtgtgccacaaacaaaaacaaaaacaatatgaagttcactataatcacaatatttttttctttatttctagtcgactttggttttgcacaacaaggggatcttgacatatcaagatttggaggaaaaccgaattcagatataagccaggctncttaagtgcctggactcaagcatgtgcatcaacaactgctgtcaaaattgtgattccagctggcacatatca

SEQ ID NO: 13093 - DNA, 239 bp, Glycine max
  Clone ID: 701154676H1
gacttaatgcagatctttagcttaggtgattttgttactgactatgaacaaatgtcaaaggtcctacttattcttgaagagttgcagaagaatgagaagtttctttctcttgaacagcaagcattcataaaggccttcagactcttcttcaacaatgctgttactcaccgcaaacagtgtgatatggctggaataaagaaagtcgagttgagccgagctaaagaagatatccttctgaa

SEQ ID NO: 13094 - DNA, 253 bp, Glycine max
  unsure (1)..(253): unsure at all n locations; Clone ID: 701154678H1
gagagaaagatgtcgaagcgtggtcgtggtggttcggcggggaacaagttccgcatgtcgctgggtcttccagtggcggcgacggtgaactgcgccgacaacacgggggcgaagaacctctacatcatttcggtgaaagggatcaaaggccgtttgaaccgtcttccctcggcctgcgttggcgacatggtgatggccaccgtnaagaagggaaaacccgatctgaggaagaaggtcttgccagctgtcatcg

SEQ ID NO: 13095 - DNA, 250 bp, Glycine max
  unsure (1)..(250): unsure at all n locations; Clone ID: 701154679H1
gacccttggcattttccattctctttttggccttcaccatagaaccctttattggcattgctgcagcagcaccagaagcagtgcttgacacctcannccagaagctgagaacaggtgtcaagtactacattctgccagtgttcagaggcaaaggtggaggcctaacagtttcaagcagtggcaacaacacatgccccctctttgtggtgcaagagaagcttgaagtctcaaagggcaccccagttacctt

SEQ ID NO: 13096 - DNA, 241 bp, Glycine max
  Clone ID: 701154681H1
ggaatcagaagaagcgagcgaagatgtcgggtcgtggaaagggaggcaagggtttgggaaagggaggagccaagaggcacaggaaggtgcttcgtgacaacatccagggtatcaccaaacccgcaattcggcgtttggctcgcagaggtggtgttaagagaatcagtggtctcatctacgaggagacacgtggcgtcctcaagatcttcctcgagaacgttattcgcgacgctgttaccta

SEQ ID NO: 13097 - DNA, 227 bp, Glycine max
  unsure (1)..(227): unsure at all n locations; Clone ID: 701154682H1
gttcttctaccagtacccagacaacgagtatacaaaattgacttaataatatgaaacttttttataaggataaaagatgaaaatagaatcatctaaaaattaaatcttaaagaattaaaatagtgncacttaaaccaaagtgattttaattaacatgtcattttattactttaatcagcgttaatgaatatattacatcttatattgatatatttaatgttcttgtt

SEQ ID NO: 13098 - DNA, 233 bp, Glycine max
  Clone ID: 701154683H1
ggcacaagtttgttgagatagctagaagcaataagatgaaaatgaaagtgcttgttttgtttgttgctacagttttggtagcatatgaatgccatggctcagactaccagaagttccctctccaaatgaaaactgggtttggtgggcaatacagcaatgaggtggcatgtgccagttggaggcttggcgtggaagcaaacaacgtatcaagtggcaaactgttcctgcagctt

SEQ ID NO: 13099 - DNA, 229 bp, Glycine max
  unsure (1)..(229): unsure at all n locations; Clone ID: 701154685H1
gattttgaaccagttcaaactgaacggccaggagagttaactgcttactacaaaattgcacgtcattacngtgggctctagatcaactgttctacaagcataacttcagccgtgtaatcatccttgaagatgacatggaaatagcacctgatttctttgattattttgaagctgcagcgagtctccttgagaaggataaatccattatggctgtttcctcatggaatga

SEQ ID NO: 13100 - DNA, 228 bp, Glycine max
  Clone ID: 701154687H1
gaacgcaaccgtttctgacgaagacaagaacgataacaaaattgaaattgaattgagtgcgaagagaaatgtcgcaaaccctaggattaggaggcgtaatccctcgcttcgtgaatcggtcatggctccgaaacctgacggtgcgtgcaatggcattatcttcctcctccgatcacggagaccagacacgtggtggccttccccgcttctactctgaaactcttcctc

SEQ ID NO: 13101 - DNA, 225 bp, Glycine max
  Clone ID: 701154688H1
aaccagactaaaaactttaggtggacagttgcaatggaccattggcttggaaagattcttgtagaccaagtgaggaaagggcttaaagtagataaagtttttctgacagaagcatataacacagctgtttcagccgtaaatgcaaaatttgggctgcatctaacaaaattcaatgttaaaaatcgactaaaacttggaagaaacagtttgaacattaaaggaaat

SEQ ID NO: 13102 - DNA, 151 bp, Glycine max
  unsure (1)..(151): unsure at all n locations; Clone ID: 701154690H1
ggttcaaagcacgccgtgtttcgctgtctctcccatcctttcgcattctcaatacccttttgatttgtgaaaggaaagcaaacatggttgancangtccaacancctacaatcatggncaannnnnctngnnancnccatctncgnnntgg

SEQ ID NO: 13103 - DNA, 235 bp, Glycine max
  Clone ID: 701154691H1
gatgaaaaggagagtttagttgaaaaccacaacaatcatgaggcccgggaggaacattacaagggggatgatgcttctagtgctgtggctcatgatactcatgcaactagcactgaaactgagacacttagtttggaaaactctgatgtaaacttagaaatgaatattccaaaacctgaaaatgagacaacttattcagacgaaagtgtcgggaagcaaaatgattcagatttga

SEQ ID NO: 13104 - DNA, 237 bp, Glycine max
  Clone ID: 701154692H1
ggaagtgtatttggtcactgacctatcttggtagagatttgaagtttaaaccttcaaattaatcaaaccattttaatttgcctatagattctgagtcactgctgctatggcgctacgcgtacttcttgtgttggggatgttgctgatgttgtgccttgttaaggtttcatctgatccaaagatagaagaagaaatactggaagcagaagaagaactgcagtttcccgataacgagcc

SEQ ID NO: 13105 - DNA, 221 bp, Glycine max
  unsure (1)..(221): unsure at all n locations; Clone ID: 701154693H1
gacaccataagaacaacatgagcattgttagatagagaatatctttttagcatcaggcacctattaggaagaccaacatgtcctctacttgtttatacacatcatttctcttgcgtgattttctttctttttgcatagatagtctatatacctgttcatattcacacttacattacacacaccagacacctncttgctgaaatagcttaccaaataacaca

SEQ ID NO: 13106 - DNA, 228 bp, Glycine max
  unsure (1)..(228): unsure at all n locations; Clone ID: 701154695H1
gatagcgtttttcatantgcattattcaatggccaacacagcagctctatccggaaccatggtgagcacctccttcatgaggaagcaacctatgacgaccaagagcctaaagacattccccaacgctctttttggtctgaaaggtggacgaggtggtcgtgtaacttgcatggcctcgtacaaggtgaagctcataaccccagaaggagaatggagtttgaatgccca

SEQ ID NO: 13107 - DNA, 259 bp, Glycine max
  Clone ID: 701154696H1
ggatgcacaagtttgttgagatagctagaagcaataagatgaaaatgaaagtgcttgttttgtttgttgctacagttttggtagcatatgaatgccatggctcagactaccagaagttccctctccaaatgaaaactgggtttggtgggcaatacagcaatgaggtggcatgtgccagttggaggcttggcgtggaagcaaacaacgtagtcaagtggcaaactgttcctgcagcttgcggagagtacatagctgacta

SEQ ID NO: 13108 - DNA, 249 bp, Glycine max
  Clone ID: 701154701H1
ggaacaagtcttgcattgggtggagcatacttagaaacagcaactatgtctctcatgcagcttactagctcccctgttggctcactggcccgtttcattgtaatatttgctttatggtacagaaccatggctttggccaagttgccaccaaacgcttcatcagttccagcagttttagcgtttggagattccatcgtggacccaggcaacaacaacaacataaaaacatgatcaagtgcaacttcccac

SEQ ID NO: 13109 - DNA, 257 bp, Glycine max
  Clone ID: 701154702H1
ggagcaaaaccctaatccctatttttcttcctcagtagtgtcatttacgcttctcttctctgcagcaactatgcctaaccctaaggtcttcttcgacatgaccatcggcggtcaatctgctggccgcatcgtgatggagctctacgccgacgtcactccccgcaccgccgagaacttccgcgcgctttgcaccggcgagaagggcgtagggcggagggcaagcccctccactacaagggctcgtcttccaccgcgtg

SEQ ID NO: 13110 - DNA, 244 bp, Glycine max
  Clone ID: 701154703H1
aaccacataacacgtgtagttagtagttagtagaataaaacgcacgtgcaagatattagtgttgtcagggagtagttattctgttaagaaacagtcagcacagttacgaccgttatacatgtaataactttgtgtatataagcctgcttgagtacgaataatacaagaaggaaaaagcttactcccgtaactagtccctaggaggtaccttatcctcgaaactaaggcaatcatccctctcttt

SEQ ID NO: 13111 - DNA, 246 bp, Glycine max
  unsure (1)..(246): unsure at all n locations; Clone ID: 701154704H1
gggggaagaagcagttaacattgcatctgctgctgcacttgctcctgatgatataatattgcctcagtaccgggagcctggagttctattgtggcgtggttttacactgcaacaatttgttcatcaatgctttggaaacacacatgattttggaaaaggcaggcagatgccaatacattatgggtctaaccagcacaattacttcacagtgtcatcccccattgcaacacaattcctcagctgtng

SEQ ID NO: 13112 - DNA, 249 bp, Glycine max
  Clone ID: 701154706H1
gatctgggcagcagaaaaacaagtagttgagaactaagaagaaggaaatggcttcctcaatgatctcctccccagctgttaccaccgtcaaccgtgccggtgccggcatggttgctccattcaccggcctcaaatccatggctggcttccccacgaggaagaccaacaatgacattacctccattgctagcaacggtggaagagtacaatgcatgcaggtgtggccaccaattggcaagaagaagttcg

SEQ ID NO: 13113 - DNA, 207 bp, Glycine max
  unsure (1)..(207): unsure at all n locations; Clone ID: 701154707H1
ggactgaaccccatttggtnntctttcatactatagtcacnttgtggggtanaatttgaactagtaccagnagtattagccataaggcctttgcaanattcaggaaaagtgactantgnttcngtttcantaatcttggnngtcnatgtccaaatgtgttttnnangtngtttnncttttcccagnaaaaatnttgnnagntccaat

SEQ ID NO: 13114 - DNA, 247 bp, Glycine max
  unsure (1)..(247): unsure at all n locations; Clone ID: 701154708H1
ggaacctttgcattctattcattcaagattcagcaagtgcgttttggaagcagagaccgaaatacttcgagatggcccgtacaaagcaaactgctcgtaagtcaactggaggaaaagctcccaggaagcagcttgcaaccanggctgcacgtaagtctgcaccaacaactggtggtgtgaagaagcctcatcgttatcgccctggaactgttgctcttcgtgagattaggaaataccagangggcnc

SEQ ID NO: 13115 - DNA, 243 bp, Glycine max
  unsure (1)..(243): unsure at all n locations; Clone ID: 701154709H1
attgtcctaccggaacccaagtatgtgtacacaggtcaaacacccatacacccatttaggtactaggagacttagatatatggttgactgaatacctaccgtatagttaacattattttctttataaattatattatttttgtgtaatttatcatttggaatttgttttctataattactatgcttattatgaactagctttggttaaggttgtagtagtatgtancaacagngngnggggtt

SEQ ID NO: 13116 - DNA, 154 bp, Glycine max
  Clone ID: 701154710H1
ggaggttccgaatggcacactctctgagttttgctcctatttgttccttcaagtcctcttgcacacaaggggcaatttccggtaattcggttgcccgaaaggcttttcagataaatgaggcatgtcaggattctaaggctcgaaactttcaatc

SEQ ID NO: 13117 - DNA, 227 bp, Glycine max
  unsure (1)..(227): unsure at all n locations; Clone ID: 701154711H1
aggaatcaaaggatgacccagttgactctgatgctgatgaggaagaggaagatgctgatgaagctggcaatgactccgatgctgaatcaaaganggaagctggagaagacaccaaggangagggtgtacatgatgaactctaggaagtttgcaaaacggataaagagtgagcggagntnatattccggaaagtaataaccttttccattgnaggtttttggttttat

SEQ ID NO: 13118 - DNA, 238 bp, Glycine max
  Clone ID: 701154713H1
agcttgagagagaagctgcacggcaagcattgctccagatggaaaagactgttgaaatcaatgagaattctcgaattctgaagatttggaactgcttagagctgtacccactgagcaattgccaggttctgtagatgagacgagtcctgcacactctcaggatggtctgggtagtttcaagtttgggagtagtaaccccttggaacaactaggattatatatcaaagccgatgatgaa

SEQ ID NO: 13119 - DNA, 242 bp, Glycine max
  Clone ID: 701154714H1
gacaaaaatccattctcaattgagaaagcgaaacgcatagaatcgaaagaggggaaaagaaaaagaaaagttagggttagggattttgagagatggcatcgactaagaagatcaccctgaagagttcggacggtgaggccttcgaggtggaggaggcggtggcgctggagtcgcagacgatcaagcacatgatccgaggacgactgcgccgacagtggaatccctctccccaatgtcaccag

SEQ ID NO: 13120 - DNA, 243 bp, Glycine max
  Clone ID: 701154716H1
gggagttgctaatgctaacattactaaacaattgttgttcattcagagcttcactcaatcctttgcacgtctcaatctgactcttcacttcacttcatcgattttgtgattctctctctcaataatggcagcacgctttcaatctgcagctgtactatgccggtgttccctatagggaaagatgaaattcaagtctaagaaaggatggaaacctattgtaccacttcatttgaaaggaaaatc

SEQ ID NO: 13121 - DNA, 255 bp, Glycine max
  unsure (1)..(255): unsure at all n locations; Clone ID: 701154718H1
gagcgtgttgaaggatcgaaatcggaagaaggattagggtttgtggagatgcaagggcaaggcgttgatgaagtgagcatagaagagttggcgtcgaatctttccctctacaaagatcaactgaaccaggttagagaactcttaaacgatgaccctgcaaattctgaatatgatnngatggagagggaactttccgaggtaagctcaattcaaccccagttttgatgttttgtttccgccttgttctctatcatt

SEQ ID NO: 13122 - DNA, 241 bp, Glycine max
  Clone ID: 701154719H1
ggttctagtgtgtgattgtttgttgttgtagctcgttcttcttcttttgttgttctgtgtttgtgtttgttttttctctcacctgaaaatgtcttgctgcggtggtaactgtggttgcggaagctcctgcaagtgcggcaacggctgcggaggctgcaagatgtacccagacttgagctacactgagtcaaccaccaccgagaccttggtcatgggagtggcacctgttaaggctcaattt

SEQ ID NO: 13123 - DNA, 243 bp, Glycine max
  unsure (1)..(243): unsure at all n locations; Clone ID: 701154720H1
tgtaaaacccttgatcaattcatacatgcatgcatagcatctaagagagagaagctaagcaagtacaacgaaaatgaaatgggtgaagctcatcatgttgactttttaacagctttgatgagagaagaaacagcacatgncgataaatttctaagggatgctgtgttcaatctatttgtggctggaagagataccataacttcagctctcacgtggttcttttggcttgttgccacaaacccc

SEQ ID NO: 13124 - DNA, 152 bp, Glycine max
  Clone ID: 701154721H1
acactctcttcttctttttcttctccctcctcctttgcctttttttgtagcttccccttgcgctctgccacttcatcattgaaggtacaaacaattcagaagaagaagcgcgtggtgaaggcagtggaagaagatacccagcaagaatcaac

SEQ ID NO: 13125 - DNA, 224 bp, Glycine max
  unsure (1)..(224): unsure at all n locations; Clone ID: 701154722H1
ctaacctactcttttataaacgtagtatttgtagagggatgggaccaagctgggatagtgtagtaatgtgtaaacgtcataagatacatacggcggatccaggcgttacgaacggtgcctctgtcactcctccaccgccacttccttaacacactgtcacatgctgcacctgctgtttgctaaagttatcattcaacgacgacaagccagaaactgcntgattt

SEQ ID NO: 13126 - DNA, 244 bp, Glycine max
  unsure (1)..(244): unsure at all n locations; Clone ID: 701154723H1
gagaacagaagggagaattaggtttttagggtttacaccgagcagcgacacctccctcccgcagtagccatggttctcaaaactgaactatgccgattcagtggtgccaagatctaccccggaaagggcatcanatttnttccgttgtgattctnangttttncctgtttgccaactcanaatgtaagcngtatttnccanaaccgnctgangccctcaaagctcacctggantgcnatgnaca

SEQ ID NO: 13127 - DNA, 248 bp, Glycine max
  unsure (1)..(248): unsure at all n locations; Clone ID: 701154724H1
gtgttgtaggttgtcttctctattattgacttgtgctatataacagcaaacagatctataacgtagagagggaagggaggttcacattcacattacaagcaacaagttaacgcttaacaccactctccccaatccttttgtgtatgcaaaatgagaccatgcaaatgcannagcaatgttctctctgctctcattcttcttgtcacattcctttttgcttccgtccactgtgaagacccatatcggta

SEQ ID NO: 13128 - DNA, 239 bp, Glycine max
  unsure (1)..(239): unsure at all n locations; Clone ID: 701154725H1
ggcacaagtgagtttgttgatcgagataactagaaacagtgtgatgaaaatgaaggtccttgttttcttcgttgctacaattttggtagcatggcaatgccatgcgtacgatatgttccctctccgaatgaacactggctatggtgcccgtactccggaggtgaaatgcgcaagttggaggcttgctgtggaagcacacaacatctttggctttgagaccattcctgaagagtgcgtna

SEQ ID NO: 13129 - DNA, 235 bp, Glycine max
  unsure (1)..(235): unsure at all n locations; Clone ID: 701154726H1
ggaacctttgcattctattcattcaagattcagcaagtgcgttttggaagcagagaccgaaatacttcgagatggcccgtacaaagcaaactgctcgtaagtcaactggaggaaaagctcccaggaagcagcttgcaaccaaggctgcacgtaatctgcaccaacaactggtggtgtgangaagctcatcgttatcgccctgggaatgttgctcttcgtgagattaggaactgcc

SEQ ID NO: 13130 - DNA, 60 bp, Glycine max
  Clone ID: 701154727H1
tcagatctggagcaggagaatagcgttggcagcgtttgcgtttgctctgctgttccaatc

SEQ ID NO: 13131 - DNA, 231 bp, Glycine max
  unsure (1)..(231): unsure at all n locations; Clone ID: 701154728H1
aatcgaatcgaaattaagtggagagtgtgtagaaactaaatggggaacgatgacatgacagagagagtagttttcgtgaccgtagggacaacgtgcttcgatgctctcgtcagagccatcgattccgacaacgttaaaaaggccttgtttgcaaaagggtacactcaccttctcattcaatgggtcgngganctactnccaannantctgngggattttttcccccnngcc

SEQ ID NO: 13132 - DNA, 235 bp, Glycine max
  unsure (1)..(235): unsure at all n locations; Clone ID: 701154729H1
ggtgctttatttttgttcagcttgaaacatcaccagttgagagtagaagagggtactattattgcagaacactgcccacaatctattctagaccttacgtataactcctacctatctaatctaactgttcaaccaaacaaggtacaaccacggactccattgtgtttttctacatctcaatgtctctcnggggctnaacaaaatgccacagtnttaaacagggnnngttntttng

SEQ ID NO: 13133 - DNA, 220 bp, Glycine max
  unsure (1)..(220): unsure at all n locations; Clone ID: 701154730H1
gatcgaagcaaaaactgaaaacccaaagtgcttatctcctctgtctttttctctctcttgctatccttttggctagtngcactgctgcaagtgcaactccaagaagcgcagtgccaagccaccatgtttcaacattcaacagaagcctttttccttccacttttctctttggaattggttcttctgcttaccaggcagaaggagcagcaagtgtagatgg

SEQ ID NO: 13134 - DNA, 241 bp, Glycine max
  unsure (1)..(241): unsure at all n locations; Clone ID: 701154731H1
aaagagacccggaaagggtgggaaccgcttttggaaatccattgggcttggatttaagactcccagggaagccatcgaagggacctacattgacaagaagtgccccttcactggcaatgtttccatccgtgnccgtatcttggctggaacatgtcacagtgctaagatgaacaggactattattgttaggaggaattatctccattttatcaagaagtaccagaggtacgagaaaaggcac

SEQ ID NO: 13135 - DNA, 225 bp, Glycine max
  Clone ID: 701154732H1
gagagggacacgaacttcaaaccgtttaagcttctccgagttttgacctacaacactctcgaatcccctcttgtgtgttgtagccgccccgtgaccatcaatggcggaaactgctgtcgacaaatcccaatctctcgctgaggaatattatgtgaaggatgagcaaacagctgtagttgaaaaacctgttgaggtcaaagaagttgaaaacccagaggaggctgc

SEQ ID NO: 13136 - DNA, 243 bp, Glycine max
  unsure (1)..(243): unsure at all n locations; Clone ID: 701154733H1
gttgtattaaaagcataagggtatttttgtacagtttagttccccaatttagttgtcctaaccaagtcattaattatactttcattaacctaagggaacagtttagaaaaatcgatgcacttntatgaatacacatatacaaatgtgtcttaaatttaaagaaatttttatgtatactaaagagagcctatatgattttaatgattactgcaatggctaaaatgtttcttttgtcaacaggac

SEQ ID NO: 13137 - DNA, 242 bp, Glycine max
  Clone ID: 701154734H1
caacccttaaccacaacaaacaacatcgtttcatatatagtgagtgagagaatctaccatcaaccatgtctgatattgctatgttggtagcagaagaatatgagaggaggacaatgaattttaagaaggctggcgctgtacaagagaggaacttgaacgtggtttcttgtgcttctttgttggttctgaaggagaagattgaggtgcagaagaaggagctgtcaagtgggttttggaaccca

SEQ ID NO: 13138 - DNA, 251 bp, Glycine max
  unsure (1)..(251): unsure at all n locations; Clone ID: 701154735H1
ggaggcactgagaganatggtgttgaatgggtggaattggaaatcgaagtgaaaagaacggttgaaagtgaaagagtaagatgctattgcaattgcgctgctctcattctcaccacaaactgacacttgcctgcagttgaagaaagantagaggatcgtggtcgatggcgtctgctagcctggaagtggtggggtcggcagttcgaggtctgttaatangtngcttcangggttctnccagntccgttcga

SEQ ID NO: 13139 - DNA, 192 bp, Glycine max
  unsure (1)..(192): unsure at all n locations; Clone ID: 701154736H1
aactacattagcggaactgcggaaaantaaaaaagncatacatctcgccatctccagtggcgacaccaacgtgcatcctccagctcagcatcgttctcgccatctgnaatggctgaacttntganggcntccatgcaggaagagaccccctattaaaagtttgaaaacagccctcattaataaatagttctt

SEQ ID NO: 13140 - DNA, 238 bp, Glycine max
  unsure (1)..(238): unsure at all n locations; Clone ID: 701154737H1
ggcacaagtgagtttgttgatcgagataactagaaacagtgtgatgaaaatgaaggtccttgttttcttcgttgctacaattttggtagcatggcaatgccatgcgtacgatatgttccctctccgaatggacactggctatggtgcccgtactccggaggtgaaatgcgcaagttggaggcttgctgtggaagcacacaacatcttcnnctttgagaccattcctgaagagtgcgtt

SEQ ID NO: 13141 - DNA, 213 bp, Glycine max
  Clone ID: 701154738H1
atcagtgtgagcaaccttattccttacaagtaaaaaagtaaataatataaacctgaagctgagaaaaagagttctaagctttgtctgtgactggtgagagccaaaagccgaagaaagggaagatggcgctatggatggaaaagggttcagagccattaaccgaaaccgagaaggcagaccttgaagccattgctgcactcaaagagtctgcag

SEQ ID NO: 13142 - DNA, 125 bp, Glycine max
  unsure (1)..(125): unsure at all n locations; Clone ID: 701154739H1
aactgttgtactgggaccctatacagaagctatttgaagggcntantatganttatatcgaatgcntcaatgtggactataaatcanctagaaaggngtcattttatgaccttcagcttgatgtg

SEQ ID NO: 13143 - DNA, 236 bp, Glycine max
  unsure (1)..(236): unsure at all n locations; Clone ID: 701154740H1
ggagaagtagagccaccacaaggttgggagtagttatctcagggaatagagcactgccatatttgattgcagccccacccgcaaaagaacccgccactagttttcccacgtacactaaatcctcctattttgcaccattcaaaaaagagtattanttnanncgatagctttgganggaattaatgtaataaataaaaaangaattgggncgattgattgnttttncttgagaagng

SEQ ID NO: 13144 - DNA, 239 bp, Glycine max
  unsure (1)..(239): unsure at all n locations; Clone ID: 701154741H1
aatatagtctacatccacagacgttggaggaatttgctgcaactcagtaggcccctaactgggaggttagaagtggatgtgttttaatttatatttcaatttaaatatatttcatttcaattcattacatttanataatatatgttgcatgacagggantanggnaaaaggcacaagattttccaaaaacacatgnctncccacatgctattctngnggggggattatgntttgaanaa

SEQ ID NO: 13145 - DNA, 235 bp, Glycine max
  unsure (1)..(235): unsure at all n locations; Clone ID: 701154742H1
atccctttgcagagttaaaatagtaaattacattaagaataaagatgtataataggctaaacaaatatcaacctatccctagtgatgattgtcagatcctaatttcattcgggtgtaatgcttttatcatccgggtagaatgtttttatcattgccaatcgaattgcggcgtttggnatcggttacagcgcaggccaaggggtgactcagggtttgatggtccttnntcaaanca

SEQ ID NO: 13146 - DNA, 161 bp, Glycine max
  Clone ID: 701154744H1
aacaagaagagcgttgagacctacaagatctacatcttcaaggtgttgaagcaagtgcaccccgacatcgggatctccagcaaggctatggggatcatgaacagtttcataaacgacatcttcgagaagctcgcccaggagtcatcgcgtctcgctaggta

SEQ ID NO: 13147 - DNA, 239 bp, Glycine max
  Clone ID: 701154745H1
gacccaaaggtgcaaaaatattaagatgataaacattggagcacttgttgtactctttgcatttctcttcctcagttgtgcctatgcacaagacacaacaacccttgtgcctgcaatcataacttttggtgactcagccgtggatgtagggaataatgactatcttcccacccttttcaaggctgattaccctccttatgggagggactttgctaaccaccaacctactgggaggtttt

SEQ ID NO: 13148 - DNA, 240 bp, Glycine max
  Clone ID: 701154746H1
cccattaccagagccttcatcgagaagtactacaccccaagtaggcgcagggcgaggcaccacagcagcctggagacggccagccgcaggaaccgatgcatcaccatcacccccgaagtccacctcagctcatttatggaggttagagcattgcatatgacatgtggctagccagcaagaagccaaccacaggggtccaagtgcagctgaacgagatttctatcagtacactctccgcca

SEQ ID NO: 13149 - DNA, 118 bp, Glycine max
  Clone ID: 701154747H1
ggcacaagtgagtttgttgatcgagataactagaaacagtgtgatgaaaatgaaggtcctgttttcttcgttgctacaattttggtagcatggcaatgccatgcgtacgatatgttcc

SEQ ID NO: 13150 - DNA, 254 bp, Glycine max
  unsure (1)..(254): unsure at all n locations; Clone ID: 701154748H1
cagataataattaacatcatactactatgatcaaaatcattgataggtttttctagaggaagaaacgcttaactgtttcttctataggtacagataagtccactctgtgctggtaatagagatcaatgtattcaacaccaagacgtttcaagctggcttcacaacatgngcgagcgtactctggtgtacccttaacaaacattccagaagagtcgatctttgtaatgccaaatttcgtcgcgatttggatcttt

SEQ ID NO: 13151 - DNA, 241 bp, Glycine max
  unsure (1)..(241): unsure at all n locations; Clone ID: 701154749H1
ccctcgacaggggacaatctccttgggcattggaccatctctttctcttgcaagccggctcagagcttagggagcttatgtactgtccaagacccacaaaatacatgtgacatcctacatgnnactctgagacacgtgtcaaccattcacgccaatcctgcaataagagcacaaacacttgtcccttagcatttgggttccctaactgacaagttatctctaacattgtctacaagcttct

SEQ ID NO: 13152 - DNA, 238 bp, Glycine max; identical to SEQ ID NO: 8719
  Clone ID: 701154751H1

SEQ ID NO: 13153 - DNA, 196 bp, Glycine max
  unsure (1)..(196): unsure at all n locations; Clone ID: 701154752H1
gagggagagtcttgacgctccatcaagatgggtatttctagggattccatgcacaagaggcgtgccactggtggcaagaagaaggcatggagaaagaagagaaagtatgagcttgggcgtcaggccgcaaacaccaagttatcaagcaacaaaactatccggaggnttcgtgttcgnggtggcaatttnaangggg

SEQ ID NO: 13154 - DNA, 243 bp, Glycine max
  unsure (1)..(243): unsure at all n locations; Clone ID: 701154754H1
ggaagcagagataagtgtctcaacaagtgatatgcaaagcatgtctctctgtgcttcactctcctccacagcttcacacctcacttcccttgcctccgtctcttcttccacctctccactttcccgcaaattttctctcactttccgggaaaaaaacagaaccccaattgcaccacctcacaagctccccttcttctcagnaaggcntgcccccaccagagtagtgtgggtgaatctgggcca

SEQ ID NO: 13155 - DNA, 235 bp, Glycine max
  unsure (1)..(235): unsure at all n locations; Clone ID: 701154755H1
gggagacaggaagaagaagaagagcatccccagcgacgaatgaatgggcaattgcggaagcagagaggaatctgccgtagtttccaaggctcaagttgttcagcagcttcaccatgcgacgtcgttgggcgccagtgccaggaccgacaagaagcacgctcacaggcacaatctcagcgagtgcgcttcggatctcagcgagtcctgttccacaccgcgcggtaacaatagcngc

SEQ ID NO: 13156 - DNA, 237 bp, Glycine max
  Clone ID: 701154756H1
ggataataattaggtagaaaaaatactatggggaggggaagagtggaactgaaaaggatagagaacaagataaacaggcaggtaacgtttgcaaagaggagaaatgggcttctcaagaaagcctatgagctttctgttctctgtgatgctgaggttgcactcatcatcttctccacccgtggcaagctttataaattctgcagcaccaacagcatgctcaaaacacttgaaaggtac

SEQ ID NO: 13157 - DNA, 234 bp, Glycine max
  unsure (1)..(234): unsure at all n locations; Clone ID: 701154757H1
ggaaggaggagagggagagggagagagaaagaaaggtgaattggattgcatctctctctgtgtgttggaagaggggaatcgtagatctgannnnnnnnnnnnnnnnnaataattttgtgatcagaattattgagctgaacaaaagacaatgggattgtgggaagcttttctcaattggcttcgcagcctttttttcaagcaggaaatggagttatctctaatnggccttcagaa

SEQ ID NO: 13158 - DNA, 234 bp, Glycine max
  unsure (1)..(234): unsure at all n locations; Clone ID: 701154758H1
gaccactttccacacccaactgcgtanggctcaaagctttttgacagtttgagcatttcagacaaacatgggngatgatggaaagaagattagtggagagggggggttagtgaaggttgagtcnaaaacccagcaatggtttcacctcaaaagtggttgatttgttggagaaattggtggtgaagtccttgaangattcttccatgccccatnatactnaatggnaatttggcc

SEQ ID NO: 13159 - DNA, 235 bp, Glycine max
  unsure (1)..(235): unsure at all n locations; Clone ID: 701154759H1
gggtgtggcactcaaacattgtttgttgtaggaagaggaatcttgagaaatggcaggggacagcaagagcaagattctgttcatcggagggactggttacatcggaaaattcatcgtggaagccagcgccaaagctggccacccaactttccttttggtgagggantccactctctcnaacccggnaaaatcncccctnatgganattttnaggggccggggtgnaatttttttt

SEQ ID NO: 13160 - DNA, 129 bp, Glycine max
  unsure (1)..(129): unsure at all n locations; Clone ID: 701154760H1
ggcatcaattcaaaatatatcatcaattntaagcatgggtttgtggaacacaacgaatgcagtgtcttgccgctttcacaagtttggtgatgaccaaaagaatctggtcttccaaggtgatgccacgtc

SEQ ID NO: 13161 - DNA, 239 bp, Glycine max
  unsure (1)..(239): unsure at all n locations; Clone ID: 701154761H1
ggttttgccacagaaggttaaaagataaaagattgatgaaagatgaagctgttgctaatgggcgacaagatcgttcaagtggtgtcatccaagatcgtggcagtggacttgggcaagattcatgcggaagcagtaagcatgctgatcacaggtatctggatcctaaggaggttgaaanccatggcntccaanaatcacgatttncctttncagatcnccccncnggttgggggcccctt

SEQ ID NO: 13162 - DNA, 235 bp, Glycine max
  Clone ID: 701154762H1
gaggggggtcacggcgtttaggtgtacagatgttgcacagtttaaggttttctctattcatggcatccaaacatcgaattgcagggaccaacattcagagctccccaaagagggcaagaaccatggccacgtcatccacagccattgaacccgcattgaaggaggctttttccagatatactcagtgtctcaatgacctcaatgacaaacgtgaaagagtggtcaaagcaatcgt

SEQ ID NO: 13163 - DNA, 240 bp, Glycine max
  unsure (1)..(240): unsure at all n locations; Clone ID: 701154763H1
ggcagcaacagcagcattcactgaaagcactcagtagggtttgcggtttcagagtttgtgacgcacgcatccatggnnnnnnnnnnnnnnnnnnnnnnagccccgccgcgccagctctcccagaaggaagccgacatccagatgatgttagccgccgacgtccacctcggcaccaaaaactgcgacttccaaatggaacgttacatcttcaagcgccgcaacgacgggatttacattatt

SEQ ID NO: 13164 - DNA, 242 bp, Glycine max
  unsure (1)..(242): unsure at all n locations; Clone ID: 701154764H1
gctatgactctcaaccntgctcatgaaagagtcttcatgtctccttatggtgctaactcctttggggttaaaattgagggacagaatcttcatgagtcttcttacttgggacctcagacacagaacatggttttccaaatgcaacagtcctcacaacactagttccatgcattagaacttgttgtagtgaattattaatgggtagaagtagaaccagaatcttctgtccattcaataagtac

SEQ ID NO: 13165 - DNA, 236 bp, Glycine max
  unsure (1)..(236): unsure at all n locations; Clone ID: 701154766H1
gacagttaatttatcataacatttgtttttggtgcattcaaaaaatggctgggattgtagtgatttttgactttgactcaacaatcattgagtgtgatagtgataattgggtgcttgatgagaccggtttaactgaaaagttctatcagcttcttccngtacgcattggaaccctctaatggataagatgatgaatgaacttcattcacaagggaaaaccattcaagacattgtac

SEQ ID NO: 13166 - DNA, 235 bp, Glycine max; identical to SEQ ID NO: 12722
  Clone ID: 701154767H1

SEQ ID NO: 13167 - DNA, 235 bp, Glycine max
  Clone ID: 701154768H1
gaaaggttggaaagaagacggcaaatgccttatcatatgcacatcaatcttgagctcctggagacagtacatcttgtatctgctatgctgctggaagttcctaatatggcagccaatgttcatgatgcaaaacgcaaactcatatctaagactttccgtcgcttgcttgaggtgagtgacagacaaacattcactggtccaccagaaaatgtaagagatcatgttatggctgcca

SEQ ID NO: 13168 - DNA, 236 bp, Glycine max
  Clone ID: 701154770H1
ggagttcaacgagatggagcaaataaagcacagaacagttgaagtgaatggcataaaaatgcatgttgcagagaaaggagagggtccagtggtgttgttcctccacggcttccctgagctctggtactcatggcgccatcagattctctctctcagctccctcggctaccgcgccgtcgctcccgatctccgtggctacggtgacaccgaagcaccaccttcaatcagcagctaca

SEQ ID NO: 13169 - DNA, 235 bp, Glycine max
  unsure (1)..(235): unsure at all n locations; Clone ID: 701154771H1
ggtgcagagggaaaagcaaagggatgatgatgcagagcaaaagggcagggtggtggttgctcagaaaggcaaaggcaaagctgagtcttaacactgaccgaaacctctcttcttctcaacacctcattctcgacaaccccaatctcaatcaggttttggtcgaaggaaatggtttctccagaatggccattctcaatagaccctntgctctcaatgctctnaacacnantnnggg

SEQ ID NO: 13170 - DNA, 237 bp, Glycine max
  unsure (1)..(237): unsure at all n locations; Clone ID: 701154773H1
ggaggtcgtttggtttggaggtttagcactcactatttctctagtttctctgcatcgccttcgtcgatcgaagtggagcttccatttcatagccggcggtgaagatagatagttagcagacttggctgaccctgagcaggaggaataagaataagatgcctccttatgattgtatgtttcgtttaagccccatataaggaagggaagctgtcatggatttagttggngnggggggga

SEQ ID NO: 13171 - DNA, 168 bp, Glycine max
  unsure (1)..(168): unsure at all n locations; Clone ID: 701154775H1
ggatccgggtatggaggtccgaatggaggctcctctaaaggtggtatcattagaccaaccgttgtgtgcaaagacaaaggcccttgtttccancaagaaggttacttgtccagccaagtgcttctcctctttcagccgttccggcaagggctatggcggcggaggcgg

SEQ ID NO: 13172 - DNA, 145 bp, Glycine max
  unsure (1)..(145): unsure at all n locations; Clone ID: 701154776H1
gattgctacaatacttataaacgctgttgcagcgaccgacgagtcttgtgtgtgacctcaaaaccctgccgtcagtcaccgtcttctctgccgccatgaagctcgtcaggtttctgatgaagctgaacaacgaaaccgtatcant

SEQ ID NO: 13173 - DNA, 232 bp, Glycine max
  unsure (1)..(232): unsure at all n locations; Clone ID: 701154777H1
gggatgaggatcatgcattcaagaagattaggttgagagctgaagatgtgcaagggaagaatgttctgacaaatttctggggaatggatttcacaacagacaagctgaggtcattggtacgaaaatggcaaactcttattgaagcccatgtggatgtgaagacaactgataattacacattgaggatgttttgcatnggnttnccangngaaggncccncccgnggaagacc

SEQ ID NO: 13174 - DNA, 154 bp, Glycine max
  Clone ID: 701154778H1
gaaccgatggcactttgcctggaagctatggagctaatcattaccagcaaaaccggggatctgtgacctctaatgggacagatgattacccgaacgttaaattgccaaatggcagcggcatgattcagccaagcagcagtactgtgtcagatac

SEQ ID NO: 13175 - DNA, 238 bp, Glycine max
  Clone ID: 701154780H1
gggacgtgggggttcttcacttctcttcttcaattcattctagttctggattccgactcgccgcattgactcggtccgggttggggtcgactcagttcggtttttcattctctcgcgaatctaatctataggaaaagctaagggcacatcacaatgaaggcattgattctggttggggggtttggaacaaggctgaggccactgacactcagttttcctaagcctcttgttgattttg

SEQ ID NO: 13176 - DNA, 235 bp, Glycine max
  Clone ID: 701154781H1
caagcatgaaagctgtgggcagtgcaccccatgcagagaggggactggttggctttggacgatcatggaaagaatgaaagttgggaatgccaagttagaagaaattgatatgcttcaggagttgaccaaacaaattgaagggcatacaatttgtgccttgggtgatgctgctgcatggccagtgcagggtctatcaagcatttcaggcctgagcttgagagaaggattagagagc

SEQ ID NO: 13177 - DNA, 234 bp, Glycine max
  unsure (1)..(234): unsure at all n locations; Clone ID: 701154782H1
ggcacaagtgagcttgttgatcgagataactagaaacagtgtgatgaaaatgaaggtccttgttttcttcgttgctacaattttggtagcatggcaatgccatgcgtacgatatgttccctctccgaatgaacactggctatggtgcccgtacncncnaggtgaaatgcgcaagttggaggcttgctgtggaagcacacaacatctttggcttgagaccattcctgaagagtgc

SEQ ID NO: 13178 - DNA, 230 bp, Glycine max
  unsure (1)..(230): unsure at all n locations; Clone ID: 701154783H1
ggtgatattgacaaatacaatgatatttatttttatagttacatttttttgaagggcagaaattgtagtgaaagcgataattctagtactagtataataactagtacgaatgatacaaatgatagtgattccactataggagaaagttctaataatctcgatgaaagtcaaaaatataagctttgtggcttgaatgcgaaantngttanggtnaatttataaaaattttt

SEQ ID NO: 13179 - DNA, 238 bp, Glycine max
  unsure (1)..(238): unsure at all n locations; Clone ID: 701154784H1
gagaggagttgtaaattaagagcatggctgcacaagctcttgtatcatcatcttctcttaccttctcagcggaggctgcaagacaaagtcttggaccaagatcactccaatctccatttggcttctccagaaaagcctcctttcttgttaaggcagctgctaccccccctgtcaagcaaggatcagacagacctttgtggtttgcatnnnagcaaagtctttcttacttggntggnag

SEQ ID NO: 13180 - DNA, 231 bp, Glycine max
  Clone ID: 701154785H1
caggatttccatttgaaaccaattttccattatcttcaaactccttttctggttgttcaacggcatttatggattcatctactgtgggtggattatgctttcctaccatgccctcacagccagttgggcctggtggtgttgtttcatccacatatccccgtccatatgttatgagtcttccaggtggtacaagtaatgtgattcctgacagcagaaaatgggcaagtcaaa

SEQ ID NO: 13181 - DNA, 213 bp, Glycine max
  unsure (1)..(213): unsure at all n locations; Clone ID: 701154786H1
aaccgcacctcctccatgccctgcagcttccccttatggtgctcctccatgcccttcttctgcttggacctaattgtttctttctttgaagcttttgacctagcttgatttttgttagtgtnaattaccaccgtgaggtttntgatggccttgatgatgcttatatataaatactangtagncccgtgtgaggngaaatgtgncacatctcaa

SEQ ID NO: 13182 - DNA, 235 bp, Glycine max
  unsure (1)..(235): unsure at all n locations; Clone ID: 701154788H1
ggnaanaaggaacaataataatagcaataacaatagcaacgagaaaaaattaacgagggaggggagaagagaaagaaggaaggagacatttataaaaagctctttcccttcccctaaatccctcacactcattccatttttacctttctctctcgctcgcaaacgcaaataataaaaaacaaggttttagccatggcatcgaagcggatcttgaaggcctcanggntcccaaagg

SEQ ID NO: 13183 - DNA, 228 bp, Glycine max
  unsure (1)..(228): unsure at all n locations; Clone ID: 701154791H1
gggtctggaagagaagagagaaagaatgggcaaagtttcaattccagtcccgcaaaacggtttctccatacgcaatttctcaacgtccaaacgctcatgtttcaccccttcaccttcaacgctcagaatttcttgctctggagtagctgagttagatggatctcatgagaatangggnggtttnttnatttcnangggaacnaggggnggnttngngnttttccnncc

SEQ ID NO: 13184 - DNA, 228 bp, Glycine max
  unsure (1)..(228): unsure at all n locations; Clone ID: 701154792H1
gatagcccttttgagccttgtttccctttccttgttttgaagctcactacaagccttaagtgaaaaaccatgatattaccatatccttaaggaattttggagctttggaattgttttgggaataagtgtggggggtttttgtttcattggacaacttgttttgttgactatgcttcatgatgtatttggggccatacttgatgtacattgtatattggtnaaatgtng

SEQ ID NO: 13185 - DNA, 231 bp, Glycine max
  unsure (1)..(231): unsure at all n locations; Clone ID: 701154793H1
ggtcactatgttcctcagttgtctcaacttgtttaccggagaaataaaggaatcgagaatccagttataaatttcaagggttttatggttggaaatgcagtcattgatgatttccatgattatattggaacatttgagtactggtgggtcaatggtttgatttcagattccacatataagaagctgggaattgcctgtgacttttattcttcngagcatccaccagagatg

SEQ ID NO: 13186 - DNA, 231 bp, Glycine max
  unsure (1)..(231): unsure at all n locations; Clone ID: 701154794H1
gagtgtgaaataaccaaacaaaccataaaatggaaaaggtgaacagaaataatttgaagtaaacattgtattgttcttatttgtctcaccccatgctcaccatgctggccttgtcgcagaatgcagataatgcagctaccgtgtctaatttgatttgaggccgtaaactacgcttttnatgccaatgcctgttgccctaatgaagaatgagttgatgtttaaccttggccc

SEQ ID NO: 13187 - DNA, 236 bp, Glycine max
  Clone ID: 701154795H1
ggtgcaaaggaggaagaggaaaaagaggattggagggtcgccacgtttagcaacaaccaaaccctctctactctttcttcttctcttcgctagggttttagcttcttcctcttcacttcgttcttctgggcctctacaatgagcaacgacaaggacaccttcaacgtcgctgatctcacttccgctctcaacgaggacaatagagcagaccttgtcaatgctctcaagagcaagat

SEQ ID NO: 13188 - DNA, 237 bp, Glycine max
  Clone ID: 701154796H1
gagatgaagttatgggtgatgatgatattgacgggaaaacatgtcctatcttatgtttctttccctttgagttgagaattccttgttgatcactcactcacacccatctgtttcttgcttcccaacatcatggacttggacttcaggagggcttcaaccattcattccaccaatcatcacttctcttctctccaaccttctcgccttcactctgtgctcaattatacagatgatgat

SEQ ID NO: 13189 - DNA, 134 bp, Glycine max
  unsure (1)..(134): unsure at all n locations; Clone ID: 701154802H1
gggagaaactagatggttgataagtactactataatagtataactaaggaaggagtaagggtgatggtggttctgatctgacttttggcggtgtgggagtcacgagagcagcaaggggaagtcacaagantcac

SEQ ID NO: 13190 - DNA, 138 bp, Glycine max
  unsure (1)..(138): unsure at all n locations; Clone ID: 701154803H1
agaagaagaagaaggancntngccatgagcatggccatgacagcagcngcagcagtgacagtgattaaactgctgcatcacctatatatttaaaaggtttatgggaccatagtagcgagggctgtgccttaatttctc

SEQ ID NO: 13191 - DNA, 250 bp, Glycine max
  Clone ID: 701154805H1
tatttgaaatatttaatcttaaaatattctttttaattggagtaacaaaaataacaaattaaaggattaatggaacaattttcataatatctgtgatctttgtacataattaacattagtttgtttggccgagcattagtaaagttgattttggttaaagtaaattttaaagacgtgattcacgttaaaatgtttttattagaaattaaaaagaaaaatagttatatactgaccatgtaaaaagttttat

SEQ ID NO: 13192 - DNA, 263 bp, Glycine max
  unsure (1)..(263): unsure at all n locations; Clone ID: 701154807H1
ggagagaagagtgcagagcaagcttagaagagcaaagtgtgtgtgtgatgtagttggacattcattcagttcagtctcaatcacatggcttcttcttctccctctcactcatatctcacacatcttcctcttcatccctctcaccaagnngatagtgagaagcgcgtggaggacgatgaatcgcgcgttccgattcacatcgtgacggcggcgtcgcaacttcccgtcgaatttctggaaccctcgcctcaatcgaagctcgt

SEQ ID NO: 13193 - DNA, 254 bp, Glycine max
  Clone ID: 701154809H1
gattcccaaatttctcattctcccatttcctctcagaaccctcgatcactcccacgcgctcctatatcctctccttcaccgtcgctctctccaacgatcacaacaacatcgtcatcccatggcaaacgccgcatctggtatggcagtccatgatgactgcaagttaaggtttttggagctgaagacaaagaggacacaccgtttcatagtttttaagattgaggagcagcagaagcaggtcattgtggagaagc

SEQ ID NO: 13194 - DNA, 253 bp, Glycine max
  Clone ID: 701154810H1
tcaccccttgaactagcttttggattgagttaggctcaaactctaagacaaaggaatctcttataagacctccacaagcagcttggcacattagcggcggtgatatatattttgtacttgatctaaaataagatcatgaagctcaaggctgaatgcagagacttgtgctaaaatttagctcatcattttttttgacatttctttctagaaaagaatgatctaaatttgcaaaggttgactttctgacttgaaa

SEQ ID NO: 13195 - DNA, 252 bp, Glycine max
  Clone ID: 701154811H1
ggagtgactgtccaggttgggcaattagggacgggaaaggagaaacacgaaaatgtttttccacatagtactggagcgaaatatgcagcttcatccacgctactttggtcgtaaccttcgcgataatctcgtttccaagcttatgaaagacgtggaaggcacttgcagtggccgacatggatttgtggtggcagttacagggatagagaacatagggaaagggctaattcgtgatggaacagggtttgtgac

SEQ ID NO: 13196 - DNA, 254 bp, Glycine max
  unsure (1)..(254): unsure at all n locations; Clone ID: 701154812H1
gaggagaagaaaacagaacagcattgcaacacatgggtgcttctggcaacaattttctccaagtggtcgccaagaacttcgatgttcttgctctgcccttggtcacccttgtttaccctttatatgcttcaatcaaggccatagagaccaggtctantactgatgatcagcaatggctgacttattgggttctctattcattgatcacactcttcgagctcacatttgccaaagttcttgaagtgcttgccata

SEQ ID NO: 13197 - DNA, 262 bp, Glycine max
  Clone ID: 701154813H1
ggaaatgatagaatattgatgaccctgagatctcagggaggtattaaggctttactgggaattgtaagatgcggacatcctgatgttctttcccaagttgcacgaggaattgctaactttgcaaaatgcgagtctcgtgcatctaatcaagggataaaaagtggcagatcctttttgatagaagatggtgcccttccgtggatagtacaaaatgctaataatgaagctgcaccaatccggcgtcacattgagcttgcactct

SEQ ID NO: 13198 - DNA, 260 bp, Glycine max
  Clone ID: 701154814H1
gcacaccaacaccaaaacaaacccactaagatggtttcctttgtatccttcctagtgctgcttcttgcagcccttatcctcatgcctcaagggcttgctacttactacaaaccaattaagaagccaccagtgtacaagcctccagtgtacaagccaccagtgtacaaaccaccggtttataagccaaaaccaccggtttacaagccgaaaccaccggtttacaagccaccatataagaagccaccatacaagaaaccacc

SEQ ID NO: 13199 - DNA, 259 bp, Glycine max
  Clone ID: 701154815H1
tggtataggtctttaaagtaacaacaataataacaaacgagaaggtaattgaaatgaaaattatctttttgaaacttgaagtgcaatgtaacgtgaactaaacgggatgatatctcaagtagaattcatttatttaattagttcaattttttcaagtccatctaatttgatttatgaatcaaattaatgaatcaatttccaaattaagtctcaaattaatttcaaatcaatttgcttcaatatctaatcttgtaggcaa

SEQ ID NO: 13200 - DNA, 263 bp, Glycine max
  unsure (1)..(263): unsure at all n locations; Clone ID: 701154816H1
ggcgctcacatngngttctctgcggcgcganctagatagggtttagaacctcgcagttacagaaaacatggcgacngnggtgccaacctccgaagnagacgctgcacnctccgtcgttcgattcgcctcngaacttgcctgggncgatgccgnnctcgaggttgctgagccccaagttagcagactctgcgtggaggctgaagaattcattgttatgggaaagtggttggagctagcatcattgatgattacctctgctgaat

SEQ ID NO: 13201 - DNA, 163 bp, Glycine max
  unsure (1)..(163): unsure at all n locations; Clone ID: 701154817H1
gtatagtgtaggatttgttggtattcgtgataaaaacacctcatcctattcattttgccatgacgggcgaactccagataaaggttttgaaagtaatgagaaattattaattcatccatgttactggcttggtttgaatctaaatcgtaatgcacttgcncca

SEQ ID NO: 13202 - DNA, 155 bp, Glycine max
  Clone ID: 701154818H1
gagagtggtggggtgtgcagaagagcgtcgcagttgtaaccctaattcagaagaagcgcagttcaagcgagtgacagccaccagccatgggtcgtatgcacagccgcggtaagggtatatcctcttctgctttgccctacaaaaggacacctcct

SEQ ID NO: 13203 - DNA, 267 bp, Glycine max
  unsure (1)..(267): unsure at all n locations; Clone ID: 701154819H1
gggagangatggccaanagatgaagtgttagcactgataaacctaaggtgcacaagtctaagcagcaatgaagagaaagaaggaaacaagggncctctgtgggagantatctcgcaagggatgtcancgctgggatacaagagaagtgcaaanaggtgcaaggagaagtgggagaacntaaccanntncttcaganaaaccanggttaatgttaataagagaangtcccttaactctaggacatgtccttatntccatcaactgngt

SEQ ID NO: 13204 - DNA, 237 bp, Glycine max
  Clone ID: 701154821H1
gttggggatggaactacctcagttgttgtattggctggtgaacttttaagggaggcagaaaagctggttgcagccaagattcatcctatgacaataatatcaggtttccgaatggcagcagagtgtgctcgtaatgctttgttggagaaggttgtggacaacaaagcagattctgagaaattcaggtcagacttattgaacattgcaatgactactttgagctccaagattctctca

SEQ ID NO: 13205 - DNA, 248 bp, Glycine max
  unsure (1)..(248): unsure at all n locations; Clone ID: 701154822H1
ggagtgcgtgctgtatagaatccgagatttgattagttagggaaattaaaacagaacagaaccctccgaaaacgcaaaaccctgtttggcgtcgtggccatggatttccaagtcgtcgttctcggcggtggcgttcccaagaagctcatccctctcgtttcgcaggagcttccgaacgcgttgcttccgttggcgaatcgccccgttctctcctangttctcgagtacttggagcttagcaacctcaa

SEQ ID NO: 13206 - DNA, 233 bp, Glycine max
  Clone ID: 701154824H1
ggtgggtggagcgtgcgaagggagagggggtcagtcaaggtcagcatagaaagactccctctcagttccgacgaggcggcgactctgcattcccacccacctaacttctctctctttctctctctagggtttcgccatttatccctaattaagctaatttcaatttcatttttaaggctgtgtttgaaagtgtgttcaatgggtactccggaattcccagatctgggaaagca

SEQ ID NO: 13207 - DNA, 252 bp, Glycine max
  unsure (1)..(252): unsure at all n locations; Clone ID: 701154826H1
ggagctaactgagtggccaatcaactggctcattgtacagtaaatattacataacctaagcgaccttagttcaagaaaaaaatctcgctgctttgctgaaccatctttgtatattacataaccctagtcttggctttctancgtacttagctcgatctcttatgtttaccaagcaataaaaaacacttcggaatgctcccaggcaatgttatcacctgtaactgttcgtccatttcaataagcttgcaatta

SEQ ID NO: 13208 - DNA, 256 bp, Glycine max
  Clone ID: 701154827H1
ggggttttgggtcctagaacaacatatgtgcttgctctaaaagacttccctggcacccatgaatttcttctgcttgatgaaggaaaatggcagcatgtcaaagagaccacagaaattggtgaaggaaaactgttctccccaggaaatttgagagccacatctgacaaccccgattatgctaagttgatcgattactatgtcaatgaaaagtacacattgagatacactggaggaatggtgccagacgtcaaccaga

SEQ ID NO: 13209 - DNA, 251 bp, Glycine max
  Clone ID: 701154828H1
gcatattctgaagtaagttattgtgatgtggccctcctcaaatgtacgcttggagtgacataacatggcggaaggcaagatgttatcagttgcttcatttaagtgttaacccaatattgcatagttgcttggattccaagagaagttttcagacaggaaggaggcattacagtccaataggaatctccaaaggatgaacaagagaaagctagctcatcaatttttatttccaatgtacaacatacaaaaga

SEQ ID NO: 13210 - DNA, 252 bp, Glycine max
  Clone ID: 701154829H1
gggctttagaagcagcctatgcacaagcatttgggaagagtatctctctttctgagcagcagctagtggattgtgctggccgtttcaacaactttggctgtaatggtgggttgccatcacaagcctttgagtacatcaaatacaatggaggacttgagacagaggaagcatacccctacactggaaaagatggtgtatgcaaattctcagctgaaaatgttgccgttcaagtcattgactcggtcaatatca

SEQ ID NO: 13211 - DNA, 256 bp, Glycine max
  unsure (1)..(256): unsure at all n locations; Clone ID: 701154831H1
aaagagacccggaaagggtgggaaccgcttttggaaatccattgggcttggatttaagactcccagggaagccatcgaaggaacctacattgacaagaagtgccccttcactggcaatgtttccatccgtggccgtatcttggctggaacatgtcacagtgctaagatgaacaggactattattgttaggaggaattatctccattttatcaagangtaccagaggtacgagaaaaggcntcccaaattctgctct

SEQ ID NO: 13212 - DNA, 194 bp, Glycine max
  Clone ID: 701154833H1
gaggagaagaaaacagaacagcattgcaacacatgggtgcttctggcaacaattttctccaagtggtcgccaagaacttcgatgttcttgctctgccctggtcacccttgtttaccctttatatgcttcaatcaaggccatagagaccaggtctagtactgatgatcagcatggctgacttatggggttctcta

SEQ ID NO: 13213 - DNA, 158 bp, Glycine max
  Clone ID: 701154834H1
gatggcaatggaaccatcgacttcccagagttcctcaacctgatggctcgcaagatgaaagacaccgactccgaggaggagcttaaggaggctttccgtgtgttcgacaagggtcagaatggtttcatctctgcagctgagctccgccatgtcatgaa

SEQ ID NO: 13214 - DNA, 259 bp, Glycine max
  unsure (1)..(259): unsure at all n locations; Clone ID: 701154835H1
ggggatggaactggagagcgcaaggnatgggataggatctatgattatgatgtctacaatgacttgggcaacccggatagcggtgataaatatgcacgccccgttcttggtggttcagccttaccttaccctcgcagaggaagaaccggaagaggaaaaactagaaaagatcccaacantgagaanccgagcnattttgttancttccaagattgaagcntttngncnnttnaaancccncngttttcccnccnttggg

SEQ ID NO: 13215 - DNA, 248 bp, Glycine max
  unsure (1)..(248): unsure at all n locations; Clone ID: 701154836H1
gatctattattattcanagccaatnntttntcagatatcangtnatgacgagtttgcnctttgcagagatggaaaagagagagaganagatcatggtggctgtggatgagagccaagagagcatgcntgcnctctcctggtgcatcaccaatcttatttccganaccaacaagcttgtgctgctttatgtcaggccaccttctgctttctactccttggatgccgcaggtataacttttcctccgatg

SEQ ID NO: 13216 - DNA, 244 bp, Glycine max
  Clone ID: 701154837H1
ggaagaacatgtggctatgtggcacctatatgttgattagtgccttatccagcaactgttgtgttgacagttgtggtggtcgttcaagatttttaacctgaaatcttcacttcacatctctctatcctctcattctcatcaccaacaagtgtttctgtaaccatggcatccaccactctatcccctacaaccccttctcagctatgctcaggaaaaagtgggattttcagttcctcacaggcac

SEQ ID NO: 13217 - DNA, 245 bp, Glycine max
  unsure (1)..(245): unsure at all n locations; Clone ID: 701154838H1
gagagtggtggggtgtgcagaagagcgtcgcagttgtaaccctaatcagaagaagcgcanttcaagcgagtgacagccaccagccatgggtcgtatgcacagccgcggtaagggtatatcctcttctgctttgccctacaaaaggacacctcctagctggctcaagatctcttcgcaagatgtcgaagaaaatatctgcaagtttgcgaagaaaggtttgaccccgtctcagattggtgtcattc

SEQ ID NO: 13218 - DNA, 244 bp, Glycine max
  unsure (1)..(244): unsure at all n locations; Clone ID: 701154839H1
ggattttagattagagattgagagggaggagtacgtggaaggcattttgacctatcgctcgcgcgaaaccaaatctctttgtttctcttaattctttatagtagcaagtgaagttgaagttgcaggtgtgtgtctcatggcgtctgttattcctcgatgccttcctcccccaattccaattgcacaccgacgaaaggcgcaggtggtgaaatcgtgtcaccaaaacgagagctctgntcggctc

SEQ ID NO: 13219 - DNA, 250 bp, Glycine max
  unsure (1)..(250): unsure at all n locations; Clone ID: 701154840H1
gactcaccattctttgtctcactacaacacaggtgtcaatttcaccctcagaaaatgaagaatttcttggtttctttgtactacttgtttcctgcaattattgcaatcattcttgtgctgctcactccaattccaagtgcacagctaacgacaagtgagaacagaatccttctccaagttcagaagcttcttgaataccctcaagctcttcatgggatggaccancttgaccaatttctgctccctccct

SEQ ID NO: 13220 - DNA, 250 bp, Glycine max
  Clone ID: 701154842H1
ggattggcattaggttgatctgaaatacgcaattgacatggcgagcgcgatggtagaggacgcgaacttcgaagatgaccaactagccaatatgaccaccgacgacatcgtcagagcttctcgtcttctcgacaacgagattcgcatcctcaaggaagagttgcagaggaccaatttggaattggaatcgtacaaggacaagatcaaggagaatcaggagaagattaagctcaataagcagttgccctac

SEQ ID NO: 13221 - DNA, 255 bp, Glycine max
  Clone ID: 701154843H1
ggacgaagaagtgaagagaagagaagagaagggatttggatctgaaaagagaagatggggggaggaatggaagcaaacaagaacaagttcatagaggattggggcactgccagagagaatctggagttcaatttccgttggactcgccgcaaccttgctcttgttggcatcttcggcatcgctattcccgtcctcgtctacaagggcatcgtccgtgaattccatatgcaagatgaagataatggtcggccgtac

SEQ ID NO: 13222 - DNA, 249 bp, Glycine max
  Clone ID: 701154844H1
gttttctcgaggagggccaatggattctggagggagacataggggtggaaggggccatgatagtttggctgggacaaccgttaaagtacgccaaggtccctataaaggttaccgtgggcgtgttatagatgttaaaggcacaacagttcgtgttgagttggaatcccaaatgaaggttgtgacagttgaccggaaccatatatctgacaatgtggctgtaaccccatatcgtgatacatctcgctatgg

SEQ ID NO: 13223 - DNA, 250 bp, Glycine max
  Clone ID: 701154845H1
gacagtaacaaagactccttttccattttccttcctttgggttgtgttctgtgttattgggttggattgtgttgtgtgttccatacaactccaactagtcagagattcttgtctgggctacattgcactttgcaccccaaaaagtgaaaggaagagaggcataaacaccccaaaaaatggagagagctctcactaaagtcagcagcttgaaggtggggttggggagttcatggatctccaagaaggccaa

SEQ ID NO: 13224 - DNA, 261 bp, Glycine max
  Clone ID: 701154846H1
ggaagcagagataagtgtctcaacaagtgatatgcaaagcatgtctctctgtgcttcactctcctccacagcttcacacctcacttcccttgcctccgtctcttcttccacctctccactttcccgcaaattttctctcactttccgggaaaaaaacagaaccccaattgcaccacctcacaagctccccttcttctcagcaaggcctgcccccaccagagtagtgttggtgaagtctcaggccacagcacctgcttcttc

SEQ ID NO: 13225 - DNA, 259 bp, Glycine max
  unsure (1)..(259): unsure at all n locations; Clone ID: 701154848H1
gaacacgcggcttccgccggaggtgaaccgcgtgctgtacgttcggaaccttcccttcaacatcaccagcgaggagatgtacgacatctttggcaaatacggcgccattcgccagatccgcatcggcaccaacaaggacactcgcggaaccgctttcgtcgtctacgaggacatctacgacgccaaaaccgccgtcgaccacctctccggcttcaagtcgccaaccgctacctcatcgttctctattatcaanaggnga

SEQ ID NO: 13226 - DNA, 181 bp, Glycine max
  unsure (1)..(181): unsure at all n locations; Clone ID: 701154849H1
gaggacatgatacggaggggtatagttcctcagtatctgactttccagagaatgaaagctgatttaaagaaacaaggtatgactgaaatggctcaaaaactttgcaagttgatgtcttctgttccttattctccgaatttgccaaatacttntggtgaantcagagaagatgcttnncccc

SEQ ID NO: 13227 - DNA, 142 bp, Glycine max
  Clone ID: 701154850H1
catctaacatagattctcgaagatcaaaattaaagagactatgcaatttcaaaaggatgtcgagatcactcgtcaaacttaaaggatgtctcaaataggaataagaaggatcgatgatggttctatgtcagtgttaacaatg

SEQ ID NO: 13228 - DNA, 244 bp, Glycine max
  Clone ID: 701154851H1
ggagttgtgacggattgatccaaagttgatggagaggatctaaatctgagttttgacgaactgggaagttacggcggaagaaaacctcttgcagttgttgacttgttggtgcaggtagttgaatatagtacattttgtcacacgaaagtttctgtgttgcaatggaggagctgaaatctgctatggaggagcacatagaccttatggcagatcttgttcagaagctctcttcagatcttcgcgc

SEQ ID NO: 13229 - DNA, 243 bp, Glycine max
  Clone ID: 701154852H1
ggaggtgagggttggttcatttgatctgcgactgagagaagagaagagaattgtgatggggggaggacagggtcacggcacaacctacaaaggtgttaccattcatcagccaaagcgctggcacactatcaccggcaagggtttgtgcgcggtcatgtggttttgggtattctacagggcaaagcaagatggtcctgttgtattgggctggagacatcctgggagggtcaccatgatgatcat

SEQ ID NO: 13230 - DNA, 247 bp, Glycine max
  unsure (1)..(247): unsure at all n locations; Clone ID: 701154854H1
ggatccaatcaagaatacaataacatagcatagagtgagaagtgagaagagaaaaatggcaatctccatacccagtagacaacttttcatagatggagagtggaaagtccctcttctcaacaatcggttnccgcatnatcaaccccgctactgaagacatcatagggcatattccagccgctactaaggaagatgttgaccttgcggtggatgctgctaaaagagccttttcccataacaaaggcaa

SEQ ID NO: 13231 - DNA, 248 bp, Glycine max
  Clone ID: 701154856H1
gtctttgcaaagattcaatagataaaatgcatgaaaccttgattctagatgtgtgctttaatgcatgggcataacattatcatcctatgtctagcaatggtttcattataatatcttttccttttagttctattagaagttatcctctgtcaagcgcctaacctctaaaactaatgcatgcatatcttctttatatttttattaaaagtaattctctgtcgagtatctaacccctaacataatgtaaa

SEQ ID NO: 13232 - DNA, 249 bp, Glycine max
  Clone ID: 701154859H1
gaccactttccacacccaactgcgtaggagctcaaagctttttgacagtttgagcatttcagacaaacatgggggatgatggaaagaagattagtggagagggggggttagtgaaggttgagccaaaacccagcaatggtttcacctcaaaagtggttgatttgttggagaaattggtggtgaagtccttgtatgattcttcactgccccatcactacctcactggtaattttgctcccgtgagtgaga

SEQ ID NO: 13233 - DNA, 249 bp, Glycine max; identical to SEQ ID NO: 6176
  Clone ID: 701154860H1

SEQ ID NO: 13234 - DNA, 262 bp, Glycine max
  unsure (1)..(262): unsure at all n locations; Clone ID: 701154861H1
aacctaacaacgccatagcgtttcctaacccatcgtgcgaggtccctcgacctccgcacaaccccaactccaaggggctgtgcctgtngccgtcgtcttccacgctcatgtcggaacccgacatccacgcgccgccgttcctgctccagcgcccgccgctcctgcagtcggcctcgccactcttcaagcagcgatcgtggtcgccggangccttccgcgatgaggcgtggctccggcgcaaggggaatgcaagaaccgccgc

SEQ ID NO: 13235 - DNA, 253 bp, Glycine max
  unsure (1)..(253): unsure at all n locations; Clone ID: 701154862H1
gggattaaagaaaattcttttattgcttgttttcttacagaacttgtctcagctagcttctatcaattatgatctggtgattaagagctccaaggaatcaactcaatgactccaacccatctatttcaagatattgctaaagagggttataagtttctccaagcgattatatatatatatcaccaaagacaanncntctaaataggtggatttccagnntaaaaaagtattgtgcgcacanatnctgannctg

SEQ ID NO: 13236 - DNA, 254 bp, Glycine max
  Clone ID: 701154863H1
ggttttgattagggtttgtcattagcacttcttcttttcacactgccgctgcaacaatggcttcagagaagaaactttcgaacccaatgagggagataaaagtgcagaagctcgttctcaatatctctgttggcgagagtggagatcgtctcaccagagccgccaaggtgttggaacaacttagtggccaaaccccagtgttttccaaagcaaggtacactgttcgttccttgggattagaagaaatgagaaga

SEQ ID NO: 13237 - DNA, 260 bp, Glycine max
  Clone ID: 701154864H1
tacatggaattctgtgatgattctgaggcaactttcagaagagccttggacttgctgcagaagcaagcaatggtgaaggaaggagaagaagtagcacttgtacaaagtggtaggcaacccatatggaggttccaatccacgcacaatatccaggttaggaaagtgtaaaccagaagaatggagagtggccacgaataatgtttcaagacacagtacgtttagcttcacaagagcatcatcttagtgttgcctcttagttg

SEQ ID NO: 13238 - DNA, 230 bp, Glycine max
  Clone ID: 701154865H1
aagacgacagaagggtacggctgcgagaagacgacagaagggtacggctgcgagaagacgacagaagggtacggctgcgagaagacgacagaaggggtggatctttttggtgactctgttggtacaaactttatgccccatatcattacagtcaatactggtgaggacttacatgaaggttatatcttttcccaacaaggaccccgtggcatatgcatcctatctgctag

SEQ ID NO: 13239 - DNA, 244 bp, Glycine max
  unsure (1)..(244): unsure at all n locations; Clone ID: 701154866H1
gcaaaatcagatagcatacaattgggtggagaagaacgtccattggttgccccaaaatcctcaccagagatggctgtaaatggatcttaagctttcagaatcatatgcaggaagacagattatttgttttatttgacgtatagatttgctggtgncttagtggttctgactacataaatagagctttgagacgaaggnnntttncctacgggggnaaattctgnttatgcgttgcagggggggg

SEQ ID NO: 13240 - DNA, 243 bp, Glycine max
  unsure (1)..(243): unsure at all n locations; Clone ID: 701154867H1
ggaagcaccttgcactgcaaaagaaaaaaacaagaagaaaaacacagcaatggagggtgggaacaacagcagcatcaacagcaaccctgaggagttggcggtggggtgcttgctttcgatcaggacaacgttgggcgacgaattcgaaggccaggtcgtgaccttcgatcgcccctccaacatcctcgtactccaggagcttccaaacctagccctcgtcgaancttaggttgctcaaagcna

SEQ ID NO: 13241 - DNA, 242 bp, Glycine max
  Clone ID: 701154868H1
ggatgctgttgttattgttgatggtgttgcggtgaaagaatctgcgatacgatacgcacacacatcatcatcacatgcatattatgcgtatatacgcgtagatctggaagagagggtagaaagaacagagagagaagaagaacaacaacgcaaagcggtgttcgttccgtacgcactcgcgcacgcacgcacgcacgcacgaggccatgtcgggattcagagacatcacggttttcctcgtc

SEQ ID NO: 13242 - DNA, 243 bp, Glycine max
  Clone ID: 701154869H1
actattggaagtaaaggttttggaagcccaatttcttttgacaattcatattataaggttcttttggagaagccgtggacgtcttcaggtggtatgccgagtatgattgggcttccttcagatcacgctcttgttgaggatgatgaatgcttaaggttctttatctttgacaacctcttatgctactcttaatatgaatttgtcccccactttttttcttttctggctaagcactaaaatttt

SEQ ID NO: 13243 - DNA, 241 bp, Glycine max
  Clone ID: 701154870H1
gctgcgttgtgcgtcggagctgtgtctggggaaatttgcgttgtttttcgcggtacagctcacacacactgaacggtaagtatggcggacaaggctgttacaatccgaacccgaaagttcatgaccaacaggcttctttccaggaagcagtttgtcgttgatgttcttcatccagggagggcaaatgtttccaaggctgaacttaaggagaagctagctaggatgtatgatgtgaaagacc

SEQ ID NO: 13244 - DNA, 251 bp, Glycine max
  Clone ID: 701154871H1
ggagttgaaggggttagggtttaggaagggatggaagcggcagtggtggacgtcggctctaagctcctcaaagcgggctttgcaattcctgaccagactcctgccatgataattcccactcagatgaagcaattactcgatgatggatccgtcgcagataattcactggctgacaatgtcaccgttgatcccgttgtgcgaggatttattagagattgggatgcaattgaggatttgttgcaccatgtttt

SEQ ID NO: 13245 - DNA, 234 bp, Glycine max
  Clone ID: 701154872H1
gcctgctggaccttacatgccaagctgtagccgacatgatcaaggggaagactcccgaggaaattcgcaagacctttaacattaagaatgacttcacccctgaggaagaagaggaagttcgtcgggaaaatcaatgggcatttgaatgattttgttgagctcataaaatatgaatcaaagatctgccatgtggatttatgctatgctgtttgtttatcaaagatcttcctgtag

SEQ ID NO: 13246 - DNA, 245 bp, Glycine max
  Clone ID: 701154873H1
gatccacataaacatcaacatcgaaaggttgttaattttcaactcaatggttcttctctcaggttttgtttccatgttgatactttttggcatggttttggtagttggggtgaatattgtcccaggggttgaggcaaaggcaagggctttctttgtatttggagactcactggttgacagtggtaacaacaattacttagcgaccactgcacgggctgattcccctccttatggcattgactatc

SEQ ID NO: 13247 - DNA, 206 bp, Glycine max
  Clone ID: 701154874H1
tgttttgcttcctctaatctggcgaatcattcgttctagcaaattttgccgaaaactccaaaaccctcttttagtaaactcgattaacgacaatctcaatcttctacagcttatcctatatctctctcttttcttctcttcccccaacaacaatttcaatcaaaactctctctcaggtgattaagagaatcagagtttgcttatcc

SEQ ID NO: 13248 - DNA, 256 bp, Glycine max
  Clone ID: 701154875H1
gatcgcaccattaagttttatactgaatgttttgggatgaagcttttgaggaaaagagatattccagaggagaaatatgccaatgcttttcttggatttggccctgaacaatcccattttgttgtggaattaacatacaattatggggtgacctcatatgatattggaactggatttggacattttgctatcgcaactccagatgtttacaaattggttgaagacatccgggctaagggtggaaatgtcaccaggg

SEQ ID NO: 13249 - DNA, 244 bp, Glycine max
  Clone ID: 701154876H1
gacggacgagggtttcgtttcgggtttgacgttgttcacaatcactttctgcgcttcactcactcccttcgtgcggttttctttctttgtcgaactcgtgcgaaaatgcgtgagattcttcacatacagggagggcaatgcggaaaccagatcggagcgaagttctgggaggtggtgtgcgcggagcacgggatcgattccacggggaggtaccagggggacaacgagttgcaactcgagcgag

SEQ ID NO: 13250 - DNA, 241 bp, Glycine max
  unsure (1)..(241): unsure at all n locations; Clone ID: 701154877H1
ggggagtgggtggttgggtctgaagtctgaacaaacagcctgaaacgacgactttccaacacgtccggaaaagaaaataggacagaacatattgtnnnnnnnnnnnnnnnnnnnacaacagacaagtttgttgttcctgttctaatctctggaccatgtcatacaactgaatctaattgcaattcctgtgagccgtggcaaagcttttgaatttagtgcctctcctctctgtttacccttc

SEQ ID NO: 13251 - DNA, 256 bp, Glycine max
  unsure (1)..(256): unsure at all n locations; Clone ID: 701154879H1
ggggaacatggagattcttcggcctggcactgatcagtttcatcccagtagttgtgaatatgataatggggtggatgccattgaatgtccacaatactatgtggtgtggaatatgaacatgaacacccacatctatccggaattcgttgttagctttaaagtctcgtctgacgctgaaggtcatttttgtggaagtgagggtaagaatntttctggggttaatacagcctgtgacggtcctcatggcttgttaaat

SEQ ID NO: 13252 - DNA, 254 bp, Glycine max
  Clone ID: 701154880H1
cactattatatattaatgtattttatgaagggagtatataaatttcataggcttgcttgattgaataaaatttcatagggttgcttgattgaataaaatgtatggatgttataaattttttgggtatcgtgttcaatttttatagataaaaaatattaatgtagttttatcatgaattttaataatcttatctgcggtttttaatatacaaggggtctaaacgtgttgcatctgttgaaagtttgaaactgtgt

SEQ ID NO: 13253 - DNA, 248 bp, Glycine max
  unsure (1)..(248): unsure at all n locations; Clone ID: 701154881H1
ggcagcgcttgagaccaagccccactcaaccaccacaccactctctctgctcttcttctacctttcaagtttttaaagtattaagatggcagagacattcctatttacctcagagtcagtgaacgagggacaccctgacaagctctgcgaccaaatctccgatgctgtcctcgacgcttgccttgaacnggacccagacagcaaggttgcctgagaaacatgcaccaagaccatttggtnatggtctg

SEQ ID NO: 13254 - DNA, 246 bp, Glycine max
  unsure (1)..(246): unsure at all n locations; Clone ID: 701154882H1
gaacacgcggctgccgccggaggtgaaccgcgtgctgtacgttcggaaccttcccttcaacatcacgagcgaggagatgtacgacatcttcggcaagtacggcgccattcggcagatccgcatcggcaccaacaaggacactcgcggaacggccttcatcgtctacgaggacatctacgacgccaaaaccgccgtcgaccacctctcnggnttnaacgtcgcnaaccgctacctcatcgttctcta

SEQ ID NO: 13255 - DNA, 244 bp, Glycine max
  Clone ID: 701154884H1
ggaaggaagcagaggaagaagaaggaggagatcttgagagatcaggtcgcaactgatcatggggagagaagttacaggaatgcaagttgtggacaagaagccaaatggcgtaataccagcttcaaatggtagttctaatgataaagtgtgcatttctcctaaaaggacagcagctaaggttcaggcgaaggatcacgaggtaaatgaatgtaccaaagctaactcttttgttgaaaaaagccaa

SEQ ID NO: 13256 - DNA, 240 bp, Glycine max
  Clone ID: 701154885H1
ggtgcagcatcgtagaggaataagggaaaaatggtgtcgctgaaactgcagaagcgcctctccgcaagcgtgctcaagtgcggcagaggaaaggtttggcttgaccccaatgaagtcaacgaaatctccatggccaattctcggcaaaacatcaggaagttggttaaggatgggtttatcatcaggaagccaaccaagattcactcccgctcacgtgctcgtaggatgaaggaggcaaag

SEQ ID NO: 13257 - DNA, 241 bp, Glycine max
  unsure (1)..(241): unsure at all n locations; Clone ID: 701154887H1
gaagtgtgagtgatatttgagcttaaaccctagccgctcttctcttcattcttcactttggaaacaatcataatggcgttctgtaataaggttggaaatgtcttgaggcagggtgctgctcgcagcacacatgcccctgttgcgtccatgcttaattacatccgctgcatgtcttcaagcaagcttttcattggaggcctttcatatggagttgatgacnngtctcttaaggatgcatttt

SEQ ID NO: 13258 - DNA, 253 bp, Glycine max
  Clone ID: 701154890H1
gactactaccaagtgaaaaagcaactaagcatagtgtataagaaagggagaaaaacaagtgctgtgtagagagaaaaatggctaggtggtgcatgatcttggtggttcttgctcttgccgtggttgcaagtgccagaaacatggacaatgacgctggtttggaggaccagaagaacttccttgggtatgggttttcgggagttggcaacaatggccttccctttggtggagtgggttctgggtttgatggtaa

SEQ ID NO: 13259 - DNA, 243 bp, Glycine max
  unsure (1)..(243): unsure at all n locations; Clone ID: 701154891H1
ggagagaacaaagtttagggttgtgttgttgggatccaacacgaacacggcacaaacaaagaacaaaggatgaggatgaagagggttttcgttgtttacagtgttttgttgctgctggtccagttttggcttggtgaggctgagacattctcggacgatggaaaggttttggttttggacgaatccaacttcgattnccgccatagcctccttcgatcacatcttggttgacttttacgctcc

SEQ ID NO: 13260 - DNA, 222 bp, Glycine max
  unsure (1)..(222): unsure at all n locations; Clone ID: 701154892H1
gataataacatattgnctgactcaagggtacacctaatcatggtctgctgtttcaagccccttgttcttcaggcctactgatgttgattgggcatttgaccccgattttgggatcttcacatatttgttttgcaaattcttttggtctcggtggtctaagaagcaaactttggtgacccaatggagcaaggagggagagcatttgagtttgacacatacagc

SEQ ID NO: 13261 - DNA, 246 bp, Glycine max
  Clone ID: 701154893H1
gggaggtgattgaacataatgaacgaaaatcgagagtaaaaggcgaaggagcggtgggagcgatgcgcatggttgttaacgacgcattcctcccattaactaaatggctatgtctttacctcttcgttttcattcctcatctttctctctcactgtaagttccgcctctctctgatggtacatcaataattgtcttcccgcatctataagtcaaagatccaaagagtaacaatttgaaggacataa

SEQ ID NO: 13262 - DNA, 245 bp, Glycine max
  unsure (1)..(245): unsure at all n locations; Clone ID: 701154894H1
aaagagacccggaaagggtgggaaccgcttttggaaatccattgggcttggatttaagactcccagggaagccatcgaaggaacctacattgacaagaagtgccccttcactggcaatgtttccatccgtggccgtatcttggctggaacatgtcacagtgctaagatgaacnggactattattgttaggnggantntcnccattttatcangaagtaccagnggtacganaaanggccccccac

SEQ ID NO: 13263 - DNA, 255 bp, Glycine max
  unsure (1)..(255): unsure at all n locations; Clone ID: 701154895H1
gaagccaaagaaaggaacaagaacaagaacaacaaagtaacgtgaaagagagagagatggaggcgattgttccagtggtggatttccagaggctttcagaggaagaggagcgcaagaagctgagaaaaacatgtgagaaaccagggtgtttcagaatcatcaaccactcaattccactaacactcatggctgacatgaagtcagtggttaaatacttgcatgaccttcccanggaattcaaattgcgcaanaacc

SEQ ID NO: 13264 - DNA, 249 bp, Glycine max
  unsure (1)..(249): unsure at all n locations; Clone ID: 701154896H1
gggtgtttagtgggtacccttgccttcataggaagtgagaaactaggctagttagtcccattggaatttttttttttttgtggctgaagaaggtgaaaagggggcaagttgcnctcttcaaggantttnaagggtgtcaacttgtgttttganacnctgaggttgaanctgcattttttttaagggtggggatgggttcnagttgtggttgtggtgtaanacttgttcttgttttcngctatggggngg

SEQ ID NO: 13265 - DNA, 252 bp, Glycine max
  unsure (1)..(252): unsure at all n locations; Clone ID: 701154901H1
gcacaagtnagtttgttgatcnagataactagaaacantgtgatgaaaatnaaggtccttgttttcttcgttgctacaattgttgtagcatggcantgccatgcgtacgatatgttccctctccgaangaacactggctatggtgcccgtactccggaggtganatgcncaagttgggaggcttnctgtggaagcacacancatctttggcttngagnccatcctgnggntggntttaagcaacaaaggata

SEQ ID NO: 13266 - DNA, 246 bp, Glycine max
  Clone ID: 701154903H1
ttttctaattaaatataaagagattttcagcagagatctaagagttaagactcaactctggtataaaattggttggactgttggcttggcataacaaaataaaaagttaaattaatgtcgtaacagtagttaagtacattatttcatttcttttaaaaaaatcacttattattaagtcaagagtactaatttgtcaatatttaaataatgattttaattatgatttgaaaatataacattaaaagc

SEQ ID NO: 13267 - DNA, 244 bp, Glycine max
  unsure (1)..(244): unsure at all n locations; Clone ID: 701154904H1
gccgcatgtattgtattccttgaaacttttgtcactaaacatgattttcttttttgttgctgctttactggagaaaacaactaaagtgcgtggtcagtatctaaatcatccatataaagagctacataaaaaaaaaaaactagttattctacggcacgggtncatgaacangacccttaagcncatnttttnngatttgtnncctttnnnatgnattttaaaaaaaaatnctaaataccctttt

SEQ ID NO: 13268 - DNA, 243 bp, Glycine max
  Clone ID: 701154905H1
tccagatatgaacaataatatcaataatatcaatatcatattaatagataaattaaaatcattacataaaaaagagtttgatttgcagatcttccaatgactttagcctctcattatcatgaaagacttacaaatataaaagtgggatgaagggaacgaaaatggaagagaaatggatcggccatagctttggaaaatgaattttccttccacactgccttctttgctatcctatttgttctt

SEQ ID NO: 13269 - DNA, 243 bp, Glycine max
  unsure (1)..(243): unsure at all n locations; Clone ID: 701154908H1
ggaattgtaacagtgatccgcttgacaaggaacatgccaaggaaaatcactgaagcaatagtgtatggcagcagctcagggtattatgatggcactatgatgaaagcacccaccatttcatgcaatgattacatggcagtgatgangcgcatggctgaacttgangannaagtcactgncctcagcatgagacctgtcattccacacgacanagacgantgctgaatagtgctcgtgcagagt

SEQ ID NO: 13270 - DNA, 233 bp, Glycine max
  unsure (1)..(233): unsure at all n locations; Clone ID: 701154910H1
ggcgacaccagatgatggagacgacggcgaangaaacgctgtcgttgcgccaatcgcggcgttgttgttggtggtgctactcgcggcgagtgtggtggtggaggctcaggagaactcggacgtgaagacgctggtgaagcacatgcacgggaagaagtactgcgacaaaggatgggaatgtaagggctggtcaatttactgttgtaacctcactattactgattatttccaga

SEQ ID NO: 13271 - DNA, 236 bp, Glycine max
  Clone ID: 701154912H1
gatggacccaaattttaagaacttggctttgcttccttcaaagtgaggtctctaagtttcactttctttgcatagggcaacctcctttctctgtgactctgaggtccattgaatatgtctccgtcgttggatcttcctcccaagggtggcttcagttttgatctatgccgaagaaacgcaatgcttcaaaacaagggcctcaaagccccaacctttctcaaaactggcaccactat

SEQ ID NO: 13272 - DNA, 184 bp, Glycine max
  unsure (1)..(184): unsure at all n locations; Clone ID: 701154914H1
ggagctaantggangaagataataaaggcatnnggntggtggccganacaggtaggcncgcntcgattagnttccgcgtggttcgntttcttcgacatttgggctcntcgtctcgccgtnttctccaacactnnaatggcnnangttcatnggcgcacatttggaacnncagacactanngacc

SEQ ID NO: 13273 - DNA, 238 bp, Glycine max
  unsure (1)..(238): unsure at all n locations; Clone ID: 701154915H1
ccctatttcaaaagatagtaaaacttaacaaggcatgacataaatgtgcaatagtccccaatcaataatggcaaaactatggattaacaatcaaaagctaattccctccacagcaatcccaaaaacagcatccttgaacgtaagnatccacatccaantatcttctagtctcctctcancccanaaacaacaataatannattnaccannatcantcancagccaagtatcgtccaaa

SEQ ID NO: 13274 - DNA, 242 bp, Glycine max
  unsure (1)..(242): unsure at all n locations; Clone ID: 701154916H1
ggataagaggaacaagaggttacatggcaccggaatgggttttcaacttggccaatcacttccaaggtggatgtttacagctatggaattgttgtgttggagntgntaacaggnaggagcccancaacaggtgtcnaaatcacagagttagaagcanagtcgcctcattcatggggaagttggtgacatgggtgagggananaaggaagaaaggntcngaatgggttcatctngggtggttc

SEQ ID NO: 13275 - DNA, 254 bp, Glycine max
  Clone ID: 701154917H1
gtacaaggttggagctcctgctcgtgttggtttggttgccccaattgatgttgttgttcctcctggcaacacagggctcgatccctcccagacctctttcttccaggtgctcaacattcctaccaagattaacaagggtactgttgaaatcattacccctgtggagctcattaagaagggagacaaggttggatcttctgaagctgcattgcttgccaagctagggataaggcccttctcgtatgggcttgtgg

SEQ ID NO: 13276 - DNA, 248 bp, Glycine max
  unsure (1)..(248): unsure at all n locations; Clone ID: 701154918H1
gacaccaacacatccattcattgtcttaatgttagcaatgtcttcctctttctccatccatttcttcctcctcctctcaatagcccttttctcagtttgttgcttcagcagcatctcaagctcccaccaccanatcacacccctatatccttcccattaaganagaccccgcaacaaatttgtactacacttcagttggcattggaactcctaggcacaactttgatttagtcattgatctttctggt

SEQ ID NO: 13277 - DNA, 242 bp, Glycine max
  Clone ID: 701154919H1
gatactcaattcattttcttcttctgcttcaccttctcttctcttctctcatagggttagggtttttttctcttcattgctctctctgtcgttttatttccatggctcagcaagatgctcagaatggtgggtcggagaatgccgctgctgcggtgtcgtttgtcgctttgaagccgcagctcctcatcgaagctcccaaagcgaacgacgccgttctgttctacaaggccgcgtttgccgct

SEQ ID NO: 13278 - DNA, 241 bp, Glycine max
  Clone ID: 701154920H1
gaaaaggaaaaaaaggcaaaatgggtaaggatctgagcgatgagcaagtgtcttcaatgaaggaagctttctctttattcgacacagacggtgacggtcggatcgcgccgtcggagctggggatcctgatgaggtctctgggagggaacccgactcaggcccaactcaaagccatcgtggccgaagagaacctcgcggctcccttcaacttcccccgattcctcgatcttatggccaaaca

SEQ ID NO: 13279 - DNA, 245 bp, Glycine max
  Clone ID: 701154921H1
ggagaaaaatttaaagaaatcaacacacacaaacacaacaacatatggaggtgctaagggtgcaaaccatagcttccaaatccaaagatgctgccatcccagccatgtttgttagggcagagacagagcaaccaggcatcacaaccgttcaaggggtgaaccttgaggtgccaattattgattttagtgacccagatgaagggaaagtggtgcatgagattttggaggcaagtagggactggggc

SEQ ID NO: 13280 - DNA, 242 bp, Glycine max
  Clone ID: 701154923H1
cagacccaaaaacactatagcatgatagtgaataactggatagcagttattttgaaattgttatccactttatataaagtaaatatatactatacaaatataagttctcaaaaatgataaaaattactcaataattgacattcataattcataattgacaataaaaagtcataggtgtctcagcaagtaaataccaacaaaagtcaaatacaagtcttctttatcattttcactactgtaga

SEQ ID NO: 13281 - DNA, 221 bp, Glycine max
  unsure (1)..(221): unsure at all n locations; Clone ID: 701154924H1
ttgagcaatgaatttgnaaatagggcaaaagtaatggataaggaattaatttcnctggatatattagaaaaccganttcgattgtctaatgatgaaactaaaacaaaatatttaactaaaatatatgancctttcctgaacggacgctttcgtggacaaatcgaaaatgttttttcaacctcaatccaatatgaaaaaaatgaaaaaaaantaccttttgt

SEQ ID NO: 13282 - DNA, 246 bp, Glycine max
  unsure (1)..(246): unsure at all n locations; Clone ID: 701154925H1
aagaanaagtaataaattaattataaagtagtaaaaaaaatataatgatataaaccgaaccaaacgcaccctacgcacctactccatcctccgcttcgtgacttgcagcaattcccaatggcttccgtttccaagctctcaacgccaaatccacttgcttccttatcagaagcgcttcgcccccgagattctcgcttcctcaccttcaaaccttcttccatcgttttaatcacaaaactaacctat

SEQ ID NO: 13283 - DNA, 222 bp, Glycine max
  Clone ID: 701154927H1
gtacaagaactatgattttggcagatgcccacgagtttactgctctggacaaccttgtattccagttggtcagtcagacatccctaggtctagtactgtgaaaatatactgccctaggtgtgaagacatttactatcctcggtccaagtatcaaggcaacattgatggagcttattttggaactacatttcctcatctgttcttgatgacttatggacaact

SEQ ID NO: 13284 - DNA, 247 bp, Glycine max
  Clone ID: 701154929H1
ggggacagttaaagaggcctgatcatgctgacctgcggtacaagtgcaggacatatgcacgtcttctgcaacatttgaaggttaaaatttgggattcaggagctgtttacttttagaaaatgttttctgttacttttgagtacaaaaatgtcacattgttttcactttgtttcctattttgaaagctttgagaaaagttgatttccctgtttcttatacaaatatttgaaaatcttaaagtataaac

SEQ ID NO: 13285 - DNA, 240 bp, Glycine max
  Clone ID: 701154930H1
ggcacttgctaaagtctgatacttgcttcttttttctttcctaggtgtgaagctttggaggaagaaaattcaactcaatgaggcactgctgaagaagaggttcaaccatcatgctgctgtggctcatgatgcagatcagaaaccccacatgtgcgatgctgtgatggatctcttgcatgagattcactctccagtctccaaaatgcaagctggatgccagatctcaaaccagtgctagca

SEQ ID NO: 13286 - DNA, 240 bp, Glycine max
  unsure (1)..(240): unsure at all n locations; Clone ID: 701154931H1
gcagtgaaagaaacaacaccagatggtgaggaggatcaagagaaaggagtgcctgcattttggcttactgccatgaaaaacaatgaagtgttggctgaggagatttcagagcgtgatgaaggtgctcttaagtatctcaaagntatcaagtggagcaggatnganaacccgaaaggnttcanacttgactttttctttgncacnaacccttnttttatcaattctgtctnanaanaacat

SEQ ID NO: 13287 - DNA, 155 bp, Glycine max
  unsure (1)..(155): unsure at all n locations; Clone ID: 701154932H1
gaagaagaagaaggagcatggccatgagcatggccatgacagcagcngcagcagtgacagtgattaaactgctgcatcacctatatatttaaaaggtttatgggaccatagtagcgagggctgtgccttaatttctcanntctctctctcncnct

SEQ ID NO: 13288 - DNA, 243 bp, Glycine max
  Clone ID: 701154934H1
aggataaataaattatagatgtaatgtatatcacaagcttttagaacattctgctttaagcttctaattgttattcttaaaatgcaggcactatcttcatatgtattcatagcagctaatgtcatctcaactcatctaaagatgttcaatctatccatttgaacgaattgtttcctcctctagttccattattaacatcacatcatcatagcttacgtggttttacccagttacttgcatatc

SEQ ID NO: 13289 - DNA, 241 bp, Glycine max
  Clone ID: 701154935H1
acgagagcttcttctcctttgattgtgtggacgttttgttttctctccattttctgggtttgaatgatacttgtaaaaaaagagggacctgagtgaaacaagtggtggggttctctcacaaacatggaagaggaaaatgttaagcagccattgttggagaggaagtaccacgagaactgccctggttgcaaagtggatcaagccaaagagttgagtgagggaaagggtgtacccgttacaa

SEQ ID NO: 13290 - DNA, 240 bp, Glycine max
  unsure (1)..(240): unsure at all n locations; Clone ID: 701154936H1
ggcaagaagctgaggctgttcccaagtcactctctttgcaacctccgaggaattttggtagcatcctctgcgatgttttgtcatcagtttcagtttttgtannnnnnnnnnnnnnnnnnnnnnnnnnnnnnaagtgagttgtttcagtttctgtgtgtgtcagtaagtgcttctcttttgtccattttttcttctttctcgtgtgggaaaatgctggttcggagaagggtgatgagttgg

SEQ ID NO: 13291 - DNA, 246 bp, Glycine max
  Clone ID: 701154939H1
gcagttgtttttttagggtagttgtgttatttcttttctttacttatgattttatgcattttaatttcagtagtttaaattcagttattgaataaaaattgcatgatatttgtgaagtcactatttaggctttttctgaagaattcaacacttgaaatgctacatgacaattgtgaaaatactggtttcctggaagcaagagtcagtcaaacagtgagacatgaatcacaaagagagaaaaggtta

SEQ ID NO: 13292 - DNA, 222 bp, Glycine max
  unsure (1)..(222): unsure at all n locations; Clone ID: 701154940H1
gtaagtgaagtcattnnctttacacaggttcatacgacgagtatggacctgatgattctgatgagtcattgtttaaagtatatggagctcgcaaaggaaaggatagagcaacaaccactgccattaatggtattgctagactccaagcccttcaacatttgcgaaagttgcttnatgatcccaccaagcttgtgcagttctcatatttacagaatgcaccac

SEQ ID NO: 13293 - DNA, 235 bp, Glycine max
  unsure (1)..(235): unsure at all n locations; Clone ID: 701154941H1
taancacaacatctctatcnagtaaattaactatgaagcctaccctactattatccctntccttcctnacctctctttgctttcctggctctttcacaagancttcaacaagttgtgggacntnagtccncnacccnatttncccatgnntnncgtatnacangatgccancaactnggnngcnnaccatntggcgattnaaangagngtgtacatgaaagtnaaactcgccggt

SEQ ID NO: 13294 - DNA, 245 bp, Glycine max
  Clone ID: 701154942H1
ggaagaagaaggttggttgattggtcccattgattccgaagagaaaagaaaagatgtttgagccacaacagctatacactcgcgcgaagaccgaggaattcgacctcgaatcaggagaaaccctctacccagggctgagcgtcggcgagaaccagctccgatggggtttcgtccgcaaggtctacggcatcctctccgcgcagatcgtcctcaccaccctcgtctccgtcaccaccgttttctat

SEQ ID NO: 13295 - DNA, 232 bp, Glycine max
  unsure (1)..(232): unsure at all n locations; Clone ID: 701154943H1
ggaataaaaattgaacacgacttatcgtctgaagcatctggcaagttgattagttagtcccttttgtgacaatgatttggtgattttgaatcttcgggtgcagcaagataatcgtgaagattgggtctccaaaatttgtttgaggggattttgtttcttgagctaaaccaaaacatgaatgaaaatactgtgaggtctnctggtgcagatctgacagctgctatagtaccat

SEQ ID NO: 13296 - DNA, 247 bp, Glycine max
  unsure (1)..(247): unsure at all n locations; Clone ID: 701154944H1
gaatcaagaatacaataacatagcatagagtgagaagtgagaagagaaaaatggcaatctccatacccagtagacaacttttcatagatggagagtggaaagtccctcttctcaacaatcggtttccgatcatcaaccccgctactgaagacatcatagggcatattccagccgctactaaggaagatgttgaccttgcggtggatgctgctaaaagagccttttcccntaacaaaggcaaagattg

SEQ ID NO: 13297 - DNA, 247 bp, Glycine max
  Clone ID: 701154945H1
ggagagagagagagttggaagaagaagaagggaagatgaacttgagatggatggaagcggtgctgccgctgggaatcatagcgggaatgctctgcgtcatgggaaacgctcagtattacattcacaaatccgcgcatggcagacctaagcacatcgggaacgatatgtgggacgtggccatggaacgaagggacaagaagcttgtcgagcaagcctctccctccattaacatcgttgttttgccatg

SEQ ID NO: 13298 - DNA, 247 bp, Glycine max
  Clone ID: 701154946H1
ggcatcaattcaaaatatatcatcaattataagcatgggtttgtggaacacaacgaatgcagtgtcttgccgctttcacaagtttggtgatgaccaaaagaatctggtcttccaaggtgatgccacgtcttcttccaggggcatagaactcacaaagttagacggtggaggaaaaccagtgggtggtagtgtggggagagtgttatactcttctccagtgcacctttgggaaagctctacagtggtc

SEQ ID NO: 13299 - DNA, 246 bp, Glycine max
  Clone ID: 701154947H1
ggggatttgagacacagggtgtcattcctgatatagttaccatggcaaagggtattggcaatggtctgccattaggagctgtagttacaactccagaaattgcaagtgtgttggcccaaaagattcaatttaatacctttggtgggaaccccgtttgctctgctggtggacttgcagtgcttagggttcttgacaaggagaagcgtcaagctcactgtgccgatgttggatctcattgcttgaacg

SEQ ID NO: 13300 - DNA, 255 bp, Glycine max
  unsure (1)..(255): unsure at all n locations; Clone ID: 701154948H1
gataccaaaaacaaaacaagccaagtgaaagagagaagaaaagtcaaagacaatgtcagggatcattcacaagattgaggagacccttcatgtgggaggccacaagaaggaggaggagcacaagggtgagcagcaccatggtggagaatacaaaggggancatcatggtgaacacagtactgaatacaaaggagagcatcatgttggtgagcacaagccggagcaccntggaggagaagagcacaaagaggggtc

SEQ ID NO: 13301 - DNA, 244 bp, Glycine max
  Clone ID: 701154950H1
ggcatcaattcaaaatatatcatcaattataagcatgggtttgtggaacacaacgaatgcagtgtcttgccgctttcacaagtttggtgatgaccaaaagaatctggtcttccaaggtgatgccacgtcttcttccaggggcatagaactcacaaagttagacggtggaggaaaaccagtgggtggcagtgtggggagagtgttatactcttctccagtgcacctttgggaaagctctacagtg

SEQ ID NO: 13302 - DNA, 203 bp, Glycine max
  Clone ID: 701154951H1
gaacctacgccgagtgaaaccccaatcccaatacactcccaactcacaaagccatgtctccaggtcctgttgtcgacgcttcccctgaggttgaagcagagcaacaacttccctccgtcgatgacgcaacccagttgaagaaatcccaaccgcaggaggatgatgctcccgttgtcgagggcgtgagggatgatgacaaggtt

SEQ ID NO: 13303 - DNA, 238 bp, Glycine max
  Clone ID: 701154952H1
ggttgacaaaggaaacgtgtagtacgagggccaatttccaaaaaccttttgtctcgcaacctcacctcttcctccttcaatctctttcggaatttcccaaaatccttagtgggaggaagagatggttctgactcagaagattcacgaagctttcaaaggcaccgtcgagaggatcactggcccccgaaccgtttccgccttcaaagaaaaaggagttctcagtgtctccgagttcgtc

SEQ ID NO: 13304 - DNA, 240 bp, Glycine max
  Clone ID: 701154953H1
gacacccttccattttctccttctcttcctcccatggtgtaattgctccaactatggccgtggacctcatgacgacgggttgcagccgaaacgacaacatcaatagtttcacaaccaaagccgaggaaaatgccgtccaagaagctgcttccggcttagagagcatcgagaagctcatcagactcctctcgcaaacccaaacccaaacccgccatcaaatcaacaacaatagctctaatg

SEQ ID NO: 13305 - DNA, 221 bp, Glycine max
  unsure (1)..(221): unsure at all n locations; Clone ID: 701154955H1
ctnctattgtatgttacaatctgctgtgatacaggaaacagggtattctactacatacccatcggggggtaggatgataatgagtagcatgtatctctaaatctgattttacagggcagccgaatacaataaagataccaacaaatatcattttaaatagaaggaaagcgcggcattctcatatgganacaacacttgcagttctgttacacttcacaagc

SEQ ID NO: 13306 - DNA, 217 bp, Glycine max
  unsure (1)..(217): unsure at all n locations; Clone ID: 701154956H1
gacagcatagggaannttggttttttattttgtgcaaattggtggaaaataactgagaaattggtgatactctcaagcagggttttttttttgtagcatttaatatctgnagtttaactgcagaaatctttccttctttagttcatattaagtgatgncttaagttagcagttgatatttgcnggtgggtttattcaatgcaagttcaagctnaggt

SEQ ID NO: 13307 - DNA, 240 bp, Glycine max
  unsure (1)..(240): unsure at all n locations; Clone ID: 701154958H1
gacacaccgtttgttctattcttaactcaacttctgctacccactctcttcttccaagtccaaccacgcttttctctacagtcatgggcaaggtcaagatcggaatcaacggatttggaagaattggccgtttggttgccagagtcgctctgcaaaganacgatgtggagctcgttgccgttaacgaccctttcattaccaccgattacatgacatacatgtttaaatacgacagtgttc

SEQ ID NO: 13308 - DNA, 244 bp, Glycine max
  unsure (1)..(244): unsure at all n locations; Clone ID: 701154960H1
ggagaaaagtgaattggattgcatctctcgctttgtgttggaagaggggaatcgtagatctgannnnnnnnnnnnnnntaataataattttgtgatcagaattattgagctgaagaaaagacaatgggattgtgggaagcttttctcaattggctacgnagccttttctncaagcaggaaatggagttatctctaataggacttcagaatgctgggaagactncnntggcacntgtagntgcta

SEQ ID NO: 13309 - DNA, 242 bp, Glycine max
  Clone ID: 701154961H1
ggttgcgtgtgtgcgtgacaaaagcaaaaggaaagaatatcaacaaggtaaagtagattccttactagacatggcgtcgaaggacacattctacatatctcatggatcaccaactttgtccatagatgaatccattcaggccaggaagttccttcagtcatggaagaaggacgtgtttcctcaaagaccctcttcaattcttgtcatctctggtcattgggaaaccgcagttcccacggtca

SEQ ID NO: 13310 - DNA, 249 bp, Glycine max
  unsure (1)..(249): unsure at all n locations; Clone ID: 701154962H1
ccttcaatccgtgccatccattctttcatgattcaatcttgatcgttgatctccataaaaaaaaaaggtttacaactttaaagtaataaaccataaaaaanggttttacgaccttaaaatcgtaaaaccaaaaaaaaaaanttncgactttaangncaatttttttnanctaattaattttangattncngtttttttttnaaaaaaatagggnnngatancaantgttanganttctanctcnccngt

SEQ ID NO: 13311 - DNA, 246 bp, Glycine max
  unsure (1)..(246): unsure at all n locations; Clone ID: 701154963H1
cagacccaaaaacactatagcatgatagtgaataactggatagcagttattttgaaattgttatccactttatataaagtaaatatatactatacaaatataagttctcaaaaatgataaaaattactcaataattgacattcataattcataattgacaataanaagtcataggtgtctcagcaagtaaataccaacaaaagtcaaatacaagtcttctttatcattttcctactgtagatttca

SEQ ID NO: 13312 - DNA, 257 bp, Glycine max
  unsure (1)..(257): unsure at all n locations; Clone ID: 701154964H1
ggtcaactgctttaatgatccatccaaggacgaatttgtttttctcttaagcagcaaggctggtggttgtggactcaatttgattggtggaaatcgacttgtcttnttcgatcctgattggaatccagcaaatgataaacaagctgcagcaagagtatggagggatggacagaagaaaagagtttatatttatagatttttgagtgccggaacaatagaagaaaaggtctaccagcgtcagatgtcaaaagaagggc

SEQ ID NO: 13313 - DNA, 253 bp, Glycine max
  unsure (1)..(253): unsure at all n locations; Clone ID: 701154965H1
gtannaagttgntactcctgntcntgttggtttngttgcctcngatgcnggnncanctantattagatcccctgntgnaaataacnctggtanttcatcatcgagtaatgtaattgtgggatttgttggatatcctaacgtggggaaaagttcaactattaatgctctggttggtcaaaaacgcactggtgttacctctaccccagggaaaacaaagcactttcagacattaattatctcggatgagctgatc

SEQ ID NO: 13314 - DNA, 243 bp, Glycine max
  unsure (1)..(243): unsure at all n locations; Clone ID: 701154966H1
aataaaagacaaaagaaacaaaangctacatagcatacagtctgtcttctcttctcttctccggttatggcgtccgccttgggcacttcttcaattgcggttctgccttcgcgctacttctcttcttcttcttccaagccttccattcacactctctctctaacttcagggcagaactatgggcggaagttttatggaggaattggaatccatggcataaagggaagggctcagctctcggtt

SEQ ID NO: 13315 - DNA, 250 bp, Glycine max
  Clone ID: 701154967H1
cctactatagtaatccaaatatatttaagagtttttaggaatgaaatgtcaaaccttagatccaataggtatattaatccataataaaggcccaaataattacacttgaagtttaaaataatagaaaaccatatcttaattcccacattaccagatgcaaaaaaaaaagagtaaagtcccacccttcaggaaatctagagtcatatgcaacaacaattttgtactaactttaccatcccaatttaatgca

SEQ ID NO: 13316 - DNA, 238 bp, Glycine max
  Clone ID: 701154968H1
ggaacaaaacaagtgtttcgaatagattatcctaagtctttgggaatagtgctgcaatggcttcaagtcaggaggaggtgacccttttgggagctactggaagcccatttgtgtgcagggttcatattgccctcaagttgaagggagttcaatacaaatatgtcgaagaaaatttgaggaacaagagtgaactgcttctcaaatccaacccagttcacaagaaggttccagtgtttat

SEQ ID NO: 13317 - DNA, 197 bp, Glycine max
  Clone ID: 701154969H1
ggtacaaaacatagacattaaaatttgatgtacatttttgttttattttccagcacagcacgctatgctccttcaatattatttaatttttggttgttgagaacatttgatgaatgcgcttacgtgttttgcaggcactggggcatgtgaatatccatcaactaggtgaccctttcttgaccatatatatgctttca

SEQ ID NO: 13318 - DNA, 236 bp, Glycine max
  unsure (1)..(236): unsure at all n locations; Clone ID: 701154970H1
ggaacaacaacaacaaggtttacaatttataaatgcgcttctaaatactgtggcctctctctctaggattcccccatacctactttcagctcctaagagcacgcatcactgttgcacttcttactcgttnnnnnnnnnnnnnnnnnnnnnnnnnnnnnnngctaaaccccccctttatttttcctatctcactaacatcgatgggagacgagaataagaccaagtcccctgcttcc

SEQ ID NO: 13319 - DNA, 249 bp, Glycine max
  Clone ID: 701154971H1
ggagacacagagcgagagagaatcgtaacaaaagcggtaaccggaataagttgtctctacgatttgagccatggcaacaacaacaccctcaaaccgatcatcagaggcgtttgctctcatggcaatcctcagcactctgctttgcacggcggtggcggcgaaggagagcgtgtacgagatactccccaagtacggcctcccgagcggtctgttaccggacaccgtcaccgactacacgctcgacgagga

SEQ ID NO: 13320 - DNA, 239 bp, Glycine max
  unsure (1)..(239): unsure at all n locations; Clone ID: 701154972H1
aggtaagagaattctatataaaaaagantgtgatggagtcatgtgtatgttatttttaatatatcagctaatgttaatttattagtttgtttagaaatgttanttgaaaaattcgaacgtgtgatttttttttcttttctcctttaccatttttcatccacaagaccaacctcntgtcttctgaatnaaaatgnaggcaagaaaaattcacaaagaaaatgttgatgagagccaaaagt

SEQ ID NO: 13321 - DNA, 239 bp, Glycine max
  Clone ID: 701154973H1
atccataattccaattacttttcttgccccaattagaatctttatttctaggacccccaaaactccagttagaattcttgttttcattcccaatgctccaaaaggatttgttagagttccaagcctagttaccactattcatagagttccaatcgttttttcttaccatgatattcaccatattgctaaaaacatggagagtgtacttgttgtgtattgcgatggtgaaatgatttcat

SEQ ID NO: 13322 - DNA, 240 bp, Glycine max
  unsure (1)..(240): unsure at all n locations; Clone ID: 701154974H1
gggtggcttgctgttataaagnagctggcagaggatgttgatncccctggtagacctttgttgttgaaaccntgtagctttctagttttgcnattaagggtctgtttgaagatcgtgtcattgttagcatgatttgtgattctttaaatcntttcatccatcgattctaancaattacagtataaatactgaaagaaaatacattaatagattgtggtggattttactgcttcttggtgc

SEQ ID NO: 13323 - DNA, 234 bp, Glycine max
  unsure (1)..(234): unsure at all n locations; Clone ID: 701154975H1
ggaagtgaaagagagattctgcgtgcaggaagagcgaaggagtgagtgtggcaatggcggaggagcagggtgaattcaggatttacaattccatgactcagcagaaagagatcttcaaaaccaaagtccccggcaaggtttccatgtacgtttgcggggtcatggcctacnactcaagcatcttggtcangctcgggctgccggttcttcgtattctcttcaagnacttaaaca

SEQ ID NO: 13324 - DNA, 253 bp, Glycine max
  unsure (1)..(253): unsure at all n locations; Clone ID: 701154976H1
ggagacacagagcgagagagaatcgtaacaaaagcggtaaccggaataagttgtctctacgatttgagccatggcaacaacaacaccctcaaaccgatcatcagaggcgtttgctctcatggcaatcctcagcactctgctttgcacggcggtggcggcgaaggagagcgtgtacgagatactccccaagtacggcctcccgagcggtctgttaccggacaccgtcaccgacttnnanntcgacgaggacggg

SEQ ID NO: 13325 - DNA, 239 bp, Glycine max
  unsure (1)..(239): unsure at all n locations; Clone ID: 701154977H1
gaggatagagatcaccaacaaaatatttgctttttgttttatttcattgcaaccatgtttggctatgcagcagcnataattgcagcnatcctcntcttccaatacttcttccataggagacgatgttgcaaacaccccattttgacagaataccctatcattggcatgctaccanaattactcntcaatttatggcgtgcccatgantatcaactcaggtgttgcaacgacatggtggc

SEQ ID NO: 13326 - DNA, 245 bp, Glycine max
  unsure (1)..(245): unsure at all n locations; Clone ID: 701154979H1
ggcgttgagaatgattgaaagggtgagggaaatcgaagattttgaagatgtggttgttgttatgacaggnaagggattgatctattagtgtagaagatgagtacgctggatgcaacaagggctgaacttggtcttcttgttttatatttgggcaaggctgaagcaagggacaaaatatgcagggcaatacaatatggttccaaatttttgagtaatggggaacctggtactgctcagaatgtaga

SEQ ID NO: 13327 - DNA, 242 bp, Glycine max
  unsure (1)..(242): unsure at all n locations; Clone ID: 701154980H1
gaagagagaaaagggagagtgctttgaaaatgggaaagtttagttcaagttacagtacttctgattttgttcactttggagttctacttccctttcttctgttatcacagttgttctttcaactttcatggtgtggctccatagtaaagttccttcctggattagagggaccccttcctttgttcttgaaaccgggtatgtgggagtgggtnaatcagaggatgtgcaggcattctactact

SEQ ID NO: 13328 - DNA, 241 bp, Glycine max
  unsure (1)..(241): unsure at all n locations; Clone ID: 701154981H1
ggagacagaggagagagaaaccaagagagacagagtagcctcctccttcccagtgaaaaacaaacaagaggtgagagagcagataaaagcttgaggcttgatttctgcgtttcttggagaatttgtcttcaaaancaagaaggggcagcagtggatttatgtcgtctgggtttattctggcagtgattggggctccgttgaagctcttcattgtttatgtttccgtttttttcttcctgac

SEQ ID NO: 13329 - DNA, 237 bp, Glycine max
  Clone ID: 701154982H1
gatagccttcaagcttgttcttccgatcccctgaaaacaaaaccatgatgagaaggcactcccttgtgactgcatcaccaaaacaagtgtccctcttctttgttggccacaaaagcaacccaacaacaattcatcctcacgctcacacccttctgactccatcacccaaacaagacccacaaaaccataatcagtggtggggccaccccaaaaccatcaaacccagtttcaatcaca

SEQ ID NO: 13330 - DNA, 229 bp, Glycine max
  Clone ID: 701154984H1
ttcccctgttgatgagactgttttcgatgtggataacgatgttgatgaccttctgccagttgaagttaaagaacagcgcctcagcaatctgctgcaggcattgatggttgcggcttgtgttgctgctatgcctcttttgaagaagataccaacttcagtgctttggggttactttgcttttatggcaatgaaagcttgcccggaaatcagttttgggagagaatatata

SEQ ID NO: 13331 - DNA, 233 bp, Glycine max
  Clone ID: 701154985H1
gacagaacaatactgcaatagagaaagaggcagatagaaaaaaagagcgacttttgagttcaaaagatgactaacttcccattgatcaacttggagaagctcagtggtgaggaaagaaacgataccatggaaaaaattaaagatgcttgtgaaaactggggattctttgagctggtgaatcatggcattcctcatgacatattggacactgtggagaggttgaccaaagagca

SEQ ID NO: 13332 - DNA, 241 bp, Glycine max
  Clone ID: 701154986H1
gacaacaaacgtgtcatggttgagttgcctcagagaactgaggcctttgcttcacttgctgctgccacttagcatccattgggtagctgaggagatgacagtttctgttcttgttgatgtcacaacctctgctttgtgccctggagagtcaacttgctcaaaagctatttacatcaatggggtccaacaaacgattgttggaattttcaagatggtggtacttccactactgggtcagctc

SEQ ID NO: 13333 - DNA, 240 bp, Glycine max
  Clone ID: 701154987H1
gacacggaaagaatttcgttgtagtgttcattacacccaacaaccaagtgcagcaatcaccaaaaaagaagaaggcaaatcaaagttttgaaccttggttcaatatctagagtccctgcaagctcaacacatcagagataatcaaaatgcatcctgcgcagatcgttttgtatggatcaactttatgtgtcatgataacagtgcacttctccatgaagctactcgctgaacatgttttga

SEQ ID NO: 13334 - DNA, 216 bp, Glycine max
  Clone ID: 701154988H1
gtcatagaaaggcagcatcaaactccattaggagtgagaaaacttcctcattcagtttcagaagcaatgccaatgttccttttcatgaattgcctggggcttcctttgatcaatacatggatgacaagcacagagtgctaagagctgtgttttctgatgacaaaggaacaactaaacagctcaatgaggaagagtggaggatcaaaatgcctccca

SEQ ID NO: 13335 - DNA, 237 bp, Glycine max
  unsure (1)..(237): unsure at all n locations; Clone ID: 701154989H1
gggagctgagctgagaaaacccccaaccccaacctcaaccttaacctctcctcactttcttttcaaccagaactatgattaagctttttaaagtaaaggnaaaacagagagaactggcagaaaatgcgagtggcggaccacccgttaagaagcnaagtgccggcgagttgcgtcttcacaaagatataagcgagctgaatctaccaaaatcatgtaccatgcaattncccaatggca

SEQ ID NO: 13336 - DNA, 237 bp, Glycine max
  Clone ID: 701154990H1
gatataaagttggtcattcctcctccggtgttgctgacaagccaatcctttgtgtaggtgctcaaccctagtaagccgcaatggtgaagtactcaagggagcctgacaatccaactaagtcttgcaaggctagaggcgccgaccttagggttcatcttaagaacacaagggaaactgcctttgcaatcaggaagttgcccttggtcaaggctaaaaggtacttggaagatgttcttg

SEQ ID NO: 13337 - DNA, 230 bp, Glycine max
  Clone ID: 701154991H1
ccagggtttccaatgaaactgtcagggggaaacctggtaaagttgttactcgttgggataacaccaaatagtttgttataggacacattaagtagagagagactaatgcaatttgaaagtgatgccacatcgccagtcaatttgttattttcaagtctcaaggatatcatgttttgaagctgactaagttcatcaggaatcaagccagagagttgattatttgaaagatc

SEQ ID NO: 13338 - DNA, 238 bp, Glycine max
  unsure (1)..(238): unsure at all n locations; Clone ID: 701154992H1
ggaagtgtatttngtcactgacctatcttggtagagatttgaagtttaaaccttcaaattaatcaaaccattttaatttgcctatagattctgagtcactgctgctatggcgctacgcgtacttcttgtgttggggatgttgctgatgttgtgccttgttaaggtttcatctgatccaaagatagaagaaganatactggaagcagaagaaganctgcagtttcccgataacgagcca

SEQ ID NO: 13339 - DNA, 250 bp, Glycine max
  Clone ID: 701154993H1
gaccaacacaaacaatagtgcatagcgtttttcattgtgcattattcaatggccaccacagcagctctatccggaaccatggtgagcacctccttcatgaggaagcaacctatgacgaccaagagcctaaagacattccccaacgctctttttggtctgaaaggtggacgaggtggtcgtgtaacttgcatggcctcgtacaaggtgaagctcataaccccagaaggagaagtggagtttgaatgcccag

SEQ ID NO: 13340 - DNA, 233 bp, Glycine max
  Clone ID: 701154995H1
ggaagaacaagtcttgcattgggtggagcatacttagaaacagcaactatgtctctcatgcagcttactagctcccctgttggctcactggtccgtttcattgtaatatttgctttatggtacagaaccatggctttggccaagttgccaccaaacgcttcatcagttccagcagttttagcgtttggagattccatcgtggacccaggcaacaacaacaacataaaaacatt

SEQ ID NO: 13341 - DNA, 196 bp, Glycine max
  Clone ID: 701154996H1
gtgttctgagctgctagaagcaatggagaggaaaagaagccatgcttctttcaccatgtttgcaatgcttgttggattgctctctcagagccttgtcattcctgtaatatccaccactgttgcagatcagaagaactactacaccccagatccacatgctggaagtccccccacaggctcacacatagtagtcctc

SEQ ID NO: 13342 - DNA, 267 bp, Glycine max
  unsure (1)..(267): unsure at all n locations; Clone ID: 701155001H1
tgctttagactatggattaacagtcttggaatttccacttatgtcaataatgtttttgaggatgtcagaaatggatgggttctattagacagttcttgacaaggtttcagctggatccgtccacnggnagctggccacaaagcctcctataaagntgccgtttcggaaagttgagaactgcnaccaagtcataaagattgggaaggaactaaactttcattagtgaatgttggctggtantgntangntncaggggnnagcntnncc

SEQ ID NO: 13343 - DNA, 257 bp, Glycine max
  unsure (1)..(257): unsure at all n locations; Clone ID: 701155002H1
atcagtggtgccccccaggataacaacataatgctgtggaatgctgtcatatttggtcctgatgatactccatgggatggnggcacgttcaagttgacactccaatttactgaggactatccaaataaaccaccgactgtacgatttgtgtctcgcatgtttcatccaaatatttatgctgatggaagtatttgtttggatatattacaaaatcagtggagtcctatttatgantgtggctgctatactcacatcta

SEQ ID NO: 13344 - DNA, 250 bp, Glycine max
  unsure (1)..(250): unsure at all n locations; Clone ID: 701155004H1
gcttccgccaatgtcttcttcgaagagcgtttcgatgacgggtgggaaaatcgatgggttaaatcagattggaaaaaagatgagaacgtggctggggagtggaaccacacctctggtcaatggaatggagacgctaatgacnaaggtattcaaaccagtgaggattacagattctatgctatttcagctgagtaccctgaattcagcaacaagggtaagacactagtctttcaattttctgntanaccga

SEQ ID NO: 13345 - DNA, 256 bp, Glycine max
  Clone ID: 701155005H1
gatccttaatattctatagtttttttcggtacatttaatattccatagtttgaaggcataaatataatatttttctctccgacctttcaaatgagcatatacacagagacttaaaggtttgtgaatgtgatgatattgtttttaaggatttattcattagtttcataatgttaatttttaataatgcgaaaatcatttaggatacaacacattttgtgacaaattcaggtgacagaactgtagatatgtaattttg

SEQ ID NO: 13346 - DNA, 261 bp, Glycine max
  unsure (1)..(261): unsure at all n locations; Clone ID: 701155007H1
gaagtgttttaaacccgattcggttttctggcacgcgagctatgcttttagcgcttattgggcgcagtttaggaaggtgggtggtacttgttacttcaatgggcttgcaactcaaaccgcaaaggatccaagttatggatcttgcncgttcccaagtgtgacactttgaaggaggagaaatcaaacaaatcaagcaaaatggagttttcgttacgcaatcatatgatgattatttaatttgactatatcgacattgggaat

SEQ ID NO: 13347 - DNA, 256 bp, Glycine max
  unsure (1)..(256): unsure at all n locations; Clone ID: 701155008H1
ggagccnatgagtgtcggctcttggtttctctgactanactgnananacctttgtacttattctctcncagtttcagataaactgagaccataattctttactngaactgaaaaaattaagantttatttnctccgaagtccaaacactgtcacagaaactgactngttaaccantgttagntanatnctgtttcttgccnctttataagntcatcgtcanccgccactggttttcattnacnaacctncttnana

SEQ ID NO: 13348 - DNA, 254 bp, Glycine max
  Clone ID: 701155009H1
gatccacaacaaaaaactacttctcaattcagttaacacaccaaccccacatccaaagcttcagttcaatatggcaaccttgtcaagttttgctcctttggccattctaagtttagttctagtaattagtgccattgtctttgaggctgaagctaggccaaggacattctttgtatttggagattcacttgttgataatggaaacaacaattacttggctaccacggcacgtgccgatgctcccccttatggga

SEQ ID NO: 13349 - DNA, 253 bp, Glycine max
  unsure (1)..(253): unsure at all n locations; Clone ID: 701155011H1
ggatccaatcaagaatacaataacatagcatagagtgagaagtgagaagagaaaaatggcaatctccatacccagtagacaacttttcatagatggagagtggaaagtccctcttctcaacaatcggtttccgatcatcaaccccgctactgaagacatcatagggcatattccagccgctactaaggaagatgttgaccttgcggtggatgctgctaaaagagcctttcccataacnnnngnaaagattggt

SEQ ID NO: 13350 - DNA, 257 bp, Glycine max
  Clone ID: 701155012H1
gaacgcagccaagaaaagaaaatcctcacccattttcttcgtagccaaacactctgaaattctcagttatgtcgcggcaagcgtatgtggatgatcacctactgtgtgaaatcgaaggtaaccacctcactcacgccgctatcatcggccaagacggaagcgtttgggctcagagcaccaacttccctcagttcaaacctgaggaaataactgccatcaataatgactttaatgagcctggatcacttgctccaact

SEQ ID NO: 13351 - DNA, 258 bp, Glycine max
  Clone ID: 701155013H1
gacacaccgtttgttctattcttaactcaacttctgctacccactctcttcttccaagtccaaccacgcttttctctacagtcatgggcaaggtcaagatcggaatcaacggatttggaagaattggccgtttggttgccagagtcgctctgcaaagagacgatgtggagctcgttgccgttaacgaccctttcattaccaccgattacatgacatacatgtttaaatacgacagtgttcacggacactggaagcatc

SEQ ID NO: 13352 - DNA, 262 bp, Glycine max
  Clone ID: 701155014H1
ctggtgcttgtgttagcacaaagggaaactgtgttgatcctatcgggtaggatccatacactaatgcatcaaataggtgtgggttgtatgttgttgacaatcctccatgcttggttgcccttgagaatgtttataaggggtcaacaatggtaccccacgtgccttttgatgaggacataaccaagggcaaggaccatgaagcacttgaagggcccatgaccagaggcaaacttaaacaagcccaacacatcatagagacaag

SEQ ID NO: 13353 - DNA, 257 bp, Glycine max
  Clone ID: 701155017H1
gactgcaaatcacttttctactttgagtcttcttgatccttctttttctccttgaactcaaacatggcagatgaggtggttctgctagatttctggccaagtccatttgggatgagggtcaggattgcacttgctgaaaagggtatcaaatatgagtacaaagaagaggacttgaggaacaagagtcctcttctcctccaaatgaacccggttcacaagaagattccggttctcatccacaatggcatacccatttc

SEQ ID NO: 13354 - DNA, 253 bp, Glycine max
  Clone ID: 701155018H1
gacactaaacaagttaaaagaagagcatcactgaactaacaaagcaaccctatgtcgaaggtggtttgtgtcaccggagccagcggcgccatcggatcatgggtggtcctactcctcctccagcgtggttacaccgtccatgccaccgtccaagatatcaaggatgaaaatgagacgaaacatttggaggaaatggaaggagcaaagagtcatctccatttttttgaaatggatcttcttgacatcgactcca

SEQ ID NO: 13355 - DNA, 209 bp, Glycine max
  Clone ID: 701155019H1
gatatctctaattaacactaataacagcaaactaaaggtgaagtttgccagaaacaagatgggaaggaaccattttcagcagcaacactgtgctgatgggagcatgtggatggagagtcagggtcagcaacagagctatgccttccaagaagagtcttggagccctgataacaactatggccacaaccacaagcaattcccaggcatgc

SEQ ID NO: 13356 - DNA, 248 bp, Glycine max
  Clone ID: 701155020H1
gcatcgggatcatgacattcattgttggacattatactgatcatcatcacaggtacaatgcatttctctttgttctctaagtgtatacttgattgccgtggaattaatctcaccgctttcatgtcatgtacttggagaccgatgtgaaatgctaccgaaatttcaccaaatttaagaaaagagacttaaccttgacgtatgagtttactataaaaatatgtcttcctgaataggataaggtcacacct

SEQ ID NO: 13357 - DNA, 258 bp, Glycine max
  Clone ID: 701155021H1
ggcgagaggactatggaatgaagtaactaacccaaacctagtccccttacttggctcgctggttggatttgattcgactcgattctcgctgatgaagaagcatttgatgcacagctatggcgttgccgtgattgtggtgttggctttgagtttgagtttgggtgcatcagcggaacaactcagttcacgagaatacgagaatctcggtttcaccggactcgccttgtgctccgactgcaacactctctccgagtacgt

SEQ ID NO: 13358 - DNA, 247 bp, Glycine max
  unsure (1)..(247): unsure at all n locations; Clone ID: 701155022H1
atatttaaatgatcaagatttaacattacgtgacgttaagttatgtcacataacttaattcttaatttatgttagtacaagtgagtgagcgagaaaaaaatttgtatgagagagtgaaataagtaaatctgaactatataattataggtaaatncattaagattaaagttgtctaatgatcacattactactactacttaaagaagtcacataacttttccgaacaaatttccaagacaataaaatt

SEQ ID NO: 13359 - DNA, 205 bp, Glycine max
  unsure (1)..(205): unsure at all n locations; Clone ID: 701155023H1
gagagagtattggcgcttcatcaagatgggtatttctagggattccatgcacaagangcgtgccactggtggcaagaaaaaggcttggagaaagaagaganagtatgagcttgggcgtcaggcagcanacaccangttatcaagcaacaagacaatcaggaggattcgtgttagaggtggcaatgttaaatggagggcttgangc

SEQ ID NO: 13360 - DNA, 253 bp, Glycine max
  Clone ID: 701155024H1
ggaagatcgaattaggaattagcttgaacattttgtattttcttaatgttcaagctaggccacatagaagagcctaaaaatgacaaaaattaaaaatttgttggaccaaagaacagtggttgttatgaaattaatggaccatagtatctggcaaggtggtctcccctccagagtccagatatcatattcacacacccctgatgctaaaggttaattatttactatttgtgctcctagtttacagaattgtcac

SEQ ID NO: 13361 - DNA, 248 bp, Glycine max
  Clone ID: 701155025H1
ggacgcttggtgggggcaaaatgaagtttgcaaaagcatccccactctttctttttgcattcagtttgcggtcgactattagatttgatcttgtaattcgtgtactgcgagtcggacggaaaatcaaacatgctcttagttacttttttttcttttttaatttaattttgatgtgattgtaatgtctttggtgaaatgcttagatggttattcattttattccttgctaatgccaacctttttttttt

SEQ ID NO: 13362 - DNA, 258 bp, Glycine max
  Clone ID: 701155026H1
ggcattatatttgagttcaaacaaatcaaagccatggccacctccaacttctctattgttctctccgtctccctagccttctttttggtgctacttaccaaggcacactcgaccgataccgtttctttcaccttcaacaagttcaacccagtccaaccaaacattatgctccaaaaagatgctagtatttcatcctctggggtgttacaactcaccaaagttggcagcaacggcgtgcccacctcgggatctctcggt

SEQ ID NO: 13363 - DNA, 251 bp, Glycine max
  unsure (1)..(251): unsure at all n locations; Clone ID: 701155027H1
cgtgttgagaccggtgtcttgaagcctggaatggtggtgacttttgcgccaactggactgacaactgaagtcaagtctgtggagatgcaccatgaatctcttacagaggcacatcctggtgacaatgtgggattcaatgttaagaatgttgctgttaaggatttgaagcgtggttatgttgcctcaaactcaaaggatgaccctgcaaaggaggctgnggacttcacagnnnaagtcatcatcatgaacca

SEQ ID NO: 13364 - DNA, 262 bp, Glycine max
  unsure (1)..(262): unsure at all n locations; Clone ID: 701155028H1
ggcatatccaaaggaacgaaaatattattaagatgatcaacattattggagcacttgttctactctttgcatttctcttcctcagttgtgtgtatgcacaagacacaantccccttgtgcctgcaatcataacttttggtgattctgctgtggatgtagggaacaatgactatcttcccacccttttcaaggctgattaccctccttatgggagggactttgttaaccaccaacctactgggaggttttgcaatggcaaatt

SEQ ID NO: 13365 - DNA, 258 bp, Glycine max
  Clone ID: 701155029H1
accacttgtctgttttgcacatactttgttgagtttgttctattgaccacacatcctctacttcttttagttctcacggtagtcttcagaaaaaagtccatgcccttcatcatctccctttgttctgttactcacttggctcttttttctctttctctgtgtgtgtcttaaatccgcattctgttctaccgcaccctattattctatctttatgttcagttctcattgtcctttccttttatttttttttaccttcac

SEQ ID NO: 13366 - DNA, 267 bp, Glycine max
  Clone ID: 701155031H1
ggaggcaacatatttgatttggaaataacagtaaatgatgaaatcataaagtcaagcagcttgacttgttacaggtcttatgcagatcctgtagtaggttttgaagagcaatccagcaatggatcaactccaccagcagattcccaagctaacatccccaatgggaaacatgtggtgaagaactgaaataatgtgccttgagaagcaccaatgcatgacatcatagaaaacttaacgcaaatatagtcataattattaccaggaatt

SEQ ID NO: 13367 - DNA, 250 bp, Glycine max
  Clone ID: 701155032H1
ggcacaagtgagtatgttgatcgagataactagaaacagtgtgatgaaaatgaaggtccttgttttcttcgttgctacaattttggtagcatggcaatgccatgcgtacgatatgttccctctccgaatgaacactggctatggtgcccgtactccggaggtgaaatgcgcaagttggaggcttgctgtggaagcacacaacatctttggctttgagaccattcctgaagagtgcgttgaagcaacaaag

SEQ ID NO: 13368 - DNA, 258 bp, Glycine max
  Clone ID: 701155033H1
gattgatttcagtatatatgtaattaattacgtacacagatgaaactttaatatcaatgattcatcatcatattatagcgttatgggtcgtagtcagaaaatttaactttctcagacacgtcgaagtgcatggtttgttaagagcacaaatgagttttcaaatgtgttaggtgtgtgtgtatatatatatctcaagtgatcttaggaaccggcacctcaacattctcacattccatcaccaaagcagtgtagttttcc

SEQ ID NO: 13369 - DNA, 251 bp, Glycine max
  Clone ID: 701155034H1
atatttaaatgatcaagatttaacattacgtgacgttaagttatgtcacataacttaattcttaatttatgttagtacaagtgagtgagcgagaaaaaaatttgtatgagagagtgaaataagtaaatctgaactatataattataggtaaatgattaagattaaagttgtctaatgatcacattactactactacttaaagaagtcacataacttttccgaacaaatttccaagacaataaaatttatct

SEQ ID NO: 13370 - DNA, 229 bp, Glycine max
  unsure (1)..(229): unsure at all n locations; Clone ID: 701155035H1
ggtgggcaaagactcaactctacagctggttatnngtggatgtggtctaacaattcaccgtggaacaactccatattttctatggtcaatgttccaccccattgtaatggaactggaccgtcctgtcatagnaacagtacagacaatttgtgtacagcagtgactaataattcaaactctctcataactgagagatgcgacaatcctcatgcttctctatgtatacttg

SEQ ID NO: 13371 - DNA, 251 bp, Glycine max
  Clone ID: 701155036H1
ggcatttcatttatttttccattccttataaaacccgaaaacaaaaaccacgcaatggtcacgtccgacaccaacaacaccatcctcaaaatctccaaactcgcgatcctcctcgttttgttcgcttcagtctgcaacgtcgctatgtcggactccaccgccaaacccctcgaccagcacgccaccacgggctctgaccctactgcgccagggttcacatcgtgtacaccgagagaccacagaacgaggag

SEQ ID NO: 13372 - DNA, 253 bp, Glycine max
  Clone ID: 701155037H1
ggtgagcgagaaatacaaagcacaagattaaaaaacaatttataaaaaaagaaagaagagagattatagaaagggaaagagagaaggttcaagttcaaggttctcaagttcaacaacaaagcctctcttctgcgtgttccgaggaagaagaagaaaaaaccctccgagtcaactcggacgagttgccttcatcgtacggttccgtcctcggactctgtcctcttctttcccttccgaaatcaccgttcgcggg

SEQ ID NO: 13373 - DNA, 243 bp, Glycine max
  unsure (1)..(243): unsure at all n locations; Clone ID: 701155038H1
gtcgtccagaaacatagaacatagcttttaaatcgcagtacgcggnaataacagcataatatcaagccacaagctgtgatttaaaactttaacanntcgtgttgttgaggntaaagntggtaatcaccatggctacggcgagggcccacnngantcttaggggccgctctcctctcttgcaccttgataggtgcatcttcgcgtggcgttgagaatcgccgtagcctcctccttccagttcca

SEQ ID NO: 13374 - DNA, 252 bp, Glycine max
  Clone ID: 701155040H1
ggtgatttcattgcataatccattgactagaaatcccatattttccccccacattaactcacccaacccctctttctaaaaggcctcaaggatacactccggacttaattacgttattttgttagggtcaccgtttcgagatattctaaacttgtactgaaaaatatggagggaaaagaagaggacgtaagagttggagccaacaggtacggagagaggcagccaatagggaccgctgctcaggctaaagac

SEQ ID NO: 13375 - DNA, 252 bp, Glycine max
  Clone ID: 701155041H1
gataccaaaaacaaaacacaagccaagtgaaagtgagaaaaaataaaaatcaaagagcataatgtcagggatcattcacaagattggggagacccttcatgtgggagggcacaagaaggaggaggagcataagggtgagcaccatgctggagaatacaaaggggagcaccatggtgaacacagtagtgagtacaaaggagagctcatggtgaacacaaagctggagagtaccatggtgagcacaagccagag

SEQ ID NO: 13376 - DNA, 257 bp, Glycine max
  Clone ID: 701155042H1
ggattcagaggaggagaagtaatggctgcgatcgcgggagcgcacgtgtttggtgttgtgagttttcagctcaagcaagctgaaatgccctttgcatgttccagcttaatccgcaagcatattggagattctcctcagcgcaatgtggctcaacgacgcagagcaaatggaacaattcttccccaaatcagagcccagaacgttcttccagactatgttccaaaatcggagttttataaagtagaagccattctcag

SEQ ID NO: 13377 - DNA, 252 bp, Glycine max
  Clone ID: 701155044H1
ctaccccttgaagagccactagtactaacaatctcatcatcaatctcttctatcctataatctgcatactccatagatactacagaaccttcatcagaatttgaagtatcataacttaaacggcgattatcccttcttgtatgactgactcttgtccttcttctatttctggatcttctaaagttgtcgaaatagagaatacatgaggtccaccagttgccctcatctccagggaagccttcaaactcgtct

SEQ ID NO: 13378 - DNA, 255 bp, Glycine max
  Clone ID: 701155045H1
gaggatagagatcaccaacaaaatatttgctttttgttttatttcattgcaaccatgtttggctatgcagcagcaataattgcagcaatcctcttcttccaatacttcttccataggagacgatgttgcaaacaccccattttgacagaataccctatcattggcatgctaccacaattactcttcaatttatggcgtgcccatgattattcaactcaggtgttgcaacgacatggtggcactggtgagttcatt

SEQ ID NO: 13379 - DNA, 259 bp, Glycine max
  unsure (1)..(259): unsure at all n locations; Clone ID: 701155046H1
ggttgtgaatcaacataaatattccgttttgcgtttctctgcctaaaaggattgaaagatgggtcaagcactaggttgctatcaagttgatcagtcaaatgtggctatcaaggagcattttggaaaatttgatgatgtcctagaacctggatgtcattgcctgccttggtgtcttgggtaccagattgctggtagtttgtcactgcgtgtgcagcaacttgatgttcgatgtgagacganaaccaaggacaatgtcttt

SEQ ID NO: 13380 - DNA, 262 bp, Glycine max
  unsure (1)..(262): unsure at all n locations; Clone ID: 701155047H1
gnncacgcggcttccgccggangtgnaccgcgtgctgtacgttcggaancttcccttcaanatcaccagcgaggcgntgtacgacatctttggcaaatacngcgcnattcgccagatccgcatcggcancaacaagganactcgcggaaccgctttcgtnctctacgangncatctangacgccaaaaccgccgtcgaccanctctccggnttcaacgtggcnaancgcnactctcgtncnctattatcaacaagcgangac

SEQ ID NO: 13381 - DNA, 261 bp, Glycine max
  Clone ID: 701155049H1
gggaacatggtcattttgaatccgtggaaggttggggttcaatcattttgattttggcctctaatagatagaaattggtcctgaggttgtcccttagtcttaaacccagtagacattttggttcctatgttaagtacaattaaactaacagaaatgcacgagacatggaaacaactttgctccatgttttaggtcaaaattgtttccctcttcactgtctgattggtgttttgataagttcagcattgataatgagaataa

SEQ ID NO: 13382 - DNA, 249 bp, Glycine max
  Clone ID: 701155050H1
gggatagcgatagcaatagtatcgacatctattcctcccggtacccgtatagtatcagaaggaacgtgatatgatgattatgtagagagagagactcagtgaagaaagaaagatatgagataattccttctttatcttttttcatagcagtgaagaaaaaactgagaaagcatgggcgtggactactacaagattcttcaggtagatagaagtgccaaagatgaggatctcaagaaagcatatcgaagg

SEQ ID NO: 13383 - DNA, 245 bp, Glycine max
  unsure (1)..(245): unsure at all n locations; Clone ID: 701155051H1
gggggttccgagggtgttgacgagtctctggaaggtggagacggcagtgttgatctggaatatgccggcagccaccgcttgcgtggggtcttgcttcccattcatcaacccgcgcctcgaaccgaagggcgcccggcctcgatgtcctgaaagctcataattccgtttcactttctcgagaaaatcgggggaattttcctgagaaaggganggaaaaggccaccgggatctgnnngncncagaac

SEQ ID NO: 13384 - DNA, 245 bp, Glycine max
  Clone ID: 701155052H1
gatcacaacatcatagtaagcactatagtaaaaaaaggacattcattcatctatggctacccttattgctcccagcaaccactctccccaagaagatgctgaagctctcagaaaggcttttgaaggatggggaactgatgagaacactgtcatagtaattttgggtcatagaactgtgtatcagaggcagcaaatcagaagagtttatgaggaaatttaccaggaggatcttgtgaagcgcctag

SEQ ID NO: 13385 - DNA, 243 bp, Glycine max
  unsure (1)..(243): unsure at all n locations; Clone ID: 701155053H1
ggtgagtggaaaagacgccataagaaagagcaagtcgaaaagttcatctctccctctctctcacacatcccagccatgagcctcttcggtataggcagaaaccagagaacattccgcccgaaaaaaagtactccttctggaagtaagggncctcaacttagaaaacatattgatgccacgttgggtagtggaaatctgagggaagcagtaaagctacctcctggggaggatttaaatgagtgg

SEQ ID NO: 13386 - DNA, 240 bp, Glycine max
  unsure (1)..(240): unsure at all n locations; Clone ID: 701155054H1
gggtttagagcaacggcagcgcagggttgggctatccatttgtttcgagaatgcggtctctctcagccaacccttccttactgcgacaagctgttccagttttggtcaaaccctacaaatccattcnctctcgagcattcctcttcagctcccctgcctccacatctcattctcacaatactcaatttcttagatccgtcacgtttttctctactacttctcttcgtaactttaattcac

SEQ ID NO: 13387 - DNA, 245 bp, Glycine max
  Clone ID: 701155055H1
ggaatcagttggacggttttgcagaaattgacgtttcaaatttcaattgaagtagcacgcacgtttcatcatccactcgcaatcgcgatcacccgttgccgatcccgaagcagagaaaacctaagccaacatgagtggcgacgccccaacccaaacccaaacccaagccaccgacaccaagaaggccgaggatctcgccggcaacatgtggcagcacttgaaaacgggaccgagttttgcggatg

SEQ ID NO: 13388 - DNA, 247 bp, Glycine max
  unsure (1)..(247): unsure at all n locations; Clone ID: 701155057H1
ggaattccagatcctcaatcggccagcaccaacagcatcggcggcgacagtcactctccgacaacaacacttccgcggcgaaaaatgtctctggtggcgaacgaggatttccagcacattctgcgtgtgctgaacaccaacgtggncgggaagcagaagataatgttcgctatgacctccatcaagggtattggaaggagattcgccaacatcgcttgcaagaaggccgatgttgacatgaacaaaa

SEQ ID NO: 13389 - DNA, 224 bp, Glycine max
  unsure (1)..(224): unsure at all n locations; Clone ID: 701155058H1
gagggaaaaanaaatcaaaattatcttgagcggnaacacagagcagagcacggaaaggaaaaacctcggtagagttgagggtttagcggcagcatagagaatagagatagagcgaattgaaactctctaatggcactctacactcatctcatcnnnnnnnnnnnnnnnnnnnnncttcattcaccttcgcctctatgtcttccaaagcctctcttcccttcttt

SEQ ID NO: 13390 - DNA, 258 bp, Glycine max
  Clone ID: 701155061H1
ggagttcaacgagatggagcaaataaagcacagaatagttgaagtgaatggcataaaaatgcatgttgcagagaaaggagagggtccagtggtgttgttcctccacggcttccctgagctctggtactcatggcgccaccagattctctctctcagctccctcggctaccgcgccgtcgctcccgatctccgtggctacggtgacaccgaggcaccaccttcaatcagcagctacaactgcttccacatagtgggtga

SEQ ID NO: 13391 - DNA, 261 bp, Glycine max
  Clone ID: 701155063H1
ggaagaacaagtcttgcattgggtggagcatacttagaaacagcaactatgtctctcatgcagcttactagctcccctgttggctcactggtccgtttcattgtaatatttgctttatggtacagaaccatggctttggccaagttgccaccaaacgcttcatcagttccagcagttttagcgtttggagattccatcgtggacccaggcaacaacaacaacataaaaacattgatcaagtgcaattcccaccttatggaa

SEQ ID NO: 13392 - DNA, 251 bp, Glycine max
  unsure (1)..(251): unsure at all n locations; Clone ID: 701155065H1
gatggtaattgatcatggtttgttgtatgtatgtatgcagatccagatgcagaagtggtgtccctctcgccgaagacgttgttggaatcggatcgttatgtgtgtgagatctgcaaccagggattccagagggaccagaaccttcagatgcataggaggaggcacaaggtgccatggaagctactgaagagggagacaccagtggtgaggaagagagtntttgtgtgtcctgagccaacttgcttgcacca

SEQ ID NO: 13393 - DNA, 263 bp, Glycine max
  unsure (1)..(263): unsure at all n locations; Clone ID: 701155066H1
ggtcaacactgaattcaaaatcactttcgaccatattctctnctgctnctctctctccatcatggtgcnnncaaggaagttcagaggtgtcaggcagcgccattggggttcatgggtatcggaaattcgccacccttttctcaanaggagggtgtggcnaggnacgttcggaacagcagaagaagcggcacgaacttacgaccaagcncgcgatattnatgagcgggcgtnncgcgaaanccnattcccaatactccaancnc

SEQ ID NO: 13394 - DNA, 251 bp, Glycine max
  Clone ID: 701155067H1
ggcagcagttgagaggaggcactgtggcagaagtcctaggagtgtaaaacagagacgcaaaatgaagacgatcttgtcgtctgagaccatgaatattcccgacggcgtgagcatcaaggttcacgctaaggttatcgaggttgagggccctcgtggaaaactcgtgcgagacttccaccatctgaacttggacttccaacttattaccgacgatggcggtaaaaggaagctcaagattgattcttggtttg

SEQ ID NO: 13395 - DNA, 244 bp, Glycine max
  unsure (1)..(244): unsure at all n locations; Clone ID: 701155068H1
gggaaaagaaaaggaataattatacatanattttggatttcgtacgtagctagctacagaagacaaaggggccttgagtctcgagatcttgtcagatcggaacgcaancgcaactgccaccgagattgctttgtgtgttatgggaagggaagttactggcatacaggttatggaaaagaagccaaatggtgccatagcggcttcaaatggcagtttaagtggtagaatgcgtgtttctcccaaa

SEQ ID NO: 13396 - DNA, 183 bp, Glycine max
  unsure (1)..(183): unsure at all n locations; Clone ID: 701155069H1
ttggattcgaaaatcgtagcgtagcttnggtgcgattgaacgatacgatgggaagaggaaaattcaagagcaagcccactggtcgccgccagttctccaccccggaagatatgcttgctggaacctctaaccgtcctcgaacttttagacagaaagaagctgagcatgaagaggnagaacccg

SEQ ID NO: 13397 - DNA, 249 bp, Glycine max
  unsure (1)..(249): unsure at all n locations; Clone ID: 701155070H1
gatcctcccagatatatttgctaattctggaggagtcacagtcagctactttgagtgggtgcaggtaactattaactgttatgatttcacatggttgcatatttggttcctctcatattaatttgtcatatcatttgaaaaaagctaaaaanaaccancgtaagacctaattacaagaaatactagcaacacatttttctaatattctcttttcaataaattttcctttattgcctaaaattcaagtga

SEQ ID NO: 13398 - DNA, 253 bp, Glycine max
  unsure (1)..(253): unsure at all n locations; Clone ID: 701155071H1
ggcaacaccctttttcctgtctcctcctcaccgctcctcatactctcatggaggagcgggtgtcttcgtcatcgctaccgtcgccatcacccccacctcttgaaaagaaccataataccgacaaactcaagttaccagacttagaccctggcacctnncgttgtccaggtccccaaggaccaagtctaccgtgttccgccgccggaaaacgcccaaatcgccgagagccataagaaatctcctcccaacaagg

SEQ ID NO: 13399 - DNA, 226 bp, Glycine max
  unsure (1)..(226): unsure at all n locations; Clone ID: 701155072H1
ggnacttctcaatcnnaaattttctcncccaaatngtagatctacggttaaattggtgtantgtggtaagatgggaggaggatttagagtgcttcactnagttaggncatcnctctcgtntcttcctgaagttcaaactgctgacaggaaagtgccatttagagagaaggncatatgcacngtgnatctctctgcntcattttcctggtttgtagtcagctcccnc

SEQ ID NO: 13400 - DNA, 244 bp, Glycine max
  unsure (1)..(244): unsure at all n locations; Clone ID: 701155073H1
atagancaaaaactgaaaacccctggttcgtttttggtggctcatatgctggagcactcagtgcatggttccgtctcaagtttccccatttaacatgtggaagtctggcaagttctgcagttgttcttgctgtttataacttcacagaatatgatcaacagattggtgagtcagcaggtgctgaatgtaaagcagtattacatgaaactactcaactcattgagcacaaacttgcaaccaatgg

SEQ ID NO: 13401 - DNA, 250 bp, Glycine max
  unsure (1)..(250): unsure at all n locations; Clone ID: 701155075H1
gatagctgagagagaaaggaaaggttaactaagaagcaatacttcaatggccacccttgttgttcataaccaaacttcttctgctcaagatgctgaggctctccaacaggctttcaaaggatggggggctgatgacaaggccattatagcaatactgggtcacagaaatgttcatcagaggcaagaaatcagaaaagcttatgaggagatttaccaagaggatctcatcaaacgncttgagtccgagatc

SEQ ID NO: 13402 - DNA, 254 bp, Glycine max
  unsure (1)..(254): unsure at all n locations; Clone ID: 701155076H1
ctcctctatatataaaaanatatcagatcaaacaccaactaagaatagtactatttttttttatcgcgaaatagaatgatgtacgaattctagtttgaaancgaaaagaagaaattggagaattgagaaaagatagttatcaggtcgattgcttgtccatnccggattgataatttgttagaggtagtattcgaaaattaaagttgaaaaatanattaagaatttcattaaccanttttcagttaagtaatggt

SEQ ID NO: 13403 - DNA, 253 bp, Glycine max
  unsure (1)..(253): unsure at all n locations; Clone ID: 701155077H1
ggaaaaagaagagagtgtaggtaaacagaagcacacactacacagttaccaaaatcaggttcaaacgcacagatctgggagaagnnnnnnnnnnnnnnnnnnnnnnnggacaggatcagaaccagagatcgctgatctacgcgttcgtgtctcgcggcacggtgattctcgccgagtacactgaattcagtggcaacttcaacacaatcgcgttccagtgcctccagaagctccctgcctccaacaacaagtt

SEQ ID NO: 13404 - DNA, 258 bp, Glycine max
  Clone ID: 701155078H1
ggaagaaagagcaagtcgaaaagttcatctctccctctctctcacacatcccagccatgagcctcttcggtataggcagaaaccagagaacattccgcccgaaaaaaagtactccttctggaagtaagggagctcaacttagaaaacatattgatgccacgttgggtagtggaaatctgagggaagcagtaaagctacctcctggggaggatttaaatgagtggctagctgtcaacactgttgatttcttcaaccagg

SEQ ID NO: 13405 - DNA, 264 bp, Glycine max
  unsure (1)..(264): unsure at all n locations; Clone ID: 701155080H1
gcctacgtaaattctgaatcgttgaactttgttttttttttacaccagaatcgttgaacttcaactttgacaaacatgatacccctggcaactattgactggctggctacagtcagcaatttgctatatatatgattttataatatacttcagatctcatcttcgacgaaaactgtagaaaatagtcaagtgtaatttttttaaaaatgcctccaagaaactaaatgcacaagaacaacgttgaagncagactacagcttgtag

SEQ ID NO: 13406 - DNA, 217 bp, Glycine max
  unsure (1)..(217): unsure at all n locations; Clone ID: 701155081H1
tcccncacttacggtggcaacaatggaggttcgcggtggctgaaggaggagggtagccatggcagtaatgtatcaagaacagttggaggaaatcaggaagcaaatcccattaattgcggtgcaattattgccgaggataaaaaatgggatgaaatggtaattagagatgcaaacataaattttcttgcaactagaaccttggtacacacaggtgcat

SEQ ID NO: 13407 - DNA, 242 bp, Glycine max
  Clone ID: 701155082H1
aaagagacccggaaagggtgggaaccgcttttggaaatccattgggcttggatttaagactcccagggaagccatcgaaggaacctacattgacaagaagtgccccttcactggcaatgtttccatccgtggccgtatcttggctggaacatgtcacagtgctaagatgaacaggactattattgttaggaggaattatctccatttatcaagaagtaccagaggtacgagaaaaggcactc

SEQ ID NO: 13408 - DNA, 241 bp, Glycine max
  unsure (1)..(241): unsure at all n locations; Clone ID: 701155084H1
ggacacagagcgagagagaatcgtgacaaaagcggtaaccggaataagttgtctctacgatttgagccatggcaacaacaacaccctcaaaccgatcatcagaggcgtttgctctcatggcaatcctcagcactctgctttgcacggcggtggcggcgaaggagagcgtgtacgagatactccccaagtacggcctcccgagcggtctgttnncggacaccgtcaccgactacacgctcga

SEQ ID NO: 13409 - DNA, 249 bp, Glycine max
  unsure (1)..(249): unsure at all n locations; Clone ID: 701155085H1
acttgagagcaatagagacgtcgttgagctccgggcacgggttgaagcttttgcaactcagtttgccatgccgggttttgacatttgaacatgaagtggccggtgaattgccattattgattatttacatatgcgacaatggtgtgtcgttgtgcactngntntacaaaagcacatcttgttcttatattttgtggagcttctctcttctctgcatgtatgcagttgtcagattttcacatcttgcagt

SEQ ID NO: 13410 - DNA, 244 bp, Glycine max
  Clone ID: 701155088H1
gtagtaggattgtggaaacaaaaactaatcatgatatttctgttaagcaagagaactctttgtcttcggggatccattccgttggttgccaagagatagatactgcaagcaatatcagtaaggataaaattttggacagaacaaacaatggtgagaatcagcaaaggcctaaacggaaacagatggaagatgatctcgatattaacgtggaggcaacgtttcagagagacctgactgtgaaagc

SEQ ID NO: 13411 - DNA, 242 bp, Glycine max
  Clone ID: 701155089H1
ggcatcaattcaaaatatatcatcaattataagcatgggtttgtggaacacaacgaatgcagtgtcttgccgctttcacaagtttggtgatgaccaaaagaatctggtcttccaaggtgatgcctgtcttcttccagggggcatagaactcacaaagttagacggtggaggaaaaccagtgggtggcagtgtggggagagtgttatactcttctccagtgcacctttgggaaagctctacag

SEQ ID NO: 13412 - DNA, 242 bp, Glycine max
  Clone ID: 701155090H1
ggggaaatgatggatgcaagttgcattaagttaatgcaatatggctatgtttgatactgcatctgtatgatgatagtattgatggctgcagatgctatgctagtttgttagttaggaattggaatacaatgattgcatgatcatagagatgtaatcatagaatcatgatgtataaaatcttggaatttagattattaagctaaattggacaacaataatctcggcatgcagtatcttttttg

SEQ ID NO: 13413 - DNA, 251 bp, Glycine max
  unsure (1)..(251): unsure at all n locations; Clone ID: 701155093H1
ttagttgggtttgtaccaagtttattgggtttatacaatttattttacatttaattctctaaaaatgagctggaatttttaaaaagatattctcttaacaacctagcagaaaacacttgtatgtaagtgttgtaaacttccttccatcgagtgtgataaataaataaaaaacagaaaataagtcatacttactaaaatatatattaatatttttgaacaataataaaatcangatatgtttattttgagaa

SEQ ID NO: 13414 - DNA, 253 bp, Glycine max
  unsure (1)..(253): unsure at all n locations; Clone ID: 701155094H1
atagacttgagtcttagtataattgttgcataatgcatgtgaattatttattatgaaatcancaagtgttgttatgccttgattgagtgggtgattcatgaataatgtgatgagtgatttgaatatgaaatttaaatgataaagtgttgaaataacgtgaattgaattaagtcgagttatgttataaatagttgtataatgtatttttgcttatgctttatntatctgtattttatnttaaaatgtgataacc

SEQ ID NO: 13415 - DNA, 250 bp, Glycine max
  Clone ID: 701155095H1
gacacgttcacattcaggaatcgttttcttcagaaatttgccatcgttgagagaagcgtgagagccttagtcgttcaagatgagagctaagtggaagaagaagcgcatgaggaggttgaagaggaagcgccgaaagatgagacaaagatctaagtaggtgcttgagcaggagttgagatgagctttccatctgctaccagcctcatgacattttaggctgttatggctcttatgatcttgaggtctagtc

SEQ ID NO: 13416 - DNA, 241 bp, Glycine max
  Clone ID: 701155096H1
agagaaagtgaaaattagaaactcttgtacttggttttatgccaaattagggactcttttggttgtcaattagatcacaaagatatggaggttgccatggaactggaagatgatctattttttgctgatttgagcaaggaaattgctctactaattatggatgaagatgaagatccacttgcttcttgtcctcctgactctcttcagctttttctggggcattcatcctcctccacagttt

SEQ ID NO: 13417 - DNA, 255 bp, Glycine max
  Clone ID: 701155101H1
ggagtgtgaagcacatatatctgcagcactgcagtctttggttggccaaagcccggatttggttgtttttctgtctctagttgagagatgttggcaggatctttgtgaccaaatgttgatgatccgtggtatagcctgtttctggataggacatatgtgaagccaaactgcaaatgtccggtcattatgggacatgggcttacaacttttccgcaaacatctttcattgtctccggaagtagaacacaaaactgt

SEQ ID NO: 13418 - DNA, 252 bp, Glycine max
  unsure (1)..(252): unsure at all n locations; Clone ID: 701155102H1
gatgtcatagtattatcattcattctcatctttctctcttctctctccacccaaaccctaactcccgaccctgttcccctctcgtatccgtcatgaaaggaggaaagtccaagaccgaatctaagagagccgatcccaaacttgctgtgaataagangggagccgccaccaaggctaggaaacccgccggcaaggggaaggcagcgaaagacctaacaagccaaagaggcctccaagtgctttnttcgtttc

SEQ ID NO: 13419 - DNA, 251 bp, Glycine max
  unsure (1)..(251): unsure at all n locations; Clone ID: 701155103H1
gtgcaaacaaacgagaacgagacccaaaaactcacacaaacccattgctggcattcatctcaacaaaacccaccgttttctgcgaaaatcaaacccacactcaccactctccaatctcccattctcccctcttttctccaactcaacgcaaccgttacaattgcggccgaatttctcgancttcacttcgaggcgtgttttgtgagcacgaaatacgaatatggatcaccacgaggatgaagtaacagcaa

SEQ ID NO: 13420 - DNA, 256 bp, Glycine max
  Clone ID: 701155104H1
aggagatgatcacaataataatagacacattaccagtgttttactaggaaaaatggtggggtacgcgccttcaagctttgcaaatttggtcttcgccagagaaaggatcgaagtgggtctgaaaagaggcaaacttaatcatcctgcttgagcgaatgagaaaactggggcaaatgaagaaggtgaggatgagggagaaacccatgctgtgactgtcattcctatacggccaagtttcccaccaaaccaacaatgt

SEQ ID NO: 13421 - DNA, 247 bp, Glycine max
  Clone ID: 701155105H1
ggagaaccaaacacgacgctgcgccttgtgtagttgcccaacgccgcgccaccagatagttacacttttttcttcaactcaagagaagagcttccatggagaatgcagacatccctgagaatgccaacgagcattgcccaggtcctcagtctgaatctgctggaaaatctgatgcatgtgaagggtgcccgaatcaacaaatttgtgccactgcccccaaaggactgaccctgatctggttgccatt

SEQ ID NO: 13422 - DNA, 250 bp, Glycine max
  Clone ID: 701155106H1
ggagtggaaaaattgagagtggagaaaagaaaaaaaagttcaagcccctctatataaagaaacttagacaatcaaagccactcatcggtatacattgtcctctccatcttcctctctttcacactcacctatggctcccatctcaaaactcattcctttcctattcttaacaacccttttagtgtctctccaagttaatgccagagacagccaattcttcagcaaagtcaccctctcaacaacaacatta

SEQ ID NO: 13423 - DNA, 151 bp, Glycine max
  unsure (1)..(151): unsure at all n locations; Clone ID: 701155107H1
ggcatcanttcaaaatatatcatacaattataagcatgggtttgtggaacacaacgaatgcagtgtcttgccgctttcacaagtntggtgatgaccaaaagaatctggtcttnccaaggtgangccacgtacttcttccangggcatngaa

SEQ ID NO: 13424 - DNA, 190 bp, Glycine max; identical to SEQ ID NO: 7239
  Clone ID: 701155109H1

SEQ ID NO: 13425 - DNA, 107 bp, Glycine max
  unsure (1)..(107): unsure at all n locations; Clone ID: 701155110H1
gggntacagaatcattggaaacgttggagaccaatggagtgacctcctgggaagcaacaaagggactaggacttttaagctgcctaatcccttgtactatgattaag

SEQ ID NO: 13426 - DNA, 117 bp, Glycine max
  unsure (1)..(117): unsure at all n locations; Clone ID: 701155111H1
agtaagattcaattgtgagattcaaaaatacganagtaaggggccggaaatcttgggntcaaaaggttgtnctaaaggactgtnaatccttgctcctagganncaagangggctttt

SEQ ID NO: 13427 - DNA, 260 bp, Glycine max
  Clone ID: 701155113H1
gatagtattatcattcattctcatctttctctcttctctctccacccaaaccctaactcccgaccctgttcccctctcgtatccgtcatgaaaggaggaaagtccaagaccgaatctaagagagccgatcccaaacttgctgtgaataagaagggagccgccaccaaggctaggaaacccgccggcaaggggaaggcagcgaaagaccctaacaagccaaagaggcctccaagtgctttcttcgttttcatggaggagtt

SEQ ID NO: 13428 - DNA, 255 bp, Glycine max
  Clone ID: 701155115H1
gaagcttagtgatgaccaagttaatctccttgaacaaaactttggaaatgaacacaaacttgagtccgagagaaaggacaggctggcaatggagcttggtttggaccctcgacaagttgctgtgtggtttcaaaacagaagagctcgttggaagaacaaaaagttggaagaagagtactccaaccttaaaaaaaatcatgaagccacttgctcgagaaatgtcgctagagactgaggtgttgaagctcaagagca

SEQ ID NO: 13429 - DNA, 249 bp, Glycine max
  Clone ID: 701155117H1
gacattcaatccctttggtttaatctctctagggttattttctctctcttggattccattcctgcgtcttcatcagagcagccaatggaagcggcggcgacggcaacggcaacagttctcgcaccaccgtcggctttcctcggaagaccctccgtatcgcttcgttccaatcttcgttctccactaagttaagcattctgtagctatctccaagcatggtcatgggagacatgtgttggaatagaaggg

SEQ ID NO: 13430 - DNA, 169 bp, Glycine max
  unsure (1)..(169): unsure at all n locations; Clone ID: 701155118H1
gccacttggtattaaaactttttggatttagttcggcataggaagttagtccaggcttgagatttggagagtgattttccaaccttttaccaagcaaagtgantgccacaatttttttcaccttaacacatggttgattcggctcaaatatagagnaatgntcgtttat

SEQ ID NO: 13431 - DNA, 255 bp, Glycine max
  Clone ID: 701155119H1
caagcagaagcctatttggatgaggaaacctgaagagattacgaaagaagaatatgctgctttctacaagagtcttaccaatgattgggaagagcatttggctgttaagcacttttctgttgagggtcagctggagtttaaggctgtcctctttatccccaagagggcaccttttgatctctttgacaccaggaagaagcctaacaacatcaaactgtatgtccgccgtgtcttcatcatggacaactgtgagga

SEQ ID NO: 13432 - DNA, 253 bp, Glycine max
  Clone ID: 701155120H1
tgttgattcttttggtttaatctttggtacttaactctttttgttgggtattgtggctgcgtttcaattgtagattgctaatgagaacagtggaggttttcctggtgctaaaaaagttgggaatcatggtctagatgtagaacaaaagagtgaaatgcgagttccgagtctggtagctaggttgatgggtctcgaatctattccggcagctcagcgagacaagtccaagaaagccttgtgtgctgatgggaag

SEQ ID NO: 13433 - DNA, 260 bp, Glycine max
  unsure (1)..(260): unsure at all n locations; Clone ID: 701155122H1
ggttgcaatcagacgcttggtgggggcaaaatgaagtttgcaaaagcatccccactctttctttttgcattcagtttgcggtcgactattagatttgatcttgtaattcgtgtactgcgagtcggacggaaaatcaaacatgctcttagttacttttnnctcttttttaatttaattttgatgtgattgtaatgtctttggtgaaatgcttagatggttattcatttttattccttgcctaatgccaacctttttttttc

SEQ ID NO: 13434 - DNA, 251 bp, Glycine max
  Clone ID: 701155123H1
tgtcatcaaaaggatcaaattgggatgagattgactttgaattcttggggaatctgagcggtgacccatacattcttcacaccaatgtgttcagtcagggcaaaggcagcagagagcaacagttctatctgtggttcgacccaactgcagatttccatacctattccattctttggaatcctcagcgcataatgtaagcacttgtcaatggcctaagtaccctcaagcattcctcaaaaatgttttatatt

SEQ ID NO: 13435 - DNA, 173 bp, Glycine max
  unsure (1)..(173): unsure at all n locations; Clone ID: 701155124H1
ggaaaaagggagtgcctgantaacccaaaaccgaccgcaccaccgttttcctttgctttgcgtnctacaatgtcgaaagnctcagagattattacntgcaaagctgctatttgctggggaataggggaaccttnngctgtganagaggcntggtggtccncccaaagcnaccg

SEQ ID NO: 13436 - DNA, 247 bp, Glycine max
  unsure (1)..(247): unsure at all n locations; Clone ID: 701155125H1
ggaagatatattattgtgattgtgaacanaaaagtgtagtgggaaatggcaggtgcgggtgcaggaggagggtatggggacgcgaaccagaggatagactacgtgttcaaggtggtgctgataggggactcggcggtggggaagtcgcagatactagctcggtttgcgaggaacgagttcagcttggactccaatccaccatcggtgttgaatttcagacgaggactttggttatcgatcacaagac

SEQ ID NO: 13437 - DNA, 243 bp, Glycine max
  unsure (1)..(243): unsure at all n locations; Clone ID: 701155126H1
tagagacgaaatcctcatctcaccaatggcgaantggaagacgagcattgattcatcgttctgggacttcaacgtggcgtcccctcagctgcacgaaggatgggtcaagtccgttccgggcgatccgtttccgttggacggctccgtcgccagcagagtgccccggccacgacagctctccgtcatcggaaacgggttgcctcttcccgtcatcgttccctcgctctctcccattcgcccaag

SEQ ID NO: 13438 - DNA, 254 bp, Glycine max
  unsure (1)..(254): unsure at all n locations; Clone ID: 701155128H1
ggtggcagttgtgtgacacagaaattaagctagagcttcatagtttcttcttcttttctcaccttccttctctcccttcagacaaagggacaaaaaatcnnnnnnnnnnnnnnnnnnnnnnnnnttccaaaaccatgtcccacagtcatctaagtttcgcctttgggattctaggtaacattgcctccttcgtgtgctttctggcaccactaccaacattttatagagtttgtaagaagaaatcaaccgaaggg

SEQ ID NO: 13439 - DNA, 267 bp, Glycine max
  unsure (1)..(267): unsure at all n locations; Clone ID: 701155130H1
ggaaaaaaggaagaggaacgaagcaatcgcaagtcgtctgttctgtcccgcgggagcagacgacctgtcttcatcgccaaacaacctcaaaaacattcatcaacgttcactattaatccatccatcattaagtaagaaaataaggttcgatttttttatctttnnttngcttctgatccatcatggaggtgccgagttcctgggatgcccttcgcaaacaggcaagaagacttgaagctcagttggatgagcagatgaattcttatc

SEQ ID NO: 13440 - DNA, 255 bp, Glycine max
  unsure (1)..(255): unsure at all n locations; Clone ID: 701155131H1
ggtggcagttgtgtgacacagaaattaagctagagcttcatagtttcttcttcttttctcaccttccttctctcccttcagacaaagggacaaaaaatcnnnnnnnnnnnnnnnnnnnnnnnnnttccaaaaccatgtcccacagtcatctaagtttcgcctttgggattctaggtaacattgcctcttcgtgtgctttctggcaccactancaacattttatagagtttgtaagangaaatcaaccganggttc

SEQ ID NO: 13441 - DNA, 255 bp, Glycine max
  unsure (1)..(255): unsure at all n locations; Clone ID: 701155132H1
ggcacaagtgagtttgttgatcgagataactagaaacagtgtgatgaaaatgaaggtccttgttttcttcgttgctacaattttggtagcatggcaatgccatgcgtacgatatgttccctctccgaatgaacactggctatggtgcccgtactccggaggtgaaatgcgcaagttggaggcttgctgtggaagcacacaacatctttgggcttgagaccatcctgaagagtgcgttgaagcaacaaanggatac

SEQ ID NO: 13442 - DNA, 94 bp, Glycine max
  unsure (1)..(94): unsure at all n locations; Clone ID: 701155133H1
ctcttcattcanctcatncttccnccaagntcttattgatggccnccnatggtggtgancttctnctagactcatcttctcctngaagnggcnt

SEQ ID NO: 13443 - DNA, 246 bp, Glycine max
  Clone ID: 701155135H1
ggggagagaatagagaagagagatggatccagacgcgttggcaaaggcattcgtggagcactactacagcaccttcgacaccaacaggaacggcttagcgaatctctaccaggagggttccatgctcactttcgaagggcagaagatccaaggcgcttccaacatcgttgccaagctcacctccctcccttttcagcagtgccaccactcatctccaccgtcgactgccagccttccggcgtcaac

SEQ ID NO: 13444 - DNA, 248 bp, Glycine max
  Clone ID: 701155136H1
gaaacagataaggtgacaattgatgtttcaagtcctgagtcaggcgtgattctaaagcttctagccaacgaaggtgatactgttgagccaggtaacaagatagcaatcatttcaaggtctgctgatgcaactcacgttgccccatctgagactatatctgagaaagctgctcctcagccaacccaaaaggttagcgaggagaagaaagccccgaaagttgaaactgctcctgctaaagagaagcccaa

SEQ ID NO: 13445 - DNA, 244 bp, Glycine max
  Clone ID: 701155137H1
gaagcttagtgatgaccaagttaatctccttgaacaaaactttggaaatgaacacaaacttgagtccgagagaaaggacaggctggcaatggagcttggtttggaccctcgacaagttgctgtgtggtttcaaaacagaagagctcgttggaagaacaaaaagttggaagaagagtactccaaccttaaaaaaatcatgaagccaccttgctcgagaatgtcgctagagactgaggtgttgaaa

SEQ ID NO: 13446 - DNA, 250 bp, Glycine max
  Clone ID: 701155138H1
ggaagaagagtcacactcacaccactttgttttaggttaatattgtgaaagagagatcatgagcaaaagagtaaggagtccaaggttggagcttaggctgaacttgtccccaccaagggcagcagcaacctcaattatatcttcttcggagctgtcgcccacagagtcatcgatgtcgtcgccggtgtcggttcaatcgttggagagctcgtgtgtatcctccgaggctgaagagacaagggcatgcttc

SEQ ID NO: 13447 - DNA, 250 bp, Glycine max
  Clone ID: 701155139H1
ggcacaagtttgttgagatagctagaagcaataagatgaaaatgaaagtgcttgttttgtttgttgctacagttttggtagcatatgaatgccatggctcagactaccagaagttccctctccaaatgaaaactgggtttggtgggcaatacagcaatgaggtggcatgtgccagttggaggcttggcgtggaagcaaacaacgtagttcaagtggcaaactgttcctgcagcttgcggagagtacatag

SEQ ID NO: 13448 - DNA, 125 bp, Glycine max
  unsure (1)..(125): unsure at all n locations; Clone ID: 701155141H1
ggaaggaggatgacntccanatctttntttagnctcangttagttacaagcaacgcttatggctcngctattagtgacttaagtgctggacttctactntgcttgatagatgaaannggagattc

SEQ ID NO: 13449 - DNA, 249 bp, Glycine max
  unsure (1)..(249): unsure at all n locations; Clone ID: 701155142H1
gtatcagcaaggattttgngctacaataatgataaattcacaaggtttgactccataagtagcagcaaggattttggctacaatcctgagacgctcacaaggtttgattccatgagtancagcactgatttgggcttcggtcgacagggacatgcaaggtttgactcaattagtagcaccaaggattcggtcanagtggtccgttctcttttgatgactctgatccattcggctctctggnccttttaa

SEQ ID NO: 13450 - DNA, 250 bp, Glycine max; identical to SEQ ID NO: 9698
  Clone ID: 701155144H1

SEQ ID NO: 13451 - DNA, 256 bp, Glycine max
  Clone ID: 701155145H1
attggatttttggttatactatgctacatacttctgtggaggtacacttggtctagtctatagcaataatctgggacagattgcacaatctgtgggccagagttcaaatacttctacacttgtcatgctctatgcatccttttctttttttggtcgcttgctttcagttggaccggactacattcggaataagatctactttgcaaggactggttggctatcaattgcacttataccaaccccagttgcgttcttc

SEQ ID NO: 13452 - DNA, 261 bp, Glycine max
  unsure (1)..(261): unsure at all n locations; Clone ID: 701155146H1
ggaacaagcaaaattaagcacaaaagcccaaccctctctctcgctgttggtctctcctatttggcattcgcagatcgattacgaagtaatttcactgaatcttattgaagatgtttctcacaaggactgagtatgaccgaggagtcaacaccttttnnccctgaaggccgtttatttcaggttgaatatgcaatcgaagccatcaagctgggatcaactgcaattgggttgaagacgaaagagggtgttgtccttgcagtt

SEQ ID NO: 13453 - DNA, 117 bp, Glycine max
  unsure (1)..(117): unsure at all n locations; Clone ID: 701155147H1
gactntgtcagtagtcttcaagctcannaactcttcaacacatgggtagtcanntcanatatgctacttgtttgttcgtcttacactaaattgcatcatttgnngtcttgtctagat

SEQ ID NO: 13454 - DNA, 258 bp, Glycine max
  Clone ID: 701155148H1
gctcataagtcaatttgctgatcgcaacactaaaattcttactccaaaaaactgtcaatctgttgaaatgtatttcaattcgcagaaaatggcaaaaaccatagggaagctggctgaaaaaacaccagaagttggtgaaactgtcagtggtttgcttgtaaaaaaaggcttcacatatcagattatggcagctgatgatctccatgtcttctcacaacttatcaacagcaaacattactcggagggttacctccctta

SEQ ID NO: 13455 - DNA, 172 bp, Glycine max
  unsure (1)..(172): unsure at all n locations; Clone ID: 701155149H1
cagtgccaagccaccatgtttcaacattcaacagaagcctttttccttccacttttctctttggaattggttcttnngcttaccaggcagaaggagcagcaagtgtagatgggagaggaccaagcatatgggacactacactagacagcatactgaaaagatttgggatcat

SEQ ID NO: 13456 - DNA, 228 bp, Glycine max
  unsure (1)..(228): unsure at all n locations; Clone ID: 701155150H1
aagacgacagaagggtagcaagagtggtgaccctgtaactgctgatgatctaggtgttggaggtgctttaacagttttaatgaaggatgccattcaccctacccttatgcagactctggaaggaactcctgttcttgttcatgcaggtccatttgcaaatattgctcatgggaatcttctatgtggctgataggatgcataaattngttggaccaggtggatttgtat

SEQ ID NO: 13457 - DNA, 253 bp, Glycine max
  unsure (1)..(253): unsure at all n locations; Clone ID: 701155152H1
gcacaagtnagtttgttgatcgagataactagaaacagtgtgatgaaaatgaaggtccttgttttcttcgttgctacaattttngtagcatggcaatgccatgcgtacgatatgttccctctccgaatgaacactggctatggtgcccgtactccggaggtgaaatgcgcaagttggaggcttgctgtggaagcacacaacatctttgggctttgangaccattcctgaagagtgcgttgaagcaacaaagga

SEQ ID NO: 13458 - DNA, 114 bp, Glycine max
  unsure (1)..(114): unsure at all n locations; Clone ID: 701155155H1
gacacacattggattgaagtttggaaatttgacacctaccccacaccatcatggcctgnatngacnanttttgggtttccgaccncgntcttctcctcntcgcttnnccncncc

SEQ ID NO: 13459 - DNA, 248 bp, Glycine max
  unsure (1)..(248): unsure at all n locations; Clone ID: 701155159H1
gctgagcaaaaccctaatccctatttttcttcctcagtagtgtcatttacgcttctcttctctgcagcaactatgcctaaccctaaggtcttcttcgacatgaccatcggcggtcaatctgctggccgcatcgtgatggagctctacgccgacgtcactccccgcaccgccgagaacttccgcgcggtttgcaccggcgagaagggcgtagggcggancggcaagcccctccactacaagggctcgtc

SEQ ID NO: 13460 - DNA, 259 bp, Glycine max
  unsure (1)..(259): unsure at all n locations; Clone ID: 701155160H1
gatgcatagcaattcccaattcctaattgtttaaacctaattctcatttcttcatcgttcgattcttctcctcctaaagatgcagatcttcgtgaaaactttgaccggtaagaccatcacccttgaggtggagtcctccgacaccatcgataacgtgaaagctaagattcaagacaaggaagggatcccacctgaccagcagagacttatctttgcgggtaaacagcttgaggatggtcgaacccttgccgatacaana

SEQ ID NO: 13461 - DNA, 264 bp, Glycine max
  Clone ID: 701155161H1
tatccttcaatatgatcagcctagatttagggatcaatggacctacccacaaccacaaagatgcatgtaacgaattcaaaagattctttatcatatcagtcaatactgaattcaagagttgaatagcaaaccttaaggcagtagttcattattagtgcttctaaaatctaaactaactacaagtgaagaaaaggttgataaaaagatctcttagaatttggtcttatggcctatctcatcttattaagggcaggctgcattgag

SEQ ID NO: 13462 - DNA, 114 bp, Glycine max
  unsure (1)..(114): unsure at all n locations; Clone ID: 701155162H1
gaagaagaagaaggagcatggccatgagcatggccatgacagcagcngcagcagtgacagtgattaaactgctgcatcacctatatatttaaaaggtttatgggaccatagtng

SEQ ID NO: 13463 - DNA, 252 bp, Glycine max
  unsure (1)..(252): unsure at all n locations; Clone ID: 701155165H1
gttctcacgtttgtgcttgcacttgcacctctccaacgataacaacgacgagcacaagatccagttacatattattcgagtagacaaggcaggcacatagtatggctggaccttttgagttgggttcatcaaagaagaaaccaggggatggagtnaatgatttactcacttttaatgctgaaaatatgcaaagccaacatgaaaattatttattacagcccgaacatttttgtcatattggtgggttgttgc

SEQ ID NO: 13464 - DNA, 253 bp, Glycine max
  Clone ID: 701155166H1
gaggaggagtcagccagacaagcaagccaccctctgctaccgcttctcatccatcatgtcgaatgaactaaaaaactatgatgtttttctcaattttcatgggcaaagattccggttacaccttcactggtactctctataatgctttgcgcagaagagaatcaagacctttttcacaaaacatgaatatggtcgtaaactacacactgatgacagccacattccaccctttactcttaaagcattaaggatc

SEQ ID NO: 13465 - DNA, 251 bp, Glycine max
  unsure (1)..(251): unsure at all n locations; Clone ID: 701155167H1
gacactaaacaagttaaaagaagagcatcactgaactaacaaagcaaccatatgtcgaaggtggtttgtgtcaccggagccagcggcnccatcggatcatgggtggtcctactcctcctccagcgtggttacaccgtccatgccaccgtccaagatatcaaggatgaaaatgagacgaaacatttggaggaaatggaaggagcaaagagtcatctccatttttttgaaatggatcttcttgacatcgactc

SEQ ID NO: 13466 - DNA, 248 bp, Glycine max
  unsure (1)..(248): unsure at all n locations; Clone ID: 701155169H1
ggagtgttttctcgtttgctgtgctcagctccttatggagntctcactctctccaanttcacatcgagttccttccacaattcncactttgaattccgctanantatcntccactaaggccacnanaaanaacaacctttgttctnaagattttccaaacacttcaactcaattgggttgcaccatcacagncacagatgctgctcaaatgcgttcccgagaaancccagagacccagttncataagg

SEQ ID NO: 13467 - DNA, 247 bp, Glycine max
  Clone ID: 701155172H1
gctattgaatgtctgtattgatgctcagagtaaaaagaacagaaagtcttgggggagtatcaattatcaactgcagaggcttaaccgaggaaggaagtaactcaagatttttcatacgtgtattgtttttgcaattcaagggaagctagcctgttatacactgctttggttgtcaacctagaatgaccatacactaacttgtattctcccttgaagtatcttgatgataaaattctactttttgttt

SEQ ID NO: 13468 - DNA, 246 bp, Glycine max
  unsure (1)..(246): unsure at all n locations; Clone ID: 701155173H1
gntctctcananncttgtcantcctgtagtanncaccactgntgaagntcngaagaactantacaacccanatccacatgctggaantnccccctcanggtcnnacnntagtatccttcantttntnggcatnggaggttttcaaccttcaanttcatcacngtagttccagtactccatcaacaaccttcaggtggaaactgtggatcatcacttccacaacatcatgatccacaacaccctcaa

SEQ ID NO: 13469 - DNA, 244 bp, Glycine max
  unsure (1)..(244): unsure at all n locations; Clone ID: 701155174H1
taatttgggaattattgctcccatcgccattggtttcattgtcggcgctaacattttgttgggtggggccttctctggagcggccatgaaccccgctgtgacatttgggcctgctgtcgtgagctggacctggaccaaccactggatctactgggccgggcctctcatcggtggtggaatcgctggccttgtttacgaggttgtctttatcagccacacccacgagnagcttcccaccactgat

SEQ ID NO: 13470 - DNA, 251 bp, Glycine max
  Clone ID: 701155175H1
ggcacaagtttgttgagatagctagaagcaataagatgaaaatgaaagtgcttgttttgtttgttgctacagttttggtagcatatgagtgccatggcccagactaccagaagttccctctccaaatgaaaactgggtttggtgggcaatacagcaatgaggtggcatgtgccagttggaggcttggcgtggaagcaaacaacgtagtcaagtggcaaactgttcctgcagcttgcggagagtacatagct

SEQ ID NO: 13471 - DNA, 251 bp, Glycine max
  unsure (1)..(251): unsure at all n locations; Clone ID: 701155176H1
ggcacaagtgagtttgttgatcgagataactagaaacagtgtgatgnnnatgaaggtccttgttttcttcgttgctacaattttggtagcatggcaatgccatgcgtacgatatgttccctctccgaatgaacactggctatggtgcccgtactccggangtgaaatgcgcaagttggaggcttgctgtggaagcacacaacatctttgggctttgagaccattcctgaagagtgcgttgaagcaacaaag

SEQ ID NO: 13472 - DNA, 254 bp, Glycine max
  Clone ID: 701155177H1
gaacccttatctatatcttcttatagcttcatcccaaaaagctcttttccttctaaatttgattccttagttcagcattctattattatatatggcttcttcaccttcctcagaaaacaaaaacctagagggagtagctggtggtgccggagagaaacccattccacttggtgagaacgttctgcagaagcatgctgcattctttggacttgaataaagatggtgtcatctacccatgggagactttaaagggt

SEQ ID NO: 13473 - DNA, 252 bp, Glycine max
  unsure (1)..(252): unsure at all n locations; Clone ID: 701155178H1
gatcgaagcaaaaaatgaaaacccaaagtgcttctctcctctgtctttttctctctcttgctatccttttggctagtngcactgctgcaagtgcaactccaagaagcgcagtgccaagccaccatgtttcaacattcaacagaagcctttttccttccacttttctctttggaattggttcttctgcttaccaggcagaaggagcagcaagtgtagatgggagaggacaagcatatggggacacctacatag

SEQ ID NO: 13474 - DNA, 250 bp, Glycine max
  unsure (1)..(250): unsure at all n locations; Clone ID: 701155179H1
ggttttcattgggtgctgatcggaacaaacagggaatagaagagaggagaagatgggtttcataatggaatttgcggagaacttggtattaaagttgatggaagatccgaaggaaagggatcggnggttcagggagcacgtttatagagtgaaggncaggtgcgagaagacgaaggagatgtggagctaccctatgcgacctatgggttttggacattcgaacgccacaattcccagcttgcttgggatg

SEQ ID NO: 13475 - DNA, 249 bp, Glycine max
  unsure (1)..(249): unsure at all n locations; Clone ID: 701155180H1
gggatacaagagncntccccttaccactgttgattngntccgtcttaanccagtgttcgaagagaagtctgtgactcagctagcgtcccatttgctctgtcgtacgtgtttggtggccatcgncatcantgagctctgtcgaaggtgtgtgtcgctatctccattcgtctactcagggcctgttnaaggtgtgtcncgccnctgtcgngtctacgaatgngccagttagtgccgcttnagatcggctta

SEQ ID NO: 13476 - DNA, 251 bp, Glycine max
  unsure (1)..(251): unsure at all n locations; Clone ID: 701155184H1
ggcacaagtgagtttgttgatcgagataactagaaacagtgtgatgaaaatgaaggtccttgttttcttcgttgctacaattttggtagcatggcaatgccatgcgtacgatatgttccctctccgaatgaacactggctatggtgcccgtactccggaggtgaaatgcgcaagttggaggcttgctgtggaagcacacaacatctttgggctttnagaccattcctgaagatgcgttgaagcaacaaagg

SEQ ID NO: 13477 - DNA, 251 bp, Glycine max
  Clone ID: 701155185H1
agtgaggtttggagaagagagagatgggaaaggagaagaagaggtatcttctgaaaacggaaccgtcggagtggtcgtgggaggaccaggcagcaaacggaggcataagcaaatgggatggggtgaagaacaagcaggcccagaaatacctcaagtccatgtccatcaacgacctctgcttcttctaccactccggccccaaggcccgccgtatcgtcggcgttgtttccgtcgtccgcgagtggtacggc

SEQ ID NO: 13478 - DNA, 262 bp, Glycine max
  unsure (1)..(262): unsure at all n locations; Clone ID: 701155188H1
gctatttcttgttcccactaagaaactattttgatccgctacagcgcntcnacnttctagttaataagttaaagcnaaactttgtttaaatagatttgattgttttcnaaaaatggnggtttttttataaaaaaaaagtttaacatgttcttggatgatataatgatgtgacatgagaaaaggnaagaagaaattatccaagtgtttgtgctataaatttgtataattaaggtaagaagttaactctttattataaaatagt

SEQ ID NO: 13479 - DNA, 241 bp, Glycine max
  Clone ID: 701155189H1
ggtgccgtgagagaagaagggagagaaaagaaaatgggtagaggagaagatcgagaaggggtcgcagcagccgggggctttttctggtcctacaccgacgaaccccatgccacacgacgtcgtctgatcctctccaaataccctcaaatcaaacaatctttggccccgaccactccgcttttttcaagattagtggagttgttttgcttcagttggtatggtgctttactccatgatgctg

SEQ ID NO: 13480 - DNA, 257 bp, Glycine max
  Clone ID: 701155193H1
gggaccggcaccgggaaaagagtggaagcagagagagggatgatcatgataaggatagaagcagggatagagacagggacaggagaagacgagccaaataagaacatttcagatgtttcagcagagatttgataccttaatgatttgcaaattggctgtaagagtcaggaggacagttggcttttcgtcatcacagggatattggcaatgtgaaacctcctgttgggagataggaatgaaacatctgccaggatagt

SEQ ID NO: 13481 - DNA, 144 bp, Glycine max
  Clone ID: 701155194H1
gcttgagagccatggggacattgttgagctccgggcacgggttgaagcttttgcaactccagtttgccatgccgggttttgacatttgaacatgaagtggctggtgaattgccattattgattatttacatattcaacaatggt

SEQ ID NO: 13482 - DNA, 258 bp, Glycine max
  Clone ID: 701155195H1
ggaaaccgagaagaagaagatggagatgtatcagatctggagcaggagaatagcgttgggagcgttcgcgtttgttctgcttttcctatcggcctcagcagacgacgtcgttgtgctctctgaagataacttcgagaaggaagttggtcaggacagaggagctctcgttgagttctatgctccttggtgtggacatgcaaaaagcttgctccagaatatgaaaagcttggtagcagcttcaagaaagccaaatctgtt

SEQ ID NO: 13483 - DNA, 263 bp, Glycine max
  unsure (1)..(263): unsure at all n locations; Clone ID: 701155196H1
gagagctgagctgcgaaaacccccaactccaacctctgttcatcgtcctaccgcgctttcttttcaaccagaactatgattaagctttttaaagtaaaggaaaagcagagagaacttgcagaaaatgcaagtggcggaccacctgttaagaagcaaagtgctggagagttgcgtcttcacaaagatatnagtgagctgnatctaccaaaatcatgtancatgcaattccccatggcaaagatgatctgatgaacttgangttt

SEQ ID NO: 13484 - DNA, 262 bp, Glycine max
  Clone ID: 701155201H1
ggaagataaagaaaagagaaatggcaacagaaacaaaagtggcagtattaggtggcatcaccgaagtgcagggagctgccaacagcgtcgagatcaacaatctcgctcgctttgctgtagaggaacaaaacaaaagagagaattcagttctggagtttgtgagggtgattagtgcaaagcagcaagtggttgctggagtgaattactacataacattggaagcaaaagatggtgagattaaaaatgagtataaagcgaagtt

SEQ ID NO: 13485 - DNA, 264 bp, Glycine max
  Clone ID: 701155202H1
ggcggcaaacatggagtttctaagctacactacacagtcggggaagcaatggattcgttctcaaatcaatcgagagggtcgtcgagccaattatctgctcaggatctcaaaaaccagttgaagaaccaactcgccattgagtatgctcaacaacttcttgagacagtgggaagaaagtgttttgagaagtgtgttacaaaaccaggttcaagcctcggtgggagtgaaagcagttgcatctctaggtgcgtagatcgatatatt

SEQ ID NO: 13486 - DNA, 113 bp, Glycine max
  unsure (1)..(113): unsure at all n locations; Clone ID: 701155203H1
cgcnctcaacaacaangangcatcncctccgnttttctctcttacantagtcattatgttcgtattggtattggttcgaataaatgnctcnttcgccatctcttgaaccctgg

SEQ ID NO: 13487 - DNA, 259 bp, Glycine max
  unsure (1)..(259): unsure at all n locations; Clone ID: 701155205H1
ggcccattgttgttgctattatcatccgcagctagcttttattcgnaccgcaaaccagtgagccatggccgtccggaaagaacaagcgcatctccanggggaagaagggtggcaagaagaaggcagttgatccctttgccaagaaggattggtatnacattaacgctncntctgtttttgnagtganaaatgttggcaaaaccctacgtctcttctactcanggtaccaagattgntctgangganncaancntagatt

SEQ ID NO: 13488 - DNA, 256 bp, Glycine max
  Clone ID: 701155206H1
ggcgtctgtaaattgtaaattgcatcatccctgaagctgaacctcaaaaccctagctgtccgcctgtctgcaacggcgtcgttatgatcagttgagaatccaaaggaatcgagtcgaatcatctgaccggcgacagttatgtacagagagcgaggaggcgtcggatccaaattcggaggtaacttccgttgatcggaagcgaatcaacgacgtcctcgataaacagcttgaacgttcctcgccttccacatccaga

SEQ ID NO: 13489 - DNA, 252 bp, Glycine max
  unsure (1)..(252): unsure at all n locations; Clone ID: 701155208H1
gagagtggagtanaaaaaaagagcagtgtaaganattagaaagggcgaaaggtcgcactttatctgaaagcaaaaaccctacctagggtcaaccgtgacgccacaatcgccttcggcatctttgcaacgggatcaggtgctcctcgtccttcacgatggcgggaactgaagccaanaaaactgantccagnaaacctgccgntaagcaatccggtgcgaagaanaaggagtggagaaggnaacnngttnggt

SEQ ID NO: 13490 - DNA, 252 bp, Glycine max
  Clone ID: 701155209H1
aaggttaactaaattgttttaattttacaattctttaattttattattaattttatataatattaagattgatatattatgagcgtgtttgaaacacatcaatgtacaaaataaaaaatgaacatggtgggacataattcacggaaaacattatcccttgtaagcatggtatatattttgggagagataaatttcttggatctccgtatcttaagagattaatcattgactctcgataaaaaatactcggat

SEQ ID NO: 13491 - DNA, 261 bp, Glycine max
  Clone ID: 701155218H1
ggaagttagaatacaggtgtgaattaagtaaatcaatggatagtcttggtcctattgaaaataccagtctaagggaagaccctaaaattttaaccgatatagaaaaaaaaattcacagggatttggattatttagaaatggaaggttttttttctagcgatctgaatactgtttctaagaatgatgatgatcattacatgtatgagactcaatttagttttaacaataatattactagtttcattgatagttgcattgaga

SEQ ID NO: 13492 - DNA, 264 bp, Glycine max
  unsure (1)..(264): unsure at all n locations; Clone ID: 701155220H1
gaattaacatatatatagcaagcatggcagtcacactctacgaccttagctcttcctctgggttgaanaaacttgatgagtaccttctcacacgcagttacatcaccggntactnnngctacaaaggatgatcttactgtttatgcagctttgccaactgctccatcagatgaatatggaaatgtttccaggtggtacaagcacattgatgcttgttgagaatctctggtgttactggcgagggatctggtgttattgttgagg

SEQ ID NO: 13493 - DNA, 248 bp, Glycine max
  unsure (1)..(248): unsure at all n locations; Clone ID: 701155223H1
gcattaagagctgctactaatgctgcccatttagttttagattctctggaaggattttactgtacagaagtgtcaaatcaggacctaaagaaggatggtaacttattgggtctcgtcgaacctgtatcatgctgatggaatgtttatgtgatttccgcncagctcaggttgtgtttctaatgtgatttcagaggatatcaaggacagggcaaaagcagttgctgaagaatggaaacccagattggatg

SEQ ID NO: 13494 - DNA, 215 bp, Glycine max
  unsure (1)..(215): unsure at all n locations; Clone ID: 701155225H1
gggattttgntaacctatcggctgcgtccgcggtgatgctgtgtttggagacttggtatttcaggtgctcgtgctcattactggctgctgataaccctcaactctctcttgattctatctcagtttgcatggcaataacagggttgacgatgcatattggaattggatttaatgcagctgcaagcgtgagggtgggtaacgagtgggagctgagc

SEQ ID NO: 13495 - DNA, 255 bp, Glycine max
  unsure (1)..(255): unsure at all n locations; Clone ID: 701155226H1
gatcacaattcacaaagagncaattcaacttaagagatcaatatgngccaccaccactanccagcctccctctaatatctgttttntccttctgttgttgctctagcacactttcatttgggcataagccaacttgagctgaattactactctaaaagctgcccaaaagctgaagagatcatcaaggaacaagtcacacaactatataacaagcatggnaacactgccgtttcgtgggtcagaaatctcttccac

SEQ ID NO: 13496 - DNA, 249 bp, Glycine max
  unsure (1)..(249): unsure at all n locations; Clone ID: 701155227H1
gctgccanagcatnagctactctctctnaccancgcactgtgcaaagcanaccaaaactgtgtgncaatttanttatgcnacaatgactctcctncctttcctcactttcaatatttgtcatcaattttagaatttccttctgtttggccatgctgttgcgaaacggtggcaaaaaaantctcattcgcagcgttaganaactctcctttgaggttctcacctaaaggccctgcgctggaantgnatcg

SEQ ID NO: 13497 - DNA, 248 bp, Glycine max
  unsure (1)..(248): unsure at all n locations; Clone ID: 701155228H1
catcatcatcaccgttgattgaagaagatgccgatcagaaacatcgccatcggaaggcctgaagaggctactcaccccgacacgttgaaggcggggttggctgagnttcatctccaccttgattctcgtgttcgccggttcaggttccgggcatcgcctacaacaagctcaccgacaacggcgccggcactcccggcggccttcatctccgcttccatcgnccatgcnttcgcctcttcgtcgncgtt

SEQ ID NO: 13498 - DNA, 226 bp, Glycine max
  unsure (1)..(226): unsure at all n locations; Clone ID: 701155229H1
ggaagggggtttganaaaggttgacattgaaattncgaagccatggttcttgactccattctgacatctcctcgtctcaagtctccatctttcaggagacagtttaaaaaggatgaactgggtagttggtccacacttttccagaggcatcgcttcctcttatctgctcttgttctgctaactctcctctgcactgtttatctttactttgctgtcactttagggg

SEQ ID NO: 13499 - DNA, 249 bp, Glycine max
  unsure (1)..(249): unsure at all n locations; Clone ID: 701155230H1
actcataanaaaatatanaaccatgtttattatgtctntnactatagaananatttatgaaaaagtaaaattattttgtaggtctcacttattaattaaatgttcttttgattttgtagtttttttaaatcaacaatagantgtgtattaganataatatattagngaatagtttgctaacactttaaatnaataattgtcaaganattattaantaatatgagatcatcgatcatnatttaattaatc

SEQ ID NO: 13500 - DNA, 256 bp, Glycine max
  Clone ID: 701155231H1
gcaccctgatatgatacacgtacgtatgatcccaattaaattaatctatatgaaataaattaatctctagataattagatgatatctcttacgataatggattgattgttgctgagagaaattctgctgcgaaaatctctgtccattgtactagcagcaacggtgaaggaccagggtgcaacatttgtgacacttaaaggtgctggtccatcatttccagcagagcaaactacgactatgtttctggcaactgcat

SEQ ID NO: 13501 - DNA, 271 bp, Glycine max
  unsure (1)..(271): unsure at all n locations; Clone ID: 701155232H1
ggatctatgattangnnggctacaatgacttgggcgatccagataagggtgaaaagtatgcacgccccgttcttggaggttctgccttaccttaccctcgcagaggaagaaccggaagaggaaaaactagaaaagatcccaacagtgagaagcccagtgattttgtttaccttccgagagatgaagcatttggccacttgaagtcatcagattttctcgtttatggaatcaaatcagtggctcaagacgtcttgcccgtgttgactgatgc

SEQ ID NO: 13502 - DNA, 266 bp, Glycine max
  Clone ID: 701155234H1
ggctggcaattaactcacgagggctgcacattcgacaatgggtggggagcggaacaaggtcttctctttggccgaggtctctcagcacaacaatgccaaagactgttggcttgtcattcatggcaaggtttataatgtgacaaagttcttggaggaccaccctggaggggatgaggtcctgttgtcttccacagggaaagatgcaaccaatgattttgaggatattggtcacagcaccagcgccgtagccatgatggatgagttct

SEQ ID NO: 13503 - DNA, 254 bp, Glycine max
  unsure (1)..(254): unsure at all n locations; Clone ID: 701155235H1
ggagacagcgtagggtaactgaaagagacgaaggaaatgaagaagtcttcgggaagcgcagtgancaaaaaganggtgcgacgctcatccgcaccagatcccacctccgacgctcctcctaggaaacaagttgtcaagaaagatgtgttccaggtttttgctgagaaggttagagatcataaggaattggtttcaaggtgggctgttctacaggagacgcgtgttgagtattttagagggaaggattttgtgac

SEQ ID NO: 13504 - DNA, 247 bp, Glycine max
  Clone ID: 701155238H1
gggtaacaaacaaactaattacattattccaacctttttttctcttttcctatttccattttctcggcaaccaaacattccaatcaattaactcgtattttatattattatttttaattcgcggtaggaattcgttttctctgatcgggatctggaagggaagcgaatcgacatgggtttcttggtgacgacgctgatcttcgtagtgatcggaatcatcgcgtgcctctgcaccagaatttgctgc

SEQ ID NO: 13505 - DNA, 226 bp, Glycine max
  Clone ID: 701155239H1
ggtagccgaatatggatttgatcaaggcttggaggttgagtccttctgtaagtgcaattccctcaccattctgtgctgctcccatttgtgtaagaactttctcttttcagttttcaacttcgccctacactcgtccaaagcctctagttcctattccacgtggcaaaagtagagactctgattctgagccgcttctagaatcttccatcgtgcaagaagtttcatt

SEQ ID NO: 13506 - DNA, 249 bp, Glycine max
  unsure (1)..(249): unsure at all n locations; Clone ID: 701155240H1
gggtccaacatgtccttcaatgcgttagnaactataaaaggacgtgtgcatgccacttttctcttcacaattcattcatcaatccattgttcactttcacatcaactcaagagattcaaccaagtcatagaagctagctagggtgtattgttacatttgttagcaaaaaacttgaaaaaatggagagcagcttgggagacatgttgattaaggttgtggtgttcatctagttcaagccttggtgtacct

SEQ ID NO: 13507 - DNA, 246 bp, Glycine max
  unsure (1)..(246): unsure at all n locations; Clone ID: 701155241H1
tgcgtnaatttgaaacacttgtancttcatcgttgtcagtannntggtggnatccacaggtttcaaatcttcgtcccccaacttacccacttgagcatttcctggatnggnatgaatgaaatgtttgattctgattgtgttgttgagcttttcacgccanagcttcantattntagataccatgactctgatctgtatgattnttctattgagggcaaccttcctnttanagnacaagtggntatt

SEQ ID NO: 13508 - DNA, 129 bp, Glycine max
  unsure (1)..(129): unsure at all n locations; Clone ID: 701155243H1
ggatgtgcttgtgtagtantgagaactggatagacagagtgtagtacgtgaaaaggaaagcgcaagaagaaagcacagcctctactacatcatcccatttcagtaccttttctttctgagtctcagttt

SEQ ID NO: 13509 - DNA, 254 bp, Glycine max
  Clone ID: 701155245H1
gcacaagtgagtttgttgatcgagataactagaaacagtgtgatgaaaatgaaggtccttgttttcttcgttgctacaattttggtagcatggcaatgccatgcgtacgatatgttccctctccgaatgaacactggctatggtgcccgtactccggaggtgaaatgcgcaagttggaggcttgctgtggaagcacacaacatctttggctttgagaccatcctgaagagtgcgttgaagcaacaaaggaatac

SEQ ID NO: 13510 - DNA, 254 bp, Glycine max
  Clone ID: 701155246H1
ggaaggagtgaggtagcaacagcactgccactgccactaccaatagcagaatgggaaccttgggcagagctttctacgccgtcggattttggatccgcgagaccggccaagccatcgatcgcctcggctctcgtctccaaggcaactacctctttcaagaacagctatctaggcatcgacctctgatgaatctgttcgacaaagctccctcggttcacagggatgcattgtggcccccagtgctccctcctcgg

SEQ ID NO: 13511 - DNA, 256 bp, Glycine max
  Clone ID: 701155247H1
ggtgcacagcttgaacacaccgcgtttcggagagagacgtcgcaatggggaggaggcctgcaaggtgttatcggcagataaaaaacaagccataccccaaatcacgcttttgccgtggtgttcctgatcctaagatcagaatttatgatgttggtatgaagaagaaaggtgttgatgagtttcccttctgtgctcatctggttagctgggaaaaagaaaatgtttcaagtgaagcttggaagctgctagattgcat

SEQ ID NO: 13512 - DNA, 242 bp, Glycine max
  unsure (1)..(242): unsure at all n locations; Clone ID: 701155248H1
aanngaagccatctcactancatcttaaccanagaagtagtttggcatcaaatgntttctccaaattctgcaactgtggtggaaaacgtgatagtattcgacagaatgccaattattctggcaaaatatgntggagtgatcaatactcaacagaagacaacttgagggtatgaagtactttttgangagncaaaattggaggtcagacaattcaatcagnatggggaagaagnttgagtagg

SEQ ID NO: 13513 - DNA, 253 bp, Glycine max
  unsure (1)..(253): unsure at all n locations; Clone ID: 701155249H1
gatcgaagcaaanaatgaaaacccaaagtgcttctctcctctgtcttnntctcnctcttgctatccttttggctagtngcactgctgcaagtgcaactccaagaagcgcagtgccaagccaccntgtttcnacattcaacagaagcctttntcctccactttnctctttggaattggttcttctgcttaccaggnagaaggngcagcaagtgtagnttggngagaccangcatntggggnacctgcacnagac

SEQ ID NO: 13514 - DNA, 251 bp, Glycine max
  unsure (1)..(251): unsure at all n locations; Clone ID: 701155250H1
gggagaaggctgatttgatcaaggtcagtgatgcgganttgagttcctcacaggaagtgacaagattgatgatgaatctgctttgtcattgtggcaccccaatttgaagttgctccttgtcactcttggggaacatggttccagatactacaccaagagtttcaaaggatcggtagatgctttccatgtcaatacagttgatacaactggtgccggtgattcctttgttggtgctttattggccaagattg

SEQ ID NO: 13515 - DNA, 247 bp, Glycine max
  unsure (1)..(247): unsure at all n locations; Clone ID: 701155251H1
gggggacatcatatgtgatttgtcccatgttctcaagagcatgctattagctaatgtttggggatttcaagttataagactctcagtggtggtgcatccccgattgtgtgagaatgagaaagagagagtgtgtgtgtgtgcagaagangtggccattcnagcaggaaaagggctcnggnttttcatcatcatccacggcagaacaagtcacngaaggaattgatggaactngtctcactgccatgtc

SEQ ID NO: 13516 - DNA, 244 bp, Glycine max
  unsure (1)..(244): unsure at all n locations; Clone ID: 701155253H1
tgaagctgtcttattgatgattgaaaatcccgccagggctaatggacatatttttaatgtgggaaacccaaacaatgaggttacagttaggcagcttgctgaaatgatgactcaggtttattcaaaggtaagtggagaagcacctctggaaaaacctactattgatgtgagctccaaagaattttatggtgagggatatgatgatagtgacaagagattcctgacatgaccatannnaaaaggc

SEQ ID NO: 13517 - DNA, 289 bp, Glycine max
  unsure (1)..(289): unsure at all n locations; Clone ID: 701155254H1
aantcnaactcgncnacnncnngtnnttccaattanangnaatgtactaaaattcaccgcgatagagatcatgcntgaaagaataatgaccatcgtcacttgggttgtgtacttgaaagcagagacatttaggttggtcaaaagtttatccaaatatggtccaaagattaacnaggtagctgattgatatggacatgtttgatacaaaagttgggtagaagaaaccttaaacttcttctggatggtanttgtcnnaatctgagcaacgcntgttgtaatcaccgcgggc

SEQ ID NO: 13518 - DNA, 232 bp, Glycine max
  unsure (1)..(232): unsure at all n locations; Clone ID: 701155259H1
gggcatcaattcaaacatatatcatcaattataancatgggtttgtggaacacaacgaatgcagtgtcttgccgctttcacaagtttggtgatgaccaaaagaatctggtcttccaaggtgatgccacgtcttcttccaggggcatagaactcacaaagttagacggtggaggaaaaccagtgggtggcagtgtggggagagtgttatactcttctccagtgcacctttggg

SEQ ID NO: 13519 - DNA, 251 bp, Glycine max
  unsure (1)..(251): unsure at all n locations; Clone ID: 701155260H1
gaccacagttttttctctcatgcacctactaatagcaanaaaaaaagctaagagggataattacattccncctctcctnnnnnnnnnnnnnnnnnnnnnnnnnnnnnnnnnnnctccgtgcgtgacctngaattactgatattttatattttaaccagctatatatattacaagaaaacatagatagtgtgtgttcatcagcttattctcaaacctgatatggagtttgtggataccagaaaactacaatt

SEQ ID NO: 13520 - DNA, 261 bp, Glycine max
  unsure (1)..(261): unsure at all n locations; Clone ID: 701155262H1
ggagttctactaagaaaccatatttccacgtatccttaanaagcacttcagggganagccatattacgttgatcttcttgattngnttaatgaggttgagttccagactgcttcaggncagatgntagatctgatcaccacactggaaggaganaaagacctgtctaaatacacattaacactgcatcgacgtattgttcagtacaagactgcatattattccttttaccttccggttgcatgtgcattgctcatggcggg

SEQ ID NO: 13521 - DNA, 252 bp, Glycine max
  Clone ID: 701155263H1
gatgcataagagcaagcacaaggtctgattcgtgtttccttacatcaacttgtggtctaaaaatgggaaggatgccatgctgtgagaaggtagggttgaacaaaggaccatggaaaaccgaagaagatgagaagctcgtggcttatgttgaaaggcatggccctggaaactggcgttcagtgcctgccaaagcgggtcttcaaagatgtggcagagttgtagactgaggtggatcaactacctaaaccctat

SEQ ID NO: 13522 - DNA, 253 bp, Glycine max
  unsure (1)..(253): unsure at all n locations; Clone ID: 701155264H1
ggtgccagtctcaatcgagggttgccaccatcgtcccccgtcgaacaagttctatcccataattaattctgtcgaggctagacttcctcatgtgtctattaatgatgctcgtctttgcaaaccgggaacacttgatcctagaaaagtaaggggaaagatactaatatgccttcgaggtgataaattaacttcagttagtganggccaacanggtgctcttgctggtgctgtggcattttgtgcaaaatgatga

SEQ ID NO: 13523 - DNA, 248 bp, Glycine max
  unsure (1)..(248): unsure at all n locations; Clone ID: 701155267H1
gatgggatttagagagagagagaacttcaactganggtgagagtgacacaaatctagggagcactactctaaaagttctattagattcttcaaaacatgaccatgcatcgcgagtcttgggcttttgtcttcggcgttatgggcaacatcatctcctttggagtgttccttgctccattgccaaccttttaccaaatctacaagaagaaatccactgaagggttccagtcacttccttatgttgttgc

SEQ ID NO: 13524 - DNA, 246 bp, Glycine max
  unsure (1)..(246): unsure at all n locations; Clone ID: 701155268H1
gtgtcttccgctctttatcttttctaagactatcttagtctttcatcgagacttcaaatgtctcccttactttgcaagacttcaaggtcttgtgcncgntataccatatgcctcttatgctctttcttttgacaggtttcgctgattaggctttcgctagtggtcgctcgggtggtgagatcgctcgaacgaaattaatgtctttatatttacttcccgttatctccaataaaagataagtgaagg

SEQ ID NO: 13525 - DNA, 250 bp, Glycine max
  unsure (1)..(250): unsure at all n locations; Clone ID: 701155269H1
ggcagagagaaganggncagagtgagaaagagaganagggaganaganactgagagaaattcgcaaaccctaatttcggaaagatcggcgatggctgcctccaaggatcgcgagaacttcgtctacatcgccaagctcgccgaacaggccgagcgatacgaagagatggtggaatcaatgaagaacgttgcgaatctcgacgttganctgactgtggaggagcggaatttactntctganannngaagna

SEQ ID NO: 13526 - DNA, 129 bp, Glycine max
  unsure (1)..(129): unsure at all n locations; Clone ID: 701155270H1
ggtgtncaattaacntcacacaanaaaaccttnntcgttcctctctgaactctctcnttactgtganccganagtcatgacgggggtcatctcttcaacaacatcagcctcggangncgnggaggcacc

SEQ ID NO: 13527 - DNA, 248 bp, Glycine max
  unsure (1)..(248): unsure at all n locations; Clone ID: 701155272H1
gggagaccgaaagaccggnacataaggcgggcaagagagtttgtttcttctctctttcaatggaaggncggcgaacangnactcccttcggccaccaccgtcgccgccgcnggatatcccaacgtctctgcctcctncgntcgctgatncctgtcggtgntttccgatctcgctgctgatgcctcggacgacgttgttgcggaacctgaaattcaccgctgatttcagacgnagagcacgatcacnnt

SEQ ID NO: 13528 - DNA, 217 bp, Glycine max
  unsure (1)..(217): unsure at all n locations; Clone ID: 701155273H1
gggattttgttaacctancggctgcgtncgcggtgatgctgtgttggagacttggnaatttcangtgctcgtgctcattactgggcttgctgataaccctcaactctctttgattcatctcagtttgcatggcaataacagggttgacgatgcatattggaattggatttaatgcagctgcaagcgtgagggtgggtaacgagttgggagctgagca

SEQ ID NO: 13529 - DNA, 266 bp, Glycine max
  Clone ID: 701155274H1
cttctcgacccttttaggggttgcgttaatttgaaacacttgtatcttcatcgttgtcagtattatggtggaatccacaggtttcaaatcttcgtcccccaacttacccacttgagcatttcctggatgggaatgaatgaaatgtttgattctgattgtgttgttgagcttttcacgccaaagcttcaatattttagataccatgactctgatctgtatgatttttctattgagggcaaccttccttttatagaacaagtggatat

SEQ ID NO: 13530 - DNA, 246 bp, Glycine max
  Clone ID: 701155275H1
ggcacaagtgagtttgttgatcgagataactagaaacagtgtgatgaaaatgaaggtccttgttttcttcgttgctacaattttggtagcatggcaatgccatgcgtacgatatgttccctctccgaatgaacactggctatggtgcccgtactccggatgtgaaatgcgcaagttggaggcttgctgtggaagcacacaacatctttggctttgagaccatcctgaagagtgcgttgaagcaaca

SEQ ID NO: 13531 - DNA, 259 bp, Glycine max
  Clone ID: 701155279H1
ggtgcacagcttgaacacaccgcgtttcggagagagacgtcgcaatggggaggaggcctgcaaggtgttatcggcagataaaaaacaagccataccccaaatcacgcttttgccgtggtgttcctgatcctaagatcagaatttatgatgttggtatgaagaagaaaggtgttgatgagtttcccttctgtgctcatctggttagctgggaaaaagaaaatgtttcaagtgaagcattggaagctgctagaattgcatg

SEQ ID NO: 13532 - DNA, 251 bp, Glycine max
  unsure (1)..(251): unsure at all n locations; Clone ID: 701155281H1
ggaaattccaattttcaacattgtcccctacctttcccacaggttaggccttcgtctttattacctgacctgtgctaccacccaatcacctttccttccattatttcattccattccatatctcaccattcaccaacaccancacanntnataattcaattaactggcacaagatactccagattagaagcttgtagttgttgntaaactttgattggtatctccacatttttngtggtagagttgttggg

SEQ ID NO: 13533 - DNA, 249 bp, Glycine max
  Clone ID: 701155282H1
ggaagaagaagcgatgagttcgggtagcagccacagcagtgagaaggagaaggagaaacagagggtgagtcgcacgtcgctgatactgtggcacgcgcaccaaaacgacgccggatcggtgcgcaagttcctccaggaggatccctcgctcgtcaaggccagggactacgacaaccgaacgccgctccatgtggcgtccctccacggctggatcgacgtcgccacgtgcctcatcgagttcggcgccga

SEQ ID NO: 13534 - DNA, 247 bp, Glycine max
  Clone ID: 701155283H1
gattaaagtaaaagaaaaacttgacaagtgtaataaagagaagttactggagttctgtgatgtgcttgacttaacaattgccaggccaacaacgaggaaggaagatattattgctgtgctgatagactttttagttgcccctcatgcaaccacaactgtgttacttgcagaaaaagacaagtccagtaagggcaaaaagcgcaaacatgttgtaaaacagggttcatcaagatctgcaacaacttca

SEQ ID NO: 13535 - DNA, 214 bp, Glycine max
  unsure (1)..(214): unsure at all n locations; Clone ID: 701155284H1
cagcacccatttggatcctctcttctcttctttgatctccgttaccctttttgttttctcannnnnnnnnnnnnnnnnnnatctttcgaagttcgtttgcgtgtgttgtgtggtcagtcaccgatggcagcaccacctgcgagggcacgtgccgattacgattacctcatcaagcttcttcttattggcgatagcggtgtgggaaagagttgtc

SEQ ID NO: 13536 - DNA, 250 bp, Glycine max
  Clone ID: 701155285H1
ggaagttacgaagattctgtagagaagaagagcaatggcgtccaacgattccgattcgcagatgaagatcgtacatggcgatgctggttacatacttgaagacgttcctcacttcgccgactatattccaaatcttcctacatatccgaatccgcttcgatccaatcctgcttactcggttgttaagcagtatttcgtgcacatggacgacgctgttcctcagaaggttgttgttcacaaggatagtcca

SEQ ID NO: 13537 - DNA, 245 bp, Glycine max
  unsure (1)..(245): unsure at all n locations; Clone ID: 701155286H1
tactaaaattcaccgcgatagagatcatgcatgaaagaataatgaccatcgtcacttgggttgtgtacttgaaagcagagacatttaggttggtcaaaagtttatccaaatatggtccaaagattaacnaggtagctgattgatatggacatgtttgatacaaaagttgggtagaagaaaccttaaacttcttctgaatggtatttgtcataatctgagcaacgcatgttgtaatcaccgcgagc

SEQ ID NO: 13538 - DNA, 245 bp, Glycine max
  unsure (1)..(245): unsure at all n locations; Clone ID: 701155287H1
gatccctcccttgttctgcactgcggccgataacaattttctgtttngtgtnattttnttgtnctttgtntacagctctgcgagatcttgagtcgccgatttganaagatgagnaagcttncagagtgatngctttncgtgaagccatctcagtccntcatggccgattccaaggagaagaatcgcaaatttgtggagaccatcggactccaaatcggtttgaagaactacgatccacagaagga

SEQ ID NO: 13539 - DNA, 245 bp, Glycine max
  Clone ID: 701155290H1
gcacgtgtaaaagctaaacatgagaagtttagggagtagggaagcggaaagacctaaatttccctgcgaatctcagagaaatcatggaatttctggtcggggaggtggaggaacacaccgtactcgtcattgttgtctaggttgggcttgcgcttggtgcccacgagctggaggacgagggggcggcgcgtgcagatgtcgttgccgcgggggaggaagtcgcggccaacaaaggcttcgaggac

SEQ ID NO: 13540 - DNA, 247 bp, Glycine max
  Clone ID: 701155291H1
aaagagacctggaaaaggtgggaaccgcttttggaagtccattgggcttggatttaagactcccagggaagccatcgaaggaacctatattgacaagaagtgccccttcactggcaatgtttccatccgtggccgtatcttggctggaacatgtcacagtgctaagatgaacaggactattattgttagaaggattatctccatgttatcaagaagtaccagaggtacgagaagaggcactcaaata

SEQ ID NO: 13541 - DNA, 250 bp, Glycine max
  unsure (1)..(250): unsure at all n locations; Clone ID: 701155293H1
gggtggtgtagtatgtatgagtttgaggaagaagaatgagaagaaagagcaggggcaaacgtaggcgtgcngcatctgcaacaactctgagtccttcttccctctccgccattcccattctttgggatgcgtatgataccatctgcattcactgcaatancnaangcgaggaggccaaggaggatggacttttgatttgcagcgggaggggctgccccgtcgntgtccatgcnacctgcntcgccaccgg

SEQ ID NO: 13542 - DNA, 267 bp, Glycine max
  Clone ID: 701155294H1
ggagaatagttatactttaatatttcttttcccatatgatgagtgtggtgatgggtgggtgagtccgaattgtgaaagtaagcaaagatggctttcacggaatcgtctctcctccttccttcggtttcaggaaccaacaagaacaagaacaaggttccagaagacaaatggtatttagcctacattgtgtattttaccctgggtctcggttaccctctcccatggaacgctttcatcaccgccgttgattacttctcctttctctac

SEQ ID NO: 13543 - DNA, 256 bp, Glycine max
  unsure (1)..(256): unsure at all n locations; Clone ID: 701155295H1
gatgcataagagcaagcacaaggtctgattcgtgtttccttacatcaacttgtggtctaaaaatgggaaggatgccatgctgtgagaaggtanggttgaacaaaggaccatggaaaaccgaagaagatgagaagctcgtggcttatgttgaaaggcatggccctggaaactggcgttcagtgcctgccanagcgggtcttcaaagatgtggcaagagttgtagactgaggtggatcanctacctanaccctaatat

SEQ ID NO: 13544 - DNA, 255 bp, Glycine max
  unsure (1)..(255): unsure at all n locations; Clone ID: 701155296H1
ggtgncantctcaatcgaggcttgccaccatcgtccccgtcgaacaagttctatcccanaattaattctgtcgnngctatacttcctcangtgnctatnaatgatgctcgtctttgcaaaccgggnacacttgatcctagaaaagttatgggaaanatacnaatatgccttcgnggggataantnaacttcagttagtgngagnccancanggtnctcttgctggnnntgtggcagatttgtggcanatgctgnc

SEQ ID NO: 13545 - DNA, 280 bp, Glycine max
  Clone ID: 701155301H1
gtcctcaatttttttaacacactaccaaccccaaatcctaaggttcatttcaatatggcaatcttgtcaagttttgctcctttgaccattcttagtttagtcttgttagtggttggaatcattgtgtctggggttgaagctaggccaagagcattctttgtgtttggagattcacttgttgacaatggaaataacaattacttggccaccacggcacgtgccgatgctcctccttatgggatgattaccctccaagtcatagaccaactggtcgtttctc

SEQ ID NO: 13546 - DNA, 273 bp, Glycine max
  unsure (1)..(273): unsure at all n locations; Clone ID: 701155302H1
gaaacagataaggtgacaattgatgtttcaagtcctgagtcaggcgtgattctaaagcttctagccaacgaaggtgatactgttgagccaggtaacaagatagcaatcatttcaaggtctgctgatgcaactcacgttgccccatctgagactatatctgagaaagctgctcctcagccaacccaaaaggttagcnaggagaagaaagccccgaaagttgaaactgctcctgctaaagagaagcccaaaacacctcctgccactctgaagtct

SEQ ID NO: 13547 - DNA, 266 bp, Glycine max
  unsure (1)..(266): unsure at all n locations; Clone ID: 701155303H1
atatttactgatattggtgcatttctttgagaaagttactaattcctagatagaggcaaaaatgttgggaattttcaaggagaagttggttaaagcacccaaagagctgaacagtccagcttcgttgaattcatgcactaagcctaagctaagtcacgaaatcctcaggatttcatgtcctgnaattcctccaatgcttctcaatgngcttgggaataaagctttgcagcctatncccctnnaaaaagcccccntncacnagggng

SEQ ID NO: 13548 - DNA, 274 bp, Glycine max
  unsure (1)..(274): unsure at all n locations; Clone ID: 701155304H1
gggatttatctgtttgttgaatacaataaaactccggataatactctcactgtcggtgatgatcaaactctagttcaacttggccgacccatgctagtggctgtgtctctgtccgacagttttttagatgatttgcccaaggcttggtttatttacttatttattggaattggtgcagtcctctttgtcatttcttgtttcggttgtattgccagctctgacacggaatgggtgctgcctgagcttttatcngttttagtgtgttgttgactag

SEQ ID NO: 13549 - DNA, 280 bp, Glycine max
  Clone ID: 701155306H1
gacataataataagctttggggtgtggtgtatcaaacgtgttcttgacctctcattaatggagagccggccagagctgtgggggaagtacacttatgtactcaatcgcctccagggcatcattgatctggctttctccaagcctcgtagtcccatgaccccatgcttttgccttcaagttcccatgacttaccagcagaagtcaggctcacctccttccaatgggatgctgccccctgcatcaaaaccagggccgtggaaaatgcacaatgcgtcagtgg

SEQ ID NO: 13550 - DNA, 272 bp, Glycine max
  Clone ID: 701155308H1
tttcttttcttccttccctatgactgagaataggcctcaggagaaaaaaagaagattgtaggggtgttctacaaagggaatgagtatgcttcgaatcccaattttgtgggatgtgttgaaagagcattgggtatacgtgagtggttggaatcacagggtcaccagtacatagtcactgatgacaaagaaggacccgattcaggttatatatatatcttgctaacttaattcaactttatataacatccatctatcttgagagtagcttatgg

SEQ ID NO: 13551 - DNA, 253 bp, Glycine max
  Clone ID: 701155311H1
acctttaagcttcctaatcccatgtactacattgagtagcaccttcacctctctcaacaatctagctagagtttgctcctatctatatgtaataaggtatgctgatatgcactattcaaataggagcattagctatgtttgttaatgtcactttatgttatgtgtctaagtcacctaagacactccacgtacctacttgttgtctcttacgcggtttaataaatcttctgcccttgttccatatttaccaaag

SEQ ID NO: 13552 - DNA, 281 bp, Glycine max
  unsure (1)..(281): unsure at all n locations; Clone ID: 701155312H1
ggagactaagaggtaacagcctctcgccagaaaggaggcagagaccgagagagcaactgcacgcactgtaactctctcaccgtttcttccgctttgatggaacagtacgagaaggttgagaagataggcgagggaacatacggcgtcgtttacaagggtcgcgaccgctccaccaacgagaccatcgccttgaagaagattcgcttggagcaggaggatgagggggntcccagcaccgccattcgcgagattctcncttgaaagaaatgcagcacagganc

SEQ ID NO: 13553 - DNA, 256 bp, Glycine max
  unsure (1)..(256): unsure at all n locations; Clone ID: 701155313H1
gggaagttttgtanngtggtttagtgtcaaatangcggcgagtagaagcacttttcctctgatganatacttgagagtgcgcgtcgacgctncttccccgcaacactcccttaaccctcgctcccaactttttgattcgacgcttctgtgaaagaggttaacgggttgttttctcgacaagtctgaggtcaacagatcgcgtcatttcctgnggtcaaaaacttccagaaattgatccctcaaaggttaaccctaa

SEQ ID NO: 13554 - DNA, 273 bp, Glycine max
  unsure (1)..(273): unsure at all n locations; Clone ID: 701155314H1
ggagtgggagaggcagcaagaagagaaaaaggggaatggcatggttgcagttgcagagaatcatcaccaataccaagggaggtgctaatttgatctcaccgctcccacgattcttctcgaaatgttccccctatgttttgaaagttnggaatacnngattttctaaagggnattgggaagggggntnattcccaggttcccnangttngaatcnaanncggggttttcnnaaanttttngganttgngcccctnaacncagaagaangngttt

SEQ ID NO: 13555 - DNA, 281 bp, Glycine max
  unsure (1)..(281): unsure at all n locations; Clone ID: 701155315H1
gacttccagatttcaaagaaggcgtcttcataaacgcctttcttctccgtttccgtttcctcgttcgaattcgctttttgatctgcgaaaatgagagagtgcatctcgatccacattggtcaggctggtatccaggtcggaaatgcttgctgggagctctactgcctcgagcacggcatcgggcccgatgggcaaatgccaagtgacaagacagttggcggtggtgatgatgctttcaatactttcttcagcgagactggtgctggaaacacgtccnaact

SEQ ID NO: 13556 - DNA, 273 bp, Glycine max
  unsure (1)..(273): unsure at all n locations; Clone ID: 701155316H1
ggcatcggatttgatagatgaagctaaaaatgctggtcaacaaggtcttgcggggattttggtgtggatgagattcatggctactaggcagctcatatggaacaaaaattacaatgtgaagccacgtgagataagcaaagcacaggatagggcttncagacttgctccaggatgtttatgcaagttacccacagtataggganattgtgaggatgatcttgtcgactgttggtcgtggaggtgnanggagatgtccggacagaggttcnggat

SEQ ID NO: 13557 - DNA, 264 bp, Glycine max
  unsure (1)..(264): unsure at all n locations; Clone ID: 701155318H1
gacccctctctcgagggcctctggatcgaacccagcagaagtggtccttggatgatcgtttcgaaccttannnnnnnnnnnnnnnnngaaggttcaatttcagaaggattcggtggtaaaatcccatctgcataagcattgttctgattcagagatgcagctgcagtggcggcagctatggcagacaacaatcccgctgcgtacgttttcgccattgaaggaagaaggnacaagaaaaggggttttaaccaaaatcctctcttt

SEQ ID NO: 13558 - DNA, 193 bp, Glycine max
  unsure (1)..(193): unsure at all n locations; Clone ID: 701155319H1
gtattgctcatgactcatgtttgaatcttccttggtttaaccgcaattatacaactaacgagataataaaactttgttggaagttgaaggttctgattagaagatagtgatttgttgcgttgtgatttattcagnaagaaagtgncaaattagttccaatgaggaagagngaaagtgaaagtccccnttccnc

SEQ ID NO: 13559 - DNA, 263 bp, Glycine max
  Clone ID: 701155320H1
gaaagaggaagaaccagtatcgcggaatccgccagcgtccatggggaaagtgggctgctgagattcgcgacccaagaaagggggttcgtgtttggcttggaactttcagcactgctgaagaagctgcaagagcttacgatgctgaagcaaggaggatccgtggcaagaaagccaaggtgaatttccctgatgagccttcaggcgctgcttcctcaaaacgtctcaaggcgaatccagaggctcagccaatgaagaaaaatctg

SEQ ID NO: 13560 - DNA, 264 bp, Glycine max
  Clone ID: 701155322H1
gggtgtgggtatatagccaaccagaaaagggctgggtatttttgagtgtgtgagagagcgagcgagcgagcagtttcaaagagaggatttgggattgggaaggcgagggattgcgctgcgtctcttcctcttctctttcgattcatccctcattcataatcttccaatccaacaacctcagcctcacactcacacatacacacatctgaacgcgtatcgtccctcccatggcttcaaagcgcatcctcaaggagctcaaggact

SEQ ID NO: 13561 - DNA, 274 bp, Glycine max
  unsure (1)..(274): unsure at all n locations; Clone ID: 701155323H1
tgttggccaataatttcatgtgtagatgaatagaagtattgattagatgtataattatgtggcaattatagtgacaataattgctgccatgccaacaggatcctttacaacagttgaccattaggcaagaggaaatctggatttcatcatgnttcaatccttgtagccacaattgcaagttggaagtaacatgtttccaaaacgctggcatgtgactaacatgatgagattattgatgaatcaagtcttaacagatgaattttactagaaccac

SEQ ID NO: 13562 - DNA, 269 bp, Glycine max
  unsure (1)..(269): unsure at all n locations; Clone ID: 701155324H1
gggagagaggggcactgactcacacccacaatagtcgggggcagcttcaaagtacctccacattgnctcctactcttactgttctcttctcttctcatcatntttattntttccaatcaaaccnaacaaganataagcaccgctcttttctctccgaaatccccatctcccttcacttctgagctctggangaggtcccagntctcaccatctntcacgcactctnccatcagattcaacccttgcgtttaacgcnaatcataanttga

SEQ ID NO: 13563 - DNA, 264 bp, Glycine max
  unsure (1)..(264): unsure at all n locations; Clone ID: 701155325H1
gacacaccgtttgttctattcttaactcaacttctgctanccactctcttcttccaagtccaaccacgcttttctctacagtcatgggcaaggtcaagatcggaatcaacggatttggaagaattggccgtttggttgccagagtngctctgcaaagagacgatgtggagctcgttgccgttaacgacccttcattaccaccgatacatgacatacatgtttaaatacgacagtgttcacgacatggaagcatcacgatgtcac

SEQ ID NO: 13564 - DNA, 270 bp, Glycine max
  unsure (1)..(270): unsure at all n locations; Clone ID: 701155326H1
ggcacaagtgagtttgttgatcgagataactagaaacagtgtgatgaaaatgaaggtccttgttttcttcgttgctacaattttggtagcgtggcaatgccatgcgtacgatatgttccctctccgaatgaacactggctatggtgcccgtactccggaggtgaaatgcgcaagttgnagggctngctgtggaaannncncacntnnnttngcttngggaccntncnnaaagngnncnttaaancacanaagggttacctcangggngaa

SEQ ID NO: 13565 - DNA, 215 bp, Glycine max
  unsure (1)..(215): unsure at all n locations; Clone ID: 701155328H1
gaccatccccatttcgcgttggtgcaaagcatcctccgtttcaatttctctctctcagcgctttctgcaatcgaacctttcatctccaaagggatccacaggccgaaggagaaatggggctgacattcacaaagctttcagtcggcttttcgcgaagaaggaaatgcgaattctgatggttggtcttgatgctgctggtaagnccatnacctgta

SEQ ID NO: 13566 - DNA, 263 bp, Glycine max
  unsure (1)..(263): unsure at all n locations; Clone ID: 701155329H1
cgccctcaacaacaacgacccatcccctccgtttttctctctaacactagncattatgttcgtattgttattgcttcgaataaatgactctttctccatctcttgangccgtgcctggccancananccatgatncatcatcatcgaanagataaatttntggagtaatngtnaactcttaggtagaccaccataatggaattaggattanttatatggatacttnttatccaccaaaacncaattgaaatgggcnctatggt

SEQ ID NO: 13567 - DNA, 199 bp, Glycine max
  unsure (1)..(199): unsure at all n locations; Clone ID: 701155330H1
aactgccgatgatccgagangcgtgtctcagagtcttggtgctgtgcactattttcctcaaggaggctgcggcttatgggcctttgcctccgctgaaattggtganatgatgactaggganttccgcagggtgaggagganccnagtgaacttgaagttntttgttnggaggnaaggaagatagtggccggaaagggaa

SEQ ID NO: 13568 - DNA, 272 bp, Glycine max
  unsure (1)..(272): unsure at all n locations; Clone ID: 701155331H1
ggcatcaattcaaaatatatcatcaattataagcatgggtttgtggaacacaacgaatgcagtgtcttgccgctttcacaagtttggtgatgaccaaaagaatctggtcttccaaggtgatgccacgtcttcttccaggggcatagaactcacaaagttagacggtggaggaaaaccagtgggtggcatgtgggggagagtgttatactcttctccagtgnacctttggggaaagctctacagtgggtcgcnaagctttgaaacccgacttc

SEQ ID NO: 13569 - DNA, 283 bp, Glycine max
  unsure (1)..(283): unsure at all n locations; Clone ID: 701155332H1
gagagaggaaagactttaccgagtccttacgcgttgtttgtgtttgcgtcggaaggaaganaagatgagtgagaatttgatggaganagtgagcgcactgggagagcgcctgaaaatcggaggcgtggaagtggggagaaagatgagcgaangggatnatctccatgagtttcaaggctcaaggagtttcttccaggcctggggccccaatcagggccgacaagcttgtgggaggacgctacnttncggaggcctgggacgagcccgaatgggcctcnatctc

SEQ ID NO: 13570 - DNA, 264 bp, Glycine max
  unsure (1)..(264): unsure at all n locations; Clone ID: 701155333H1
ggcacaagtgagtttgttgatcgagataactagaaacagtgtgatgaaaatgaaggtcctgttttcttcgttgctacaattttggtagcatggcaatgccatgcgtaccgatatgttcctcntcgaatggacacgggtatggggcccgtactccggaggtgaaatccgcaantngnaggcttnntttggagccnncacanncttgggtttnnngaccattcctgaagagtgctnnagncaccaagggatcnttnccngcnganc

SEQ ID NO: 13571 - DNA, 264 bp, Glycine max
  unsure (1)..(264): unsure at all n locations; Clone ID: 701155335H1
ggagttctactaagaaaccatattccacgtatccttaaaaagcacttcaggggaaagccatattacgttgatcttcttgatttgtttaatgaggttgagttccagactgcttcaggacagatgatagatctgatcaccacactggaaggagaaaaagacctgtctaaatacacattaacactgcatcgacgtattgttccagtacaagncggnatatncncctnanccccngggaanangggatnccccaggggggggggtnnc

SEQ ID NO: 13572 - DNA, 261 bp, Glycine max
  Clone ID: 701155336H1
ggatctacactcataaatcattacatggtcatagtctacacctaattagccaaacacaccacagcaccaaactagttggctcaattctctttgaatggctttggaggctttgaattcaccaacagcagccaccactcccttccgtggttaccaagaagaggaggaggaggttgaccttcacctacgcgagccttgggccaagagaaaacgctccaaacgacctcgttttgagtcggaggaagagtattggctctttgcctc

SEQ ID NO: 13573 - DNA, 264 bp, Glycine max
  unsure (1)..(264): unsure at all n locations; Clone ID: 701155337H1
cacttttctactttgagtcttcttgatccttctttttctccttgaactcaaacatggcagatgaggtggttctgctagatttctggccaagtccatttgggatgagggtcaggattgcacttgctgaaaagggtatcaaatatgagtacaaagaagaggacttgaggaacaagagtcctcttctcctccaaatgaacccggttcacangaagttccggttccccatccacaatggaaaacccattgggaaccccncattggtnt

SEQ ID NO: 13574 - DNA, 258 bp, Glycine max
  Clone ID: 701155338H1
gaggccaaggaggagttcctcttggctcttgagtctgctgaggctggagggaaccaatgggcttacttgctaccccagatttatgtcaacctcggcatcgcactcgagggtgaagggctggttttgagtgcctgtgagtattatagggaggctgcgattctttgtcccacacattttagagctttgaagctcttaggtagtgctctttttggtgttggggagtatagggccgcggtgaaggcattggaggaggcaata

SEQ ID NO: 13575 - DNA, 264 bp, Glycine max
  Clone ID: 701155339H1
ggagtcgaaaaatgtcagacggaacattgcaggtactggacggaacgcacctgagaggcgtcgatctgtccttaggcgacgacggtccattcaccggagctaacatactcgacattgcccattcccgagcctcttcttccctcttcggtctctcattacccgattatctcaaagcctctgctctcacgcgcctccggcactccaggacgccgatgttttccgctccgccgagtacaccgccgacaagggcctccgagattctcc

SEQ ID NO: 13576 - DNA, 266 bp, Glycine max
  unsure (1)..(266): unsure at all n locations; Clone ID: 701155340H1
gggagagcagatactatagctancagtgagagggtgtggtgtgggggttgcattgcagtatcatcagaatcanagttgagttgancccttcattccattaactatnnctcttaacaatgcaagcagcaattgcagccatggccgcccacactattctcttttcttccttcccagctcctcaatccattgcccttcccgncacttaccaagaaagccgntgcaatccctcaaggggcattcctccgtccatggccttgtcactctaa

SEQ ID NO: 13577 - DNA, 263 bp, Glycine max
  unsure (1)..(263): unsure at all n locations; Clone ID: 701155341H1
ggtattgtagattgtagatccatccactccctcgcacaggcatcaggtgagtttgttgtgatttgaatggagggaantggaggtggcggtggcagtggcggtggttcaccttctgcacctgtgaagcaatacttgcaggaattctcgaagctttttcagtactatctggataaatccactccccatgccctctacagatggattgggactttcgtgattgcatccatctacgttctgcgtgttgtttatttgcaggggtttac

SEQ ID NO: 13578 - DNA, 267 bp, Glycine max
  unsure (1)..(267): unsure at all n locations; Clone ID: 701155342H1
tggacttatgaaggtaatacattataaaaactgacaaccagtatgatatatgtcacatcttaatttgaacaaaaagaaagatataaaataaaataataacttcaatttagttattaaaataatatcanataatattaaaaaactcattatacaaccatttattttttaatttttaaggccctttttagtcatggaccttgtgtggttacacctccaaatagggacctaaaatcgacactagatccaatttgatgtaaatggtggtnc

SEQ ID NO: 13579 - DNA, 268 bp, Glycine max
  unsure (1)..(268): unsure at all n locations; Clone ID: 701155343H1
gatagcagagaaccttcagaaaccctaatttctcaaaatcttcagaggacacacagcacaaccaacacctccacagcctctcctacctcccggagccatggccgccgccgactcctccgccgctccatcgcaccagttgtcgtagagggagacggacatccagatgatgctcgccgccgacgttcacttcggcaccaaaaaactgcgatttcagatggaacgcttaggtnttcaagcggnagaaccgatggtatttacataattaacc

SEQ ID NO: 13580 - DNA, 145 bp, Glycine max
  unsure (1)..(145): unsure at all n locations; Clone ID: 701155344H1
gggagagaggggcactgactcacacccacaatagtcgggggcagcttcaaagtacctccacattgtctcctactcttactgttctcttctcttctcatcatttttattttttccaatcaaaccaaaccaagacatangcacgcnc

SEQ ID NO: 13581 - DNA, 274 bp, Glycine max
  unsure (1)..(274): unsure at all n locations; Clone ID: 701155345H1
gagacaagaagaggccttcactctgaaccaaataccatagtcttctctttgtctgagaaaatagttccccccaaaaataaaatgaacaagggtctctcctttgtgctgctgattcttctgatccactacaacaacgttgtcaacgccaacaacaaaaactgtgtcacagaggtttgcctcatcggcaacaatgatttgggagtcnagaattctacttcggttcccatgtgggccagantgctctacggatgtgaggccaatctgtgtctggcca

SEQ ID NO: 13582 - DNA, 145 bp, Glycine max
  unsure (1)..(145): unsure at all n locations; Clone ID: 701155346H1
ggacgcagcaatctttcccgtgaaaagggaccatggaggcaaattcaggtgccagcgaccgaatttcgagaatcgccggccacctccgcccccagagagaggatgatgtttgtttgaagcgtaganttgccgtncaaaaggtggg

SEQ ID NO: 13583 - DNA, 157 bp, Glycine max
  Clone ID: 701155347H1
aatggagaagctttgaagcacaaagctttccaggggaacatttctgattataatccacatacagattcatctacttctactgttgaggttgtccgtttggtggcaggcaacatgactactggacaactttacagtcatctaatacccctcacactat

SEQ ID NO: 13584 - DNA, 264 bp, Glycine max
  unsure (1)..(264): unsure at all n locations; Clone ID: 701155348H1
gttgaccaatatggatgataaatatgatgtctatagaggtnagangggtggtttggcaggactgcagaacttggggaatacctgcttcatgaacagttctattcaatgtttagtccacactccaccantttctgaatattncttacaagattacagtgatgaaatcaacatgggacaatcctttaggaatgcgtgtgagttagcactgcaattggtnactgttgaggaaactgtggtcttcagggcgnactgctaatgcgcccc

SEQ ID NO: 13585 - DNA, 267 bp, Glycine max
  unsure (1)..(267): unsure at all n locations; Clone ID: 701155349H1
ggagctttagattcttttcccctagattcagccacagttggaaaaaaaaaaaaagttgttcgaganggcacgtacgaagcaaactgctcgnaagtccacaggaggaaaggcacctaggaagcagctcgcaaccaaggctgcacgtaagttctgcaccaactactggnggtgtgaanaagccacatccgtnatcgtcctggtaccgttgctcttcgngagattaggaantaccagaagagtaccgngntttgatcaggaagctcccct

SEQ ID NO: 13586 - DNA, 275 bp, Glycine max
  unsure (1)..(275): unsure at all n locations; Clone ID: 701155350H1
ggaaggtgaaggtgatgatggaattggaagtcgacgagaacgacttgaaagccgccggtgctgagctcttcgtcgacggtggtcggcgcggcattcgcatcaatggctgggtgatcgagactcggaggcactccatactcaactcttccacactccaagagtgggaacagaatctcganacgtctcatttaccagaaatggtttttggggaaaacactttgattctaaaacacttgagcagtggcaccaacattcattttaatgcatttgagncc

SEQ ID NO: 13587 - DNA, 237 bp, Glycine max
  unsure (1)..(237): unsure at all n locations; Clone ID: 701155352H1
gagagtgagaganactagtgactgacttttcganaaaggaaaaaaaaagagtttccggcattattccatcatgaacgctcttcccattcttctcttcttcctcttcgtttcggcattaggtattgttgttcccttcctcttcttcccaatctgcaaaaatttccaacacctctttctttttattgctcttcattcttcgccgcattttcaatccgcagttacttcagatctcgttaa

SEQ ID NO: 13588 - DNA, 261 bp, Glycine max
  unsure (1)..(261): unsure at all n locations; Clone ID: 701155353H1
ggaagcaattcattcaataatataatgatgattcttcatgttaaatctttgcccttctgattaaccttgcaacttggttctaccacctctctctcccaaactctctttgttgtgctgcttcagcgtctgcaggtagcaaagatggcgacattgactgcttcaagtaacttagtctctagaaattcccatgtccncncatggaccaanaatgctcatanggggtctaaagccgttagcatgggncttgagnncttganagng

SEQ ID NO: 13589 - DNA, 258 bp, Glycine max
  Clone ID: 701155354H1
ggaaaaagggtctttttctcctctagctgtccctaggactctcccaagtgcagcaaggatgatcccaaggactagtagtggcaatagtagtgctagttcctcacatgaaaccaaggttattcagcaatcagcacctctcaacattcctgattggtcacagatttataggaacaagccaaacaagaccacccccaagagtgtttcaaggtttggtgaggactatgatgatttctatcatcattctgttaatgatgaggg

SEQ ID NO: 13590 - DNA, 259 bp, Glycine max
  unsure (1)..(259): unsure at all n locations; Clone ID: 701155355H1
ggaaggaagagagaatagaacgccatggatgagatattgaacaaggtggggtcttactggttctccaagaaggccagcaaggaatttaactctgtcggcgatgatatcaactcactgtcaaccagtattgaagggggaaccaaatggttggtcaacaagttaaaaggnaagatgcaaaaggcntaacagagttgctaaaggagtatgatctacccataggaatctttcctcgcgatgcgacaaactacganattaacgg

SEQ ID NO: 13591 - DNA, 256 bp, Glycine max
  Clone ID: 701155357H1
gcaagccatgcccaaaaatacttcattcgtttgaactcaatgaacaaagatagaaggcgatccagcatacatgatatcaccagtgttaacaatggagatatttcagcacctcaagggccaataaccggtcaaacaaacggttctgctggaaattctactgccaaagcagccaaagcggccaccccggccttcaactggggtgccaggtgttggaatttatgcagctccaaccattggacaacctataggaggaccc

SEQ ID NO: 13592 - DNA, 266 bp, Glycine max
  unsure (1)..(266): unsure at all n locations; Clone ID: 701155359H1
aatactaattcttgcaattcatctggaggatcatcttcaggtttgacttcgacgtggcaatcgatgaagactggctttcagagtttcaaggtgaacataggggccaaaaagtttttacctctacggcaaatacaggnaaataccggctctagnacaccccgcgtnngacncncgatgnnatattttngaactccagacngggngactnaaaccaatcnntatncanngganggcngttaattngngggncaatngatttgggtttt

SEQ ID NO: 13593 - DNA, 95 bp, Glycine max
  Clone ID: 701155360H1
ggcacttcaattgcaatcaaattagttcattctctttgcgcagttccctacctctcctttcaaggttcgtagatttcttctgtttttttttcttc

SEQ ID NO: 13594 - DNA, 187 bp, Glycine max
  unsure (1)..(187): unsure at all n locations; Clone ID: 701155363H1
atctgtgacgagcatcatggcctcgagagcagtgctattgttggctatgtgtgtgcttccggccatggttgtggccattcgcccagcaaagaaccctttttgcgtgaagggtcgcgtctactgtgaccctgccgtgctggttttgagacctcagcaaccnactacattgcnggtgctgagatatgtt

SEQ ID NO: 13595 - DNA, 263 bp, Glycine max
  unsure (1)..(263): unsure at all n locations; Clone ID: 701155364H1
gaaggtcaaaaacttgcatgcatgctctgtctgttcttattcgttgcaaatgggacaatgaaattcattccagggcgtcatcattgtataatctnatagatnttcacagcaaagctgttgcatctatagtgaacaaggcagaaccattagaagcaaccttaattcatgtaccgatttggaaggattcctcgtttgtgttggtgttaaaaggcagatcagtgtgaaagtagtagctgctttgcccctgggcagacatctgttgt

SEQ ID NO: 13596 - DNA, 261 bp, Glycine max
  Clone ID: 701155366H1
ggcatcaattcaaaatatatcatcaattataagcatgggtttgtggaacacaacgaatgcagtgtcttgccgctttcacaagtttggtgatgaccaaaagaacctggtcttccaaggtgatgccacgtcttcttccaggggcatagaactcacaaagttagacggtggaggaaaaccagtgggtggcagtgtggggagagtgttatactcttctccagtgcacctttgggaaagctctacagtggtcgcaagctttgaaac

SEQ ID NO: 13597 - DNA, 209 bp, Glycine max
  unsure (1)..(209): unsure at all n locations; Clone ID: 701155367H1
acatggctacacgtgaataacatttcaccatcattgcaacttgaggtattccctgagcaggattctgagcatttgcagcacaaacagggtgaatcaataagtttgctgcctgatgaaaagggtttcgtgccttcaagtgaaacaacangctgtgaagatgctggcatttttggtaacctaggggttctgtgtncgcngccnnccgnaac

SEQ ID NO: 13598 - DNA, 255 bp, Glycine max
  unsure (1)..(255): unsure at all n locations; Clone ID: 701155368H1
cgccctcaacaacaacgacccatcccctccgtttttctctctaacactagacattatgttcgtattgttattgcttcgaataaatgactctttctccatctcttgaacccgtgcctgnnnnnnnnnnnnnnnnnnnnnnnnnngaaaagataantttactggngtaattgttaactcttaggtagaacaacaataatnggaattaggattaaatatnttgatacatttttatccaacaaactcaaattggnaatt

SEQ ID NO: 13599 - DNA, 143 bp, Glycine max
  Clone ID: 701155369H1
gaccacattccaaaacacaaacacatacattgtagtatcacttttgtctcggaatttgttcttttgagttatggcaagcttaaaggttgcatgtgtggttttgatgtgcatggctgtgatgagtgcaccaatgatggtgcaac

SEQ ID NO: 13600 - DNA, 280 bp, Glycine max
  unsure (1)..(280): unsure at all n locations; Clone ID: 701155371H1
ggagggttggttcatttgatctgcgagtggagaagagaatcgtgatgggangaggacacggtcacggcaccacctacaaagganttaccgttcatcacccaaagcgctggcacactatcaccggcaagggtttgtgcgcggtcatgtggttttgggtattctacagggcaaagcaagacggtcctgttntattngggctggaggcatccttgggatggtcatcacgatgattcatgggcaagggccattaagcattccttaaggcntgaantccaagaac

SEQ ID NO: 13601 - DNA, 262 bp, Glycine max
  unsure (1)..(262): unsure at all n locations; Clone ID: 701155372H1
ggtggcagttgtgtgacacagaaattaagctagagcttcatagtttcttcttcttttctcaccttccttctctcccttcagacaaagggacaaaaaatcnnnnnnnnnnnnnnnnnnnnnnnnnttccaaaaccatgtcccacagtcatctaagtttcgcctttgggattctaggtaacattggcctccttcgtgtgctttctggcaccactaccaacattttatagagtttgtaagaagaaatcaaccgaaggttcccatc

SEQ ID NO: 13602 - DNA, 264 bp, Glycine max
  unsure (1)..(264): unsure at all n locations; Clone ID: 701155373H1
agaaaaaggaataggagatggcacagttagttatggaatggatgatggtgatgacatttacatgcgctcttggactggaaccattattggtccctataatactgtacatgaaggaagaatttatcaattgaagctgttttgtgataaagactaccctgaaaagcccccgagcgtccggtttcattcacggatcaatatgacttgtgttaatcatgaaactggagtggttganccaagaaattggtctcctgcaaattggcacag

SEQ ID NO: 13603 - DNA, 209 bp, Glycine max
  unsure (1)..(209): unsure at all n locations; Clone ID: 701155374H1
atagggantatggactactactcgggactagaaatgaagcaaatggagaatgacatttttgtttctcaagagagctatggaaaggtgttaaagaaatttcaaaagtttgattacaactttctgaacacaccgatggaaggtaacttgatattgtcaaggctgatggtggaaataaagaagatcctaattcgttaaagagtctgcaggta

SEQ ID NO: 13604 - DNA, 255 bp, Glycine max
  unsure (1)..(255): unsure at all n locations; Clone ID: 701155375H1
ggcacaagtgagtttgttgatcgagataactagaaacagtgtgatgaaaatgaaggtccttgttttcttcgttgctacaattttggtagcatggcaatgccatgcgtacgatatgttccctctccgaatgaacactggctatggtgcccgtactccggaggtgaaatgcgcaattgggaggcttgctgtnggaagcacacaacatctttggctttanancatccngaaggtgcttgaacnacaaaggatacatcc

SEQ ID NO: 13605 - DNA, 257 bp, Glycine max
  unsure (1)..(257): unsure at all n locations; Clone ID: 701155376H1
ggcacaagtnannttgtngatcnagataactagngacagtgtnatnaaaatgaaggnccttgttcttcttcgttgctacaattttggtagcatggcaatgccatncgtacgatcatgttcccnctccgaatgaacactggctatggtgcccgtactccggaggtgaaatgcgcaagttgnaggttgntgtgggangcnacaaattttggcntngancctttctaaagatcgngtgaaccaanacaggannacncccg

SEQ ID NO: 13606 - DNA, 257 bp, Glycine max
  Clone ID: 701155377H1
gctgtttgaattgctgtagcctactgtccaagtgaataataatatttacattggtttgtcaacaaagttcttcaccttttcttttgattagagaggacgtacacatacccatatgtctctgtgtttgtgtaattgtgtttctctcgtagaatggggaaacacagaagatagttatgtggggcttttggttttgttggagcggtgcagggagtagggattaggaagctaaatgtattaaccatgcatgtgattatttt

SEQ ID NO: 13607 - DNA, 126 bp, Glycine max
  unsure (1)..(126): unsure at all n locations; Clone ID: 701155378H1
gaaatgaggtgcttttnctgaagggtgttggtggtggtttttggttttgaagattgtggctgtggaaagggaaggtgcatgtgggatcccaattgggttctatgtttggtgnaaaagggtttgnga

SEQ ID NO: 13608 - DNA, 274 bp, Glycine max
  Clone ID: 701155380H1
tgctgccagattttcagtctcacgacaatctgaagcaaaatcaatcacatataggagaatgacatgtactaatgctaaggaaaatgttctacagctgcaagccaaagtgacgaacaagtgcttcttgatgtagaaattgggggtgaacctgctggcagagttgttttcggcctatttggagaagatgttcctaaaacagttgaaaatttccgggctttatgtacaggagagaaaggatatgggctacaaagggtcctacttccatcgtataata

SEQ ID NO: 13609 - DNA, 75 bp, Glycine max
  Clone ID: 701155382H1
tgattcggccgcctatcacccgggcttttattgagaagtactgtacccagagacagggtcagggtgatgctccac

SEQ ID NO: 13610 - DNA, 197 bp, Glycine max
  unsure (1)..(197): unsure at all n locations; Clone ID: 701155383H1
catcaacaaggagttcccaatttcagttgcgtcacatgttcctcnatcacatantngggatgttnacccagtgccgtcaatgtcacctgtgcagcagtggcaaaatcatcagtctgtgtcagagggttcacaggtacctgtacaggaacattcttcaccatcttcaaactgattcagcattannaaagntcgcannc

SEQ ID NO: 13611 - DNA, 249 bp, Glycine max
  Clone ID: 701155384H1
ggacaacagttttatagtggcacgagatgcaattggggtcacttccttgtacattggttggggtctagatggctctgtctggatttcatcagaattgaaggggttgaatgatgattgcgaacattttgagtcttttccacctggtcacttgtactctagcaaagagagagcgtttcgcagatggtacaatcctccatggttctctgaggctattccctcagcacctatgatcctcttgctttgaggcag

SEQ ID NO: 13612 - DNA, 232 bp, Glycine max
  unsure (1)..(232): unsure at all n locations; Clone ID: 701155385H1
gactatcagcatgccactgctgagccagaaaaacctattatagtttatactcgtaggtcctattccaggaaacaatgttcagacagcaatcttgttgtggttcctgaaaagccttttgtttgtgcagatgagaattctccggctgagcttgtgttgaactttgctgagctggattctgttccctcagaaatgcacctaaataagattttagggggntgggacctctaaatga

SEQ ID NO: 13613 - DNA, 257 bp, Glycine max
  unsure (1)..(257): unsure at all n locations; Clone ID: 701155386H1
gcctctttaagaaaattagtgtaattattaggttcacttttacaattacctccacacaggttttacccctagtgtcccgataaagtacatttacagctaagtcatgcattaagaataaaaaaaacattacaattgaaactaacaattagagaaatcacgaaacgcccagaatcagtcatggtgcatacaatctcttcaaaacctaattgtcttacaatctcttcacataaagcttccttttantaaagaaagccctg

SEQ ID NO: 13614 - DNA, 268 bp, Glycine max
  Clone ID: 701155387H1
ggcagccaaagaaaagaaaatcctcaattttctgagtagccaaacactctctctctgtctctcgaaaattctcagtttgcagagaaaatctgaatcatgtcgtggcgagcgtatgtcgacgatcaccttctgtgtgacatcgaaggtaaccacctcactcacgctgctatcatcggccaagacggcagcgtttgggctcagagtaccgacttccctcagttcaaacctgaggagataatgccatcatgaatgatttaatgagcctggg

SEQ ID NO: 13615 - DNA, 262 bp, Glycine max
  Clone ID: 701155389H1
gggagctgagctgagaaaacccccaaccccaacctcaaccttaacctctcctcactttcttttcaaccaggttctttctttctcacaaatctgattcattttccctataatttcccacttctactattttctctatttcttttattccctttatctctgatttcccgacgatccctttgcgttagggtttttcgctcgcttcttttcaattagtgatttaactatacctttgattgagatattggattggattctgtatgtg

SEQ ID NO: 13616 - DNA, 256 bp, Glycine max
  unsure (1)..(256): unsure at all n locations; Clone ID: 701155390H1
gattccttgtcgataatctcttgtttctctcataaccttagggaggacaatcaatcaagaagagaccttgcttggttcgttctcccacatctaataatctaataaattgaaacatgggcaactgtgctagctaccccaagaccaacgaaggtgatcccccagtgcctgtgccggtgccagaacctgtcgngncgaggtcaaggttgancagcaagagaacaaggctgaggaaaatgtcgtcgaggccaagacagag

SEQ ID NO: 13617 - DNA, 260 bp, Glycine max
  unsure (1)..(260): unsure at all n locations; Clone ID: 701155391H1
accaccacccaactaattctataactactaggtaaataactctataacttcccaacttcatgaattcatcacccgaaacttaacccccttctgaatgggganaagtagcaaaaatgccagataacatgaaaactcatcttangatnagtttgactttaggtataataatggaatatgcgaattgtttgaagagcttttattaaaaattnnacttctgcntaatggtggaatggcaggcaatccatataggctttggtggg

SEQ ID NO: 13618 - DNA, 113 bp, Glycine max
  unsure (1)..(113): unsure at all n locations; Clone ID: 701155392H1
ggatgacggngaaatgtgagcaacgactgctctaggaatctcacctcctggcccttaagtaattagccaacatggcgctgggaaagaattcccgaggtagaggggaggaagtt

SEQ ID NO: 13619 - DNA, 160 bp, Glycine max
  unsure (1)..(160): unsure at all n locations; Clone ID: 701155393H1
ggatgcagagaaggtactagtttagtttcaccaaaataacccgcagacgcaaacgttgaaaacacatccgtctgccccaacattacgagggtttgagattataaagacttggtggaagggtaagctaaagtngaaganttgaggggatacaagagngang

SEQ ID NO: 13620 - DNA, 255 bp, Glycine max
  Clone ID: 701155394H1
gctttaaggtgtatggctacatcagcatggttcaagcactgagctttttgcaagacttcaaacttggacattatatgaagattccaccaaggacaatgttcatggcacaggtggtaggaacaatcttatcagtatttatatacacaataacagcatggtggttgatgagaaccatccctcacctttgtgatactaccatgttggatcctgatagcccttggacttgcccatggacatgtgttctttgatgcatca

SEQ ID NO: 13621 - DNA, 258 bp, Glycine max
  Clone ID: 701155395H1
tacactaacattttaatttaaaagtatataaaatttgaaatcatctaatcgtttttatttatttattatttatttagtgtagttctgatggatgaaccaaataagaggcttgaaacagtagctttgaattgagagatacatagtgaatgagaaatcaaaccccccaaccccattaggaatttatagtagatgtgtgataagttctgaaagcatatgctaagggaaggaaggtactatccaatttgcaaggtacgtcgc

SEQ ID NO: 13622 - DNA, 263 bp, Glycine max
  unsure (1)..(263): unsure at all n locations; Clone ID: 701155396H1
ggatgcagagaaggtactagtttagtgtcacgaaaataacccgcagacgcaaacgtgaaaacacagacaagacgcatacgtccgtctcaacgtgtttgagattataaagacttagtggaagggtaagctgaagttgaagagttgaggggaaaacaagcagtgaaggaggttgaggtactcaataaagttttgatttgtttgaattggggggcttgttgccaatgttggatacagttgtatgtgctagaaaccatcnacatcgg

SEQ ID NO: 13623 - DNA, 264 bp, Glycine max
  Clone ID: 701155401H1
ggagttgaacaatgacttgttccggaagaccatgggtccagtgaagaaggctatggaagatgctggattacagaagagtcagattgatgagattgttcttgttggtggaagcacaaggattccgaagtacaacagcttttgaaggactactttgatggaaaggagccaaacaagggggtcaaccctgatgaagcagttgcctatggtgctgcagtgcaaggaagcattttgagtggagagggtggtgaagaaaccaaagatatc

SEQ ID NO: 13624 - DNA, 227 bp, Glycine max
  unsure (1)..(227): unsure at all n locations; Clone ID: 701155402H1
ggcgcattgaacgaaaattagggtttgtagtgtagcaggaagaagcagcaatggcgccgaagataacacgtaaggttagcagaaaccctgaattgataaggggaatcggaaagtactcgaggtcgcagatgtaccacaagaggggcatttgggctatcaaggncaaaaacggtggcgttttacctcgccacgaccctaaacccaagcctgaagctcctgctgaaaaa

SEQ ID NO: 13625 - DNA, 242 bp, Glycine max
  Clone ID: 701155403H1
cttatacacaatatatgttcttaccaatttcttaccttagttctggatgtctatttaacacaattgaaattgcttggagaataggcatgtcatcaggatgctcatccctcacttttgctgtctagatatctcaccagaaagccattagattctgtttaagataaccacaaccggattcatgattaaaagaagcaacagaagccatatgcagcaagatcttacctctgccagaattctctgta

SEQ ID NO: 13626 - DNA, 247 bp, Glycine max
  Clone ID: 701155404H1
ggcaaacaattcaagcaaaaaaagcaacctctcttttcttcacaagctcaaatcaaatagtgagtagaacttcaaaaaaaaattaaacatgtctactacacatttttcccttctagccatttttctccttctttcgctagattctcttggcacaaccatgggtggacgactcatccccccaagtgctccaagtacagttacaaggccactagtttcatcagaagttgaaaactacgtgaagccacag

SEQ ID NO: 13627 - DNA, 238 bp, Glycine max
  unsure (1)..(238): unsure at all n locations; Clone ID: 701155405H1
ggagagcgagttgattaaggcaaagggtgtgatgagattagttttgagaagaaaccagcaatcggcgattaggagtgagagagatatggagggaattgaaggaaatagcagcagatacagtctgaaaccctcgcgaatttgcaacgaagatgttctgatctgcgtcgacgtcgatcctcagtncctcgtcgaaatgaaggntnccaccggtcccatggcccccccctcattgtttgaa

SEQ ID NO: 13628 - DNA, 237 bp, Glycine max
  unsure (1)..(237): unsure at all n locations; Clone ID: 701155406H1
gatatggattttgttatattgtaagtaacaacgagggaggaagaaggaaaagaggagtgataaacacaaaagaatgatgctcttctttctctggatcatcaattttggcgatgtggcaacataagaataaggaattcagcttttatatattatanataaataaactagctatttgatgtataaattgagaatactaatacatatttgccatgtatctattaaactttgcattatttt

SEQ ID NO: 13629 - DNA, 219 bp, Glycine max
  unsure (1)..(219): unsure at all n locations; Clone ID: 701155407H1
ggacgaactaaannttcaaattttgtttccgatctctgaagaagagagtgatggcggaaccttggagaaacatcgacgtggagaagctgatctcgtacagcgacgacctcgtcaaggcgttgtcggagggtccgcgcgacctcaacaacctctctcactctctccaacaaacacgcgccctttcttcctcctgcgactccgacctcaatgaagctcgct

SEQ ID NO: 13630 - DNA, 210 bp, Glycine max
  unsure (1)..(210): unsure at all n locations; Clone ID: 701155409H1
cagtttcagacacagagaggggtttgggattggagggattgacgctgcgtctcttcctcttctctttcgatccatccctcattcctaatcctccaatccaaccacctcagcctcacactcacatatacacatatctgaacgcgtatcgtccctcctatggcttcaaagcgcatcctcaaggagctnnnngacttgcagaaagacccacca

SEQ ID NO: 13631 - DNA, 239 bp, Glycine max
  unsure (1)..(239): unsure at all n locations; Clone ID: 701155410H1
caaggacaagccagttcattgttagtgtgaacaagtatttagaggctatcaaccaaaaatgtaatgttggtatgagattcaagatgaggtttgaaggggatgaatcccctgaaaatgacaaaagattttcgggcacaatacttggagtagannatatttcccctcactgggtgaattcaaattggcgatctcttaaggttcaatgggatgaacctgcatcttttccaagacctgataga

SEQ ID NO: 13632 - DNA, 240 bp, Glycine max
  Clone ID: 701155411H1
gggcagcagaagaacaagtagttgagaactaagaaggagaagcaaatggcttcctcaatgatctcttccccagctgttaccactgtcaaccgtgccggtgccggcatggttgctccattcactggcctcaagtccatggctggcttccccaccagaaagaccaacaatgacattacctccattgctagcaacagtggaagagtgcaatgcatgcaggtgtggccaccagttggcaagaag

SEQ ID NO: 13633 - DNA, 240 bp, Glycine max
  Clone ID: 701155412H1
atcctcatgataaaagaagtatttattgtaagagaagtgaaattatacgttggtcacaaacattattttgtttccggttgggatataaaaggtgagagtagaagataaatgcccctttctcctcccgataaaatatgtattttttgcaagagaaatggaattataagtagggtgcttcacacgcgtgtacgtacatgcacacacgggcataagagtatatggacaagaagtgtagtttct

SEQ ID NO: 13634 - DNA, 254 bp, Glycine max
  Clone ID: 701155413H1
ggggcaccaccttgatgagatgctcccacgcaaacgctctcttcagagctctcaaacccaaaccccgcaattcttcactgccactttcttcaatggccatcaacaaaggtaatagtaataaggcatatgatgcattgctgttggatgctgggggcaccctattgcaattggcaaagccagttgaggagatttatgccactattggatccaaatatggtgtgactgtggatccagctatgataaagcagggattt

SEQ ID NO: 13635 - DNA, 248 bp, Glycine max
  Clone ID: 701155414H1
ttcaccaaattataagatgaccacaagtttatattgttggttgaggaattagaaattaaaaccacagtctgttgtcaacagagaatgcatgcacgacttcaagttccaagatgtcttatccaagtatcatatatttttgtgatggcaacagctgaagtccctcgtgacccttccctatcataactttcaaaagcttataccaaaggggttgagtttatcaaaagggttaatatctcttaacatatcaa

SEQ ID NO: 13636 - DNA, 247 bp, Glycine max
  Clone ID: 701155415H1
aaagaggttcaagggatcgtacggtaacgctaggccgaagaaagagaagatgatagagcgcatcaaggacaaggtcgaagttcccaggtccactccttggcctctccctttcaagctcatctgattccctattttattctaggctttccgctcactcatatcacatatctactctctcgttaccattttctattcaattcgattttcacttttatgctctctctttggttttatcatcaaaacaaat

SEQ ID NO: 13637 - DNA, 250 bp, Glycine max; identical to SEQ ID NO: 11058
  Clone ID: 701155416H1

SEQ ID NO: 13638 - DNA, 85 bp, Glycine max
  unsure (1)..(85): unsure at all n locations; Clone ID: 701155417H1
gagacaantgatttaacgaaattctttaacccacagtataagattgggaagcaacaancnnntattcgtattgntgctgaccagt

SEQ ID NO: 13639 - DNA, 244 bp, Glycine max
  Clone ID: 701155418H1
gggatacgcccacatcatggactttatcatatgtggaacagctccaatttgcaacagcaaacttcatcaagtaccatgctttggcagaaatcaccatcatttgttaatgatgcttcttctccgggccttccacagatgtcaagctttgctagaacaccgcctcatatgctgagaacaccacatatgacggaccatcatgttggatcagcaccagttgttacagcctcaccatgggaaaggaaaa

SEQ ID NO: 13640 - DNA, 242 bp, Glycine max
  unsure (1)..(242): unsure at all n locations; Clone ID: 701155419H1
gacactaaacaagttanaagaagagcatcactgaactaacaaagcaaccatatgtcgaaggtggtttgtgtcaccggagccagcggcgccatcggatcatgggtggtcctactcctcctccagcgtggttacaccgtccatgccaccgtccaagatatcaaggatgagaatgagacgaaacatttggaggaatggaaggagcaaagagtcatctcnatttttttgaatggatcttcttgaca

SEQ ID NO: 13641 - DNA, 174 bp, Glycine max
  unsure (1)..(174): unsure at all n locations; Clone ID: 701155420H1
gactgcaaagttgagaagtgaatacacaagcaaaattaaattaattaattaagctgaaagcaagagaaaatgaagatggaaattgaggaagttggcaactgcgaanacttcccctgctttcactgaaccacgtgtcccttttgtgcagatcagtgtgggngnactatgaggttt

SEQ ID NO: 13642 - DNA, 140 bp, Glycine max
  Clone ID: 701155421H1
aaccgctacttacacctcctttttcaaaacatgcacattcttttgttttcggcctaccccatttttttatttttttatattaagtccaaaataaaatgaaactggcggttacacctctctcctttatatatgtacccctg

SEQ ID NO: 13643 - DNA, 237 bp, Glycine max; identical to SEQ ID NO: 11371
  unsure (1)..(237): unsure at all n locations; Clone ID: 701155422H1

SEQ ID NO: 13644 - DNA, 226 bp, Glycine max
  Clone ID: 701155423H1
caggcgaggtgctgctcctgtgtcattcaatactttaggccttcccatgcgtcaggaagaaaaatcatgtccctattacatgagaactgggtcttgtaagtttggtgttgcatgcaagtttcatcatccacagcatgcttcccttggagcatacccattggctggatctcctactcctacctcaacaattattcctacatcaggtttaccatatgctggagggttc

SEQ ID NO: 13645 - DNA, 237 bp, Glycine max
  Clone ID: 701155424H1
ggccaaaggtggcgcattccacatccataaccatggcgtctaactctgcttccgctctttacttccttttatgcctatcgcccatcactttgcttctttctgcgtttcgtgctcaagctcaatctcatgctccagctcccactttcaagtactgtgaaaagaatgcagactatgctgtgaaggtgagtggagtggaaatattgcctgaccccgtggagagaggagtgccattcactt

SEQ ID NO: 13646 - DNA, 238 bp, Glycine max
  Clone ID: 701155426H1
ggttctggtttgtcgttctttctctcgcaatcttcactacattcaccgagcatttgcattcacattgaatatggctgagactacacaatctaatgctgagttgttggagtggcctaagaaagataagcgccgcttcctgcatgttgtgtatcgtgttggtgatcttgatcgcaccattaagttttatactgaatgttttgggatgaagcttttgaggaaaagagatattccagaggag

SEQ ID NO: 13647 - DNA, 236 bp, Glycine max
  Clone ID: 701155427H1
gggccttatccagtttagggtttcggttctctaccctatctttcacgtatcgaaaccttaaatttacgatcaggtctgagcaatctggttggtagaacctttggtcttagtgagtcaagttttatgtctgaattagacgatcaaattcctactgccttcgatccttttgctgatgcaaatgctgatgactcgggtgctgggtcaaaggagtatgtgcatattcgtgtacagcagcg

SEQ ID NO: 13648 - DNA, 97 bp, Glycine max
  Clone ID: 701155428H1
gggatgtgaaacaaatgtacttagaatgtctcaaaattaaaaataaacacaaggagaaaatttactgagagtaatagaagatatatttttacttggg

SEQ ID NO: 13649 - DNA, 241 bp, Glycine max
  Clone ID: 701155429H1
ccaccttctaccattcaacaacaatgccatctagtggcatagattcatcaaccaaatctacaccaagatgtttctttaaacatttgatgcattataaaatgttggtttaaccctgtaatctaccttgcaactgcctttcttgtttgatgcactacaaagtcagttgttacaatctaattgtgcttatgttttatgcttgctttttaagtttccaatactgaaaaagcagcaaaataaatct

SEQ ID NO: 13650 - DNA, 244 bp, Glycine max
  Clone ID: 701155430H1
ggaagtgcagagggaaaagcaaagggatgatgatgcagagcaaaagggcagggtggtggttgctcagaaaggcaaaggcaaagctgagtcttaacactgaccgaaacctctcttcttctcaacacctcattctcgacaaccccaatctcaatcaggttttggtcgaaggaaatggtttctccagaatggccattctcaatagaccctctgctctcaatgctctcaacaccaatatggcggctac

SEQ ID NO: 13651 - DNA, 246 bp, Glycine max
  unsure (1)..(246): unsure at all n locations; Clone ID: 701155431H1
gacaacaacatagaataacgaattaaataaacctaccactagctactttgctctattgcattgcgtggaacttcattttcccacacattctcatggcctccaagttctcttttctaacccttcttatggagagaagaaaaccttctnnnnnnnnnnnnnnnnnnnnnnnnnnnttagcatttgtgaaggcagctgcatgggcatggtaccaacacaactcaggctctaaggggaaagctattagcg

SEQ ID NO: 13652 - DNA, 250 bp, Glycine max
  Clone ID: 701155432H1
gggatgtgttagaaaacaaaaccctaacacgttcaattctgaaaaaaaaataaatcacaatccctttcttttcctctctgatctgcaaacacatttcaagagaacgtttttgttgttgcgcccaatcggtgttgcatttttcttttgcagagaggaggggaagtctttatttgtgagatttttcttaggaagatgaaaaacacggagaggattgcaaatttggccgtagcaggtttaactttagccccgc

SEQ ID NO: 13653 - DNA, 246 bp, Glycine max
  Clone ID: 701155433H1
aaaagaaaaagaaaagttagggttagggattttgagagatggcatcgactaagaagatcaccctgaagagttcggacggtgaggccttcgaggtggaggaggcggtggcgctggagtcgcagacgattcaagcacatgatcgaggacgactgcgccgacagtggaatccctctccccaatgtcaccagcaagattctggcgaagttatcgagtactgcaagaagcacttgaggcgaacagtgctgt

SEQ ID NO: 13654 - DNA, 241 bp, Glycine max
  Clone ID: 701155434H1
atccttcattttaattgtgtcaaaccattaataatataaattgtaaggatgataggctctatgtgatgattaacattctcaagtatttcaatgttaaacttattaagaagtagacatgttcatgaagtgacaaatatatcacaagaaggaggattgaattaaaatttaaaacttttatactccctttgaaaataaaaaggtttctagtgatagttaagaataaatcaaataaattaatgac

SEQ ID NO: 13655 - DNA, 242 bp, Glycine max
  Clone ID: 701155435H1
gggatccaatctcgttagggtttttgagagttgcagtttgcactttgtaggatcatctcctagcattgatcgattgagatggcagacgaagctaacagaactgctttccttgaaattcaaagtcgcatgatcgatactactggaaaaataaaacaggtgcaaacccagatgcgttccaaagaagcagaaaaaaagcgtgcttttctgaccatggaggagctgaagcaagttcctgatgatac

SEQ ID NO: 13656 - DNA, 194 bp, Glycine max
  Clone ID: 701155436H1
gcattgggtgttcctgctcttcccctgacatacgtggctcacgttctggcacttgttgccagcatcttggtcgtgctctgggtcctcaattttaggggtggcttggcttgggattctgataacaaggccctcatcttcaatcttcatccagttcttattgtcattggcttactagtccttgggggtgaagctat

SEQ ID NO: 13657 - DNA, 169 bp, Glycine max
  unsure (1)..(169): unsure at all n locations; Clone ID: 701155437H1
gacacgcagttgtattgtagaactgaacaagggtttctctttctctttctctgtctgcttcttcactttctctcgtttcaatcgaaaaaaatcatgggcagaaaattcttcgtcggtggcaactggaaatgcaatgggaccactgaggaggtgaagaagattnttacta

SEQ ID NO: 13658 - DNA, 213 bp, Glycine max
  unsure (1)..(213): unsure at all n locations; Clone ID: 701155438H1
tcagatctggagcaggagaatagcgttggcagcgtttgcgtttgctctgctgttccaatcggcctcagcagacgacgtcgttgtgctctctgaagataacttcgagaaggaagttggtcaggacagaggagcttncgttgagttctatgctccttggtgtggacactgcaaaaagcttgctccagaatatgaaaagcttggtagcagcttcaa

SEQ ID NO: 13659 - DNA, 235 bp, Glycine max
  Clone ID: 701155439H1
ggggtgccatcgttgctgtcatcatccgcagctgctgttattcgcaccgcaaacaaacagtgagccatggccgtcggaaagaacaagcgcatctccaaagggaaaaagggtggcaagaagaaggcagctgatccctttgccaagaaggattggtatgacattaaggccccttctctttttcaagtgaaaaatgttggcaaaaccctcgtctctcgtacgcaggtaccaagattgc

SEQ ID NO: 13660 - DNA, 235 bp, Glycine max
  Clone ID: 701155440H1
tggacctttcatgcaagttctacccttatgtaccagactccttaatcaagagattttaagggttaccggaaagaatgaattattgcagacaccaaggatttagtgactttgatagaatgcgattcataaatctgagtcatatggcttctccaaactcaacaccaaacttcactggctggaacagctgtcacatgaactggtgtgcagggactaaacatggattggcaaacttcac

SEQ ID NO: 13661 - DNA, 234 bp, Glycine max
  Clone ID: 701155442H1
ggagctgacacatacaaacatccatcatcattattattttactccgaacgagttgacaccgattccactcactcaaccatgagccgattcaggcgttttgagctcatagaacaaccacctttcttccactcctgctactctttcccttccttcgtcctccaagactcactctctctcgacctcgacctcttgccacttcccagccacttcgacgctttcgcagatctggtgcac

SEQ ID NO: 13662 - DNA, 237 bp, Glycine max
  unsure (1)..(237): unsure at all n locations; Clone ID: 701155443H1
gacactgaaagatgactttccttcgtatttgaataccaacaagtatccaatgctaattgaatagtgtttaacaaactctttccaaccatcaaggaaccaatacttgttgtctgcctttttcaatcctacacgccagacactaccatcaggaacagagagggtaacaattggcaatagttcacccccatatttcctcataaaattatctggaagcctctgcaattcacaagtcaagnt

SEQ ID NO: 13663 - DNA, 250 bp, Glycine max
  Clone ID: 701155444H1
gatagcaaatattcagagaattccaactgataaaaagaatattcagagaattccaaagacagagatgactgtcattaaggaagagcaacaaccaaaccaaatagctggccacaaagaacttggtcacaaaagtctccttcagagcgatgcactctatcagtatatacttgaaaccagtgtgtacccaagagagcatgagagcttgaaggagctacgagagttgacggaaaaacacccttggaacctgatg

SEQ ID NO: 13664 - DNA, 239 bp, Glycine max; identical to SEQ ID NO: 5887
  Clone ID: 701155445H1

SEQ ID NO: 13665 - DNA, 250 bp, Glycine max
  Clone ID: 701155446H1
cattccttcccaagaaacctcgtagcattctctcccttgaactcttcggctcttaatgatttctgacacaggacacttcacagggatctgtgatcggatataatataaataagattcttgtatatatccaggttcaaaaataaggagcctgtagataaaatttatgttcactaataatagtaatggcattatagaaactcgatgaatggaagatttccctgtttattgatgatacactgaatgcagtaga

SEQ ID NO: 13666 - DNA, 244 bp, Glycine max
  Clone ID: 701155447H1
ggcgtgttgttgttgttcaggatcttccttttgccgatcaaaggttgaatggtaaaattcccaagatgttaagccatcgcctttttcctcaagcaaaatactcaatttgggtagactccaagtcccaattccggagagacccactaggtgtgttggaagcactcctttggcgcacaaattcattacttgctatatcagaacatggagctcgcagtagtgtctatgatgaggctaaggctgttgt

SEQ ID NO: 13667 - DNA, 242 bp, Glycine max
  Clone ID: 701155449H1
gaaaagaagattgaccatggcttcttcattgaggatctcaaggctcctctctcgttcttttctttctgcttccactactactcctttgttttctagaggcggaagtggtgctcttggtgcagggctcagtaaattcagcactgctgctgctattgaagaaccaattaaaccaccacttaaagtcgaacacacccagctcttaattgatggaaaatttgttgatgctgctactggcaaaactt

SEQ ID NO: 13668 - DNA, 243 bp, Glycine max
  Clone ID: 701155450H1
gatactactcatagatatggtcctaatacttttaagctgcataggttgccggttccgaggcccgggcaggtgcttgggttggttgggactaatgggattgggaagtccaccgctcttaaagttttggccgggaaactgaagccgaacttgggtcgattcactaatccccctgattggcgggaaattttgacctattttcgaggatctgaactgcagaattattttactcggattctagaggat

SEQ ID NO: 13669 - DNA, 241 bp, Glycine max
  Clone ID: 701155451H1
caacccaatgcatgaaactcccagcattgagggggccgtgataggtaagatgcagccacaactgtcagcacagaggtcatttccacaactagaacttgtgaccaccaggttataaggcagcaaccttactattgtgtcaaggcacaccctccaaacaataatcacaatacaccatgagctgattttgtgaccaacacgtgaaagcaccaatcataaatgataataggaggttgaaaatatg

SEQ ID NO: 13670 - DNA, 234 bp, Glycine max
  Clone ID: 701155453H1
ggcagcatccattcttgttctcttctttctttcgatcagcgcacgcggtagccagagggatcatgatcgcgaaagggctcaggctagaactggtgctaaaggcaagcagaaagatgatggattgacccctgaacagcgcagggaaagagacgcaaaggcgctgcaggagaaggccgcaaagaaagcggcacagggtgcaggagggaatatgcagctggaagcaaaaaataggca

SEQ ID NO: 13671 - DNA, 232 bp, Glycine max
  Clone ID: 701155455H1
ggaaaatcacttacttatgctttagaggataatatgaagaacatgtttctagagcttacgagtcattgtgcgtctgttatctgctgtcgctcatcgccaaagcagaaggctctggttactagactggtcaaatctggaactggtaaaacaacattagctattggtgatggagctaatgatgttggaatgcttcaagaagcagatgtagggattggaatcagtggtgtcgaag

SEQ ID NO: 13672 - DNA, 236 bp, Glycine max
  Clone ID: 701155456H1
ggagagtgagtgagatagagagagacgcttcgcaaatctcaatcgaatctcagaaaaatgagagaaatcatcagcattcacataggtcaggccgggatccaggtcggaaactcctgctgggaactctactgcctggaacatggcatccagcccgatggcatgatgccaagtgactcctccttcggtgtagcccacgacgccttcaacaccttcttcagcgaaaccggatctggcaa

SEQ ID NO: 13673 - DNA, 233 bp, Glycine max
  unsure (1)..(233): unsure at all n locations; Clone ID: 701155457H1
gtgacattaggatatatgttctatattaattgtatgaagcttagacgaccttgttgagtcgagaatactttananatttatttggacaagtttaaatatgatgtaaaaganaatgaatgtgaacatttttcccctttgaaagacttgtaaaaaaatgttttncaaatacttttaattaatatttgaattttttattccttattagtatatatgtgaggggtagaaggtgtcat

SEQ ID NO: 13674 - DNA, 234 bp, Glycine max
  unsure (1)..(234): unsure at all n locations; Clone ID: 701155458H1
gattgttcaacacttaccttataacataattgggcaggcatcctccgcattgtgaagcaattagggtttcatcctccgcattgtgaagcaatcgagcgcaggcatcaattgggaaattagggtnnnnnnnnnnnnnnnnnnnnnnntcttattactcaagcaattcgttctctcgaacatggaaccggaagggtacggtgaacccgtcggcaatgttagcttctctgcttagta

SEQ ID NO: 13675 - DNA, 233 bp, Glycine max
  Clone ID: 701155459H1
atccttcattttaattgtgtcaaaccattaataatataaattgtaaggatgataggctctatgtgatgattaacattctcaagtatttcaatgttaaacttattaagaagtagacatgttcatgaagtgacaaatatatcacaagaaggaggattgaattaaaatttaaaactttttatactccctttgaaaataaaaaggtttctagtgatagttaagaataaatcaaataa

SEQ ID NO: 13676 - DNA, 84 bp, Glycine max
  unsure (1)..(84): unsure at all n locations; Clone ID: 701155460H1
gntcatancctagcgtgtcatatacaatgattcaattgaaggacagaatgacagctagctagcgttgcacaatcactgacaanc

SEQ ID NO: 13677 - DNA, 246 bp, Glycine max
  Clone ID: 701155462H1
acacctacactagacagcatactgaaaagatttgggatcatagcaccggtgacatgggagctgatttttatcatcgatacaagggtgacataaaaatagcgaaagaaattgggctggactctttcagattctctatctcatggtcaagaatattcccaaagggcaagggagcagttaacccctttggggttaaattctacaacaatgtcatcgatgagatcctagcaaatggtttaaaaccttttg

SEQ ID NO: 13678 - DNA, 272 bp, Glycine max
  unsure (1)..(272): unsure at all n locations; Clone ID: 701155464H1
tccgagctaaccaaatttatttaaatttgactgtttcatatttaattttatcctaaacttaaaccaattccaacttgtgaatacaagtataccgggggganggggagcacatcctgtttttgtatacatgatactaattaataataattaaaaagaaatttattaaaatattttgtatatttattttccactcgtgtatagtcagaaatcaaaagaaaacgctgtttacaagcgatactgaattttaggaacttaaaaaaacatatctttac

SEQ ID NO: 13679 - DNA, 240 bp, Glycine max
  unsure (1)..(240): unsure at all n locations; Clone ID: 701155465H1
ggaggagagggagagggagagagaaagaaaggtgaattggattgcatctctctctgtgtgttggaagaggggaatcgtagatctgannnnnnnnnnnnnnntaataattttgtgatcagaattattgagccgaacaaaagacaatgggattgtgggaagcttttctcaattggcttcgcagcctttttttcaagcaggaaatggagttatctctaataggacttcagaatgctgggaaga

SEQ ID NO: 13680 - DNA, 237 bp, Glycine max
  Clone ID: 701155466H1
ggccacactttatcatcctcagacgaatggccaagcagaaatctctaacagggagcttaagcgaatcttggagaagacagttgcatcatccagaaaggattgggccttgaagctcaatgatactctctgggcctataggacaacgttcaagacccccatcggcttatcaccgtttcagccatgtatgggaagtcatgccattaccagtggagctggagcataaagcatattgggctc

SEQ ID NO: 13681 - DNA, 69 bp, Glycine max
  unsure (1)..(69): unsure at all n locations; Clone ID: 701155467H1
aaccaacataaagttagaagctgaatttgacaacaacaaaaaaaaaaanccancctagtttnccttgtt

SEQ ID NO: 13682 - DNA, 244 bp, Glycine max
  Clone ID: 701155468H1
gttgatgttaaagaggaggatttcaaggctgcaagagaggaaggtttggctctcctcaaggtagtggatgcctatcttgtggcaaaccctgaggcctatgctgaaggaactataaatagcgatgagtttactagcactgtccagccaggaaggttgttcaaggctttggtccttgatgctccaaacctcattcccaagctgatgcccgaggccattaagaatattcaactggttgaagggaatg

SEQ ID NO: 13683 - DNA, 230 bp, Glycine max
  unsure (1)..(230): unsure at all n locations; Clone ID: 701155469H1
tccacatgcattctcataaagcaattattgatgtatcatttgaaatgactccacacgatttctaacaggacatgtggtaacgctactagtgaagaaacattggccatgtccgcaaaatctacacgtgacgtgattatcaaacgaagcttcattaattcatagcttacgtagcatgggttcagcctggaaggaagacaagcccaattggcttttataanggtttgatncct

SEQ ID NO: 13684 - DNA, 230 bp, Glycine max
  Clone ID: 701155470H1
gaccacattccaaaacacaaacacatacattgtagtatcacttttgtctcggaatttgttcttttgagttatggcaagcttaaaggttgcatgtgtggttttgatgtgcatggctgtgatgagtgcaccaatgatggtgcaagccgtgtcatgcaatgatgtttctgtgaacctagcaccgtgcctatcttacctgatgcagggtggagatgttccagaatcgtgctgta

SEQ ID NO: 13685 - DNA, 233 bp, Glycine max
  Clone ID: 701155471H1
gagagaaagagagagaaagatgtcgaagcgtggtcgtggtggttcggcggggaacaagttccgcatgtcgctgggtcttccagtggcggcgacggtgaactgcgccgacaacacgggggcgaagaacctccacatcatttcggtgaaagggatcaaaggccgtttgaaccgtcttccctcggcctgcgttggcgacatggtgatggccaccgtgaagaagggaaaacccgatc

SEQ ID NO: 13686 - DNA, 230 bp, Glycine max
  unsure (1)..(230): unsure at all n locations; Clone ID: 701155472H1
ggtggtcagtatatatgggctcgcttacaatccttctctgcttttcgtannatggggtgatactgagcagagaccattggctagacncttatggatcttgatacaacggatanaaggaatatatagagctgcttcatttggaaacctgttgatatttctttgcactggaagatatcganatcttattgaaagagccttacgagctaggctgtatatggaagcccgaatat

SEQ ID NO: 13687 - DNA, 237 bp, Glycine max
  Clone ID: 701155474H1
tggagagagcagaacaaactacatcctatccaatagtctttatcttgtggtggcaggtagtgacgacattgccaacacctattttgttgctcacgccagaatattacagtatgacattccttcttacaccgaccttatggtcaactcagcctctaattttgtaaaggaactgtataatctgggagctcgtagagtttcagtactgggtgcaccaccgattggatgcgtgccatcaca

SEQ ID NO: 13688 - DNA, 208 bp, Glycine max
  Clone ID: 701155475H1
accagggtttagctcaagttgtttcctcttcaagaaattctgatgttatatactttaatcttaaaattgccaacgtctgcatataataacataaatattattatggtatgcccttttcctaatattaataccaatcttggtatattttaaaatttattattactttaattaattagtagagtgtaacatcaccttcatcagtagctaa

SEQ ID NO: 13689 - DNA, 90 bp, Glycine max
  Clone ID: 701155476H1
cggagctcgcaagcatgaattgttggttactaatgcagtcgcaacaaaggaaggcagttctgcggcttctacatcaaaatctgggcatga

SEQ ID NO: 13690 - DNA, 233 bp, Glycine max
  Clone ID: 701155477H1
gggtggcacttgggttggtagcggcgaagaacgtcgttaatggaagaagagaaagaagcagtgatggtaacaccgggagaagtgttgggtagaaccagcgatgtcaaagctggaagaggagcatacgcggcgcttcacaacaacaccgtatacgcctccctaaccggcttccgccacaccgtacctcccgcccccgactcttccgacctgagaccgactgttgaagtaactgg

SEQ ID NO: 13691 - DNA, 245 bp, Glycine max
  unsure (1)..(245): unsure at all n locations; Clone ID: 701155479H1
agaggaccaagcatatgggacacctacactagacagcatactgaaaagatttgggatcatagcaccggtgacatgggagctgatttttatcatcgatacaagggtgacataaaaatagcgaaagaaattgggctggactctttcagattctctatctcatgnccaagaatattcccaaagggcaagggagcagttaacccccttggggttaaattctacaacaatgtcatcgatgagatcctagc

SEQ ID NO: 13692 - DNA, 241 bp, Glycine max
  Clone ID: 701155480H1
gatatccaaaggaacaaaaatattattaagatgatcaacattattggagcacttgttctactctttgcatttctcttcctcagttgtgtgtatgcacaagacacaacaacccttgtgcctgcaatcataacttttggtgattctgctgtggatgtagggaacaatgactatcttcccacccttttcaaggctgattaccctccttatgggagggactttgttaaccaccaacctactggga

SEQ ID NO: 13693 - DNA, 238 bp, Glycine max
  Clone ID: 701155481H1
gactacacacaacatttacatttctctctccagtatggcttctactcacaatgagttttatgcacttatgctagtggtggtggttggctccatggtggcttcctgtggtgctaacttcaaccaagactttgatctaacatggggtgatcaccgtgctaagatattcaatggtggtcagcttctatctctttctctggacaaagtctctggctccggcttccaatccaagaaagagtac

SEQ ID NO: 13694 - DNA, 232 bp, Glycine max
  Clone ID: 701155482H1
ggagtttggagagaagagtgaagaaggcaaatcgcgaagactagatctgatctgagagaatggctcctcggtctagcagcaaggacgcccaagaccttttccgcgctctttggtctgcttatgctgcaacccccactaatctcaagatcattgatctctatgtcatctatgccgtattcaccgctttcatccagttgtttacatggctttggttggatcattccattaactc

SEQ ID NO: 13695 - DNA, 241 bp, Glycine max
  Clone ID: 701155483H1
gacaccaacaccaaaacaaacccactaagatggcttcctttgtatccttcctagtgctgcttcttgcagcccttatcctcatgcctcaagggcttgctacttactacaaaccaattaagaagccaccagtgtacaagcctccagtgtacaagccaccagtgtacaaaccaccggtttataagccaaaaccaccggtttacaagccgaaaccaccggtttacaagccaccatataagaagcc

SEQ ID NO: 13696 - DNA, 229 bp, Glycine max
  unsure (1)..(229): unsure at all n locations; Clone ID: 701155484H1
ggtcttggtgttggtgtaattgcacctccaaaaccaaaaccaaaaccaatttcgttacccttttctaaccacccgaaacaacaaacggcctttggcagatttaccttcttcttggtaatttcttcttctctccaaaataattaaccanacncttattaatggggatattgtatggaatggtggcaagggggcaggtggttctggctgagttcagcgccacccagagtaa

SEQ ID NO: 13697 - DNA, 230 bp, Glycine max
  Clone ID: 701155485H1
gtgtcatattaataatgccaaagtcataagtttaatttctacatgtattattaattttaaattaatttataaaatatatttttatataccaatccatatttagctttagggaaaaatggaatttactattttactttaccggatgtactaacaattatgctgatgcccgtaacaacacagcctccttttatttgctatgccaacacattttctagcaaagcccaatacac

SEQ ID NO: 13698 - DNA, 228 bp, Glycine max
  Clone ID: 701155486H1
gactccgcagctgcagcactcaaaaccctagagaggacgagagagcgtgcaactttcggcaaccacagaccatgacattcaagcgcaggaatggaggtcgcaacaaacacggccgcggccatgtcaaattcatccgatgctccaactgcggaaaatgctgccccaaggacaaggccatcaagaggtttttggttaggaacattgttgaacaggctgcagtcagagatg

SEQ ID NO: 13699 - DNA, 228 bp, Glycine max
  unsure (1)..(228): unsure at all n locations; Clone ID: 701155487H1
ggaatgggatttggctatgagtgtgatacgaccgaatacgctgcgtttggtggacttttcgatcattcggatttgtattatnnatcgtggcggcacgagaccttgccaacacaatagaagatttaatgaaaacaaaaggaaaaaaagggttttagagatgtaaatattttcttctctctcagctttttcttttnnactnttttgttcccttctcttgatgaagggaat

SEQ ID NO: 13700 - DNA, 229 bp, Glycine max
  Clone ID: 701155488H1
ggtcttggtgttggtgtaattgcacctccaaaaccaaaaccaaaaccaatttcgttacccttttctaaccacccgaaacaacaaacggcctttggcagatttaccttcttcttggtaatttcttcttctctccaaaataattaaccaaaccattattaatggggatattgtatggaatggtggcaagggggcaggtggttctggctgagttcagcgccacccagagtaa

SEQ ID NO: 13701 - DNA, 226 bp, Glycine max
  Clone ID: 701155489H1
ggattttaattattacagataaaactgtatacttttctgcattttgtgtggtgggtgtgtgagattttgaaattttggttcagctggaaatggatctgattgaatctcaaggaaggttttttttatttggtttattgtttctgttgggctaagaattagagaatcatggttttcactgtttggttgattgagactatttttctaataatccgagcatctcctgggc

SEQ ID NO: 13702 - DNA, 227 bp, Glycine max
  Clone ID: 701155490H1
ggaagaaaaataaagttattattaaaactgaaatatccaaaagtcagaagatggcattgcgaggattgagtgcggtggcggtgacggcgtcaatacgccctcccggtcctcgattcagagtagacagcggcacatcaaggattccctcttccggatgcagaatctcggtgcggtgtaaagctgtcggagaaagccgacaaggttccttggaggaaaccgttgtttat

SEQ ID NO: 13703 - DNA, 232 bp, Glycine max
  Clone ID: 701155491H1
ggagtcgaacaagaaagaaaagaaaagaagaggaaaaggagagtggagaggaagaaaaggattgaagttgttgctgtgagaaagagaaagagtgaaatcggagtttgggaaggaattgcaatcaatggatgtgataaagacgcagcaaatctcatctcgaccaatcgagaaggtggtggttcaccctctcgtgcttctcagcatcgtcgacaactacaacagagtcgccaaa

SEQ ID NO: 13704 - DNA, 233 bp, Glycine max
  Clone ID: 701155492H1
tatatactattaaatataatgttaattatttactgttcaaaataatgaagcagtttaagaaatcgaacaactaaactttggcaactagcacatttactgtgggattcaaatgacaaactttatctacaatactaatatttagacatttagacgtacattacatatgtacgtaaattaatctaattaatttgagttgaatgggattgtggtaacatgattacatttttaactta

SEQ ID NO: 13705 - DNA, 234 bp, Glycine max
  Clone ID: 701155493H1
gaccacattccaaaacacaaacacatacattgtagtatcacttttgtctcggaatttgttcttttgagttatggcaagcttaaaggttgcatgtgtggttttgatgtgcatggctgtgatgagtgcaccaatgatggtgcaagccgtgtcatgcaatgatgtttctgtgaacctagcaccgtgcctatcttacctgatgcagggtggagatgttccagaatcgtgctgtagcgg

SEQ ID NO: 13706 - DNA, 234 bp, Glycine max
  Clone ID: 701155494H1
ttgttctgtgcatttgctgctgccaactgcccccttgaagataaatgttctcgcattcatggaaatcagtgcttatactgtagaaaattttgcttacatcctactgatcgaaaggaaaaagaaaaccatttgagaacttgtgagaaaaaggaaaaataccttcaggctttgaaagatagtcaagaagtagagtgcaatgtttgtttggaacgtgttctgtccaaacctaaacca

SEQ ID NO: 13707 - DNA, 237 bp, Glycine max
  Clone ID: 701155495H1
aactgttgttgagggaactatacagaagctatttgaagggcatcatatgaattatatcgaatgcatcaatgtggactataaatcaactagaaaggagtcattttatgaccttcagcttgatgtgaagggctgtcctgatgtttatgcttcctttgacaagtatgttgaagttgaacgtcttgaaggggataacaaatatcatgcggaacaatatggtttgcaggatgctaagaaggg

SEQ ID NO: 13708 - DNA, 248 bp, Glycine max
  unsure (1)..(248): unsure at all n locations; Clone ID: 701155501H1
gggacatcgaagcaaaaaatgaaaacccaaagtgcttctctcctctgtctttttctctctcttgctatccttttggctagtggcactgctgcaagtgcaactccaagaagcgcagtgccaagccaccatgtttcaacattcancagaagcctttttccttccacttttctctttggaattggttcttctgcttaccaggcagaaggagcagcaagtgtagatgggagaggaccaagcatatgggacac

SEQ ID NO: 13709 - DNA, 261 bp, Glycine max
  Clone ID: 701155503H1
gagtgacagacacactcgtgaatcgtgatttagcatttaccacaccaaaatcaatctgcggagtcagaaagccatggatccctacaagaatcggccatcaagcgccttcaattctcccttctggactacaaattccggtgctcccatctggaacaataactcatcgctgactgttggatctagaggtccaattctgctggaggattaccatctggtggagaagcttgcaaactttgacagggaacggatccccgaacgtgt

SEQ ID NO: 13710 - DNA, 253 bp, Glycine max
  Clone ID: 701155505H1
tgaagagacgaggtggcccaggaggtctcaccaaaatctgtggtgtttcgcctgaacttcaggtcattgttggccagccagcattgtcgaggactgagattgtgaagcaactgtgggcttacataaggaagaacaatctccaagatcccagcaacaaaaggaaaataatttgcaatgatgaactgcgtgtggtgtttgagacggattgtactgatatgttcaagatgaataagttgctatctaagcacattat

SEQ ID NO: 13711 - DNA, 242 bp, Glycine max
  unsure (1)..(242): unsure at all n locations; Clone ID: 701155506H1
ggccaaaaaaaanangaaaaactcaacccccaanttgaaggggaaaaaaaagaagaaaaaagcactttgggaaacgcaggttttggttcgattgttttgtgcagagtgcaaaatcagtgaaaccaccatgcttcgtagcttgacgaaacttcgttgtttcgccgccgttcaatcacgccaagtcctatcacctccctcttctcgccgtctcctccaccactcgccgccgccgcaaccgcttt

SEQ ID NO: 13712 - DNA, 270 bp, Glycine max
  unsure (1)..(270): unsure at all n locations; Clone ID: 701155507H1
ggtggtgtagactgtcgagcagtgaataccagttgctcctatagccggngctcaacaacatngcggacaaggcagtcaccatccgaaccagaaagttcatgacgaacaggcttctctccagaaagcaattcatcgttgntgtccttcatccaggganggctaatgattccaaggctgaactgaaggagnaattnggcagaatgtatgacgngaaagacactaacactgtatttgtcttcaagtttcgaactcatttggtggtggcaagtc

SEQ ID NO: 13713 - DNA, 261 bp, Glycine max
  Clone ID: 701155508H1
gatggaatgaagtaactaacccaaacctagtccccttacttggctcgctggttggatttgattcgactcgattctcgctgatgaagaagcatttgatgcacagctatggcgttgccgtgattgtggtgttggctttgagtttgagtttgggtgcatcagcggaacaactcagttcacgagaatgcgagaatctcggtttcaccggactcgccttgtgctccgactgcaacactctctccgagtacgtcaaggacaaagagt

SEQ ID NO: 13714 - DNA, 54 bp, Glycine max
  Clone ID: 701155509H1
gtaccctcatctgtttgagactcaaggttagtcatagatcaaattcaaggacga

SEQ ID NO: 13715 - DNA, 271 bp, Glycine max
  Clone ID: 701155510H1
gttatttgaagaagaagatgacggtaaagatggcgaggatggttcagaagaacaagctgtgattggattatggagtggcattgcttggttggttggaatgactgtattcattgctgtgttgtctgaatatgtggtggatacaattgaggatgcatcagattcatggggtttgtctgtgagcttcctaagcataatctgctgccgatagttggcaatgcagctgaacatgcaggagcaatatatttgcctcaagaacaagctggacatctca

SEQ ID NO: 13716 - DNA, 261 bp, Glycine max
  unsure (1)..(261): unsure at all n locations; Clone ID: 701155511H1
ggagggttttgtcttgtgattatccttgcaacacacattgtcttgtcggcaaaatcttccaccaacaacacacagnnatggcaggctcaaacattctttctcactctccttcccttcccaaaacctacagccactccttaaaccaaaacgcgttatcccaaaagcttttttttctgcccctcaaattcaaagccaccacannaccacgtgctctcagagcggttctctcgcagaacgctgtcaaaacctcggtggaggaca

SEQ ID NO: 13717 - DNA, 257 bp, Glycine max
  Clone ID: 701155512H1
gattggagaaatatgaagcaagttgcatgcctggaggactctcatgtggatgatgtcactcaggttcattttgtccctaatgaacaaggcaagctgatttctgcttcagtagatgggttgatctgcacatttgatgctactggagatatcaatgatgatgatcatctagaatcagtgattaacatggggacttcaattgcaaaggtggggattttggagagaattatcagaagcttggtgcttaacacatattgaaa

SEQ ID NO: 13718 - DNA, 263 bp, Glycine max
  Clone ID: 701155513H1
gagaacataactcagcaatgacaatgaagtttcgggccaatgaggttctcaatgggaagtacacaagagccacagccaaaagtgttttcctggtacccttcactcttcttctcatcatgctccctctttctctcatgagaagctctcatgaatcaactccagagatatcttctgtaagtgtaagcagcagtttgaacaacaacacagaagtaaaacaatgtaacatcttttctggaagatgggtgcataatcctgaagcacct

SEQ ID NO: 13719 - DNA, 261 bp, Glycine max
  Clone ID: 701155514H1
gagatagttgaaattattatttgtctattcctagatcgccaatttcagggtttgttggtgctttgaatgactgcatggaagcgattgtcaattactttacagaccaggaatggtgctcaagttgtgagaacatagcaaaattcattgcttgcagagtctcaaaggatttgaattgcattcagactattgaatgtatttcagaagctaactctcgttgcaaacaacttaggagtgctgttgcttatcaaacactgctttctt

SEQ ID NO: 13720 - DNA, 267 bp, Glycine max
  unsure (1)..(267): unsure at all n locations; Clone ID: 701155517H1
ggagaaagaggngatgcagattcgagttcgatgcaactgtggagaaggaagctgcgaggaatggggggttatagaacttcaaggagtggtggagccacagcctggattccacgattccctccaaaatcttcacatcggcactttgtgtcgtccttcttctcaggnagtctacaccttcactgttggataccatgaactgacggggtcaaaggttcccttaaagaagccaatggtggtgctcaagaaagtaaagcatcctgatggaga

SEQ ID NO: 13721 - DNA, 260 bp, Glycine max
  unsure (1)..(260): unsure at all n locations; Clone ID: 701155518H1
ggatcacaacacaagtattcaaaatatctctatatattccctccatttctgagaatggcgaaggctgcggagaagaagccagcggctgagaagtctccggcggagaagaagcctaaggcagagaaaaagattccgaaggaaggcggtggcgnnnnnnnnnnnnnnnnnnnnnnnnnnagcgtggagacctacaagatctatatcttcaaggtgctgaagcaggtacaccctgacatcggtatttctagcaaggccatggg

SEQ ID NO: 13722 - DNA, 255 bp, Glycine max
  Clone ID: 701155519H1
gaagggcagaaacaaaagcataaccctagctaggacgtgtttggagttggtttgagcgtattgaggcaatgacgcgaccttacggtgtgaaggggggccggaagcgaaagcacgccgaacccaaatacgacgaagaagatcaagaaacgcaaccaaaaaaagctgtggtggaggtggagcacaacaaagaagaagaacaacagcaacaaacaccagagggggatgattgagcggtatcccattacgcccatgaga

SEQ ID NO: 13723 - DNA, 249 bp, Glycine max
  Clone ID: 701155520H1
gaggcctccaaatattttcctttttagctttgattagagtggcctagttgttgtttttctcaatgagaagggcttccactatgcattgcgcactttggcgcttctgtgttcccttgttgctacttgctagcttcagttatgcaccttttgttttggcgacaactgaaatttcagggaatgaagtgagcactgatggaaaggttttaaatgaagagttagcaaaacctaatctacaaggacatgatgaag

SEQ ID NO: 13724 - DNA, 258 bp, Glycine max
  unsure (1)..(258): unsure at all n locations; Clone ID: 701155523H1
gaagccaagagtacatatgtggaaaatatgcaggatgtgcccccgctgaaaagttctaaactgaacaaaattgatatggtgaagcatgaaaagtttgcccaatttgaaagggaatcagctgagcataatgatgaaacagaagttacaattgtatcagatgctgcaaggtgcgacaaaacttctgaattaacagagttaaggccagaacaagactgtggtgttgctgaacctgaaactgaaaacgaggatganatctta

SEQ ID NO: 13725 - DNA, 259 bp, Glycine max
  Clone ID: 701155525H1
ggagaacaaaacaagtgtttcgaatagattatcctaagtctttgggaatagtgctgcaatggcttcaagtcaggaggaggtgacccttttgggagctactggaagcccatttgtgtgcagggttcatattgccctcaagttgaagggagttcaatacaaatatgtcgaagaaaatttgaggaacaagagtgaactgcttctcaaatccaacccagttcacaagaaggttccagtgtttattcacaatgagaggcccata

SEQ ID NO: 13726 - DNA, 257 bp, Glycine max
  Clone ID: 701155527H1
tggtgggatttcaatatcactcattgtaaactgtaaagttggcatattgctcattgttttcctttcttttttgccggaccgatcctaatgctatgtagtacttccctttgccaagttaggtcctatatactccacctgattgcaactgagctgacccatgcttggttagaaattgtatatgctctgaatccgattatggtacaaaagaacgctacatttagttgtttagccgtatcttaacaaagacagcgtatcta

SEQ ID NO: 13727 - DNA, 259 bp, Glycine max
  unsure (1)..(259): unsure at all n locations; Clone ID: 701155528H1
ggagggttntgtcttgtgattatccttgcaacacacattgtcttgtcggcaaaatcttccaccaacaacacacagncatggnaggctcaaacattctttctcactctccttcccttcccaaaacctacagccactccttaaaccaaaacgcgttatcccaaaagcttttttttctgcccctcaaattcaaagccaccacaaaaccacgtgctctcagagcggttctctcgcagaacgctgtnaaaacctcggtggagga

SEQ ID NO: 13728 - DNA, 237 bp, Glycine max
  unsure (1)..(237): unsure at all n locations; Clone ID: 701155529H1
ggcacaagtttgntgagatagctagaagcaataagatgaaaatgaaagtgcttgttttgtttgttgctacagttttggtagcatatgaatgccatggctcagactaccagaagttccctctccaaatgaaaactgggtttggtgggcaatacagcaatgaggtggcatgtgccagttggaggcttggcgtggaagcaagcaacgtatcaagtggcaaactgttcctgcagcttgcgg

SEQ ID NO: 13729 - DNA, 262 bp, Glycine max
  unsure (1)..(262): unsure at all n locations; Clone ID: 701155530H1
gaagcaaagaaaaataaaaaaacaatggggaaaacttagcgtgtcctctgatgcacagaagacagaagagaagtgagtgagagaatgtttaagaaggcnngtggaggcgaaatctcaccagaggttgtctggtgcggacaggaagaagctgagacgaagcattaagcaaaaattccaaagggtttctgattccgacttagatgccttgcttcctcccaaggctgagattacagtagccaagcttcaaaaccgcgtccatgta

SEQ ID NO: 13730 - DNA, 265 bp, Glycine max
  unsure (1)..(265): unsure at all n locations; Clone ID: 701155531H1
gatagctgaagaatactgtgagaganagataaatgttaggaaaagagtgctacacaaacccgncatcaatcctaaattcctctagtgcggttggccatgttatcaatatcggtggtgttaattcttacgtcactggttcccctctctccatcctcgccataattctagcctctgatatttttggatttaaaccaccacttttaaggaacattgcagacaaggttgcagctactgggtattatgtcgtggttcctgacttcttcaa

SEQ ID NO: 13731 - DNA, 264 bp, Glycine max
  Clone ID: 701155532H1
atagttaaaagaaagaaactttatcgaaagtagtcaatcagattttttttaataaaaattaatcattaataaaattaaaatttgtaacttcatgatcagcaagagggtacttcaataaaatgcaagaatttctttgcatttcttcacaattttgagcaaagggttttttactaggtcctacaccgtttttttaaatttctttgctatttgaacccaatcaatcgaaggaagtttcataccttcctcctactttcttcctttctt

SEQ ID NO: 13732 - DNA, 248 bp, Glycine max
  Clone ID: 701155535H1
gaggcgcggcgggatcatcacgagattgcaaaatgaagttcaacattgcaaatcccaccactgggtgccagaagaagctggaaatcgatgacgacctgaagcttcgggcattttgggacaagaggatctcccaggaggtccttggtgacgccctgggtgaggagtttaaaggatatgttttcaaaatcactggtgggtgtgacaaacaaggattcccaatgaagcagggagtgttgacccctggtcgt

SEQ ID NO: 13733 - DNA, 259 bp, Glycine max
  Clone ID: 701155536H1
tgtagctcaccttttaaagcctcgtggctggaaaccgcccgttcgccgacagtttttcctagactgcaatgaaattgcagatctttgtgatagtgcagaacgcatattttcaagtgaaccgagtgtcttacagcttagggctccaattaaaatatttggtgatttgcatgggcaatttggagatctcatgcgcctctttgaagagtatggtgcaccatcaactgctggtgacatagcatatatcgactatctattcctc

SEQ ID NO: 13734 - DNA, 256 bp, Glycine max
  Clone ID: 701155537H1
ggcggagaaatcatgtaattatagaagatagagaaatcgcaacacattaattgcaatttcaactcccatatatcattctcgttaatttcttaacccatcttccaagcattcttatccgacaaggattcctttctctctctcttgatccaatcttttcgtccattaaaattaggattttaaattctcaattttcaattttcaactccaatccctccggcgagctttccaggaagctcgcttctctccgaccatggcc

SEQ ID NO: 13735 - DNA, 264 bp, Glycine max
  unsure (1)..(264): unsure at all n locations; Clone ID: 701155538H1
aagctcatgttgatcacatgtgttggagtatccttgcaaggctaaaacaccctaatgcgccaccgacaatatcatctcggtaagagcgatagtgtcaggttgcccattgtgtgacaattcattgactacatngactcacataggctacattcacaatgttttccaaaatggtaccacatgtatacgagtctatgagtccaatgtgcatcacatttcgtgtgtgactttatgtatggaatgtttgatttggataagacatgctta

SEQ ID NO: 13736 - DNA, 258 bp, Glycine max
  Clone ID: 701155539H1
tctgaatttaaatgctgcatcgtcaaaccaccagcaagggagaaatatatgggcaacagctgcacttgctattgctgttttgctagccgtcaccggctacagctgctagcagtctcatggtgaccatggattcactttaatgagttatttggtttgcaaaatatataatcattttatgtgtatagatctgataatgagaatctatacctatgattcttcctttttttgttgtgatctttgctcagaaatattaatgga

SEQ ID NO: 13737 - DNA, 223 bp, Glycine max
  unsure (1)..(223): unsure at all n locations; Clone ID: 701155540H1
angacgacagaagggggtgacnaatggagggtccttagttctgtttctctttcttctctctgttctctcaaccaagttctcaattcaatcttcttcacccttttgatctgctaattctcaaggtattcaaaattgggaggttttcgtttgaattgtgatgtccaagccactgctaggcataggggaggaggaaggtcaaagcaatgtcactttgttggtttct

SEQ ID NO: 13738 - DNA, 255 bp, Glycine max
  Clone ID: 701155541H1
gggagcgaagtgaattgaaattgaagtgactcggggtgagttgactcagcaatggcggaagaggtgactcgggtgatggtggcggtgaacgagtcgagcattaagggataccctcatccttcgatcagcagcaaaggggctttcgactggaccatcaacaagatcgttcgcgacaacgtctctgccttcaaccttctttttcttcacgttcaagtccccgatgaagatggttttgatgacatggatagtatcttg

SEQ ID NO: 13739 - DNA, 256 bp, Glycine max
  unsure (1)..(256): unsure at all n locations; Clone ID: 701155542H1
gatagtagtcagcgccccactatcagtgccagtccattaagaaaacgcaaaaatcatcgctgaaaacataaacaaacatggtctgcctctgctgttagcagctactacctcgctccacaaaaaacaccccctttctcaaatcttaggttgttccaacgatggaagagttcagatccaaatcgtacggtgacggaaggatgcagattgangcctaccgtggngcgaacattcaagatctccgctgctgcagcgcctc

SEQ ID NO: 13740 - DNA, 251 bp, Glycine max
  Clone ID: 701155543H1
ggggtggaggtggaggatacggcggtggtagagaccgtggttacggtggtgatggtggttctcgctactctcgcggtggggaaggcggtggatccgatggaaactggagaaattaggcatatgaccctgtaaattagggtttatgattaagttcaattattttaaggtgttgtctgtgtgtggtttaagtttcggtatctgtgttggtttcgtttcgtgttcctgtggttttcgtttttgacctacaatct

SEQ ID NO: 13741 - DNA, 254 bp, Glycine max
  Clone ID: 701155544H1
aggaattttttattttattttatttttcttataattatttttctttgatctgcagataaggttttggatgctgcagaagtagctggaaggaatgtcatgtccacttcatcagttgtgaccaccggcctagtttcagataagtaagttcgttctctatttaagtattcttctcatcactaacataattgcctggcctcaaatgatacaagaccttgcttgattttttatttgttttttatcaaaccaatgttttg

SEQ ID NO: 13742 - DNA, 257 bp, Glycine max
  Clone ID: 701155546H1
ggcatcaattcaaaatatatcatcaattataagcatgggtttgtggaacacaacgaatgcagtgtcttgccgctttcacaagtttggtgatgaccaaaagaatctggtcttccaaggtgatgccacgtcttcttccaggggcatagaactcacaaagttagacggtggaggaaaaccagtgggtggcagtgtggggagagtgttatactcttctccagtgcacctttgggaaagctctacagtggtcgcaagctttg

SEQ ID NO: 13743 - DNA, 259 bp, Glycine max
  unsure (1)..(259): unsure at all n locations; Clone ID: 701155547H1
catacagggatgcaggagattatgcctgtaggtgctaactttcccagaataggcaagatggttacagtgctcataggtgatccgatcaattttgatgatataattgaatttgacaaagacaaaggctcaaatgtgcccagaagacgactatatgatgcagtagcatctagaattggtgatcggttgcatgagatgaaggtccgggttgacccnntcgcaattgatcaagaaatgcagctacaagataagtcctcacaca

SEQ ID NO: 13744 - DNA, 272 bp, Glycine max
  unsure (1)..(272): unsure at all n locations; Clone ID: 701155548H1
gttatttgaagaagaagatgacggtaaagatggcgaggatggttcagaagaacaagctgtgattggattatggagtggcattgcttggttggttggaatgactgtattcattgctgtgttgtctgaatatgtggtggatacaattgaggatgcatcagattcatggggtttgtctgtgagcttcctaagcataatcttgctgcccgatagttggcaatgcagctgaacatgcaggagcatnatatttgccttcagaacaagctggacatctc

SEQ ID NO: 13745 - DNA, 254 bp, Glycine max
  Clone ID: 701155549H1
tccataccacttttctttctccgttagttccatatagttcatagttttcctttgcaatttttattaatacaacaacgaagaaactataaaagcggaaaataccgaggtgatgtttaaataaatttctccatatatatttataggaaaaggaaataaaaaagtgaaatgaattgaatttctgtcagaaaataaaatcaacttatgtatgtagttgagctatagaaagattaaataagaattttcttttaaataag

SEQ ID NO: 13746 - DNA, 253 bp, Glycine max
  Clone ID: 701155550H1
gatggaatgaagtaactaacccaaacctagtccccttacttggctcgctggttggatttgattcgactcgattctcgctgatgaagaagcatttgatgcacagctatggcgttgccgtgattgtggtgttggctttgagtttgagtttgggtgcatcagcggaacaactcagttcacgagaatgcgagaatctcggtttcaccggactcgccttgtgctccgactgcaacactctctccgagtacgtcaagga

SEQ ID NO: 13747 - DNA, 252 bp, Glycine max
  Clone ID: 701155551H1
ggatcaatactaccatatgttgcatgaaagccctgagcttgtgcataggttttaccaagatgtcagtaagcttggccgtcctgagcagaatggcataatgggtattacaaccacaatgtttgatattaacaagaagatactatcattgggttatggcgaactcagtgcagagattgtatctgtggatgcacaagaatcttatggtgggggagtcattgtcttggtcactgggtttatgataggaaaggacga

SEQ ID NO: 13748 - DNA, 228 bp, Glycine max
  Clone ID: 701155552H1
gtcttaatttgtttcttgttttctctgtcgtttcgttcccttaatctttgatctctgagttacaagttataacaaaagaaataaacaacacatataaatatttgtaagaaaatatatatatgatcatgggttttcttcacaaactatgggacgaaacgttggcgggtccagcaccggaaacgggtctggggaagctccgaaagtacaactcgttctccggcggaagct

SEQ ID NO: 13749 - DNA, 253 bp, Glycine max
  Clone ID: 701155553H1
gggggttaggtatgagagtgagaacgaggaagggtaagtgtattcacattttgtagagggcgatttcctagactctgtcttgggggcacaattcaattgtggctccgatcaagggcgtagtggtgaaggagccgaagtggatggtggcggctgcggcgacaacggaggagaagcataatgagaatttgagcagcgaggggagtttggaggacgatgattcgtggagagtcagaatcttcaatgggcgcaggga

SEQ ID NO: 13750 - DNA, 254 bp, Glycine max
  unsure (1)..(254): unsure at all n locations; Clone ID: 701155554H1
aagggtaataataaaaaaggcacttggacgattttcttctggtatttatgtttgagttcagttcgttttacaatttacatatccataattatattcaattatataaataatatcatttatntncaataattattgtgattcacataatttaacatttataaaaaaattagaacaaaatatgtttgagatctttttgtaaaatttaaaaaatattaatttggttctcataaaaaatttcgtattaatttgttctc

SEQ ID NO: 13751 - DNA, 233 bp, Glycine max
  Clone ID: 701155555H1
gatccacataaacatcaacatcgaaaggttgttaattttcaactcaatggttcttccctcaggttttgtttccatgttgatactttttggcatggttttggtagttggggtgaatattgtcccaggggttgaggcaaaggcaagggctttctttgtatttggagactcactggttgacagtggtaacaacaattacttagcgaccactgcacgggctgattcccctccttatg

SEQ ID NO: 13752 - DNA, 258 bp, Glycine max
  unsure (1)..(258): unsure at all n locations; Clone ID: 701155556H1
ggaaaggcaaagtgagtagcaggaggagtacggaaatggcatgtggctctgttctttcatctttncttcacataacgaactccatggccatcaagggtgtcctctccttcgcaccaaatcctcctctgcttcttcgtctccccaaagctgtcaccttcctttccttttctgcttccactaaatcccccactaagtcttttcaagtgagatcaattgctggtactacagaagctgcatcggggtttgatgagatggttt

SEQ ID NO: 13753 - DNA, 252 bp, Glycine max
  Clone ID: 701155557H1
tactgaatgatggattaaagatgctagtttttctaaaactccctgctgcgatgtttcatttgtttctccataggaaagttttgctgcacctatgattttttcttaccagatctgtttatattgatgattgactaggttttggaagccaatgcaacattgcttatttctttgttgattatgtgcagcatagtgtaaaagatgacttggcgaacataatagcaccactcatgattagaccaattacaaggtggc

SEQ ID NO: 13754 - DNA, 256 bp, Glycine max
  unsure (1)..(256): unsure at all n locations; Clone ID: 701155559H1
gctcgaggaattaaattgacaanattttgagtcgcttaaccttaagtagcgagattttcngatggattntttttagtaatttgatttacttatcgagtcacttttgcctcggatctgtccaacagtacaatcgtgatttgatttgtttcgtcaatctatggctcaggctgttatttctttttctttttaggctaattgaagaattaatgaaagtgtaatactacacatataaaaggttcttttatgcgttattaga

SEQ ID NO: 13755 - DNA, 253 bp, Glycine max
  Clone ID: 701155560H1
gggtgcaggaagagagggcttgttggtggatccgattcagaaaaaatgggttcaaacccgtcgtttgtcccggagatcggatccgatggtcttcccagacaatcttccgttatcacttacaccgaacagataatcgaagcagaacagcttcaattgaagaagtacattcaagaaaactatactaaaattcgtgatgtggagcgtgagttgcaaatcttggattagagatgaagcttacatctggaccaaagaa

SEQ ID NO: 13756 - DNA, 254 bp, Glycine max
  Clone ID: 701155561H1
gagcacagaagtgaaatacttttctgataccggctacaatgattccaaaccaattggatttgattttttgttgggaaccgatttttgcgcacccctaaattgtaaaattgtatttctttgaacatcagtccttggtgctgcaattttggtcgaagatgaagaattggtcgaaggagggttggaggtggctatctaagattgattttcacggaaatgttgcttcgaaggtgatcgtgactcgccgatttggaagc

SEQ ID NO: 13757 - DNA, 261 bp, Glycine max
  unsure (1)..(261): unsure at all n locations; Clone ID: 701155563H1
gcatcaccagggtgacaagagataccagtccatgcacaaggagactcatcaaactattgccaaaatgggatagagaatgaaaatcgcctaaaaagttaaagtttacaacttcaaactctatttctcatatgaaaaggcatttcacaaaaatttggatagagaaacaaaatcccaaaatgggaagtgaaaggtgaaaatttgaaaactacccagaatgcaaatattccccccaaaaaaaannnggttncngannanntcngg

SEQ ID NO: 13758 - DNA, 260 bp, Glycine max
  unsure (1)..(260): unsure at all n locations; Clone ID: 701155564H1
gacaacaaaacaatttccaaactccattaccattnccataacctaaatctcctctttgtttccgagtcagnnagcaatggcacgtaccaagcaaaccgctcgcnagtccaccggcggaaaggcgccgatnncgcaattgggcgactaaagccgctcgcaagtcagctccggncaccggnggagtgaagaagccccaccgctttcaggcccggaaggtggctctgagggagatcagaaagtaccagaagagcatgaacttc

SEQ ID NO: 13759 - DNA, 254 bp, Glycine max
  unsure (1)..(254): unsure at all n locations; Clone ID: 701155565H1
gacagttaatttatcataacatttgtttttggtgcattcaaaaaatggctgggattgtagtgatttttgactttgactcaacaatcattgagtgtgatagtgataattgggtgcttgatgagaccggtttaactgaaaagttctatcagctnngtcctagcacgcattggaaccctctaatggataagatgatgaatgaacttcattcacaagggaaaaccatcaagacattgtacaaatctgagtaggacacc

SEQ ID NO: 13760 - DNA, 252 bp, Glycine max
  unsure (1)..(252): unsure at all n locations; Clone ID: 701155566H1
gatcgaagcaaaaaatgaaaacccaaagtgcttctctcctctgtctttttctctctcttgctatccttttggctagtggcactgctgcanccgcaactccaagaagcgcagtgccaagccaccatgtttcaacattcaacagaagcctttttccttccacttttctctttggaattggttcttctgcttaccaggcagaaggagcancaagtgtagatgggagaggaccaagcatatgggacacctacacta

SEQ ID NO: 13761 - DNA, 254 bp, Glycine max
  Clone ID: 701155568H1
gaagacgaagatttcaactatcgcttcaattccatcagcttcaaagggaaggaagggtggattgtcggaaaacctgcgattctgttgtacacttccgatgccggagacagttgggagaggatacctctcagtgctgaacttccaggggatatggtgtacataaaggcaaccggtgagaagagtgcggagatggtgaccgacgaaggtgccatatatgttactgcaaacagaggttacaactggagggctgctgt

SEQ ID NO: 13762 - DNA, 260 bp, Glycine max
  Clone ID: 701155569H1
ggaagagaatggctcccaagggtttaacctttctggctgtgttaatatgcgtttcagcactgtcactgagtccttctgttgcgggggaagggcaaaataatggccttgttatgaacttctacaaggaatcatgccctcaggctgaagacatcatcacagaacaagtcaagcttctctacaagcgccacaagaacactgctttctcctggctcaggaacatcttccatgactgtgctgttcagagttgtgatgcttcactg

SEQ ID NO: 13763 - DNA, 216 bp, Glycine max
  unsure (1)..(216): unsure at all n locations; Clone ID: 701155570H1
gggagcagatgaagttatgagtgatgatgatattgacgggaaaacatgtcctatcttatgtttctttccctttgagttgagaattccttgttgatcactcactcacacccatctgntnntgcttcccaacatcatggacttggacttcaggagggcttcaaccattcattccaccaatcatcacttctcttctctccaaccttctcgccttcactc

SEQ ID NO: 13764 - DNA, 266 bp, Glycine max
  unsure (1)..(266): unsure at all n locations; Clone ID: 701155571H1
gagaaatcggtgngctgaaatgggtctgctctacctcgggatgggagtttctggtggtgaggaaggtgctcgtaatggtccctctttgatgcctggtggttcgtttgaggctttcaaatacatagaagatattcttctcaaggtggcagctcaagtccctgacagtggtccttgcgtgacttatattggtaaaggtggctctggtaatttgtgaaaatgatccacaatggcatcgaatatggtgacatgcagctgattgcagaggc

SEQ ID NO: 13765 - DNA, 257 bp, Glycine max
  unsure (1)..(257): unsure at all n locations; Clone ID: 701155572H1
gtagtgtggatccgtngcctcnnttttaaaaacgtcttgaacctcgcacttgacttttaggagcnatattatnttagtcagccaaaagtctgattttttaaanaaatgtctttaagatgtcgtcttggnncaatagatctnnaaaataacattnttaatgtgtttcnatgnatttngtatggnaaatantgantaacnccanaattttacttttaanaanaccngggtcaaaangtnacntcctaaaatgcttcttc

SEQ ID NO: 13766 - DNA, 251 bp, Glycine max
  Clone ID: 701155573H1
ggcatcaattcaaaatatatcatcaattataagcatgggtttgtggaacacaacgaatgcagtgtcttgccgctttcacaagtttggtgatgaccaaaagaatctggtcttccaaggtgatgccacgtcttcttccaggggcatagaactcacaaagttagacggtggaggaaaaccagtgggtggcagtgtggggagagtgttatactcttctccagtgcacctttgggaaagctctacatggtcgcaag

SEQ ID NO: 13767 - DNA, 119 bp, Glycine max
  unsure (1)..(119): unsure at all n locations; Clone ID: 701155574H1
gntagtagtcagcggagcnntatccagngccngtacatgaaggagangcaannntcnnngntgtgaacataaataaatatggtctgcctctgctgttagcagctactaccttggtncat

SEQ ID NO: 13768 - DNA, 250 bp, Glycine max
  Clone ID: 701155576H1
catgtgaagaactcatatttaatcatctgaaacagctttatcccactcacaagttcattggggaagagaccacagctgcctatggcactacagaacttacggatgaacccacatggatagttgatcccctggatggaactactaactttgtgcatgggttcccctttgtttgtgtctccattggtctcacaattggaaaaactcctacaattggtgttgtatacaatccaataattaatgagctttttac

SEQ ID NO: 13769 - DNA, 256 bp, Glycine max
  Clone ID: 701155577H1
ggcgtgtttagagaaaagtaactaaccagagaagaagattccgattccgattccggctgtggcagcctgagccacttctcttttgaatcgaatcaaatcgacgcagtcactcgacatggcactgtcgcgtcttcgtcaccctctcttctctcgctcccttctcatcctctcttctcccgccagatccctctccagaacttcttattcatctatttttaccctcggaggcgatcatcacaatataacaaggcctgca

SEQ ID NO: 13770 - DNA, 220 bp, Glycine max
  Clone ID: 701155578H1
agtgagcgtgaaagatgccttcggcgaggctttcagggtcaccaaggctcgacgttgctattgacatgggcaatccatttctcaatctcactgttgatggtttccttaagatcggagctgtcgcagccacgcgatcagctgctgaagatacttatcatattatccgaaacgggaatatctcaagtcatgatttcgagaaaacgttgaagaagatgtgtaa

SEQ ID NO: 13771 - DNA, 256 bp, Glycine max
  Clone ID: 701155580H1
tactctgatgggtatttggtagcttcatagatatatttgttagatccaatttagattacaaatgaactataccatgatcacctggaaaaaaaatatatatgtccatcttatcaaaaggaacgttagtaataaattctctaacacattaatataatgtagggagatataatgtcttttaaactaagtttctaaagatgatgactagatggaaaaacatctaaaggagaaaatgaaaaactacaatgtaaactagtta

SEQ ID NO: 13772 - DNA, 251 bp, Glycine max
  unsure (1)..(251): unsure at all n locations; Clone ID: 701155581H1
atatggatgaatttgatgttgttgtctctcaatctctcataattacatctttgcttatttaactttcattggaatgtggatgtacgttnttagtttgtttgctcaagtgacttgtactcttgagttgatctccaagtccgcccaatcagaaattgcatgttctacacgtttggtggggttgccgtaagcgacgagtaaaattgaataaacatttgattaactatgtttccaaataaaaaaaaataagaagt

SEQ ID NO: 13773 - DNA, 252 bp, Glycine max
  Clone ID: 701155582H1
ggaggtcaatagcaacaacagcaattgctactatacctgcagccttagcattctcatcatcttcatcatcttctttccctcgctcttcccaatcccccaatccccaaaatagattaggtcttgtcaaaacacttgctactcctccctctgctctccacatggaccacaaactctcttctcagcctgacgctgtcttgcccgagttactgacggagttcatggtggacatgaaatgcgaaggttgtgttaatg

SEQ ID NO: 13774 - DNA, 251 bp, Glycine max
  Clone ID: 701155583H1
gatcgaagcaaaaaatgaaaacccaaagtgcttctctcctctgtctttttctctctcttgctatccttttggctagtggcactgctgcaagtgcaactccaagaagcgcagtgccaagccaccatgtttcaacattcaacagaagcctttttccttccacttttctctttggaattggttcttctgcttaccaggcagaaggagcagcaagtgtagatgggagaggaccaagcatatgggacacctacact

SEQ ID NO: 13775 - DNA, 249 bp, Glycine max
  Clone ID: 701155585H1
gtcactgatggcaccatacttacctcagggtgggactggagctggtggtagtccatactcagaaggtggtgctctctatgcccttggtcttattcatgctaaccatggagagggcatcaaacaatttcttcgtgatagcctgcgcagtacaactgttgaggttattcaacatggtgcatgtttaggtcttggtttggcatccttaggaactgctgatgaagatatttatgaagaaataaaaaatgttct

SEQ ID NO: 13776 - DNA, 201 bp, Glycine max
  unsure (1)..(201): unsure at all n locations; Clone ID: 701155586H1
gtgttctgagctgctagaagcaatggagaggaaaagaagccatgcttctttcaccatgtttgcaatgnttgttggattgctctctcagagccttgtcattcctgtaatatccaccactgttgcagatcagaagaactactacaccccagatccacatgctggaagtccccccacaggctcacacaatagtagtcctccatc

SEQ ID NO: 13777 - DNA, 252 bp, Glycine max
  Clone ID: 701155587H1
gatagttgaatttttaacttgtctgttcttatcttcatcctacgccaatagcccaaaaccttgttctctttttgtggttcatttctctcttccagatgccacttgccgttcttcaccctcacgattttctcaggaaaaacccatctaaccagtaccagaccataatccctcactctcccaacatgaatcctaataagtctcatcggacttcccgaaaccgtaagaagcggcccgatccaagcccacaaggcg

SEQ ID NO: 13778 - DNA, 225 bp, Glycine max
  Clone ID: 701155588H1
agacaggagtgttatccggcgaaggaggcattcgagaagcttgaaaaggtgggagaagggacatatgggaaggtgtacagagcaagagagaaggcaactgggaagatcgtggctctgaagaagactcgtctccacgaggacgaagaaggtgtccctcccaccactctccgtgaggtttccatctgcgaatgctctctcgcgatccccatgtcgttagttaatgga

SEQ ID NO: 13779 - DNA, 250 bp, Glycine max
  Clone ID: 701155589H1
gaccacattccaaaacacaaacacatacattgtagtatcacttttgtctccggaatttgttcttttgagttatggcaagcttaaaggttgcatgtgtggttttgatgtgcatggctgtgatgagtgcaccaatgatggtgcaagccgtgtcatgcaatgatgtttctgtgaacctagcaccgtgcctatcttacctgatgcagggtggagatgttccagaatcgtgctgtagcggagtgaggaacattct

SEQ ID NO: 13780 - DNA, 249 bp, Glycine max
  unsure (1)..(249): unsure at all n locations; Clone ID: 701155590H1
ggacgaattcgganacgaaagaaggagtggcgataaagaagattgggaatgcctttgacaacaggatcgacgccaagaggacgctcagggaaatcaagcttctctgtcacatggaacatgataacataattaaaattaaggacataattcggccagcggagagggagaacttcaatgacgtgtatatcgtgtacgagttgatggacaccgattgngcatcagattatacagtctaatcaggctctcacc

SEQ ID NO: 13781 - DNA, 249 bp, Glycine max
  Clone ID: 701155591H1
catattatttgataatatagtttattatcagcagactgagttttgaggtgcggaaactatgatccaagcatttcattaataattaataatccaaatgagtactgctatttatcccacttatccttcaatacacgttctaatttaactttattactgaacttaaaagcctggtgggatatgaggctaatgttttgattccacatatccctttgaaattgccactgtttttgtgtatgtaaaccattcata

SEQ ID NO: 13782 - DNA, 238 bp, Glycine max
  Clone ID: 701155592H1
gacagttagtttatctctacattatttgttttggtgcattcaaatggctgggattgtagtgatatttgactttgactcaacaatcattgagtgtgatagtgataattgggtgcttgatgagaccggtttaactgaaaagttctatcagcttcttcctagcatggcttggaaccctctaatggataagatgatgaatgaacttcattcacaagggaaaaccattcaagacattgtagaa

SEQ ID NO: 13783 - DNA, 251 bp, Glycine max
  Clone ID: 701155593H1
ggacacatggttttaaagaggaggaaggattatgatgaggcgtctgaaggcaatgcttggaggcttcttgctgaggtgtccctttctcaagagaggtttcaagaagtcaatgatcttgtttttgaagccattggctgtggtgaattggaggatgtcaatgttcaaagtgtcaaaaaagaagttgatgcagtcagcacaagcgaacaccctactgtggtggtggtggctggttcacaagaatgtgtggttct

SEQ ID NO: 13784 - DNA, 253 bp, Glycine max
  unsure (1)..(253): unsure at all n locations; Clone ID: 701155594H1
gacagcaaagtgagaaagtgttgctgtgttgcagagcacaagaggtggcggtggctgcaaggaaaaccattcaaatagcttccgctgcnanngaaccctcctctctcgtcgatcttcatgtcccactaagctcaatggacttgccttttcttattcttctcctcagaaacgtgccctctctttttcccggcttccggtgctgttggnnnntgcgcaagtgtctttgacgccgttgcatagtgctactgcctct

SEQ ID NO: 13785 - DNA, 235 bp, Glycine max
  unsure (1)..(235): unsure at all n locations; Clone ID: 701155595H1
acagcaaaacaatnttcaaactcaattaccattaccataacctaaatctcctctttgtttccgagtcagagagcaatggcacgtaccaagcaaaccgctcgcaagtccaccggcggaaaggcgccgaggaagcaattggcgactaaagccgctcgcaagttcagctccggccaccggcggagtgaagaagccccaccgnttcaggcccggaangtggctctgagggagatcagaa

SEQ ID NO: 13786 - DNA, 230 bp, Glycine max
  Clone ID: 701155601H1
acctacaaggtaaagtttgcattcacacgattttttcaaatgctaatacaactcccaagaaaaagaataaataatggagaaaatatgattgtgtttgccattcacactggagtttatggcgaaaatatggttataatggtgttgctacactgctctcgttgttattgtattgtattaatttcccactattgccagtactggcatagtccatacatcataatatgatgaga

SEQ ID NO: 13787 - DNA, 236 bp, Glycine max
  Clone ID: 701155602H1
gggaaaccatggcgaaatatcgggccgagctaaagaaattggcagagaaagtgatggaggtgatggatgagaatcttggcttaaccaaagggtacatcaagaaggcactgaatggtggagatggagacaatgccttctttggcaccaaggtgagccactaccctccatgtccccatccagggcttgtgaagggtctgcgagctcacaccgacgcaggaggcgtcatcctactcctc

SEQ ID NO: 13788 - DNA, 234 bp, Glycine max
  Clone ID: 701155603H1
ggatcaggaggcacaccaccaactacattgacaagttgttcgatgtgttcgatcccatgattgatgaacgcatgaggaggaggggagagaagggttatgccactagccatgacatgttggatatcttgctggatatttctgaccagagtagcgagaagattcataggaagcagatcaagcatttgttccttgacctattcgttgcggggacggatacaacagcctacggcttag

SEQ ID NO: 13789 - DNA, 223 bp, Glycine max
  Clone ID: 701155604H1
gaattcaaaatatatcatcaattataagcatgggtttgtggaacacaacgaatgcagtgtcttgccgctttcacaagtttggtgatgaccaaaagaatctggtcttccaaggtgatgccacgtcttcttccaggggcatagaactcacaaagttagacggtggaggaaaaccagtgggtggcagtgtggggagagtgttatactcttctccagtgcacctttg

SEQ ID NO: 13790 - DNA, 166 bp, Glycine max
  Clone ID: 701155607H1
gatagggtttggatttttcgagcaatattctctctctgtcacttcacctcacacgatctcgttccgattgcacgcgttttaatgatcttcgtcttccacggcctctgatttggctttgatctctcttgtcgcacctctctgccagaaccatcatctccgtgcaggg

SEQ ID NO: 13791 - DNA, 234 bp, Glycine max
  unsure (1)..(234): unsure at all n locations; Clone ID: 701155608H1
ggaagcccaaagtgcaacgtnactttgcaaaaaccctaaaccctctctttctctctccgcgactctgtactcatcaatggcgacgcaatcgttagacgaagaaacaactaagaaagtcatacgacaggtcgagttttatttcggcgacagcaaccttctcaccgatggtttcatgaggaagnggatcactgaaagcgaagatggcatgattagtttggcgctgatttgctcgtt

SEQ ID NO: 13792 - DNA, 229 bp, Glycine max
  unsure (1)..(229): unsure at all n locations; Clone ID: 701155609H1
ctccctttcaacaaccatggggtgttggtacatggttaaaggaaattaaagacactactaaagaaggatatagttttgaagagctatgcatcaagaaagaagccattgagggagaagagaagttttgtgcaaaatccttgggaacagtnattggttttgccatttcaaagctgggaaagaacattcaagtactttcaagttcctttgtcaataagcaagaccaatacac

SEQ ID NO: 13793 - DNA, 234 bp, Glycine max
  Clone ID: 701155611H1
atagttttcattaccataggctatatgtttaaaaatgtgataagtgataacttctaagcttgtagttagactgagatgtaattcaaagtccatttatatatataacctatagtttgttcattgctcattatttgttaagtttacctggtgaagctcaggttaccaaactgagtgttagaagtcttcatatttgtcccaggtgattctgtttgttcttatgaataaatgcttcag

SEQ ID NO: 13794 - DNA, 235 bp, Glycine max
  Clone ID: 701155612H1
gaactaaaggagagtgcaattacgtagtgtgtgggagacaaagagagatggctaagtggtgtatgttggtgttggttcttgctctagctctggctgtggccacaagtgccagagatgcacccgaagatgttggtctcaaggaccagaagaacttcatcagctatgctggagttggtggctattcaggaattggaagcaatggactaccttttggaggtgccggaataggtggtgg

SEQ ID NO: 13795 - DNA, 228 bp, Glycine max
  Clone ID: 701155613H1
ggcacaagtttgttgagatagctagaagcaataagatgaaaatgaaagtgcttgttttgtttgttgctacagttttggtagcatatgaatgccatggctcagactaccagaagttccctctccaaatgaaaactgggtttggtgggcaatacagcaatgaggtggcatgtgccagttggaggcttggcgtggaagcaaacaacgtagtcaagtggcaaactgttcctg

SEQ ID NO: 13796 - DNA, 232 bp, Glycine max
  Clone ID: 701155614H1
ggagtaagatttttcttgttcctttgttggtgggtttcctttccgcttcaggttcagcttcaacttcaaattctcagtgaaaccaattcagctgagtccaaatcccaaatccgaatcaaaatccgaagtgagatttgcgatggagaggcttcagcgaatgtttgcaggtgcaggtggagcgctagggcaccctcccccagattccccaactctcgattcctccgagcaggtc

SEQ ID NO: 13797 - DNA, 59 bp, Glycine max
  unsure (1)..(59): unsure at all n locations; Clone ID: 701155615H1
agattagaggattttncatgatgatgtcctacgtgcaagcatgacatagcaatatagta

SEQ ID NO: 13798 - DNA, 231 bp, Glycine max
  Clone ID: 701155616H1
ggatccaaaccaaaacaaaatccctttaaaaccctagttctcgcaatttcgaaatttatcactcactcagtcactctcatcatccactcatcttattctcaggccagaaaagagaagaagaaatggtgttaggcgtgagagagataagctgtagcggagagcctgtccttgacagtgataacggggaggagttgatgcaggtgcaaccggggcatagacatagtcctcggc

SEQ ID NO: 13799 - DNA, 222 bp, Glycine max
  Clone ID: 701155617H1
gagagggggaggggggctgagaaatgtggtaaatgccaatagatggtccacttgatgttgcttgggctggcgggcaatggccatgtctgcatacgacattagggcacatgggttgtatctgatgaggcagggcacaaggaaataggaacattatcacacgtcctcagcattccaaaggccgtttcttctttgtgacttcctttgacagtgatatcatctcag

SEQ ID NO: 13800 - DNA, 248 bp, Glycine max
  Clone ID: 701155618H1
attaccatcccttattcaggtgcctttaatgtcatacagcatagactcaaacagatatatgaaagtgtagctcagtcagtggatgaagaatctggagttcccacattgcaagtccatgagtgtgttactgtgaaacatgaatctgaaaagcatgttatccttgcattgggcctctgatcccatgagtgacatggtatctgattcaattgttgctctggttttaaatatcaaccgcgatgtcccaaaaa

SEQ ID NO: 13801 - DNA, 203 bp, Glycine max
  unsure (1)..(203): unsure at all n locations; Clone ID: 701155619H1
ggcacaaacacnccaaaaaatttctagagcgcgaaagtgagaggagagagaaagtagctgatcctccatggcctccaccaaggaacgcgaaaactttgtctacaccgccaagctcgccgaacaagccgaacgctatgaagaaatggtggaagcaatgaagaatgtggcgaactgaacgtggaattnacggtcgaggagcggaa

SEQ ID NO: 13802 - DNA, 224 bp, Glycine max
  unsure (1)..(224): unsure at all n locations; Clone ID: 701155621H1
ggagaatataaaaaattagcatagagaaagtggaatcaccaatcttgtaacggaactttttgataactagctgtgtgaagacgacaactgccacccattccaacacacagagangccttagcaattacctttccttgtttgttccgtcttatactctctctagtcttntcgtgcgaacatcatataaaccacctcggattttgcttcctctgctgcgttttaac

SEQ ID NO: 13803 - DNA, 217 bp, Glycine max
  unsure (1)..(217): unsure at all n locations; Clone ID: 701155622H1
ggagctttgttctcttttgtgttagtgagagaaagttctctctgcttctctctcttagactcaaaaccctattgcgtgnttgcaatcgaccccgattatggccaacagtaacctccctcgnagantcatcnaggaaacgcagcgtttgctcagtgagncagcacctggaattagtgcgtcnccttcggaagacnatatgnggtatttcaatgtgatg

SEQ ID NO: 13804 - DNA, 112 bp, Glycine max
  unsure (1)..(112): unsure at all n locations; Clone ID: 701155623H1
catggaaacngtgatgaagaanaagaggaagaggaggagggtcngttttgatttggagtgcagctatgcgattgtacagagagccaagcagcagttattgtataagcttcgt

SEQ ID NO: 13805 - DNA, 223 bp, Glycine max
  unsure (1)..(223): unsure at all n locations; Clone ID: 701155624H1
ggcatcaattcaaaatatatcatcaattataagcatgggtttgtggaacacaacgaatgcagtgtcttgccgctttcacaagtttggtgatgaccaaaagaatctggtcttccaaggtgatgccacgtcttcttccaggggcatagaactcacaaagttagacggtggaggancaaccagtgggtggcagtgtggggagagtgttacactcttctccagtgca

SEQ ID NO: 13806 - DNA, 220 bp, Glycine max
  Clone ID: 701155625H1
gacggaagagaagaaggaagcagaagtgatagaagagaagaaggaaacagaagtgatagaagagaagaaggaaagtgttgttcctattagtccagaggaagttgagatatggggaattcccctgcttggggacgagaggagcgatgtgattctgctaaagtttctccgggccagggatttcaaggtgaaggatgccttgagcatgctgagaaacacggtg

SEQ ID NO: 13807 - DNA, 220 bp, Glycine max
  Clone ID: 701155626H1
ggactcagcatggacgctgttttctacttcctatgcgctgcttatgctctcgtctcttccatcgctttgaattgaagttagagtacctgagtatggctggactacgcagaaaatttttcatctcatgaacttcattgtcaacggagttcgtgctgtggtgtttggattgcacaagctagtttttcttttgcatcctaaggtgttgatttcggtgctatta

SEQ ID NO: 13808 - DNA, 220 bp, Glycine max
  Clone ID: 701155627H1
ggggacagagaatgtggcttttacgaaaaccatcctttttctcgtgttcctcgtgtcttcgttttgctcctctcctcggcgccctggttgctgctggtcttcttcttacaaatttttcagctcttgttcgttggtgttcctttcttctactgaatgaggaggaaccgagtggaaatcatgtcatttctttcaagctcttcatggtgtgcaactgagcata

SEQ ID NO: 13809 - DNA, 214 bp, Glycine max
  Clone ID: 701155628H1
gctatttaaagaagcaaatcctcgatgaggaaagtgcacaagtgagtttgttgatcgagataactagaaacagtgtgatgaaaatgaaggtccttgttttcttcgttgctacaattttggtagcatggcaatgccatgcgtacgatatgttccctctccgaatgaacactggctatggtgcccgtactccggaggtgaaatgcgcaagttggag

SEQ ID NO: 13810 - DNA, 234 bp, Glycine max
  unsure (1)..(234): unsure at all n locations; Clone ID: 701155629H1
ggacgaaaaggaggagcattatcaatagcgtcataacacacctgctgcaattggatccgccacaaatcgnagagcataaatggcgttgaagttggcaaatttagagatctgaacattaatcataatcaccatcactgttcatgctcntctggttgcgctgattctcaccaatggacaagtcaagtgctctggagtacattcaaccagatgttccccaacgaggtgtctctttct

SEQ ID NO: 13811 - DNA, 202 bp, Glycine max
  unsure (1)..(202): unsure at all n locations; Clone ID: 701155630H1
gggcacaagttngttgagatagctagaagcaataagatgaaaatgaaagtgcttgttttgtttgttgctacagttttggtagcatatgaatgccatggctcagactaccagaagttccctctccaaatgaaaactgggtttggtgggcaatacagcaatgaggtggcatgtgccagttggaggctggcgtggaagcaagcaa

SEQ ID NO: 13812 - DNA, 238 bp, Glycine max
  unsure (1)..(238): unsure at all n locations; Clone ID: 701155633H1
gaattggatgagttcagcgcanttttggagcactcagaaaaccaaatcgagaaatgaggaagatgataggtctgtgccagcgaacccaattaatgggaattcgtgtgtcctcgagaaggagggttcccaagttccgaggtttggtttgatggctcgtgcttctgaactgagtcatagcaattccaagagtgttggtggagatattagttctggctcctctttgctccgtgttgaggta

SEQ ID NO: 13813 - DNA, 224 bp, Glycine max
  Clone ID: 701155634H1
aatgtattatttaaagttggcaattatcagcgagcaggaaagaaatatgaaaaggctgctgattttgttgatgaagacggatcctttgggtttgatgagcaaaagcaagctcagacactgaaagtgtcatgcgcgttgaatagtgcagcttgtagccttaaacttgatgactttcctggagcaatcaagctatgttcacaggtgcttgatgttgaattttacaa

SEQ ID NO: 13814 - DNA, 224 bp, Glycine max
  unsure (1)..(224): unsure at all n locations; Clone ID: 701155635H1
gataccataagtttctactacttacctttagtagctgcttttgcttacaaacacctannnnnnnnnnnnnnnnnnnnnnnnnnnntcaggttgggaattagtgcctttggtggtcaccatgttccttcttagaaggcaaacccagaatcaccatgagaatgattcctcatatcaagatacaaaggtggctgaactcaagacagctcttgggcccctctctggtc

SEQ ID NO: 13815 - DNA, 218 bp, Glycine max
  Clone ID: 701155636H1
gttttttttcacgagattgcttcagatccgtacttaagattacgtaatggattttgattctgatttatctgtgattgttgactcgacagatgcagatcttcgtcaagaccctcaccggcaagaccatcacccttgaggtggaaagctctgacaccatcgacaacgtcaaggccaagatccaggacaaggaaggaatccccccggaccagcaacgtctc

SEQ ID NO: 13816 - DNA, 202 bp, Glycine max
  unsure (1)..(202): unsure at all n locations; Clone ID: 701155637H1
actgctgacaaggcaaagttccaacaatgtttttttnaagaatctntnagantcanccactgatgatgaattgangaatgttttnggtgantttggnactattactagtgctgtcgtaatgggggatggagatgggaaatcaaagtgttttggatttgtgaattttgagaatgctgatgatgctgctagggctgttgaggct

SEQ ID NO: 13817 - DNA, 217 bp, Glycine max
  Clone ID: 701155638H1
agagatgagtccttttatgtcggctaataaaattaagaagcccatcttgcttattcacggggaagaggacaataatccaggaacattaaccatgcagtcagacaggtttttcaacgctctaaagggtcatggtgctctttgtcggctggtgattttgcctcacgagagtcatggttacactgctaaagaaagcatcatgcatgtcctttgggaaaca

SEQ ID NO: 13818 - DNA, 231 bp, Glycine max
  unsure (1)..(231): unsure at all n locations; Clone ID: 701155639H1
ggttgaagaggtgaaggaatggaggttggnggttgcaacgtgcaaccgcctcttagcacttctttttaaatggccgaagaggagaggcattgtaagtcgaagagaggcttaacaaagcacaaaatgtcctctaatccagtaatactgcagagtgtgaacttgaccaagtatatactggagaccagcgtttatccacgagaagaagagactctcaaagagctaaggaaagcc

SEQ ID NO: 13819 - DNA, 227 bp, Glycine max
  unsure (1)..(227): unsure at all n locations; Clone ID: 701155642H1
gacaggtagttggtgtgaggcaatgacgcggccttttcggtgtgaagggggggaggaagcgaaagcacgcggaacccaaatacgacgcccnnnnnnnnnnnnnnnnnnnnnnnnnnnnnnnnnnnnnnnnnnnnnnnnnnnnnnnnnnnnnnnnnnnnnnnnnnnnnnnnactccagcaccagcaccagaggatgatggattgagcggtatcccaattgcgcccagt

SEQ ID NO: 13820 - DNA, 220 bp, Glycine max
  unsure (1)..(220): unsure at all n locations; Clone ID: 701155645H1
ggaagcaaaaaatgaaaacccaaagtgcttctctcctctgtctttttctctctcttgctatccttttggctagtngcactgctgcaagtgcaactccaagaagcgcagtgccaagccaccatgtttcaacattcaacagaagcctttttccttccacttttctctttggaattggttcttctgcttaccaggcagaaggagcagcaagtgtagatgggag

SEQ ID NO: 13821 - DNA, 226 bp, Glycine max
  unsure (1)..(226): unsure at all n locations; Clone ID: 701155646H1
ggaggcatgcaagaagagagaggaatcgtactacacaagtttcatacttcccctcatttttttactgcatttgggactcttcactcttctccacaccttcatctttgtccaagtttccatagcatagagacaanaccgggtgctttgagataataatgctgaggaagaggaacaggtcagtgcagaaggatcaacacctcatgtgtgaagtcaattcggagcacta

SEQ ID NO: 13822 - DNA, 88 bp, Glycine max
  Clone ID: 701155648H1
tagtggcatggcacttgtgttgttgtacatatatcgaatggtcttggaagtgcgtgcacttcatattcgcattcaagtttctacgagc

SEQ ID NO: 13823 - DNA, 210 bp, Glycine max
  Clone ID: 701155649H1
caggggttttaattttgctaaaatacccccattttttgctaaaccacataccttattttatattttaatctttaatagagattaaaatattggtgggactcttgggtaaggctaaaaagttcacttttaaaaggattcaaaaaatgagactcatatatatatgtaagtttcgtgggtagcctgtgcacctgaagccatttgtccatgtat

SEQ ID NO: 13824 - DNA, 221 bp, Glycine max
  Clone ID: 701155650H1
tttagtgtaagtgagattgaagcactgtatgaactattcaagaagatcagcagtggagtaatggacaaaggattaattactaaggatgaatttcagttggcctattcaagacaaccaagaaagagagcttatttacagatagggtgtttgacttgtttgacacaaagcatagtggaatacttgatttcaaagagtttgcacttgctctctctgtctttcat

SEQ ID NO: 13825 - DNA, 197 bp, Glycine max
  Clone ID: 701155652H1
ggtgaaatacaagaatttgaatccagaatggaatgaggaatttaatatagtcgtcaaagatccagaatctcaagtcttagagcttactgtttatgactgggagcagattggcaagcatgacaagatgggtatgaatgtcattccattgaaagagattacacctgatgaaccaaaagcggtgactcttaatttactca

SEQ ID NO: 13826 - DNA, 216 bp, Glycine max
  Clone ID: 701155654H1
ggtgatttgagaggatcgtgagagggacggtagcagagattccgtgagttgcaaaaatgaaaacaattctttctgcagagaccatgaacatcccggacggcgtgagcgtcaaggttaatgccaaggtcatcgaagttgagggcccccgcggaaaattggtgcgagacttcaagcacttgaatctcgattttcagctcatcactgacgaaaacggta

SEQ ID NO: 13827 - DNA, 215 bp, Glycine max
  Clone ID: 701155655H1
gatgtccatatattacaaataaaaaagtcattctattttataaaattcattgatgatgaaaatggtctagacaacagtcaaaattttgaaaataataaacaatttttaaaattaattttaaaaaaactactcttacaagcaaacgacaaaagccttattccactaggtgtaggtcaattacatgaattgcacaatgtcatttgacgttctgttca

SEQ ID NO: 13828 - DNA, 218 bp, Glycine max
  unsure (1)..(218): unsure at all n locations; Clone ID: 701155656H1
ggaaacaaacatggattggcatcatggcacaaaaccatttgttcctcggccagagaccttaagcttcttnnnnnnnnnnnnnnnnnnnnnntcatatccatgagtggaagtgaaacaagcggcattgatggagacaggagaaaggtcggttccggcaatggaccgtggaaacaaagagaagaagaagcggttaacaaataaccagatagagttattgg

SEQ ID NO: 13829 - DNA, 226 bp, Glycine max
  unsure (1)..(226): unsure at all n locations; Clone ID: 701155657H1
gagaantanngaaagaaagcaagaatttgaaggnagaggggatatggnatacaaggagctagttgtctatttgcaataatcataacatcatcncagctcggatgcatcgattccaaccttagtattcaacccagagagatttgncagtaataattnactnacaacaacttaaaacaatgggcaggaggaggttatgtagattcgggaaatgcaaagcaatttgaag

SEQ ID NO: 13830 - DNA, 196 bp, Glycine max
  Clone ID: 701155658H1
gggaggagagagaagtgtatctggggaaaaaaaacctcgcgagtcgctgtaaaagaaggcacgcttatccgttttatggtgaaagcaaatttgttatcccaaagaattaaaaataagaaagttcacacattgttctacgattgaaagcacgttgaataaacgctgttaggatttaaagggggaaacttgaagtgcc

SEQ ID NO: 13831 - DNA, 217 bp, Glycine max
  Clone ID: 701155659H1
ggatgcacaagtttgttgagatagctagaagcaataagatgaaaatgaaagtgcttgttttgtttgttgctacagttttggtagcatatgaatgccatggctcagactaccagaagttccctctccaaatgaaaactgggtttggtgggcaatacagcaatgaggtggcatgtgccagttggaggcttggcgtggaagcaaacaacgtagtcaagtg

SEQ ID NO: 13832 - DNA, 216 bp, Glycine max
  Clone ID: 701155660H1
caaggcagagagtgaggcaggggatgcaagtcctgttgtgactgaagctgacatacagcatattgtctcatcttggactggtattcctgttgagaaagtctcaacagatgaatcagatcgcctcctcaagatggaagagactttacataagcgggtcattggtcaggatgaagcagttaaagccattagtcgggccatccgtcgagctcgggttgg

SEQ ID NO: 13833 - DNA, 219 bp, Glycine max
  unsure (1)..(219): unsure at all n locations; Clone ID: 701155661H1
gggctggcaatacattagctgcaactctgtgttatatatnnngctggaaatattgataaaactgttgaaatttggtcaaggagcctgtcaaatgagaccgagggaaaatcttatgttgaccttcttcaggatttaatggaaaagactattgttcttgccttggcaactgggcagaagcggtttagtgcttctctgtgcaagcttgttgagaaatatgct

SEQ ID NO: 13834 - DNA, 222 bp, Glycine max
  unsure (1)..(222): unsure at all n locations; Clone ID: 701155663H1
catcaccagggtgacaagagataccagtccatgcacaaggagactcatcaaactattgccaaaatgggatananaatganaatcgcctaaaaagttaaagtttacaacttcaaactctatttctcatatgaaaaggcatttcacnaaaatttggatagagagncaaantcccnnaatgggaagtgaaaggtgnnaatttgaaaactacccagnatgcnaata

SEQ ID NO: 13835 - DNA, 225 bp, Glycine max
  Clone ID: 701155664H1
cactttgcatttaaaccacctaaatcttagtgataaaaatttaattctcaatatgcatgcatcttatcttttggtttagaactctacaattctctccctcaagccaaaagagaaatatccttccaatcaattcaaaagtgaacaaactctctctccaacgaaagtatctccacacttttacaacattagaaaacttcactttcttattcagtttgctatcatggt

SEQ ID NO: 13836 - DNA, 218 bp, Glycine max
  Clone ID: 701155665H1
gggagcagaattttgatataagggtcaccccagatgagaattttgatggaactgggaaaattggagttcagctagcccctaatgtgaagatagctaaggttaggccaaaaaatttggtgcaggctgtggagtttactgggcaagagttttggggtctggcctctaatgttttagatgggttaaagcagacttttttgaacttctcccagtcagctagt

SEQ ID NO: 13837 - DNA, 221 bp, Glycine max
  Clone ID: 701155667H1
ggatatcgttgagagtttttacaggcctggttcgggagactataggatacggctttttatccgaactgaactcttggggaagggaattccacccactcatcaatggcatctactctcttcgcttgcccgtcgttgtgttcctcctcttcttctatattttctacttccgtcaaattctccttaaacccgaataaaatttctcttccgttcgccggaaacaa

SEQ ID NO: 13838 - DNA, 230 bp, Glycine max
  unsure (1)..(230): unsure at all n locations; Clone ID: 701155668H1
gatcgaagcaaaaaatgaaaacccaaagtgcttctctcctctgtctttttctctctcttgctatccttttggctagtngcactgctgcaagtgcaactccaagaagcgcagtgccaagccaccatgtttcaacattcaacagaagcctttttccttccacttttctctttggaattggttcttctgcttaccaggcggaaggagcagcaagtgtagatgggagaggacca

SEQ ID NO: 13839 - DNA, 189 bp, Glycine max
  unsure (1)..(189): unsure at all n locations; Clone ID: 701155671H1
gaggccaaccanaggcagccatttagaggttnaagcagcggcttcttagtgagtgcttttctgagattcaatggcgttcattggtgcagtcaaattcttgctgcagtactagttctattatgcctcctcaactatctacctctttctcaaggtaagcagaactggaatgaagggtacccatttataaga

SEQ ID NO: 13840 - DNA, 216 bp, Glycine max
  Clone ID: 701155672H1
gacatacatcatcaaaaaacacacacgacacactcccatacacacacgttgtctcgcacacattccttcattccgcagcagcaaacatctttaccttaaacgacaacaatggccgatgccgaggatattcaacccctcgtttgcgataatggaaccggaatggtgaaggctggttttgccagagatgatgcgccgagggcggtgttccccagcatt

SEQ ID NO: 13841 - DNA, 225 bp, Glycine max
  Clone ID: 701155673H1
ggatgttaaagtgtgaagggacaaggaaacatagagtctcgttggttcaatacacttgtgcaatttggccactatgaacacagggcttgctgcaggtgcagccttgcttgcactcttggctatcaccttctccttgttgagccctcaaaccctgttttctccgcctgagattccgggctcgaaggaccaccttcacgctgctcggttactccatgtcaccggagc

SEQ ID NO: 13842 - DNA, 198 bp, Glycine max
  unsure (1)..(198): unsure at all n locations; Clone ID: 701155674H1
gggacntaaataagtatgcaatgcctattgttccttctttcagctnctagcctctatctctaagcccttgnccagtgctctttcagcggcacctaaaaccctttgcggcggctgcgaaaacaccctccacgcanccaaacccanacaatgangnngtcgagncaagggttcagaagacccgttatcatnaaaaaaacc

SEQ ID NO: 13843 - DNA, 97 bp, Glycine max
  unsure (1)..(97): unsure at all n locations; Clone ID: 701155675H1
aaaacaatgcangcgacgcacaccagataaagaacggtgggtcgccggttaatggaggacacttgcttgtgctgcctcattgctgtttccgtcacag

SEQ ID NO: 13844 - DNA, 196 bp, Glycine max
  unsure (1)..(196): unsure at all n locations; Clone ID: 701155677H1
ggagtgagcgtanttgaggttttgccacttcgaaaccaaattttcttccttcgttggcatctgtgatctcttctcctcacaatgagcagatcagggcaaccaccggatttgaagaagtacatggacaagaagcttcagatcaagctgaatgcaaatcgcatggttgttggtactctccgtggcttcgaccagttta

SEQ ID NO: 13845 - DNA, 218 bp, Glycine max
  Clone ID: 701155678H1
ggaagagtgaagagaatggctcccaagggtttaacctttctggctgtgttaatatgcgtttcagcactgtcactgagtccttctgttgcgggggaagggcaaaataatggccttgttatgaacttctacaaggaatcatgccctcaggctgaagacatcatcacagaacaagtcaagcttctctacaagcgccacaagaacactgctttctcctggct

SEQ ID NO: 13846 - DNA, 222 bp, Glycine max
  unsure (1)..(222): unsure at all n locations; Clone ID: 701155680H1
gatcactttcttttcttcaccgttcgctcttcctctcccagacaaacacatggctttgcccaatcagcaaaccgtcgattaccccagcttcaagctcgtcatcgtcggtgacggtggcacncgaaagacaaccttcgtgaaaaggcatctcactggtgaattcgagaagaaatatgaaccgaccattggtgtggaggttcatccgttggattttttcactaa

SEQ ID NO: 13847 - DNA, 216 bp, Glycine max
  Clone ID: 701155681H1
agtggagagttgtttaaaccagcatcttttaatttctcaagcccccagtccatcttcaccaacccagacaacaatttcaggtgcattctctggtggcttcaatgctgtggcagctgttcccgcacaagctccaggtgggtttgggcagccagcacaaattggatcagggcaacaggttcttgggtcagttctcggtggttttggacaatcaagaca

SEQ ID NO: 13848 - DNA, 221 bp, Glycine max
  Clone ID: 701155682H1
ggatgcaaaagttagtagtagtgaggaaaatgaaagtccttgttttctttgttgctatagttctagcagcatggcattgccatggctcagaccatgaccatgaccatggccacacctaccaaattttccctctgagaatgaaaactggccatggtggccactacattccggaggtatcatgccaaagttggaggcttggtgtggaagcacacaacgtcatt

SEQ ID NO: 13849 - DNA, 221 bp, Glycine max; identical to SEQ ID NO: 13848
  Clone ID: 701155683H1

SEQ ID NO: 13850 - DNA, 218 bp, Glycine max
  unsure (1)..(218): unsure at all n locations; Clone ID: 701155684H1
ggcacttcaattgcaatcaaattagttcattctctttgcgcagttccctacctctcctttcaagatgcagatcttcgtcaagaccctcaccggaagaccatcaccccttgaggtggaaagctctgacaaccatccgacaacgtcaaggccangatccaggacaaggaaggaattcccccggatcagcaagtctcatcttcgccggaaagcagctcgag

SEQ ID NO: 13851 - DNA, 218 bp, Glycine max
  unsure (1)..(218): unsure at all n locations; Clone ID: 701155685H1
gactcttacaaacataacacattcagatactcactncacctgtttttagtagtttcttccctattttctgttcataactcagtttgtaactatgactgctgaggttatggctcaagaggagacacaagcagctgaggttgttgttgctgttgagcccctgaaagaggagaaggttgctgaagaaaatgtgaaaccaagagagtcatcagtggaagcat

SEQ ID NO: 13852 - DNA, 212 bp, Glycine max
  Clone ID: 701155686H1
ggagagaaagagatcgcagacacagagcagaatggcttctacccaatgtttcttgcaccaccatgctcttaccacccctgccagtgccagatccccatcactacgcatcttggttagcaccaagcctaaccagcttgtttgcaaggcacagaaacaacaaacaccacaagaggatattgatgtcagcccaatctctcgccgtttagctctaa

SEQ ID NO: 13853 - DNA, 210 bp, Glycine max
  Clone ID: 701155687H1
gaattcaaaatatatcatcaattataagcatgggtttgtggaacacaacgaatgcaatgtcttgccgctttcacaagtttggtgatgaccaaaagaatctggtcttccaaggtgatgccacgtcttcttccaggggcatagaactcacaaagttagacggtggaggaaaaccagtgggtggcagtgtggggagagtgttatactcttctc

SEQ ID NO: 13854 - DNA, 213 bp, Glycine max
  Clone ID: 701155688H1
gaatttgttaacaatggtaccctttttgattttatacacaccgaaagaaaggtaaataatgaaacttggaaaacgcgtgtaaggatagcagcagaggcagctggagctctaacatatctgcactcagaagcctcaatagccattatccacagagatgtgaagactgctaacatcctcttagataacacttacactgcaaaagtgtctgatttt

SEQ ID NO: 13855 - DNA, 212 bp, Glycine max
  unsure (1)..(212): unsure at all n locations; Clone ID: 701155689H1
atactttcatagacagagcactnactcgacacgttaccagaaacttgctaagtatttattagagtctccttaccaaatttctttaggagnaaacntttagtataaaantcatacgaaaataatananaaattataaatggtgtaattttccttatttgaataaatacatttctaataaaaatttaactatgncctaacaataaatactttct

SEQ ID NO: 13856 - DNA, 192 bp, Glycine max
  Clone ID: 701155690H1
ctaagcactttccatattttcacgttgaatttggtctaaacaagggttttgtccatgttattgatgatgaaaagcagtttaacatcagccttggcttgaatgtcataagaggcatgctacatttggcagaggaggacatgtataggcgacgacgctacgaggctgtggaggtacaaaagcaagcagttgaaa

SEQ ID NO: 13857 - DNA, 222 bp, Glycine max
  Clone ID: 701155691H1
acaatgcagcttgcatacgagactgttgtgaagctcatgctggctgcactcgaacgcaacgtgctccctgaacgtcatcaccaggagactcacgcgcttgctgttggctactcgccttcgctctgcttacaaaccctcctcccaacttcaactctccgatctcctctacttcgcgcattcattacaagagatgcccatagcaatcaacactgacaagcctaa

SEQ ID NO: 13858 - DNA, 206 bp, Glycine max
  Clone ID: 701155692H1
ggtaccgaacaattaacaaccatatctatctattgagaaacatgaagaaggtttcacccttggcattttccattctctttttggccttcaccatagaaccctttattggcattgctgcagcagcaccagaagcagtgcttgacacctcaggccagaagctgagaacaggtgtcaagtactacattctgccagtgttcagaggcaaa

SEQ ID NO: 13859 - DNA, 227 bp, Glycine max
  Clone ID: 701155694H1
gggcctatgagtttcatcaggacacatccatggtggcatgctctttcaattcccaattgaaattcccccaaagccaccttttttttattcaataaatcaacacccaattttcaaaattccaacttgtaaattgtaatcaattttgctttccatttgtcaaaccataccaatcaaccaacctcgttgcttcttgtgatcactctttgaaccaccctcatggatattga

SEQ ID NO: 13860 - DNA, 218 bp, Glycine max
  unsure (1)..(218): unsure at all n locations; Clone ID: 701155696H1
gcagatattgaggagnnnactccaccctcggtttactaactctcccttgttgtcacccatcgtagcaaaaaaagatgatgctggctctactggcagtcagtccttaagagcacttgcattaattggagctggtttgtcaggtcctttcagtttttcaacaatggcagcagctgatgaagctgaacatggcctggcatgtccaagctatccatggcctc

SEQ ID NO: 13861 - DNA, 260 bp, Glycine max
  unsure (1)..(260): unsure at all n locations; Clone ID: 701155701H1
ggagaaaaacgagccaattcatcattttctctcttctctgcctcttcttgttcaaatcttaggagctgaggagaatcaatcgagagaaatatgtctggtatcgctcgtggacgccttgctgaggaacgaaagtcatggcgcaaaaaccatccacacggtttcnttgccaagcccgagactctacctgatggcaccgtaaatttgatggtctggcattgcactattcctggcaagaccgggactgattgggaggtggatat

SEQ ID NO: 13862 - DNA, 256 bp, Glycine max
  unsure (1)..(256): unsure at all n locations; Clone ID: 701155702H1
gtcaattatagctggccaaccacccccaatgcatccatcaattcctatgaataaccatggaattcccatacccccaccaccaggatctcagttcactcctgttccagttccgcgaccttatgttcctctttctgttccaccatcagttatgcctatgatgcatccnccacctttgcctcaaggattgccaccgccaccgccaccagaggaggctcctcctccactcccagaagaaccagaaccaaagaggcaggaa

SEQ ID NO: 13863 - DNA, 251 bp, Glycine max
  Clone ID: 701155703H1
ggtgcatttggagatgccgcaaccacaaaatataatactccacctcaaatatcattatcacatgcgattcactttctgtttgaaggaccaaagtgagagatagagttctctagcaactcactctacattgccccgaatgaatctgctcaagatctcgagtggtgcaagcttgtggcgggattccttaaagtatatattgatgcaggaatcttcgaagaaccaaatctctttggtgctggtattgtacgtgg

SEQ ID NO: 13864 - DNA, 94 bp, Glycine max
  Clone ID: 701155705H1
ataaatgacgaatatgatattaatattatttcagataattcagccattagaaataaaacaataggtcaaataactactcatctagatcagatac

SEQ ID NO: 13865 - DNA, 256 bp, Glycine max
  Clone ID: 701155706H1
atcggtagaggaattgagggaaagttgagaaaactccagaaaccagaagaaaaataagaaaaaggagataaatcactctttgtattggagtgaaatgaatgtgctcaatctataaaccgataataacagtatgctatatctaaaaagtaagttacagttaaagatactaaaaaaataactgaatctaactaatccaaactaacccgtaactggcggacaaagtctaattttgaatacacaggatgataaaatatca

SEQ ID NO: 13866 - DNA, 257 bp, Glycine max
  Clone ID: 701155707H1
ggtggtgtagactgtcgagcagtgaataccagttgctcctatagccggcgctcaacaacatggcggacaaggcagtcaccatccgaaccagaaagttcatgacgaacaggcttctctccagaaagcaattcatcgttgatgtccttcatccagggagggctaatgattccaaggctgaactgaaggagaaattgggcagaatgtatgacgtgaaagacactaacactgtatttgtcttcaagtttcgaactcatttt

SEQ ID NO: 13867 - DNA, 222 bp, Glycine max
  Clone ID: 701155708H1
acagcgccctagatttgctcttctttgcttcggaagaaagagaaaaacaaataacaatggcgttcgcttctttcctcggcagagttctcttcgcttccgtcttcatactctctgcttaccaagaatttaacgaatttggagttgatgggggacctgcagcaaaagcactcagacctaagtttgatgcctttacacatcgagtgcattctcaagttggctttc

SEQ ID NO: 13868 - DNA, 250 bp, Glycine max
  Clone ID: 701155709H1
cccatgtttgcttgttgctgcttcacataatttattttgtacttcttggacacaaccactcaaatcacacgggatcttcacactaagtcattcaataagagggaaactgaggacatggaagcagcataactaatactactatcttttaacttgtaaagaagttcaattgtagatttcctataatcatctcatctccataatgatattgttattggtgcattattctataatatttattggaaagtatgta

SEQ ID NO: 13869 - DNA, 237 bp, Glycine max
  Clone ID: 701155710H1
gggatgatgcagccattaaggccacctatgaaagaagaaatgaaatagaattgctacctagtgttgccagttatttcttagagcgggctgttgagatactgaggactgagtatgaaccctcggatttagatatcctctatgctgaaggagttacttcatccaatgggatggcttctgtagagttttcatttcctcaaccagctcccgaggaaactgttgacactgctgatctacata

SEQ ID NO: 13870 - DNA, 246 bp, Glycine max
  Clone ID: 701155711H1
gggtctaaggcctagtaatgaattagctagtgatgatcatgagaagagacaaggtggtggtgatggcaatatgttaatgtctcagatcagtggtggtagcattaatgtgagtgatgagttaggtggttcgggaaatagtaacaataataaaaagaaaggagagaaaaaggttagaaagcctagatatgcttttcaaacaaggagccaggttgatattcttgatgatggttaccgatggaggaagta

SEQ ID NO: 13871 - DNA, 224 bp, Glycine max
  unsure (1)..(224): unsure at all n locations; Clone ID: 701155713H1
gacaacaaacaacaacaactactcctttttccntttcgtattctcttctctttcattgacgatctccacgaagttctttcacctcaaacacacccttaattacatcgcattctcttcctctttctcttaccgtttgaattagattgcacctactcctctctctttcactcttctttttctggatcttcaacttctccctgattttgctgatttgggggattgag

SEQ ID NO: 13872 - DNA, 226 bp, Glycine max
  unsure (1)..(226): unsure at all n locations; Clone ID: 701155714H1
ggctaaaataaacttnnacttgtttgttgtccatgntaggattctttctgattcccttttaaccttgttgagacttctaatatcctcaggtttttttggggggagaattggggggaaaaatggttatatgaatccgtgtttgtgccttgatcttatttttattatctttgtttaatggttctgagtttctgttcttaccgtgatttttacacttttccaattatat

SEQ ID NO: 13873 - DNA, 246 bp, Glycine max
  unsure (1)..(246): unsure at all n locations; Clone ID: 701155715H1
ggcacaagtgagtntgttgatcgagataactanaaacagngtgatganaatgaaggtcctgttttcttcgttgctacaattttngtagcatggcaatgccatgcgtaacgatatgttccctctccgaatgancactggctatggtgcccgtactccggaggtnaaatgcgcaagttggaggcttgctgtggaagcacacaacatctttggctttgagaccattcctgnagagtgcgntgaagcaac

SEQ ID NO: 13874 - DNA, 253 bp, Glycine max
  Clone ID: 701155716H1
gaggatccaacggtccaaaatgttcggggcttgtgctgtttgttttcccaggttttagagctccaaaccttcagatccacctcattcgtctccagatcttccttcctggataacgttttcgggttcgagaaggcacttgtgttgtttttcgtacgaaatggagactaaacagagttcggtgacggctacgctcagttacggcgcgttgacgtgcgccgcggaatttctcgcgactttgctagcttctgctgtc

SEQ ID NO: 13875 - DNA, 259 bp, Glycine max
  unsure (1)..(259): unsure at all n locations; Clone ID: 701155717H1
gaagnncggcgggatcagcacaagattgcaaaatgaagttcaacattgcaaatcccaccactgggtgccagaagaagctggaaatcgatgacgacctgaagcttcgagcattttgggacaagaggatctcccaggaggttcttggtgatgctctgggtgaggngtttaaaggatatgttttcaaaatcaccggtgggtgtgacaaacaaggattccctatgaagcagggagtgctgacccctggtcgtgttcgactttt

SEQ ID NO: 13876 - DNA, 260 bp, Glycine max
  Clone ID: 701155720H1
ggatctaaccctaaacaaaaccttagcatactttattctcgcttggttgcagcttcagcagcagcggcaagcaactccatccgcaatgggaatcgatttgaaggcaggaggtaagtccaagaagaccaaacgtacagcccccaaatccaatgatatttacctcaagctccccgtcaagctgtaccgttttcttgttcggaggactggtagtaacttcaatgccgtcatcctcaaacgccttttcatgagcaaggtcaaca

SEQ ID NO: 13877 - DNA, 245 bp, Glycine max
  Clone ID: 701155721H1
gacattgtatttgcactacgaccatttcaggaagaaagaagtgcaatggacatcggaacctatggctatcctacaccagcagtgaaaaagattgagtcttactatgatgtgccagagggagtggatattcggggaagatatgatgcagagtttgcaaaaatcctcacaaaagatgctttgaaattcgttgctgacttgcaacgtgagttcaggaaccatatcaagtatgcattagagtgcagaag

SEQ ID NO: 13878 - DNA, 246 bp, Glycine max
  Clone ID: 701155722H1
gctgctgaattgctccatgtcccatcaatcaaaataaaatgctaggttgcacctacttttaactgattcataataaaaagaaaattattaccttatgaattgactgtagattctgtattaagttttcctagtcaatgatcaagtggtaaattcaaaaaaaaatttaaaatcatatgactttgtatcttctcaaaagaagttaacattgttatacaacctgctgcaagcaaaacacaagatgtaact

SEQ ID NO: 13879 - DNA, 245 bp, Glycine max
  Clone ID: 701155723H1
ggagtggagggcaacttataggccagaggaaatccgttgggctgaaatagcacatgagggcgagacaggcaaagtctccagagctaactttcatgatcgacatgggagggctgtgcttattatgaggccagggatgcagaatacagcatcggctgaagataatatcaggcatttagtctatctgttggaaaatgctatcctgaatctttctgaaggtcaagaacaaatgtcatggttgatagact

SEQ ID NO: 13880 - DNA, 244 bp, Glycine max
  Clone ID: 701155724H1
ggactgggttttcactgatcaagcattgcctaatgatcttgtcaagagaggagttgcggttaaggatccatctgctccccatggagttcggcttttgattgaggactatccttatgcttctgatgggctagagatatgggatgccatcaagtcctgggtgcatgaatatgtctcattctactacaagtcagatgcagcaattcaacaagatcccgagctccaagcttggtggaaagaacttgtc

SEQ ID NO: 13881 - DNA, 252 bp, Glycine max
  Clone ID: 701155727H1
tagaaaagataggtaattgttattccaagccagaacttcacaaggaggaaaagtttgttgacttgatcctcttagactctgtcttcataatggagctgtttttgagaaaagcaaacaaatctgaacggaagaatgatcacatgttcaccacatcatgggtgtgcaagttggctcaacgtgatttgttactacttgaaaatcagattcccatgtttgtgttggaggaattgcacacaagggtcatccttggag

SEQ ID NO: 13882 - DNA, 242 bp, Glycine max
  unsure (1)..(242): unsure at all n locations; Clone ID: 701155728H1
ggattcaagttgttaattatggtggctttgagcatttctcagtggttgtgtgagggagagacagttgaggaaactgattgtacagtatggaacatagtagtagtttggttttctggctactggggttgcttcttttgttgttnatggagatttcttctgctgctctttctccttctggcataaactatgaagttgtagctctgatggccataaagaatgacttgattgatcctcacaatgtt

SEQ ID NO: 13883 - DNA, 244 bp, Glycine max
  unsure (1)..(244): unsure at all n locations; Clone ID: 701155729H1
agatagagtnatccttgagaaattccttctattatgttgaaacgcttcttccaatctagtaacttgcttcgagtgcaatcttcttagtgttaatgaagcaatatgcatgttgttagaaataaagcaatcttttagtgtgtgtgtgtgacatttatgtagttatgttcagataggaaagcataaggcaatgaatcatatatacatctataacaattactgaaaacttcgttgagccaacttaatg

SEQ ID NO: 13884 - DNA, 245 bp, Glycine max
  Clone ID: 701155730H1
ggaagaggcattgagtggagtgaggggtcatgcacaagatttgttacatgttagagatttgttagagttagagtcatggagagcagcacaaaagacattgagacagagctcagcaattctgaagaaggatatttatatcataatccaaagcaagcctggaattgagagggcacaattaaggaagctctattctactctcttcaacaatgtaactagactagattatgcagcaagggataaagatg

SEQ ID NO: 13885 - DNA, 248 bp, Glycine max
  unsure (1)..(248): unsure at all n locations; Clone ID: 701155731H1
gatcgaagcaaaaaatgaaaacccaaagtgcttctctcctctgtctttttctctctcttgctatccntttggctagtngcactgctgcaagtgcaactccaagaagcgcagtgccaagccancatgttccaacattcaacagaagcctttttccttccacttttctctttggaattggttcttctgcttaccaggcagaaggagcagcaagtgtagatgggagaggaccaagcatatggggcacctac

SEQ ID NO: 13886 - DNA, 249 bp, Glycine max
  unsure (1)..(249): unsure at all n locations; Clone ID: 701155732H1
tccttcactgcgtgttatatcacatgtacaaattccagaanaacacggaatataatgtgtnanctataattaattnagatanatcttgnttttatttaagangncacaagccacacgaacggaaacnnttgtgtagctagtgaattttatacaaagtcaatgtnatgtgacantctgtttaatgactaataagctacgctatatgtacagangtagaaagtgctttgtgaatggcttctattctnttta

SEQ ID NO: 13887 - DNA, 254 bp, Glycine max
  unsure (1)..(254): unsure at all n locations; Clone ID: 701155734H1
gaacgagcagtggctaacaccggaatctgcaaactgagaagtcccatcattctttttccacacttccatcgttaatcattttcccgcaaaatatttttctttctctgtgttgtggcttctccttcaccgttcattctaaaatctcagccgctgatcagattaggctncgtgttgatcttgatcgccgctcatggaggtccgttccaaccccgccgcagacaattcctccgaccaccgtcgaccgcccgccgttt

SEQ ID NO: 13888 - DNA, 250 bp, Glycine max
  unsure (1)..(250): unsure at all n locations; Clone ID: 701155735H1
ggcagaaagacanntagaagaagctggcatttgcaganacgccctgagagngannattggnaggntgcgacgagngntganatacacatattgtgacggtagtgaaatcgaggaaaaagaggtagcaatttgcgagttgcaatgagtaacganaaggctccttcatcagctttttcgagtagctacgagttgagcaaaggcatcaatggcntcgacaaggttatncttcgcgacgcacgtggtagctccg

SEQ ID NO: 13889 - DNA, 112 bp, Glycine max
  Clone ID: 701155736H1
tggttttggtgttaacacttacacccttatcaacaaggctggcaaagccgtctatgtcaaatttcattggaaaaccacctgtggcgaaaagtgtctcttggacgacgaggcc

SEQ ID NO: 13890 - DNA, 243 bp, Glycine max
  unsure (1)..(243): unsure at all n locations; Clone ID: 701155737H1
gagagtggtggggtgtgcagaagagcgtcgcagttgtaaccctaatcagaagaagcgcanttcaagcgagtgacagccaccagccatgggtcgtatgcacagccgcggtaagggtatatcctcttctgctttgccctacaaaaggacacctcctagctggctcaagatctcttcgcaagatgtcgaagaaaatatctgcaagtttgcgaagaaaggtttgaccccgtctcagattggtgtcat

SEQ ID NO: 13891 - DNA, 243 bp, Glycine max
  Clone ID: 701155739H1
ggagagaagttattagggtttttgagtgcggcggtccaaacactcttctctgcagcttttgcctacaactcccttcaccatggctgaacaaaccgagaaagcctttctgaagcaaccaaaagtgtttctcagcacaaagaagactgggaagggaaagagacctggaaaaggtgggaaccgcttttggaagtccattgggcttggatttaagactcccagggaagccatcgaaggaacctatat

SEQ ID NO: 13892 - DNA, 160 bp, Glycine max
  Clone ID: 701155740H1
cagtgccaagccaccatgtttcaacattcaacagaagcctttttccttccacttttctctttggaattggttcttctgcttaccaggcagaaggagcagcaagtgtagatgggagaggaccaagcatatgggacacctacactagacagcatactgaaaa

SEQ ID NO: 13893 - DNA, 243 bp, Glycine max
  Clone ID: 701155741H1
ggctgccgctctctgagaaaaacagatagtgtgggagagagaagagcggaagagaaaatgacgaccaggttcaagaagaacaggaagaagagaggtcacgtcagcgccggacacggccgtatcggaaagcaccgcaagcatcccggaggtcgcggtaacgccggtggcatgcatcaccaccgtatcctcttcgacaagtaccatcctggtttcttcgggaaggtaggcatgcgctacttccac

SEQ ID NO: 13894 - DNA, 245 bp, Glycine max
  Clone ID: 701155742H1
gcctacacacataaatgtaaaagtaaaaaaaatacgtatacccaccgtttgtttgtcataggtaaaattcaaaaatatgtacttattattatttggtataggtaaaagttaaaataacttctacttacaaatcgtttaatgttggtaaaatttcaaaaaacttatacttacaattatttgatgttagtaaaatcctataaaattcattggtgtacatatagtttaaagtagtaaaatcgaattgg

SEQ ID NO: 13895 - DNA, 246 bp, Glycine max
  Clone ID: 701155743H1
ggtagcgcagagaaagaactagaactagggtttcatctttgccatcagtaaacgacaatgatttacgacgttaactctcctcttttccgatccttcctcagccagaagggaggctcctctgataagaggaaatcggacgaacagaagccaaaagagcagaaacccaaagccagcgagaacaaacctataatgactgagtgataacagctgagctgcattcagttgtagaatgaaaataggtggtag

SEQ ID NO: 13896 - DNA, 243 bp, Glycine max
  unsure (1)..(243): unsure at all n locations; Clone ID: 701155744H1
gaagctgaaaacatatctgaataagattgtggttttgaagtctcagaaagctcacaagccaaactttagatttgacatcaatgcagatggtgagccaaacagcaggtttaagccaataaaggacctcaagacagacgcaattntctcagttgactgatgatgtggttgttccatgttctactctagattttgctttctctgtctggcaaagtgcaccatttacgatggttggatttgttcctc

SEQ ID NO: 13897 - DNA, 244 bp, Glycine max
  unsure (1)..(244): unsure at all n locations; Clone ID: 701155745H1
ggtggcnngttgtgtgacacagaaattaagctagagcttcatagtttcttcttcttttctcaccttccttctctcccttcagacaaagggacaaaaaatcnnnnnnnnnnnnnnnnnnnnnnnnnttccaaaaccatgtcccacagtcatctaagtttcgcctttgggattctaggtaacattgcctccttcgtgtgctttctggcaccactaccaacattttatagagtttgtaagaagaaat

SEQ ID NO: 13898 - DNA, 241 bp, Glycine max
  Clone ID: 701155746H1
gaggataagtcagtagggaagagccctttgtggttgtggttgtgggtaggtgctgctgctgcttccattcctattcttacagtgaaggttcaatggaagggacaatgcagcttgcatacgagactgttgtgaagctcatgctggctgcactcgaacgcaacgtgctccctgacgtcatcaccaggagactcacgcgcttgctgttggctactcgccttcgctctgcttacaaaccctcctc

SEQ ID NO: 13899 - DNA, 249 bp, Glycine max
  Clone ID: 701155747H1
ggaggaagcaagggggatcttgaattctgcgcttaacgcttcgaatctttgaattcattcaaagatctccctctacgcatatcagggcactatggctgccacggtgaaacaaatgtctttgatcgtgtcactgttgggtgtggtgtccttcattttgggagttgttgctgaaaacaagaagcctgtggctggaacacccgtgcctggttcggatggtatctctgtcacctgcaagtacccagccgatcc

SEQ ID NO: 13900 - DNA, 249 bp, Glycine max
  Clone ID: 701155748H1
gagaaaagaaggtagagaaggtgttgtgaaaggttaagatcgagaaattagggtgaagtgaaggagaagctcttgagaagctgacttgaaagttgaaacagaagatgggagaagcaacagaaagatatgcagttgtgacgggtgcaaataaaggaattggattagagatagttagacagttagcttcagctggaatcaaagtgttgctcacagcaagaaatgagaagaagggtctccaagcactggaaa

SEQ ID NO: 13901 - DNA, 244 bp, Glycine max
  Clone ID: 701155750H1
aatggtcaatcaaacgttcataatagattgtagtaaaatagtaacgaattggggggggtgtttgtttttgtaaattaaacaacaagtaaatttgaattagaaaatatcagaattaaaacacgttgtttccccttgattcacaagcaagtctcttatcctaggttacgaggatttatcctttatccgctcaaccacttaatccaaccccaaattaaattactaagtgaaatttaacataaggcat

SEQ ID NO: 13902 - DNA, 245 bp, Glycine max
  unsure (1)..(245): unsure at all n locations; Clone ID: 701155751H1
ggggagctcgagaagcgcgcccccaagctcgtggaatcggggaagaagacgctgatcctgcacggaacgaagaccagcggcgtgctgaacgccgtgctcgcgcagatttatcatttgaagaaggacagcgccgtcaagtacagccgcaagaacgagaacgtcaagcctttcgaggccggcggcgagacttcgctcgagtttttntctctcaaaaccgattgcagcgtatttgtgtatggatctca

SEQ ID NO: 13903 - DNA, 244 bp, Glycine max
  Clone ID: 701155752H1
ggggagctcgagaagcgcgcccccaagctcgtggaatcggggaagaagacgctgatcctgcacggaacgaagaccagcggcgtgctgaacgccgtgctcgcgcagatttatcatttgaagaaggacagcgccgtcaagtacagccgcaagaacgagaacgtcaagcctttcgaggccggcggcgagacttcgctcgagtttttctctctcaaaaccgattgcagcgtatttgtgtatggatctc

SEQ ID NO: 13904 - DNA, 250 bp, Glycine max
  Clone ID: 701155753H1
agtaaatgctattatgttttttacacttatattctgttgaaaataatttgcaacacctgtgttgcttcacatcacatacatgatacactgaatgttttagccacatttttgctctagctttgacaataatgtagaatgagacagccaaaaaaaggaaaaaggaatcctcaggtttccaataagaacaatgaatacttcaaattgaaaaacacccgataatattttttaatttaatcacgataaaagtgat

SEQ ID NO: 13905 - DNA, 240 bp, Glycine max
  Clone ID: 701155754H1
gaggacatgttatactgtaatgtattttcccacttcccacagtacataaatacaacttccactgaaaggccttaacttaactcttatagtctttcttattccttctggaatccttccctttagtttcatgcgcaaggggaagaagcaattcatttgactcttactttattatttgatttgccggcaccctcttcttcacgggagctgaaaaaaaatgggagaaagtgctttgttctctgt

SEQ ID NO: 13906 - DNA, 241 bp, Glycine max
  Clone ID: 701155755H1
gattgataaaaaagcttcaggtgcttcccttttcatctcatttgggccaggatcctctctgccttcaaattcggatcttaccacactgtatggtaagtttggagctctgaatgaatcagaaacatctatgctctctagtgattgcactgctcgtgtgttcttcctgaaagcctctgatgctgaaaaggccttgagccattcacagaacatgaacccctttggctcttccgaagcctctttt

SEQ ID NO: 13907 - DNA, 241 bp, Glycine max
  Clone ID: 701155756H1
atgtcttagacttctgaaaagaaaagtctatgttaaaattagaaatggaaggagtaagaatcaagtgttgtacttttaatataatagatacttttttcgaacttaaatacaggtaaaattaattaacttttatgataattaagaaattacttaatattatttaattattcttatttcattttttttctaaagtatctttcataacttgattccaagaataagaaaagtaatcgaaaataat

SEQ ID NO: 13908 - DNA, 251 bp, Glycine max
  Clone ID: 701155757H1
caacatgcatgatgcctttcaactaagtgcctgtttggtttaagtttattttgaagtaatatattttcaaacattaatgttcttaagtctgggtttagtctaactcaaccgaaaaagttggcttgtgaggtgaggattgttcaagccttaagtagctctactagcaatatctataatgatgtgccataattgtttgattcctctcgagaagagtgttaatattatttaacacactctttttaacatactct

SEQ ID NO: 13909 - DNA, 248 bp, Glycine max
  Clone ID: 701155758H1
ggagaggatcgtgagagggacggtagcagagattccgtgagttgcaaaaatgaaaacaattctttctgcagagaccatgaacatcccggacggcgtgagcgtcaaggttaatgccaaggtcatcgaagttgagggcccccgcggaaaattggtgcgagacttcaagcacttgaatctcgattttcagctcatcactgacgaaaacggtaaaaggaagctgaaggtggaggcctggttcggttctcgga

SEQ ID NO: 13910 - DNA, 243 bp, Glycine max
  Clone ID: 701155759H1
caccctcagaaagatcgaacctttttggttacacaaagacataaacaaaagcaaaccaacataccgaaatagtctaccccaaacgttaaagttttgaaaaaaataacaaaatgttggaactgggagtaaatgcaaaataatcgaacacagggacaaccacaaaaagatcgaacctttttggttgaacaaagtcataaattgcacagagaagggaaaccatgccgacaaaggtcaagagcaccc

SEQ ID NO: 13911 - DNA, 244 bp, Glycine max
  Clone ID: 701155760H1
ggagagtgtaaggttttgcatttcatttgacgaagagtgagagagtcttatctgtcgtctctgatctctgatcgcatcttcattccgaaaatggctgtttcggctatcactggagcgaggctaactctagggatgtctctttcctcttccacgcgatcacgaaccgtcgcaatggccgtatctatcgaccccaagaccgataacaaactcactcttaccaagtccgaggaagctttcgctgcgg

SEQ ID NO: 13912 - DNA, 253 bp, Glycine max
  Clone ID: 701155761H1
ggatccttttgtctataaactgaactgaattgagtctcaacaacccagttgagtaactaagatggcgcaagtgaggaacaagcaagtgcttctaaaggactatgttaccggttttcccaaagaatccgacatgaatattgtcgaaagtaccataacattgaagcttccacaaggttccaatgatgtcttgctcaaaaatttgtacttgtcttgtgatccgtatatgaggaatctcatgaacaagcccgaaggc

SEQ ID NO: 13913 - DNA, 225 bp, Glycine max
  unsure (1)..(225): unsure at all n locations; Clone ID: 701155762H1
acatttctgatgatgaganacgaggaagagaagaaggangaggggggtaaagttgaagatgtggatgaagataaggagaaggaggagaagaaaaagaagaccattaaggaggtatctcatgagtggtcattggtgaacaagcagaagcctatttggatgaggaaacctgaagagatcacaaaagaagaatatgctgctttctacaagagtcttaccaatgattgg

SEQ ID NO: 13914 - DNA, 242 bp, Glycine max
  unsure (1)..(242): unsure at all n locations; Clone ID: 701155763H1
ctctgtctcattaagcatatcttagcctttaggagtatgaatagagatctaaaacatatgtacattgatacttcatagtttagaatattcatgaacattgtatttaaatttcctgatgtcagcatgagttgtattaagggtggtttccaatttctacactttttttcacgtttggagtatacttatttaaagagaggacacaattttacagcatcctttntttttttnccttganaatctna

SEQ ID NO: 13915 - DNA, 243 bp, Glycine max
  Clone ID: 701155764H1
ggaagagtgaagagaatggctcccaagggtttaacctttctggctgtgttaatatgcgtttcagcactgtcactgagtccttctgttgcgggggaagggcaaaataatggccttgttatgaacttctacaaggaatcatgccctcaggctgaagacatcatcacagaacaagtcaagcttctctacaagcgccacaagaacactgctttctcctggctcaggaacatcttccatgactgtgct

SEQ ID NO: 13916 - DNA, 250 bp, Glycine max
  unsure (1)..(250): unsure at all n locations; Clone ID: 701155765H1
gtggagggcccaacaaaaaggctgaagtaaaggtactaaactactaaaaaaaattcatttgaaattaaagtaaggtttttttttcctccagctaacagccatttagggtgtgattaagcatttacaggtgtgctagcaagtgtaaggggaaggtaatttggattgaagcctgatttataactaagtttgattccgttcacaccaaagagataagtatnaatttaattaattttggaggaaccaatatgaa

SEQ ID NO: 13917 - DNA, 258 bp, Glycine max
  unsure (1)..(258): unsure at all n locations; Clone ID: 701155767H1
gacagcacagcactctttgcaacacaacaaaaaaagacaacacagagagaagcgtcttaataaacgctcttctctgaaaaacctgatttcttctcttcttctcttctctttcgtttcgatcttcgatctctgaaaatgagagagtgcatttcaatccacatcggtcaggccggtattcaggtcggaaacgcctgctgggagctctactgcctnnnnacacggcattcagcctgatgggcagatgccaagtgataagac

SEQ ID NO: 13918 - DNA, 245 bp, Glycine max
  Clone ID: 701155768H1
ggagcaagagtgaagagcgaagagaatggctcccaagggtttaatctttttggctgtgttatgcttctcagcactgtcactgagtcgttgtcttgcggaggataatggacttgttatgaacttctacaaggaatcatgccctcaggctgaagacatcatcaaagaacaagtcaagcttctctacaagcgccacaagaacactgctttctcctggctcagaaacatcttccatgactgtgctgttc

SEQ ID NO: 13919 - DNA, 239 bp, Glycine max
  Clone ID: 701155769H1
ggaggaggaattgacacgagtgagtgagtgagaacaagacattgcacttgtcatcatcatcaagctctacatttctttatcatcagtcaacagacacgcatgcattcatttgttcagctgccaccgttctcggtatctcatgtgatcttcaaagtttgttgctttcagccttttcaagctgtccatttaagtttttgagagcaagcagttttttatgaggaccgaataaaagattcaaa

SEQ ID NO: 13920 - DNA, 244 bp, Glycine max
  Clone ID: 701155770H1
ggtaggcaaagagagagagagaaaagcgtgaatcatgtcggacgaagagcatcacttcgattctcaggcggatgcgggagcgtccaagacgtatcctcagcaggctggtaccattcgcaagaatggctacatcgtcatcaaatccaggccttgcaaggttgtagaggtctctacgtcaaagacaggcaagcatggacatgcaaagtgtcactttgttgcaattgatatttttaatgggaaaaag

SEQ ID NO: 13921 - DNA, 223 bp, Glycine max
  Clone ID: 701155771H1
tccagagagaagaagaaacttaatcgatcatcacttcacttcactaatacatcatggcagacgagacccagaacaagtatgagagctctgaggttgaggtccaggatcgtggtgtttttgactttctcggtaagaaaaaggatgaagaagacgagcctcatcctcaggaggaggtcatcgccaccgagtttcaaaaagtcactgtctcagaccaaggagagaa

SEQ ID NO: 13922 - DNA, 229 bp, Glycine max
  Clone ID: 701155772H1
ggcgctagttctgagtattctgatcgctccctgagagagctcgtcgcggcggttgcagaagaagattgcaagatgaagttcaacatcgcgaatcccaccactggatgccagaagaagctcgagatcgacgacgatctgaaactgcgagcattttgggacaagaggatctcacaggaggtcatcggagatgcactcggtgaggaatttaagggctatgtcttcaaaatta

SEQ ID NO: 13923 - DNA, 240 bp, Glycine max
  Clone ID: 701155773H1
caaataagttaaggttccacgttagtaattttttggtgtttgaattgaagttaaagggccatggcttcaggatccaaatcagtagcctctatcctcttggcactgaatctagtgctgtacttcattgtgcttgtaattgcttcttgggcagtgaatcatgggattcaaaggtctggcgaaacagcatctgctttgtccattccggctcgcatatttccaatatatttcccaatgggaaac

SEQ ID NO: 13924 - DNA, 249 bp, Glycine max
  Clone ID: 701155778H1
tattctttcttttgtacacagtacagtatggaaagtattatttggaaaggttgctgattcactggagaaaggaactgaacatgaagatgaatacatgatcagtgaaaaggagctcctcgtaaacaaattcatttctatcccaaaggacatgggaacgtttaactgtggagcatttgttgctggaatagtacggggcgttttggatggtgctgggtttccagctgttgtaacagctcattttgtgcccgt

SEQ ID NO: 13925 - DNA, 239 bp, Glycine max
  unsure (1)..(239): unsure at all n locations; Clone ID: 701155779H1
atccaacaaccgttcacaaatctttttctaagtgtagtagaggngaggaaccgcgccaaccctctcttctnctnctncttcaatcctnttatancntttntagtttcattcttaatcgttgggaaaaatgttcatcgagaattttaaggtagagagtcctaatgtgaagtacaccgagactgagattcagtccgtgtacanctacgaaaccaccgnacttgttcacgagaacaggatgg

SEQ ID NO: 13926 - DNA, 71 bp, Glycine max; identical to SEQ ID NO: 6746
  Clone ID: 701155780H1

SEQ ID NO: 13927 - DNA, 257 bp, Glycine max
  Clone ID: 701155781H1
ggtacacagcctcaacaaccctaacgcgtgcagagcagagagagacgcagccatggggcgaagacccgcgaggtgttataggcaaattaagaacaaaccataccccaagtcacggttttgccgtggtgttcctgatcccaagatcaggatttacgatgttggtatgaagaagaagggtgttgatgagtttcctttctgtgtccatctggttagttgggagaaggaaaacgtttctagtgaggccctggaagctgctc

SEQ ID NO: 13928 - DNA, 243 bp, Glycine max
  Clone ID: 701155782H1
ctgtacattaaatgaaacaaattatgataaaatatgaaattgagggcaaactgtggcacaacagtaaagttgcgccttggtgacgggttggttatggattcgaatcaagaaacagctttctttgcatatgcaaagttaagggtgcatacactgactctctcccaaacctttgcaaggcgagaagtcttctagcaccagatacattagtttatggtaaaatatgaaataagttggtaaaaagag

SEQ ID NO: 13929 - DNA, 240 bp, Glycine max
  Clone ID: 701155783H1
ggagagaaagagatcgcagacacagagcagaatggcttctacccaatgtttcttgcaccaccatgctcttaccacccctgccagtgccagatccccatcactacgcatcttggttagcaccaagcctaaccagcttgtttgcaaggcacagaaacaacaaacaccacaagaggatattgatgtcagcccaatctctcgccgtttagctctaactgtgctcattggtgctgctgctgttgg

SEQ ID NO: 13930 - DNA, 128 bp, Glycine max
  Clone ID: 701155784H1
tgtaataagatgcgttcaaataggggcactagcttcactttatgttgtttcagctgtgtgtcaacaagtcatgtaagagacttcactatgttgttttctctttcgtggctttaataaattatgcgccc

SEQ ID NO: 13931 - DNA, 216 bp, Glycine max
  unsure (1)..(216): unsure at all n locations; Clone ID: 701155785H1
gcagccggagaacgcngtttatgatttcgaggacaagatcaactttgcggtgttcccttcgctgcagggtgggccccacaaccaccagatcggggctcttgccgtggcgctgaagcaggccgcgtcgcccgggtttaaggcctacgccaagcaggttaaggccaacgccgttgcgcttgggaattacttgatggggaaagggtacagtcttgtcac

SEQ ID NO: 13932 - DNA, 238 bp, Glycine max
  Clone ID: 701155786H1
acaggagggaggtgagggactgatgactgagatagcggtgattcaattgcatcatcacaatcacaacattgcttattgacattcatatcctctcattctctctctttttctttctcttcaattccaaacctatggcggatcagagccccaaaccagagaccttcgaactcaacaatggcagcatgcaagtcctcctcagcaatctcggctgcaccatcatctccttatccgtacccgg

SEQ ID NO: 13933 - DNA, 237 bp, Glycine max
  Clone ID: 701155787H1
ggtagactcaaagcttgttgatcttagagaaagtggcatcaagaacaagtccttcttagatggacatgtgtcatcaatggaagatattgtgaccaatgcaaaaaggaaatggcaggccttttgcgtgcaagcagaaaaggatgcaaaagacactgctgatgattctgccgcaaagcattgtcgtatggagaaactcatacagcggggtgttcatactgctcaatcggctttcgaaca

SEQ ID NO: 13934 - DNA, 206 bp, Glycine max
  Clone ID: 701155788H1
gacaaaaactacttccttctctcctttgctgtgttttctttctcaaaaatgggtcgtacctatgttcttatgatggttgctgcattgttgttgagctccaccatggctcaatctccagcttcgtcgccggctttgtcccccacccacacgccggtggccactccacctaggagggcgttgtcgccgtctccgtcgtctgtgtcacc

SEQ ID NO: 13935 - DNA, 235 bp, Glycine max
  Clone ID: 701155789H1
aacagacaccgacacagatctgtcttccgaagcaggaactaaatatggctgacttgttggaatggtcaaagcaagataagaaacgaatgcttcatgtcgtctaccgtgttggtgaccttgatcgcaccatcaaattttacacagaatgtttaggaatgaagcttttgaggcaaagagatatcccagaggagaaatatgctaatgcttttcttggatttggccctgaagaatccca

SEQ ID NO: 13936 - DNA, 237 bp, Glycine max
  Clone ID: 701155790H1
agagtggtggagtgtgcaaaagagcgtcgtagtcgcaaccctaattcagaagaagcgcagttcaagcgagtgacagccaccagccatgggtcgtatgcacagccgcggtaagggtatatcctcttctgctttgccctacaaaaggacacctcctagctggctcaagatctcttcgcaagatgtcgaagaaaatatctgcaagtttgcgaagaaaggtttgaccccgtctcagattgg

SEQ ID NO: 13937 - DNA, 237 bp, Glycine max
  unsure (1)..(237): unsure at all n locations; Clone ID: 701155791H1
tactcgcttagcgagctgacttcctcgctaagtggataagcctcgcttagccaatctagctcgctgancgagcccttcagcagcatttcaaaatcttctcttctttagcctaaaaatccaaataagttcaacattagtcatccaaangaagtttccactgtatgaantcacacaaaaataaattatttacaaatctcacaaaagaaaccataaattagaggaacattgctacttttt

SEQ ID NO: 13938 - DNA, 236 bp, Glycine max
  Clone ID: 701155792H1
gacgtcaaacttttcaaccgctggagcttcgacgacgttgaggttactgatatgtctctggctgattacattggagtgtccccgtcaaagcatgctacatatgttcctcacactgctggtaggtactcagtgaagaggttcaggaaggcgcagtgccccattgttgagagactcaccaactctctcatgatgcacggaaggaacaatggaaagaagctcatggctgtcaggattat

SEQ ID NO: 13939 - DNA, 235 bp, Glycine max
  Clone ID: 701155793H1
tgatacagtaactaacataagtaagattgaatggtaggtaccaagggagtctaactggtttaagagggtatatgactgtagtgatactgttttgatttctattgaccaaaataaagattcaacggtaggttggcagcattcccatgtaataacggctaggaacctcacagtcgagtgtaaaatgttctctatttttggttggtaattattaatatttgcactgatttttttagca

SEQ ID NO: 13940 - DNA, 156 bp, Glycine max
  Clone ID: 701155794H1
tatgcaaaggtgtagtcagcccataccttgcagtacatttaataatgatggttccatatttgcttatgcggtttgttatgattggagcaaaggtgcagaaaatcgcaatccagctacagcaaagaactacatatatttgcacttaccacaggagtc

SEQ ID NO: 13941 - DNA, 241 bp, Glycine max
  unsure (1)..(241): unsure at all n locations; Clone ID: 701155795H1
gggcaccgatacacacatacatcaccaactgatatataatactagatttcttgcagtctattattagagagaagaattgagttggaagaacccagaaaaaganacaannaataaataaaacgatgtggtggccattcagcagaataggatcttctgggttttcatcatnttctactgccgnggaagttactcatggantcgatggaagcggtctcactgctattgttacaggagcatctag

SEQ ID NO: 13942 - DNA, 241 bp, Glycine max
  unsure (1)..(241): unsure at all n locations; Clone ID: 701155796H1
ctacctgtggtggtcccccacatgtatgggtgaggaacgtgaccagaagccacagtgagttgtagtatggtggcatggtgactcttggcccataatatgcctgaagatatagtagacatnttanattataatacagtcactattcactacactagagaccanacacacttgaaaacttgctgggtgnaccaatttgaaanggataaaattnatagttttataccatcgaatcaatgttttt

SEQ ID NO: 13943 - DNA, 283 bp, Glycine max
  unsure (1)..(283): unsure at all n locations; Clone ID: 701155801H1
gaggctgagttctgtaattgtgttttggctgtggacaatggctctgncttctgggcttttctngtgttcttcttcccgtgttctcccaccaccagaaacccacactttcatgaggaccaggccttcttctgctgccttgcgcaccatttccgttagctgttgcaccgtctctcagtcgtctaagccagcccgcaaaatccgtggtatcatgaaaccccgcaaagtctcccccgagatggaagacctcgtcggcgctcccgagatggctcgaacncaagtcctc

SEQ ID NO: 13944 - DNA, 255 bp, Glycine max
  unsure (1)..(255): unsure at all n locations; Clone ID: 701155802H1
tattctgttgataatagaggtgatgtaggttcttgggttcgtgaggctgcattagatggcctagaaaaatgtacatacatgctctgtaagatagacaagtcagtttgtttgtctggaagatctgatggaaatgaaattgagcctattgcacatccctcaattgatagcatgcttaagaacaaccaagagctttctttatttgatgagnatcttgctaccaatttagttggaggaatttgtaagcaagctgtggag

SEQ ID NO: 13945 - DNA, 252 bp, Glycine max
  Clone ID: 701155804H1
gatatttctgttcattatgtttagtttatcttagctttatctttaaaaggaaaaaaaagttgtgttctgtatgaaatcttatttgtaactccgtggtatggtctactttgattatgcataacagtattgtgttccagggtcatacttttaacttccaccgtgctctagatttgataaaagttagatcatggacatggtttaaggccaagatgaataatgttgaatgttcctttttcaattggtgcaataagc

SEQ ID NO: 13946 - DNA, 259 bp, Glycine max
  unsure (1)..(259): unsure at all n locations; Clone ID: 701155805H1
ggaagagagaaagcatttgtgatggcagacgatctgtttgatggattgccccctccttcctcaagcactctcattcttcctnnnnnnnnnnnnnnnnnnnnnnnnnnnnntgagccaattcttgttgctaccaacaacaacaaccctgaatcctctgcagttccggctccaaagccaatcctcaaaagtgccctcaagcgccccaaccctactcaacccgacacccaagctgcagcacctaagaaaagcttgaagttca

SEQ ID NO: 13947 - DNA, 255 bp, Glycine max
  unsure (1)..(255): unsure at all n locations; Clone ID: 701155806H1
gaggttacattggaaacatattatgtggctgagcgatcggnaaaatttatcttacttatagcatgtaagatttgtatgactgtctactcatgtgacacaccgctgaacccacagtcaaaaagacttttgatataaaagattcttaagttaaggatctattatcatcattttatttgtttgagttagtcaccaaattaaactattgattctaatatcaattgttggaaaattgagaaggtaaaataagagagattt

SEQ ID NO: 13948 - DNA, 284 bp, Glycine max
  Clone ID: 701155807H1
ttggcagcttcaatatccccccagcaagtttagccacatttgtgactctatccatgcttgtatgtgtggtgctctatgaccgtttctttgtcaagatcatgcaaaggtttaccaagaaccctagggggataacccttctccaaaggattggaattggcctcataatccacatagtgattatggtagttgcatctcttactgaaaggtatagacttagagtggccaaagaacatgggttagtagaaaatggagggcaagttcctttgagcattttcatcttgctt

SEQ ID NO: 13949 - DNA, 254 bp, Glycine max
  Clone ID: 701155808H1
ggcacaagtgagtttgttgatcgagataactagaaacagtgtgatgaaaatgaaggtccttgttttcttcgttgctacaattttggtagcatggcaatgccatgcgtacgatatgttccctctccgaatgaacactggctatggtgcccgtactccggaggtgaaatgcgcaagttggaggcttgctgtggaagcacacaacatctttggctttgagaccattcctgaagagtgcgttgaagcaacaaaggaat

SEQ ID NO: 13950 - DNA, 238 bp, Glycine max
  unsure (1)..(238): unsure at all n locations; Clone ID: 701155810H1
gggtgcagtgaagttatgntcatgaagcatttaacaattttactctattaaattattagtagccagccccagaagtctcaaacaagatatggccgatttgaatctaaatatctaacagttaatttgctattaaattcaacaaagttcgtttccaatttcatgtcaactactgcatgaaatggcgctacattcactaatatcttgaactgaatccgttaatttgcctccatctcctcca

SEQ ID NO: 13951 - DNA, 253 bp, Glycine max
  Clone ID: 701155811H1
taccaagatgtcgccattccatggctcgagaaaaagcctaaacccaaaagaactagaaaggctaagaaggtggcgttcgcacgacaatttggcggcattggtgcagcaatggctgctgagactgggccaagttccaagtttcctctcactttgctggactcaaaggtaaccctactagttaaaaggccaaagcagttgaggagcaagagggacaaggaggaagaggaagaagtgttggtgattgatgggattg

SEQ ID NO: 13952 - DNA, 141 bp, Glycine max
  Clone ID: 701155812H1
tctaggctcccaaaattcacaaaagctgaatctgaaggtctaaaaaattccatagattttcttggtgtgaattactacaccacttattatgcggaacatgctgaacctgtcagtgccaaccgaaccttctacacagacata

SEQ ID NO: 13953 - DNA, 253 bp, Glycine max
  Clone ID: 701155813H1
ggaagatacggaggctgctgctatcgaatactcggataaggaggaacatcttttcaatggcgtcccaaattacccgtgagtggtctggaatcaatacattcgcacctgctacccagactaagttgcttgaactcttgggaaaacttaaacaagagaatgtgaactccttaactatacctgtgatgggaaaaggtggtgttggaaaatcttcaactgtgaactccatcattggggatagagtggtttcgattaa

SEQ ID NO: 13954 - DNA, 251 bp, Glycine max
  Clone ID: 701155814H1
ggaagaaggcaaatcgcgaagactagatctgatctgagagaatggctcctcggtctagcagcaaggacgcccaagaccttttccgcgctctttggtctgcttatgctgcaacccccactaatctcaagatcattgatctctatgtcatctatgccgtattcaccgctttcatccaggttgtttacatggctttggttggatcattccattcaactccttcctatcaggagtactttcttgtgtaggaactg

SEQ ID NO: 13955 - DNA, 252 bp, Glycine max
  unsure (1)..(252): unsure at all n locations; Clone ID: 701155815H1
ggtgggtttcaactttcaattcagaacgaacgattccttcatttcccgagtgattcaccgatctgataatcgattgaatttagggtttgggagatggcgtcgagtgtgttgaagagcctcctcctgagattttcctcatcgaggaacacggcgaccaccagaagtttcagcctcgttacccctcaaatcagcaaccacaccgccaagtggatgcaggatacaagcaagaaancnccgaggagctgnttaatg

SEQ ID NO: 13956 - DNA, 271 bp, Glycine max
  unsure (1)..(271): unsure at all n locations; Clone ID: 701155816H1
gatcgctattgtgattatagcagagaaggcaaagaaagaaaataatgagtaggtgtgtatcttgtgcgctgattcccaataagaatttcttggtatcaccaattcaaatcccaattcataatgcagtaaaggttaggggcaacaatagaacttgnggcctgcgngtncagcttnccnngggggggnctctcccccccnttgtttccacnnggcgnancganggttttttttnanncncngggncntgggtnnttnggnnaaacaaananaa

SEQ ID NO: 13957 - DNA, 260 bp, Glycine max
  unsure (1)..(260): unsure at all n locations; Clone ID: 701155817H1
agcagaggaagaagaaggaggagatcttgagagatcaggtcgcaactgatcatggggagagaagttacaggaatgcaagttgtggacaagaagccaaatggcgtaataccagcttcaaatggtagttctaatgataaagtgtgcatttctcctaaaaggacagcagctaaggttcaggcgaaggatcacgaggtaaatgaatgtaccananntanctcttttgttgaaaaaagccaagagaagatggatggtttgagtgc

SEQ ID NO: 13958 - DNA, 255 bp, Glycine max
  Clone ID: 701155819H1
ggagaatctggagttgtggttgctatgctgagaggttatgcacttgcatgttttgcggtacttggtgggacttttgcctggggtatcgactctttgtcaccagcatcaaaacgacgaccaaaggtccttgagattcatttagaatttcttgcaaatgcactagatagaaaaatatctcttcgctgtgattgtgctacttggcgtgcatatgtgtctggggttatgagcttgatggtgagttgcacgccactgtgt

SEQ ID NO: 13959 - DNA, 192 bp, Glycine max
  Clone ID: 701155820H1
tgattaaactgccgcatcacctatatatttaaaaggtatacttttgttttgcatttttatgtttggctctgtcaaaattaaatctttccacattggtctattacaacaacatggatgatgaattaggaaatttaattatgatcttattttcttctatcacttttgagctaacattagttagggaaattatac

SEQ ID NO: 13960 - DNA, 253 bp, Glycine max
  Clone ID: 701155821H1
taccttcactttatttgtctttcccgcagacaaatattggattaattatattggggaatacgtacccaagaccatcttgagagaagaaagcaagttatcgatgccataatacctgtcaaatgccccacaggtatattttgttcatgcacatgcatcatgtcccccaaagtttaatttgaaggggcttatatatagttttgtatttgagaaagggggaaaaaggagaggctttttcttcatcttgaccactttt

SEQ ID NO: 13961 - DNA, 217 bp, Glycine max
  unsure (1)..(217): unsure at all n locations; Clone ID: 701155822H1
agggtggttttgatttggagtgcagctatgcgattgtacagagagccaagcagcagttattgtataagcttcgtagatttgagaaactggcggagtcncgatccagtggaacttgagaaaagaatgcaggatcaagaagaggacgaggatgacacatttatggaagaggaagatggtcatgatgagaaaaaccaagcatcatgcaaagaaaatgact

SEQ ID NO: 13962 - DNA, 264 bp, Glycine max
  unsure (1)..(264): unsure at all n locations; Clone ID: 701155823H1
gctcgagttcaacacagatccattaagcagattctttgggtgtggantcagagtgctcttgatcaggggaagtggtctctcgagctcaaattctctgttgggaagattcctccatgaactgaagtcacttgcttcaggtgggattgtgaagttcaaatctcgtccagtgagttcaatccactttctccgctcatccttatcaagactcataagattgggcgatggaacaacctcgatgccatgcacacattgaggatttgaaag

SEQ ID NO: 13963 - DNA, 254 bp, Glycine max
  unsure (1)..(254): unsure at all n locations; Clone ID: 701155824H1
ggatccaaaccaaaacaaaatccctttaaaaccctagtctcgcaatttcgaaatttatcactcactcagtcactctcatcatccactcatcttattctcaggccagaaaagagaagaagaaatggtgttaggcgtgagagagataagctgtagcggagagnctgtccttgacagtgataacggggaggagttgatgcaggtgcaaccgggcatagacatagtcctcggcgatcttcctcgccagtcccccggca

SEQ ID NO: 13964 - DNA, 254 bp, Glycine max
  Clone ID: 701155825H1
gggagaggcaaagcgaacaaacggctactctcctcccacttgctatcctcgaaattaacgaaacgtagttgaagaacccacagaatcagaaccccaacactgccttatgctttccctataaatacacattgtcccttcctctcgtcatttcaaatacaaactcacaacacactttgtacactccgtccctcttccctgtctctcaaatggcttccctgacgcaaactttcatgtccctcgcctctcttcccaat

SEQ ID NO: 13965 - DNA, 254 bp, Glycine max
  Clone ID: 701155826H1
gaacacactcatcaaaaaacccttctttctttcaggttcattacttgatcagtgtcaaaagggtagttgcaaattgcaatggctaagcatgatgttgagggtggttccttctcagcaaaggactaccatgatcctcctccagcacctttgattgatgctgaggaactcacacagtggtccttctacagggctttgattgctgaattcattgccacattacttttcctttacatcacagtgctcactgtgattgg

SEQ ID NO: 13966 - DNA, 247 bp, Glycine max
  unsure (1)..(247): unsure at all n locations; Clone ID: 701155827H1
cttatatataacaacttaaaatttcaggtcaaccaaatctttaaacagctattttcacttctttgacctcaaagcatcaatattaccagtaatattatgaccgagtaaaaatatttgcgggtttcaaaatgtactgtcctttccaaaccaacagacnacaaattaatttaaacttaaaatcatttatccctgtttcctgaatacagtatgatttactctaatattctaatattgattttcagtgggc

SEQ ID NO: 13967 - DNA, 232 bp, Glycine max
  unsure (1)..(232): unsure at all n locations; Clone ID: 701155829H1
ctgcaacttcctctgttttgctcccctgtttaggccttttcataagcttagaatgacacacaaggaattttccattgctctagtgactctcattgctgttctctttgtcaacatgaacatccaaggtgccactgctgactntggtagttggcagagtgctcatgccactttttatggcgggggtgatgcttctggcacaatgggtggagcatgtgggtatggaaatttgtat

SEQ ID NO: 13968 - DNA, 175 bp, Glycine max
  unsure (1)..(175): unsure at all n locations; Clone ID: 701155832H1
atagtagtaaacaacgtaataatttcttgcggtcaattaatgagcacagttaaacacaccttggctggggacatagcagtctcgtnaaatagtaggtttgcttcccacagtnaggtgtggtcangtgaagagnngnnnggggngnncccnttttnntgtnnncnnnggggtgaga

SEQ ID NO: 13969 - DNA, 146 bp, Glycine max
  unsure (1)..(146): unsure at all n locations; Clone ID: 701155833H1
ggancctggaccattgacnactccgntgtcgagaggtaattttgtacagatcagatggtaaagtgcnctctggtgcgtgtcgcgctttccaattgacgttatatgagctggcgggtggtctcctacnanatcgaannncaaaaggg

SEQ ID NO: 13970 - DNA, 252 bp, Glycine max
  unsure (1)..(252): unsure at all n locations; Clone ID: 701155834H1
tccccctcttctttttctggccattttaaaatgaaatttgatatttgacgtttcttttttcagttggataagaaaagattgtaggttgaattagagtcgtaaataattcaatatatccacacaaaagtggaaaactgactttatatatataaagatattgggcatcagaggtgaccaccaatgccgcacaaaagcctgtttctctgtgtgacaccaacaaggttactttaaggctttttttttttaaagntg

SEQ ID NO: 13971 - DNA, 251 bp, Glycine max
  unsure (1)..(251): unsure at all n locations; Clone ID: 701155835H1
gatgacaatggaggggatgatggacaagggggtgttggatgatgtgataagaaggcttctggaagggaaaggagggaaacaggtgcaactctctgagtcggagatccgtcaactctgcgtcaacgccagacaaatcttcctctctcagccaattcttctcgacctccgtgctcccatccgcatctgcggtgatatacatggtcagtannnngacttgctgaggctttttgaatatggtggctaccctcctg

SEQ ID NO: 13972 - DNA, 250 bp, Glycine max
  Clone ID: 701155836H1
atatcatgaggagtagattaatatctggaaaaacaaacacaacgatattttaactgaacaatgggtggaatagtgacacatacactagagtacatgggatggtataggaaaaacactattttgttcttgtctgttgcacaacaactaaatgatccacacacaacaattacccataatgctgcaaggataactgttgaacaaacacatatcaaaattccacatcctcagtcaatgtaatgtactccttcac

SEQ ID NO: 13973 - DNA, 244 bp, Glycine max
  Clone ID: 701155837H1
acatttggacatttggccccagagtactacttgcatggtgttgtggatgagaagacagatgtgtttgcctttggtgtgttcatgctagaagtaatctctggcagaaaaccagtggatgggtctcaccaaagcttacatagctgggctaaaccaattttgaacaagggtgagatagaagagttggtggatccaaggcttgaaggggcttatgatgtgacacagttaaagagatttgccttcgctg

SEQ ID NO: 13974 - DNA, 249 bp, Glycine max
  unsure (1)..(249): unsure at all n locations; Clone ID: 701155838H1
ggagagcgagttgattaaggcaaagggtgtgatgagattagttttgagaagaaaccagcaatcggcgattaggagtgagagagatatggagggaattgaaggaaatagcagcagatacagtctgaaaccntcgcgaatttgcaacgaagatgttctgatctgcgtcgacgtcgatcctcagtgcctcgtcgaaatgaaaggtgccaccggtcccaatggcagacccctcacccgtttggactccatcaa

SEQ ID NO: 13975 - DNA, 250 bp, Glycine max
  Clone ID: 701155839H1
ggaacaagcaaaattaagcacaaaagcccaaccctctctctcgctgttggtctctcctatttggcattcgcagatcgattacgaagtaatttcactgaatcttattgaagatgtttctcacaaggactgagtatgaccgaggagtcaacaccttttctcctgaaggccgtttatttcaggttgaatatgcaatcgaagccatcaagctgggatcaactgcaattgggttgaagacgaaagagggtgttgt

SEQ ID NO: 13976 - DNA, 259 bp, Glycine max
  Clone ID: 701155840H1
ggaacctgatcgatctctttaccagttgccacactacaccgagattccccctaaacccgtttgcgttgttgtttgcgaagaaatggcgactaagaggagcgtgggaacgttgaaggagggtgatttgaaagggaagagggtgttcgtgagggtcgatctgaacgtgcctttggatgacaaccttaacatcaccgatgacactagagtccgtgctgctgttcccaccatcaagtacttaactggtcatggagccaaagtg

SEQ ID NO: 13977 - DNA, 229 bp, Glycine max
  unsure (1)..(229): unsure at all n locations; Clone ID: 701155841H1
ggatcttctagtnacaaaacaaaagcataaancttctcactacctaattcctctaagttctatatctgataagcttgtgtactaggccacaaatctcccatggagaaaacggttcacatagcagtagttcctggtcctggctccagccacttagtcccaattcttcaattctcaaagagacttgttcatctccatcaaaactttcatgtcacatgcataattccctcag

SEQ ID NO: 13978 - DNA, 250 bp, Glycine max
  unsure (1)..(250): unsure at all n locations; Clone ID: 701155842H1
gattgtggttgatgttccttcattcatcttcatttctcttgcaagtaactcttcagattttggttttttgttccctatccgctctctcttattcacttcttgaacatggcggtggcaccttacaccaccggttccgcannnnnnnnnnnnnnnnnnnnnnnntctagtgttgccacaaagctctattccggattgaaacttcaagctgcgagttctttccgagcggcaagacctaacgtaaccgctgaat

SEQ ID NO: 13979 - DNA, 200 bp, Glycine max
  unsure (1)..(200): unsure at all n locations; Clone ID: 701155843H1
ggttcacttaacttcatcaaaatatatagcttgggttcacttcaaaatatggctcaaaatagtgaatcctatgaaatgaaggtattaccagctgtgtttggantgcntcatanagtncgacatcatttcncatctcacctgtcannaacatgtaatcacanctnanagattcagncattngtgtatgtattgtgagctnc

SEQ ID NO: 13980 - DNA, 250 bp, Glycine max
  Clone ID: 701155844H1
ctagacatgacttctatgacaaaactacaataggtgaacaagtcactctagatttttgagtttttcttctacttcaatatttttgtaagaattttatggtttaggtttcagccacaaaaaataacaagacaaaactcaaaggaacctaaactcaacaaaattcatgattcaagacaagaacaagaaatttgaaccatagaaaatcaaatctagcttctatagcaagtttaatcagtggaaactctaaaga

SEQ ID NO: 13981 - DNA, 241 bp, Glycine max
  Clone ID: 701155845H1
aaatgagggtatagcttgcatagcctctccgtcagagaaatgagtgtatatttgggaaaataggatacttcatcgcaaagaagatgagattctctaatgaaataaatcctccacccctaaaatctgttgaagggtcagaaccttgccatcccatttccttccaaaggtctgatttaagtgaaggaagctccctgtccgggtaagccaatttccacaattgtttaagtgcgtcttggtgctc

SEQ ID NO: 13982 - DNA, 230 bp, Glycine max
  unsure (1)..(230): unsure at all n locations; Clone ID: 701155846H1
gaaaacagttcaggaantgggtggatgatttattggctacaccgttaggttcagatacatggctagtgaaatttgacaagtgggagttatctggtgaagagcggcagggttgtgttgttaccgccataataagcaaaaaggattcggattggttcacttgggtgcatgtgcatgaaacctggttggaaaactcagagcaaggtttatggatactttagtttgttcctacg

SEQ ID NO: 13983 - DNA, 249 bp, Glycine max
  unsure (1)..(249): unsure at all n locations; Clone ID: 701155847H1
aaagagacccggaaagggtgggaaccgcttttggaaatccattgggcttggatttaagactcccagggaagccatcgaaggaacctacattgacaagaagtgccccttcactggcaatgtttccatccgtggccgtatcttggctggaacatgtcacagtgctaagatgaacaggactattattgttaggaggaattatctccattttatcaagangtnccagaggtacgagaaaggcactccaanttt

SEQ ID NO: 13984 - DNA, 255 bp, Glycine max
  unsure (1)..(255): unsure at all n locations; Clone ID: 701155848H1
ctatagatgcttcatacctctccggcaccgttaccanaattttctctacaattcttgaatcagcaaaatcacttcccaacaactttatcttgttggcaatacccaacaattngtntgagtattctttgantgtctctgactncttgcancctnngaagctcannttccctccttaaattgagcncntgantgcttcgnagccngangntgtcgagngtnnnnaacaannagtttngngngtgngacgtcnggtgg

SEQ ID NO: 13985 - DNA, 253 bp, Glycine max
  Clone ID: 701155850H1
gatagagaagtaggaacttgatacttggttgcatcacattttgagttaatcgattgcatgagtaagactaattgcatactaatgagtattttcgtgaattgttgattctcgtgcaagcagacgtcagtgtaagtgatggagtgtgaactaatagcacaagaatgaaaaagttagtatttttgacaaaaaagcttggaataagaacctgaatacttcaatgaaaaccggtaagttgtgtgatctttaaattgtg

SEQ ID NO: 13986 - DNA, 249 bp, Glycine max
  unsure (1)..(249): unsure at all n locations; Clone ID: 701155852H1
ggaagcgaaagagcagcactcacagagagagtgagacagagagatggcagcaacagagattgggttgttggagtgggtgagagtgnnnnnnnnnnnnnnnnnnnnnnnnnnnnnnaaagggtgtttgagcaagttcgtcgataatggcagcgtggagagtcacagatactacttgtctcgcagaaccactctcgaaatgctcaaagacagaggctactccattccctctcacgaaatcgacctttctct

SEQ ID NO: 13987 - DNA, 257 bp, Glycine max
  Clone ID: 701155853H1
tgctagagaaacgattgctggtgtaaatccaaacgtcattaagattcttgaggagttcccaccacgtagcaagctagatacacaagcctacggtgatcatacctgtataataacaaaacaacatttggaacctaacttgggtgggctcactgttgagcaggctatccagagcaagaagctgttcatcttagatcaccatgactatctcactccatatttgaggaaaataaatgcaactaccacaaagacttatgcta

SEQ ID NO: 13988 - DNA, 256 bp, Glycine max
  unsure (1)..(256): unsure at all n locations; Clone ID: 701155854H1
ggattacaaggggaaaagaaaagagattctgagactgaaagtaaatcgaagcnnnnnnnnnnnnnnnnnnnnnnntggtgaaagtggcgacgtacttcgcgatgacgctaggagccttcgtgttctggcagtccatggacaagctccatgtctggatcgctctccgtcaagacgaaaagaaagagaggttggagaaggaagccgagatcagaagggttagagaagaattattgcagcagcaggccagtcagaagga

SEQ ID NO: 13989 - DNA, 249 bp, Glycine max
  Clone ID: 701155855H1
ggctgttaaaaaaaatgtgccaactatgctcatgtgaagtcccatcctttctcccattcattattacctcaacaagtccatatcataattaatgctccgtgagtgaatgagtcagtgtcttcatattatcactgcttgccagtgtcatggacttaagttgtgaaaatcaatgaatggttggtttgtgtaggatgctttgcttgaaaggatggggtgcacttactctgtgtataggaagaaaaaatcaag

SEQ ID NO: 13990 - DNA, 249 bp, Glycine max
  Clone ID: 701155857H1
gccatgccggttccaaaacatgttcctcttcgtcaggctcacccatgtcttccaaatttccatcatgattggaagaaggcagagcacgaaacaaattggtcgccaccatcttcgtcatctcctggcatcgctaactcgttgaacttcgaattcacagacgaaacataatcaacaagctcaagtagagtttgccgcttaacgtccttctctttgagatgcttgacaggatcatgaaatcaaacacaacac

SEQ ID NO: 13991 - DNA, 250 bp, Glycine max
  Clone ID: 701155858H1
ggaggattcacaaatgataatcatctctactgaccaaatctgaagaaaattgctttctctttggttcctagctcgcactctctctacgcacgcctcaacatcccttctctgctccattcattatgtctccgtcgttggatcttccccccaagggtggcttcagttttgatctatgccgaagaaacgcaatgcttcaaaacaagggcctcaaagccccaacctttctcaaaactggcaccactattgtcgg

SEQ ID NO: 13992 - DNA, 247 bp, Glycine max
  unsure (1)..(247): unsure at all n locations; Clone ID: 701155860H1
ggacttaacagagtagctcattccacaagaagatttcacgtgcaacaaaacgcagacctgccgtgagcgacaacactatgcaagcacagtgtccgtcactcccagattgcactcttcaagtgcccagattctcaatcagtgccactcctccnaattttgcatcttttctgagcccctccaaggttgcaatcaaattgagttgtgggattcacaaaccaatttgtaggagtaggtgtgatggtttaag

SEQ ID NO: 13993 - DNA, 247 bp, Glycine max
  Clone ID: 701155862H1
tatatcaatgttttaagaggggcggaaaaaagaagaaatagaagtgggctcacatgtatgacattggttcatgtggacatgatatagtacaaattgtttggttcaacctaaaataattggttttaattagcattaatatacatatttaaaagagtaatgatatataaatatttatatcataaacatacatttatatatttaacatcatattttctcttatcttacttttatcaattatatcatatat

SEQ ID NO: 13994 - DNA, 211 bp, Glycine max
  unsure (1)..(211): unsure at all n locations; Clone ID: 701155864H1
gatcactgattagacaactctcttccaaccaccatggccaatttcaaaactttcttcatttcccaaaccctaaccctaaccctccttttctccaccctagtggctgccacttaccaccacaaatcncncnaagtttgtcgttcgnggagaggngnccacttnnnttantggnttttgngannnngnnnngtgtanncccnngggggggggg

SEQ ID NO: 13995 - DNA, 259 bp, Glycine max
  unsure (1)..(259): unsure at all n locations; Clone ID: 701155865H1
tccattgcttcantatgacaattcaattanaaaccaagagntgtgagttttcatnnttatctcattaacaaactcatgtacagagtgagaaaanagtanctgtagatcctcctccaagtantttacacatatgatctanngntgcctgttctcgtngnttcttttctgctntagaaactccagccaatggagtnangtccccaacaattnntatnactagaaagcnccaaagtgaacaaatgaaatngtagatcagtgc

SEQ ID NO: 13996 - DNA, 247 bp, Glycine max
  Clone ID: 701155866H1
gataagcaaaactaatatatcactgaattagaaaaaaaaaatggggaagaagaagagaagtagggtttccgaagacgaggaaatcgaatctgacaccaaccctttcgatcaaaacgaacacactctctaccaggttcttggtgtggagaaaacagcatctcaacaggaaataaagaaggcatactacaagttggcattgaggctgcatcctgataagaaccccggcgatgaggaagctaaagcaaag

SEQ ID NO: 13997 - DNA, 249 bp, Glycine max
  Clone ID: 701155868H1
gagcaattccatgataatggtcttttggcaaattcctctgtgaagttgtaagctgacaaatctccatacttgatgaattgaagttgaaatgcagagtcactgagaattatatagcaaatgccaagtgaaatggagtccaataatgctgaatatgtgacactgggaggagaaggttcaactccaaagttagagaagatgagcaaggtttcaattatgcctctgatgttcttgatcttttatgaggtctcg

SEQ ID NO: 13998 - DNA, 221 bp, Glycine max
  Clone ID: 701155869H1
gaccatagcaagtagcaaggagactagttctgtattcagattacattgcaaaaatggcatcattcaccatgacagcttctatctttggctgcccagctgtcaccaaacggtcggcagtggctgcgcagaggagattactcgtagtgagtgctgccaaagctgaaggggaaaaggtcagttatgacaacaatgatagcaatggaaggaggaacttgatgttc

SEQ ID NO: 13999 - DNA, 255 bp, Glycine max
  Clone ID: 701155871H1
ccatttaatagatgcaaacaacatgctcaaaggttttacatttgattcctcctagtaatttttttgttgataatataataataaaaaaaattgtcatatactcacaattatttgacgttaaccaagagcaccaactcaataacaaagatctagcacaccatccaaaatgtgtcaatttggcaggaaagctgtttaacaaaagaaatgacagaccctatacaacttttttaaccgagtatccagaagtttggatac

SEQ ID NO: 14000 - DNA, 244 bp, Glycine max
  unsure (1)..(244): unsure at all n locations; Clone ID: 701155872H1
cctttgtcaattattttttctggttgctgagattttttttttggattctctatgtcactttagttgttcttcgaggacagtacccgcaacatacaagctggaaaacgtgtggggcttcacactgtgctggttagtcattggaatctttgttatttagtagaaacttacttgcttctagaaactattattggttgcatttaatttgtccaaatccaccaatgtactattttttttttgtacaang

SEQ ID NO: 14001 - DNA, 125 bp, Glycine max
  unsure (1)..(125): unsure at all n locations; Clone ID: 701155873H1
caattccactaaattgggccaacaaggaaaatgggattcactggtatctcttggggaaacctggtcccacctggaatggctnccatggccgttcgctttngtnaagtggccaggcaaaaggatgg

SEQ ID NO: 14002 - DNA, 251 bp, Glycine max
  Clone ID: 701155874H1
ggggttaaattttacttgacaaaataattctaaacccccctgtttttgagtactttgcatctgatcgtagttcagaaggaggagttctgatgaaaccagcagacctaatgcgggcagtggttcctgttttcctccatctgaatcccaccttgttagagatggatacttggaaggagaaaggaggccaggccatttacgctgccctccttccaaattttttatgctttttgatgtaaacaatgatggtctga

SEQ ID NO: 14003 - DNA, 250 bp, Glycine max
  Clone ID: 701155875H1
ggacgcacatagtaaggtgtgattcagcaacaacagcacacaaagacacagacacagattgttatcccaacgttttatcctttcagctttaagctcaccgaactaactcagcattcaacaacaatggtgatgctcatccgttgctcttgcttcttcgctcgccctcgcttctcacaacctcaattctacggcaacaacaccaaacccttactcccagggaaattagcttttctttctctaaaacctgaca

SEQ ID NO: 14004 - DNA, 254 bp, Glycine max
  unsure (1)..(254): unsure at all n locations; Clone ID: 701155876H1
gggacactgttcaaattactaccactcttcctcttctcctccttcaccatacgcaactctcttttgattatgttccctacaaagtgatacggttcggttccacccaaaacacaacatctctgccttattgatttggtcatgtgctactacctcaatcancttgtaaaataataagatagtagataacactaacttctttttttagttgctttcctcaaccaagtgattactactggctttgtttgagaaaaaag

SEQ ID NO: 14005 - DNA, 223 bp, Glycine max
  unsure (1)..(223): unsure at all n locations; Clone ID: 701155878H1
gaccaacaacacgangtattatttcattgatttntccctcttcgctctctctcagtgaccagagacagatgatgatggagatggcgaacgaaacgctgtcgttgcggcactcgcggcgttggtgctactcgcggcgagtgtggcggtggatgctcaggagaactcggacgtgaagacgctggtgaagtacaagcacgggaagaagtactgcgacaaaggatgg

SEQ ID NO: 14006 - DNA, 253 bp, Glycine max
  unsure (1)..(253): unsure at all n locations; Clone ID: 701155879H1
gttactgatgaagcatctttcaacaatattaggaattggattcgcaacattgaacaacatgcttctgacaatgtaaacaagatacttgtgggtaacaaggctgatatggatgaaagtaaaaggncctgtgcctacctccaanggtcaagcccttactgatgagtatggtatcaagttttttgaaaccngtgcgaagacaaacatgnnngtggggggggntcccttttnnagtancagggtntcncaggggggg

SEQ ID NO: 14007 - DNA, 250 bp, Glycine max
  unsure (1)..(250): unsure at all n locations; Clone ID: 701155880H1
tccccccacacacatacacaccctatctcacacactctgagtttgagtctgaggcacacacaaatactactacaacatcaacaaccactgtagtattctaattctaattctctttggtgcagttatgaccgaaaattcataaatgagntttncnanagtagagtngnngggtgcagttgnnngggnngngaanatngnacncnanttntntgnccgggggtnggtnncagggntnngtagttttatggtc

SEQ ID NO: 14008 - DNA, 244 bp, Glycine max
  Clone ID: 701155881H1
cagatctggttagtcctactggaattgaacgggtcctaaccgaaaaggaccttctggctgactcatattcagacctagaggcttctatccttgatgaaaaagaatttctcctattgaaggttatctctacctttccggagttatcttgcttaatatgctctatggttggagcgggtcggggaatagacggtgtttaaattatccataacccatctttcgggaagagttacttcatcccatttta

SEQ ID NO: 14009 - DNA, 248 bp, Glycine max
  unsure (1)..(248): unsure at all n locations; Clone ID: 701155882H1
ggaatttcagtggttgaacaagtcactggaagagatctcgtgctcaatcatttaagcatcccagctgcttgtttcactcatcctgaaatcagcatggttggattgacagagcctcaagcaagggagaaaggtgaaacagaggggtttgaagtaagtgttgccaaaacaanttttaaagctaacacaaaggctctagcagaaaacgaaggagagggactagccaagttgatatatagacctgacaatgg

SEQ ID NO: 14010 - DNA, 242 bp, Glycine max
  Clone ID: 701155883H1
tctatgcttttggattaggtccaatcattgtcatgtttaattggatctaacacatgtgaagacctgattaaataagattcacacaaccccgatctaaacattaagtatgtgcatgttgtacagtataacattttccttaatttcttagaagacacaagttcattttggacctgtttttcatgaagaggcccgaacgggagaccatgggccgaggaagtagcctaggtcagaagagagtgttt

SEQ ID NO: 14011 - DNA, 257 bp, Glycine max
  Clone ID: 701155884H1
ggaagaagatattagggtttttgagtgcggtgcggcgatcctagcactctcttctgcagctttcgccgacagcttcattcaccatggctgagcaaaccgagaaggcttttttgaaacaaccaaaagtgtttctcagctcgaagaaaactgggaagggaaagagacccggaaagggtgggaaccgcttttggaaatccattgggcttggatttaagactcccagggaagccatcgaaggaacctacattgacaagaag

SEQ ID NO: 14012 - DNA, 220 bp, Glycine max
  unsure (1)..(220): unsure at all n locations; Clone ID: 701155885H1
ggcgtacgcagcttnatccctaacgcgtgcatagcngagtcagagacagagacgcagccatggggcggagacctgcgaggcgttataggcaaattaagaacaagccataccccaagtcacgtttctgccgtggtgttcctgatcccaagatcaggatttatgatgttggtatgaagaagaagggtgttgatgagtttcctttctgtgtccatctggttag

SEQ ID NO: 14013 - DNA, 241 bp, Glycine max
  Clone ID: 701155886H1
gatcgaagcaaaaaatgaaaacccaaagtgcttctctcctctgtctttttctctctcttgctatccttttggctagtggcactgctgcaagtgcaactccaagaagcgcagtgccaagccaccatgtttcaacattcaacagaagcctttttccttccacttttctctttggaattggttcttctgcttaccaggcagaaggagcagcaagtgtagatgggagagggccaagcatatggga

SEQ ID NO: 14014 - DNA, 243 bp, Glycine max
  Clone ID: 701155887H1
ggcagttcaattccaatatatcccattctctctgtgtatttccctacctctcccttcaagatgcagatcttcgtcaagaccctcaccggcaagaccatcacccttgaggtggaaagctctgacaccatcgacaacgtcaaggctaagatccaggacaaggaaggaatccccccggaccagcaacgtctcattttcgccggaaagcaacttgaggacggccgtacccttgctgactacaacatt

SEQ ID NO: 14015 - DNA, 240 bp, Glycine max
  unsure (1)..(240): unsure at all n locations; Clone ID: 701155888H1
aacatagtcgttggagtaattgatagtggaatttggcctaattcttatagctttactgacgggggatttggtccaccaccacgacaattgagctgctataactttacttgcaataacaaaataattggagcaaaatattttcgcatncngggcgggtttgagaaagaggacatcataaatccaacggatacgtctggtcacgggtctcattgtgcatccactgctgctggaaacccagtt

SEQ ID NO: 14016 - DNA, 243 bp, Glycine max
  Clone ID: 701155890H1
gactgagaaaatcagataacctctgtcaacacctgtctgtggcgcgcgagagagaaatcggagatgtcatcaaaccctaacgatcctcgtcagccctcggcggcgagaccctacgtggcgccgcagatttcgccgcaggaccttccgatcgactacgccggcttcatcgccgtcatatttggcgtcgccggcgtcatgttcaggtacaaactgagctcttggctggcgctcatattctgcgcg

SEQ ID NO: 14017 - DNA, 241 bp, Glycine max
  Clone ID: 701155891H1
ggcatcaattcaaaatatatcatcaattataagcatgggtttgtggaacacaacgaatgcagtgtcttgccgctttcacaagtttggtgatgaccaaaagaatctggtcttccaaggtgatgccacgtcttcttccaggggcatagaactcacaaagttagacggtggaggaaaaccagtgggtggcagtgtggggagagtgttatactcttctccagtgcacctttgggaaagctctaca

SEQ ID NO: 14018 - DNA, 240 bp, Glycine max
  Clone ID: 701155892H1
gacattccaaaacacaaacacatacattgtagtatcacttttgtctcggaatttgttcttttgagttatggcaagcttaaaggttgcatgtgtggttttgatgtgcatggctgtgatgagtgcaccaatgatggtgcaagccgtgtcgtgcaatgatgtttctgtgaacctagcaccgtgcctatcttacctgatgcagggtggagatgttccagaatcgtgctgtagcggagtgaggaa

SEQ ID NO: 14019 - DNA, 243 bp, Glycine max
  Clone ID: 701155893H1
gaaggcatggaggttaacattgagaaaacgttgctaatgtgtaagagtttcatgaaagaggtaaagatatggggttgtttgaagcagacaggggtcagcctgagatacatgatggagtttggttccaaccccactcagaagaatttgctcacttctgcacagttccttcacaaagagcttcccattagaattgcaaggagagccattgagcttcactctctccctcatggcttgtctcacatg

SEQ ID NO: 14020 - DNA, 223 bp, Glycine max
  unsure (1)..(223): unsure at all n locations; Clone ID: 701155894H1
gacagcaaaacaattttcaaactcaattaccattaccataacctaaatctcctctttgtttccgagtcagagagcaatggcacgtaccaagcaaaccgctcgcaagtccaccggcggnaaggcgccgaggaagcnattggcgactaaagccgctcgcaagtcagctccggccaccggcggagtgaagaagccccaccgcttcaggcccggaaggtngttctaa

SEQ ID NO: 14021 - DNA, 187 bp, Glycine max
  unsure (1)..(187): unsure at all n locations; Clone ID: 701155895H1
ggagcgagcgagaaacagaaacctatnnttattttctctctttatatcactgagagtgattgtgagagtggtagcttttgtatccatgatatgaatatgangattatngattcgattatgcgtcnntntttnngtgngggttcntngganatttctcnagnccnaggntngttgngngtgcngtngc

SEQ ID NO: 14022 - DNA, 245 bp, Glycine max
  unsure (1)..(245): unsure at all n locations; Clone ID: 701155901H1
gggatcgcgcattcacaaataaggttgaagaggtcactgccggaagaagggagcaacaccatctttcattttccggcgatctcttgtttcttctatcatcaccgttttccggcgatccctaatcctcgcaaacagaaatgacgacatcaaggcgcatcncagacaggaaggtggagaagtttgagaagaacatcacaaaaagaggatttgtgccagacactaccactaagaagggaaaagactac

SEQ ID NO: 14023 - DNA, 241 bp, Glycine max
  Clone ID: 701155903H1
cttgactcacttggcaggccaagcaatgctgagtaacttgttgcccccatcatttatttgtgggtgctgtgatgaaaatagaaactgagatgatatcatagcctaattatgcttccatagaaatggaagactacgaaatgaagaagcaaacaatcaatggagataataagtggaagaatgacaaaggctagtgatttgaaatgaagatgatgccaccacgtgaagtggtaaggtggaggat

SEQ ID NO: 14024 - DNA, 242 bp, Glycine max
  Clone ID: 701155904H1
gacagcatatatatcaataatctattttatactatacctacattttgataattttctttgtagttgatagccatggctacccgtggaaagcttgaggttgacattgatctcaagtccaacgcagacaagtactggcaaacccttaggaattctactgaaatattccctaaggccttcccacatgattacaaaagcattgaggttcttgagggtgatggcaagtctcctggttctatccgcca

SEQ ID NO: 14025 - DNA, 239 bp, Glycine max
  unsure (1)..(239): unsure at all n locations; Clone ID: 701155906H1
ggaaggtaactcaactgttacgtctttcagctcttttatttctctctctggcgaatgaacccttctcttcctctccgatccgaaacccatcgcttctaacacccgcagatctccctttctcaacctcactccacaccttacaccaaagtcccccaaactttccatcgcttattattccctttttaccctttctctcttctnanntttntgcantggcttctcnngggtttctngggggg

SEQ ID NO: 14026 - DNA, 236 bp, Glycine max
  unsure (1)..(236): unsure at all n locations; Clone ID: 701155907H1
ggtttgattagggtttgtcattagcacttcttcttttcacactgccgctgcaacaatggcttcagagaagaaactttcgaacccaatgagggagataaaagtgcagaagctcgttctcaatatctctgttggcgagagtggagatcgtctcaccagagccgccaaggtgttggaacaacttagtggccaaaccccagtgttttccanngcaaggtacactgttcgttcctttggga

SEQ ID NO: 14027 - DNA, 233 bp, Glycine max
  unsure (1)..(233): unsure at all n locations; Clone ID: 701155909H1
tctcctctccccctccctccaatccttccagcncgtcgaagccatccactcctccgtcgtgcctcttcttccgctccaccgtgttgcttcttcattgtgagatcgggaagcctcaagcccgcggaggccctcttgccactgaaagaaggacccgttggaaccgacggcggcaaccatgactccacgtgcggagatggtaggtggggtcagtggatgaaaggaccactcgtgag

SEQ ID NO: 14028 - DNA, 239 bp, Glycine max
  unsure (1)..(239): unsure at all n locations; Clone ID: 701155911H1
ggaagaaacatggtggaaaggttagagagtgaganagtgtgaagcatggaagtgggtatgcctccaatctcagcttcaaagagaggaaaactcttggctgctggttacaccactctcgatgccattgctcgtgcctcccccacccaccttgttcgagatattgatgtttctgagagtgaagccacggaaattctgaatcttgcaagcaaacctagtgctttggagagaccgaatgggtc

SEQ ID NO: 14029 - DNA, 249 bp, Glycine max; identical to SEQ ID NO: 6176
  Clone ID: 701155912H1

SEQ ID NO: 14030 - DNA, 237 bp, Glycine max
  Clone ID: 701155913H1
ggaaaataggagttcccttgcagcccaaaacaccctgcatgaacttcatgttgttttggaccgaaggagccccttcttcttcactttcaccatcttcagtctgcaactgcgattttcatattttcaaatatggaatcataatactttataatttccccatctcctttttcatgtagcaaattccatcacaaagggatgttttaacgaccataatattcacttcagaacattttcgaa

SEQ ID NO: 14031 - DNA, 238 bp, Glycine max; identical to SEQ ID NO: 11678
  Clone ID: 701155914H1

SEQ ID NO: 14032 - DNA, 241 bp, Glycine max
  Clone ID: 701155915H1
ggagggaatagagcacaggacagttgaagtaaatggcataaaaatgcacattgcagagaaaggagaaggccctgtggtgttgtttctccacggcttccccgaactctggcactgttggcacaaccagattgtggctcttggttccctcggataccatgcggtggcaccagatctccgaggctacggtgacaccgatgcaccaccttcaatagacagctacacatgctttcatatagtggct

SEQ ID NO: 14033 - DNA, 243 bp, Glycine max
  Clone ID: 701155916H1
ggcgtgttttcatcattgtcgttctgaacggaaaagcactggcgcagtaccctgaggcttctcttctcttctcttctctgtcgtgagtcaccatggtgagggttagtgtgctgaacgatgctctgaagagcatgtacaatgctgagaaaaggggaaagcgccaagtcatgattaggccatcctccaaagtcattatcaaattccttttggtgatgcaaaagcacggatacatcggagagtttg

SEQ ID NO: 14034 - DNA, 244 bp, Glycine max
  unsure (1)..(244): unsure at all n locations; Clone ID: 701155917H1
ggcattatatttgagttcaaacaaatcaaagccatggccacctccaacttctctattgttctctccgtctccctagccttctttttagtgctacttaccaaggcacactcgaccgataccgtttctttcaccttcaacaagttcaacccagtccaaccanacattatgctccaaaaagatgctagtatttcatcctctggggtgttacaactcaccaaagttggcagcaacggcgtgcccacct

SEQ ID NO: 14035 - DNA, 241 bp, Glycine max
  unsure (1)..(241): unsure at all n locations; Clone ID: 701155918H1
ggttgtgtgaaagtgactcncacttagccttctcttctattctattctatattcggtgcnncntctatgttttctctaaatanatctaatcggaancttcaccatntaatcagagccntgagtanataagactcgtggatgtgncatctnctggnntcaacgttgaatatngtnattnttccttcctggtatnaaggaaatactctttcgntgaagcctgaatattannagagcancatcg

SEQ ID NO: 14036 - DNA, 204 bp, Glycine max
  Clone ID: 701155919H1
tggagaagtcagggaagagagtgttgcttacctccaacggcgacgacatttctcaaggcattgccttccatttggtgaagcaagggtgcaggttggttttgctgggagatcagaattccctgcggagcattcgcgaacaaaatcatggattccctctccctcgcagacagaagcaccgtgcaggtcgttggattggacatggag

SEQ ID NO: 14037 - DNA, 233 bp, Glycine max
  Clone ID: 701155920H1
gggtgagagctttcctgtgccagtctatctgtctttaattccaatcattggtggatgtgcacttgctgctgtgactgagctcaatttcaatatgatcggttttatgggggccatgatatcgaatttggcatttgtattccgtaatatcttttcgaaaaagggcatgaagggaaagtctgttagtggaatgaattactacgcatgtttatctattttatctcttgctattctca

SEQ ID NO: 14038 - DNA, 235 bp, Glycine max
  Clone ID: 701155922H1
gatcttgaaagaatttgctccatctattcccgagaaaaacatttcttgtttgactagattggaccacaatagggcactgggccaaatttctgagagactgaacattcaggtttctgatgtaaagaatgtcattatctggggcaatcactcaccaacccaatatcctgatgttaaccatgcaactgttggggagaagcccgtccgcgagcttatagctgatgatgcctggttgaat

SEQ ID NO: 14039 - DNA, 240 bp, Glycine max
  unsure (1)..(240): unsure at all n locations; Clone ID: 701155923H1
ggaagaaaacccgggaacgcaacctagaacaaaagcgaanagttgaagatggagcacgacgaagacgaagagccacctcttgctgttcagattcaagggaatgatgaatccgtttctcagcaatcttcttctgttggggtcactctcatcaccggttatcttggttcgggcaagtccactctagtgaatcatattttgaattcgcaacatnntnagaggattgctgtcattttaaatgag

SEQ ID NO: 14040 - DNA, 236 bp, Glycine max
  unsure (1)..(236): unsure at all n locations; Clone ID: 701155924H1
ggctgtatttggaatttttggagaagtttgagaggaagtttgttgcccaaggagcttacgatacacgcaatatcttccagtcactagatcttgcatggactttgcttcggattttccctcgcgagnttcttcatcgtattcctgcaaagactcttgatcagttctacagccgagatgccggaaactgatgatataatagcaaggtcttataccttagtcacatgctcaatcatctt

SEQ ID NO: 14041 - DNA, 233 bp, Glycine max
  Clone ID: 701155925H1
ggcacaagtgagtttgttgatcgagataactagaaacagtgtgatgaaaatggaggtccttgttttcttcgttgctacaattttggtagcatggcaatgccatgcgtacgatatgttccctctccgaatgaacactggctatggtgcccgtactccggaggtgaaatgcgcaagttggaggcttgctgtggaagcacacaacatctttggctttgagaccattcctgaagagt

SEQ ID NO: 14042 - DNA, 239 bp, Glycine max
  Clone ID: 701155927H1
ggcaaaagttagtagtagtgaagaaaatgaaagtccttgttttctttgttgctatagttctagcagcatggcattgccatggctcagaccatgaccatgaccatggccacacctaccaaattttccctctgagaatgaaaactggccatggtggccactacattccggaggtatcatgccaaagttggaggcttggtgtggaagcacacaacgtcattgactggaaaaccgttcctcaa

SEQ ID NO: 14043 - DNA, 213 bp, Glycine max
  unsure (1)..(213): unsure at all n locations; Clone ID: 701155928H1
ggagtgccctcatctcacctcactctttattntctcatcctttctcactctcacatcacccaacaacctcttacattactnnnnnnnnnnnnnnnngggttgaatttgacttggcaaaccctagcctgggaattcagagaactggttgctctgctattccgaatcggtttcgagtttgcagcattaggagcaaagtttgaagagggaagtgga

SEQ ID NO: 14044 - DNA, 236 bp, Glycine max
  Clone ID: 701155929H1
ggaagaagatattagggtttttgagtgcggtgcggcgatcctagcactctcttctgcagctttcgccgacagcttcattcaccatggctgagcaaaccgagaaggcttttttgaaacaaccaaaagtgtttctcagctcgaagaaaactgggaagggaaagagacccggaaagggtgggaaccgcttttggaaatccattgggcttggatttaagactcccagggaagccatcgaa

SEQ ID NO: 14045 - DNA, 240 bp, Glycine max
  Clone ID: 701155931H1
cacacacacatatatatatagacacactcatttaattttctctagcattattttgttccatttttagcggagaatgttctgtgaaatccgaacgcttttcttcaccaaggtaagtaatgaatagttatctgattccatatcacacatgcaatgaagacaagtaataagaaaaacagctgttatatattattctagtgtcagacaaattctgaatttgaatttatgctgccttttgtacta

SEQ ID NO: 14046 - DNA, 264 bp, Glycine max
  Clone ID: 701155932H1
aaccttatcagatttagcagctgcagaccttgataatgatggatcaatcaggtatgcctgaatgtttgtagtctcatataatatctttccttgttgttttgtcgcttgtataataaatggattaaagcagaatcagtgcattggttacaaagagagttataagaagtcaaggcctaattaaaagcaagagtaaacagaatattactagaagttcgtggctaaagcctgttttagtcactttgaaaataagaaattgtaggataa

SEQ ID NO: 14047 - DNA, 237 bp, Glycine max
  unsure (1)..(237): unsure at all n locations; Clone ID: 701155935H1
ggggggaggagagtcaacaagtgaatcatacaataattttcaatgattgatattcaaaattatgaaaaatctagagtaaaccactcatatttgtaattgtacctttgaaggatcaaatccanatccacccatttgcatcatacgttgtgtatcatctacagctgcataaaaaacagcacacatcacaacaaattccagcttacatggaaaaacgacaacatactgaaaagtagtaaa

SEQ ID NO: 14048 - DNA, 234 bp, Glycine max
  unsure (1)..(234): unsure at all n locations; Clone ID: 701155937H1
ggaactgaattgagtctcaacaacccagttgagtaactaagatggcgcaagtgaggaacaagcaagtgcttctaaaggactatgttaccggttttcccaaagaatccgacatgaatattgtcgaaagtaccataacattgaagcttccacaaggttccaatgatgtcttgctcaaaaatttgtacttgtcttgtgatccgtatatgaggaatctcatgaacaancccggggccc

SEQ ID NO: 14049 - DNA, 233 bp, Glycine max
  Clone ID: 701155940H1
gacatatttctctgtctatctgaaaaggaaaaatatttctatatttgttgttggttccagataatgatgtacttcatggaacttgcctccccgcacactgaagaagcaataaaacttgtggaggaagttggaggatttgaatggttgattcagaaatatgaaatagatggagctactgcactcaagctggatcttgcactcgacactccaattatcattgttccaaggaattc

SEQ ID NO: 14050 - DNA, 240 bp, Glycine max
  Clone ID: 701155941H1
gacaacaacaataacaatggctgcctcactacaagctgcagctaccttcatgcaacccaccaaggttggcatagcctctcgcaacctcaaatctacacaatacatttctaaggcttttggcttggaacctgctgcagctaaactcacttgctcccttcagcctgatctcaaagaatttgctcaaaaatgtgtcgacgctaccaaaattgcaggattcgcccttgccacctctgctctcgt

SEQ ID NO: 14051 - DNA, 233 bp, Glycine max
  unsure (1)..(233): unsure at all n locations; Clone ID: 701155942H1
gaccacactcatttctttttctctatcttttgttctgctcagctcgatctacctaccttggttcttctctgttctgttatttcagtgcagcagcagaaaatgaccatcctcattgagcaacctgcccttgagttacaagttgaaggcaacaatgtgcatgntgcagaaaccaatgagcttgtattggatggtggatttccattgccaaaggatggatatatggccccagaaat

SEQ ID NO: 14052 - DNA, 189 bp, Glycine max
  Clone ID: 701155943H1
gggctcaattccgattccgattccgattcatactcataaccctttcaatgctttattgaactaacgaggttttcttcacgcaccttgttttctctgcattgtttcgaattccatggaggagtcttcgtacaccggtcttcccactagccacttgctcggttcagttcctgctgtcataactgaagaaaa

SEQ ID NO: 14053 - DNA, 234 bp, Glycine max
  Clone ID: 701155944H1
gggattatattcttcaacacctaagtccttcgaggttagagatctgttttgtgcttttgaaaattttaatgttagattctgcttctaattttataacttgtcttaagcttctttgatttctttgaattaggacttgagcatggtttagggtttgtaacatgattaaatcgattttcatttccattatctttctttttagtttctgttgatttccaaatcgggtataaaatatga

SEQ ID NO: 14054 - DNA, 211 bp, Glycine max
  Clone ID: 701155945H1
agtagacgagtgattgcgttgcgattgacgacgacgaggaatcatgtcttccggcggcggcggtggtaagccgttcttctgccacgtgtgcagtcagaggattacgtgctccgatgagtcggaaccattctgcccgatgtgtatggaaagtttcgtagaagaatgcaaccctaacaatcccaaccctaatctcttccccgacagtgatgaa

SEQ ID NO: 14055 - DNA, 238 bp, Glycine max
  unsure (1)..(238): unsure at all n locations; Clone ID: 701155946H1
tccttacttagaaacatgactataaactagtaagacataataaaaagtttttacaaaaatgcatcaacaagtaacaatacctaccagtaacaagctcccctgaaggcagctttataactgcttgaactggtgccttatgagcctcccaccactctacagnttgcccattcctccaccgttttaaggtactacacaacagtaaagagtgcaagaatcacatcaaaattgaaacaaaatc

SEQ ID NO: 14056 - DNA, 239 bp, Glycine max
  Clone ID: 701155947H1
aatcaggcacatgtcgaccacactccacacaagctaaggtaggattttgtgctacgtgtcagtgtcgtgtgtcagttgataatggcagtgaccgagccattaaccactagattcaattcaagtatccactacggagagctacctagtgtggtcatcacaaatgaataatactttctcaacattagatgctcactctacagctatagccagccacaaattgataatatgcattgatgcca

SEQ ID NO: 14057 - DNA, 245 bp, Glycine max
  unsure (1)..(245): unsure at all n locations; Clone ID: 701155948H1
ggcaacgtactttgcaaaaaccctaaaccctctctctttctctctcggcgactctgcactcatcgatggcaacgcaatcgttagacgaagaaacaactaagaaagtcatacgacaggttgagttttatttcggcgatagcaaccttctcaccgatggtttcatgaggaatagtatcactgaaagcgaagatggcatgattagtttggcgctgatttgctcgtttaatcgaatgcgaaancacctt

SEQ ID NO: 14058 - DNA, 237 bp, Glycine max
  unsure (1)..(237): unsure at all n locations; Clone ID: 701155949H1
ggttccatagttcttgctctgggtgggtaaagatggaaggtgctagtagagtcttatgcttgtttctggnggcatttttgtggtttaatgctcaacatgcttttgnaagntgtgcnttgacatttgagttgcaaagcaaaattgctaaagccaaccaagagggaccttacctaggtttaatcataccaaattcnggtgaactagancctcttcntcagaatcntggctacncagcta

SEQ ID NO: 14059 - DNA, 160 bp, Glycine max
  unsure (1)..(160): unsure at all n locations; Clone ID: 701155950H1
gggataagcacaaaccttattcnacactcatanccttatcctgtntctttcnatggaagtcatttctgcttctagcttnaatcccancgctccgatgttcgnnccactcgnctatngnacggnggaggnttnntccgaccantggtgggacctcgntnna

SEQ ID NO: 14060 - DNA, 119 bp, Glycine max
  unsure (1)..(119): unsure at all n locations; Clone ID: 701155951H1
aggaggacgaggaggancaangggaagangaggatttnggaacagagtaccttatccgcccttagaaactgctgaggaggaggaagcatcaagtgattttgaaccagaggagaatggtg

SEQ ID NO: 14061 - DNA, 234 bp, Glycine max
  unsure (1)..(234): unsure at all n locations; Clone ID: 701155952H1
gaccactagtgctaaaatcatcaaccaaaaaggtaaacttctgcaacaaccatggttgcaatggcagcagcaacagcatcctcccagttgattttctcaaagcctcgntcancctcgcgtctntggcccttccaactatgtgtctttgacaccaaacaagtgctgtcaagttcaantggnaggngaangcatntggggggntctggagttagntgaatgggggtggnanaaanc

SEQ ID NO: 14062 - DNA, 245 bp, Glycine max
  Clone ID: 701155954H1
gacagatatatcacagaaaaggatgctagtgggtgctgtcagagttcaacattttctgagttcactcactttttctcgcttccaaccttccttttctctgcgagcattttccgctatggccgaagaatttgtgaagggcactgttcatcaaaacggcgtcgctgtcatcaccctcgatcgccccaaagccctcaacgccatgaacctagatatggatgtaaagtataaaagttatcttgatgaat

SEQ ID NO: 14063 - DNA, 85 bp, Glycine max
  unsure (1)..(85): unsure at all n locations; Clone ID: 701155956H1
atttactactcgtaaagactcctagaaagaatatgtgccgcaaaaaaaanancnnacganacacncaaaatcngccanccnanta

SEQ ID NO: 14064 - DNA, 233 bp, Glycine max
  unsure (1)..(233): unsure at all n locations; Clone ID: 701155957H1
gcacagtaagaacctaagagattcttgttccactaaattaanacatnatatacnaaagggagctgagttcagtttgcaaggctgaaaagggagttcagtttcccaagatccctcaacttcattcacttttgaatcacgaagtttcattttacaatagtataactactcaaaacattataagtactgggggaaatcatcatggacagagtgtcctgttcctgatatgaaaaaat

SEQ ID NO: 14065 - DNA, 269 bp, Glycine max
  unsure (1)..(269): unsure at all n locations; Clone ID: 701155958H1
ggcaggaacagaaggagaaaggaaaggaagagaagagaagagaaggagaaggagaagggtttggtagttggttacttagtttgtttgattaacgaacgggcggcactacaacgattccccacaattccagagggcttggtttattatctnccatcncattttaattttaatttccccanaaacccacggcttcnacctaaagttttcaattttcaaatccctttttccttttttccttttnnnattttaaaaatttcccaattttccgc

SEQ ID NO: 14066 - DNA, 233 bp, Glycine max
  Clone ID: 701155959H1
actgaggttaagtctgttgagatgcaccatgaggctctcacagaggctcttccaggtgacaatgttggatttaatgtgaagaatgttgcagtcaaggatctcaagcgtggttttgttgcatccaactccaaggacgaccctgccaaggaagctgccaacttcacatcccaagtcattatcatgaaccatcctggccagattggtaatggatacgcaccagtccttgactgcca

SEQ ID NO: 14067 - DNA, 224 bp, Glycine max
  Clone ID: 701155960H1
ggttccagttccacttagagccatgacagacatctccaagtcccttctctttacctttaccatcatcatcagctttggcttgtgcattctttatgcatctgcagaactccagagatttgcacactcttccaaacatgatggtgctcttagcttcttggtgcttggtgactggggaagaagaggtgcttacaaccaatcactagttgctttccagatgggaaagg

SEQ ID NO: 14068 - DNA, 225 bp, Glycine max
  unsure (1)..(225): unsure at all n locations; Clone ID: 701155961H1
gaggcgcggcgggatcatcacgagattgcnaaatgaagttcaacattgcaaatcccaccactgggtgccagaagaagctggaaatcgatgacgacctgaagcttcgggcattttgggacaagaggatctcccaggaggtccttggtgacgccctgggtgaggagtttaaaggatatgttttcaaaatcactggtgggtgtgacaaacaaggattcccaatgaagc

SEQ ID NO: 14069 - DNA, 234 bp, Glycine max
  unsure (1)..(234): unsure at all n locations; Clone ID: 701155962H1
gcaaaagagaaagaagcgcttatcgaactcggacggaagcactgagttgactcggagggagtggaaagtgttgttgcgtaatgtctggtggtatcgctcgtggacgcctcaccgaggagcgcaagtcgtggcggaagaaccatccccatggttttntcccgaaccggagacgctgcccgatggaaccgtgaatttgatgtgtgcaatgcactattcccgggaagactgggactg

SEQ ID NO: 14070 - DNA, 237 bp, Glycine max
  unsure (1)..(237): unsure at all n locations; Clone ID: 701155963H1
ccgctaaagaaaaccatgcttcctctgggctgctcatgaacccaacacgtgatgaaatatatcctcctttctgccagcttaatagcacttctagtcccatctgtccgcaactttctcggtctttctgatttggcctccttttccccttcttgaatcaaccgntgcatatcacaaagggcacacaccaatgcaggagttcccaaaccaagcagactgatcacatcatcaatgacaccc

SEQ ID NO: 14071 - DNA, 242 bp, Glycine max
  Clone ID: 701155964H1
aatatcatcaacatataatagcaatatcacaaactcaactttagaaggaaatttgaagtaaacacaattatcatagtgacttctatgaaactttatgtgagccataaattcatcaaatctcctattccattgcctgggggattgctttaaaccatacatggatttgtttaattttcaaacataatcctctttacctctgacttcaaatccctcaggttgtttcatcaatatcacctcatcag

SEQ ID NO: 14072 - DNA, 238 bp, Glycine max
  unsure (1)..(238): unsure at all n locations; Clone ID: 701155965H1
ggangtttggtggtntggtttagtgtcaaaatggcggcgagtagaagcactttacctctgatgaagtacttgagagtgcgcgtggacnctcttccccgcaacactcccttgaccctcacctccaacttgtngantcgccgcttctccgaaaaanaaaggggttgttttctcgacaagtccgaggtcacagatcgcgtcatttccngcgtcaaaaacttccagaaagtcgatccttcta

SEQ ID NO: 14073 - DNA, 234 bp, Glycine max
  unsure (1)..(234): unsure at all n locations; Clone ID: 701155966H1
tcctctcacaaacgcatgtttgcttattcaactttcaccggaatgtgggtgtaagccattggtctgtttgctcaagcaacctgcgctcctgagtgttgacttccaagaccgttcaatcagagattactcatcttgcacgttggtgggggtgccgttaaacaacgagcaaagttcaaaacaantaagtttcaaaatcacaaataanaaggcatttgatngannnagtgttcaagt

SEQ ID NO: 14074 - DNA, 233 bp, Glycine max
  unsure (1)..(233): unsure at all n locations; Clone ID: 701155967H1
tgcgacattcaccattgattgcgcgaancggtggaggacaagatcatggacattgcgtctctcgagaagttccttcaagagaggattaaggttggtggcaaggccggtgctctcggcgactccatcaccgtcgtacgtganaagaccaaaatcattgttacttccgacagcaacttctccaaacggtacctcaagtacttgnctaagaagtacctgaagaagcacaatgtgcg

SEQ ID NO: 14075 - DNA, 231 bp, Glycine max
  Clone ID: 701155968H1
ggatgcacaagtttgttgagatagctagaagcaataagatgaaaatgaaagtgcttgttttgtttgttgctacagttttggtagcatatgaatgccatggctcagactaccagaagttccctctccaaatgaaaactgggtttggtgggcaatacagcaatgaggtggcatgtgccagttggaggcttggcgtggaagcaaacaacgtagtcaagtggcaaactgttcctg

SEQ ID NO: 14076 - DNA, 230 bp, Glycine max
  unsure (1)..(230): unsure at all n locations; Clone ID: 701155969H1
aggcaataaaaggacatgcttgtatggggttagtactgcttatgtaattaccacaacaacctgtttgaggtactattcccacataaaatgagaagattattatttatatgcaattatgaatttgtgttgtagtttgttacttgtatcatttattacttttttatctcgtaatattacaggtattagcctaccttaatgatatttgttcatgntctaacgangntggttct

SEQ ID NO: 14077 - DNA, 230 bp, Glycine max
  unsure (1)..(230): unsure at all n locations; Clone ID: 701155970H1
ggagggggttgaacataatgaaccaaaatccagagtaaaaggcgaacagacggtgggagcgatgcgcatcatggttgctcccataaactaaatggctatgtctttacctcttcgtttctattcctccccgtctttctctctcacttctcttggggttgtgagaaaagtgctcgggactcttacaacagatattgttcaaccaangagtggaaattggcacttagcaaaaa

SEQ ID NO: 14078 - DNA, 231 bp, Glycine max
  unsure (1)..(231): unsure at all n locations; Clone ID: 701155971H1
gatagctgaagaatactgtgagagaaagaaaaatgttaggaaaagagtgctacacaaacccgccatcaatcctaaattcctctagtgcggttggccatgttatcaatatcggtggtgttaattcttacgtcactggttcccctctctccatcctcgccataattctagcctctgatatttttggatttaaaccaccactttnnnggaacattgcagacaaggttgcagcta

SEQ ID NO: 14079 - DNA, 132 bp, Glycine max
  unsure (1)..(132): unsure at all n locations; Clone ID: 701155972H1
aanacgacagaagggacctacangacagaagcttttgaaaatcaacatcattctcaagtgaggtcctgaacctaccagcagaagctnaaccaaatgaatcatgcaatgcactgtctaccttatcaaaatnaa

SEQ ID NO: 14080 - DNA, 233 bp, Glycine max
  unsure (1)..(233): unsure at all n locations; Clone ID: 701155973H1
ggnacaagtgagtttgttgatcgagataactagaaacagtgtgatgaaaatgaaggtccttgttttcttcgttgctacaattttggtagcatggcaatgccatgcgtacgatatgttccctctccgaatgaacactggctatggtgcccgtactccggaggtgaaatgcgcaagttggaggcttgctgtggaagcacacaacatctttggctttgagaccattcctgaagagt

SEQ ID NO: 14081 - DNA, 231 bp, Glycine max
  Clone ID: 701155975H1
ctccacgtaggatataaggctctcaacagtcccacaatgcctgaaacgtgagggcatgacattgatgtgcctgaaactgagttaaatggaatcctgcgtttgtcgaacacttgattggttggtccttgggcttcagtataggccgctgtaactgacacccctggtgcagtgatatcaggctgaatatattggacaaattaagattgttagatatctaacacattacaacag

SEQ ID NO: 14082 - DNA, 230 bp, Glycine max
  Clone ID: 701155976H1
gaaactaaagataaacaaaatttagaaacaaaaacatgttggtgaaggtgtacggtccaacctatggagcccccaagagggtgctggtgtgtctgattgagaaggaaattgagtttgaaacagtacatattgatctcttcaagggagagaataaggaacctgagttcctaaagctgcagccatttggatcacttcctgttattcaagatggtgattatactctctatgaa

SEQ ID NO: 14083 - DNA, 231 bp, Glycine max
  Clone ID: 701155977H1
ggatcacaaatctttcgctaacactcattaattgcaagaatggcacttcgttgcttggtgatgtccctttctgttctcttcactcttggtcttgcgagagaaagccatgccagagacgaagatttttggcatgctgtttggccaaacactcccattccaagttcattgcgagatcttctaaagcctggccctgcaagtgttgaaatcgatgatcaccctatgcaaattgaa

SEQ ID NO: 14084 - DNA, 249 bp, Glycine max
  unsure (1)..(249): unsure at all n locations; Clone ID: 701155978H1
ggaagagaaaagaaaagaatcgagtgattttcgtttgcgttgctgttgcgactgagtgagtgaagatggcgtgcttgcacgaccacagttgcgaagaccatgactgttcctctaactggtctctctacaaacacattcgacctctccaaggtaactggctttgaatgagtncaaatccaggaagtgttaagtcagttttcaaagcttgggaagagcgtctggattcttctggggttcacttggaaagca

SEQ ID NO: 14085 - DNA, 240 bp, Glycine max
  Clone ID: 701155979H1
gatttgggaaatgtacagctcatttctatatcgagtgatgccaaaaatttagttacatcagattttgagggtaaacatcttcaagtttggaagtgtgatttaaattcaggaaatgtgggtagaggtcctacacttcccataaggcatcctccattaattttagactgccacagtggttgcaataaagaagatgtagttgttttggcagttactggtagaggttctgcctatatatggaat

SEQ ID NO: 14086 - DNA, 233 bp, Glycine max
  unsure (1)..(233): unsure at all n locations; Clone ID: 701155980H1
catatatgataatattgttaacttttataataataattttaaaatcacattaatgataatttataattagataaatgtgtaaaacaattttacactatatgaccattaaactctattaaataagttatccttctgttgtattgtattttgaatattgcttatagattaattgttacaagtgataactannagatttaaggttttgtggttatgatattacttaatatatttat

SEQ ID NO: 14087 - DNA, 236 bp, Glycine max
  unsure (1)..(236): unsure at all n locations; Clone ID: 701155981H1
aacctcactttttttctctataaaatccaacctaaacactctaagagaaccttctcccgataaaccttttttcaccttcccctttgtttctcaacatcattccccaatttccccttctgtattgtttttcttcatttctctttttcaatccccgntttcccccttcttcgttttgtgtcttcataattcagatcnnaacttcaatctagggttcctggcttaacgaaatcaaatgt

SEQ ID NO: 14088 - DNA, 77 bp, Glycine max
  unsure (1)..(77): unsure at all n locations; Clone ID: 701155982H1
ggggnatatcancatacatanatctagatcntgtggtnattcgcatggtcatcatcaantgntnntagcttgcatgc

SEQ ID NO: 14089 - DNA, 231 bp, Glycine max
  unsure (1)..(231): unsure at all n locations; Clone ID: 701155983H1
ggcacaagtttgttgagatagctanaagcaataagatgaaaatgaaagtgcttgttttgtttgttgctacagttttggtagcatatgaatgccatggctcagactaccagaagttccctctccaaatgaaaactgggtttggtgggcaatacagcaatgaggtggcatgtgccagttggaggcttggcgtggaagcaaacaacgtagtcaagtggcaaactgttcctgcag

SEQ ID NO: 14090 - DNA, 221 bp, Glycine max
  unsure (1)..(221): unsure at all n locations; Clone ID: 701155984H1
tggttaataccttcattcaaactcttatcgatgatccaggcagtttggcaggacaacttgtagactctttttctgatattatatccaacaagaggctaagaagtggattctgtagtaaagctggggcatcaaattaagggtgatccggttattcaagtttgccatttgcttcaacttttccatttatcattttctgtcagaaaaagncncctgcngttttt

SEQ ID NO: 14091 - DNA, 226 bp, Glycine max
  unsure (1)..(226): unsure at all n locations; Clone ID: 701155985H1
ggaataaaaaaacctaatctaacccttcgctctgctctcgcttcaactattcacaccaagatggaagctgtttgtcttcactgtggcgacagaggctttccagaaacattggttttttgcagccagtgtaaggcttatgcgctgcataggtactgtttaaaggggcctgtgatttttactgatgctgtnacatggttttgtgaggnttgcaacaaagctgggggcc

SEQ ID NO: 14092 - DNA, 239 bp, Glycine max
  Clone ID: 701155986H1
ggaacaagcaaaattaagcacaaaagcccaaccctctctctcgctgttggtctctcctatttggcatacgcagatcgattacgaagtaatttcactgaatcttattgaagatgtttctcacaaggactgagtatgaccgaggagtcaacaccttttctcctgaaggccgtttatttcaggttgaatatgcaatcgaagccatcaagctgggatcaactgcaattgggttgaagacgaaa

SEQ ID NO: 14093 - DNA, 193 bp, Glycine max
  Clone ID: 701155988H1
agaaagatgagcgacgaggaaagaacgaagcaaatagcggagtgagcaaaagcctgaaagaaggagagagaatcgtgggcccaacgagacggcccgacggaaccctccgcaagcccattcgaatccgcgccggttacacccctcaagacgaagtcgccatttaccaacccaaaggagcatcctgaaaaaggag

SEQ ID NO: 14094 - DNA, 231 bp, Glycine max
  unsure (1)..(231): unsure at all n locations; Clone ID: 701155989H1
ggaagttgaaggcttgggaagagagacaagaaaacaaagccagacatggaggggaattatgggagcacaagacgttatgttccccgagcagattcttccttgagcttcctttacaactacaactacaccccttatccaggaatggaagtgaagcaacaancactgggctggcacaagttcatccatggaaaaagtgaactgcgggaaccaggagaagaagaagcgattaac

SEQ ID NO: 14095 - DNA, 232 bp, Glycine max
  unsure (1)..(232): unsure at all n locations; Clone ID: 701155990H1
ggaagcaaaaaatgaaaacccaaagtgcttctctcctctgtctttttctctctcttgctatccttttggctagtngcactgctgcaagtgcaactccaagaagcgcagtgccaagccaccatgtttcaacattcaacagaagcctttttccttccacttttctctttggaattggttctctgcttaccaggcagaaggagcagcaagtgtagatgggagangaccaagcata

SEQ ID NO: 14096 - DNA, 247 bp, Glycine max
  Clone ID: 701155991H1
aacaaatggacagtcaattttggttaaaaagcgaaattttcgcatttggtcagaggatgaattgagaaaaatggttacaccagagcttgtttgtgcttacgaaagcatgcaagctgacctctaccgtctaaaacatttaggaataactgaaacacaccccactaatatttcatctgcaatgagtcgtcttcctgatgaagcaatagcattggctgctgcatcacacatcgagagggaactgcagatt

SEQ ID NO: 14097 - DNA, 237 bp, Glycine max
  Clone ID: 701155992H1
gatataagatcgattatactcacaagttttgttctttcctagcaattcggcgcaatcgtcttctgcttcaaggaaggagagcttgttattctctatcaacaaggaaaatgtcaggtgaagaggttgttgttgcagctgagccagctgctgccatcccaggcgagcctatggatatcatgactgccttgcaacttgtgctcagaaaatctctggcttatggtggtcttgcacgaggcc

SEQ ID NO: 14098 - DNA, 233 bp, Glycine max
  Clone ID: 701155993H1
gatcacaacacaagttgaaacacaaagaagaaaaaatgggttcctctttgtggacttgtctgattttgttatcacttgcttctgcttccttcgccgccaacccaagaacaccaattgatgtgccatttggcagaaactatgtgcctacttggggcctttgatcacatcaaatacctcaatggtggttctgagattcagcttcatcttgataagtacactggtactgggcttcc

SEQ ID NO: 14099 - DNA, 233 bp, Glycine max
  Clone ID: 701155995H1
ggaagctgagaaaacaaaggtttagatcacctctgaaattctgctatggcctcaaccagatcactcattctttgtctgttcattcaactgtgcttctaccttctacccctctcattcgctcaatcccccgccaccgggtctgccgaagttacaccatttatggtcgagtgaagatccccagtgtgggaacaaaagattatattcttcctggaaaaatttcaaatgtcaaagtc

SEQ ID NO: 14100 - DNA, 252 bp, Glycine max
  unsure (1)..(252): unsure at all n locations; Clone ID: 701155996H1
ggaggtaggagaggaagagagaaaagtgaattggattgcatctctcgctttgtgttggaagaggggaatcgtagatctgannnnnnnnnnnnnnntaataataattttgtgatcagaattattgagctgaagaaaagacaatgggattgtgggaagcttttctcaattggctacgcagccttttcttcaagcaggaaatggagttatctctaataggacttcagaatgctgggaagacttcccttgtaaatg

SEQ ID NO: 14101 - DNA, 237 bp, Glycine max
  unsure (1)..(237): unsure at all n locations; Clone ID: 701156001H1
gtttttcagttttttctaactgtttaatttagcatgtggatgcctacattttttgaaattggttgtaaacaattctgactgcctaatgtttctgaattctttgtatgcatactctgtgttcttcgtttttgatgttatacagatataaaaaaataaataacttttggaattaatagctactacaatagtttgtcttggttactataggatattaaaaggtatatatataacncccca

SEQ ID NO: 14102 - DNA, 235 bp, Glycine max
  unsure (1)..(235): unsure at all n locations; Clone ID: 701156002H1
gacggacagaaatggcggcaggtagtgacggggtggacataaacgacgccgcttcgcccaaaacaaccaccagcaagagggggcgattcaccacctccaccgaatcacgccgacaaaccctaacatcatcttcttcacacactcacacccttcctatcgagctcatccaggaaatcctccagcggctccctgtgaaattccttttacaattcgatncgtatgtaannctggaaat

SEQ ID NO: 14103 - DNA, 234 bp, Glycine max
  Clone ID: 701156004H1
gacaccaacgccaaaacaaacccactaagatggcttcctttgtatccttcctagtgctgcttcttgcagcccttatcctcatgcctcaggggcttgctacttactacaaaccaattaagaagccaccagtgtacaagcctccagtgtacaagccaccagtgtacaaaccaccggtttataagccaaaaccaccggtttacaagccgaaaccaccggtttacaagccaccatata

SEQ ID NO: 14104 - DNA, 231 bp, Glycine max
  Clone ID: 701156005H1
accattgtcaaatgctcttacaatgctgtggctctcggtccgagcttaaaatcccaatatgcttcagcacagatgtcaccaattcaacccttgcacttgcttgttcctacaaattatcctaattgttcccccatactcctagacaagtttccagtcgaatccagtaaggagaatgaagatctttctgtcaaagcgaagtcaaggtttagcatatccttgcgaagtttatca

SEQ ID NO: 14105 - DNA, 211 bp, Glycine max
  unsure (1)..(211): unsure at all n locations; Clone ID: 701156006H1
gattgctcagtggcgatcntccttgttngtgaattctattctattctattctatcagcactttcaagtttcaagacagcaagcatatcatacaaaccttgtcccttgtcattatactttcactgaaatccaagtcagagtcaattctcagtgtctcacttcccaaaattcttcacccttttggccttttttcccattcagaaaatatnttc

SEQ ID NO: 14106 - DNA, 189 bp, Glycine max
  unsure (1)..(189): unsure at all n locations; Clone ID: 701156008H1
gatcgaagcaaaaaatgaaaacccaaagtgcttctctcctctgtctttttctctctcttgctatccttttggctagtggcactgctgcaagtgcaactccaagaagcgcagtgccaagccaccatgtttcnacattcaacagaagcctttttccttccacttttctctttggaattggttcttctgctt

SEQ ID NO: 14107 - DNA, 230 bp, Glycine max
  Clone ID: 701156009H1
aatgaaggaggaagattttattgagagacttatgtacaggtttgatagcaagagattttgcagagattgtagaagaaatgttattcgagaatacaaggaactaaaagaactgaagcgcattcgcagagaacctcgttgcaccagctggttttgtgttgctgactctgcctttcaatatgaggtatctgatgactcagttcaagctgattggcgtcagacatttgctgatg

SEQ ID NO: 14108 - DNA, 243 bp, Glycine max
  Clone ID: 701156011H1
gagagaagagaagagagatctgagagaagcagagctgaagaggtgaagtgaagatgatgtccggaaaatatacgtcgattgacgcgcagagacttcagggatctgttcctgccgttccagattcacgacccgccaccgtcaatttcgcagattcaaatcttcagacttttcctccttctggagctcagggcaagatcaccgctgcttccgggcctcctcgtgacgctgatgattcattttcaa

SEQ ID NO: 14109 - DNA, 231 bp, Glycine max
  unsure (1)..(231): unsure at all n locations; Clone ID: 701156012H1
ggtgatttcattgcataatccattgactagaaatcccatattttccccccacattaactcacccaacccctctttctaaaaggcctcaaggatacactccggacttaattacgttattttgttagggtcacngctacgagatattctaaacttgtactgaaaaatatggagggaaaagaagaggacgtaagagttggagccaacaggtacggagagaggcagccaataggg

SEQ ID NO: 14110 - DNA, 204 bp, Glycine max
  unsure (1)..(204): unsure at all n locations; Clone ID: 701156013H1
ggatcacttcatagtaagcactatagaaaaaangnnattcattcatctatggnnacccttattgntcccagcaaccantctccccaagaagacgctgaggctntcagaaaggcttttgaaggatgggggactgaagggggaactgtcatagtaatattgggtcatagaanngntcccaagaggcagcaaatcagaagagtctat

SEQ ID NO: 14111 - DNA, 228 bp, Glycine max
  unsure (1)..(228): unsure at all n locations; Clone ID: 701156015H1
ggcatcaattcaaaatatatcatcaattataancatgggtttgtggancacnacgaatgnagtgtnnngccgctttcacaagttnngngatgaccnnaagnatcnggtcttccaagatgatgccacgtcttcttccaggggcatanaactcacaaagntanacggaggaggaaaaccagtgggtggcatgtgggganagtgntatactcttntccantgcacngtngg

SEQ ID NO: 14112 - DNA, 229 bp, Glycine max
  Clone ID: 701156016H1
cctctcttagatagttctggaaacctcattgggataaatacagcaatatattccccatctggtgcatcctctggtgttggattttctattccagtggacactgtaaatggtattgttgaccagttggtgaagtttgggaaggttacaagacctattttagggattaagtttgcccctgatcagtctgtggagcagttgggagtaagtggagtgctgtctagatgctcct

SEQ ID NO: 14113 - DNA, 238 bp, Glycine max
  Clone ID: 701156017H1
tcactaatccaacacactactttttgccaaaatctcaaagtgctgcagattacaaggcagcaagtagagctctggacttcttctttggttggtattctgatccggttttctatggtgactatccggagagtatgaaatcttcagtaggttctaggctcccaaaattcacaaaagctgaatctgaaggtctaaaaaattccatagatttcttggtgtgaattactacaccacttattat

SEQ ID NO: 14114 - DNA, 237 bp, Glycine max
  Clone ID: 701156018H1
taccactaaatgaaaggctgcgtgttactgttgacatcacaaaattcaatatgttcgtcattaatttataatattcttccttaacccctgttctgaaagtaaagcatgattagtgaacctgagtaaatcagctttctgcgtcaaaatagtgctcctgatgctaattaacaaactttaaagaaacatgcaagtctctctcccatgatggtggaaaaggaaagctgaaaatttcgagaa

SEQ ID NO: 14115 - DNA, 232 bp, Glycine max
  Clone ID: 701156019H1
ggtggaggtgaaaaagagtggaaatggcaggtgcaggaggagggtatggggacgcgaaccagaggatagactacgtgttcaaggtggtgctgataggggactcggcggtggggaagtcgcagatactagctcggtttgcgaggaacgagttcagcttggactccaagtccaccatcggtgttgaatttcagacaaggaccttggtcatagatcacaagaccgttaaggctca

SEQ ID NO: 14116 - DNA, 219 bp, Glycine max
  unsure (1)..(219): unsure at all n locations; Clone ID: 701156020H1
tatgacaacaatgtagcaattcccgattcttacatcattgatatttgataccactccaataacaaaacaaatcagcttgaaaatgtctacatacacagttaaacaaggatttaatgcttgtaacatgtatnatcttctatatcaatatttctaaaggnagaagttccaccataaataactatncgtcattagcagatcaggcacaaccacacatttagt

SEQ ID NO: 14117 - DNA, 234 bp, Glycine max
  Clone ID: 701156021H1
ggggagaggagagagagtgggagtcagagagcaaagtaaagcagccgattggactttgagtccgtttgttccttggttttgttttcttcagatatttttctttttttcgttttttctgtcgtttcaccccaaacagatattttggtatccaaacagacctcatctctacattttttctttaccagcagaacagaagaaacacgttcgttgcacttcgttcccatggcggtctcc

SEQ ID NO: 14118 - DNA, 224 bp, Glycine max
  unsure (1)..(224): unsure at all n locations; Clone ID: 701156024H1
gtgaggcgatatgcccatgggttgaggaagctcataagaattggccaaggcccagagaaactgttacgacaatcatcaaagttggctattaggcctgatgggtttgaaggggacagtggagatgcagttgaagcacatcaatggaaatgcgttcnacngtggctggtattagaatttttgaagatgtttctgatcacaagaatggtaaggctgttcttgcaaag

SEQ ID NO: 14119 - DNA, 221 bp, Glycine max
  Clone ID: 701156027H1
gaatcacaatgatctcaatcacttctactgaattgaactacttagtcttccgttacctccacgaatcaggttttactcattctgcatttgcattcgggtatgaagcagggattgataaaaacaaaaatgatgatagtgtggttccaccgggtgctcttgttactttcatacagaaaggaattcagtatcttgagctggaagcaaacttgagtggtagtgat

SEQ ID NO: 14120 - DNA, 223 bp, Glycine max
  Clone ID: 701156028H1
gaagggtgaatgctgtgaagattttcccagacgcccgaaatggactcggatgaatgcacaaattgataaaagaacatattttggaaacattgggttgatttaaaatagaggaaatgaatcctgagccctagcatcacatgaccataaaaatttgacacttgagtgtccgcataggtgcatgcacgaccagttttgcataaagtttccaaatcatcatttttgc

SEQ ID NO: 14121 - DNA, 206 bp, Glycine max
  unsure (1)..(206): unsure at all n locations; Clone ID: 701156029H1
ggaccacgattactanccaagtgaaaaagcaattaacctaagcatatatagcgtgtaagacagtgagaaaaaaagtgttgtgtagagagaaatggctaggtggtgcatcttggtggttcttgcccttgtcgtggttgcaagtgccagaaacatgcccaatgacgcaggtttggaggaccagaagaacttcctcgggtatgggttct

SEQ ID NO: 14122 - DNA, 241 bp, Glycine max
  Clone ID: 701156031H1
gcacacaaactttattacagttgttgtattgtaattaagcaagaatattaggcaatggagtcttctagaacttcaactactcttgctctttttttaaccatcaatttgcttttctttgtcatggcaagtggctgctacacttgcacacagcctaagccaaaccctatcccattcccttaccctaaccctagtcctgccgcgaagagctgccccagggacgcacttaagctcggagtgtctc

SEQ ID NO: 14123 - DNA, 234 bp, Glycine max
  Clone ID: 701156032H1
aaagagacccggaaagggtgggaaccgcttttggaaatccattgggcttggatttaagactcccagggaagccatcgaaggaacctacattgacaagaagtgccccttcactggcaatgtttccattccgtggccgtatcctggctggaacatgtcacagtgctaagatgaacaggactattattgttaggaggaattatctccatttatcaagaagtaccagaggtacgagaa

SEQ ID NO: 14124 - DNA, 234 bp, Glycine max
  unsure (1)..(234): unsure at all n locations; Clone ID: 701156033H1
ggcagttgtattgttgaacaagggtttctctgtctgcttcttcactttctctcgtttcaatcgaaaccaaaacaaaaacatgggcagaaaattcttcgtcggtggcaactggaaatgcaatgggaccactgaggaggtaaagaagattgttactactttgaatgaggctaaagtccctggagaagatgtcgtagaagttgttgtgagcccnccttgtgtncctcctgttgnaaa

SEQ ID NO: 14125 - DNA, 234 bp, Glycine max
  unsure (1)..(234): unsure at all n locations; Clone ID: 701156034H1
gtggtcagggcactactccagcgtatcttaagagccgcattccattgagaaatttggatttggttaatggtacttgttgcatcagcatagggaatcaaaatttccagaaatggcagataattctctattttgtgaatatcctgatgcagacaganaanataaaataaatttattgacaaaaaatgacaacaacttatcagcatagctagcaatttgatgatttaccantagtgt

SEQ ID NO: 14126 - DNA, 229 bp, Glycine max
  unsure (1)..(229): unsure at all n locations; Clone ID: 701156037H1
gaggagcaagaagaagaaacaacctcaaaatccctttcttgtgttcgattagatattgccttcacaccagagtctgagtcctctgagactttccttcagtccttcaccttctttctctctaggcgcaaaacctcgtactgtttgtggcggctaangntntcagggaaaggggcgaagggttgatcacaggcaaaacctccgccaccaacaacaaagacaaggacaagaa

SEQ ID NO: 14127 - DNA, 228 bp, Glycine max
  unsure (1)..(228): unsure at all n locations; Clone ID: 701156038H1
ggaggaaaaggaaaggaaagggaagccaaagcgaaaccctaaccctaacggagagatggcggagcacttggcatcgatattcgggacggagaaggacagggtgaactgtccgttctacttcaagatcggcgcgtgcaggcacggcgaccggtgctcccggcttcacacgaagcccacaattagcccaacgttggttctgtcgaacatgtaccagaggcccgcgnnncc

SEQ ID NO: 14128 - DNA, 226 bp, Glycine max
  unsure (1)..(226): unsure at all n locations; Clone ID: 701156039H1
gacctgatgatgtatgctcacaggttggtttatgtttcaaaagggctaaatcagagagcaatggaattgagatggtgaccgaaaagggacaaagagagttatcagctaaagatactgctttgtgcacttcctgtcagatgcttgtggtttggattcagaatcaactaaaacaaaagaagaccaaggagatagtattcaactatgtaaatcagctntgcgagagctt

SEQ ID NO: 14129 - DNA, 226 bp, Glycine max
  Clone ID: 701156041H1
ttatcgaggcaatagatctaaatatctgggaagccatagaaatagggccttatatacccaccacagtagaaagagtttcaatagatgatagttcatcaagtgaaagcataaccatagaaaaacctagagatagatggtctgaagaggatagaaaaagagtacaatacaacttaaaagccaaaaacataataacatctgccctaggaatggatgaatatttcagggt

SEQ ID NO: 14130 - DNA, 223 bp, Glycine max
  unsure (1)..(223): unsure at all n locations; Clone ID: 701156042H1
ggcacattgaaatctgaaccttccggatttcgttttgctttgttcaggtagccagccagtcatggtgctcttcaatgtttcacgcgtagagaccactcccttcgatggccngaagcctggaacctctngtctccgcaagaaggtgaaagtgttcgtgcaacctcattacctccataactttgttcagtcnncnnntcaatgcattaactgtggaaaaagttag

SEQ ID NO: 14131 - DNA, 217 bp, Glycine max
  Clone ID: 701156043H1
ttgtttggaagacctgaaattgttgtaacacctgagggggcagtctctaaggatgaaaacatcaaaattagctttggtggtttaaagaagcttgttttagaggctgtgacatttggttctttctctgggatgttgagagctatgtggactcaaggtaccattttgtgttgaactgagtaaatcttatatgtgtatccttttagatcccaccaggtgg

SEQ ID NO: 14132 - DNA, 152 bp, Glycine max
  Clone ID: 701156046H1
ttaatagtaaaaattacacttttttctttattaatactaggtcacaaaaaatttaatgacgatttttaaaaaattatatataaattatttagtgataactaattaatgttattttttgttgtagtgatatttactttaaatgtaacttattt

SEQ ID NO: 14133 - DNA, 205 bp, Glycine max
  unsure (1)..(205): unsure at all n locations; Clone ID: 701156047H1
tcccaattgtatataaanttangttatntnnagtngatcaatgacatagtgttacaaagcttggtacatgaaataaatgacattatctctcatctatactctcnctatataactaactttccctngcnaccttcatgtttctaggctctagttgnctaggtctacaaggacaanctngtaaggnctcttcnattatnngatcnac

SEQ ID NO: 14134 - DNA, 231 bp, Glycine max
  unsure (1)..(231): unsure at all n locations; Clone ID: 701156048H1
gatgaaggtatagctaaggattccaagaaagctgaagatgggaaaactaagcagtcagagttcaaatctgatgaggcagaggataaagctactgaaggtaaggatgctgcagaagaaagcaatgcaaacaaagagcatactgaagaaaaggaaagttctgatgacaaatctgaggtagataaagaacaaaaaaaggatgtcctganagtggaaatgaggctaagaaggatg

SEQ ID NO: 14135 - DNA, 229 bp, Glycine max
  unsure (1)..(229): unsure at all n locations; Clone ID: 701156049H1
aatgctggagttctcaacgagctgttagtggaagctctatttcctaactgtgcacatgcattttatgattataacttatgaattccgcagcttaaaatttttaccctctcagtaactaaattgtttctacaggaagacatccgtggttttcctaggaatagaaccgtgttgagtggagatgtggatttagtagttgaatcaattgaanntccttgtcnnaacaaagaat

SEQ ID NO: 14136 - DNA, 231 bp, Glycine max
  unsure (1)..(231): unsure at all n locations; Clone ID: 701156050H1
attaaaaacaattacaggatgacaaccgatacagngctgggcgaggtgctcacattaatcttaaacgtgcagaacatgctagaataactataggcaaaattccaggtttgctttcatgaatgnctatgaacctatccattattgacagtgccatttgaacttctgatgacagtatgttttctttcagctatggttgacaatcttataaacaaaacattagccgggaagatg

SEQ ID NO: 14137 - DNA, 242 bp, Glycine max
  unsure (1)..(242): unsure at all n locations; Clone ID: 701156051H1
gaaggatcagcagggagaattaggtttttagggtttacaccgagcagccacacctcccgcagcagccatggttctcaaaactgaactatgccgattcagtggtgccaagatctacccaggaaagggcatcanatttgttcgtggtgattctcaggttttcctgtttgcaaactcaaaatgtaagaggtatttccacaatcgcctgaagccttcaaagctcacctggactgcaatgtacagaa

SEQ ID NO: 14138 - DNA, 229 bp, Glycine max
  unsure (1)..(229): unsure at all n locations; Clone ID: 701156052H1
gaaaaaaacgggcacttcacagcgtatttgaatggaacatgctacttcagcatagagtcgtatgagctaaagtacaagtccaccatcaagggagtgatctccaagggcaagttgtcgaagctgaaaggtgttagtgtgaagattgaagtgttgtggctcaaaatcgtggagctaactcgcgacggcgatgacntccaattctcggtgggtgttgcctctgctggcttca

SEQ ID NO: 14139 - DNA, 225 bp, Glycine max
  Clone ID: 701156055H1
gacactcattccatttttacctttctctctcgctcgcaaacgcaaataataaaaaacaaggttttagccatggcatcgaagcggatcttgaaggaactcaaggatctccaaaaggatcctcctacctcatgcagcgccggtcttgttgctgaagacatgtttcactggcaagcaacaattatgggtcctccagacagtccttatgctgggggtgttttcctagtc

SEQ ID NO: 14140 - DNA, 232 bp, Glycine max
  Clone ID: 701156056H1
gactgaaggtcgtaagcatgaattgttggttactaatgcagttgcaacaaagggaggagccagttctgcggcttctacctcaaaatctggatctgggcatgaacttctcctttttgaggccctacgtgaaggtttggaggaagaaatggagaggggtccttgtgtatgtgtcatgggtgaagatgtaggtcattatggaggatcttataaggtgactaaaggccttgcccca

SEQ ID NO: 14141 - DNA, 222 bp, Glycine max
  Clone ID: 701156057H1
gagtgcacaagtgagtttgttgatcgagataactagaaacagtgtgatgaaaatgaaggtccttgttttcttcgttgctacaattttggtagcatggcaatgccatgcgtacgatatgttccctctccgaatgaacactggctatggtgcccgtactccggaggtgaaatgcgcaagttggaggcttgctgtggaagcacacaacatctttgtgctttgaga

SEQ ID NO: 14142 - DNA, 219 bp, Glycine max
  Clone ID: 701156058H1
ggggacccctttattgctttgtgcatcttcatctccttcttcgatcatcggtgatctttttctttgtttaaagcgagtttcgaccgattgttcataccgtaatctcgtttaatcaccattaaaataaaattcaacagattgtttctattgtaatctcacttaatcactgtttaaatgaatttcaaccgatcgtttgtgctgtaatctcattaatcactg

SEQ ID NO: 14143 - DNA, 219 bp, Glycine max
  Clone ID: 701156059H1
ggtttgtagtaatcatcaactcactcagttgccgtaggttgtcgtgatccatcacaacactttgtcactgaaattcagaaaaatggcatcagcaatgtttcgtaggaacatcatcacccactactccaagtttgcttcttctttgtcttcgttgcctcgccattcctcaatctacaaccctctctctatgtctgtttcttcattcatagcgaaagtgtt

SEQ ID NO: 14144 - DNA, 223 bp, Glycine max
  Clone ID: 701156060H1
ctcagagtactgttattgaaaggcaaaggacaatagagtatacctgaagccctagagccctatccccttcaacacttttgaagtcattgacaatagcaattcccaactgcaatgtgatttaacaacaacattaataaccatttttatttgacatattatcatattcatatccaacaaaatgtcatgaagaatatattacatactccagctatgctgtatagga

SEQ ID NO: 14145 - DNA, 228 bp, Glycine max
  Clone ID: 701156061H1
caagttggtaatttttaccaatgaatccaatattgaacgttggaagaataagaggcaagtagctgtggactcgaaaattggacgtctaaataattttattgtgaaagtgaaggttccagttcaggtttttatagcttgtggggtaggtagtaaatcaggtaaagtaaacaaaaaggaagatgatccttttcgcaaacccaaaccagggatgtggcatcttatggagca

SEQ ID NO: 14146 - DNA, 202 bp, Glycine max
  unsure (1)..(202): unsure at all n locations; Clone ID: 701156063H1
gtcttaatttgtttcttgttttctctgtcgtttcgttcccttaatctttgatctctgagttacaagttataacaaaagaaataaacaacacatataaatatttgtaagaaaatatatatatgatcatgggttttcttcacaaactatgggacgaaacgttggcgggtccagcaccggaaacnnntctggggaagctccgaaa

SEQ ID NO: 14147 - DNA, 228 bp, Glycine max
  Clone ID: 701156064H1
ggcacaagtgagtttgttgatcgagataactagaaacagtgtgatgaaaatgaaggtccttgttttcttcgttgctacaattttggtagcatggcaatgccatgcgtacgatatgttccctctccgaatgaacactggctatggtgcccgtactccggaggtgaaatgcgcaagttggaggctgctgtggaagcacacaacatctttggcttgagaccattcctgaag

SEQ ID NO: 14148 - DNA, 231 bp, Glycine max
  unsure (1)..(231): unsure at all n locations; Clone ID: 701156065H1
gaactgtgaagtgtatttggtcactgacctatcttggtagagatttgaagtttaaaccttcaaattaatcaaaccattttaatttgcctatagattctgagtcactgctgctatggcgctacgcgtacttcttgtgttggggatgttgctgatgttgtgcctgttaaggtttcatctgatccaaagatagaagaaganatactggaagcagaagaagaactgcanttcccg

SEQ ID NO: 14149 - DNA, 231 bp, Glycine max
  unsure (1)..(231): unsure at all n locations; Clone ID: 701156066H1
ggcacaagtttgttgagatagctagaagcaataagatgaaaatgaaagtgcttgttttgtttgttgctacagttttggtagcatatgaatgccatggctcagactaccagaagttccctctccanctgaaaactgggtttggtgggcaatacagcaatgaggtggcatgtgccagttggaggcttggcgtggaagcaaacaacgtagtcaagtggcaaactgttcctgcag

SEQ ID NO: 14150 - DNA, 240 bp, Glycine max
  unsure (1)..(240): unsure at all n locations; Clone ID: 701156067H1
gatagcagtagtgagtggagancganaggcataacataacataagaccacaaagctgtgttgcgcgttgaagagcgaagaaggaagaagatgtcgggtatgggagatgggnacgtgggcaccgcccaagacncngtgangattcgacggttggagaagcagananaagcggagcngcgcaaaatccaagagctgaaaaccaagtcttgggccgccaaggaccaacccggtcttctccatt

SEQ ID NO: 14151 - DNA, 230 bp, Glycine max
  unsure (1)..(230): unsure at all n locations; Clone ID: 701156068H1
aagggtactcttaagatcattccaatactctactggaggatccccatgaatccttcgttccctaacaagggaagtccaccaatagagagcatacccttgaaagctaagggtagccaatggaacttttctctcttcgctaatatgatggcaagcaaagagttgttcaaccttcattcccaatctaagtaggcnccaacattatctttttcatggaaatatgggaggctaat

SEQ ID NO: 14152 - DNA, 71 bp, Glycine max; identical to SEQ ID NO: 6746
  Clone ID: 701156069H1

SEQ ID NO: 14153 - DNA, 222 bp, Glycine max
  Clone ID: 701156071H1
gcacaagtttgttgagatagctagaagcaataagatgaaaatgaaagtgcttgttttgtttgttgctacagttttggtagcatatgaatgccatggctcagactaccagaagttccctctccaaatgaaaactgggtttggtgggcaatacagcaatgaggtggcatgtgccagttggaggctggcgtggaagcaaacaacgtagtcaagtggcaaactgtt

SEQ ID NO: 14154 - DNA, 220 bp, Glycine max
  Clone ID: 701156073H1
ggaatggtgagcgtcaccaaccaaagttctctctcccaatgtcttggtcgtcgacgcaggaggcagtagtagcagattgtgaagaagaacgaaactggctggaccttccgcgagacgtggtgtgcacgattttccagaagctgggcgcaatcgaaatcctgacgcgcgcccagcgctgtgctccgtgtggcgcggcatctcgaaggagtccttcctgtgg

SEQ ID NO: 14155 - DNA, 228 bp, Glycine max
  Clone ID: 701156074H1
gaacgcagccaaagaaaagaaaatcctcaattttctgagcagccaaacactccctctctgtctctcgaaaattctcagtttgcagagaaaatctgaatcatgtcgtggcaagcgtatgtcgacgatcaccttctgtgtgacatcgaaggtaaccacctcactcacgctgctatcatcggccaagacggcagcgtttgggctcagagtaccgacttccctcagttcaaa

SEQ ID NO: 14156 - DNA, 226 bp, Glycine max
  Clone ID: 701156075H1
gtgaatctgatgtggtatttgtgccattcttttcctctcttcgttataaccggttctcctccaaaactaatccacatgagaagaggagcatgaacaaggtgctgcaagaaaaattggtgaagtatgtgacggaacaagaggaatggaagaggtctggggggaaggatcatgtgatcgtggctcaccatccaaatagtatgttggatgcaagaatgaagttgtggcc

SEQ ID NO: 14157 - DNA, 234 bp, Glycine max
  unsure (1)..(234): unsure at all n locations; Clone ID: 701156076H1
ggacgcataggtaacgaatttaccgttacctgtggcgtcgcgtctcagatccctctctctttggagagaacgccccaacaatctaaatctgcatcgnnnnnnnnnnnnnnnnnnnnnnnatacttcatttatggggacctattagctacaatacttgtttgctgcaggctgccaacgaaaaggtcaaggcattttggatcagacatcttggccctgcaagcttgatgcaacaca

SEQ ID NO: 14158 - DNA, 219 bp, Glycine max
  Clone ID: 701156077H1
gggtgtcttattttgatcactgatttttggagttggtcaatcaatcactgaagtttcagtgtctatccattttcactgtaaattacattttgttagttaaatgacagaatttgctaatatgtaagcaataggcatttgcacacttcaatcttccattaagagctatatagcctgctatatgcatttgtgggagcagggagttcatgcaattaatttatc

SEQ ID NO: 14159 - DNA, 225 bp, Glycine max
  Clone ID: 701156078H1
ggttcgtgcatttatatttggaaattagtaatgcaattggtttagaaaagtttgaggctcttcatgagattgtaacatggccgtccatggtcgtccttaatgtaaggtatacggacagaatgtttatggattctctggccgtcgaaccaagtatataaacgtgtttctatactcaatgcttcaatatctcgctagcttgattttgtttctgaagtcaaatggttg

SEQ ID NO: 14160 - DNA, 232 bp, Glycine max
  unsure (1)..(232): unsure at all n locations; Clone ID: 701156080H1
ggaggaagaagaaacagggacaattaagcatagggaactgtgaagagctgaaggaacctnnnnnnnnnnnnnnnnnnnnnnnnnncgtctggattgggntggctttagggctttgaatgccatctggggttttgctctcaggcaatcaagctccaaagctgacccctttctctcacttctaactcacataccttgntccattcttcatttctctctctaganctacatggca

SEQ ID NO: 14161 - DNA, 234 bp, Glycine max
  unsure (1)..(234): unsure at all n locations; Clone ID: 701156082H1
ggaactcattcttcttcaactcaacagagcaanaggttcgcactcgcagattcttgagcaagaataatggggaagaaangnaaacacagtgagactactcaagctgtagcacaacccanaaagtgagangccgctccagagagaccggctaggacccttttggggtggaaggataagaatcaagttgaggatgattcaccaatatttaggaacaaagagaagctattggtcact

SEQ ID NO: 14162 - DNA, 231 bp, Glycine max
  Clone ID: 701156083H1
aagagaagaggaagaagacgaagaagaatccaaaagcaatcccatctgtgtgtttgcacatcagaagggagggctatcaaactcaaagatctaatctaatcaggcttttgggggtgtttcagacattgcatgcatatgggagcagtggttgtgttggatgctataaaaggcctacactgagtgctactgtggatgtgccatcgaaagggttggcaacacaaggtaacggat

SEQ ID NO: 14163 - DNA, 233 bp, Glycine max
  Clone ID: 701156084H1
gtccctctccttttcctgatggatcatttgacaaaccagttaatttctcccccccaaagctagtgattcttcatatgaatatggcactacatgtgtatgaagatatcatgaggatgactgaaaacctgagtgagaagtatataattggatatggagcatcaagtacagtttataaatgtgttcttaagaattgcaagccggtggctatcaagaggatctattctcactatccc

SEQ ID NO: 14164 - DNA, 225 bp, Glycine max
  unsure (1)..(225): unsure at all n locations; Clone ID: 701156085H1
ggaaagagggaggccacactttcccagtgagcaaacgccaaaaacgcgtggactcaaaaactcttttctccatcgcagttcataatcccccctcatatccgcgtctgcaacaccactttcacaacgacgccgtttaaactgccacatctcaaactcaataatcctcgctccttcctttttccttctcttgcgccagatnnnngttgctgaccccaagcctcactc

SEQ ID NO: 14165 - DNA, 222 bp, Glycine max
  Clone ID: 701156087H1
ggggcgaggtagccagagagtgatacaatacagagtgcgttgttgctccttcgccacaactccctgccaacatgggtatctccagagattctatgcacaagaggcgtgccactggtggcaagaagaaggcatggaggaagaagagaaagtatgagcttggtcgccagcctgctaacactaagctgtcaagcaacaagacagtcaggaggatccgggttagag

SEQ ID NO: 14166 - DNA, 222 bp, Glycine max
  Clone ID: 701156088H1
ggcacaagtgagtttgttgatcgagataactagaaacagtgtgatgaaaatgaaggtccttgttttcttcgttgctacaattttggtagcatggcaatgccatgcgtacgatatgttccctctccgaatgaacactggctatggtgcccgtactccggaggtgaaatgcgcaagttggaggcttgctgtggaagcacacaacatctttggctttgagaccat

SEQ ID NO: 14167 - DNA, 219 bp, Glycine max
  Clone ID: 701156090H1
ggcacaccaaagaaagattgcaacaactgcacgaaaatggcgaccatttggaagaccaacgcatcgagaaacgcagtgcgttgtttgacgcatccttggcatccactagccgtaccccttcgctcccctctcatttctcctccgtccgctacctccgcaccggtcgcgatcccagttcaaggacttatgagataattccgccggtgaattgggggattc

SEQ ID NO: 14168 - DNA, 219 bp, Glycine max
  Clone ID: 701156091H1
ggaagaagatattagggtttttgagtgcggtgcggcgatcctagcactctcttctgcagctttcgccgacagcttcattcaccatggctgagcaaaccgagaaggcttttttgaaacaaccacaagtgtttctcagctcgaagaaaactgggaagggaaagagacccggaaagggtgggaaccgcttttggaaatccattgggcttggatttaagactc

SEQ ID NO: 14169 - DNA, 223 bp, Glycine max
  unsure (1)..(223): unsure at all n locations; Clone ID: 701156092H1
aagggtactcttaagatcattccaatactctactggaggatccccatgaatccttcgttccctaacaagggaagtccaccaatagagagcatacccttgaaagctaagggtagccaatggaacttttctctcttcgctaatatgatggcaagctcaagagttgttcaaccttcatttcccaatctaagtaggncctcaacattatctttttcatggaaatatg

SEQ ID NO: 14170 - DNA, 219 bp, Glycine max
  Clone ID: 701156093H1
gtggcaaaagatgcaaactcgtgaagagttgattgaagcctcggctaccctcgtatggatcgcttcagcccttcatgcagctgttaactttggacagtatccatatggaggtttaatcctaaacaggccaaccattagcaggagattcatgcctgagaaagggtctgctgagtatgcagctttggctaagaaccctgagaaggagtttttgaagactat

SEQ ID NO: 14171 - DNA, 223 bp, Glycine max
  Clone ID: 701156094H1
ggcccatccattcttcaaatggaaaagctccatgcttctgtgctcgcccttgtattccttcttgtcatactatttcaggaaggattggtaacatgtatgaagaatgaagacggatcagaagaatggggatatgtgcaagttagaccaaaagcccacttgttctggtggctttacagaagtccatacagagtggagaatccctccaagacctggccaatcatct

SEQ ID NO: 14172 - DNA, 245 bp, Glycine max
  Clone ID: 701156095H1
gagagaagagaagagagatctgagagaagcagagctgaagaggtgaagtgaagatgatgtccggaaaatatacgtcgattgacgcgcagagcttcagggatctgttcctgccgttccagattcacgacccgccaccgtcaatttcgcagattcaaatcttcagacttttcctccttctggagctcagggcaagatcaccgctgcttccgggcctcctcgtgacgctgatgattcattttcaaaac

SEQ ID NO: 14173 - DNA, 226 bp, Glycine max
  Clone ID: 701156096H1
catggtatcaactgttttgttaacagacagttgatttacaattttccagaggagctctttgctgatgcgggaatattggctattgaacatgctgattttgatggtattgagcgtctggctttggtaactggtggtgaaattgcatcaacctttgacaatcctgagtctgttaagcttgggcattgtgacctattgaggagatatgatggcgaggataaactgattc

SEQ ID NO: 14174 - DNA, 269 bp, Glycine max
  Clone ID: 701156101H1
gacccatttcctcactctttcactcttcttgtatgatggagaagatccagcacagtgaggtggaagtgaagggactgaagcttcacgtggcagagattggaagtggctccaaaacagtggtattcttgcatggattcccagagatctggtacacatggaggcaccaaatgatttctgtggcaaacgctggttatagggctattgcctttgatttcagaggctatggactttctcagcaaccagcagagcctgaaaaggaaaccagtttg

SEQ ID NO: 14175 - DNA, 231 bp, Glycine max
  unsure (1)..(231): unsure at all n locations; Clone ID: 701156103H1
gggganactttggggtttctctcganaaccaagaaggaactagggttttacagaatacaagnnnnnnnnnnnnnnngtcggttttcgtcaatcaaatccaatccaatatcaaatatgagtcgtcatcccgaggttaagtgggctcagaggcttgacaaggtctatatcacggtgcaattggctgnttcaaaaaatgcaaaagtggatntacgccagatggtatttttacct

SEQ ID NO: 14176 - DNA, 266 bp, Glycine max
  unsure (1)..(266): unsure at all n locations; Clone ID: 701156104H1
gactgcaaatcacttttctactttgagtcttcttgatccttctttttctccttgaactcaaacatggcagatgaggtggttctgctagatttctggccaagtccatttgggataagggtcaggattgcacttgctgaaaagggtatcaaatatgagtacaaagaagaggacttgaggaacaagagtcctcttctcctccananacanccggttcacaagaagattccggttctcatccacaatggcaaacccatttgtgatccctc

SEQ ID NO: 14177 - DNA, 258 bp, Glycine max
  unsure (1)..(258): unsure at all n locations; Clone ID: 701156105H1
acaacgaatgcagtgtcttgccgctttcacaagtttggtgatgacncaaagaatctggtcttccaaggtgatgccacgtcttcttccaggggcatagaactcacaaagttagacggtggaggaaaaccagtgggtggcagtgtggggagagtgttatactcttctccagtgcacctttgggaaagctctacagtggtcgcaagctttgaaaccgacttcaccttttccatctcatcagactctactactccaggtgat

SEQ ID NO: 14178 - DNA, 257 bp, Glycine max
  Clone ID: 701156106H1
gacacaccgtttgttctattcttaactcaacttctgctacccactctcttcttccaagtccaaccacgcttttctctacagtcatgggcaaggtcaagatcggaatcaacggatttggaagaattggccgtttggttgccagagtcgctctgcaaagagacgatgtggagctcgttgccgttaacgaccctttcattaccaccgattacatgacatacatgtttaaatacgacagtgttcaggacactggaagcatc

SEQ ID NO: 14179 - DNA, 250 bp, Glycine max
  Clone ID: 701156107H1
gaccacattccaaaacacaaacacatacattgtagtatcacttttgtctcggaatttgttcttttgagttatggcaagcttaaaggttgcatgtgtggttttgatgtgcatggctgtgatgagtacaccaatgatggtgcatgccgtgtcatgcaatgatgtttctgtgaacctagcaccgtgcctatcttacctgatgcaggtggagatgttccagaatcgtgctgtagcggagtgaggaacatctggg

SEQ ID NO: 14180 - DNA, 256 bp, Glycine max
  unsure (1)..(256): unsure at all n locations; Clone ID: 701156108H1
gaaagtagagtagctagagagaatagaaatgactcaagtgatgagaggagaggtgattganaaggcttatgctgggtcttggaaggctcacaagtccccagacaagccttaccttattgaaaagatcaacagaaacgaccctcaagaagttatcttttgttttccaggatcaggtgctgtcagggattggtactctcagaaaaacttggtgaaacaaaaatagatcttggtctgtttccctcatcagaagcatggt

SEQ ID NO: 14181 - DNA, 261 bp, Glycine max
  unsure (1)..(261): unsure at all n locations; Clone ID: 701156109H1
gaagagaaactttcatagtttttnantccttctcccagtgtcggtgtgctcttcttctggggcattcgtttttngcttcttcagctccnccttcacnncncgcttttggtnnaagaagcttcactgggatcactatnnnnggtgngtgagagagggattacggantagtgagtttttgtcactaagttagagctatgtcgtntcatgatgatgggtggtagcatttggtggtgggataaagtgggggcttattggatctgg

SEQ ID NO: 14182 - DNA, 250 bp, Glycine max
  Clone ID: 701156110H1
gtgggacaggcggaaaaggctcatacttgaagagattaataactataatgccagcatactgtgcttccaggaggttgatcattttaatgatctggatgatcttttccagaacagtggctttaaaggtgttcacaaggctcgcacaggagaagcacaagatggatgtgctgtattttggaaagacaagttattcaaacttttgcatcaagaagatatagagtttcaaagatttggtatgcgtaacaatgtt

SEQ ID NO: 14183 - DNA, 255 bp, Glycine max
  unsure (1)..(255): unsure at all n locations; Clone ID: 701156112H1
ggtgtctcactcacatcacacacactctcatagctgtagcggcgacactaagatcggagaaagaatggcgaaaacgacgtcgttgctgctctttacactgctcctcttcggaaccctagctctcatccaggcgaagaaatcgaaggaggatttgaaggangtgacccacaaggtttactttgatgttgagattaatggaaaagaagcaggtcgtattgtaatgggtctttatgggaaggctgttccaaaaactgc

SEQ ID NO: 14184 - DNA, 249 bp, Glycine max
  Clone ID: 701156113H1
ggtagggtttttttatcaattctttaacctacccaacatatgtgcatgattaatccttgcaagttgcaactatcataccaactaaggtttgggtttattcaagtttttagcacacacaagattgggccttggttgagtatttgcaccgcagagacagagaggaaaaagaaacgcaaacaacgatggctgtgaaaggatcaccacaacggtgggacatgagattagttttgacaattactctcttttaat

SEQ ID NO: 14185 - DNA, 250 bp, Glycine max
  Clone ID: 701156114H1
tggtccttcttattttaatgcatgtgactgcaacaacaaagtaaattccacgatggagaggtaaagattgaatataattataccgtagcagttatctggactaggtaattgacacgtacgaattaacacggcaaaggaatttatatttttttacttctacaccttcacccacatgtaaaacgaaatttcagtgccatcctacctaatacgcacacatgtaaaacgaatcaaattaaaccatataccatgt

SEQ ID NO: 14186 - DNA, 263 bp, Glycine max
  Clone ID: 701156115H1
ggagggcaaaaagtcggaaccaccggagaggagggcttcacacagagaattacgcggttgcagcagtcaacgcccgggattcccacgtccataccaaccacaacaggcggagagagagtttaggccttagtgagaaggataacgccatttggttttggcttggaatacgtcatccactatcaatcaactgggctttgaaatggtgaaggagaccgaatactatgacgtgctgggtgtcagccctacggcatccgaagccgaga

SEQ ID NO: 14187 - DNA, 234 bp, Glycine max
  unsure (1)..(234): unsure at all n locations; Clone ID: 701156116H1
ggacgatgagtcganttgataactaagatattgntattcgtgatattgatccaatttgatatcatcgaaatccaatttataccattgttgaattaattatcgatgaaagatttatcatctctatgggattaaatcccgaattttttattggaaatttaagagaagtaaaacataataaagattatggaagtaaatattctgcatttattgctactgcactgtttattctagttc

SEQ ID NO: 14188 - DNA, 54 bp, Glycine max
  unsure (1)..(54): unsure at all n locations; Clone ID: 701156117H1
gtanntgggccgttattattatacaatttncctatagtnagtcgnattaaaant

SEQ ID NO: 14189 - DNA, 256 bp, Glycine max
  unsure (1)..(256): unsure at all n locations; Clone ID: 701156120H1
ctatgctggttgggcagataagatccatggtctaacagttccagctgatggaccatatcatgtgcaaacattatatgaaccaattggtgttgccggtcagatcattccttggaacttccctcttctcatgtttgcctggaaggttngnccggcattngcctgtggcaacaccattgttctcaaaacagctgngcagacaccgttatctgcttatatgcagcaaaactatttcatgangctggacttcctgtggtgt

SEQ ID NO: 14190 - DNA, 257 bp, Glycine max
  unsure (1)..(257): unsure at all n locations; Clone ID: 701156122H1
ggagagtcagattcgcacgcattgcttcgcctcacaacagcagctgcagcagcaatggctcccaaacgaggtggaaaggctccggctcttgccgctaagaagaagcctgagaaggtcacgaatccgttgttcgagaagctccgaagcagttcggaatcggaggggnttgcctccgaagagagacttgactagttcgtgaagtggccaaagaatgttcaaattcagaggaagaagaggattctgaagcagagttgaag

SEQ ID NO: 14191 - DNA, 252 bp, Glycine max
  Clone ID: 701156123H1
gggtgataaagttggagttggtgtgatagtggagtcttgcaaggaatgtgaaaattgccaacaggatctggagaattactgtccccgccctgtgtttacctataactctccttattatgatgggacacgaacccaaggtggttattctaacattgtggtcgtgcaccagcgttatgtgctccggtttcctgagaacttgccccttgatgctggtgctcctctgctgtgtgctgggataacgtgtatagccca

SEQ ID NO: 14192 - DNA, 249 bp, Glycine max
  Clone ID: 701156124H1
gagattcaaagcttcgagatggcgatcgtggcgtttcaggcgagcctagccgccgttctccttgctctgcctctcccacagccttcgcaagtacggtctccgccggttcctcttcgttgaccgctactccgggaagttgcattgctttcaccgcgactacgtcgctcagatttcgggatctatgcgcatgctttttctgtgggtgttgccgtgtttcatctgaagacagtgcgagaaatcatcgcattt

SEQ ID NO: 14193 - DNA, 247 bp, Glycine max
  unsure (1)..(247): unsure at all n locations; Clone ID: 701156127H1
gggtcctgctgatagtccttatgctggaggtgtattcctagtcactattcacttccctccggattatcctttcaagcctcctaaggttgcctttaggactaaggtgtttcacccgaacatcaataanttaagtagcatttgtcctgatatcctgaaggagcagtggagccctgcactcaccatctctaaggtactgctttctatctgctcatgctgactgatccaaatcctgatgatccattgtncc

SEQ ID NO: 14194 - DNA, 250 bp, Glycine max
  Clone ID: 701156129H1
acactcagctaacagaaactgaattaaaagaagctaatcacaaggttttggcattagaagtggaagtggagaacaaaaatcaatattgtgaagaattagagaccagatgcattgaacttcagctccagcttgaaagcatgacaaagaagtggtcagacaatgatgctatcagaaagatgagccactgcaaactgactgggagataactgctgcatcagaaaagttggcagagtgtcaagaaaccatcctt

SEQ ID NO: 14195 - DNA, 254 bp, Glycine max
  Clone ID: 701156132H1
ggaagtgtattggtcactggcctatcttggaagagttttgaagtttaaaccttcaaacccttttgcctttagattctgattctgagtctctgctgctatatatggcgccacgcgtatttcttgtgttggggatgttgctgatggtgtgccttgttaaggtttcgtctgatccaaagagagaagaagaaatactggaagaagaatacatttcccgataacgagccacttattgtgagagacgggaacagaaggct

SEQ ID NO: 14196 - DNA, 262 bp, Glycine max
  unsure (1)..(262): unsure at all n locations; Clone ID: 701156133H1
gattgagaganagagagaaatggagaagacaggagtgttatcggcgaaggaggcattcgagaagcttgaaaaggtgggagaanggacatatgggaaggtgtacagagcaagagagaaggcaactggnaagatcgtggctctgaagaagactcgtttccacgaggacgaagaaggtgtccctcccaccattctccgtgagtttccatctgcgaatgctctctagcgatccccatgtcgttangntaatggatgtaaacaagtc

SEQ ID NO: 14197 - DNA, 104 bp, Glycine max
  unsure (1)..(104): unsure at all n locations; Clone ID: 701156134H1
tgnncatgaaggacatcaacaatgtcaggaacaatgatgnaagaacagctcttcatgttgctgtgattcataatatccaatgtgatgtagtggaattactgatg

SEQ ID NO: 14198 - DNA, 255 bp, Glycine max
  Clone ID: 701156135H1
ggaggcaagaagttgtattttggcatccccgtggcttcaagaagagaatctcaatggaggcccaggagctgaagcgcgtgttccagatgttcgaccgcaacggcgacgggagaataacgaagaaggagctgaacaactcgctggagaacctgggcaagctcatctctgacaaggacctgagccaaatgtccagaggatcgacgtcaaggcgacggttgcgtggacatggacgatttggggagtgtatcagaccat

SEQ ID NO: 14199 - DNA, 256 bp, Glycine max
  unsure (1)..(256): unsure at all n locations; Clone ID: 701156137H1
gaacctgatcgatctctttaccagttgccacactacaccgagatagncccctaaacccgtttgcgttgttgtttgcgaagaaatggcgactaagaggagcgtgggaacgttgaaggagggtgatttgaaagggaagagggtgttcgtgagggtcgatctgaacgtgcctttggatgacaaccttaacatcaccgatgacatagagtccgtgctgctgttcccaccatcaagtacttaactggtcatggagccaaag

SEQ ID NO: 14200 - DNA, 250 bp, Glycine max
  Clone ID: 701156138H1
ggaagtcaaccgatctaaaaaactaaaactcggatcccctttatgttgtttattttgatttggagtggttccatcgggagtttggatggccaccttgaatgttccccctcttcctccttcaccgagagacgatgccatacaactttacgctgctttcaaaggatttggatgcgatactagcgttgtgatcaatatacttgctcatcgagatgctacccagcgtgctacatccaacaagaatacaaagcaa

SEQ ID NO: 14201 - DNA, 190 bp, Glycine max
  Clone ID: 701156139H1
tcagatctggagcaggagaatagcgttgggagcgttcgcgtttgttctgcttttcctatcggcctcagcagacgacgtcgttgtgctctctgaagataacttcgagaaggaagttggtcaggacagaggagctctcgttgagttctatgctcctggtgtggacatgcaaaaagctgctccagaatatgaa

SEQ ID NO: 14202 - DNA, 67 bp, Glycine max
  unsure (1)..(67): unsure at all n locations; Clone ID: 701156141H1
gacnngagcttttgantgaaaatggnagaaaggaggagaacagcctcngntactcgtgnncccactt

SEQ ID NO: 14203 - DNA, 126 bp, Glycine max
  unsure (1)..(126): unsure at all n locations; Clone ID: 701156143H1
gacttccaatgatcacaattcacaacaacactcactcaccttaatcaaacaaaaccanacactccactcccaacaacaacaatggtgggattctacgacctctccgacaccgacaacgactccgcc

SEQ ID NO: 14204 - DNA, 249 bp, Glycine max
  unsure (1)..(249): unsure at all n locations; Clone ID: 701156144H1
ggaagaaaatgttggcaccaaaaactcacacgtgcgaggctctttctctttctctgccacaaccgtcatctcccctccggagcccgtgaacatcnngggccgccgccgccaactcctcagcgccaccgcatccaccatttccttcaatttcactgnccctttcacaacctctctgtccatgtcagagccggtagccagtgccggcggcctcttccaaatgcccccatncgcctcatnaaccggtatttt

SEQ ID NO: 14205 - DNA, 251 bp, Glycine max
  unsure (1)..(251): unsure at all n locations; Clone ID: 701156145H1
gaacgagggaggggagaagaganagaaggaaggagacatttataaaaagctctttcccttcccctaaatccctcacactcattccatttttacctttctctctcgctcgcaaacgcaaataataaaaaacaaggttttagccatggcatcgaagcggatcttgaaggaactcaaggatctccaaaaggatcctcctacctcatgcagcgccggtcctgttgctgaagacatgtttcactggcaagcaacaa

SEQ ID NO: 14206 - DNA, 254 bp, Glycine max
  unsure (1)..(254): unsure at all n locations; Clone ID: 701156147H1
ggaagagaataatatgaagagccatgtctcagaaagggttcanccttttgccaagtgcctccagagttgagatcacctcggaataaaacttggagaattattacaattttcaaggtgacaaaagtgcatgtcatagattttttnatccttataaaatcgaagacaagtatggtaatttacaacagtccacgcatcctgctcaatcaagacctcctggtaaaggagatgtcatagataaagctacacactgctcc

SEQ ID NO: 14207 - DNA, 252 bp, Glycine max
  unsure (1)..(252): unsure at all n locations; Clone ID: 701156148H1
gnaggattcatgtgctacaagncatctgtcaatcactcaaaganattcaagattgatccattctactagcaagattgttccaaattctgaaattcagaatataactactggagatggtgaagacaccagaggtnctcaagatggatggatcagtcatccctacaatagccccttgtgatgcagcagnccagggcaatagggtttcaagatgcagcaacactataatgcaggaataatngacttacatcagat

SEQ ID NO: 14208 - DNA, 266 bp, Glycine max
  unsure (1)..(266): unsure at all n locations; Clone ID: 701156150H1
gacttccgttcacttttgaacccaaagagcggatagctgagatcggagaaccctctctttcttctccttcttcagcagttgaaaataaaaaatggcagatggtgaggatattcaaccactcgtctgcgataatgggacaggaatggtgaaagctggatttgctggggatgatgctccgagggctgtgtttcccagcattgttggtcgtccccgtcacacgggagtgatggttggcatgggccaaaangatgcatatgttggggaga

SEQ ID NO: 14209 - DNA, 255 bp, Glycine max
  unsure (1)..(255): unsure at all n locations; Clone ID: 701156152H1
ggaacataantgctccatatattgttgggcgtcattcctttccttattttcttcttagcatacaatgaatcacaaggcacctagtttttttctggggatggatgtgaagagaatcatgggtggtgatagagatgggaacaccaattgggtgattaaggaagatggtgnagaagatagcaatgattcatcatccattngactcnactcaatggactctatgtnctcgtctnctncatcagagctgagcgaagacgc

SEQ ID NO: 14210 - DNA, 265 bp, Glycine max
  Clone ID: 701156153H1
ggaggaggtatgagataatggctcgcagtatatcgtacataacggggtcgcagcttctctctctcagacgccatccaagcatcgccgtcgtcgatgtaagggacgatgagaggagctacgacggacacatatcggggtctcttcattacgcaagcgacactttctccgataacatctcaaatctcattcgggcagttaaaggcaaagacatctcgtcttccactgcgctctaagtcaggttcgtggcccaacttgtgctaggagg

SEQ ID NO: 14211 - DNA, 266 bp, Glycine max
  unsure (1)..(266): unsure at all n locations; Clone ID: 701156154H1
gggggaaagcaagagtagtgacanagagaggngangatcgttcacataaaacatcgacagagatcgacgnggnanagctagagcctaacaatgtggagctccnaaacganattgatgtttggcgtcgcaggncattgctctgatgatgngnctctcatntgcttcagcggacgacgtcgntntcantcacagaggaaaccttcgacaaacgaagttggcaaggatcgtgccgctctcgtcgangttacgctaccctggtgtggacc

SEQ ID NO: 14212 - DNA, 249 bp, Glycine max
  Clone ID: 701156155H1
ggaagttgaaggcttgggaagagagacaagaaaacaaagccagacatggaggggaattatgggagcacaagacgttatgttccccgagcagattcttccttgagcttcctttacaactacaactacaccccttatccaggaatggaagtgaagcaacaaacactggctggcacaagttcatccatggaaaaagtgaactgcgggaaccaggagaagaagaagcgattaacaagtgaccagttagattcg

SEQ ID NO: 14213 - DNA, 254 bp, Glycine max
  unsure (1)..(254): unsure at all n locations; Clone ID: 701156156H1
ggcagttgtattgttgaacaagggtttctctgtctgcttcttcactttctctcgtttcaatcgaaaccaaaacaaaaacatgggcagaaaattcttcgtcggtggcaactggaaatgcaatgggaccactgaggaggtaaagaagattgttactactttgaatgaggctaaagtccctggagaagatgtcgtagaagttgttgtgagccctccttntgtgttcntcctgttgtaaaaagtttgctgcgccctga

SEQ ID NO: 14214 - DNA, 222 bp, Glycine max
  unsure (1)..(222): unsure at all n locations; Clone ID: 701156159H1
gggatgcacaagtttantgagatagctagaagcaatcagatgaaaatgaaagtgcttgttttgtttgttgctacagttttggtagcatatgaatgccatggctcagactaccagaagttccctctccaaatgaaaactgggtttggtgggcaatacagcaatgaggtggcagtgccattggaggctggcgtggaagcaaacaacgtatcaatggcaactgtt

SEQ ID NO: 14215 - DNA, 79 bp, Glycine max
  unsure (1)..(79): unsure at all n locations; Clone ID: 701156160H1
gatgccatgtnaagttggtcattncttcactaaactagaagatctggttcaatagtgaaagccaaatgataataataac

SEQ ID NO: 14216 - DNA, 246 bp, Glycine max
  unsure (1)..(246): unsure at all n locations; Clone ID: 701156161H1
ggtgagggagaattatcaaaggtgaaacgaagaagccctaactacgcacgcattcgtgaganaactcaatattcgtcgctcatggcactctcttctcgtctcttttccaaatccaaattgatctatggcagtcaaatgcttctacaaaaggagcanttatnccagttcgtcatttgctaaagagtctgcccctcctggcccttaagggagacgagatgctgaagaacattttgtggaggtgaagaa

SEQ ID NO: 14217 - DNA, 84 bp, Glycine max
  Clone ID: 701156162H1
caatgtcatgcataagctatagaattttgtaagactttctggttacccttgtttaagtagaatatactatattacccaaaaaac

SEQ ID NO: 14218 - DNA, 251 bp, Glycine max
  unsure (1)..(251): unsure at all n locations; Clone ID: 701156163H1
gttggcaattggactgagtcagttaaaccctagttgttgtcctcacactctcccaagcaatggaagtnccttcggaagcgccgtctaccggcatcgccgccgaaaccatnagcaaaaatgcgctgaagcgcgaactcaagaacaaacagatacnagaagaaaggnaacgcaaggnngaggacaaggccaaanangcagctgaaatgcagaaggctaaggataanaaatctgcacctgctgatgaagatgat

SEQ ID NO: 14219 - DNA, 256 bp, Glycine max
  unsure (1)..(256): unsure at all n locations; Clone ID: 701156164H1
ggctctgaccgggaaaagaaaaaccagctttcttcaagcacctagatttcctctctctctaaatggcgttctcttcttttctcggcagagtcctcttcgcctccgttttcatcctctccggttaccaagaatttaattcttatggagntgatgggggacccgcagcaaaagcactcagaccgcaagtttgatgcctttgcacatcaagtacattctaaagttggtttcaacttccagatattgatatgaaattttt

SEQ ID NO: 14220 - DNA, 262 bp, Glycine max
  unsure (1)..(262): unsure at all n locations; Clone ID: 701156165H1
gatcacaacatcatagtaagcactatagtaaaaaaaggacattcattcatctatggctacccttattgctcccagcaaccactctccccaagaagatgctgaagctctcagaaaggcttttgagggatgggaactgatgagaacactgtcatagtaatttngggtcataganctgtgtatcagaggcagcaaatcagaagagtttatgagganatttncngggaggatcttgtgaagcgcctagagtctgagatcaaaggag

SEQ ID NO: 14221 - DNA, 256 bp, Glycine max
  unsure (1)..(256): unsure at all n locations; Clone ID: 701156168H1
gaacccaaagaaaaaaataaacctactttgtaacttatcgaactgagctaaattgtccgnattagagctaaacccgacccatgctnaatcctaatataacctattgcgagggtgttggtggagtgttgnagtgtgaagaagangaagaatgagtnaaccgnnanagcagcgnctctatgatttcgnnatgattnngnttcancaacatnttcgttcacncctacgccaggtgtgcgattgtactgtggagatgcga

SEQ ID NO: 14222 - DNA, 146 bp, Glycine max
  unsure (1)..(146): unsure at all n locations; Clone ID: 701156169H1
gaagaagaagaaggagcatggccatgagcatggccatgacngcagcngcagcagtgacagtgattaaactgctgcatcacctatatatttaaaaggtttatgggaccatagtagcgagggctgtgccttaatttctctctcnctct

SEQ ID NO: 14223 - DNA, 262 bp, Glycine max
  unsure (1)..(262): unsure at all n locations; Clone ID: 701156170H1
gacaacatatccattttatttacaacaacaatggcttctgtgcctcaaccaaaaatctcccttctaaccttattcttcttctcgtccttcaccatcattgcgcatgcaattgttcctcaaaacgaaaccttcaaatttgagaactcaggtgaacttggaccctacatngttgagtacggtgcagatacagaatgataagcatcttcaactctccattccaagttggtttctacaacaccacnccaaatgccttcactctagt

SEQ ID NO: 14224 - DNA, 219 bp, Glycine max
  unsure (1)..(219): unsure at all n locations; Clone ID: 701156171H1
ggcacaagtgagtttgttgatcgagataaanagaaacagngtgatgaaaatgaaggtccttgttttctcgttgctacaattttggtagcatggcaatgccatncgtacgatatgttccctctccgaatgaacactggctatggtgcccgtactccggaggtgaaatgcgcaagttggaggcttgctgtggaagcacacaacatctttngctttgagaca

SEQ ID NO: 14225 - DNA, 262 bp, Glycine max
  unsure (1)..(262): unsure at all n locations; Clone ID: 701156172H1
tatccatagccatctttcccaactaaatttgtcttaattgtgttaacaggtttatggagtcaatttccagaatctagtggcctgtttgattctttttatttttttaaacaaaaaattatttcatagaactatttcacagactanaaatatccaaaaaaaacctgttttatgaatattgttttgaaaattaaattctgaaagcttacaaatgtnctctgattgcagctgaggtccgggtggtgatggtggtttgaagtgagat

SEQ ID NO: 14226 - DNA, 249 bp, Glycine max
  unsure (1)..(249): unsure at all n locations; Clone ID: 701156174H1
tgtgcatgtgcacttttcacctctactggccttgatgatgcaggccaaatgcctggggcaggagaagaggtgtagttttgattaggcggaggaacactgcctggagaagctaacttatcactactctgaggctctgaactggtatctttgtagtagtagtggtcattgtttagtctttggcttggagccccnatatacgaaactgcagctaccactgcactgggcttgaagcaacaagcctagtaacac

SEQ ID NO: 14227 - DNA, 227 bp, Glycine max
  Clone ID: 701156177H1
ttggtcagatttgctcggcgatcttgaccaagtgttacagactgagatctcaaagatctcacagagtttggcacttgctgcaccaaaggagatgtgacatctgcattaccttcattggaactgcgatccctgtgtgtattaggcgcccttgcagacaaactgtatatgacaagaagctggagcttgtttacacacagagatggctttctggatttgaggtccatcat

SEQ ID NO: 14228 - DNA, 247 bp, Glycine max
  unsure (1)..(247): unsure at all n locations; Clone ID: 701156178H1
gttggtgggaaattgaagttgaagggaaaagcactggatgtggctggtggagtnnnnnnnnnnnnnnnnnnnnnnnnnagaaatcaggaacaacttctgcaagtcgccgaagatgaagtttcagcaggtggaaatacagaacaggccaaagatcctaatgatggagatataaatgatgtgagtgaattaagcgggaaagggaagacagcccttatgatgatcatcttacaccggcggagaggcgata

SEQ ID NO: 14229 - DNA, 248 bp, Glycine max
  unsure (1)..(248): unsure at all n locations; Clone ID: 701156179H1
gcagtggctggtgatctcatgtcaaaaccaacatggtatgctgctagcagaatccacgacgcattaatacgnatggacaatgaatatttgagatcggctcttgactatctagagctgcagcctgatctaaaatcccttgttcgtggagcacatcnttttagatgtccaaatcttggtatcactagctgggcaaggcttccaatccatgatgctgacttggttggggaagacccatttcatgggacctg

SEQ ID NO: 14230 - DNA, 274 bp, Glycine max
  unsure (1)..(274): unsure at all n locations; Clone ID: 701156180H1
agtccttactaatggacctttcttattgaatcttgattgtgatcactacataaacaacagtaaagccttgagggaagctatgtgctttatgatggatcccaaccttgggaaaaatgtttgctatgtccagtttccacagaggtttgatggncattgataggaatgatcgatatgccaatcgcaatactgttttctttgatataaacttgagaggtttggatggcattcaggtccgtttatgtgggtactggatgtgccttaatagaacagcttt

SEQ ID NO: 14231 - DNA, 120 bp, Glycine max
  unsure (1)..(120): unsure at all n locations; Clone ID: 701156181H1
gcacccaaaattgaacaagaagtcctgagaaggcatctagaacaaagctnctgaatctgattttgaaaactggaacgcgtaaaatgaacggtcccccnccctcataaataaaatctannc

SEQ ID NO: 14232 - DNA, 282 bp, Glycine max
  Clone ID: 701156182H1
gagggcacaacacaacacaaaagtcacaatcacaaatctgagtatagtggagtagggtttttttgcgtttgagagaagcatgagcaggagtttgggaattccggtgaagctgctccacgaggcttcggggcacgtggtgacggtggagctcaagagcggagaactctacagaggcagcatgatcgagtgcgaggacaactggaactgccaactcgagagcatcacctacactgccaaggatggcaaaacatcgcaacttgagcatgtttttattcgaggaac

SEQ ID NO: 14233 - DNA, 253 bp, Glycine max
  Clone ID: 701156184H1
ggagaggccaaaatatccattgcacctttctctttctccgatggctaatccctcactcttgttcttcagtctcctcctattatccgccaccgtagccgccgccgaacggatcgacgatgaagacgaccttctgatccgtcaagtggtgccggatgcggaggaccaccacctgctcaacgcggagcaccacttctccgccttcaagacaaagttcggcaagacctacgcccacgaagaggagcacgaccaccgt

SEQ ID NO: 14234 - DNA, 229 bp, Glycine max
  unsure (1)..(229): unsure at all n locations; Clone ID: 701156185H1
ggtaggagtcataacancttttctttatcatcctatccntcttcgtccccccatagttgcanctgacgcatttctttaacaagttgcnctatnttctcccgcaagaggcaccatggaggaaagagtggggattttgtcactgattttgntgggtgctgcttgggcttgtgatacnagagagctagcaataatctctgaattanacagnaaatcagatgtctgtggactt

SEQ ID NO: 14235 - DNA, 245 bp, Glycine max
  unsure (1)..(245): unsure at all n locations; Clone ID: 701156186H1
gtggtgatcatcatcgtgacgnagttagctcagaatcttgtaatttccggagaagatgcctcgcaggtggaaagcattgntccgaggtctgagggttcaactgagagtaagaagggatcaaaggatcggagagggtccctaaaananggnagactgaacagacatggacctagttgcccanactactgatgataatcatgcatggagnnagtacggacaaaaggaaatcctaaattctcatttcc

SEQ ID NO: 14236 - DNA, 254 bp, Glycine max
  unsure (1)..(254): unsure at all n locations; Clone ID: 701156187H1
agataaatagttctttaaaacatccatactagtaaaaagttttgcaaaattacttcattttgataaaaaaatatganttaaganaaaaaaatgttanttagtcctcttaaganactanaagagaacaantatgcgtnnacttacattactaatgaantttttnacattctcctantanntnacatcnaanntngntntatntaatntcnnaatnatgctggttatnancgatggnctagatatctagtncnctt

SEQ ID NO: 14237 - DNA, 250 bp, Glycine max
  unsure (1)..(250): unsure at all n locations; Clone ID: 701156188H1
ggggttttgtcttgtgattatccttgcaacacacattgtcttgtcggcaaaatcttccaccaacaacacacagnnatggcaggctcaaacattcttctcactctccttccctcccaaaanctacagccantccttaaaccaaaacgcgttatcccaaaagctnntnnttctgcccctcaaattcanagccaccacaaaaccagtgctctcagagcggtnctctcgnagaagctgtcaaaacctcggtgga

SEQ ID NO: 14238 - DNA, 247 bp, Glycine max
  unsure (1)..(247): unsure at all n locations; Clone ID: 701156190H1
gatgtgaaagatgagataatatcgggagtgggtggttgggtctgaagtctgaacaaacagcctgaaacgacgactttccaacacgtccggaaaagaaaataggacagaacatattgtnnnnnnnnnnnnnnnnnnnacaacagacaagtttgttgttcctgttctaatctctggaccatgtcatacaactgaatctaatgcaatgccttagagccgtnggcantnactttgaatttagtgcctctcc

SEQ ID NO: 14239 - DNA, 247 bp, Glycine max
  unsure (1)..(247): unsure at all n locations; Clone ID: 701156191H1
gaatgatcttgtcacttcgtgagagtctccagaactgtaaggaaacacttgcgacataccaaaatgaacttgaggctgcaaaatctgagattcanagttggcattctacacttaaaaatgagccgtccaaatctgctgggatcactccagagcccaagatgttgattaattatcttcagaccttgaaattctctgaagagtctttaagagagcagcttgaaaaggcaaagnaaaaggaagctgcgtt

SEQ ID NO: 14240 - DNA, 224 bp, Glycine max
  unsure (1)..(224): unsure at all n locations; Clone ID: 701156192H1
ggagtacttgccaganctacacgttgctatctttactcaggtacatcatttagatggtatgccgcagttgtgtaaggtctttggttgttcaagctggaaccttcgccaacagtgtgagaatcaacggatttncgaggagtttgcaggcagttcagagtttttctcattggccgattcgtgaatacaagacaaccacaaggatgatggttgatacgggttctatg

SEQ ID NO: 14241 - DNA, 245 bp, Glycine max
  Clone ID: 701156194H1
ttccatattgatcaatgtcttcatctttcctacgttcaaatacatcctctacatttttggatgagctggcagcatcacttgatcgaacatttaaatcattgtcctgattctgtccccaaataacttagcaaaaagtaggtccttcgcccacacaatacagtgaacaaactgccataaaataaagagatgaaagcttagaactcattaaatagaatattgaagcaaatatcaaaattcacacatca

SEQ ID NO: 14242 - DNA, 255 bp, Glycine max
  unsure (1)..(255): unsure at all n locations; Clone ID: 701156201H1
gctgcaaaaaagctgacgttgaaaaatgtcacagactatatcgtagatgttgtttgtaaaagagctgaaattaattacaattatggtgttattcttatccccgaaggtctaattgatttcatacctgaggtccagcatctcattgcagaactaaatgaaattcttgcccatgataccgtggatgagggtgggttatggaagaagaaactcactgatcatcgttgaagctttttgacttttccncctcaagcaatt

SEQ ID NO: 14243 - DNA, 243 bp, Glycine max
  unsure (1)..(243): unsure at all n locations; Clone ID: 701156202H1
ggtgaaatgaaatgtcaaagtggaggcgccacacggacacggttgtcctccncatagttatattaataagttgagcgtcttcggagactgacttaattcgaaaatccaaacaacaatggacctccgtgaatcgataagcaaccaaaccgacgtggccctgagcatctcaaagctcctgttgtcgaaagaagctcgggacaagaacctcgtgtatcnncggctgtnttncantttntttnnaca

SEQ ID NO: 14244 - DNA, 232 bp, Glycine max
  unsure (1)..(232): unsure at all n locations; Clone ID: 701156203H1
gactgaactaataaaaaatccaagcattatgaagaaagtgcaagaagaaattagaggctaagtggtaagaaagatttcttggatgaagatgatattcaaaagttttcctacttaagggcagtgataaaagagacattagnttgcacttaccagcaccactattatnccnggnganncaantaaaaatgcngttagatggctacgaanttccagccagcnttttttgngnngc

SEQ ID NO: 14245 - DNA, 238 bp, Glycine max
  unsure (1)..(238): unsure at all n locations; Clone ID: 701156204H1
ggcatcaattcaaaatatatcatcaattataagcatgggtttgtggaacacaacgaatgcagtgtcttgccgctttcacaagtttggtgatgaccaaaagaatctggtcttccaaggtgatgccacgtcttcttccaggggcatagaactcacaaagttagacggtggaggaaaaccagtgggtgncantntggggaggtgttatactctnctccagtgcnctttgggaaanctctac

SEQ ID NO: 14246 - DNA, 250 bp, Glycine max
  unsure (1)..(250): unsure at all n locations; Clone ID: 701156205H1
gggtgtatttagtgaaaaggggggtgcaaatagaaaccaggcccacttgggccttcctgagggttccaaaaaggaagagcaaaaaggttcagcccttctggtattgagaaatctctcgaaatttgtgagaaaaattatttccgtgaaaaaaatccaagccgaggtgcgtccgtaacgttttcgagacgtttccataagcgatttcgtggagatccttcaccgttcttcatcgttcttcgncgttcnaang

SEQ ID NO: 14247 - DNA, 213 bp, Glycine max
  unsure (1)..(213): unsure at all n locations; Clone ID: 701156207H1
gagacatatctctaattaacactaataacagcaaactaaaggtgaagtttgccagaaacaagatgggaaggaaccattttcagcagcaacactgtgctgatnggagcatgtggatggagagtcagggtcagcaacagagctatgccttccaagaagagtcttggagccctgataacaactatggccacaaccacaagcaattcccaggcatgc

SEQ ID NO: 14248 - DNA, 252 bp, Glycine max
  Clone ID: 701156209H1
cactggtggttttgaagctggtatttccaaggatggacagactcgtgaacatgctctgctttcattcacccttggtgtgaaacagatgatttgctgctgtaacaaaatggatgctactacacccaagtattccaaggccaggtatgatgaaattgtgaaggaagtctcttcctacttgaagaaagtaggatacaaccctgacaagattccttttgttcctatctctggttttgagggagacaacatgattga

SEQ ID NO: 14249 - DNA, 243 bp, Glycine max
  Clone ID: 701156210H1
ggagctggtgttcaaggaggacgggcaggagtacgcgcaggtgctccggatgctggggaacgggcggtgcgaggcgatgtgcatcgacgggacgaagaggctctgccacatccgcgggaagatgcacaagaaggtgtggatcgccgccggagacatcatcctggttggactcagggactaccaggacgacaaggctgacgtcatcctcaagtacatgcccgacgaggccaggctcctcaaggc

SEQ ID NO: 14250 - DNA, 241 bp, Glycine max
  Clone ID: 701156211H1
accgttgcaaaccataacccacttgggaggcttgataactggaggttgagctgggactggatgaatgatgagtttatatattcaatgaaaggggcttatccttcggttgtggatgcttctgattgtctctttggtaagcaaggaactttctatagggatcttgactttgcccttgtgttgaattgtgagagaaggccaaccataattgatctccctcccaccaagttcaatgattccgacc

SEQ ID NO: 14251 - DNA, 245 bp, Glycine max
  Clone ID: 701156212H1
gggtttcaatcaaaacaaaaactcacactttggtggccacagcaacaataacaatggcagcctcactacaagctgcagctaccttcatgcaacccaccaaggtgggcatggccactcgcgacctcaaatctacacaatgcatttctaaggcttttggcttggaacccgctgcagctaaactcatttgctcccttaagcccgatctcaaagattttgctcaaaaatgtgtcgacgccaccaaaatt

SEQ ID NO: 14252 - DNA, 244 bp, Glycine max
  Clone ID: 701156213H1
gggagaagaattaagcactcggttgcagaacagaacaaacttctttcactctttcgcttctgaatcttcaacaatggtgctcgaggcgacgatgatctgtatcgacaattctgaatggatgcgtaacggagattactctccttctcgacttcaagctcaagcagacgctgtcaatctcatatgcggtgctaaaacgcatctaatccggaaaatacagtgggagttctcacaatggctgggaaag

SEQ ID NO: 14253 - DNA, 247 bp, Glycine max
  Clone ID: 701156214H1
catagaggagattgctgagttgtttattgttggaaaacctgacatgacgatagtggcttttggatctgctgttctggatatattcgaagtcaatgatgttatgtcatccaaagggtggcatttgaatgcattacagagacccaacagcatccatatctgtgtgaccctgcaacatgtgccaattgttgaagactttctcaatgatttgaaggaatctgtgaaaactgtgaaagcaaatccaggtcca

SEQ ID NO: 14254 - DNA, 230 bp, Glycine max
  unsure (1)..(230): unsure at all n locations; Clone ID: 701156215H1
gtagcgcagagaaaganctagaactagggtttcatctttgccatcagtaaacgacaatgattnacgacgttaactctcctcttttccgatccttcctcagccagaaggggngctcctctgataagaggaaatcggacgaacagaagccaaaagagcagaaacccaaagccagcgagaacaaacctatatgactggnggataacagctgagtgcatttcagttgtagaatg

SEQ ID NO: 14255 - DNA, 251 bp, Glycine max
  Clone ID: 701156216H1
gggaccaatcgctatcgtaatggtattggtacgatgcgcttcgcctcttcaatgttgcgactgaggccgtgagagggttttgccaactcaagttgagattctacaaacatgatgcactcctgtaaagggtggctgggggcagacgtttgcgcttgctaaacacaatgaatccgaagggagaaagactcggattcgccgctcaaagcaggaaaggaaggcaatggttgaatcctttataaagaagtaccaag

SEQ ID NO: 14256 - DNA, 243 bp, Glycine max
  unsure (1)..(243): unsure at all n locations; Clone ID: 701156217H1
gaagaagaagaaaagagaagaagcttcttcttggttaccttgacagacagagagtggagcaaacgacaaatcagcgagttggaacattttgtgtttggtggagatgcctattcggagcttggtagaagtggagccaccaagcccactgagatacttgatcggcgccgccgttatgatgatcggagttgtgttaccagtcggttacatgatgntcngnaacaagcgcccccctcntnttctnaa

SEQ ID NO: 14257 - DNA, 133 bp, Glycine max
  unsure (1)..(133): unsure at all n locations; Clone ID: 701156218H1
ggacgatgagtcganttgataactaagatattgttattcgtgatattgatccaatttgatatcatcgaaatccaatttataccattgttgaattaattatcgatgaaagatttatcatctctatgggattaaa

SEQ ID NO: 14258 - DNA, 240 bp, Glycine max
  unsure (1)..(240): unsure at all n locations; Clone ID: 701156219H1
gcaccctatgtagaaaaaacgaaattcccaaaaaatagacagttacataacctaaagcagcatataaatatcacacatcaggtcagataatacacggccgatagcataacagagcacaccaacacnaacatcgtcattctcattctctctcngttttctttcagnnttggctttgatctttcaagtncatggcnggncatatggggagcnttngcccccccccggnttnagaggattccc

SEQ ID NO: 14259 - DNA, 248 bp, Glycine max
  Clone ID: 701156220H1
taaccctagaggtcgaaagctctgacaccattgacaacgtcaaggccaagatccaggacaaggagggaatccccccagaccagcaacgtctcatcttcgccggaaagcaacttgaggacgggcgcaccctcgccgactacaacatccagaaggaatcaacccttcacctcgtcctccgtctccgtggtggcatgcagatcttcgttaagaccctcaccggcaagactataaccctagaagtcgagagc

SEQ ID NO: 14260 - DNA, 241 bp, Glycine max
  unsure (1)..(241): unsure at all n locations; Clone ID: 701156221H1
ggcaggaacagaaggagaaaggaaaggaagagaagagaagagaaggagaaggagaagggtttggtagttggttacttagtttgtttgattaacgacggcgcactacacgatccccacaatccagaggcttgttattatctccatccatttaatttaattcccacaaccacgctcacctaagtttcaatttcaatcccttttctttttcttntntatttaaaattccaatttcgcgaacccc

SEQ ID NO: 14261 - DNA, 251 bp, Glycine max
  Clone ID: 701156222H1
ttggtaggaagggatggaaaaggatttagctgaatttgtacataaatgtctagtatgtcaacaaattaaagcaaagcatcaaaatcccccaggcttatttcaatgaattgatatacctgaatggaaatgggagaggattactatggattttgtgacgaggttacgtaaaacctcaaagggttatgactcggtttgggtgattgtagatcgattgactaagttagcacacttttttcctgtgaaaactacct

SEQ ID NO: 14262 - DNA, 240 bp, Glycine max
  unsure (1)..(240): unsure at all n locations; Clone ID: 701156223H1
gataccaaaaacaaaacacaagccaagtgaaagtgagaaaaaataaaaatcaaagagcataatgtcagggatcattcacaagattggggagacccttcatnnngggagggcacaagaaggaggaggagcataagggtgagcaccatgctggagaatacaaaggggagcaccatggtgaacacagtagtgagtacaaaggagagcatcatggtgaacacaaagctggagagtaccatggtg

SEQ ID NO: 14263 - DNA, 238 bp, Glycine max
  unsure (1)..(238): unsure at all n locations; Clone ID: 701156224H1
ggaacaaaacaagtgtttcgaatagattatcctaagtctttgggaatagtgctgcaatggcttcaagtcaggaggaggtgacccttttgggagctactggaagcccatttgtgtgcagggttcatattgccctcaagttgaagggagttcaatacaaatatgtcgaagaaaatttgaggaacaagagtgaactgctnncnnaaatccaacccagttcacaagaaggttccagtgttta

SEQ ID NO: 14264 - DNA, 240 bp, Glycine max
  Clone ID: 701156225H1
ggtgtgagtgaagaagcagagggagtagcggcattaaaaatgcagatcttcgtgaaaactctgacagggaagactataaccctcgaggtcgagagcagcgacaccatcgacaatgtcaaggccaagattcaagacaaggaaggcattcctccggatcagcagcgtttgattttcgccggaaagcagcttgaagatggaaggaccctggccgattacaacatccagaaggaatcaaccctt

SEQ ID NO: 14265 - DNA, 241 bp, Glycine max
  Clone ID: 701156226H1
gggggttacgctttgcgagtgagaattgataaacaaatcgttagggttttttggttgtgcgagtgagagtgagagagaacaatggaagacataacagagggagtgaacaacatcaacatccctgattcgtataagaaaaatcgcattcaggtctctaacaccaagaagcccctcttcttctacgttaatctggccaagagatatatgcaacagcgtgatgaggtcgagctctcagctctag

SEQ ID NO: 14266 - DNA, 251 bp, Glycine max
  unsure (1)..(251): unsure at all n locations; Clone ID: 701156228H1
ggaagcccaaaatattttcatagcattttcagaggaaaatggcgggtacggtttcgacttgtttcttcttcgtgtttcttctttctctccttcttccttttcagatctccgctgaggaatcctcggagaaggagttcgtactcacattggatcactctaactnncacgacactgtcagcaagcacgatttcatcgtcgtcgagttctacgccccatggtgtggtcactgtaagaagcttgctccggagtat

SEQ ID NO: 14267 - DNA, 245 bp, Glycine max
  unsure (1)..(245): unsure at all n locations; Clone ID: 701156229H1
ggcagccaagaaaagaaaatcctcacccattttcttcgtagccaaacactctgaaattctcagttatgtcgtggcaagcgtatgtggatgatcacctactgtgtgaaatcgaaggtaaccacctcactcacgccgctatcatcggccaagacggaagcgtttgggctcagagcaccaacttccctcagttcaaacctgaggaaataactgccatcantaatgactttaatgagcctggatcattg

SEQ ID NO: 14268 - DNA, 139 bp, Glycine max
  Clone ID: 701156230H1
ggaaaggcaaagtgagtagcaggaggagtacggaaatggcatgtggctctgttctttcatcttttcttcacataacgaactccatggccatcaagggtgtcctctccttcgcaccaaatcctcctctgcttcttcgtct

SEQ ID NO: 14269 - DNA, 250 bp, Glycine max
  unsure (1)..(250): unsure at all n locations; Clone ID: 701156231H1
gggtgataaagttggagttggtgtgatagtggagtcttgcaaggaatgtgaaaattgccaacaggatctggagaattactgtccccgccctgtgtttacctataactctccttattatgatgggacacnaacccaaggtggttattctaacattgtggtcgtgcaccagcgttatgtgctccggtttcctgagaattgcccctgatgcggtgcnccncttgcagtgtgcnggggaaaantgngnatancc

SEQ ID NO: 14270 - DNA, 176 bp, Glycine max
  unsure (1)..(176): unsure at all n locations; Clone ID: 701156232H1
ggaagagagtgattcagtgtagggttttgtagaataagaagaaaattgttttgttgatgatggattctccagaaccttccaagaacaacaatggcnngttcttcttctgcctccactcctcaacaacaacnnncaacaacgatgatgctccttcatcggaatcccctcaagttcaa

SEQ ID NO: 14271 - DNA, 223 bp, Glycine max
  unsure (1)..(223): unsure at all n locations; Clone ID: 701156234H1
tacgagctgtactccgagaaggcgattgcggtgttgaaggacgccacggaggagctgagagtggncgccaaggaaatcggcgacgaaggcnaacagtatctcaccgtagntgccgagaattcgccggaggncaangaantcgntgaancattnncctctccaantcgtgacntcggngaaatttctnaattncngattcnacnnggngaactggcggtnaant

SEQ ID NO: 14272 - DNA, 241 bp, Glycine max
  unsure (1)..(241): unsure at all n locations; Clone ID: 701156235H1
ggatcacattttaggttgttttgagaaagcaaaaagaaaatcagtaggcgtggagaacagcaaagaaagaggaataatggagcaggaagagcacgaagtgtaacggtgcagacattcccgacgaggagattgacatggacgcagacgccgagcaacaagatgagcaacttgcccccaatcacacaaacaaggaatggaggacatgaagangaggctgaaggagatcgaggaggnncccccc

SEQ ID NO: 14273 - DNA, 240 bp, Glycine max
  unsure (1)..(240): unsure at all n locations; Clone ID: 701156238H1
gaacgagggaggggagaagagaaagaaggaaggagacatttataaaaagctctttcccttcccctaaatccctcacactcattccatttttacctttctctctcgctcgcaaacgcaaataataaaaaacaaggttttagccatggcatcgaagcggatcttgaaggaactcaaggatctccaaaaggatcctcctacctcatgcagcgccgntcnnnttgctgaagacatgtttcactg

SEQ ID NO: 14274 - DNA, 240 bp, Glycine max
  unsure (1)..(240): unsure at all n locations; Clone ID: 701156239H1
gagacatatctctaattaacantantaacagcanactanaggngaagtttgccagnaacaagatgggaaggaaccattttcagcngcaacactgngctgantntagnatgtggatggagagtcagggtcagcaacagagctatgccttccaagaagagtcttggagccctgataacaactatggccacaaccacaagcaattcccaggcatgcacatgaacatgaacaacanatacaaca

SEQ ID NO: 14275 - DNA, 237 bp, Glycine max
  Clone ID: 701156240H1
gaagagagagaggagagagagctaaactagaaccttggtgctgttatatagtttttcagccccaaagcttacaaatctgttttaaatccaagcccaattctggattcaagcccaagcccaattatagattgaagcccaatgcttcattaattcctgaaattagattaaaaacatcaaggtagctgaatggacccaaattataaaactgcctaataaatttgacaattaagacgaatc

SEQ ID NO: 14276 - DNA, 250 bp, Glycine max
  Clone ID: 701156241H1
ggggaacatcatcacattacattagattggtggtaatggcagcgtcactacaagcagcagctactttcatgcaacccaccaagttgagcaggagcaacactttgcagcaaaagtctactcagtccatttccaaggcttttggtttggaacctgttggagctaaaaaggtcacatgctcccttcaggctgatcttaaggacttggctcacaagtgtgttgatgctaccaaaattgcaggattcgcccttgc

SEQ ID NO: 14277 - DNA, 240 bp, Glycine max
  Clone ID: 701156242H1
cggactgcctacaaagcacccataggaatgtctccttatcgggttgtctttggaaaggcatgtcatcttccagtggaaattgagcacaaagcatactgggcagtgaagacttgcaacttctctatggatcaagctggcgaggaaaggaagttgcaactgagtgagttagatgaaatccgcctagaagcctacgagaatgccaagttctacaaagaaaagaccaagaagttccatgatagc

SEQ ID NO: 14278 - DNA, 252 bp, Glycine max
  Clone ID: 701156243H1
gactttttctttttgctttactatttatatactcgtgggggagggcttcataacatgtgcatcacaaataaatgattttatatacaaacacatacatacacactcacaaggtaattaattttgaacttatttacttgttgataattatcagtttatcacaagtatactgcatataaagtgattattaccttatgatatgaagacatttcaaacaaaataaaagtcatatacactcatgggacatgcattagg

SEQ ID NO: 14279 - DNA, 243 bp, Glycine max
  Clone ID: 701156244H1
gaccacaccgagtcgcagaaaaagaaaaaagcgatcatagtttcacttcggccttatccagtttagggtttcggttctctaccctatctttcacgtatcgaaaccttaaatttacgatcaggtctgagcaatctggttggtagaacctttggtcttagtgagtcaagttttatgtctgaattagacgatcaaattcctactgccttcgatcctttgctgatgcaaatgctgatgactcgggtg

SEQ ID NO: 14280 - DNA, 243 bp, Glycine max; identical to SEQ ID NO: 11080
  Clone ID: 701156245H1

SEQ ID NO: 14281 - DNA, 245 bp, Glycine max
  Clone ID: 701156246H1
gtaatcaaccttggtgaccaacttgaggtcataaccaatggcaagtacaagagtgtgatgcaccgagtgattgctcaaaccgatggtaccagaatgtccatagcttctttctacaaccctggtgatgatgctgtcatttctcctgcaccagccttggtgaaggaattagatgagacaagccaagtgtacccaaaatttgtgtttgatgattacatgaagctctatgctggtctcaagtttcaggc

SEQ ID NO: 14282 - DNA, 247 bp, Glycine max
  Clone ID: 701156248H1
ggcatcaattcaaaatatatcatcaattataagcatgggtttgtggaacacaacgaatgcagtgtcttgccgctttcacaagtttggtgatgaccaaaagaatctggtcttccaaggtgatgccacgtcttcttccaggggcatagaactcacaaagttagacggtggaggaaaaccagtgggtggcagtgtggggagagtgttatactcttctccagtgcacctttgggaaagctctacagtggtc

SEQ ID NO: 14283 - DNA, 245 bp, Glycine max
  unsure (1)..(245): unsure at all n locations; Clone ID: 701156249H1
gatcgaagcaaaaaatgaaaacccaaagtgcttctctcctctgtcttttnctctctcttgctatccttttggctagtngcactgctgcaagtgcaactccaagaagcgcagtgccaagccaccatgtttcaacattcaacagaagcntttttccttccacttttctctttgganttggttcttctgcttaccaggcagaaggnttttccaagtgtagatgggagnggnccantnntnggggcccc

SEQ ID NO: 14284 - DNA, 234 bp, Glycine max
  unsure (1)..(234): unsure at all n locations; Clone ID: 701156251H1
gattcccaaaatttctcattctccctttcctctccgaaccctcgatcactctcacgcgctcctatattcgctcctccaccgtcgctctctcgaacaaccacaacaccatcttcatcacatggcaaacgcagcatctggtatggcagtccatgatgactgcaagttgaggtttttggagctgaaggcaaaaaggacacacgtttcatagttttnaagttggggagcagcagaagc

SEQ ID NO: 14285 - DNA, 235 bp, Glycine max
  unsure (1)..(235): unsure at all n locations; Clone ID: 701156252H1
aggccacggcgggaagttcacgtggatcggccacggctacgagcaagttgagatgccgcacggtgctatggacgccaaggacccgaacttcgaggatcctgtggagatcgccaccgtgtgatcgcggtggtttccggtggccaggtctgtaaatagtagtaattggcgaaacgtgttttttcgtgttcaataatgtgaagcgaatcggagaagaagcnttttctgtgattgatta

SEQ ID NO: 14286 - DNA, 186 bp, Glycine max
  unsure (1)..(186): unsure at all n locations; Clone ID: 701156253H1
ggttggattggttntcttcttccttntctctanagagaatctantctcaatnctcattanagntttcttcatncctctctcagtcttttctgttttccccctttgacatccncgttttcgccgaaacanaaacaactaagantttgtgtatgtnntgtnttnnntctccnngttgntatttgactc

SEQ ID NO: 14287 - DNA, 258 bp, Glycine max
  Clone ID: 701156254H1
gacacgtttgaacattgaacttgaacttgaacaacctcatctccaatgagttaacgttctccactcgtccctgcttctgcttctgctcattcttctccttccacagggatggcttatgttccacatggaaatgcaaattgcaactctttattccaaaaatttgcaaattcccatgtgggtatttctgctttgcccttcctgcaaccgggactaaaatcttgtacagttttcaacagaggaacactcattcccctgtgc

SEQ ID NO: 14288 - DNA, 236 bp, Glycine max
  unsure (1)..(236): unsure at all n locations; Clone ID: 701156255H1
ggagtgcagaaagaagggaggattgttggtgatcgatcatcgatcatcgatcatcgatcatcgatggcgtctgctagccttggaagtggtggggtgggcngttccaggtctgttaatggtggcttcaggggttcttccagttccgtcgattggcttggcagagagatgcttgagatgtctttgagagaccacgaggacgatagagatagtgagcctgacatcattgatggtttggg

SEQ ID NO: 14289 - DNA, 50 bp, Glycine max
  Clone ID: 701156257H1
tgtcccaattattggccccctttcctcccactttactcgtgtcccaccag

SEQ ID NO: 14290 - DNA, 239 bp, Glycine max
  Clone ID: 701156258H1
cacaggcaaagttgtcattggaatggatgttgcagcttctgaattctacaaggaagacaaaacatacgatttgaacttcaaggaagataacaatgatggctcccagaggatctctggagatgctttgaaagatctgtacaagtcatttgtgtcagagtacccaattgtttcaattgaggatccatttgaccaggatgactgggagcactatgctaagctaactgctgaggttggagcca

SEQ ID NO: 14291 - DNA, 246 bp, Glycine max
  unsure (1)..(246): unsure at all n locations; Clone ID: 701156259H1
gagtgtgaagataacagttgccggttcaagtgtcagcgttggtgctgccagtgaaacgcgaaccgtgccaggcagtgaggctagtnatattcaaatggttgaagcaggnaatatggtcatttccatacaagttctgnagnatgtcactgacaatttcagngannancntgttctgggaaaggaggttttggnacgtntatanaggtgaactccatgatggtacnagnattgcngtnaanannatgg

SEQ ID NO: 14292 - DNA, 243 bp, Glycine max
  Clone ID: 701156260H1
gggaaaagttagaagtagtgaagaaaatgaaagtcattgttttcttcgttgctataataattttaggtgcagaatggcaatgcaatgggtcagagcatgagcatgagcatggccacagctaccaaattttccctttgcgaatgaaaaccggccccggtggccactacattccggaggtatcgtgcaaaagttggaggcttggtgtggaagcacacaacgtcattgactggagaaccatcctca

SEQ ID NO: 14293 - DNA, 187 bp, Glycine max
  unsure (1)..(187): unsure at all n locations; Clone ID: 701156262H1
ancnccgcggaaattncattccncgggnncccggtaaacncttnacaggtcgtaacacagactttcncgctgataagtngagtgcgttattgaggagacttgtggcgtacattcatggtacattaggctgtttgccctgtgntgaaaatngtncattcccggcttcatcanattccccgcatcaaaa

SEQ ID NO: 14294 - DNA, 245 bp, Glycine max
  Clone ID: 701156264H1
gaccacattccaaaacacaaacacatacattgtagtatcacttttgtctcggaatttgttcttttgagttatggcaagcttaaaggttgcatgtgtggttttgatgtgcatggctgtgatgagtgcaccaatgatggtgcaagccgtgtcatgcaatgatgtttctgtgaacctagcaccgtgcctatcttacctgatgcagggtggagatgttccagaatcgtgctgtagcggagtgaggaaca

SEQ ID NO: 14295 - DNA, 246 bp, Glycine max
  unsure (1)..(246): unsure at all n locations; Clone ID: 701156265H1
ggggaacatcatcacattacattagattggtggtaatggcagcgtcactacaagcagcagctactttcatgcaacccaccaagttgagcaggagcaacactttgcagcaaaagtctactcagtccatttccaaggcttttggtttggaacctgttggagctaaaaaggtcacatgctcccttcaggctgatcttaaggacttggctcacaagtgtgttgatggcanccaaaattgcgggtttcgcc

SEQ ID NO: 14296 - DNA, 237 bp, Glycine max
  unsure (1)..(237): unsure at all n locations; Clone ID: 701156266H1
ggttgcaagatggaaaaccggaacacaggatcagatgctggagatgtatcttcagccacagcagttctccttggagctttagctcctggtgttaatggtcctacatggattactttaaagtccacttttttattgctgggtctctgtcttgctgttatgctggccttagcattctcttccagggattcanggttgatttcccatgttgcatnccttgtncaaattcncccccncccc

SEQ ID NO: 14297 - DNA, 237 bp, Glycine max
  Clone ID: 701156267H1
ggcagcagcagcttcttaacattgtcttgtgcaggtgcggcgcaaaatcaacacgcgtcacaccctagaacgttttttggagttcctcacaagaatcagagaaagaggaaaacaccgcataggttagttgtggttgcggtgactcaaggctctgctgaatcaagcaagtccgacgaaaaaatcccttcgtgggccaaaccggactccgatgaaccaccgccatgggtccgggatgac

SEQ ID NO: 14298 - DNA, 233 bp, Glycine max
  Clone ID: 701156268H1
ggcacaagtgagtttgttgatcgagataactagaaacagtgtgatgaaaatgaaggtccttgttttcttcgttgctacaattttggtagcatggcaatgccatgcgtacgatatgttccctctccgaatgaacactggctatggtgcccgtactccggaggtgaaatgcgcaagttggaggcttgctgtggaagcacacaacatctttggctttgagaccattcctgaagagg

SEQ ID NO: 14299 - DNA, 76 bp, Glycine max
  unsure (1)..(76): unsure at all n locations; Clone ID: 701156269H1
ggaagaanacgcggtaaanggannggaggatatggcgancacaggcgctttntgtggnactatgttgnagaccncc

SEQ ID NO: 14300 - DNA, 234 bp, Glycine max
  unsure (1)..(234): unsure at all n locations; Clone ID: 701156270H1
aggtcatttgttgtaaatgggtcttttagaccaaaagggattcattaggcaatattgagagatacaaggcaagactcgttgctaagggatttactaaaaatgaaggaatcaactacatagagacttnctctcttgtacctaagaaatattctctttgtattattttggcattagttgctcattttgaccttgagttgcaaaaaatagatgtnaaaacaacatttcttaatggtg

SEQ ID NO: 14301 - DNA, 245 bp, Glycine max
  unsure (1)..(245): unsure at all n locations; Clone ID: 701156272H1
gactcgcagattcaaacgtttccgaggtgaggctgaggcatctctctctgctttctagaatgggagctgggcgtggagtctccatcccacttgatggggtgagggacaagaaccttatgcagctcaaaaagctcaatctcgctcttttccccgttcgttacaatgacaaatactatgtcgatgcactcgcttccggtgaatttnnccaaactagcttactatagtgatatttgtgttggagcaat

SEQ ID NO: 14302 - DNA, 243 bp, Glycine max
  Clone ID: 701156273H1
gaggaagaaaaatggtgaatgcactcactcacagtcagagtcagtttgtgttggtgctattgaactccaattgcagagggagcaagagtagtagcaacaccgtcttccgaaaaccctttgcgaaattttcatccctcaccactaaaatttgccacgcctcttaccaccgtttcgctgacacaaagcacacaacccttctggttgagacttaccatctccatcacagcctcagagccttacttg

SEQ ID NO: 14303 - DNA, 235 bp, Glycine max
  unsure (1)..(235): unsure at all n locations; Clone ID: 701156274H1
atctacatttatggttttggtttccttttgcatttctgtagaatactaaatgtttcagtggcttttgtgtgtttgttttcgaagtccaacaccacacgcataagtattgcagataatatggtgtttgttacttaatatgttataatccaaaaaaganaaaatcaacgaatatcacggttttgtagattgatgaggagattcttcaggaagcggttaatatgggatttgacaggaa

SEQ ID NO: 14304 - DNA, 237 bp, Glycine max
  unsure (1)..(237): unsure at all n locations; Clone ID: 701156275H1
gaccacaccgagtcgcagaaaaagaaaaaagcgatcatagtttcacttcggccttatccagtttagggtttcggttctctaccctatctttcacgtatcgaaaccttaaatttacgatcaggtctgagcaatctggttggtagaacctntgtgnctagtgagtcaagttttatgtctgaattagacgatcaaattcctactgccttcgatccttttgctgatgcaaatgctgatgac

SEQ ID NO: 14305 - DNA, 250 bp, Glycine max
  Clone ID: 701156276H1
gtatacttcaaagatgcttcttgctgcaatagacgagcaatgtaagggaacttatgattttctgtatttaccgattgatttcaagaataaatgtaatgttggctatgcattcataaacatgattgatcctggtcaaattattcctttccaccaggcttttgatgggaaaaaatgggagaagtttaatagtgaaaaagtagcctcacttgcctatgcccgaattcaaggaaaagcttctcttattgctcat

SEQ ID NO: 14306 - DNA, 242 bp, Glycine max
  Clone ID: 701156277H1
gaccacaccgagtcgcagaaaaagaaaaaagcgatcatagtttcacttcggccttatccagtttagggtttcggttctctaccctatctttcacgtatcgaaaccttaaatttacgatcaggtctgagcaatctggttggtagaacctttggtcttagtgagtcaagttttatgtctgaattagacgatcaaattcctactgccttcgatccttttgctgatgcaaatgctgatgactcggg

SEQ ID NO: 14307 - DNA, 246 bp, Glycine max
  unsure (1)..(246): unsure at all n locations; Clone ID: 701156278H1
gtggncaaccttggtgaccaacttgaggncataaccaatggnaagtacaagagtgtgatgcaccgngtgattgctcaaaccgatggtaccagaatgtccatagcttctttctacaaccctggtgatgatgctgtcatntctccctgaaccagccttggtgaagganttgntggggcaagcccagggttncccaaatttggggtttncnaantcnngnnccntaaaggggggccccaaatttaggna

SEQ ID NO: 14308 - DNA, 245 bp, Glycine max
  Clone ID: 701156279H1
ggaaggatgcttcttcaattccctttccttctttcttagctttgaagaccaactcatttcaacttaacccatcaaaaccatcgctctctattttcgtcctttctacctttctccgatcccaatccctaatctttctctcttcaaactctaattttttcatctggggagatcggtgacgaatcgagaggatctcatcgctcgcaagggattagggttcaatcgatcgcatcacatatcacaatcat

SEQ ID NO: 14309 - DNA, 244 bp, Glycine max
  Clone ID: 701156280H1
actgaggttaagtctgttgagatgcaccatgaggctctcacagaggctcttccaggtgacaatgttggatttaatgtgaagaatgttgcagtcaaggatctcaagcgtggttttgttgcatccaactccaaggacgaccctgccaaggaagctgccaacttcacatcccaagtcattatcatgaaccatctggccagattggtaatggatacgcaccagtcccttgactgccacacttctcaca

SEQ ID NO: 14310 - DNA, 236 bp, Glycine max
  unsure (1)..(236): unsure at all n locations; Clone ID: 701156281H1
gaacctgatcgatctctttaccagttgccacactacaccgagatnnacccctaaacccgtttgcgttgttgtttgcgaagaaatggcgactaagaggagcgtgggaacgttgaaggagggtgatttgaaagggaagagggtgttcgtgagggtcgatctgaacgtgcctttggatgacaaccttaacatcaccgatgacactagatccgtgtgctgttcccaccatnaagnantna

SEQ ID NO: 14311 - DNA, 144 bp, Glycine max
  Clone ID: 701156282H1
accgacaagcaaacgaaaagtaaatcaatcaatcgttggaatctctcaacttatcgcttcttcctgatttgggggtttccgtttcaatggacgacggcgagctggatttctcgaaccatgaagtgttttcgagtccgaacatgg

SEQ ID NO: 14312 - DNA, 240 bp, Glycine max
  unsure (1)..(240): unsure at all n locations; Clone ID: 701156283H1
aactcctttagaactgctcattaaattaaactatacatcaaatatttgaattatgtttagattgagcataatggactattcaatgctatgactggagcattttccacactctaaatcttgtgnagataagctagatcactactagtttaaggtatacgggacagctctcgaaagttttgtgctagcggcatcattaganccagtaaaacactaaacactgnttnggcaaagacactgaag

SEQ ID NO: 14313 - DNA, 229 bp, Glycine max
  unsure (1)..(229): unsure at all n locations; Clone ID: 701156284H1
ggagctctacttaaagtctgtggctagagcaaaggcagcaaaacttgcttaattgagcaaaagaagggttccctgtgcaatggttcaattttgtcagtttctacatagagacaagagttcanagttaaagctcaatcagcaggatttcactgngcataccagccattcaagaacntctcagattgggaatgatttantaaaaaatattaaatgcaacatggcgctgaaa

SEQ ID NO: 14314 - DNA, 61 bp, Glycine max
  unsure (1)..(61): unsure at all n locations; Clone ID: 701156285H1
ggaagatgatgagganacattggtagaagaaattgaagaganagaganngagananagana

SEQ ID NO: 14315 - DNA, 238 bp, Glycine max
  Clone ID: 701156286H1
gaagacatgagtttgtaaattgaagtgcgaaagaagcttaaaccccaaaaccaaaaccaaaaccctagcgaggttggttggttcccaattcccatggcttctccttctccaccgaaatcgaagttcagtgtctatcaaaatccttccttttctgcggttctcacttccaacagtcttcaaccttccaattccacaatcctctccatctcgctccttcttctctgcctccgcattcgtt

SEQ ID NO: 14316 - DNA, 231 bp, Glycine max
  Clone ID: 701156287H1
gaccacaccgagtcgcagaaaaagaaaaaagcgatcatagtttcacttcggccttatccagtttagggtttcggttctctaccctatctttcacgtatcgaaaccttaaatttacgatcaggtctgagcaatctggttggtagaacctttggtcttagtgagtcaagttttatgtctgaattagacgatcaaattcctactgccttcgatccttttgctgatgcaaatgct

SEQ ID NO: 14317 - DNA, 240 bp, Glycine max
  Clone ID: 701156290H1
gatgcacaagtttgttgagatagctagaagcaataagatgaaaatgaaagtgcttgttttgtttgctgctacagttttggtagcatatgaatgccatggctcagactaccagaagttccctctccaaatgaaaactgggtttggtgggcaatacagcaatgaggtggcatgtgccagttggaggcttggcgtggaagcaaacaacgtagtcaagtggcaaactgttcctgcagcttgcgg

SEQ ID NO: 14318 - DNA, 237 bp, Glycine max
  Clone ID: 701156291H1
ggcttgaagggaattgtgagagcgtgtgccttttgcattctctctctaaatccaacgtttggagtgtttctctctcactcctctctgcaagatccgcaccccaaaccctagcaaacccctaccgcagagggagccgagaagaacaacaacaacacgcaccttcacaaccaccaccctcgcttcttccgatccagttcgactagcttttggaaacaattataatgacaacttcagagc

SEQ ID NO: 14319 - DNA, 184 bp, Glycine max
  Clone ID: 701156292H1
atggcggaagagaaggggatgagtccgtgggagcagcactcggctgttatcaagctgcctcggtttgattacaacgctccctcttctcttctccgtaactcccattccggttttctcatcacttgtactatcaagcgagagaaaagcgctacaaaagaagcaatctctatccttcacaagttcc

SEQ ID NO: 14320 - DNA, 231 bp, Glycine max
  unsure (1)..(231): unsure at all n locations; Clone ID: 701156293H1
gggaccgcattnactttctcctacctcgtccttctaacccaacctcaacctgtttctccgagaatcacatccaacgcttctgtcatggaggaagttaacgttgtggaaactaaggatggaactgtctcagtagctgctgcgtttgctggtcatcaggaagccgtgcaggatagagaccacaaatttttaagaaaagctgttgaagaagcatataaaggggtagattgcaaa

SEQ ID NO: 14321 - DNA, 112 bp, Glycine max
  unsure (1)..(112): unsure at all n locations; Clone ID: 701156294H1
gacagagcttttgattgaaaatggtagaaaggaggagaaagcctctgatactgtgttccactgtcccaatcaanggnttcttncccccttcaatctcaatctccttccactt

SEQ ID NO: 14322 - DNA, 244 bp, Glycine max
  Clone ID: 701156295H1
ggaggtcaatagcaacaacagcaattgctactatacctgcagccttagcattctcatcatcttcatcatcttctttccctcgctcttcccaatcccccaatccccaaaatagattaggtcttgtcaaaacacttgctactcctccctctgctctccacatggaccacaaactctcttctcagcctgacgctgtcttgcccgagttactgacggagttcatggtggacatgaaatgcgaaggttg

SEQ ID NO: 14323 - DNA, 255 bp, Glycine max
  Clone ID: 701156301H1
gaagggaaaggggaagtagaacacattcaagccaaatttgttcactttatttttatatggttagggggtcttccctagattgtccattgttgtgtccatcataggttttggtggacttgccagactttctcttcaacacaacaatccatgtgatcacttccaagaacaagggcaactgcaccaagtgcaatgagcactgcagtgtaagttgatttccatttctgatcaggatgcaagatgctaaaccccctgaag

SEQ ID NO: 14324 - DNA, 237 bp, Glycine max
  unsure (1)..(237): unsure at all n locations; Clone ID: 701156302H1
gacanttaaacaagttaaaantagagcatcactgaactaacaaagcaaccctatgtcgaaggtggtttgtgtcaccggagccagcggcgccntcggatcatgggtggtcctactcctcctccagcgtggttacaccgtccatgccaccgtccaagatatcaaggatgaaaatgagacgaaacatttggtggaaatggaaggagcaaagagtcatctccattttntgaaatggatcnc

SEQ ID NO: 14325 - DNA, 227 bp, Glycine max
  unsure (1)..(227): unsure at all n locations; Clone ID: 701156303H1
gagagtaaccagtagtgtgactnagaaaacttcaagctcccagattctgttccaatgcctcccgtaccaatttcccccatcaaagttgggcacattgatgatgtccaagagctaagaaaaaccaagccaaggacaattcctcaaagatttgtacgagacttgacagaaagaccaacacttcactacacctcttcccccaccacatagtgactgccagtcattgattt

SEQ ID NO: 14326 - DNA, 50 bp, Glycine max
  unsure (1)..(50): unsure at all n locations; Clone ID: 701156305H1
caacanaggtaatagtaataangcntatgatnnattnctgttggatgctg

SEQ ID NO: 14327 - DNA, 243 bp, Glycine max
  Clone ID: 701156306H1
gagttcagacttgaggctgcaactggtgcttgctatggaattttagcaaagaataattctctgggctcgaagtatccatctgaagaaaacctcctacaatgcttgagatatttatacgactctttgcttcatcctcagatgatggtaaactatgaagcagggacaaggactcttgcaatgaactcagctcagaagctttttgactgcaagcagtttgtaaaagattataatcctgagatgtgg

SEQ ID NO: 14328 - DNA, 240 bp, Glycine max
  Clone ID: 701156307H1
ggaggtcattttctcttggatatattagcaaggttaagatacttcatcttctgcaaggagctaccagtggtgttgaaggccgtcgttcacggcgatgagaacctattcaacagctacccagaattgcaagatgccttggtttgggtctactttcactcaaacattccagaattcaacaaggtggaatgttggggcccactgaaggaagcgtcagcacccacaggtggggtccaggaggag

SEQ ID NO: 14329 - DNA, 228 bp, Glycine max
  unsure (1)..(228): unsure at all n locations; Clone ID: 701156308H1
ggtgcacaagtgagtttgttgatcgagataactagaaacagtgtgatgaaaatgaaggtcctgttttcttcgttgctacaattttggtagcatggcaatgccatgcgtacgatatgttccctctccgaatgaacactggctatggtgcccgtactccggaggtgaaatgcgcaagttggaggcttgctgtggaaacacacaccatcttgggcttgagaccattcntga

SEQ ID NO: 14330 - DNA, 247 bp, Glycine max
  unsure (1)..(247): unsure at all n locations; Clone ID: 701156309H1
gggagaggagacgaacactgataagtagtagtaatgggcagtggtggctggtaacggccaccaagaatcaactgaaaattgttgtgatgacatcgtggcaagcagcaagacccgtaagcacccatctatgctcactttcaaccaaactcaacaaatcaaaatcctaacgcacctgccctatctcactttgttcggtgtacttttgatctagtaccggctatccctatgtataaagcacggtnnnnnc

SEQ ID NO: 14331 - DNA, 243 bp, Glycine max
  unsure (1)..(243): unsure at all n locations; Clone ID: 701156310H1
ggatgcacaagtttgttgagatagctagaagcaataagatgaaaatgaaagtgcttgttttgtttgttgctacagttttggtagcatatgaatgccatggctcagactaccagaagttccctctccaaatgaaaactgggtttggtgggcaatacagcaatgaggtggcatgtggccagttggaggcttggcgtggaaagccaaacaacgtagtccaagtggnaacntgttcccccacttgcg

SEQ ID NO: 14332 - DNA, 249 bp, Glycine max
  unsure (1)..(249): unsure at all n locations; Clone ID: 701156311H1
ccataaattatttaaaaataaaaaataaaacttcacgagtgtttaaaaaatcacatgcactgaccactgcaaattatatacgcaaagaggcaaccccaaaaagcattgggcatatacattttaacacatccaaccccaaaagatcattgtcatataaaatcagtttgcaggtgatcagtaaacaatnaaccattaantcccagatatccaaagggttagtatctattggctttaaaataatnaacttag

SEQ ID NO: 14333 - DNA, 247 bp, Glycine max
  Clone ID: 701156313H1
gattcgttagggcactcaacattttacactcttttcttcttctcgttgttgcttcggtgttgaatcatggatcagaaagtcgatttcagtgctccgcattccatgggaaccactatcatcggcgttacttacaacggcggtgtcgttctcggagccgactctcgaaccagcactggagtgtatgttgccaaccgagcatcggacaaaaatcacacagctcactgataatgtttacgtgtgtcgctcc

SEQ ID NO: 14334 - DNA, 216 bp, Glycine max
  unsure (1)..(216): unsure at all n locations; Clone ID: 701156314H1
agaacatngttttanncaaaggtgcctactttattgggaagangatatggagcaaaggctacaaagaactgctccaacttcttaaagatcatgaaaaggaattatctgctcttgaggttgatttatttggcagtggagaggactcagatgaagttcagaaagctgcagaaaagttggaactagcagtagagtcccaccagctcgtgatcatgctga

SEQ ID NO: 14335 - DNA, 246 bp, Glycine max
  unsure (1)..(246): unsure at all n locations; Clone ID: 701156316H1
ggaagggaaattttgataaagaagaagaaaagggtttaggttaggggtttggggaaaatggaaagtgggagaattagtagtgagaaaaatgcgattcgaattgagaatccatttagtttgaaagtgggtcaggtgtttncaggttttggtatcggctgcggagtcggcatcggcgttggccgccctttaaatttgggtgcatacctatgttgaatcaagtaatgagtgccaccagaggtgccaccg

SEQ ID NO: 14336 - DNA, 200 bp, Glycine max
  Clone ID: 701156317H1
gggagaaacaaggcaaagcaccacaagttgacagagagagctatatattattaccgtcaattcttataataacacttgcaaatagagcattatcaactttcacctttcataggtatagtaaagtgatcattcagggaatagaagtctgatcaggttgaatgtacagtactcatcagcaacatcaaggaaagaacattcac

SEQ ID NO: 14337 - DNA, 256 bp, Glycine max
  unsure (1)..(256): unsure at all n locations; Clone ID: 701156318H1
tgccccacctaccactaccattatttgattactccatccaaacgtgggctcctaatcaatgctgcatatgcaacccacctcagctcaataccttagcactgatgataagtgttactaactagttcttcctacatatatatcccancactgatattttaatcttatactctcttttttactatttttagtgccaaggacattcttgatcgatcaaagactattttttgaaatataaatattattatacacacatggg

SEQ ID NO: 14338 - DNA, 220 bp, Glycine max
  unsure (1)..(220): unsure at all n locations; Clone ID: 701156320H1
ggaggagactgagaacncagaaganaacaaaatgncngacacagtttctgcgttgaggtctttgatggtttctcactctccgccgctggatgccttagtggtgccctctgaagattatcacctgagcgaatatgtgtctgcacgagacaagcgccgcgaattcgtttccggcttcatggaatgccggtnggcacttataacaagnagnagcatgctgtgg

SEQ ID NO: 14339 - DNA, 242 bp, Glycine max
  unsure (1)..(242): unsure at all n locations; Clone ID: 701156322H1
ggacgaatgaacaagattgaaatggcagctactattaacttgtccctgccccttttgtccctctgcaaaccccctaagtttctgaaacctccaacaacaagatttctgcaacatgaatacgtaaacagnntcagcctcagcctcagaagaagaatcactgaatcaaacacttgcagaaaaagaagagggatcgtgtgcgggttgccattgccagttgatccatgggcacctaccattgactc

SEQ ID NO: 14340 - DNA, 241 bp, Glycine max
  unsure (1)..(241): unsure at all n locations; Clone ID: 701156323H1
gattggtgacaaagttagaaacaaggagaaagaaagaagatggcaggaaagaaaatcccagatgtgttgctgaattcaggacacaaaatgccagttataggcatgggaacttcagtggagaatcgtccatcaaatgagacccttgcttctatctatgttgaagccattgaggtgggttaccgtcattttgacactgctgcagtgtatggaacagaggaagccatangcctagccgtgggcc

SEQ ID NO: 14341 - DNA, 245 bp, Glycine max
  unsure (1)..(245): unsure at all n locations; Clone ID: 701156324H1
aaaganacccggaaagggtgggaaccgcttttggaaatccattgggcttggatttaagactcccagggaagccatcgaaggaacctacattgacaagaagtgccccttcactggcaatgtttccatccgtggccgtatcttggctggaacatgtcacagtgctaagatgaacaggactattattgttaggaggattatcccccattttatcaagangtacccagaggtaccgagaaaaggcacnt

SEQ ID NO: 14342 - DNA, 248 bp, Glycine max
  unsure (1)..(248): unsure at all n locations; Clone ID: 701156326H1
ggnacaagtgantttgttgatcganataactagaaacagtgtnatnaaaatgaaggtccttgttttcttcgttgctacaattttngtagcatggcaatgccatgcgtacgatatgttccctctccgaatgaacactggctatggtgcccgtactccggagtgaaatgcgcaagttggaggcttgctgtggaaagcacacaacatctttnggctttgagaccattcctgaagattgcgttnagggccgg

SEQ ID NO: 14343 - DNA, 175 bp, Glycine max
  unsure (1)..(175): unsure at all n locations; Clone ID: 701156327H1
gcatcatggattcagagacgagtagaggngcttctntganggtgaagtatntgcatatggggatatggtggtctcagtgatganctntgttgggtatttaatggtttggattgtgatgccccaccaacatcttctttncacattggttttccagatnttccangctaagggcagg

SEQ ID NO: 14344 - DNA, 238 bp, Glycine max
  unsure (1)..(238): unsure at all n locations; Clone ID: 701156328H1
gatccatactcaaaatacaaaaatggagagagtagctaaggtgttggtgatgttgagcatggtggtgttggtgcttgcatcaaatgctgaagggggacgattacttgaggaagagaatgtggatcagccccagaccttcctggatcagtggaggcnngagtgggatatttccaagcccaagcccagcttcagcttcaccggcgtgggctttggcccatctgggttttgcatttcctgg

SEQ ID NO: 14345 - DNA, 246 bp, Glycine max
  unsure (1)..(246): unsure at all n locations; Clone ID: 701156329H1
tgacaaatacaatgatatttatttttatagttacatttttttgaagggcagaaattgtagtgaaagcgataattctagtactagtataataactagtagncnatgatacaaatgatagtgattccactataggagaaagttctaataatctcgatgaaagtcaaaaatataagcattgtgggcttgaatgcggaaattggtatgggttaaattataaaaaattttnttaatccaaaatggattatt

SEQ ID NO: 14346 - DNA, 240 bp, Glycine max
  unsure (1)..(240): unsure at all n locations; Clone ID: 701156330H1
aacagacaccgacacagatctgtcttccgaagcaggaactaaatatgggctgacttgttggaatggtcaaagcaagataagaaacgaatgcttcatgtcgtctaccgtgttggtgacttgatcgcaccatcaaattttacacagaatgtttagganncnancttttganggcaaagagatatcccagaggagaatatgctatgcttttctggatttggcctgaagatcccattttgtgtg

SEQ ID NO: 14347 - DNA, 259 bp, Glycine max
  unsure (1)..(259): unsure at all n locations; Clone ID: 701156331H1
gacacttattcttcctctctatccctctttcctgtttaccgtttcgtttgtttctgcggaaaatgggaggtgaagaaaatgtaaagcatcttgaagattgttctgtttccaatgcattgggcacttgggtattctcagttgcaggagntnncgatgggctattccagtggggataaagtgcaaatctctgggcaccccttgtattttttggcaaccatggtactatgttggatattattatgggattagtgcttgcgaa

SEQ ID NO: 14348 - DNA, 250 bp, Glycine max
  unsure (1)..(250): unsure at all n locations; Clone ID: 701156333H1
gaacacgcggcttccgccggaggtgaaccgcgtgctgtacgttcggaaccttcccttcaacatcaccagcgaggagatgtacgacatctttgggcaaatacggcgccattcgccagatccgcatcggcaccaacaaggacactcgcggaaccgtttccgtcgtctacgaggacatctacgacgccaaaaccgccgtcgaccactctncggcttcaacgtcgccaaccgctacctcatcgttctctattag

SEQ ID NO: 14349 - DNA, 245 bp, Glycine max
  unsure (1)..(245): unsure at all n locations; Clone ID: 701156334H1
gccaacggtatattgaacgtgtctgcggaggacaaaaccactggncagaagaacaagnttacnattaccaacgacnaaggaangctttctaaggnngagattnagaagatggtgcaggaagctgagnngtacaaggctgaggatgannagcataagaaganagtggangccaagaatacattggagattacgcctataacatgangnacaccattcngatgatnngatgcttccnagtgnctgcc

SEQ ID NO: 14350 - DNA, 221 bp, Glycine max
  unsure (1)..(221): unsure at all n locations; Clone ID: 701156335H1
gaagtacttgttaangtgtgtggagtgcgtcctncatagtaacaatgtaactaattgaatatgataaaacgtcactatgcgtaagcaggaacgagactacgtacatacatgctaaaaagggcatccaccccccttaaaaaaaaaatccctaaagncaaanaaagngggccccgntctantgancccngtgnccgggattnttccggccgtnnnctnggggg

SEQ ID NO: 14351 - DNA, 250 bp, Glycine max
  unsure (1)..(250): unsure at all n locations; Clone ID: 701156337H1
ggtgataaggaatgtaccgcgaanaagtgtagaaagagaaactgaattcaatggcgccactttcattgcctctgaatttgaaatggacgccgttgagtgtgaaggnnnnnnnnnnnnnnnnnnnnnnnnnnnaggtccctgaggtgccgctgccggagaagatccgcaactctagaatcctcgtcctcggcggaacgggtcgggtcggaggatccactgccattgcactctccaattatgtcccgatctt

SEQ ID NO: 14352 - DNA, 240 bp, Glycine max
  unsure (1)..(240): unsure at all n locations; Clone ID: 701156338H1
ctccaagcccatcagctcttggatcagtcatgtgatgagcatcacatgttatggcaccccccaaatattctgctattattctggctcccctttttgttgcactctccaagctctccattaccttatnnantttnccggtgatagagaatcaagttntanttaggtgancaaaagtaagttaaaacaaaancttgttaagccatattgctttaganttgctngcaaaagntgcatatggtg

SEQ ID NO: 14353 - DNA, 240 bp, Glycine max
  Clone ID: 701156339H1
tttgttaaaaaatatagacaataaaagtatgtgaattcttttaacaaatgtcttgaattataaaataagctgcctattaagagtttgcattgtctgaagtttatcatcatccctgtggggttttcatacccatttggcccattgatacacacaagaggacagtggtgtgatacacttagagctagcttaaccctttcttgatttcattttcaaaactcaattagtttatatatgtgtttg

SEQ ID NO: 14354 - DNA, 210 bp, Glycine max
  Clone ID: 701156340H1
gggcgagagtagtactaggatgggtgacctcctgggaagtcctcgtgttgcacctccaatttgaaccggtccggcccaattccggttcactacaccaaaaacccagatgaatttgatgtcgaggaatacacctatgtgacatgccgcgtacctaacaaaacgttcactaaggtatactatgatggtggtgaagtgatattattcggagac

SEQ ID NO: 14355 - DNA, 233 bp, Glycine max
  unsure (1)..(233): unsure at all n locations; Clone ID: 701156342H1
gcaaatagaaataagaaagagtataagtatgcaaatgaatctgtcttgattcttttttatacttaatgaaattacttaatgaattaatgaaatgggggggtaaaacagaaatcttattattcctacctgttagtaacattcatttacttaaaacttccgaggatgttccggatgtgttgttatgcttaatatttcctatttactnaaaatcctataanaaaaacttttaggng

SEQ ID NO: 14356 - DNA, 182 bp, Glycine max
  Clone ID: 701156343H1
atgcgctcctccaatgagcccaagaatctctttctcaaatgatttcgtggatgtgaaacaagccatgaagcaagaacaaagaggctcatccagatcagacgcgccagtatcttcagatttcgagttttcagtggcaaactactccatgatgagtgctgatgaacttttcttcaagggcaggt

SEQ ID NO: 14357 - DNA, 244 bp, Glycine max
  unsure (1)..(244): unsure at all n locations; Clone ID: 701156344H1
ggtcacacagctattcctcttaagcttgctactgagtttccacactggcataccttaggtcttccgaattcgaagttaatttgcaagatggctaaggaaaaggctcagatcaacattgtggtggttggtcatgtggaccctgaggaggcaaccacnatnngacgagctgaagaagcctgttgtggagaaagaagctccagggcatgccatatgagggnnnccnacgtacggctcggaggggaac

SEQ ID NO: 14358 - DNA, 223 bp, Glycine max
  unsure (1)..(223): unsure at all n locations; Clone ID: 701156345H1
ggagtgacactccnnggagccaagggaaaaacannaaacctgacctttccctttctccaaaggatcatcgaactaaaccaaatcaaaatcaaactttgtcacagttattggtgtgctacctccgttagttatataagacccttttataaactccttttaaggcttttcaatctccaatccacttcttccttgtgttgtcataacttcaacaacttctttcttc

SEQ ID NO: 14359 - DNA, 263 bp, Glycine max
  unsure (1)..(263): unsure at all n locations; Clone ID: 701156346H1
tttggcttctaattggctttctgcgtttggttgtttgaaggaaatttctttgactgatanaaggaaaaataggganaaaattgtattatggtatgaacaactatcatggggaacttggagcatactaggtattatgaacaactatcatggggtactggagcatactaggtgcattganggaacatgtccaattaatgattagttatctggtttttggtgntggtacttcgggagggacttnaanattgcnccattntttacng

SEQ ID NO: 14360 - DNA, 239 bp, Glycine max
  unsure (1)..(239): unsure at all n locations; Clone ID: 701156349H1
caaacttgaggatttgaaatatgaggagaactctgttaaggcagtgcaatgcttaaatgacatggtcactaatgctctgatgcatgctgaagattgcttaaaatacatggctgctttacgtgacccgcctatatttcgcttttgtgctataccccagataatggcaattggaacacttgcatatgctacaacaacattgangtcttcagaggtgtagttaaaatgaggcgaggnttaac

SEQ ID NO: 14361 - DNA, 131 bp, Glycine max
  Clone ID: 701156351H1
gggagagagagaacggaaggtccccttggctgtaagaaagcacacacaaacaaaggtgcatggaccaaagaagaagatcatcgcctcatttcttacattagagcttcacggtgaaggctgctggcgctctc

SEQ ID NO: 14362 - DNA, 255 bp, Glycine max
  unsure (1)..(255): unsure at all n locations; Clone ID: 701156352H1
ggttgctaaaactcgtgcatgggaagaagatcatggcatgtcatttacatatgatggtgttcctcttcttgccatgttagatgaatatgccatgctcagacatgaacgggaagaggaaaaacggaggatgagggatcagaaaaagcatcacgagcagcgaatcncggancangaaaccatctttggttcaagacccagccctgctagggccagttagttcccagtaantcagggggtccncgtgctaacggngga

SEQ ID NO: 14363 - DNA, 168 bp, Glycine max
  unsure (1)..(168): unsure at all n locations; Clone ID: 701156353H1
catgaccaatttttctcactggcaattcagtggcagtgtattgcttaggcttccgtcaaaatgaaaggaaaatcaatgagtctgacagaacaacttcagtcttcactcttcactagttgaacacaaataaaaaaaaattaaactacttcaaggataaataaaaggntc

SEQ ID NO: 14364 - DNA, 154 bp, Glycine max
  unsure (1)..(154): unsure at all n locations; Clone ID: 701156354H1
ggtggcagttgtgtgncacagaaattaagctanagcttcatagttgcttctnctcctcttcatcttccttcncnccctncagatcanagggacantaaatcagngagtgngananagatgaganttnnanaaccatgncccacacttntctagg

SEQ ID NO: 14365 - DNA, 235 bp, Glycine max
  Clone ID: 701156355H1
ggcacaagtgagtttgttgatcgagataactagaaacagtgtgatgaaaatgaaggtccttgttttcttcgttgctacaattttggtagcatggcaatgccatgcgtacgatatgttccctctccgaatgaacactggctatggtgcccgtactccggagtgaaatgcgcaagttggaggcttgctgtggaagcacacaacatcttgggcttgagaccattcctgaagagtgcgt

SEQ ID NO: 14366 - DNA, 240 bp, Glycine max
  unsure (1)..(240): unsure at all n locations; Clone ID: 701156356H1
gaaattaaatatttaaattaatanaattagtcgtgttctattcgattttttgaattggccnttttttacagtagctantgccagtcaccgaacttagtcaatgagctagaatgggttatnnagcnatcnanngatntatnnagatanatntaccnatngatatctntagaggactaatagngtttggacgattagnccgcatccttttcaggtagagccagggggaattanggggncant

SEQ ID NO: 14367 - DNA, 238 bp, Glycine max
  Clone ID: 701156357H1
gacgcacattgttactgaacacacaaaccctctcaccaaaccttcatcgatctctttgtttttttataaattataatattgatacgaagttgtttctgtaaatagcaattcagagaccttaaaggtagtgagtattttcctcctacttaatctattgtgtgatcaaagtcgttattattaaattagataattgataaccatgtcgatgaagctgttattagcttccctatccatttcg

SEQ ID NO: 14368 - DNA, 242 bp, Glycine max
  unsure (1)..(242): unsure at all n locations; Clone ID: 701156359H1
tattgtctctttccctggtttgccacatataaatacaaaattcaatactgatgttggatttactttacttgaaaagagattttagtatttatctatttcacttcactcaaataataaatattgggtgcttctattagtgcccacattattccgactaggtattgaaataatgttttatgttaacgctacaatatttgaaaattgaaganttagagcatcangataaganagtcatcatggtg

SEQ ID NO: 14369 - DNA, 234 bp, Glycine max
  unsure (1)..(234): unsure at all n locations; Clone ID: 701156365H1
ggatgcacaagtttgttgagatagctagaagcaataagatgaaaatgaaagtgcttgttttgtttgttgctacagttttggtagcatatgaatgccatggctcagactaccagaagttccctctccaaatgaaaactgggtttggtgggcatacagcaatgaggtggcatgtgccagtnggaggcttggcctggaagcaaacacgtgtccagtggcaaactgttcctgcagctt

SEQ ID NO: 14370 - DNA, 242 bp, Glycine max
  Clone ID: 701156366H1
gagacacgagtggcttttgttactgcgctgcgtgcagaaacagagaaggagagaagaatggacgaggagaatggttacagtgggagtagcagctcaaacttggagactacaaaagcagagagatctgtgtggctgatgaagtgcccttggtggtggctaagtcatgggcaggctcatcctcctctcaacctctcgccaaggttgtgctctcccttgatcctctccacctgaagaagacgatc

SEQ ID NO: 14371 - DNA, 244 bp, Glycine max
  unsure (1)..(244): unsure at all n locations; Clone ID: 701156367H1
gttatctgaaaagcctaaagcaaaagcacatacccccatcacttcagctgtggcatacaaatggtagatgccctgaggacacaatacctgtcaggagaaccaaggaggaggatgttctgagagcaagttcagtgaaacggtatggtaggaagaagcacagagcaatccctaagcctaggtctgcagaacctnttctaattaaccaaagtggtcatcagcatgcaatagcatatgttgaaggaga

SEQ ID NO: 14372 - DNA, 239 bp, Glycine max
  unsure (1)..(239): unsure at all n locations; Clone ID: 701156368H1
aaggctactgggtcaatgttatctccactcacaatgttgatggttacctgactcaacctgatgggtcaaatgtgaatttgaaaattcgggtacaacaattatagtccatcctaatatgtcagtacaattgcagcttcacaaaattcatttctgttctttggtcttatctgcagaaaggtttccagcatatatgtgtagaacaacctggttaccatgaatttagtnttgttgactcatgt

SEQ ID NO: 14373 - DNA, 223 bp, Glycine max
  unsure (1)..(223): unsure at all n locations; Clone ID: 701156369H1
ggaatcacatgaggngcaagtcattgccgtgtttncacctcaacttcaaaaacagccttgtattgtattgtactcacacacgacacaaaatacacggcaacgcaactcacgctgccctcaacacaaaaactcagatttgattctctctcgcaatttcattctcccctctacaaatccatttcccactcctttatgctcctctctcaccatttttcggttaaga

SEQ ID NO: 14374 - DNA, 237 bp, Glycine max
  Clone ID: 701156371H1
gaagaaaacacaacacgaatttcattgcagagtgttattttgagtatcagcatcaatggctccaattgcagtgggaaacgtgattccagacggcattttggcttacttggatgaagaaaacaaaccccaaactgtctccattcactctctcgccaccggcaagaaagtcatcatctttggggttcccggtggcttcactcctacttgcagcttgaagcacgttctgggcttcattga

SEQ ID NO: 14375 - DNA, 255 bp, Glycine max
  unsure (1)..(255): unsure at all n locations; Clone ID: 701156373H1
ggaatagaaagaagggaaaaaatggcgggcaatctggcagtaatagaacactccaacaagaacttcggcgaggctgagagagcagtgggagatctgcttcgctcgcttcatcccctatcccactctccctccctnttctgatctccttccnctcgctctncgcctcggcaacctctntccccgggggcaaactggatctccctcctcttncggtcgggctttgtttcgggnttctncntntnccaacattnnccc

SEQ ID NO: 14376 - DNA, 222 bp, Glycine max
  Clone ID: 701156374H1
aagaaaaggtggtcctttagaaggagctcatgttcacattgttcacttgtctgattcaagtgcttccttggatctgattaaggaagcaaaaagtcgtggtgacagcataagtgttgagacttgtccccattacttagctttttcatctgaagagataccaaatggagatactcgttttaaagtgttcccggcccattcgtggatgctttataacagagtaaa

SEQ ID NO: 14377 - DNA, 250 bp, Glycine max
  Clone ID: 701156375H1
gacacagagtgagatatagaatcactgaagagcttccttcaatggcggtttcttctctctctgttactcctctttcgctctcaaattcttccccctctccatcttccaagccaaagtttccatctttgtgttttctctctggcaacaacaccacattgagggtaacatgccccaaaaccctctggcactcatccactggttgttcagttggctaccggaagcggtgggattcatcccctggatcccttgg

SEQ ID NO: 14378 - DNA, 244 bp, Glycine max
  unsure (1)..(244): unsure at all n locations; Clone ID: 701156377H1
gaaggaaacagagaaaaaatggcatcctcaagagcttgtaccaaacccatcatcttcctctctgccttcaccaagtcaaagttctctcatcaatatcncgtctcttcatcaacaccacctcccacatacccatctacccaaagctctctcagcaagttccctggtggtcaaccaacgtattgaaaaacagttgagccggacagaaactctttgcggagttcccaactcggaggaatttgggtct

SEQ ID NO: 14379 - DNA, 234 bp, Glycine max
  unsure (1)..(234): unsure at all n locations; Clone ID: 701156378H1
aaccattcttccctcctcctttatccatctttcttcttttatccatatcnacccctanattgtaggcaaaacccangtgatgggagcctagcagccantacattngnaatgtaatatttnctnactatctattgaatgtaagccantttntnnttcntcttccnatgttttattttcatngctatgcattgttagggattagacatggaaaaagtctattctaagactgganag

SEQ ID NO: 14380 - DNA, 246 bp, Glycine max
  unsure (1)..(246): unsure at all n locations; Clone ID: 701156379H1
ggggaatgtactgtgcaacagaaatggtggcaccaaccttgaatgtttttccttcttcttctctaagactaagactcgaattgccctctcttcttcactcgaagctcaaacaagcacgctttccgtttccgtcgttctcnttcaaaaccctaccttccgtcctgttatctgcagagcctccgagtcacncaccgttccacctaagnatcgntcntctaacaacagaaaccctaaaaacaacagcaa

SEQ ID NO: 14381 - DNA, 233 bp, Glycine max
  unsure (1)..(233): unsure at all n locations; Clone ID: 701156380H1
gactctgggaaatccactaccactggtcacctgatttacaagcttgganccattgacaagcgtgttattgagaggtttgagaaggaagctgctgagatgaacaagaggtcttcaagtatgcctgggtgctggacaaacttaaggctgagcgtgaaagaggaatcaccattgatattgctttgtggaagtttgaaacaacaaagtattattgcacagttattgatgcgcctgga

SEQ ID NO: 14382 - DNA, 135 bp, Glycine max
  unsure (1)..(135): unsure at all n locations; Clone ID: 701156381H1
gaacaaattttgatgggccaggtgccactaatantctgaagcagatatgttcaattcatcttcaaatctcaccgaggcatcttggcccagtaaaaaatgtgaatgatttttatgacatggtgggatatactaaac

SEQ ID NO: 14383 - DNA, 211 bp, Glycine max
  Clone ID: 701156382H1
tcagatctggagcaggagaatagcgttgggagcgttcgcgtttgttctgcttttcctatcggcctcagcagacgacgtcgttgtgctctctgaagataacttcgagaaggaagttggtcaggacagaggagctctcgttgagttctatgctcctggtgtggacactggcaaaaagcttgctccagaatatgaaaagctggtagcagcttca

SEQ ID NO: 14384 - DNA, 232 bp, Glycine max
  Clone ID: 701156385H1
agttgtgcacagagatatcaaacccgagaatattctcctcactgcatccggaaaaataaagcttgcagatttcggcttggccatgagagtttccgaaggtcagaacttgactggtttggcaggaagccctgcctatgttgccccagaagtattgttaggcagatactctgagaaggtggatatatggagtgctggagtgctcctgcatgctctgttggttggcagtcttcca

SEQ ID NO: 14385 - DNA, 238 bp, Glycine max
  Clone ID: 701156386H1
ggtgcccctcaaaaaatgtaactataaataaaggcaggcacagactccattcttcttccataacaagctctgaaaagaagagagagaaggtggatagggtgatacagattacagagtttgtgtatccatcttcgttcgtcgcttggcttgttcgccttcactctccgacattcacatcattcatcagagactggagcctgcgaagaaaagaataatttatggaggacggcgcaggaag

SEQ ID NO: 14386 - DNA, 234 bp, Glycine max
  unsure (1)..(234): unsure at all n locations; Clone ID: 701156387H1
gacacaacattgatttctgagattcagatgatggcgagtgagtcgcaaaactgggtgttcatggtcactgcacagacaccaaccaacattgccgttatcaagtattgggggaaaagagacgaaancctcatcttaccggttaacgacagtatcagtgtcttctcgatccccagccacctctgcaccancaccactgctgccgtcagtnccgtttccacccaagatcgcagtggg

SEQ ID NO: 14387 - DNA, 242 bp, Glycine max
  unsure (1)..(242): unsure at all n locations; Clone ID: 701156388H1
aaaganacccggaaagggtgggaaccgcttttggaaatccattgggcttggatttaagactcccaggggagccatcgaaggaacctacattgacaagaagtgccccttcactggcaatgtttccatccgtggccgtatcttggctggaacatgtcacagtgctaagatgaacaggactattattgttaggaggattatctccattttatcnagaagtaccagaggtacgagaaaaggcactc

SEQ ID NO: 14388 - DNA, 243 bp, Glycine max
  Clone ID: 701156389H1
acccaatacacaccgttacaacctgaatccaatccaacccaacccaaggttcaaacggaggactgtgaactttaattttcagcgtaatttattgtagattaaacttttgagacttgaatctaaatgaacatatccaacacccacccctaagactctaattctactagtcttttgagagtcaaacttgaatcacgtatgccaattaagtggttttgggttagtggttgaaacttacggttccat

SEQ ID NO: 14389 - DNA, 236 bp, Glycine max
  unsure (1)..(236): unsure at all n locations; Clone ID: 701156390H1
gaagcctgcagatatttcccttttgagctttgattagtgtggcctagttgttgttttctcatgaaaaangcttccgctatgcattgcgcacttttgcgcttctgggttccctgttgctgcttgccagcttcagttttgctccttctgttttggccaaagctgaaatttcagggaatgaagtgaacacacatgggaaggttgtaagtgaagagttaaccaaatccagtctaaaagaa

SEQ ID NO: 14390 - DNA, 239 bp, Glycine max
  unsure (1)..(239): unsure at all n locations; Clone ID: 701156391H1
gggtcggtgatgcatttctctgctacaaggtcagtggcagtgccatcatctggacagaataaagtgattcctagtccaactcagtttagcatcctctataaggggaaaatgtgtatctatgaaggaattcctgcagaaaaggtgcgtgaaataatgttgattgcttctgtctctgctaagtctgctgaaatgaagagtgggatccgattgactgnggntcattcccaaaagcccttctt

SEQ ID NO: 14391 - DNA, 243 bp, Glycine max
  unsure (1)..(243): unsure at all n locations; Clone ID: 701156393H1
ggaagaaggactcaattgagaganagagatggagaagccaggangaggaggagtgttatcggcgaaggaggcattcgagaagcttgaaaaggtgggagaagggacatatgggaaggtgtacagagcaaganagaaggccacggggaagatcgtggctctgaagaagactcgtctccacgaggacgaagaaggtgttcctcccaccatctccgtgagtttccattctgcgatgtctctcgcgat

SEQ ID NO: 14392 - DNA, 241 bp, Glycine max
  unsure (1)..(241): unsure at all n locations; Clone ID: 701156394H1
gggtgaggtgctgggagtaccgccagcaaccttctattgtccgtttgacaaggtctactcgcccagacaaggctcgccgcttgggtttcaaggctaagcagggttatgtgatttaccgtgntcgtgtacgaaggggtggccggaannaancnnntccaaaaggtattgtttatggtaagcccaccaaccaaggtgttactcaactgaaatttcagcgcacaagangtctgttgccgaggag

SEQ ID NO: 14393 - DNA, 177 bp, Glycine max
  unsure (1)..(177): unsure at all n locations; Clone ID: 701156395H1
ctcattgtcaaggccgacattgatgattacttggcttctggtgctaaagaagtttcggcatcctccaannnnaangttgcagcagatgcagcattggattataccgacattccgtctctcagatacggaagtcacagcttcacggttattattatcaaaacaaactatccctcatta

SEQ ID NO: 14394 - DNA, 258 bp, Glycine max
  unsure (1)..(258): unsure at all n locations; Clone ID: 701156402H1
ggnnaaaaaagatatccctacggtaaagaagcccttctttttcttctcttacaaccaagagntcactcttataactctggactcgtttacactcgtacctaagggttgaatcaccggtggcactttccactttcttcccttcnangccacgaagcctcnatnaccggatttcaccttcgaaacgcttgaaagcgtttgaaagcgcgtgggagaaaatgtcatccttgtcggaaatagagaggacgcgaggtgaagagg

SEQ ID NO: 14395 - DNA, 248 bp, Glycine max
  unsure (1)..(248): unsure at all n locations; Clone ID: 701156403H1
aagccagctggattcaaacaagaaagcaatgtcgattcagtgcaaggtgtgcatgcaaacatttatgtgcaccacatcggaagtgaagtgtagggagcatgctgaagccaaacaccctaaatctgatgtttatgcttgttttcctcatctgaaaaagtgaacatattggagactgcaaatggagaaaactttatatcttatggcccnnccttaaaacttttggnngggatttcccnnttttatntaaa

SEQ ID NO: 14396 - DNA, 249 bp, Glycine max
  Clone ID: 701156404H1
ggagcgaagaagatattagggtttttgagtgcggtgcggcgatcctagcactctcttctgcagctttcgccgacagcttcattcaccatggctgagcaaaccgagaaggcttttttgaaacaaccaaaagtgtttctcagctcgaagaaaactgggaagggaaagagacccggaaagggtgggaaccgcttttggaaatccattgggcttggatttaagactcccagggaagccatcgaaggaacctac

SEQ ID NO: 14397 - DNA, 244 bp, Glycine max
  Clone ID: 701156405H1
gatgatgtaaatgctgcttttgacgatgctgaggaaccgagggctgatcaacaatgtgacaacgatgacatgggtcctctaatgcttaatgcatttgacttgataattttgtctcaaggcttaaatcttgcaacaatctttgatcgtgggcaggactctgtgaagtaccaaacccgttttatctctcaaaaaccagcaaaggtggttttatcaagtatggaagttgtggcacaatcaatgggat

SEQ ID NO: 14398 - DNA, 131 bp, Glycine max
  Clone ID: 701156406H1
gaagaagaagaaggagcatggccatgagcatggccatgacagcagctgcagcagtgacagtgattaaactgctgcatcacctatatatttaaaaggtttatgggaccatagtagcgagggctgtgccttaa

SEQ ID NO: 14399 - DNA, 215 bp, Glycine max
  unsure (1)..(215): unsure at all n locations; Clone ID: 701156407H1
cttcacaatcacaggaagagctacaatcacaacaacagtttcaacaacaccaacacccaaatgaactcaccagaagggaatcattgttgttgtctcctgcagctantaacaacacaaaacaattcagcaacagcncaaaggtagtagataatgtcacagctgccaacagcaccaacaccaactgttttcatgttgaatgcgagagcnctctcaat

SEQ ID NO: 14400 - DNA, 264 bp, Glycine max
  unsure (1)..(264): unsure at all n locations; Clone ID: 701156409H1
caaaatgtcctagatatgtaattttcaatttgagatttaggtttgtcattttcaatttagagatttgggtttgttcattttgtggtggctcactatttgcataccattttaaataatttaaaaaataaagaattgaaatatattttttaaaagataaataaccaagggatttgacggtaagaaatcaaatttttntcagagtgtttttttttttnccngtttgaggcgtttgagacgtggcagttacgttacttacgtaatttt

SEQ ID NO: 14401 - DNA, 238 bp, Glycine max
  Clone ID: 701156410H1
ggggggagcaaaaccaaaaacaagaacaagaacaacatcaacatcaagtttggttggtgttgtttcattttcaaataatctctctcaccatgatgaataacatggcctatcccaacaaggccttcttcctctttgtcatgttcttttctgcatctcttcaccttggcatgtttgatacttctcttgatcagcttttgcctggcctaggacaaggtgcgtttctacaagatgcaaaatg

SEQ ID NO: 14402 - DNA, 237 bp, Glycine max
  unsure (1)..(237): unsure at all n locations; Clone ID: 701156411H1
aataacgaaagagccttcaacgctgatttttgtagaatattggaccgacaaatagttaccagcttccaccctgtctctctgcgattgagaaagggactcacgttctctgttcannnnnnnnnnnnnnnnnnnnnnnnnnnnnnnnnnnnatccatgtgcatttcttgtctcatattaggcttcgaattcagaggtcgcccccttcatagcttagaagcaacttccgcaacgttttct

SEQ ID NO: 14403 - DNA, 248 bp, Glycine max
  Clone ID: 701156413H1
ggaagaggaagggaacggcctggaggaaggtatatgagttttatccatggtgatggagttcaggatgtggtaatcacaggtgaaaatgggacaatagatgggcaaggagatgcgtggtggaataagtggaggcagggaactcttcagtttaccagaccaaacctagttgaatttgtgaattctagagatattattatttcaaatgtaatctttaagaattctcccttttggaacatacacccggttta

SEQ ID NO: 14404 - DNA, 241 bp, Glycine max
  Clone ID: 701156414H1
gagcactgcactcttcgcaacacaacaaaaaaagacaacccagagagcgcgtcttaataaacgctcttctctgaaaacccccatttcttttcttctttcttcttctctttcgcttcttcgatcttcgatcttcgtcgctgaaaatgagagagtgcatttcaatccacatcggccaggccgggattcaggttggaaacgcctgctgggagctttactgcctcgaacacggcattcagcctga

SEQ ID NO: 14405 - DNA, 256 bp, Glycine max
  unsure (1)..(256): unsure at all n locations; Clone ID: 701156415H1
gacantcangtcatttnntctatcnnntgttcngctcagctcganctacctannttggntcntctctgttcngnnatntcagtgcagcagcagaaaatnaccatcctcattgagnaacctgcccttgagttacaanttgaaggcaacaatgtgcatgctnaaaangaaaannagcttgtattggatggtggatttccattgccaaaggatggatatatggccccagaatnnattcattnggcnatcttcagagaat

SEQ ID NO: 14406 - DNA, 225 bp, Glycine max
  unsure (1)..(225): unsure at all n locations; Clone ID: 701156416H1
gatagccagatccanacagacactgccagtgcganangcctatcagcaaacagagtcttcttttctttttcttttttctctacacacagtgaaggaagagagtatcatccatggcggccaccagagcagtaaccattgccagcaactccacatgctctctgcttgcaaagaaaacctttgtgggtggcatgctctttcctcancaacntnaaattttgtngtnct

SEQ ID NO: 14407 - DNA, 262 bp, Glycine max
  unsure (1)..(262): unsure at all n locations; Clone ID: 701156417H1
gttcattgtttgaaactttgaagtttttgtactagttgtagagtggaagtgcgactccatttttgtnttatgttacttttttttggcacggtttgaactttgaattcctgctaggagacccaccttcattcttcattnncatcatttagcatgtaactatcgccancgaagaaaaggcaggtgagaaaaaaaaatgtttttttgatttaaaaatacttttattcttattttattagtagctacaaaagaccatttaatttac

SEQ ID NO: 14408 - DNA, 252 bp, Glycine max
  unsure (1)..(252): unsure at all n locations; Clone ID: 701156419H1
ttagtggatatattatttatcaacaaatttaatttggtatttattatactatcgttgatgagaaaaaaaatattgataatataatataatttttaatttgtgatcaattatgttgtaagatagtgacccaataaactaacacaatgagatattaaaattgtttaattattaaactttaattaataaatttgtagttctagattagaanttnnnctaaacataatttctaattatttgaaactaaacattgtg

SEQ ID NO: 14409 - DNA, 245 bp, Glycine max
  Clone ID: 701156421H1
gacccattacgtacattcctagtgagcaaatactatgttagatattatcgataagttcagtctcttccatttattcccagaaaaagttatgccatgattgccatcccataaaggaagctaaatggataacaacagtatacagaatattatcaaagctaacgcactagatatcaagcaaaacaaaataaacttgttataattgaaaagaatattcaggcgactttaatttgtagaacaagctcaca

SEQ ID NO: 14410 - DNA, 244 bp, Glycine max
  unsure (1)..(244): unsure at all n locations; Clone ID: 701156423H1
gagggcacaacacaacacaaaggtcacaatcacaaatctgagtatagtggagtagggtttttttgcgtttgagagaagcatgagcaggagtttgggaattccggtgaagctgctccacgaggcttcggggcacgtggtgacggtggagctcaagagcggagaactctacagaggcagcatgatcgantgcgaggacactggaantgccaactcgagagcatcccctaaactgccaaggttggaa

SEQ ID NO: 14411 - DNA, 249 bp, Glycine max
  unsure (1)..(249): unsure at all n locations; Clone ID: 701156424H1
gataggatagagatcaccaacaaaatatttgctttttgttttatttcattgcaaccatgtttggctatgcagcagcaataattgcagcaatcctcttcttccaatacttcttccataggagacgatgttgcaaacaccccattttgacagaataccctatcattggcatgttaccacaattactcttcaatttatggcgtgcccatgattnctcaactcaggtgttgcaacgacatggtggcatggtga

SEQ ID NO: 14412 - DNA, 235 bp, Glycine max
  unsure (1)..(235): unsure at all n locations; Clone ID: 701156426H1
agaaggcgagttctttgaggcagagaaagaggaaaagagtgtgttgccccagcagaagaaagatgaccagaaaactgtggacgctgcagtgttaaaagccattgagagtgtgccagacttgaagtcctatttgggtgccaggttttctctgaaggccggggtgaaaccacatgagctagtcttctagaggaaagaggggtgttactcttgtttttgatatcgtgtttgtttnttg

SEQ ID NO: 14413 - DNA, 214 bp, Glycine max
  unsure (1)..(214): unsure at all n locations; Clone ID: 701156427H1
gaagattggattanggattagganaaaatggcntncaggggtatgcttcgntccaccattctcatagaacncagcntactccgttcttnaaatttcaattctaacaaacatcacatagcttcactcanccaatggnnttgccggtttcattctccaaaacccccttattcttcctctcagaacgnaacgccgttgtctcaggaccctgtnttga

SEQ ID NO: 14414 - DNA, 216 bp, Glycine max
  unsure (1)..(216): unsure at all n locations; Clone ID: 701156428H1
gggtgtttttccgaccaaaaataagccaatgacnnatttcctcttcgaaaatactacgaaaatcgaaaaccaatcgtagactaccgatgatgttcatgatgatattaaagagcaaaggtggcctcttttcatgtgaattttgagtgatccattgattcttcagctaccatcttatctgcgccaaaaaggaagagggaaaaagaaattgaaacatgg

SEQ ID NO: 14415 - DNA, 239 bp, Glycine max
  unsure (1)..(239): unsure at all n locations; Clone ID: 701156429H1
ggacgtgggtttttctagggtttggaggctatgccgaaaacgggttaaataagctcggaaaatgattctcacaaagcagtaccgatgcatacactcagctagttgtcaatgtactaaagggcatttaagtgaagatatgatattcttagtatttcataatttnnaattggaatcccaagctaattgcaactctatcatgtgtgtgcaaatggtttgatgatcttgccaagcgagttcta

SEQ ID NO: 14416 - DNA, 249 bp, Glycine max
  unsure (1)..(249): unsure at all n locations; Clone ID: 701156430H1
gacatagaaagaaaaacatgagtntgagggaagacaatgtagagggaagggatctgaagaagccatttcttcacacaggaagttggtatcgtatgagtgggagacaatccagtgtgtttggntccacacaggccatncgncngtcctccatctctgtctttgcgcgngttcnaatcgttgcttngggnccaattcagttnggttncaactgcnggtnacaccncacctacaaatctggcnatcataatg

SEQ ID NO: 14417 - DNA, 243 bp, Glycine max
  unsure (1)..(243): unsure at all n locations; Clone ID: 701156431H1
ggaataaaacaagaggaggaaatgcaacttacttgttgatataaacttcacagagagaaagttgttgtaaagccttgttgctgcnatggncacccacgnggntcttgcttctanaaggntcccttcaaacacnaggttcccatccaaggcctctcactctttcccaacccaatgcgccttaaagagacttgaggtgacaganttctctgggctnaatcnncttctgtgccaaaatgtagaagg

SEQ ID NO: 14418 - DNA, 255 bp, Glycine max
  Clone ID: 701156434H1
ggtagataaaaaattatcttttttgtaggttttatatgtaggatggttttacgcgacactggaaagtacttctgtcttcttgctaggtctacttgaaggcatattgaatgataatgattaatgagcttgtttactaatttgttgtgtcaaggacatgctttatgatttgttaaattgcatttgggattaataccttgtatgttttttgtaagaggaattctcagccaattttaacaaaagatgcaggaatcccca

SEQ ID NO: 14419 - DNA, 252 bp, Glycine max
  unsure (1)..(252): unsure at all n locations; Clone ID: 701156435H1
gggtttggccaaggggcaaaagagaagagatttgttgaagttggtacataaatggaaacggaggtttttggtggtattacgctatcatacgtgttcaatgctagtaccaaaatgatgctcctccaatatccatgcatgggtgaagtgggcaaaagcgaaagaaacatgaggaggaatttactttgtgnccttcagcttatttgatgnaacatngcccatggggttaaaaagntntggattgnanttgaggga

SEQ ID NO: 14420 - DNA, 245 bp, Glycine max
  Clone ID: 701156436H1
gagagatgatcaaacgaaccgtagggcgctgcattattacagaataataacacaaaccctagtcccaaaaatcaaaaaggaaaaaaaaaatcagataacaaacttatcacttcgctgcgagattcaattcccatctttaaaattctcaaatccgaattcgattcccaattccgcctcttgttcagaaattgattctgtgtcgttacaggggaaaatttctctgcacgacatgtctgatgaacgag

SEQ ID NO: 14421 - DNA, 254 bp, Glycine max
  Clone ID: 701156437H1
ggatgcgactctgctacttcttctacctctaccgtgttactgttagggcttactgagttgcaagattcacttcaaattatgcgtttcgctgatcggttcctcatcacatcaaacgacgtcgcagatcatcgcaattccttgattatttccttttgttgatacgcggaatcgcgcacacggtgctggtgtgtgcactgaggtagaaagaagaagattgaattgtaaacagcatgaattaccttcttggagctttc

SEQ ID NO: 14422 - DNA, 239 bp, Glycine max
  unsure (1)..(239): unsure at all n locations; Clone ID: 701156439H1
ggatgaaaaaaaattcacctcacccatcagacccgtaaacttccttcttagacccgaaaaccttctcattaccccaacccagaggagtgttgattatgttggtggtttcgaatcttctgctggagaagagctcaaaggccgcaacgcccaagagctttcntcttcggattcttgtcagcnaccaaccatactggatgnttcccaagctacaaagacgcgnggagaagaagatagggttt

SEQ ID NO: 14423 - DNA, 214 bp, Glycine max
  unsure (1)..(214): unsure at all n locations; Clone ID: 701156445H1
ccatggattcttcttcacacatggcttcgcttccggaagatatcatcaccgacgagcatttacaacagcaaactcaacccgcctcagcctctgctttcgcttccgttcctcagcgcccgccaactaagagctcntcagaaaaatatacacctttagattggtccgtgtattttgacaaagaagacgatgttgcaattcccgaatcgaacgatgt

SEQ ID NO: 14424 - DNA, 236 bp, Glycine max
  unsure (1)..(236): unsure at all n locations; Clone ID: 701156446H1
gtcggatttcttttaagctttatgattggaatcctgcggaatttcctagaaggctacgacatcaaatattccaatggttggcaagtatgcctgtggagttggagggatatatccgccctgggtgtacgatcctgacaatttttattgcaatgcctaacatcatgtggataaatnnactgnnagaccctttggagtatgtgcatgatattgttgctcctggaaagatgctatctgga

SEQ ID NO: 14425 - DNA, 243 bp, Glycine max
  unsure (1)..(243): unsure at all n locations; Clone ID: 701156447H1
taatactatagttaagacaataattatgagttaggggtaatgaattagtcaagtgcgcataaataattatattagaaacttcttacttctaacagttagattaatgcggatatgaactttctgtttagaataaatatttcccttataaatatgagangcaattatatattngggtactcncttgaggtnctaannctncctttnccccncntgnagacctcggaaacccagttcagatnctnc

SEQ ID NO: 14426 - DNA, 245 bp, Glycine max
  unsure (1)..(245): unsure at all n locations; Clone ID: 701156448H1
ttcaaatattttcctttttagctttgattagagtggcctagttgttgtttttctcaatgagaagggtttccactatgcattgcgcactttggcgcttctgtgttcccttgttgctacttgctagcttcagttatgctccttttgttttggccactgaaatttcagggaatgaagtgagcactgatggaaaggttttaaatgaagagttagcaaaacctaatctacaaggncatgatgaggangca

SEQ ID NO: 14427 - DNA, 253 bp, Glycine max
  unsure (1)..(253): unsure at all n locations; Clone ID: 701156450H1
ggtgtacatgatgaactctaggaagtttgcaaaacggataaagagtgagcggaagttatattccggaaagttatatctttttcagttgtagtgtttttttgtttttatttttccctagataagcagaccgtggaaaactgcaagtgaaagctggagcttttgcttcaatcacatttgactatttcactgattagaacnngcaaagatgtctcttttgggttgatcttttatgtttcgatcaattgaatttcca

SEQ ID NO: 14428 - DNA, 253 bp, Glycine max
  unsure (1)..(253): unsure at all n locations; Clone ID: 701156451H1
gacacattgttctactcatacctcaaaaaaggcaaagcttattcccccaagacttagctagcactagcnaacacctcnatatctaaaatggtttcaatttctgatcatgaactggttttgatctttggtctcctaggtaacattgtgtcattcatggtgttcttagcacccttgccaaccttctatacaatttacaagaagaaatcatcagaaggatttcaatcaattccatatgcggttgcacttcttagcg

SEQ ID NO: 14429 - DNA, 231 bp, Glycine max
  unsure (1)..(231): unsure at all n locations; Clone ID: 701156453H1
ggagcaataattgaggttgagatgccagaaatttcactaaaacccgtgtatgttattttacttctttgatattaaaagttctttaatttaagttttcagttatggcttccaaccaagaaataacagcccctttgagatattgggtggacaatgaacgaaagcgtgtagttatggcggaagcaagtggacactttntagatgttctctttagtttcctaacccttccattgg

SEQ ID NO: 14430 - DNA, 204 bp, Glycine max
  unsure (1)..(204): unsure at all n locations; Clone ID: 701156454H1
aanncgacagaagggatcagtngtgccccccaggataacaacataatgctgtggaatgctgtcatatttggtcctgatgatactccatgggatggaggcacgttcaagttgacactccaatttactgaggactatccaaataaaccaccgactgtacgatttgtgtctcgcatgtttcatccaaatatttatgctgatggaagt

SEQ ID NO: 14431 - DNA, 237 bp, Glycine max
  unsure (1)..(237): unsure at all n locations; Clone ID: 701156455H1
tctgcaaatctgtattaatgttcttgcaatctaacacccatacattgagtaaaacttgagtgtaaaacaagtacactatacacaaacgcatccactcattcatttatctaaagcaaaacacaaattaagaaactcacttgcatgatctcccatattgccattgaccaaggcctcagaatatagcaaccggnaatatcatagtattcatcatttcggcattaacaacaacctgccnga

SEQ ID NO: 14432 - DNA, 238 bp, Glycine max
  Clone ID: 701156456H1
gatagcatattccagtgtttttcatttcatcgtgcattcaatggccaccacagcagctctatccggaaccatggtgagcacctccttcatgaggaggcaacctatgaccaccacaagcctaaagacattccccaacgttggtgaagctctttttggtctgaaaagtggacgaggtggtcgtgtcacttgcatggcctcgtacaaggtgaagctcataaccccagaaggagaagtggag

SEQ ID NO: 14433 - DNA, 247 bp, Glycine max
  Clone ID: 701156457H1
ggaagaaggtggaactagctaatggaatgtccacaccaacacaagacattttgtctcacatgctaatatattgtgatgagaatggacaatatttggctgaacatgatattgtcaacaagatccttggcttgctgataggtagccatgaaaccacaagtactgtttgcactttcgttgtcaaataccttgccgagctccctcaaaatatttatgaaaatgtctatcaagaacaaatggcgattgcaaa

SEQ ID NO: 14434 - DNA, 230 bp, Glycine max
  Clone ID: 701156458H1
gttgtgcattgaaaaaaagcaaaagattgttttgaggtttcttgcactcatttatgattgtatgagctcttgtgatgagttacttttggttgtgtttactattggtgtagtggttaaattatttggcagctgtccataaccagagagcgtactgcttaattaggaggtttgatatgatgaaatagtttgtattgttattgcagaaggtaggtttaattcagtattccatc

SEQ ID NO: 14435 - DNA, 232 bp, Glycine max
  Clone ID: 701156459H1
gaccccaaaataaaataaaataaatctatcatctcctctttctccgggccttgttgccatcctggatacatatggacggcgaaaggttgagggagatggaggagatggggtgtggtcattatgtgggtcatggctacgtgagcaattggggcatgcaatgcaacaacatgcgtcgtcgtcaccatacgggtgaagcaccactgtcgacgacggcggtttccagctacagaaa

SEQ ID NO: 14436 - DNA, 232 bp, Glycine max
  Clone ID: 701156460H1
atggtatctttccttctttagaattaactgtgttgttgattaagccatgatgaataaatccatgttgtgtatggacactacaacgagctttttttatgggcaggcaatgaattgtgtggaagtggaattggagcaagtgttgcagcagatcaatatgcttctgatgttgctgctttaagaaacatagttgaaaatgcatatagagggattgaacctaagccactagtcattg

SEQ ID NO: 14437 - DNA, 240 bp, Glycine max
  unsure (1)..(240): unsure at all n locations; Clone ID: 701156462H1
ctatctatactcctttgagtttctcatggatgatggcagctgganagcttctgttcacagatatcagagtggtaagactaggtatgcacattaccgccagtccgataacttattggcggatnnaancaannattgcagcttttgcttccgccatatcagcgatttcatctttaanatgaaagcgtaccagtnataacgncagntncanttccccnannntnaaaacccccgggggnnnnc

SEQ ID NO: 14438 - DNA, 247 bp, Glycine max
  unsure (1)..(247): unsure at all n locations; Clone ID: 701156463H1
ggcacaagtttgttgagatagctagaagcaataagatgaaaatgaaagtgcttgttttgtttgttgctacagttttggtagcatatgaatgccatggctcagactaccagaagttccctctccaaatgaaaactgggtttggtgggcaatacagcaatgaggtggnctttcccatttggaannnttgngcggngacnnanangngttcnangngggganannntccngccanctggctggngganna

SEQ ID NO: 14439 - DNA, 261 bp, Glycine max
  unsure (1)..(261): unsure at all n locations; Clone ID: 701156465H1
gaatgcacaaaactgtaacgtgacgaaacagagggattataaaaagagaagttactcgatagttcaaatcagaagatggttcctgtcacaccaactcaataacagatcaaaccanacccaaactgttaggaacngaaanntttggtgtgaagccatggctgattcttcttccaacctgaaatccgacgcgataatggagcagatgaagcaacacctcgccaccgagttgggcaaacaagtcaccaataaaattggactcgt

SEQ ID NO: 14440 - DNA, 227 bp, Glycine max
  unsure (1)..(227): unsure at all n locations; Clone ID: 701156466H1
aagatggagacagtgntgagctgagcaatattggcncattttgatctttcatcgaataatatgaatctggatctttactgggatgccaacgagaatcttccgatggatgatgatggatttttggaatacaatgatattgcaattgggaatggggataatcctaccgannncgatctttctgcaaatgccatgctagatgagtatgctgcactcgctgatgatgatat

SEQ ID NO: 14441 - DNA, 241 bp, Glycine max
  unsure (1)..(241): unsure at all n locations; Clone ID: 701156468H1
gcttcttgcggcgtgagatcgtgcgattataccgatcctaacagagtgagntttcagggttacataatgaccaagaagnnnncacanaatngggttgntgttgganagggnnatngngttngnggtgntgtagatttggagtctgtcatacacaaccacgctctntttttcgacaagttgattgaattgantcccgccaagttctatctgccaaccgatgacaaggagaagccatggtttc

SEQ ID NO: 14442 - DNA, 239 bp, Glycine max
  Clone ID: 701156469H1
catatgagaatatgacacgtaatagtcataatccaataaaaacgtgacatatgaccgtcaacattatttcgtaacatccaattgtggacaagaagaccaatattaagtgatttgattacatacaaagataaagttcgtgaataattttattaaagggataaaatataagattaaagataaaatgggagatcaaatttataatttttcctttctacaatatctaattttaacaagaaact

SEQ ID NO: 14443 - DNA, 239 bp, Glycine max
  unsure (1)..(239): unsure at all n locations; Clone ID: 701156470H1
acttccatagtttcatgattgaattctaagtattttaaattttcattactaatgaacacattattaagaacatcaatcaaaaatcaggaagcataatcagattgtatgcaagantctagaaatgcaaaaatttgaaatatgctatttctagaaacataactggtaccccaatgaagaaaattggattcaaatggcatgcatacactttatgcaataccaaaagctgcacttggaacaga

SEQ ID NO: 14444 - DNA, 236 bp, Glycine max
  Clone ID: 701156471H1
ggagtttgttgatcgagataactagaaacagtgtgatgaaaatgaaggtccttgttttcttcgttgctacaattttggtagcatggcaatgccatgcgtacgatatgttccctctccgaatgaacactggctatggtgcccgtactccggaggtgaaatgcacaagttggaggcttgctgtggaagcacacaacatctttggctttgagaccattcctgaagagtgcgttgaagca

SEQ ID NO: 14445 - DNA, 234 bp, Glycine max
  unsure (1)..(234): unsure at all n locations; Clone ID: 701156472H1
gacggacgagggtttcgtttcgggtttgacgttgttcacaatcactttctgcgcttcactcactcccttcgtgcggttttctttctttgtcgaactcgtgcgaaaatgcgtgagattcttcacatacagggagggcaatgcggaaaccagatctcagcgaagttctgggaggtggtgtgcgcggaccncggncncattccacggggaggtaccagggggacaacgagttgcaac

SEQ ID NO: 14446 - DNA, 233 bp, Glycine max
  unsure (1)..(233): unsure at all n locations; Clone ID: 701156473H1
gacacacattagtagttaaagttctcacttgagttctgaactcctctgcattccttagtgaggctaatggaactacagactaatattggtgaaaatgatactagcactagcannnnnnnnnnnnnnnnnnnnnccatgttattcagttgctgtggacattaatgnacaagtgaggcaagtggcagcaaagcataacgtgtcttgcctcctagtttttggagactcaagtgttg

SEQ ID NO: 14447 - DNA, 232 bp, Glycine max
  Clone ID: 701156474H1
agctccctgcatcctatcaaaacttgtacttttccagacaaagtcaacactgaaaccatggttaacatcaactggaaccccctgcaaataacaagggcaataagcacagggcacagatgaagagcttgaaggcacaacataagcatcacaaactaatgctaagttcacctgactagcacgaagctccagtgcaacctccccttgtgcagttagcttaatctgaaaatagaat

SEQ ID NO: 14448 - DNA, 247 bp, Glycine max
  Clone ID: 701156476H1
ggtggtagtgtggcagcgacacgtatcaacttcaataatcgcatcgcagaagcagtttccggtgcatctcatcgtctccgaaaatgaacgacgcagatgtctcgaagcaaatccagcagatggtgcggttcatccgccaggaagctgaggaaaaggccaacgagatctctgtctccgccgaagaggaattcaatatcgagaagctgcagttggtcgaagccgacaagaagaagatcaggcaagaata

SEQ ID NO: 14449 - DNA, 233 bp, Glycine max
  Clone ID: 701156477H1
gatactcaattcattttcttcttctgcttcaccttctcttctcttctctcatagggttagggtttttttctcttcattgctctctctgtcgttttatttccatggctcagcaagatgctcagaatggtgggtcggagaatgccgctgctgcggtgtcgtttgtcgctttgaagccgcagctcctcatcgaagctcccaaagcgaacgacgccgttctgttctacaaggccgcg

SEQ ID NO: 14450 - DNA, 234 bp, Glycine max
  Clone ID: 701156478H1
cacagaggcaaagcagaaaagcagaaggcggaaaactgcctcgtggttaaggaagtgtgtattgcagcttggtccaactttcattaaacttggtcagttatcatcaacaaggtcagatctatttccacgtgaatttgtggatgagctcgcaaaattacaggacatggttcctgccttctctcctaagaaagcaagaaaattcatcgagagtgaattgggagctcccataacata

SEQ ID NO: 14451 - DNA, 244 bp, Glycine max
  unsure (1)..(244): unsure at all n locations; Clone ID: 701156479H1
ggagattgggaagcattggtggctagctaagcgnnntataagccanactcttcagcagtttgnnttagcttagcttcttcttctgcctntgctttctccaccaccanaaccaccatgtatgtgccactgcctccaacactttcttccttctctctggtttccntctctggcggncncctctgngtcctaaccggngttncccgngtncccggggaattnagnacngtnttttaaaaaaaaaggc

SEQ ID NO: 14452 - DNA, 179 bp, Glycine max
  unsure (1)..(179): unsure at all n locations; Clone ID: 701156481H1
ggaggagaggtgcggcgatggcttttgcagtnacgcccaagataataacggtgtcattcgataagcaaaaccaaaggaggagtttcgaaggattgtttgggaaaaggtatcgggtaagggtgaagcgaagtcaagatcattcagtgaagtgtgnnagagagcgaacagcagcgatggaa

SEQ ID NO: 14453 - DNA, 245 bp, Glycine max
  Clone ID: 701156482H1
ggcaatcagattaggatcgataaacaatttctgcagatagatagaagctcagcatgtgatggaggatgaagctgtttaagaacaactttaggcaaccgagtatgatccatgcactaagccaaatggattggcacataatctaattataaaatattagctatttgacttttatagtcactgtcgctggtcatcatgagatgattgattattaatgttggaggatagacaaaagcaatttccccccg

SEQ ID NO: 14454 - DNA, 252 bp, Glycine max
  unsure (1)..(252): unsure at all n locations; Clone ID: 701156483H1
gacacattgttctactcatacctcaaaaaaggcaaagcttattcccccaagacttagctagcactagcaaacacctctatatctaaaatggtttcaatttctgatcatgaactggttttgatctttggtctcctaggtaacattgtgtcattcatggtgttcttagcacccttgccaaccttctatacaatttacaagaagaaatcatcagaaggattcaatcaattccatatgcggttncacttcttagcg

SEQ ID NO: 14455 - DNA, 238 bp, Glycine max
  unsure (1)..(238): unsure at all n locations; Clone ID: 701156484H1
gggagagaaaaaaaaaaacagaattacacagaaactcaatcaaaataaaaatttattatggatcataggttacgttgttttgtgacaatacccaaaattccttttctatngctactttctctgattctcgtcttcagttacgttaacgcagccttcgacctcgctactatacccttcaacgatggctattctccgctcttcggagatagcaacgttgttcgctccgaggatggcaacg

SEQ ID NO: 14456 - DNA, 242 bp, Glycine max
  Clone ID: 701156485H1
ggtagaaatttgtgatggcatcggttatggtgaatcgaggtggttccaggatcatcaagtcagtgtctgcagctcttggtacgaggtttttcgcaaaggttgcaactgggactgacatagtctctgccgcacccaatgcttctctccagaaagctcgtacctgggacgagggtcttgcttccaagttctccaccactcctctcaaagacatcttcaaggacaagaaagttgtcatctttggg

SEQ ID NO: 14457 - DNA, 234 bp, Glycine max
  unsure (1)..(234): unsure at all n locations; Clone ID: 701156486H1
gggagtgaagaagattaacgaaggatggaatctgggtctagcgaaggagaagaggtgcagcaacgcgtgccgttgagggagagagtggagtggtcagatgttactccggttcctcaaaacgacggccctaaccctgtcgttccgatccagtacactgaagagttttccgaagttatggattactttcgcgccgtttacctcaccgatgannggntcccctcgnncctcgcttta

SEQ ID NO: 14458 - DNA, 233 bp, Glycine max
  unsure (1)..(233): unsure at all n locations; Clone ID: 701156487H1
gatcgaagcaaaaaatgaaaacccaaagtgcttctctcctctgtctttttctctctcttgctatccttttggctagtggcactgctgcaagtgcaactccaagaagcgcagtgccaagccaccatgtttcaacattcaacagaagcctttttccttccacttttctctttggaattggttcttctgntnaccaggtcnaggagcagcaatgtagntgggagaggnccaancnt

SEQ ID NO: 14459 - DNA, 300 bp, Glycine max
  unsure (1)..(300): unsure at all n locations; Clone ID: 701156488H1
ggagggcgaggaagccacatagagacacaatacagagtgagttgttgcttccttcgccacaaacttctctggccaacatgggtatnctnccagagattctatggcacaagagggcgtggccaactgcgtgggcaagcaagaaagggcctgggagggaaaaaagcaganaagtcatggaggctttgggttcggccaggcctngnctgaancaacttaaggctngtacaaaggcaaaccaaggaacaagttncagggaagggattcccgttggttnaggaagggttgggaaaattggtggaa

SEQ ID NO: 14460 - DNA, 228 bp, Glycine max
  Clone ID: 701156490H1
ggagaacaaaacaagtgtttcgaatagattatcctaagtctttgggaatagtgctgcaatggcttcaagtcaggaggaggtgacccttttgggagctactggaagcccatttgtgtgcagggttcatattgccctcaagttgaagggagttcaatacaaatatgtcgaagaaaatttgaggaacaagagtgaactgcttctcaaatccaacccagttcacaagaaggt

SEQ ID NO: 14461 - DNA, 205 bp, Glycine max
  unsure (1)..(205): unsure at all n locations; Clone ID: 701156491H1
ggggagcgaagtganannanattgnagtgactcggggtgagttgactncagcaatggcgnaagangtgactcgggtgatggtggcngtgaacgagtacgancantaagggataccctcatccttcgtcagcaggaaaggggtttcgactggaccatcannaagatcgttcgcgacaacgtctctgccttcaacctctttttctca

SEQ ID NO: 14462 - DNA, 229 bp, Glycine max
  Clone ID: 701156492H1
gaggtattttccaactgtccatagatgtctaatatcacatcacatgtgacggttattattgttgtatctgagtgatgatgtattgatgtgaatagttgtatctgagttattattgtctaatatcatagtatgaatgattattagtgtatatctatatagatttgtcattgaatctgaatttgatagaaaagaaaaacaaaacccagatgggtaatgagtgattattatt

SEQ ID NO: 14463 - DNA, 240 bp, Glycine max
  unsure (1)..(240): unsure at all n locations; Clone ID: 701156494H1
ggatatcgttgagagtttttacaggcctggttcgggagactataggatacggctttttatccgaactgaactcttggggaagggaattccacccactcatcaatggcatctactctcttcgcttgncccgtcgttgtgttcctcctctnccttctatattttctacttccgtcaaattctccttaaacccgaataaaatttctcttccgttcgccggaaacaaaaaacctctttcggctc

SEQ ID NO: 14464 - DNA, 239 bp, Glycine max
  unsure (1)..(239): unsure at all n locations; Clone ID: 701156495H1
ggaaaaaaaaatggctggagatgaagaaaagcttcgaatagtgtgatgtttccatggctagcctttggtcacatgatcccaaaccttgagctggccaaactcattgctcaaaagggtcaccacgtgagtttcgtatccacccaagaancatagancgttttccaaaacngtcactaaacacattgatatcaatttngtgaaccttccactgcctaaagtccaaaaccttccagaaaacg

SEQ ID NO: 14465 - DNA, 242 bp, Glycine max
  unsure (1)..(242): unsure at all n locations; Clone ID: 701156496H1
gaattcaaaatatatacatcaattataagcatgggtttgtggaacacaacgaatgcagtgtcttgccgctttcacaagtttggtgatgaccaaaagaatctggtcttccaaggtgatgccacgtcttcttccaggggcatagaactcacaaagttagacggtggaggaaaaccagtgggtggcagtgtggggagagtgttatactcttctccagtgcacctttgnannncanctacagtgga

SEQ ID NO: 14466 - DNA, 263 bp, Glycine max
  Clone ID: 701156501H1
gaagcaaaagatggaacttgtgatgcatcaaaggtgaatgaacctgcagtgtcaattgatggccatgagaatgtccccgtgaacaatgaggccgcattgctcaaagctgttgcccatcaacctgtatcggtagccattgaagctgggggaattgacttccagttctattcagagggagtatttacgggaaactgtggcactgctctggatcatggggtagcaattgtgggctatggaacaactcaagatggaaccaaatattg

SEQ ID NO: 14467 - DNA, 118 bp, Glycine max
  unsure (1)..(118): unsure at all n locations; Clone ID: 701156502H1
atgtagtttataatagggcggtgtttgtttagaagtctagccatgcgagattatgcagtgatnncaaaaacaatccttttcttttgccatatttatgtaantttaacattagtaaaat

SEQ ID NO: 14468 - DNA, 266 bp, Glycine max
  unsure (1)..(266): unsure at all n locations; Clone ID: 701156503H1
ggagggcgaggaagccacatagagacacaatacagagtgagttgttgctccttcgccacaactctctgccaacatgggtatctccanagattctatgcacaagaggcgtgccactggtggcaagaagaaggcctggaggaaaaagagaaagtatgagcttggtcgccagntccgctaacactaagctgtcaagcaacaagacagttcaggaggatccgtgttagaggtggaaatgtgaaatggagggcntgagattggatactgga

SEQ ID NO: 14469 - DNA, 264 bp, Glycine max
  unsure (1)..(264): unsure at all n locations; Clone ID: 701156505H1
gaagagagatctaactattatgattctcttcttgctgctgaatcgcgtgcaatttnctggaaggaaaggcacccactctgccaaggatcctccagtgatgcatataactgatttgaccatggcatcggctaagaaagccagagacttcttgcctttcctgcaccgaagtagaagagttcctgctgttgtggaatatgtgctcagtggccatcgttttaaattgttaattccaaaagaaacttgcagcattgcgttctctttttc

SEQ ID NO: 14470 - DNA, 287 bp, Glycine max
  Clone ID: 701156506H1
ttgttggtttttgttaatccgtttggtgggaagaaatccgctacgaagattttcgctgaacaagtgaaacctctttttgaagatgctcatatccaaatcacagttcaagaaaccaagcaccagctccatgcaaaggaagttgctcgttcgctagatattactaaatacgatgggattgtttgtgttagtggagatggaattttggttgaggttagcttcattgccattacacttgttgcactatttgttatcatcatcttgatcgtcatcgtcatgttcgtggttat

SEQ ID NO: 14471 - DNA, 292 bp, Glycine max
  unsure (1)..(292): unsure at all n locations; Clone ID: 701156507H1
tggcgtgaaacaagcctctcaccttctcaagtacgattcgatcctcggaaccttcgatgctgatgtcaagcctgttggcagtcgncatcatctctggtcgatggaaaggaaattcaaagttgtctctgaccgcaaccctgccaaccttccttggaaggatttggggatagacttggtgattgaaggaactggggtgtttgtagacagannaggtgcagggnnnacacattcaagcaggagctaagaaggtgctcattactgctcctggtaaaggagacatccccacatatgt

SEQ ID NO: 14472 - DNA, 273 bp, Glycine max
  unsure (1)..(273): unsure at all n locations; Clone ID: 701156511H1
ttcagctatgttatacactagacaattttntttcctttaataatttctcatgtgaatcttgcaacatggtcaccattgattttggagcctgaacaagtaaattagatcctttaaaaaagcaaagcaaaccaaagcgtcattgctgataaacttagtttttttcacaagtagcatagcacatggttttctcctgaaatttcacataacttaaggatgatcttacaaattacaataccattannttcagagatataaggttggttgactagtaaa

SEQ ID NO: 14473 - DNA, 260 bp, Glycine max
  unsure (1)..(260): unsure at all n locations; Clone ID: 701156512H1
gtatgcttaaaacatgatagctataagatgcatttcatctgtcttctttaaggattcagatgtttgctatttgttgggtactccatcttcattatcccaaaagaaccatccctatttattgacttcatatttggcgttttgcctaaagaaaaaatagcaagtagaaggattaggtaggtagagaaaagccactagcaagagagannggaaaattgggttcataacgttaaatctgatattgtaaaattgggcacacatgt

SEQ ID NO: 14474 - DNA, 263 bp, Glycine max
  Clone ID: 701156513H1
gggcaagggaaatccatgctaatagtgagatttggaggaacaaaaagatcaccactagcaaaagtgtttcctaagtggtacctccaccagaatgcaagcaaggtgtttgagcaagacatgggattcttgtcatcacaaaatgaaattcttctgaaagaaaaggtttcaacaaaggaactatacctgaatctgaaatcatcagacacatgggttgctgaatacaggaagtggatggacaaagcggggcatggaatgccatatca

SEQ ID NO: 14475 - DNA, 263 bp, Glycine max
  unsure (1)..(263): unsure at all n locations; Clone ID: 701156514H1
ggnggaaaaaaaataatgttgggggcattagtccaagtccaaccacattagcgtanggtgcgggggcgaggaagagtcaacgacgactggattttaacgcgtctaaaagatggatcttgataaataccacttcttaaactaatatagttccatcctctcaaacttgcattttagcaatggccaaatggatctcatttgctgctcttttgcaatacttttactactcatctctcctgagcttgcaagtgctgcccaacctagtc

SEQ ID NO: 14476 - DNA, 264 bp, Glycine max
  Clone ID: 701156515H1
gatcttttattgaattgattccaaatacaaacatgggcaatgaagaagttcttgtgggttgttctgtccctttctttggtccttggagtggccaatagctttgattttcacgacaaggatttggagtccgaggaaagcctgtgggacttgtacgagagatggaggagtcaccacacggtttcgcgaaccttggtgacaagcacaagcggtttaacgtgttcaaagcgaatgtgatgcatgtccataacaccaacaaaatggata

SEQ ID NO: 14477 - DNA, 270 bp, Glycine max
  unsure (1)..(270): unsure at all n locations; Clone ID: 701156516H1
gggcaagggaaatccatgctaatagtgagatttggaggaacaanaagatcaccactagcaaaagtgtttcctaagtggtacctccaccagaatgcaagcaaggtgtttgagcaagacatgggattcttgtcatcacaaaatgaaattcttctgaaagaaaaggtttcaacaaaggaactatacctgaatctgaaatcatcagacacatgggttgctgaatacaggaagtggatggacaaagcggggcatggaatgccatatcattttggt

SEQ ID NO: 14478 - DNA, 259 bp, Glycine max
  Clone ID: 701156517H1
ggcatatccaaaggaacaaaaatattattaagatgatcaacattattggagcacttgttctactctttgcatttctcttcctcagttgtgtgtatgcacaagacacaacaacccttgtgcctgcaatcataacttttggtgattctgctgtggatgtagggaacaatgactatcttcccacccttttcaaggctgattaccctccttatgggagggactttgttaaccaccaacctactgggaggttttgcaatggcaa

SEQ ID NO: 14479 - DNA, 259 bp, Glycine max
  Clone ID: 701156518H1
gatcacttattaattgtgttaagaaatttaagtgaggagctagagaatgatgatgaagtctgctatgtgtgcagtggtggttgtagcacttcttcttctggcggaggtggggcccatggctgaggctgtgacatgcaccccaacagagttgagtccgtgtcttccagcaatcacttccggtgctaaaccttccaatgctgttgcacgaagctgaagcagcaaaaaccatgctatgtggctacctcaaaaacgctagctt

SEQ ID NO: 14480 - DNA, 260 bp, Glycine max
  Clone ID: 701156519H1
ggcatcaattcaaaatatatcatcaattataagcatgggtttgtggaacacaacgaatgcagtgtcttgccgctttcacaagtttggtgatgaccaaaagaatctggtcttccaaggtgatgccacgtcttcttccaggggcatagaactcacaaagttagacggtggaggaaaaccagtgggtggcagtgtggggagagtgttatactcttctccagtgcacctttgggaaagctctacagtggtcgcaagctttgaaa

SEQ ID NO: 14481 - DNA, 258 bp, Glycine max; identical to SEQ ID NO: 8260
  Clone ID: 701156520H1

SEQ ID NO: 14482 - DNA, 264 bp, Glycine max
  Clone ID: 701156521H1
gaagaaaacacaacacgaatttcattgcagagtgttattttgagtatcagcatcaatgggctccaattgcagtgggaaacgtgattccagacggcattttggcttacttggatgaagaaaacaaaccccaaactgtctccattcactctctcgccaccggcaagaaagtcatcatctttggggttcccggtgccttcactcctacttgcagcttgaagcacgttcctggcttcattgagagagcagaagagctgaaaggaaagg

SEQ ID NO: 14483 - DNA, 275 bp, Glycine max
  Clone ID: 701156523H1
aaagagacccggaaagggtgggaaccgcttttggaaatccattgggcttggatttaagactcccagggaagccatcgaaggaacctacgttgacaagaagtgccccttcactggcaatgtttccatccgtggccgtatcttggctggaacatgtcacagtgctaagatgaacaggactattattgttaggaggaattatctccattttatcaagaagtaccagaggtacgagaaaaggcactccaacattcctgctcatatatcacctgctttcc

SEQ ID NO: 14484 - DNA, 269 bp, Glycine max
  unsure (1)..(269): unsure at all n locations; Clone ID: 701156524H1
gataccaaaaacaanacacaagccaagtgaaagtgagataaaataanaatcaaagagcataatgtcagggatcattcacaagattggggagacccttcatgtgggagggcacaagaaggaggaggagcataagggtgagcaccatgctggagaatacaaaggggagcaccatggtgaacacagtagtgagtacaaaggagagcatcatggtgaacacaaagctggagagtaccatggtgagcacaagccagagcacaaagaggggttcc

SEQ ID NO: 14485 - DNA, 276 bp, Glycine max
  unsure (1)..(276): unsure at all n locations; Clone ID: 701156525H1
gggattcgattcgagaaattcgacgttttcgaagaattggaaactggaaacttcacttctgttcgaattcagaggttaattctcgttaattagatcaatcatgagaactcnaaatgccgattccgcttccaaatccgcaacccctaagaannnnnnnnnnnnnnnnnnnanncgaatcccctgcggcaaagcgcaccaccgccaccaaaaccagagccacaaagaagaacgaggtttcgcccgcacccgattccaacccctatcaatctcctctgg

SEQ ID NO: 14486 - DNA, 260 bp, Glycine max
  Clone ID: 701156526H1
gagagaagagtgagtgtgtgtgataataattgggatcaactaatcaatcaatttgaatggcatcatccaattcggctcagctagaagggaacaaacccgcaaagagaaaacccgtgttcaccaaagtggatcagctcaaacctggaaccaccggtcacacgttggtggctaaggtcttgtcctccgacaccgtcgtacacaaaccgcgaccctcttccgcccacaacctcaaacccactgtcatcgccgagtgcctcatc

SEQ ID NO: 14487 - DNA, 268 bp, Glycine max
  unsure (1)..(268): unsure at all n locations; Clone ID: 701156531H1
ggcacaagtgagtttgttgatcgagataactagaaacagtgtgatgaaaatgaaggtcctgttttcttcgttgctacaattttggtagcatggcaatgccatgcgtacgatatgttccctctccgaatgaacactggctatggtgcccgtactccggangtgaaatgcgcaagttggaggcttgctgtggaagcacacaacatctttggctttgagaccattcctgaagagtgcgttgaagcaacaaaggaatacatccatggcgaac

SEQ ID NO: 14488 - DNA, 167 bp, Glycine max
  unsure (1)..(167): unsure at all n locations; Clone ID: 701156532H1
gatgatattaatgaatatcacgagcagaagnattggagtgnattgtgtnagacgtcttggtatggaaagatccaaccgagnctntgtgaagtcactgagctaatgtncttctgganntcagagtcaagntagtgatnacaggagcttaagcganaagctttnaatgg

SEQ ID NO: 14489 - DNA, 265 bp, Glycine max
  unsure (1)..(265): unsure at all n locations; Clone ID: 701156533H1
atatcaactaatcttatgtcatagagagagataatataacataaaagcaaccanaaatcatactattatcgtgaaaatgatttattttattttattctnaattaatgtatatatagttacataattaaaattaattctcacttgagaacaattctgatcacttgacatatgctgtataaatataaaaatatatatatcagacttgactagctcaggtagtcaggttaatttcatatttttatcattgtgtcaaacaattaatttt

SEQ ID NO: 14490 - DNA, 258 bp, Glycine max
  unsure (1)..(258): unsure at all n locations; Clone ID: 701156534H1
ggtcacaactcagaaagganagctttgaggtttcttccgcattttagagtggtgagaggatggtgggtgttatttcgttggtaacagggatggctggtcctagtgggtttggatcagcttccactgcagaacaggttactgatggaattgatgccagcnacctcactgcaattatcacaggaggagcaagtggtataggcttggagacagcaagagtgttggctcttcgaaaggtccatgtgatcattgcagttcgga

SEQ ID NO: 14491 - DNA, 262 bp, Glycine max
  unsure (1)..(262): unsure at all n locations; Clone ID: 701156536H1
ggcacaagtgagtttgttgatcgagataactagaaacagtgtgatgaaaatgaaggtccttgttttcttcgttgctacaattttggtagcatggcaatgccatgcgtacgatatgttccctctccgaatgaacactggctatggtgcccgtactccggaggtgaaatgcgcaagttggaggctgctgtggaagcacacnncatctttggctttgagaccatcctgaagagtgcgttgaagcaacaaaggaatacatccatgg

SEQ ID NO: 14492 - DNA, 260 bp, Glycine max
  unsure (1)..(260): unsure at all n locations; Clone ID: 701156538H1
gggatgtgttgagatccactgctgcagaatccaatttgtgaccctaaatccaagttactatgactgctcagacccaagaggagcttcttgcgcaacacctcgaacagcaaaagatccatgatggtgaacctnnnnnnnnnnnnnnnnnnnnnnnnnnnnnnnnnnnnnnnnnnnnnnnnnnnnnnnnnnnnnnngccgaaggactagaaggtgatgcatctggtaggtcgaagcagaccagaagtgaaaagaagagtcgc

SEQ ID NO: 14493 - DNA, 262 bp, Glycine max
  Clone ID: 701156539H1
gacaacaacatagactagtgcggtgcattcccttcgtttaccatgctttcctaagagaaagagaaaagtaaaacccctcactactgatagattttcattcctccgaggaaaaaaaaaacatgtcggatgctttgatcaatggattggccggagctggaggagggatcattgctcagctcatcacatacccacttcaaactgtaaacactcgccaacaaaccgagcgtgatccgaagaaagacacgaggagtcaaggggccct

SEQ ID NO: 14494 - DNA, 261 bp, Glycine max
  unsure (1)..(261): unsure at all n locations; Clone ID: 701156540H1
ggcaaaagttagtagtagtgaagaaaatgcaagtccttgttttctttgttgctatagttctagcagcatggcattgccatggctcagaccatgaccatgaccatggccacacctaccaaattttccctctgngaatgaaaactggccatggtggccactacattccggaggtatcatgccaaagttggaggcttggtgtggaagcacacaacgtcattgactggaaaaccgttcctcaagattgcgagggatatattggga

SEQ ID NO: 14495 - DNA, 259 bp, Glycine max
  unsure (1)..(259): unsure at all n locations; Clone ID: 701156541H1
ggaggaatggggtggtggagaaggtggcgaatgacaattcangancaacatgtgaataatggnagaccaacaacaacctcaacctcatcgtccctaatcctcaagattcactgtggatgatgaatttgaggactggggaaacaatggattctggaactnnccggagcgtccaggggagccagattgctcatattacatcagaacagnnntnnntagatttggtgcaacatgtcgatttaatcatcctcctaacaggagg

SEQ ID NO: 14496 - DNA, 215 bp, Glycine max
  unsure (1)..(215): unsure at all n locations; Clone ID: 701156542H1
ggggcgagnagtagtactagggatgggtgacctcctgggaagtactcgtgttgcacctccaatttgaaaccggtccggcccaattccggttcactacaccanaaacccagatgaatttgatgtcgaggaatacacctatgtgacatgccgcgtacctaacaaaacgttcactaaggtatactatgatggtggtgaaggtgatattattcggagac

SEQ ID NO: 14497 - DNA, 248 bp, Glycine max
  unsure (1)..(248): unsure at all n locations; Clone ID: 701156543H1
atatgcccgtggtagtgagcttcaaattccagattgtactgattatttcatggaaaatttgcaaaggctgtctgacacaaattatgtgccaacaaaggaggatgttttgtatgcaagagtgcgtacctctggcgttgttgagatgcagttcagccctgttggggaaagtaagaaaagtggtgaagtctanagactctttgatgttggcggccagagaaatgagaggagaaaatggatccatttgtttg

SEQ ID NO: 14498 - DNA, 259 bp, Glycine max
  unsure (1)..(259): unsure at all n locations; Clone ID: 701156545H1
gacagcatatatatcaataatctattttatactatacctacattttgataattttctttgtagttgatagccatgggctacccgtggaaagcttgaggttgacattgatctcaagtccaacgcagacaagtactggcaaacccttaggaattctactgaaatattccctaaggccttcccacatgattacaaaagcnttgaggttcttgagggtgatggcaagtctcctggttctatccgccanntaagttatggtgaa

SEQ ID NO: 14499 - DNA, 260 bp, Glycine max
  Clone ID: 701156546H1
ggaagtgcatattatgtggcccctgaagttctccatagatcttatagcacagagggctgatgtgtggagtataggtgtgatagcatatattctattatgtggcagtcgtccattttgggctcgaacagagtctggtatttttagggcagttttgaaagctgatccaagctttgatgaaacaccgtggccatctttatctttagaagctaaagattttgtcaaacgcttattgaataaggatccacggaagcgaatatctg

SEQ ID NO: 14500 - DNA, 263 bp, Glycine max
  Clone ID: 701156547H1
ggggtaaacacgaattttggatcttagtccgcgttctataaatccggcaaggcctgcctgtgagaccatctcaatttcttttctctttgtcgcaaagagaagagatctgcctcctttttatcaaatctatctcttcttcaagaatagttgaaaatggggctgtctttcaccaagttgttcagccgactgtttgccaagaaagagatgcgtatactgatggtgggtctcgatgctgcgggtaagaccaccattctgtacaagct

SEQ ID NO: 14501 - DNA, 199 bp, Glycine max
  unsure (1)..(199): unsure at all n locations; Clone ID: 701156548H1
gcccaaatttttgaagaatggtgatgctggtatggttaanatggttccaaccaagcccatggtggttgaaactttctctgagtatcctccccttggtcgttttgctgtgagggacatgcgtcagaccgtagctgttggagtcatcaagagtgttgagaagaaagaccccaccggagccaaggtcacaaangctgccgcc

SEQ ID NO: 14502 - DNA, 232 bp, Glycine max
  unsure (1)..(232): unsure at all n locations; Clone ID: 701156549H1
tngtgtctctgaaacttcagaagcggcttgccgtagcgttcccaagtgtggtaggggcaaagtntggcttgaccctaatgaggtcaatganatctccatggntaattctcgacaaaacataaggaaattggttaaggatggtttcattatcaggaagccaactaagattcattcccgttcccgtgctcgcagaatgaaggaggccaagaggaagggacgtcactctggttat

SEQ ID NO: 14503 - DNA, 260 bp, Glycine max
  unsure (1)..(260): unsure at all n locations; Clone ID: 701156551H1
gaataggagaagaagggactagcggcgaactcaaacggcgtcgtatncgactcgttgttcatccatttgagaggcatctggtagcggaagatggataagggtaagatccaagaggtgatcgagaaccaagtcctgacggtggcgcaagccgtcgagnnacaagatcgacgatgagatcgccgccctggaacgcctcgatgccgacgacatcgaagccctccgcgagcgccgcctccagcagatgaagaagatngcggaga

SEQ ID NO: 14504 - DNA, 263 bp, Glycine max
  Clone ID: 701156553H1
gaacagcagcattcactgaaagcactcagtagggtttgcggtttcagagtttgtgacgcacgcatccatggccaccaccaccaacgccgccgcagccccgccgacgccagctctcccagaaggaagccgacatccagatgatgttagccgccgacgtccacctcggcaccaaaaactgcgacttccaaatggaacgttacatcttcaagcgccgcaacgacgggatttacattattaaccttgggaagacatgggagaagctt

SEQ ID NO: 14505 - DNA, 260 bp, Glycine max
  unsure (1)..(260): unsure at all n locations; Clone ID: 701156554H1
ggaancnaagcaagccctanctncgcangcattcgtgaganaactacanattcntnnntcnaggcactctnnntcgtctcntttcctaatccnaatngatctatngctgncaaatacttctncaacaggtgcntgctnttccgttcntcgctttgntanngagtctgcccctcctgcccttnagggagacgagatgctgaagaaactttttgtggcggtgaanagcaaatttgagnccgccataggaatattgangaagg

SEQ ID NO: 14506 - DNA, 259 bp, Glycine max
  Clone ID: 701156555H1
gggtggaaaaacactcaatcaacacacatgattgaagtgcaagcaaatgccatggagcagagttggtgggccaatatgcctcacgagcttctcagagaggtcctcctccgaattgaatcgtcggagtggacgtggccgctgcggaggagcgtcgtggcttgtggcggagtgtgccgcacctggaggaggctcatcgtcaaggagattgtcaagccacctcaattctcttccaacataaccttccccatctctctcaaac

SEQ ID NO: 14507 - DNA, 85 bp, Glycine max
  unsure (1)..(85): unsure at all n locations; Clone ID: 701156557H1
ggggttctgaagganccaactnggttaaggtttgagtgantcgcannagannaaagtgcagggncaccaactaccaaaaccnngt

SEQ ID NO: 14508 - DNA, 256 bp, Glycine max
  Clone ID: 701156558H1
atagcaggaggtatttctcgtacagcaactgctcctcttgatcgtctgaaggtggtcttacaagttcaaagcgaacctgcttccatcatgccagcagtaacgaagatatggaagcaagatggtctgttaggatttttccgagaacctggtcctctagtacaactaggatgtgggacaatttctggggctgttggagctacttgtgtctatccattgcaggttattcgaacaaggtacaatgctgtcagtattactg

SEQ ID NO: 14509 - DNA, 254 bp, Glycine max
  unsure (1)..(254): unsure at all n locations; Clone ID: 701156559H1
ggataggagaggtncggcgatggcttttgcagttacgcccaanatantnacggtgtcattcgataagcaaaaccaaaggnggagtttcgaaggnttgtttgggaaaaggtatcgggtaagggtgaagcgaagtcaagatcattcagtgangngtggtattgagcgaacagcagcgatggaaagaaagggggcggagaggangcgtgtcaaattcgaactacgtggtgccgctggacaacatggacgaacccatc

SEQ ID NO: 14510 - DNA, 269 bp, Glycine max
  unsure (1)..(269): unsure at all n locations; Clone ID: 701156560H1
aaatattatgatttctggcaaaacactaganctgtgaagtcaacaatacttcatttncaattgaggaatttngnttggtcaacatcaaaacatgatgtatanctngtttcaaattactccattgttcactggtcttcattaacttccaagagatctgaagtcttgaatgtatcagggcatgtagctccatgtgagaaacatcctggaagcctcntggaaggnnntactcagacacaaattagtcacactggctgtacgagatnaattgt

SEQ ID NO: 14511 - DNA, 262 bp, Glycine max
  unsure (1)..(262): unsure at all n locations; Clone ID: 701156562H1
gggaggaaggaaggtaaaggaagcaaacgcaagagcaagagcaagagcgaaagcggcaganaagatggaangagaagagggttctcagcagccacagttggtgctcgcggacaagctattccttctccggcaacccgatgtgcaagacattgacaaggttcgctacaaagaggatgtcttcactcatgtcaaggaaaacgatatggtccctctgtacgaaaccctagtgcgctgattccgtgttggacttggatcgtgccct

SEQ ID NO: 14512 - DNA, 265 bp, Glycine max
  Clone ID: 701156563H1
ggagattcttcttatttctccacttgctgccactggggtgattcgtcttccatccttcatcggcattgcgcttcacaaattctcagtctacgacttggtggatttcattaagttgtgataaacatgggaaaagactcaaagccaaaggagtccggaggcaagggaaaggggaaacaggctgcaagtggaagtgatgagaatgcttctaagggaaaagggaaaggtgggaaaggtggagatgggcttggtacttgcacctatgtca

SEQ ID NO: 14513 - DNA, 270 bp, Glycine max
  unsure (1)..(270): unsure at all n locations; Clone ID: 701156564H1
gaacacaacgcaacacaacgtcgcactctctcntttctctcttaacacggatnnccctatcggttcttcgcngtttcgccgattcncgccatgccgaaagccaaatccgacgccanagccgncgatagccggttgaagcgcaagggcgctggtgctggaangaagcaatcgannaaagctgctaaggatcctaacaagccaaagagacctccaagcgctttcttcgttttcatgtccgagttcagagagcagtttaagaaggagcatcct

SEQ ID NO: 14514 - DNA, 172 bp, Glycine max
  unsure (1)..(172): unsure at all n locations; Clone ID: 701156565H1
cacataaggagaaggagaagtggctaagcatcagcagcaaatcctccatggccaggtttaaggaagggtncttccacattctagaggccaaagaagtttggtttgtaaattatgttgatannacggaganatatcagcagactgtgaaangagnaggctgcnntctgattgt

SEQ ID NO: 14515 - DNA, 254 bp, Glycine max
  Clone ID: 701156566H1
tgtggaattgctgggtgaacatgacgccctttctttgttctgtcaccatgcttttggacagaaatcaattcctatgggtgctaatgtgagtttggtgaagcaggttgtggctgagtgtggaaggcttccactggctctgaaggtgattggagcttctttgcgagaccagaacgaaatgttttggttgagtgttaaaagcaggctctcccaaggccaaagcattggtgaaacctatgaaaccaatctgattgata

SEQ ID NO: 14516 - DNA, 257 bp, Glycine max
  unsure (1)..(257): unsure at all n locations; Clone ID: 701156567H1
ggcatcaattcaaaatatatcatcaattataagcatgggtttgtggaacacaacgaatgcagtgtcttgccgctttcacaagtttggtgatgaccaaaagaatctggtcttccaaggtgatgccacgtcttcttccaggggcatagaactcacatngttagnncggtggaggaaaaccagtgggtggcagtgtggggagagtgttatactcttctccagtgcacctttgggaaaactctacagtggtcgcaagcttt

SEQ ID NO: 14517 - DNA, 253 bp, Glycine max
  unsure (1)..(253): unsure at all n locations; Clone ID: 701156568H1
aganaaaggaataggagatggcacagttagttatggaatggatgatggtgatgacatttacatgcgctcttggactggaaccattattggtccctataatactgtacatgaaggaagaatttatcaattgaagctgttttgtgataaagactaccctgaaaagcccccgagcgtccggtttcattcacggatcaatatgactgtgttaatcatgaaactggagtggttgaatcaaagaaatttggtcntcttg

SEQ ID NO: 14518 - DNA, 259 bp, Glycine max
  unsure (1)..(259): unsure at all n locations; Clone ID: 701156569H1
gactgagaaaatcagataacctctgtcaacacctgtctgtggcgcgcgagagagaaatcggagatgtcatcaaaccctaacgatcctcgtcagccctcggcggcgagaccctacgtggcgccgcagatttcgccgcaggaccttccgatcgactacnccggcttcatcgccgtcatatttggcgtcgccggcgtcatgttcaggtacaaactgagctcttggctggcgctcatattctgcgcgcaatccgtcgcgaaca

SEQ ID NO: 14519 - DNA, 266 bp, Glycine max
  Clone ID: 701156570H1
catggattctagatgagtattccgaatttcatggccactctcctgcagtagtgactgggaaacctgtagaactcggtggatctctaggcagagatgcagctactggacgaggagtcctctttgcaacggaggctttgcttaaggagcatgggatgagtgtatccggacagcggtttatcatacagggatttggaaatgtggggtcttgggctgcccaattgatcagtgagaaaggtggaaaagttgttgcagtgagtgacataact

SEQ ID NO: 14520 - DNA, 259 bp, Glycine max
  unsure (1)..(259): unsure at all n locations; Clone ID: 701156571H1
gggacactgttcaaattactaccactcttcctcttctcctccttcaccatacgcaactnctcttttgattatgttccctacaaagtgatacggttcggttccacccaaaacacaacatctctgccttattgatttggtcatgtgctactacctcaatcaacttgtaaaataataagatagtagataacactaacttctttttttagttgctttcctcaaccaagtgattactactggctttgtttgagaaaaaaggttg

SEQ ID NO: 14521 - DNA, 257 bp, Glycine max
  unsure (1)..(257): unsure at all n locations; Clone ID: 701156572H1
aaggctactgggtcaatgttatctccactcacaatgttgatggttanctgactcaacctgatgggtcaaatgtgaatttgaaaattcgggtacaacaattatagtccatcctaatatgtcagtacaattgcagcttcacaaaattcatttctgttcttttggtcttatctgcagaaaggtttccagcatatatgtgtagaacaacctggtgtacatgaatttagttttgttgactcatgtatcttctttgggggttc

SEQ ID NO: 14522 - DNA, 260 bp, Glycine max
  unsure (1)..(260): unsure at all n locations; Clone ID: 701156575H1
ggggtttaggattttgcacaactcactcatggaggaggaagaagcnccagacgttatatgcgagctggaaaacgttcaaggcttagtggacgccctcaccgccgttcggtggaagcgccagcaggacgtcgtgttggagttgtccgaacacagtgcatgttttgatcgtcgaagaaagcggttgcctccaagccaaggtttatctcaaacgagagttattcattcgttacgattacaacgcacgagggaggacgacctcg

SEQ ID NO: 14523 - DNA, 257 bp, Glycine max
  unsure (1)..(257): unsure at all n locations; Clone ID: 701156577H1
gatactcaattcattttcttcttctgcttcaccttctcttctcttctctcatagggttagggttttnttctcttcattgctctctctgtcgttttatntccatggctcagcaagatgctcagaatggtgggtcggagaatgccgctgctgcggtgtcgtttgtcgctttgaagccgcagctcctcatcgaannnnnnaaagcgaacgacgccgttctgttctacaaggccgcgtttgccgnngaggaggttggccgt

SEQ ID NO: 14524 - DNA, 257 bp, Glycine max
  unsure (1)..(257): unsure at all n locations; Clone ID: 701156578H1
ggcacaagtttgttgagatagctagaagcaataagatganaatgaaagtgcttgttttgtttgttgctacagttttggtagcatatgaatgccatggctcagactaccagaagttccctctccaaatgaaaactgggtttggtgggcaatacagcaatgaggtggcatgtgccagttggaggctggcgtggaagcaaacaacgtagttcaagtggcaaactgttcctggcagcttgcggagagtacatagctgacta

SEQ ID NO: 14525 - DNA, 251 bp, Glycine max
  unsure (1)..(251): unsure at all n locations; Clone ID: 701156579H1
ggtcngactttagtaatgaaggatttcacaaccaagtntagtcactcagactgtctatttttcatctgattaaggtcggctccaagaaagtctacanataaaaacanaatatcaagctaagcttntttatctgtgatataatnataagagcttataatgtatgattttancaaacataaatcaccttgttaataattgtttctatcatntcatatgacaacttaatttcagcntcacaaagaagtgcnttt

SEQ ID NO: 14526 - DNA, 265 bp, Glycine max
  unsure (1)..(265): unsure at all n locations; Clone ID: 701156580H1
aagccagctgggattcaaacaagnaagcaatgtcgattcagtgcaaggtgtgcatggcaaacatttatgtgcaccacatcggaagtgaagtgtagggagcatgctgaagccaaacaccctaaatctgatgtttatgcttgttttcctcatctgaaaaagtgaacatattggagactgcaaatggagaaaactttatatcattatggcctcttccttaaaacctattgacagagatcttccccattttctatctatataaaaatgt

SEQ ID NO: 14527 - DNA, 252 bp, Glycine max
  unsure (1)..(252): unsure at all n locations; Clone ID: 701156581H1
ggaacaatgaggcaacaagaacctgtgagctccgagtctgaggcgcgccgtgtctaatccgacgtcgttttggtggtgttctatgtcantgtggtgctcgtgtttgggacatggcggaaacaacctctgcttctgtttcttctcctgcgggtgattctaattggagagagaacaagttgtggaaaggcacatttgctgtcgcaggaatcatgctcaccctcgttacctatggtgttttgcaggaaaagatca

SEQ ID NO: 14528 - DNA, 244 bp, Glycine max
  unsure (1)..(244): unsure at all n locations; Clone ID: 701156582H1
ggcngaaangacgtcattcgtngttgggaanaagatgagttcggagcnaatgcagatgcaaatgcaaaacagcggtggcagcagcagtatcagcagcaacatcccagtgagcgaggttttctggactctcgtcgacaaagccgacaagangttctccaaaatcagagaccttccctctaccaacgcagcaggcgccgatacttacttttataaggtgttcaaggtctacacacaattatggaag

SEQ ID NO: 14529 - DNA, 237 bp, Glycine max
  unsure (1)..(237): unsure at all n locations; Clone ID: 701156583H1
gggancagcagggagaattaggtttttaggnnttacaccgagcagccacacctcccgcagcagccatggttctcaaaactgaactatgccgattcagtggtgccaagatctacccagganagggcatcanatttgttcgtggtgattctcaggttttcctgtttgcaaactcaaaatgtaagaggtatttccacaatcgcctgaagccttcaaagctcacctggactgcaatgtaca

SEQ ID NO: 14530 - DNA, 255 bp, Glycine max
  Clone ID: 701156584H1
ctgaccctttccctttcaataaaacactgttatttagtagccctgacgaatggattgacagcaagaaattgtttaatttttccctcctctttctttgcacattctctctctcgcttccacgcactgccattcatctccaccactttctttctttgttgataatcagatcacaagaatctagtttttcattttttttcagtaaaaagcttttttttatatatatatatttaaaccatgtaactaactcatagttct

SEQ ID NO: 14531 - DNA, 255 bp, Glycine max
  unsure (1)..(255): unsure at all n locations; Clone ID: 701156585H1
gaggaagaaccaataacagaggaatccaagttcctttctagggaccgcnattcctcattcattcnttcatatgcttcttcaactttctcctctcttctccctctaactcagattctttcatctcagggagattatagcacagtgcctgaatcctttttagtgagttggcatcaatcatgttgggtggatttgtaaaaaaattcgcttccacaatgggaggctgcgcttcaaagccgaacaggaagagtaatgttc

SEQ ID NO: 14532 - DNA, 254 bp, Glycine max
  unsure (1)..(254): unsure at all n locations; Clone ID: 701156588H1
aaaaatagaacataaatntttgaattaaaatgttggaaaaaatcaagttgcacgtnccactannaataaaactaaattagnatataaaaatgagggataattctcaccctttgagttaatttttgggattgaattaggtctaaactcatattctaagatagtaccaggacatagggtcctaaactcatattctgagataaaatacaaaatttttcatctatattatttttcttctctctatcaaacatattgta

SEQ ID NO: 14533 - DNA, 253 bp, Glycine max
  unsure (1)..(253): unsure at all n locations; Clone ID: 701156589H1
gataagaaagaagatcaaaagaaaaaagagaaacaaatgggcagcactgggtggcttaccgacatcaccggagcacagaacagcatcgatatcgaaaatctcgctcgctttgctgttgatgaacanaacaaaaaagagaatgcagttctggagtttgtgagggtgattagtgcaaagaaacaagtggtttctggcaccttgtactatatcatttggaggcaaatgatggtgtgacgaaaaaggtttatgaaac

SEQ ID NO: 14534 - DNA, 253 bp, Glycine max
  unsure (1)..(253): unsure at all n locations; Clone ID: 701156590H1
ggcatcaattcaaaatatatcatcaattataagcatgggtttgtggaacacaacgaatgcagtgtcttgccgctttcacaagtttggtgatgaccaaaagaatctggtcttccaaggtgatgccacgtcttcttccaggggcatagaactcacaaagttagacggtggaggaaaaccagtgggtggcagtgtnnggagagtgttatactcttctccagtgcacctttgggaaagctctacagtggtcgcaagc

SEQ ID NO: 14535 - DNA, 257 bp, Glycine max
  unsure (1)..(257): unsure at all n locations; Clone ID: 701156591H1
gaacacgcggcttccgccggangtgaaccgcgtgctgtacgttcggaaccttcccttcaanatcancagcgaggagatgtacgncatctntggcaaatacggcgncattcgccanatccgcatcggcaccaacaaggacactcgcggaaccgctttcgtcgtctacgaggacatctangacgccaanaccgccgtcgaccanctctncggnttcaacgtcgccanccgctacctcatcgttctctattatcaacaag

SEQ ID NO: 14536 - DNA, 235 bp, Glycine max
  unsure (1)..(235): unsure at all n locations; Clone ID: 701156592H1
ggaagcttgatgaanacacgtgattcaaagctgtgaanaaactcaagttgtggtccaaaaagaaaaggaagaaaaagacccatggccatgagcatcctcctcactattgctgcagctgctattgttcctcatccatccaaccatcagctccacccttaccttcatcctcatgccttgattttgaatacagcaactatggaacattcttaccaaccccggagccggagccggagcc

SEQ ID NO: 14537 - DNA, 257 bp, Glycine max
  unsure (1)..(257): unsure at all n locations; Clone ID: 701156593H1
aacaagaagagcgttgagacctacaagatctacatcttcaaggtgttgaagcaagtgncaccccgacatcgggatctccagcaaggctatggggatcatgaacagtttcataaacgacatcttcgagaagctcgcccaggagtcatcgcgtctcgctaggtacaacaagaagcccaccattacttccagggagatccaaacggcggtntgtttggtcctccctggggagttggccaagcatgccgtttctgaaggca

SEQ ID NO: 14538 - DNA, 260 bp, Glycine max
  unsure (1)..(260): unsure at all n locations; Clone ID: 701156594H1
ggatccaatcaagaatacaataacatagcatagagtgagnagtgagaagagagaaatgggcaatctcccatacccagtagacaacttttcatagatggagagtggaaagtccctcttctcaacaatcggtttccgatcatcaaccccgctactgaagacatcatagggcatattccagccgctactaaggaagatgttgaccttgcggtggatgctgctaaaagagccttttcccataacaaaggcaaagattggtcttc

SEQ ID NO: 14539 - DNA, 263 bp, Glycine max
  unsure (1)..(263): unsure at all n locations; Clone ID: 701156595H1
gactgttacagttgttggtgtaaangaacagcggtgggtnagtgactagangagaggaaacatggctacggngtcggcgtcggcgtccgtgggaggaactgacgctgaaagtgaaatggagcggnaacgaatanaccgtccgcgtctgctgcgacgacaccgtgggcgaactcaaacgtcgnatctgcnngctaaccancgtnttancccttcgccagaagctcttgtaccctaaactcgcttccaaactcancgacgnctct

SEQ ID NO: 14540 - DNA, 262 bp, Glycine max
  unsure (1)..(262): unsure at all n locations; Clone ID: 701156596H1
ggggagcagaggacaanatgggnagtgtgagttatagnaatctgaagaacgccatgatagcatccttggtccctctaccctccatcctattctacctctcattccaatcggccattagtactccttcttcttggtcttctctgtggacatggtgctatcaccaccctctgctattggccaatgtccttttcttcttcaatgtcaatctcctcttctggctcatcggcctaatccaatccagccatggatgattgacccgtat

SEQ ID NO: 14541 - DNA, 259 bp, Glycine max
  Clone ID: 701156601H1
catatgagaatatgacacgtaatagtcataatccaataaaaacgtgacatatgaccgtcaacattatttcgtaacatccaattgtggacaagaagaccatattaagtgatttgattacatacaaagataaagttcgtgaataattttattaaagggataaaatataagattaaagataaaatgggagatcaaatttataatttttcctttctacaatatctaattttaacaagaaactctaatggaaagaaattcagaa

SEQ ID NO: 14542 - DNA, 238 bp, Glycine max
  unsure (1)..(238): unsure at all n locations; Clone ID: 701156603H1
ggggacgcataggtaacgaatttaccgttacctgtggcgtcgcgtctcagatccctctctctttggagagaacgccccaacaactaaatctgcatcgnnnnnnnnnnnnnnnnnnnnatacttcatttanggggttttattagctacaatacttgtttgctgcaggctgccaacgaaaaggtcaaggcatttggatcagacatcttgggcctgcaagcttgatgcaacacaacaaata

SEQ ID NO: 14543 - DNA, 169 bp, Glycine max
  unsure (1)..(169): unsure at all n locations; Clone ID: 701156604H1
cagtgccaagccacatgtttcaacattcaacagaagcctttttccttccacttttctctttggaattggttcttctgcttaccaggcagaaggagcagcaagtgtagatnnngagaggaccaagcatatgggacacctacactagacagcatactgaaaagattgggat

SEQ ID NO: 14544 - DNA, 250 bp, Glycine max
  Clone ID: 701156606H1
gggaaaagttagaagtagtgaagaaaatgaaagtcattgttttcttcgttgctataataattttaggtgcagaatggcaatgcaatgggtcagagatgagcatgagcatggccacagctaccaaattttccctttgcgaatgaaaaccggccccggtggccactacattccagaggtatcgtgcaaaagttggaggcttggtgtggaagcacacttacgtcattgactggagaaccattcctcaagatgc

SEQ ID NO: 14545 - DNA, 262 bp, Glycine max
  Clone ID: 701156608H1
gtatccttgtttgtttgctcacaaccttatttgcaactggcttctttgagatcaaggctgtaaaggagattgagcctgcattgaagaaacaactcatcatttccactgcctgatgactattgggattgcaattgttagttggattgcactcccaacttccttcactatcttcaattttggagttcagaaagatgtcaagaattggcagctattcttgtgtgttgctgttggtctttgggcaggtcttattattggatttgta

SEQ ID NO: 14546 - DNA, 249 bp, Glycine max
  Clone ID: 701156610H1
ggaagctgcagtaactagatctcccatgcagatgaagatgggggatcatgaattagaaggcaacactaccagtgccctacgcactgccgagacgttctgcgtttgttccctgttggtctatgtgtttcagcacttgttctcatgcttaagagctctcagcagaatgaatatggatctgttgattacagcgatcttggagctttcaggtacttggtgcatgcaaatggcatttgtgccggctactctcta

SEQ ID NO: 14547 - DNA, 248 bp, Glycine max
  Clone ID: 701156611H1
tctatccccacaaatatagtaatctcctaattcaaactaaaatgttaaatgaattcccttagtacattcaaaaggaacaataacttttctatcttctttaaccattaaccaactgattgaaatatcaatttttcatcaagatagcaaaagcaaatacaagtttgtatagaattccgaatcatacaactcaattgtaagaatagaaaaaggcacgattttaatacgttaaattccaatctcagatcttc

SEQ ID NO: 14548 - DNA, 249 bp, Glycine max
  Clone ID: 701156612H1
cgatgaaacaacatcacaaagtgtggtggtgccatctttggtgccggagttggagccttcctttgacagaacactcatcaaagacccgggaaattgaaccgcttcttgttagcaaaatggtgccctaatattgctaatggaaacagtgatggtgatgataatgggaagcgaaccgtgaagattctaccttccccaccaagactcaaggaagcgttttcagccacgtcagtgattaaaccaacaattgag

SEQ ID NO: 14549 - DNA, 272 bp, Glycine max
  Clone ID: 701156613H1
tctccttcttccttgtcacctttctttgcaaagtcgtccctgatgccaatatggctttgcctgaatccctgtgctcctcattacgtgcatccctatgttcatgcatatccttgtactcttgtgttacgtgttggtaagactatgatgacgactggtgtgacgttgccgagtgaatcttactccctttgttgcagctatcatgggggaccatggcgattgccactatatccctttggattccctctaagttcttctcttcgagttgattcttt

SEQ ID NO: 14550 - DNA, 263 bp, Glycine max
  unsure (1)..(263): unsure at all n locations; Clone ID: 701156615H1
gtgcattnncttgtntaggttcacagaagggngggaagcgcattgtacctgcatctcgcattcctgacagtaatgggnnancctctcaaccanatggacctcaagtggttggttgacnaatcangccacgggnntagcnccttctctcttagctccactncttcaccancatccttnacacattctgccctncctcnatgcacnatcacctagtggttcttatcctagtcgctaactcactggnggtccatcatctaanatgt

SEQ ID NO: 14551 - DNA, 253 bp, Glycine max
  unsure (1)..(253): unsure at all n locations; Clone ID: 701156616H1
gatcgaagcaaaaaatgaaaacccaaagtgcttctctcctctgtctttttctctctcttgctatccttttggctagtggcactgctgcaagtgcaactcaagaagcgcagtgccaagccaccatgtttnaacattcaacagaagcctttttccttccacttttctctttggnattggttcttctgcttaccaggcagaagggnagcaantgtnaatnggagnggcccanctttgggnnccctccnntngaggg

SEQ ID NO: 14552 - DNA, 237 bp, Glycine max
  unsure (1)..(237): unsure at all n locations; Clone ID: 701156617H1
gggcagaaatgnngaataacagacagannannttcagaactcatcgcgcacaatcaagtcgacaccaccaccaacaactcttactagaggacgattctcaaagctctctccagaaaatggtgnnnnnnnnnnnnnnnnnnnnnnactcacggaacctaaaataaagcttgctatgtgggattttnggcaatgcgatgccaaaaagtgcactggacgcaagctttcaagattgggcat

SEQ ID NO: 14553 - DNA, 251 bp, Glycine max
  Clone ID: 701156619H1
ggggaacatcatcacattacattagattggtggtaatggcagcgtcactacaagcagcagctactttcatgcaacccaccaagttgagcaggagcacactttgcagcaaaagtctactcagtccatttccaaggcttttggtttggaacctgttggagctaaaaaggtcacatgctcccttcaggctgatcttaaggacttggctcacaagtgtgttgatgctaccaaaattgcaggattcgcccttgcca

SEQ ID NO: 14554 - DNA, 250 bp, Glycine max
  Clone ID: 701156620H1
gaggaaggatgtgatgactaagaacgtctccatttacaagtcccaggcttctgcccttgaaaagcatgctgctgccaactgcaaggttcttgttgtgctaacccagcaaacaccaatgcattgatcttgaaagaatttgctccatctattcccgagaaaaacatttcttgtttgactagattggaccacaatagggcactgggccaaatttctgagagactgaacattcaggtttctgatgtaaagaatg

SEQ ID NO: 14555 - DNA, 248 bp, Glycine max
  Clone ID: 701156622H1
ggaagaacaagtcttgcattgggtggagcatacttagaaacagcaactatgtctctcatgcagcttactagctcccctgttggctcactggtcctttcattgtaatatttgctttatggtacataaccatggctttggccaagttgccaccaaacgcttcatcagttccagcagttttagcgtttggagattccatcgtggacccaggcaacaacaacaacataaaaacattgatcaagtgcaacttc

SEQ ID NO: 14556 - DNA, 250 bp, Glycine max
  Clone ID: 701156623H1
ggggcatatgctgtctaacggttcttatgtatggagtaagaagtattcattcaaggcatccccatatcctggacagaactctttgcaacgtgttatctatttggtgacatgggaaaggctgagcgtgatggttcaaatgaatatgctgattatcaaccgggttctctaaacaccacagaccaactcgtcaaggatttagaaaattatgacattgttttccacataggagacatgccttatgcaaatggat

SEQ ID NO: 14557 - DNA, 247 bp, Glycine max
  Clone ID: 701156624H1
ggaactaataagttgaataatcaaaggcaaaaggaagaagcaaaaccaaacgcagtgcgtgtgttcttctctgaagtctgaaccattcgttcctcccataacatgccctctgctcaggatccattttacgttgtcaaggccgagattcaagattctattgataagctgcaatctacttttcaccaatgggaaagcaagtctggagctgcggaacaaggacatcttacaaaggaggttcttgctggat

SEQ ID NO: 14558 - DNA, 150 bp, Glycine max
  Clone ID: 701156625H1
ggcggcgaaatgggaaaacgagagaagcagaagcagaggcacgagaagggacaccgtggaagagggtctttcactatcttcaagaggaccgtgattttgatgacactccaagaccctcaccctctgaagaagaatgtgctgatgacagca

SEQ ID NO: 14559 - DNA, 244 bp, Glycine max
  Clone ID: 701156626H1
gtagattcaagttctcaaaatgggcatctagatggtgattcacaagatgacattaaatggatggaaacgctactctacttcatcatctcatcttgaagtctgggagatcctcatatctgctcgacgtgcttgtgggacttctatatcctgtgatttgcttgcaggaaacatcaaataaggatttgtcaacattagccaaggtagcatttgaattgctaaatggatgattgtttgggaacctcac

SEQ ID NO: 14560 - DNA, 176 bp, Glycine max
  unsure (1)..(176): unsure at all n locations; Clone ID: 701156627H1
acaagaagcttgtcgagcaagctctccctccaattaacatcgttgttttgccaatgacattgtgaagaanataaactgctcatctggatttacgactgtgttctagggaagcagggttaatcacaagaatcaaattccgtctgttttcttgtatgctnttcaacntaagatnnatt

SEQ ID NO: 14561 - DNA, 249 bp, Glycine max
  unsure (1)..(249): unsure at all n locations; Clone ID: 701156628H1
ggaaggtcaatttcgaagcctctcgaatccaaactcaacagaacattcatttccctataaattcgacgtngtttcgttccgctctcactccaaanaacgttttgcagaagattccaatcggagctcaganaaaanagaaacctaattcgccgatcgcgtcgaaagttcgttgttgttctgtgaaattgccttttttttttccgttctgtgataattctgtgantaatnaacaatactnnngngccttcc

SEQ ID NO: 14562 - DNA, 110 bp, Glycine max
  unsure (1)..(110): unsure at all n locations; Clone ID: 701156629H1
gnatncttttaaacttttaatagtgaatcaattgctggctctcagcctacgcttttgagacaacacataananaanaanaaaaananaaaaaaaaangngnccccctnnt

SEQ ID NO: 14563 - DNA, 254 bp, Glycine max
  unsure (1)..(254): unsure at all n locations; Clone ID: 701156631H1
aagaagatgtcgtacctgttgcctcacttgcactctgggtgggcggttgatcaagcaatcctggcagaagaggagcgtctggtcgtgatccgtttcggcacgactgggacgaaacctgcatgcagatggacgaggtgttggcgtcggtggcganaccgataaanaactttgnggtgcnatncctgtnacanntaaccggggttncggattttcaacaccatgtacgagctcttacgaccttccanggtgatgtt

SEQ ID NO: 14564 - DNA, 256 bp, Glycine max
  Clone ID: 701156632H1
ggcacacgtttgttgagatagctagaagcaataagatgaaaatgaaagtgcttgttttgtttgttgctacagttttggtagcatatgaatgccatggctcagactaccagaagttccctctccaaatgaaaactgggtttggtgggcaatacagcaatgaggtggcatgtgccagttggaggctggcgtggaagcaaacaacgtagtcaagtggcaaactgttcctgcagcttgcggagagtacatagctgactac

SEQ ID NO: 14565 - DNA, 266 bp, Glycine max
  unsure (1)..(266): unsure at all n locations; Clone ID: 701156633H1
gataccaccctcaaataatcaaacttatcgtatgtatgacttctatcttatttcaacacgaagtgcaggacnaagcagcgaggtttttcataacaaaggagaatgangctttttcagttaaggttggggagggaagggaaggtaaaaatggcaacctttctgntggtcctgtgtaccgtaacctcctctcaganaatgaatttcctccaatggatccngatttcagtaccacttgggatattttctgtgtgtctgtcaaaaatcat

SEQ ID NO: 14566 - DNA, 263 bp, Glycine max
  unsure (1)..(263): unsure at all n locations; Clone ID: 701156634H1
gggtgtctgatctctttatggaaagagttcagagcaatgggcaatggtctttgttttgccccaatgaagcgccaggtttggctgattgctggggtgaagaatttgaaaattgtacactcaatatgaaagagaaggaaaagcaaagaaggttgttcaggcacacnctctctggtttgaaattttgaagtcccagatagaaactggaactcctacatgctttttaaggacacttgcaataaaaaaagcaaccaacagaatttggg

SEQ ID NO: 14567 - DNA, 250 bp, Glycine max
  unsure (1)..(250): unsure at all n locations; Clone ID: 701156635H1
ggcgctcacatcgtgttctctgcggcgcgagtagctagggtttagaaccttcgcagttacagaaaacatggcgactgtggtgccaacctccgaaaagacgctgcactctccgtcgttcgattcgcctctgaacttgcctgggccgatgccggtcccgaggttgctgagccccaagttagcagactctgcgtggaggctgaagaattcattgttatgggaaagtngttggagctagcatcattgatgatac

SEQ ID NO: 14568 - DNA, 249 bp, Glycine max
  unsure (1)..(249): unsure at all n locations; Clone ID: 701156636H1
ggacgtgggtttttctagggtttggaggctatgccgaaaacgggttaaataagctcggaaaatgattctcacaaagcagtaccgatgcatacatcagctagttgtcaatgtactaaagggcanttaagtgaagatatgatattcttagtatttcataatttgaattggaatcccaagctaattgcaactctatcatgtgtgtgcaaatggtttgatgatcttgccaagcgagttctatggaaagagttt

SEQ ID NO: 14569 - DNA, 251 bp, Glycine max
  Clone ID: 701156637H1
ggagcaagagtgaagagcgaagagaatggctcccaagggtttaatctttttggctgtgttatgcttctcagcactgtcactgagtcgttgtcttgcgaggataatggacttgttatgaacttctacaaggaatcatgccctcaggctgaagacatcatcaaagaacaagtcaagcttctctacaagcgccacaagaacactgctttctcctggctcagaaacatcttccatgactgtgctgttcagagttg

SEQ ID NO: 14570 - DNA, 246 bp, Glycine max
  unsure (1)..(246): unsure at all n locations; Clone ID: 701156638H1
ggcacaagtttgttgagatagctagaagcaataagatgaaaatgaaagtgcttgttttgtttgttgctacagttttggtagcatatgaatgcatggctcagactaccagaagttccctctcnaatgaaaactgggtttggtgggcaatacagcaatgaggtggcatgtgccagttggaggcttggcgtggaagcaaacaacgtagtcaagtggcaaactgttcctgcagcttgcggagagtacata

SEQ ID NO: 14571 - DNA, 246 bp, Glycine max
  Clone ID: 701156639H1
gatgcaactccatttcccaaatttgcgtaatatgtgcctcgagactagataatgaaatcacatacccaaaaattgtccctcgtctcttgtggtatttgcttaattaattgtgttcagctttttgatacagcgttttgaggccctcttcctaggcaattgacctcatcgtgtatttccaattttaaaagatcctgtgcaatattgctaataagcatgataactcctccgcaaatgaagatccttgga

SEQ ID NO: 14572 - DNA, 231 bp, Glycine max
  unsure (1)..(231): unsure at all n locations; Clone ID: 701156640H1
cangtgggtgtcaaattntagcatcacaaaagaaggngtaattttatttaaagaagacaaaacagcctcggcttcaccttttttgactatgacaacaaaatctattctagcatgtttggggtggtggtcaggtgaaccaaattcaactttgaaaccacagtgagtgtgaagcaacacattgttgcttaggaaaaatcatggtgacaccgtggttttgaggtagccaccatg

SEQ ID NO: 14573 - DNA, 249 bp, Glycine max
  unsure (1)..(249): unsure at all n locations; Clone ID: 701156641H1
gggtgttgtgttaatctcattcacacattcacagttatactctctctctctttgtcgcttggatcactgatctcatctcaattttcagatatgcgacatctgataagccagaagtggtggaaaggggtagcaaggatgaaaaacacaaggcaanatgatcaagaggaggggaagggtggattcattgagaaggtgaaggatttcattcatgacattggtgagaagattgaggaagctattgggtttggg

SEQ ID NO: 14574 - DNA, 249 bp, Glycine max
  unsure (1)..(249): unsure at all n locations; Clone ID: 701156642H1
gactccacgttctaatggctgcttcagaatcagaaccttttcaagacagtattctccagtgcctctctctctattctganccctctcttccaaatcaatctctgctgtcacctatttccccaacagcccctcataccctcccatcttagactcctacatcagaaacctcagattcagttcctccacaactccaaaancatccttcatagtggcaccaacccacgtgtcccacatccaggcctccatcat

SEQ ID NO: 14575 - DNA, 258 bp, Glycine max
  unsure (1)..(258): unsure at all n locations; Clone ID: 701156643H1
gacctcacccagttgcagaaaganaagaccatcaaagtttcacttcagccttatccggtttagggtttcggtttttgacccaacctttgacgtatcgaaaccttagtttcggatcaggtctgagcaatctggttggtagaacctttggtcttagagagtcaagttttatgtctgaattagacgatcaaattcctactgccttcgatccttttgctgatgcaaatgctgatgactcgggtgctgggtcaaaggagtatg

SEQ ID NO: 14576 - DNA, 246 bp, Glycine max
  unsure (1)..(246): unsure at all n locations; Clone ID: 701156644H1
ggaagacganctgtgatgaaaaanaaatatnnngaattaatacggaaggatatctnnngtagtgngtattagccaatgaattggcacatggnccccaccctatctgtgccttntcctangtgtgtgaatttaaatgnnaactgaagaaaactanggaaggnaggnagagtgancgtgaaagntgccttgggnnaggctttcagagtctccaaggctcgacgntnctattnncatgggtaatccttt

SEQ ID NO: 14577 - DNA, 261 bp, Glycine max
  Clone ID: 701156645H1
gaggaagtttatagcaaacatttcagtctcaaacggagtgtttaagggaagaactcctcaaatggagacacctttagtgatccagaagttcacttcagaatctgatacttgccggtgaaaagcttgaaggatttgaagtttgttttgtggacagagacagtgaagatatggagaatagcattccctatggcactgtctgcactgcttcagtttctcacaatctcctcaacttccatctatgctggccatcttggagacatt

SEQ ID NO: 14578 - DNA, 227 bp, Glycine max
  unsure (1)..(227): unsure at all n locations; Clone ID: 701156646H1
gcaatcgcgttanggtttttgagagttgcagtgtgcagacttcttaggatcatctcttagcagtgatcgattagatggcagacgaagctaacagaactgctttccttgaaattcaaagtcgcatgatcgatactactggaaaaataaaacaggtgcaaacccagatgcgttccaaagaagcagaaaagaagcgtgcttttctgaccatggaggagctgaagcaattc

SEQ ID NO: 14579 - DNA, 254 bp, Glycine max
  unsure (1)..(254): unsure at all n locations; Clone ID: 701156647H1
tggagaggacatggttgaacttgttagaagctgccaaaatgagtttaaggagtactacattcaaatgcaagcagctaagcgaagtcaagcacctcatcttcacagttgaaggacgataggataatcctgacaaaacattagctgatcaagtgtcatcatggaaaagcagcaggggtctaagtgatacagtggtgactgatcatgcttgttctggggaaacgtgctcttactaccatattggagatgtattatnt

SEQ ID NO: 14580 - DNA, 255 bp, Glycine max
  Clone ID: 701156648H1
gggatttgtgtgaaaaatatgtctcagttgcaccggcttcaatctaaaccatgtgttataccaaagagttttggtcctctcacttgtgttctactgacttaagagcaagacaatcgtttagctcgaaatgttggcccattttacaatctcggaaacctcttcatatttgcttagccggtggaaaagggatgatgggaaatgatgagaatccccatggaaatctattgagaaagctattggaaaatttaagggaga

SEQ ID NO: 14581 - DNA, 256 bp, Glycine max
  unsure (1)..(256): unsure at all n locations; Clone ID: 701156649H1
ggacaataataacacacaaaatcaattccacacctacatatccaatnacaccatggccaccaccaccatgttctcatcaccatcagccattttatctcaaccactacaaccaccacaccaaaaccatcatcttcagcaccaccctccccatcatgcaaacctcttctacncttcaaacaacccttaacaaccttaactgcngccgccgccatcgccaccattttaaccaccgcaccagcaccctccttagcncaag

SEQ ID NO: 14582 - DNA, 251 bp, Glycine max
  unsure (1)..(251): unsure at all n locations; Clone ID: 701156650H1
ggagggaacaacaactgacacattcaaaacacgtgtaaactgtttctattaccttgagatttgttgtcactgaaaaactcacctagactgtccagggaaaatggcttcattgaaactgccagaggttgttccttctcccacacaagacagtgaacgactcagaaaggctttccaaggatttgggacagatgagnnnaccggtgatattggtattnngacacaggaatgctcaacaaaggaagaaaattgga

SEQ ID NO: 14583 - DNA, 247 bp, Glycine max
  unsure (1)..(247): unsure at all n locations; Clone ID: 701156651H1
gatttaaggaagatgggtaaggaaaaggttcacatcagtattgtggtcattggccatgtcgactctgggaaatccactaccactggtcaccnatttacaagcttggaggcattgacaagcgtgttattgagaggtttgagaaggaagctgctgagatgaacaagaggtctttcaagtatgcctgggtgctggacaaacttaaggctgagcgtgaaagaggaatcaccattgatattgcnntgtngga

SEQ ID NO: 14584 - DNA, 246 bp, Glycine max
  Clone ID: 701156652H1
gggagaaggagggtggcgcgagcgaggaaactttgtctttggagcttcctgctccacctggttggaagaagcagttcattccaaagaaagctgtaccccaaagaaaaacgagattgtgttcactgcaccaacaggagaggagatcaataacaggaagcagctggaaaaatatttgaaagcacaccctggaggcccagctgtatcagaatttgactggggcactggtgagaccccaagaagatctac

SEQ ID NO: 14585 - DNA, 246 bp, Glycine max
  unsure (1)..(246): unsure at all n locations; Clone ID: 701156653H1
ggaaaaggtangaagttatgaactcccagatgaatttgaaggcaanatgngatnncattgaccttggaactgagcttcggaaacttatgganctctggatattgccaattattaccgacatgggaggaattatgaggacagttcttcttcctacatggttaagggaagaccaaaacgatatagatatcctcaaagatggttggaacatgctgagagaaagtcacatgaatctctctcagcatcttg

SEQ ID NO: 14586 - DNA, 246 bp, Glycine max
  unsure (1)..(246): unsure at all n locations; Clone ID: 701156654H1
ggtaccagaaaatatagcaagaaaggctatttcaatagcatcatccanaatgcctatncgaactcaattcantanttcagggtaatnnnttagnccanaggaaagnggtctttaagntgcangcccaaaatgcaaatgtaggttcctttttttgancacaanatatntttacttccattngttgactganagnatngnnnaatgatntgattcaacctcaanctcatttgantgnagctgntacta

SEQ ID NO: 14587 - DNA, 244 bp, Glycine max
  Clone ID: 701156655H1
ggggtaaacacgaattttggatcttagtccgcgttctataaatccggcaaggcctgcctgtgagaccatctcaatttcttttctctttgtccaaagagaagagatctgcctcctttttatcaaatctatctcttcttcaagaatagttgaaaatggggctgtctttcaccaagttgttcagccgactgtttgccaagaaagagatgcgtatactgatggtgggtctcgatgctgcgggtaagac

SEQ ID NO: 14588 - DNA, 245 bp, Glycine max
  Clone ID: 701156656H1
ggaagtggcggttataatgttactagcagctatagtggtggcaatgctgaaactagttacactggtggtggtaatgctagtaattaccaattcaatgaaaactctggtggagattttggctcagctagcggtgaattcagcagcaaccaaaatgacacagcaggtgcagacaatgatggattcattgagccacttgaagacaatgtgagggagaacaatgatggacctaccgactacgctcagaa

SEQ ID NO: 14589 - DNA, 245 bp, Glycine max
  Clone ID: 701156657H1
taaagaacataaaatctcagggaaccagtgggaaaaaggtgaaaaggaataagtctgtgccagctgaaacaaaaaagactggaaatgatttgacatcttaaatatggtcagagaaattaatgtggataacttggggacccccactaattttgaaccaagtagcggtcatgaccattctctgattaaaaaggaactgaaggatccagaatatgcaacaggtaaaaagagaaaagctagcaaaacat

SEQ ID NO: 14590 - DNA, 241 bp, Glycine max
  unsure (1)..(241): unsure at all n locations; Clone ID: 701156658H1
gcccttgttattttctccactgttttgggtgcctattgtaaagtatccattatccagcaaagttttgggtaaaagacatctcatttcagcttctgtaaacataaancnnngaaacanaaagtgtaattacagaaggatctaantcnngtgaacanaannagtntnccttngtgtnttcttcagggtgactgtatttcctgggantctcattctggtatnntaatcatancaggctcaaggc

SEQ ID NO: 14591 - DNA, 244 bp, Glycine max
  unsure (1)..(244): unsure at all n locations; Clone ID: 701156659H1
ggaggctgagttctgtaattgtgttttggctgtggacaatggctctgtcttctgggcttttcttgtgttcttcttcccgtgttctcccacaccagaaacccacactttcatnaggaccaggccttcttctgctgccttgtgcacnntttccnttagctgttgcaccgtctctcagtcgtctaagccagcccgcaaaatccgtggtatcatgaaaccccgcaaagtcttccccgngatgggagac

SEQ ID NO: 14592 - DNA, 245 bp, Glycine max
  Clone ID: 701156660H1
ggaatccaaactctcactcttctgagctctcatttgccaaaaatcatgaggcaaaagaccaacaacgcagattctagtggttttttgggagcatttcttccaattttctcagatcagtctcttcttcaaatcgcaaacccacttcttcaaaccctaaacccccaaagtctgacactgaaaacactcctccgactacccatccaaacattcccatcaatcttcaccaccaatcaaagcccaacgac

SEQ ID NO: 14593 - DNA, 247 bp, Glycine max
  Clone ID: 701156661H1
gacagcaacacacattgttaaaagtttctttatttcaagtgaagttagttagttatatttatatacacaatcatgtcaatgagatcaattgtacaagccttagccttatggtatggcttgtaattgcaacatcagcattaacaaaatctgataaccccccagtcctagacacacaaggcaaccctcttgagcctggcaaagatctactacatcaaacctgccataaccgacgttggaggccgcgtca

SEQ ID NO: 14594 - DNA, 253 bp, Glycine max
  Clone ID: 701156662H1
ggcacaagtgagtttgttgatcgagataactagaaacagtgtgatgaaaatgaaggtccttgttttcttcgttgctacaattttggtagcatgacaatgcctgcgtacgatatgttccctctccgaatgaacactggctgtggtgcccgtactccggaggtgatatgcgcaagttggaggcttgctgtggaagcacacaacatcttggcttgagaccattcctgaagagtgcgtgaagcaacaaagggatact

SEQ ID NO: 14595 - DNA, 178 bp, Glycine max
  unsure (1)..(178): unsure at all n locations; Clone ID: 701156663H1
tacngctgcgagacagacgacagannggtacggctgcgagaagacgacagaagggtacncgttagatcatatnctataaaggatcccccactgnttnataaaataggatgggaagaatttaagtctgtgtatttggacaaacaaaatgtaaagcttnatgntggtnaggtttaagcct

SEQ ID NO: 14596 - DNA, 254 bp, Glycine max
  Clone ID: 701156664H1
atttacgtatgctatataatatttttacacaaatatccaagaaaacttgattatttatttgttttactatttcagtagacactattaacgaaaaaacatgctacccatttaatcatcaattatctaaaatattaatttattcttttttaaaagtaatattaggcctttttctttttacatcttttaaactggaaaacaaaaaaattcttctacgaacaacccagacataaagatggcctttatcaactcgacct

SEQ ID NO: 14597 - DNA, 251 bp, Glycine max
  Clone ID: 701156665H1
gagacagaatcaattgagaatggggatccgattcgtactgatggtgaacaagcaaggccaaactcgtcttgctcaatactacgaatatctcacctcgaagagcgacgtgccctcgaaggcgaaatcgttcgcaaatgcctcgcccgcaacgaacagcagtgttccttcgttgagcatcgcaactacaaaattgtatatcgtcgctacgcctctttgtttttcctcgttggagttgacgatgatgagaatga

SEQ ID NO: 14598 - DNA, 252 bp, Glycine max
  unsure (1)..(252): unsure at all n locations; Clone ID: 701156666H1
atagcaggaggtatttctcgtacagcaactgctcctcttgatcgtctgaaggtggtcttacaagttcaaagcgaacctgcttccatcatgcagcagtaacgaagatatggaagcaagatggtctgttaggatttttccgagaacctggtcctctagtacaactaggatgtgggacaatttctggggctgtnnnntnctacttgtgtctatncnnnntgcaggttattcgaacaaggtacaatgctgtcagta

SEQ ID NO: 14599 - DNA, 259 bp, Glycine max
  unsure (1)..(259): unsure at all n locations; Clone ID: 701156667H1
ggacgtaagnttttantattgtcaggggtagtgtcggtgatgaagtaactagaataaatatagntacaacatcaacttccatgttcttcacgtttcacttctgcttaagtttgtggctttctactttctctttctagagtaggactaaactcatacactgatcatgggagtggatttaagacaagtggtggcgggtgtcctcaccctcacaatgttcgtcatgcttatacncatgatcaaaagagancatttgatgctg

SEQ ID NO: 14600 - DNA, 243 bp, Glycine max
  Clone ID: 701156668H1
acacctgcttactactgcgctctgcagtggttatatttcccctttcaaaagagacaatgtcgtgtttgtactgatcactttgatcaccttgctgaaccatgagagtttaaatgaagccgtctcgataataaagaaaataattaaaatcaatttgcttaagtaggagtaaatcagagtatatacattgcaattttagcaatagaaaagaggaatatgtctttgaagtaaaaatggtagaagatg

SEQ ID NO: 14601 - DNA, 231 bp, Glycine max
  unsure (1)..(231): unsure at all n locations; Clone ID: 701156669H1
gacacganactatttctgactaanttttgctctncnccctctacctctctctcaaaaatcgttctcttcgattttagggtttgttttgctgctgcctccgttccccccttctcataaacaacgcgttttctcttctgcttcgtatctattctttgcttttggttttggttgattcaaggccttcacagcattcgttgcggcatttaatcgattatccaagcaggactgaat

SEQ ID NO: 14602 - DNA, 242 bp, Glycine max
  unsure (1)..(242): unsure at all n locations; Clone ID: 701156670H1
gggattatatattatatagacacacagagatagaaagagagagaaagagtctaactagaatttttttttctctctttcataacctagtggactctgtgtcagagtttgtgaagtgaatcccataatcatgaagaaaggnaacttgggacttggtctcaaactctcagttcctgtgtctgatcaatctaattttgccagttcctgactgaaagtgggacttttaagggtngggntctgcttgt

SEQ ID NO: 14603 - DNA, 240 bp, Glycine max
  unsure (1)..(240): unsure at all n locations; Clone ID: 701156671H1
gggcattggaatgttcttctacgtgcgccgtatttcttataggaagaaggaagaggaccctgaaggaaacaagtgggcaagaagtctaagggtactaaaaaaataaaggtttctatgctganaagtcaatttcaaaaatgaacttgaatgatctcangaaggctactgataacttcagcaaaagcaatattattgggactggaagatcangaattgtttacaaagctgtcctcatgatgg

SEQ ID NO: 14604 - DNA, 237 bp, Glycine max
  Clone ID: 701156672H1
ggagctagttaggtgttaaatatttgattgcaatattaatatgaaggcacagtgtgagtagtgagaaggggcattagtaaagagatgggtagacgaccctgctgccccaaagagatcaacaaaggtgcttggtctcgagaagaagatgaaaccctctccaaatatgtttccatccatggagaaggaaaatggcagaaggttgcccaaaatgcagggttaaagcgatgtggaaagagt

SEQ ID NO: 14605 - DNA, 172 bp, Glycine max
  Clone ID: 701156673H1
ggaacctcaaaatcagtctctaatatttttctcactgtcttgtctctccagagaactgtatagagagagatggcagctgcaacatctggtctgtgttaaatgggttgggatcttccttctgagtggaggaaacaggagccaaacccttctggccactgctattggaggcaaa

SEQ ID NO: 14606 - DNA, 251 bp, Glycine max
  Clone ID: 701156674H1
ggaagtactgtaagatattgggcatgtatcaacttctcacgaagtgtaacaggaaagtgcagcttcgtggattttaccaacagttagttcagatgtgccaatctcaggcatggaattcagtcaggacccgcgattcctatacattcggctagaccagatcaggtaaagaaggctttgaagtatgtacattctgctgttatagacaaacttgatgggaaagagctagagttgctgattgccctcttccagac

SEQ ID NO: 14607 - DNA, 253 bp, Glycine max
  unsure (1)..(253): unsure at all n locations; Clone ID: 701156675H1
gacacaccgtttgttctattcttaactcaacttctgctacccactctcttcttccaagtccaaccacgcttttctctacagtcatgggcaaggtcaagatggaatcaacggatttggaagaattggccgttggttgccggagtcgctctgcaaagagacgatgtggagctcgttgccgttaacgaccctttcattaccaccgattacatgacatacatgtttaaatacgacagtgttcacggacactgnnagc

SEQ ID NO: 14608 - DNA, 195 bp, Glycine max
  unsure (1)..(195): unsure at all n locations; Clone ID: 701156676H1
ggacaataataacacacaaaatcaattccacacctacatatccannacaccatggccaccaccaccatgttctcatcaccatcagccatttatcctcaaccactacaaccaccacaccagaaccatcatcttcagcaccaccctccccatcatgcaaacctcttctacccttcaaacaacccttaacaaccttaa

SEQ ID NO: 14609 - DNA, 245 bp, Glycine max
  unsure (1)..(245): unsure at all n locations; Clone ID: 701156677H1
ggtcanacagctattcctcttaagcttgctactgagtttccacactgcataccttaggtcttccgaattcgaagttaatttgcaagatggtaaggaaaaggctcagatcaacattgtggtggttggtcatgtggaccctgaggaggcaaccaccattaacgagctgaagaagcctgttgtggagaaagaagctccagggcatnncatatgagggcatgcacgtacggcctcggaggggaaccaga

SEQ ID NO: 14610 - DNA, 249 bp, Glycine max
  unsure (1)..(249): unsure at all n locations; Clone ID: 701156681H1
ataggatagagatcaccaacaaaatatttgctttttgttncatttcgttgcaaccatgtttggctatgcagcagcaataattgcagcaacctcttcttccaatacttcttccataggagacgatgttgcaaacaccccattttganagaataccctatcattggcatgctaccacaattactcttcaatttatggcgtgcccatgattattcaactcaggtgttgcaacgacatggtggcactggtgag

SEQ ID NO: 14611 - DNA, 247 bp, Glycine max
  unsure (1)..(247): unsure at all n locations; Clone ID: 701156682H1
cacctaattttctaaaaacaagtcagcaatcatcttttccaaagatagggtcatctttaattaatacataattacagtaatgagcgacttttatacataaccagcaaggtaaagggattagaaagagtaaagtgtgaagaagaaaaatactgttaaaatattatgtaaatctaaataaatgncatcctaaataatctgataccttctgcttaaatagtttaattccttgagcacaatgaacatagtg

SEQ ID NO: 14612 - DNA, 245 bp, Glycine max
  Clone ID: 701156683H1
aatactaattcttgcaattcatctggaggatcatcttcaggtttgacttcgacgtggcaatcgatgaagactggctttcagagtttcaagtgaacataggggccaaaaagtttttacctctacggcaaatacaggaaaataccggctctagtcattcctcgtctgagtcccttgatgacatatttcaaaaactcaaacggccaactttaaaccaatctatatacaatgacgacgattagtatgga

SEQ ID NO: 14613 - DNA, 245 bp, Glycine max
  Clone ID: 701156684H1
gaataatataactatataagcggttcttccatttgactcttgttctgaacgacttttcaagagaatcaaaccatggcagtgaaagtatacggccccactgtgcttccaccaagcgggtgctggtttgtctggttgagaaggaagtcgaatttgaggttgtccctgttgatgtcactaagggggagcagaaggatcctgagtacctcaaactacagccattggagttgttcctgtcatcaaagatg

SEQ ID NO: 14614 - DNA, 219 bp, Glycine max
  unsure (1)..(219): unsure at all n locations; Clone ID: 701156685H1
gatcgaagcaaaatatgaaaacccanagtgctnctctcctctgtctttttctctctcttgctatcctttggctagtggcactgctgcaagtgcaactccaagangcgcagtgccaagccaccatgtttcaacattcaacagaagcctttttccttccacttttctctttggaattggtcttctgcttnccaggcagnaggagcagcaagtgtagatggg

SEQ ID NO: 14615 - DNA, 243 bp, Glycine max
  unsure (1)..(243): unsure at all n locations; Clone ID: 701156686H1
gaacctggttgtaccagttcagctgctggtcacattattgttggccatagagcagacaaaggncagttcaaagtggcagtcaaaaggaagnggaattcaagacatacgagtaaaaatataaaacatgcctcaagaaaatatgtggacacagnncccccaatccagtgcttatttgtcaggaatagggatctcggatgggatctatcagggtgcttgtcagaaagttgattggaatggcatggg

SEQ ID NO: 14616 - DNA, 192 bp, Glycine max
  unsure (1)..(192): unsure at all n locations; Clone ID: 701156687H1
aggcgaangagagcattcgaaggcataaacataaagaattgaagataatgcgaaccctttgcgacgttggcgagancgccgctgccattctcttctgcgccgctgatgaggccgctctctgctccgcttgtgaccacaagatccatatgtgtaacaaacttgctagtaggcatgttcgagttggccttgctg

SEQ ID NO: 14617 - DNA, 244 bp, Glycine max
  Clone ID: 701156688H1
cttccgtaacgtttccgtgggtgatttcgcgaagattttcaaccgtttcttcgacgttcttcgttcgttcttcggtcttcaaccggtaagtcccgaaatcgaacttttcaattcattctatgtacccttagtggtcctcatttgtttcacgtgcttttatttttatttcatttactttccgtaccccccttttgacgtgctttagtcatttacttaagtcattttctcgcctaatcgaaaaata

SEQ ID NO: 14618 - DNA, 241 bp, Glycine max
  Clone ID: 701156689H1
ggaaatgaacaagaaaaacttgaagccagacctgttgctgtatggaactaaaatatggggtctttgcagacaaaatgaaatagaagatctatggctgtaattcgggagatgatggattgtggtctgactgctaatagttacatatatacaacccttatagatgcatattttaaggttgggaaaaccacagaagctgttaatctattacaagagatgcaggatttgggtatcaagataacag

SEQ ID NO: 14619 - DNA, 240 bp, Glycine max
  Clone ID: 701156690H1
ccatcatcgataagtgcaaagagaagctaaatctagcggcgactcacgagcaaaggctagaggatgagtacgccaagatatcaacagaagggaagcaagggaaagggtaattgattcattgcaccaagaggcaacaatgtggacggaacgatttgctcttactttgaacaggagtcaagaacttccccgattgctagccaaggccaaagcaatggcggacacctactccgcccccaagga

SEQ ID NO: 14620 - DNA, 242 bp, Glycine max
  Clone ID: 701156691H1
gattccagagatacagagatcaagtatggtctcctgcgttatccagttaaaggccttggggattgataatatcttgggctttgactggcagcgtctccatctactgaagcaatgatccgagcattagaaattctctactcacttagggttttggatgatgatgctaagctgacttcaccaactggatttcaagttgcagagattccacttgatccgatggtctcaaaaatgataattgcttc

SEQ ID NO: 14621 - DNA, 240 bp, Glycine max
  Clone ID: 701156692H1
gactctgctcttgctttagccatcactaacactcagtctctgaattggggctgagggtttcgagtaacgtttatttttcacgagtttagatatcatgggtaaagagaaggttcacataacattgtggtcattggccatgttgactctgggaagtcaaccaccactggccacttgatttacaagcttggaggtattgacaagcgtgttattgagaggtttgagaaagaagctgctgagatg

SEQ ID NO: 14622 - DNA, 242 bp, Glycine max
  unsure (1)..(242): unsure at all n locations; Clone ID: 701156693H1
ggtcgttgaaaataaaactctcactttgccacggttacgacctttagcccctgcagccatgtcaacgagcatcgaagaccaagctctgngtcaactggcagcgatctgaagtgcgacgggtacggcatctcccttgtcgtttcgtcggttttgttcgttctgtatcttgcggtgcacgccaagaagaacctcaacagcctctgtcgtcgaggctcctatgttgtcgttcctatttgccctcc

SEQ ID NO: 14623 - DNA, 246 bp, Glycine max
  Clone ID: 701156694H1
atttacgtatgctatataatatttttacacaaatatccaagaaaacttgattatttatttgttttactatttcagtagacactattaacgaaaacacatgctacccatttaatcatcaattatctaaaatattaatttattcttttttaaaagtaatattaggccttttcttttacatcttttaaactggaaaacaaaaaaattcttctacgaacaacccagacataaagatgccctttatcaact

SEQ ID NO: 14624 - DNA, 241 bp, Glycine max
  unsure (1)..(241): unsure at all n locations; Clone ID: 701156695H1
tcccttgagtcaaggttacgttcttagaaagacacaatgaacaattccaagaaattggccccttaatccagaatgaactaccaaaatcaagaaatgcaaagacaacggacacattttcagaattcctcacaacttacacagncnccttcatcagcctgacaaatgaaactataccnanaatggatgaaaaatggnctatattaatatgttacccagggatcnctttatgaattccggtata

SEQ ID NO: 14625 - DNA, 259 bp, Glycine max
  Clone ID: 701156696H1
ggcatatccaaaggaacaaaaatattattaagatgatcaacattattggagcacttgttctactctttgcatttctcttcctcagttgtgtgtatgcacaagacacaacaacccttgtgcctgcaatcataacttttggtgattctgctgtggatgtagggaccaatgactatcttcccacccttttcaaggctgattaccctccttatgggagggactttgttaaccaccaacctactgggaggtttgcaatggcaaa

SEQ ID NO: 14626 - DNA, 257 bp, Glycine max
  unsure (1)..(257): unsure at all n locations; Clone ID: 701156702H1
gacgacgccgtttaaatccactaacgacgcttgggatgttctgtacgcagctgcaggggnanttgcgaagntgnagatgaacgatttagtttcttcgaagtttgatttccagaaccgtggagtgctgggtggttttcctccacctgttgcggcggagaatgtattttttccaaaccagggtgtttctcaggttcgataccagcaagtgagaccagagcagatgctgaagcagcatgtggttcggtttggggcaggca

SEQ ID NO: 14627 - DNA, 73 bp, Glycine max
  Clone ID: 701156703H1
caatgtatgcataagctatagaattttgtaagactttctggttccttgtttaagtagaatatactatattacc

SEQ ID NO: 14628 - DNA, 234 bp, Glycine max
  unsure (1)..(234): unsure at all n locations; Clone ID: 701156704H1
ggttgcagagganccgtgttctctaatcttgnaattttctgtgtcgcttcgtggttcattcttctcgttcttgtgatctgttctattttggagtacttacaacactcctttgcaagtttaattaattaaagaggctaatcaattttcaattggactgcagcagatggctgagnagggttgcagggttactctaaatgtttatgacttgagcccaggactagcacggcagctttt

SEQ ID NO: 14629 - DNA, 268 bp, Glycine max
  Clone ID: 701156705H1
gaatcaagaatacaataacatagcatagagtgagaagtgagaagagaaaaatggcaatctccatacccagtagacaacttttcatagatggagagtggaaagtccctcttctcaacaatcggtttccgatcatcaaccccgctactgaagacatcatagggcatatttccagccgctactaaggaagatgttgaccttgcggtggatgctgctaaaagagcttttccccataacaaagggcaagattggtcttcagtcctggctctgt

SEQ ID NO: 14630 - DNA, 255 bp, Glycine max
  unsure (1)..(255): unsure at all n locations; Clone ID: 701156706H1
gagattaaaagcaagggtagaantattgcaacgttctcaaaggaacctactcggggaagatcttgcccaaatgaatacaaatgagctagagcagcttgagaatcaactggaggcagcactgaggaatattncgtcaacaaagactcaattcatgcttgaccagctttctgatcttcaccaccgggaaacattgcttattgaaactaataacgtgttaaggagtaagttggaagaaactgatcactcacaagttca

SEQ ID NO: 14631 - DNA, 222 bp, Glycine max
  unsure (1)..(222): unsure at all n locations; Clone ID: 701156707H1
gacaaaaactacttccttctctcctttgctgtgttttctttctcaaaaatgggtcgtacctatgttcttatgatggttgctgcattgttgttgagctccaccatggctcaatctccagcttcgtcgccggctttgtcccccanccacacgccggtggccactccacctagganggcgttgtcgccgtctccgtcgtctntntcaacancngcttcaaccggc

SEQ ID NO: 14632 - DNA, 252 bp, Glycine max
  unsure (1)..(252): unsure at all n locations; Clone ID: 701156708H1
gaggtacttgagaagagaaaatggtgtcgtcgcaggttgtgaatacgtacccgttgtcgagctacacgttcggcacgaaggagcccaagatggagaaggatacctccgtcgcggatcgtctcgctcgcatgaaagtcaactatatgaanggngggatgaaggaccatgtggaaggaattttactggtaccaagagcacatccatcctcaatacttcttctgcaaattggaaacacattctggcaaactccca

SEQ ID NO: 14633 - DNA, 255 bp, Glycine max
  Clone ID: 701156709H1
ctcagagtactgttattgaaaggcaaaggacaatagagtatacctgaagccctagagccctatccccttcaacacttttgaagtcattgacaatagcaattcccaactgcaatgtgatttaacaacaacattaataaccatttttatttgacatattatcatattcatatccaacaaaatgtcatgaagaatatattacatactccagctatgctgtataggagtgtgagaacaattatatctggtgtaagagtt

SEQ ID NO: 14634 - DNA, 229 bp, Glycine max
  unsure (1)..(229): unsure at all n locations; Clone ID: 701156710H1
ggaacctttgcattctattcattcaagattcagcaagtgcgttttggaagcagagaccgaaatacttcgagatggcccgtacaaagcaaactgctcgtaagtcaactggaggaaaagctcccaggaagcagcttgcaaccaaggctgcacgtaagtccgcaccaacaactggtggtgtgaagaagtntcatcgttatcgccctggaatgttgctcctcgtgagattagg

SEQ ID NO: 14635 - DNA, 191 bp, Glycine max
  unsure (1)..(191): unsure at all n locations; Clone ID: 701156711H1
gaaangncaaaggcnccgtgtaagagcngtttgaangntgctaacatatctntcaaaggaagtacatnaggntcnttcttgttggaggcatgactcctgtgccctaaagtccaggaagtggtttcnagcnatctttggnaanagtcctagcnaaggagtaaatcctgatgaagcagttgccatgggagcnc

SEQ ID NO: 14636 - DNA, 251 bp, Glycine max
  unsure (1)..(251): unsure at all n locations; Clone ID: 701156714H1
gacctaaaacaaattccaacagttctttttcttagaatggagancttgtggaaaactctcatgaggatacacgtgattagaacattttttgctctccttttggttgcacttttaagttcagagggagtagagagcagaaaagccaaagttgtgaccacttccttagagtacaatgctataaactgcagagctcacagtgcttcattgacagattttggtggtgttggagatggaaaagcatccaacacaag

SEQ ID NO: 14637 - DNA, 256 bp, Glycine max
  unsure (1)..(256): unsure at all n locations; Clone ID: 701156715H1
ggttgatacgttgtcttaaaccaacccacatgtgttgctggtgcttggattttgcatcagttaccttaccttaaccttaaccttagcatacttccttgttttgtgtcctctctcttcccttttcactcctttcttgcatgctttaaacaatccactcatatcccactctttgctttccaactaaccattattattcctactctcataacttgttgccacnntcatcattctcagactttgcctccccgatgggtcc

SEQ ID NO: 14638 - DNA, 258 bp, Glycine max
  Clone ID: 701156716H1
taccattaatgttgtcataactatcaccattgtcacaaccaacatccatcaccactattattattaccaacaataccatttttgtcacggttaccaaaactgtcagtactaccaacattgtcatcaccaatattgcttaccaataatacattgttgccacaaccattaatattgtcagtgtcatcacgatcactgttggattttaaatgttacaagataagtgaccgaacgaaatttgaatgagacgatgtattacgc

SEQ ID NO: 14639 - DNA, 265 bp, Glycine max
  unsure (1)..(265): unsure at all n locations; Clone ID: 701156717H1
ggtggacaatttgatttgggtggtgcctttgcgaatagttggttgaacgagctcctttgcaaccatgagttttgtcttccgagggagtaggggagatattgaaagtggcttttcagaatatgttcctganagaaccttgatgcgggttcatccagctcgaccagttaatggcaattctctagcttttcttatcacagttattttgatattcatgatattaaactcccctcagatgttacatcattttttgctctgggttgtactg

SEQ ID NO: 14640 - DNA, 257 bp, Glycine max
  unsure (1)..(257): unsure at all n locations; Clone ID: 701156718H1
gatagttacatacgtaaaaaaacttgcaattgttttataaggaatcagattagttacacttccattcccttccagcagctgggtttgagaagacaattgattatataggttttgttagtaaacaaaagaaaaggaaacatgaaggacgcagatgtgtcaaggcagatccagcagatgatcaggttcatccgtcaagaggctgaagagaaagctnntgannaatctgttgctgctgaagaggaattcaatattgagaa

SEQ ID NO: 14641 - DNA, 260 bp, Glycine max
  Clone ID: 701156719H1
ggaagcaaaaaatgaaaacccaaagtgcttctctcctctgtctttttctctctcttgctatccttttggctagtggcactgctgcaagtgcaactccaagaagcgcagtgccaagccaccatgtttcaacattcaacagaagcctttttccttccacttttctctttggaattggttcttctgcttaccaggcagaaggagcagcaagtgtagatgggagaggaccaagcatatgggacacctacactagacagcatact

SEQ ID NO: 14642 - DNA, 268 bp, Glycine max
  unsure (1)..(268): unsure at all n locations; Clone ID: 701156720H1
attgtgaaggaagtctcttcctacttgaagaaagtaggatacaaccctgacaagattccttttgttcctatctctggttttgagggagacaacatgattgagaggtccacaaaccttgactggtacaagggtccaactctgcttgatgcacttgaccagattagtgagcccaagaggccctctgacaagcccctcaggcttccccttcaggatgtgtacaagattgnanncattggaactgtgccagtgggacgtgttgagaccggtg

SEQ ID NO: 14643 - DNA, 223 bp, Glycine max
  Clone ID: 701156721H1
acctctctctactcttaaaatggaacgaaactcctctcagaagcctgagaatgtggctaccaatatgccaagaagcaaggacccagcagaaattgggaataatgctgatgctgtgttcccttgggctggtgctggtgctggagatatctcatttacaggaccattagttgaagcatctgcttgttgaggagatggagaagcttgtggagagaggcctccagct

SEQ ID NO: 14644 - DNA, 240 bp, Glycine max
  unsure (1)..(240): unsure at all n locations; Clone ID: 701156722H1
aagacgacagaagggggaaggagtgaggtagcaacagcactgccactgccactaccaatagcagaatgggaaccttgggcagagctttctacgccgtcggattttggatccgcgancaccggccaagccatcgatcgcctcggctctcgtctccaaggcaactacctctttcaagaacagctatctaggcatcgacctctgatgaatctgttcgacaaagctccctcggttcacagggat

SEQ ID NO: 14645 - DNA, 231 bp, Glycine max
  unsure (1)..(231): unsure at all n locations; Clone ID: 701156723H1
gggcacaagtgagtangttgatcgagataactagacaacagtgtgatgaaaatgaaggtccttgttnncttcgttgctacaattttggtagcatggcaatgccatgcgtacgatatgttccctctccgaatgaacactggctatggtgcccgtactccggaggtgaaatgcgcaagttggaggcttgctgtggaagcncacaacatctttggctttgagaccattcctgaa

SEQ ID NO: 14646 - DNA, 245 bp, Glycine max
  unsure (1)..(245): unsure at all n locations; Clone ID: 701156724H1
aatgctggagttctcaacgagctgttagtggaagctctatttcctaactgtgcacatgcattttatgattataacttatgaattccgcagcttaaaatttttaccctctcagtaactaaattgtttctacaggaagacatccgtggttttcctaggaatagaaccgtgttgagtggagatgtggatttagtagttgaatcanttgaagctccttgtcggaacaaagaatatggttgcnatgaaac

SEQ ID NO: 14647 - DNA, 246 bp, Glycine max
  Clone ID: 701156725H1
cccattcagagcatgagagcaattgtgtcaagtgcaaatcaatattgtttaatgaaaaaagcaaaacctgcatgtattgttattttttttcatagctagcggagttaagcaacatacgttgctcaatttgatttaggcaatcacatatgttccctttgataatgtgcttcttctctacagactcaataatatatatacgacatcaattttcatttagaatcaatctgattcagtaagtcatacaca

SEQ ID NO: 14648 - DNA, 215 bp, Glycine max
  unsure (1)..(215): unsure at all n locations; Clone ID: 701156726H1
gggaaacgaagaagccactaactacgnacgcattcgtgagaaaactcaatattcgtcgctcatggcactctcttctcgtctcttttccaaatccaaattgatctatggcagtcaaatacttctacaaaaggagcatgctattccagttcgtcactttgttaaagagtctgcccctcctgcccttaagggagacgagatgctgnagaacatttttg

SEQ ID NO: 14649 - DNA, 263 bp, Glycine max
  unsure (1)..(263): unsure at all n locations; Clone ID: 701156727H1
ggttgccttctgttgtgttgtgtgtgcataaacaaaacaaaaacaaagagcgtttcaattgctatctcccacaaacatcnatagttaagatctgcgttaaccactaagatctctgaagcagagggcattgtctactgtcacaggcatgggtgaagaaaagaaagacgaaggaaacaaagaagaagccaaggaggaaaagaaggaagaagagaagaaggaggagccaccaccggagatantgctcaaagttgatatgcttgtga

SEQ ID NO: 14650 - DNA, 250 bp, Glycine max
  Clone ID: 701156728H1
atcctttgtgacgggcgcgcggggtgctaataccttccctatgtgtaaacaactctcgaatcattctttaaaaattcgcagacctctttttggtttttctaacgttttcccttaaatgaacattgatggtgactctgctcgttttctccctaggagacgaatgcactttggcttatttatcttgcttttgtcgtcccgtcgtgaggtaggttgcgacagatgtcgactccattggggacttgttggagag

SEQ ID NO: 14651 - DNA, 85 bp, Glycine max
  Clone ID: 701156729H1
gggattctttgctattgctgaaaatgaatctattggaagagaacgctacagctttatgcagaaaatgctcctgccttgtggtttg

SEQ ID NO: 14652 - DNA, 256 bp, Glycine max
  unsure (1)..(256): unsure at all n locations; Clone ID: 701156730H1
ggcacaagtttgttgagatagctagaagcaataagatgaaaatgaaagtgcttgttttgtttgttgctacagttttggtagcatatgaatgccatggctcagactaccagaagttccctctccaaatgaaaactgggtttggtgggcaatacagcaatgaggtggcatgtgccggttggaggcttggcgtggaagcaaacaacgtagtcaagtggcaaactnttcctgcagcttgcggagagtacatagctgacta

SEQ ID NO: 14653 - DNA, 258 bp, Glycine max
  unsure (1)..(258): unsure at all n locations; Clone ID: 701156731H1
ggaagctgaacccnaactagctgancagacggatnanaacttcgactgaagctgccttctgacgatcgccgntncgattcagcctcagncatttccgttgcagtcatggtgcaanaaaatggcaagaggnaganaccanacattctggtgactggcacaccggggacaggaaagacaactgtgtgcatgctctagctgaagccacccagctctgcnacatcnatgtcggnganttagtcaagcaaagaacttgcntgt

SEQ ID NO: 14654 - DNA, 261 bp, Glycine max
  unsure (1)..(261): unsure at all n locations; Clone ID: 701156732H1
ggcagcgcttgatttgaggccaggcaagccccactcaaccaccacacctctcctcgttcacgctacncctttctgntcttcttctacctttcaagttttaaaagtataaagatggcagagacattcctatttacctcagagtcggtgaacgagggacaccctgacaagctctgcgaccaaatctccgatgctgtcctcgacgcttgcctcgagcaggacccagacagcaaagttgcccgcgaaacatgcaccaaaaccaac

SEQ ID NO: 14655 - DNA, 257 bp, Glycine max
  unsure (1)..(257): unsure at all n locations; Clone ID: 701156733H1
ggccgctttgtgctgctgttgcaaaacttagggttgggcctttttttgaggttttcagcgcttctttctcacaatggttcttcagaatgatattgatttgctgaatcctccagctgagntnnagaagagaaagcacaaactcaagcgtcttgttcagtcaccaaactctttcttcatggatgttaagtgccagggatgcttcaacataacaatgtgtttagccactctcaaactgttgtggtgtgcggaaactgcca

SEQ ID NO: 14656 - DNA, 260 bp, Glycine max
  unsure (1)..(260): unsure at all n locations; Clone ID: 701156734H1
gaggatgagtttgataactccaatgatacggtgagtttttcccaaccgttaattccaaatcaatggtgcatatttatttccattggagaaaaatgttattgaagcaggtgggtgttatttccgtggtctaaagcaaagtgaattagacttagattctgattctgggattggatggagctaggcctcatggataagaatccaacgaagctggaacactttgnnnncatgtggaggctcgaatccactgccacactattatc

SEQ ID NO: 14657 - DNA, 256 bp, Glycine max
  unsure (1)..(256): unsure at all n locations; Clone ID: 701156735H1
gccttttcatttctaacctaattttcgtttccatccaaaanatggctctatcgcgcgtggctcaatcgtcgccatcacagtcgaatcttttgaaacccctctcgtcgtacttatccctacgacgccgttcggtgtcgacctcgtcggagcccctcaccgtggagacctcggtgcccttcacctcccacaactgcgatgcgcctccacgcgccgtggagacgtcctcggcggantcttctcgttcttccgtgacatg

SEQ ID NO: 14658 - DNA, 216 bp, Glycine max
  unsure (1)..(216): unsure at all n locations; Clone ID: 701156736H1
gcatgagaagataacaaacaaaacacctcattcttcatggctcaccaatcctcttcttctgaatctgatgaccatattccttctcatcatcacccattggacctaaacagtccccatccttctaaagatatcatcttcgacgacaacatggagcncacaacagcaccaacaagaaganntnngcaacattaacaaccatgaatatgatggagatat

SEQ ID NO: 14659 - DNA, 231 bp, Glycine max
  unsure (1)..(231): unsure at all n locations; Clone ID: 701156737H1
gatgcccaagtcaangtccacaggaacactttgagttgcccgtcccagtaaaacccgcatgatgaattgagtcatcattaaagcattatccaatatcttaaattcaatttaattattgananaaaaattatcccagtgcagcantcttttgaaagctcattnatgtttatccaactactacttcctttagagttttctntcatcacaaaactcactcaataatttacaagg

SEQ ID NO: 14660 - DNA, 255 bp, Glycine max
  Clone ID: 701156739H1
agccttctaggaacaccatctggaactttgcctggtacagtataagacagtgcagtccataacactaccatcattggaaccccataatctgctataaatcctcgtagccaccctgcattgcaagccagagtaagaatatataaagtggtatttgagattatttacttaacacaaaaacattgtgtacataaaagctctatcttgtaagatatttttggggttatttacctgttccatatcgccacgttctagctc

SEQ ID NO: 14661 - DNA, 245 bp, Glycine max
  Clone ID: 701156740H1
ggcacaagtgggtttgttgatcgagataactagaaacagtgtgatgaaaatgaaggtccttgttttcttcgttgctacaattttggtagcatggcaatgccatgcgtacgatatgttccctctccgaatgaacactggctatggtgcccgtactccggaggtgaaatgcgcaagttggaggctgctgtggaagcacacaacatctttggctttgagaccattcctgaagagtgcgttgaagcaac

SEQ ID NO: 14662 - DNA, 222 bp, Glycine max
  unsure (1)..(222): unsure at all n locations; Clone ID: 701156741H1
ggcaacagccaacaaaaaataanacacacacataataagcaagcaaaacacacacaaaagganataccatatattatacacanaccaaaccatatatcttattctatntnctccctntccaccannnnnnnnnnnnnnnnnnnnnnnnnnnnntantcatggagaatattggagaagagtacgagcattactgggagaccaacatgttcctnnaaacccaag

SEQ ID NO: 14663 - DNA, 248 bp, Glycine max
  Clone ID: 701156743H1
ggcacaagtgagtttgttgatcgagataactagaaacagtgtgatgaaaatgaaggtccttgttttcttcgttgctacaattttggtagcatggcaatgccatgcgtacgatatgttccctctccgaatgaacactggctatggtgcccgtactccggaggtgaaatgcgcaagttggaggcttgctgtggaatcacacaacatctttggctttgagaccattcctgaagagtgcgttgaagcaacaa

SEQ ID NO: 14664 - DNA, 238 bp, Glycine max
  unsure (1)..(238): unsure at all n locations; Clone ID: 701156744H1
gganacaagcaaaattaagcnccaaaagcccaaccctctctactcgctgttggtctctcctatttggncattcgcagatcgattacgaagtaatttcactgaatcttattgaagatgtttctcacaaggactgagtatgaccgaggagtcaacaccttttctcctgaaggccgtttatttcaggttgaatatgcaatcgaagccatcaagctgggatcaactgcaattgggttgaaga

SEQ ID NO: 14665 - DNA, 249 bp, Glycine max
  Clone ID: 701156745H1
gacggcaacagaagaataatcgagacacagatcatagtgatcattttttaatttctcagatttatccgacgtcgctgcagatccaccaaccgttatggctgccttcagcggtgatgaaacggcaccgtttttcggcttccttggcgccgcagctgccctcgtcttctcctgtatgggagctgcctatggcacagcgaagagtggcgtgggcgtggaaccccgaggtgtaatgagacctgagctggtgat

SEQ ID NO: 14666 - DNA, 250 bp, Glycine max
  Clone ID: 701156746H1
gcagcagttgcaaaacttaccaacctacaaactgtggatgtatcgtttaacaatcttactggagcccttcctaagcaattggctaaccttgccaatcttcttaccttcaatttatctcataacaaccttcagggtgaactgccggctggtggtcttttcaacaccattacgcctcctctgtttctggcaatccatctctttgtggcgctgcagtaaacaaatcatgccctgctgttctcccaaagcctat

SEQ ID NO: 14667 - DNA, 246 bp, Glycine max
  unsure (1)..(246): unsure at all n locations; Clone ID: 701156747H1
gggcagtgagtgacacattcagctgcacaaagaatcccaaagtagagaaacagcacactctcacctcactcacttgtccttgttatatttgttttatatcttgtcacaatctgtgactgttcgagttatccgaggcccctcttttatatggtcgttgataaaatggcttcgacccttttagcaaagatgcttttgggtnntngattgatacacccttcttcgttcctcactcaccagccacagatt

SEQ ID NO: 14668 - DNA, 266 bp, Glycine max
  unsure (1)..(266): unsure at all n locations; Clone ID: 701156748H1
ggcacaanaatacnatancaanacanaactganccaaagngagagtgtgtgaaagtgaaccaaaaatcagaacaacaatggcganacttaanggttcctcagnntcttccccccgttgnaagatgattgtnagcngttcgaaaaggccctctcaagttgggggaactaaacggaggagcctgattgtatcgatcttggctcataaggaatgctgctcngaggnagcttatccagagnaaacttatggcccagactatgggagaagt

SEQ ID NO: 14669 - DNA, 255 bp, Glycine max
  unsure (1)..(255): unsure at all n locations; Clone ID: 701156749H1
gagggagagaggatccaaatccaagtacggttgggttggagagaaaatgcgtccctgctgaaaacaccaaaccctaaaacgcgaaaagggttctaagaatttgcgaaggaaagagctagcggagatggagattcactacagtaacagctatttcgagangcgccccatcctcaagtccaaggctgccgctgtcaaatgggtcaaagaatgggttccccaagatcttgtgacaacaggagggaagtgcatgatctt

SEQ ID NO: 14670 - DNA, 254 bp, Glycine max
  Clone ID: 701156750H1
gggtccatcttggcagttaatgacttcagagagaaaagtagaccaaacattaacttttggtcttgctgggcatccaatgtccgcaagggacgattccactccctatagagcaggcacacaccattcctattgaacacatacatcatatggccattgtttcctgaagctgtcggagcaggaggtgaaggactaatctcagaccccccaaagaattgcattcttgatcaacagggatgaagaatagattgatacta

SEQ ID NO: 14671 - DNA, 252 bp, Glycine max
  Clone ID: 701156751H1
gaaagagaagaagtgaaaggaagcatcagccgcggcggtgttaggtaggcggagcatggcggcgcctgaatcccctctctgttacgtcggtgtcgccaggcaatccgctgcttttcgcctgatgaagcaaatggggtgggaagaaggagaaggtcttggaaaagagaagcaggggatcaaaggacacgttcgagttaaaaacaaacaggacactattggtattggccttgagaagccaaacaactgggcctt

SEQ ID NO: 14672 - DNA, 198 bp, Glycine max
  unsure (1)..(198): unsure at all n locations; Clone ID: 701156752H1
gctctgtgttttttctctctgcagaatttcccaaatttctccactaccctatctcctttgctcctgaaactcccacattcttcaccagcaatgcacgatcttcaatacgaatgcagtttcgatatttgatatcggagtatcggtgtttgagcggctgaattngaattggaaaatgcttgaggcaatggaaagttcggt

SEQ ID NO: 14673 - DNA, 251 bp, Glycine max
  unsure (1)..(251): unsure at all n locations; Clone ID: 701156753H1
ggcacaccaaagaaagagtgcaacaactgcacgaaaatggcgaccatttggaagaccaacgcancgagaaacgcagtgcgttgtttgacgcagtccttggcatccactagccgtaccccttcgctcccctctcatttctcctccgtccgctacctccgcaccggtcgcgatcccagttcaaggacttatgagataattccgccggtgaattgggggattcggattgtgccggagaagaaggcgtttgtgat

SEQ ID NO: 14674 - DNA, 250 bp, Glycine max
  Clone ID: 701156755H1
ggcggcaaacatggagtttctaagctacactacacagtcggggaagcaatggattcgttctcaaatcaatcgagagggtcgtcgagccaattatctgctcaggatctcaaaaaccagttgaagaaccaactcgccattgagtatgctcaacaacttcttgagacagtgggaagaaagtgttttgagaagtgtgttacaaaaccaggttcaagcctcggtgggagtgaaagcagttgcatctctaggtgcg

SEQ ID NO: 14675 - DNA, 248 bp, Glycine max
  Clone ID: 701156756H1
gacacttcaacaaaaaaattacaaagcacgagggtctcgtttagcaacttgtaaaggacacaacagcatcacttacataacatgcacttccccttctccaccgcattctgtgttctctagtcaatagaaagtgagcactgaatttgctttgtgccgttcctgttttcttataatttgtgcatttttttgcacataaacaaaacccatgggaagggctccttgttgtgagaaagtgggattgaagaagg

SEQ ID NO: 14676 - DNA, 252 bp, Glycine max
  Clone ID: 701156757H1
gacggaggctgctgctatcgaatactcggataaggagggtaagggcggtgaagtgcagtacttcaatccccttttctctcttctccttttatttcatcactctcttcgttcctttcttcttctccaaagttttcaattttcacacttttcgagtaagaacatcttttcaatggcgtcccaaattacccgtgagtggtctggaatcaatacattcgcacctgctacccagactaagttgcttgaactcttggg

SEQ ID NO: 14677 - DNA, 248 bp, Glycine max
  unsure (1)..(248): unsure at all n locations; Clone ID: 701156758H1
cctaccatcttcataactgagtataaagactgcaatgatgcctgaatatttcttgcccttcctcttccccccaccctaagttttcttataacttcatattggcttgcaaaattaatattcactcctttcctttgggagcaacatctattccacaatacttcccaaantctaatagtctactgccactttaatttgccactgtttctttgcaaatttttagaaatcatgctcttaatttccaacttgta

SEQ ID NO: 14678 - DNA, 257 bp, Glycine max
  unsure (1)..(257): unsure at all n locations; Clone ID: 701156761H1
gggtggggtgtgcagaagagcgtcgcagttgtaaccctaatcagaagaagcgcggcttcaagcgagtgacagccaccagccatgggtcgtatgcacagccgcggncagggtatatcctcttctgctttgccctacaaaaggacacctcctagctggctcaagatctcttcgcaagatgtcgaagaaaatatctgcaagtttgcgaagaaaggtttgaccccgtctcagattggtgccattctcagagattctcacgg

SEQ ID NO: 14679 - DNA, 255 bp, Glycine max
  unsure (1)..(255): unsure at all n locations; Clone ID: 701156763H1
ggtggcactgtggctaagtagagaggtagctttccctgtaagactgttacttaagattaccaagaattctagctagctggttagttcttttgtcatttcaaagagaaactgagagagccatagctagggagaataccatgnccaaattgtatgggttgagtcatctcttcatgacagtgtttcttcataacttctccatgttcatggtggtaccagccatcaccgatgtcacaatggctgctctttgtcccggac

SEQ ID NO: 14680 - DNA, 180 bp, Glycine max
  Clone ID: 701156764H1
ttaatagtaaaaattacacttttttctttattaatactaggtcacaaaaaatttaatgacgatttttaaaaaattatatataaattatttagtgataactaattaatgttattttttgttgtagtgatatttactttaaatgtaactttattttggtctaacaataatatgttacgcacc

SEQ ID NO: 14681 - DNA, 256 bp, Glycine max
  unsure (1)..(256): unsure at all n locations; Clone ID: 701156765H1
gacaccaacgccaaaacaaacccactaagatggcttcctttgtatccttcctagtgctgcttcttgcagcccttatcctcatgcctcaggggcttgctacttactacaaaccaattaanangccaccagtgtacaagcctccagtgtacaagccaccagtgtacaaaccaccggtttataagccaaaaccaccggtttacaagccgaaaccaccggtttacaagccaccatataagaagccaccatncaagaaacc

SEQ ID NO: 14682 - DNA, 250 bp, Glycine max
  Clone ID: 701156767H1
ggaagccgaggctctatcttcccaaaatcatataattctctttcatctgaattttccccttcaaatctcttcctttgaagttttcgtagttctctgcatcatggagatggaacgcgtcttcgagtttcctcacactcacatggatcggcgcccgagaaagagagcgagattgggctgggacatccctgaggtccccaaggctcaggtaggattgttttgtggacaagatgttgggactatttcaagcttt

SEQ ID NO: 14683 - DNA, 251 bp, Glycine max
  unsure (1)..(251): unsure at all n locations; Clone ID: 701156768H1
gctcgaggaattaaattgacatnattttgagtcgcttancttaagtagcgagattttcngatggattttttttagtaatttgatttacttatcgagtcacttttgcctcggatctgtccaacagtacaatcgtgatttgatttgtttcgtcaatctatggctcaggctgttatttctttttctttttaggctaattgaagaatttaatganagtgtaatactacacatataaaaggttcttttatgcgtta

SEQ ID NO: 14684 - DNA, 246 bp, Glycine max
  unsure (1)..(246): unsure at all n locations; Clone ID: 701156770H1
ggatgctttgcggtggccatggagctgctcagctctttgaggaaggaggacatactggagctcttctctcatggcttctgttcccactgcgaggatattctgcatactcgaattacaaaccgggcntaaaagaaagttggatgaaacttcatctccggatgaagaaggctttgaatcttctggggatcatgtagtagacaagccagtgaatattggtaatgtttcaaattcagaatctttgactaa

SEQ ID NO: 14685 - DNA, 270 bp, Glycine max
  Clone ID: 701156771H1
tcttcagttttcacgtcttacattgttttgagtctagtgatggcactagcaattagcggtttcaatttcaaaggggcagaggcagcacgtgccttctttgtgtttggtgattctctcgttgacaatggcaacaacaactacttagccaccacagctagagcagacgctccaccttatggcattgattatccaactcgcagacccactggccgtttctctaatggcctcaatattcctgattttatcagtcaagaacttgggtcagagtcc

SEQ ID NO: 14686 - DNA, 245 bp, Glycine max
  Clone ID: 701156772H1
ggcatatccaaaggaacaaaaatattattaagatgatcaacattattggagcacttgttctactctttgcatttctcttcctcagttgtgtgtatgcacaagacacaacaacccttgtgcctgcaatcataacttttggtgattctgctgtggatgtagggaacaatgactatcttcccacccttttcaaggctgattaccctccttatgggagggactttgttaaccaccaacctactgggagg

SEQ ID NO: 14687 - DNA, 245 bp, Glycine max
  Clone ID: 701156773H1
agggaagaagaaaaacaatgcatcttccaaatctaggaaaagtggatcttggagagacagtgttggagcaagcagtcagttgactgtctatcatggctatgtagctagttcttatcatacagggattatttcaggattcatgctaatatcttctcacatggaaaatgtggcatcaagtgggaaaatggtaaaagctgtaataataggtcttggagcaggtttacttcccatgtttcttcacggat

SEQ ID NO: 14688 - DNA, 216 bp, Glycine max
  unsure (1)..(216): unsure at all n locations; Clone ID: 701156774H1
ggcatatcannagganacaaaaatattattaagatgatcaacattattggagcacttgttctactctttgcatttctcttcctcagttgtgtgtatgcacaagacacaacaacccttgtgcctgcaatcataacttttggtgattctgctgtggatgtagggaacaatgactntcttcccacccttttcaaggctgattaccctccttatgggagg

SEQ ID NO: 14689 - DNA, 242 bp, Glycine max
  unsure (1)..(242): unsure at all n locations; Clone ID: 701156775H1
taatttgggaattattgctcccatcgccattggtttcattgtcggcgctaacattttgttgggtggggccttctctggagcggccatgaaccccgctgtgacatttgggcctgctgtcgtgagctggacctggaccaaccactggatctactgggccgggcctctcatcggtggtggaatcgctggcctgntttacgaggttgtcttatcagccacanncacgagcagcttcccaccactga

SEQ ID NO: 14690 - DNA, 255 bp, Glycine max
  unsure (1)..(255): unsure at all n locations; Clone ID: 701156776H1
ggggccactatgattctgctcatgatttagattcaattgactttagaatgcaaagactattcagttcagcttcatcagttatggtagctgatataacaatcaaaagtttagaaggtcttgattcacttgagttattcccaactcatatacaagacatatcatttnaaagtcccttgatcttatcaggaagatacagtggaacttttcctgaattagttaaagtcactggtactttggcagatatgactaacttcg

SEQ ID NO: 14691 - DNA, 247 bp, Glycine max
  unsure (1)..(247): unsure at all n locations; Clone ID: 701156777H1
gaaagacctgaaatcagggcaaaagctttctaggtatgctgccgaggcaaccgcggaagttgttggccgaaaggctaggggcttgggattgaaatctgttgtcatgaaagtgaatggatttacacattttaggagaaaaaggaatgcaataatgagctggaaggagggctttactgctggttctagaggggatagaaatccaattgtatacattgncagataccactagaaaaccccataatggctg

SEQ ID NO: 14692 - DNA, 260 bp, Glycine max
  Clone ID: 701156778H1
ggcagttcaaagcgaaggaagattcgaaacgaagaaagaaagcgttgtgaagaatggcggaagagggacaagtgatcggtgtccacagcgtagaggagtggaaggaacatctcaagaagggagaagagtccaagaaattgattgtggtggattttactgcttcttggtgcggtccatgccgtttcattgccccaattcttgcagagtttgctaaaaagttgccgaatgtcaccttcctcaaggtggatgtggatgaattg

SEQ ID NO: 14693 - DNA, 235 bp, Glycine max
  unsure (1)..(235): unsure at all n locations; Clone ID: 701156779H1
tgcagcnctggttgtcaagcttgaaggaaattccctgttctcatctggaaatattgctggagctgcatcaaaatactctgaagcattggcattgtgtcctatgagatccaggaaggagagagttgttctatatagtaatcgtgctcaatgccatcttttgctgcaacaacctttggctgccataagtgatgctacccgtgcactatgtctccatagacctgtcaatcgtcagcca

SEQ ID NO: 14694 - DNA, 254 bp, Glycine max
  unsure (1)..(254): unsure at all n locations; Clone ID: 701156780H1
gaagagagttggaaaacaaagtatagagtgaaagaatgggtgananaagcaagattttgatcataggaggcaccggctacatcggcaaacatatagtggaagcaagcgcaaaggctggaaatcccacttttgctttggtgagggaatccacactctctgacccctccaaggcacaactcatccacaattttgaggctttgggcgttaatttggtccgcggggatctgtacgatcatgagaagttggtgaaagct

SEQ ID NO: 14695 - DNA, 252 bp, Glycine max
  unsure (1)..(252): unsure at all n locations; Clone ID: 701156781H1
gagttnaccgaaagcaaagtgtctctctaacctctgcaaaantccaaggttgcacggttttaactgcttaggtttttgtcttcanaattaaaactgtgcaactttggttgcnaagtcataggggttaanttntgtttgcattaangtgggcttnanataattgtgcctcttgtatgatggaatccctttggaagcttttgtatttgctggagcctgcgcctgtcacacttatcactacanctgtggctgtgt

SEQ ID NO: 14696 - DNA, 251 bp, Glycine max
  Clone ID: 701156782H1
gatcgaagcaaaaaatgaaaacccaaagtgcttctctcctctgtctttttctctctcttgctacccttttggctagtggcactgctgcaagtgcaactccaagaagcgcagtgccaagccaccatgtttcaacattcaacagaagcctttttccttccacttttctctttggaattggttcttctgcttaccaggcagaaggagcagcaagtgtagatgggagaggaccaagcatatgggacacctacact

SEQ ID NO: 14697 - DNA, 248 bp, Glycine max
  unsure (1)..(248): unsure at all n locations; Clone ID: 701156783H1
tattctgagtgttttgatgtagaggagtctgtggaatctgaagttgatgatcctgagcaagaagaggaaggggttaccaaatttgataactgtatagaagaggaggaagttaagattgtggctgcaaatgatgaagtgatggggctgaggaaagaantcaacagacttggtgaagagaacaaggatcataaagatcaaattaaggagaaatataacgtttatgatgaagttatggtgttgagggaaga

SEQ ID NO: 14698 - DNA, 245 bp, Glycine max
  Clone ID: 701156784H1
gactcgcagttgtattgttgaacaagggtttctctgtctgcttcttcactttctctcgtttcaatcgaaaccaaaacaaaaacatgggcagaaaattcttcgtcggtggcaactggaaatgcaatgggaccactgaggaggtaaagaagattgttactactttgaatgaggctaaagtccctggagaagatgtcgtagaagttgttgtgagccctccttttgtgttccttcctgttgtaaaaagt

SEQ ID NO: 14699 - DNA, 243 bp, Glycine max
  Clone ID: 701156786H1
gaaacaatgagatgtggatggtggatcatcaagggggtgtgtctaggtcaaggtcactatgcagcttcaggggtggagggatatttggatctgaggatggtggtgattcagtgttgtcaggtgctagaagctcaatttctgcagctaggagttctggggttaatatgttggaatctgggaggagaagtggatacagtgaagctgagccaagaaggagtggttttgatggagtagagaggaggg

SEQ ID NO: 14700 - DNA, 254 bp, Glycine max
  unsure (1)..(254): unsure at all n locations; Clone ID: 701156787H1
ggcagttcaaagcgaaggaagattcgaaacgaagaaagaaagcgttgtgaagaatggcggaagagggacaagtgatcggtgtccacagcgtagaggagtggaaggaacatctcaagaagggagaagagtccaaganattgattgtggtggattttactgcttcttggtgcggtccatgccgtttcattgccccaattcttgcagagtttgctaaaaagttgccgaatgtcaccttcctcaaggtggatgtggat

SEQ ID NO: 14701 - DNA, 243 bp, Glycine max
  Clone ID: 701156788H1
ggagcaagagtgaagagcgaagagaatggctcccaagggtttaatctttttggctgtgttatgcttctcagcactgtcactgagtcgttgtcttgcggaggataatggacttgttatgaacttctacaaggaatcatgccctcaggctgaagacatcatcaaagaacaagtcaagcttctctacaagcgccacaagaacactgctttctcctggctcagaaacatcttccatgactgtgctgt

SEQ ID NO: 14702 - DNA, 243 bp, Glycine max
  unsure (1)..(243): unsure at all n locations; Clone ID: 701156789H1
gagaggaaaaaagaaaaagaaaaatgttagaggtgaagagaatcggtgtggtggggagtggccaaatgggatcgggaatagcccangtcgctgccatgcacggcatcgacgtttggcttcacgacctcgaccctcaagctctctccaaagcctcctcttccatctcttcctccatcaaccgtttcgtttccaaaaaccacatctctcaggttgcgggtgctgatgctttgaaacgactgcgtc

SEQ ID NO: 14703 - DNA, 244 bp, Glycine max
  Clone ID: 701156790H1
gtactattaatccactccaataatattttttctaagctatggataacactactcaatcgtcaactatttctgtctctatcttcaatggtgaaaattatgatttctggcatgttaaaatggaaacatatttttcatctcaagatttatgggacatagtagaagaaggcttcaccgttcccgcggatacatcagctcttaattcatctcaagaaaaagagttgaagaaaaataaacagaaaaattc

SEQ ID NO: 14704 - DNA, 215 bp, Glycine max
  unsure (1)..(215): unsure at all n locations; Clone ID: 701156791H1
ggggttanctttggggtttctctcgcanaccaagaangaactagggttttacagaatacaagnnnnnnnnnnnnnnngtcggttttcgtcaatcaaatccaatccaatatcaaatatgagtcgtcatcccgaggttaagtgggctcagaggcttgacaaggtctatatcacggtgcaattggctgattcaaaaaatgcaaaagtggatcttacgc

SEQ ID NO: 14705 - DNA, 211 bp, Glycine max
  Clone ID: 701156792H1
ggtgagagggcttttggagcttgtgttaattttctacatcatcacttaccatgccacaggtgatgctgtcaacgaatgccctgatctgcgatcggggcactggcatcatagtgccagttctaacttgttctatgtgcagtgtgtttacattgagtttgggggaggtttaaagatggtagcacgtagtaaaggtccaattgagtttggtgaa

SEQ ID NO: 14706 - DNA, 245 bp, Glycine max
  unsure (1)..(245): unsure at all n locations; Clone ID: 701156793H1
ggttctagtgtgtgattgtttgttgttgtaactcgttcttcttcttttgttgttctgtgtttgtgtttgtnttttctctcacctgaaaatgtcttgctgcggtggtaactgtggttgcggaagctcctgcaagtgcggcaacggctgcggaggctgcaagatgtacccagacttgagctacactgagtcaaccaccaccgagaccttggtcatgggagtngcacctgttaaggctcaatttgagg

SEQ ID NO: 14707 - DNA, 249 bp, Glycine max
  Clone ID: 701156794H1
ggaagcatcgagaacatcgcagcgatggcgagagtgggtagaatgaagttgggttcacaaggcatggaggtgtctttgcagggacttgggtgcatgggcatgtctgcgttctatggtcctcccaagcctgaccccgatatgattgctctcatccaccacgctgttcaaactggtgtcacttttcttgacacttctgacgtctatggtcctcaggaccaacgaactccttctaggaaaggctctgaaggg

SEQ ID NO: 14708 - DNA, 247 bp, Glycine max
  Clone ID: 701156795H1
actgaggttaagtctgttgagatgcaccatgaggctctcacagaggctcttccaggtgacaatgttggatttaatgtgaagaatgttgcagtcaaggatctcaagcgtggttttgttgcatccaactccaaggtcgaccctgccaaggaagctgccaacttcacatcccaagtcattatcatgaaccatcctggccagattggtaatggatacgcaccagtcctgactgccacacttctcacattgc

SEQ ID NO: 14709 - DNA, 264 bp, Glycine max
  Clone ID: 701156796H1
ggacaagccaatcctttgtgtaggtgctcaaccctagtaagccgcaatggtgaagtactcaagggagcctgacaatccaactaagtcttgcaaggctagaggcgccgaccttagggttcattttaagaacacaagggaaactgcctttgcaatcaggaagttgcccttggtcaaggctaaaaggtacttggaagatgttcttgcccacaagcaggcaattccattcagacgtttttgtcgagtgttggaaggacagcccaggct

SEQ ID NO: 14710 - DNA, 256 bp, Glycine max
  unsure (1)..(256): unsure at all n locations; Clone ID: 701156801H1
ggcacaagtgagtttgttgatcgagataactagaaacagtgtgatgaaaatgaaggtcctgttttcttcgttgctacaattttggtagcatggcaatgccatgcgtaacgatatgttccctctccgaatgaacactggctatggtgcccgtactccggaggtgaaatgcgcaagttggaggctgctgtggaagcactnaacatcttgctttgagaccatcctgaagagtgcgttgaagcaacaaaggaatacatcc

SEQ ID NO: 14711 - DNA, 258 bp, Glycine max
  unsure (1)..(258): unsure at all n locations; Clone ID: 701156802H1
agcttgagagagaagctgcacggcaagcattgctccagatggaaaagactgttgaaatcaatgagaattctcgaattcttgaagatttggaactgcttagagctgtacccactgagcaattgccaagttctgtagatgagacgagtcctgcacactctcaggatggtctgggtagtttcaagtttgggagtagtaaccccttggaacataggattatnnatcaaagccgatgatgaagaggaggaaggagagccaccc

SEQ ID NO: 14712 - DNA, 240 bp, Glycine max
  unsure (1)..(240): unsure at all n locations; Clone ID: 701156805H1
ggtgtcatgattcatttctaaaccctaattctccttgtttccatttctgcttcattgttttttaagcaattcccgagcattgatcaaatgggtttttgttcatttccaattttctgaaatagcgtgccctcaaaaaaatattatctgatcacattttctncttctgcaaattctgcatttttttctttcttctctttctggggtctctgctgaacaagggaatctcgcagattctttgtg

SEQ ID NO: 14713 - DNA, 239 bp, Glycine max
  unsure (1)..(239): unsure at all n locations; Clone ID: 701156806H1
gagtgtggttttgtttgaattaatgttctattttcccactcatctaaaatgttttgtgcaattttcaattgcatgtgcagaagaacatggctacctccanaggtcgaccacctaagagaaaatccccagatgntaatgaggctactgataatatncaaatcaatttttctatcatagatcaggtgtatgcatactttttctacaataatccttattttctaactattgctttggaaaaa

SEQ ID NO: 14714 - DNA, 237 bp, Glycine max
  unsure (1)..(237): unsure at all n locations; Clone ID: 701156808H1
catcaaaaccataacttaccaaaagtataccctaaatatatgggatgttgggggccagaaaacaataagatcttactggagaaactactttgagcaaacagatggtttggtttgggtggttgacagttcagatctcagaaggttggatgattgcaaattcgagctcgataaccttctcaaggaagagaggatnnggagcatctttactgatacttgcaaataaacaggacataaaag

SEQ ID NO: 14715 - DNA, 238 bp, Glycine max
  Clone ID: 701156809H1
ggtgtggtagtgtggcagcgacacgtatcaacttcaataatcgcatcgcagaagcagtttccggtgcatctcatcgtctccgaaaatgaacgacgcagatgtctcgaagcaaatccagcagatggtgcggttcatccgccaggaagctgaggaaaaggccaacgagatctctgtctccgccgaagaggaatcaatatcgagaagctgcagttggtcgaagccgacaagaagaagatca

SEQ ID NO: 14716 - DNA, 216 bp, Glycine max
  Clone ID: 701156810H1
tccagagagaagaagaaacttaatccgatcatcacttcacttcactaatacatcatggcagacgagacccagaacaagtatgagagctctgaggttgaggtccaggatcgtggtgtttttgactttctcggtaagaaaaaggatgaagaagacaagcctcatcctcaggggaggtcatcgccaccgagtttcaaaaagtcactgtctcagaccaag

SEQ ID NO: 14717 - DNA, 185 bp, Glycine max
  unsure (1)..(185): unsure at all n locations; Clone ID: 701156811H1
gacttaattattcattttgaaataaaaaaatatattaattttatttttattcaaagaggcaataaatgcaacgcgtncttattaaaanaaaaatctgtatcaatctttttctatatccttaccattaaattcctaaacaaagatcatctgtaaaaaatttaatataaaatattttttattatgtt

SEQ ID NO: 14718 - DNA, 246 bp, Glycine max
  Clone ID: 701156812H1
ggaagagaaaagaaaagaatcgagtgattttcgtttgcgttgctgttgcgactgagtgagtgaagatggcgtgcttgcacgaccacagttgcgaagaccatgactgttcctctaactggtctctctacaaacacatcgacctctccaaggtaactgctttgaatgaggcaaatccaggaagtgttaagtcagttttcaaattgggaagagcgtctggattctctggggttcacttggaaagcaatg

SEQ ID NO: 14719 - DNA, 234 bp, Glycine max
  Clone ID: 701156814H1
gaagaaagagaggtaaatgagactggtatgccggtttccatcttgtttttgccgggggttttggcagaattgggttcgactcccatagtcccgcggcattccccctgacctcgagataaaatgaaaaaacggacgataaacagtttgattgttaagggtaccattatttcattagtaagggaatttttttggaacgggcttcgattcccttatacgcgatgtggcgaattagac

SEQ ID NO: 14720 - DNA, 237 bp, Glycine max
  unsure (1)..(237): unsure at all n locations; Clone ID: 701156815H1
gggtgagaagaagagagagacagacagaacaatgggggaagcaaggggaaaggaagaagaagtgttagcctcagttcactcaaccgtgttcaaagaatcagaaagccttgatggaaagtgtgttaagattgagggctatgatttcaaccgcgncgtcaattatccgttgctactcagctccatggtcacatgggtttcaagcttccaacctcggtgatgccatccaagtcgttaatc

SEQ ID NO: 14721 - DNA, 245 bp, Glycine max
  unsure (1)..(245): unsure at all n locations; Clone ID: 701156816H1
ggatagaaagcacatagaagagaaagaaagaaaacaaagaggagaaagaaagtggttgaggaagatacaaacaatttttgcagattgttgagaatgcctttcaagaagcctcatcacacctcagacaagaactacataacaggggacgacggaggcaagttcgagatacaacctagaggactcaacattgtgtggggaatgattctcgatactggaaaattccagaacaaggtcctgcggantga

SEQ ID NO: 14722 - DNA, 228 bp, Glycine max
  unsure (1)..(228): unsure at all n locations; Clone ID: 701156817H1
gtagttggaaganctggatctaaagagaaggnggatctgctgacaaataaatttggatttgatggaggttttaactacaaggaagagcctgaccttgatgcagctttgaaaaggcactttccagaaggcattgatgtttactttgagaatgttgggggcaagacacttgacgccgtaacctgaacatgagagtccgtggtcgcatacccgtctgtggaatgatctcac

SEQ ID NO: 14723 - DNA, 245 bp, Glycine max
  unsure (1)..(245): unsure at all n locations; Clone ID: 701156818H1
ggcatatccaaaggaacaaaaatattattaagatgatcaacattattggagcacttgttctactctttgcatttctcttcctcagttgtgtgtatgcacaagacacaacaacccttgtgcctgcaatcataacttttggtgattctgctgtggatgtagggaacaatgactatcttcccacccttttcaaggctntaccctccttatgggagggactttgttaaccaccaacctactgggaggtt

SEQ ID NO: 14724 - DNA, 245 bp, Glycine max
  Clone ID: 701156819H1
gaccaccactactaccaagtgaaaaagcaactaagcatagtgtgtaagaaagggagaaaaacaagtgctgtgtatagagaaaaatggctaggtggtgcatgatcttggtggttcttgctcttgccgtggttgcaagtgccagaaacatgcccaatgacgctggtttggaggaccagaagaacttccttgggtatggttttcgggagttggcaacaatggccttccctttggtggagtgggttctg

SEQ ID NO: 14725 - DNA, 242 bp, Glycine max
  Clone ID: 701156820H1
gggggcaaaaaataaccgcagctacacaacactttttgactttaatttgatgataatcattcaattagttactgattacacctaatcacacaagattatggaaggggtagaaaaaatcatcgctacaccacacttttgactttgacgataatcgttcaattatttacttgaataaacctaattacttgaaatacatcaatcatcatggtacccaagcttatttttaccaccattttgtggca

SEQ ID NO: 14726 - DNA, 235 bp, Glycine max
  Clone ID: 701156822H1
ggaagctgaaccctaactagctgagcagacggaggagaactcgactgaagctgcctctgcgacgccgtttcgattcagcctcagacatttccgttgcagtcatggtgcaagaaaatggcaagaggaagaaaccaaacattctggtgactggcacaccggggacaggaaagacaactgtgtgcactgctagctgaagccacccagctctgccacatcaatgtcggagaattagtca

SEQ ID NO: 14727 - DNA, 234 bp, Glycine max
  Clone ID: 701156824H1
ggaaaacttattaggagttggaagctttggttcagtttataaaggccatctaagtcatggagctactgttgcagtgaaagttcttgacactctaagaactggctctttaaagagtttctttgcagaatgtgaggccatgaagaactcaaggcatcgaaatctggttaagctgatcacatcatgctctatattgactttaaaaacaatgattttctggctctggtgtacgagtac

SEQ ID NO: 14728 - DNA, 240 bp, Glycine max
  Clone ID: 701156825H1
ggcacagagcaatactgcaatagagaaagaggcagatagaaaaaagagctgagttttgagttcaaaagatgactaacttcccagtgatcaacttggagaagctcaatggtgaggagagaaacgacaccatggagaaaataaaggatgcttgtgaaaactggggattctttgagctggtgaatcatggcataccctgacttattggacactgtggagaggttgaccaaagagcactacagg

SEQ ID NO: 14729 - DNA, 232 bp, Glycine max
  Clone ID: 701156826H1
ggggctcacaattggtgccatgctggaagagattcagagtctttataggcagcaccaccaaccatgctttctttatctctccagtgaagttataaagatatttggttctgatccatcttgtgctgactacctgaaaaatttgattgaggcactcttccagcacacaacactccttctcacaaatatcaggaattcacagcccggcctgatatagcagatgattgttttttgt

SEQ ID NO: 14730 - DNA, 234 bp, Glycine max
  Clone ID: 701156827H1
ggatgcaaaagttagtagtagtgaagaaaatgaaagtccttgttttctttgttgctatagttctagcagcatggcattgccatggctcagaccatgaccatgaccatggccacacctaccaaattttccctctgagaatgaaaactggccatggtggccactacattccggaggtatcatgccaaagtggaggctggtgtggaagcacacaacgtcattgactggaaaaccgtt

SEQ ID NO: 14731 - DNA, 237 bp, Glycine max
  Clone ID: 701156828H1
tacctctaacttagcctaaagtttgtacatcagtggagaatagaaattactcttttctctctcactacatatatatgaacttattttgatctaagaagtgtccgtctcgaaaccaatggccattagttgatactcacatatcatgctaataagtcactcgaaaaattagctttatatatgagttgcttacaagatgtaagagcatcttcaaacacatattttatgagttattttaag

SEQ ID NO: 14732 - DNA, 235 bp, Glycine max
  Clone ID: 701156830H1
gacacaccgtttgttctattcttaactcaacttctgctacccactctcttcttccaagtccaaccacgcttttctctacagtcatgggcaaggtcaagatcggaatcaacggatttggaagaattggccgtttggttgccagagtcgctctgcaaagagacgatgtggagctcgttgccgttaacgaacttcattaccaccgattacatgacatacatgtttaaatacgacagtg

SEQ ID NO: 14733 - DNA, 247 bp, Glycine max
  unsure (1)..(247): unsure at all n locations; Clone ID: 701156833H1
gggagggcgtgggcgagggatatctatcttcattttcgtcgtcgttcatttttttattttttttttctgttttccattcgcttcttctctcagaaaagctcgccaatcgatcttgctctcttctacgcttttcgaattccttccattccattatggacgcagattagattcacgttcacattcacttctcttcgtttntcaaccactctgctctgctctgctctactctgagatccgatcgcatttc

SEQ ID NO: 14734 - DNA, 243 bp, Glycine max
  unsure (1)..(243): unsure at all n locations; Clone ID: 701156834H1
gaatgattgaatcataaaaaatttggagcgtgaagtgtaatgaaataaaattctatcgatttttttatttttagaggtggtatccagattattactcgaaattatgaataatttatggttggcttgattgaaccaataaaataaagtacccaggctctgtttagaaaaaaccaattggtaatatatctacgatccacttctatcatatccgtatattttacagaaaatattaaataaganatt

SEQ ID NO: 14735 - DNA, 241 bp, Glycine max
  Clone ID: 701156835H1
agcacaagtgagtttgttgatcgagataactagaaacagtgtgatgaaaatgaaggtccttgttttcttcgttgctacaattttggtagcatggcaatgccatgcgtacgatatgttccctctccgaatgaacactggctatggtgcccgtactccggaggtgaaatgcgcaagttggaggcttgctgtggagcacacaacatctttggctttgagaccattcctgaagagtgcgttgaag

SEQ ID NO: 14736 - DNA, 247 bp, Glycine max
  Clone ID: 701156836H1
ggggccactatgattctgctcatgatttagattcaattgactttagaatgcaaagactattcagttcagcttcatcagttatggtagctgatataacaatcaaaagtttagaaggtctgattcacttgagttattcccaactcatatacaagacatatcatttgaaagtcccttgatcttatcaggaagatacagtggattttcctgaattagttaaagtcactggtactttggcagatatgactaa

SEQ ID NO: 14737 - DNA, 235 bp, Glycine max
  Clone ID: 701156838H1
ggaagttgaaggcttgggaagagagacaagaaaacaaagccagacatggaggggaattatgggagcacaagacgttatgttccccgagcagattcttccttgagcttcctttacaactacaactacaccccttatccaggaatggaagtgaagcaacaaacactggctggcacaagttcatccatggaaaagtgaactgcgggaaccaggagaagaagaagcgattaacaagtga

SEQ ID NO: 14738 - DNA, 233 bp, Glycine max
  unsure (1)..(233): unsure at all n locations; Clone ID: 701156840H1
gctggaaaaaaatgataaaagtccaataatctctgaatctctctctctgtatgctccctgactcttttacaactttttggtgcccataaattggagttcctccctcgcttctccatcacttgtggtctttgatacaaagctagcatagcatttttctttaacaaagcaagacacccttttcctttnattccatcatctttttagctttgtccaaagaccatgtctgtggtggc

SEQ ID NO: 14739 - DNA, 232 bp, Glycine max
  Clone ID: 701156841H1
ggtattgggagagaggatgggtgcagaagcaaatggcggcgagaagcaattgaaatttctgatctacggtcgcagcggttggattggtggtctactgggtaagctctgcgaagagcgcgggatccaatatgagtacggcaccggcagattggagaaccgctcgtcgttggaggcggacatagcggctgaagcccagccacgtgttcaacgccgcgggtgtcacgggtagacc

SEQ ID NO: 14740 - DNA, 232 bp, Glycine max
  Clone ID: 701156842H1
cacagtaagaacctaagagattcttgttccactaaattaaaacataatatacaaaagggagctgagttcagtttgcaaggctgaaaagggagttcagtttcccaagatccctcaacttcattcacttttgaatcacgaagtttcattttacaatagtataactactcaaaacattataagtactggggaaatcatcattggacagagtgtcctgttcctgatatgaaaaaat

SEQ ID NO: 14741 - DNA, 239 bp, Glycine max
  Clone ID: 701156843H1
ggggttgggttatcccttgtgtattccattccaccacctgctacctactgcaccagttcctagctcgcttcttctctgttctctctcatctcctcagatcgatcaagcatcagggggctttgagggttgattctctggtgtggtagcaatcagcacaatagaaaatgttttttgacggatatggatatcatggacatcatttgagcagatatatcgatgctacccagcttcctttattg

SEQ ID NO: 14742 - DNA, 231 bp, Glycine max
  Clone ID: 701156844H1
gaggaaccctaaatctgaaactacctggagtccgttctgccacggctgagaaaatagcgacgcggaaacacgctcgtcttcacgatcctgcgatccagcgcgacgtgtccagcgattcctctctctaacgagtctacggagggcgaagaatcgcgaggctagccgccggtgaagagtcgcccgatcaagcccgattcatccccgatgcagagattcaaccacgattcagga

SEQ ID NO: 14743 - DNA, 229 bp, Glycine max
  Clone ID: 701156845H1
ggaggctctgtccattaaaaccactctccaaaatttctctctccattccttgcgcttccatccatcatggccatcgcaacagagactcagcctcaacaacacaaggattcttcggaggtttcgggttcagctgcggagaaagaaggtggacgcttaacgatttcgatatcggaaagcctcttgaaggggaaaattcagtcacgtctatttggccagagagaagactagt

SEQ ID NO: 14744 - DNA, 232 bp, Glycine max
  unsure (1)..(232): unsure at all n locations; Clone ID: 701156846H1
gataccaaaaacaaaacacaagccaagtgaaagtgaganaaaataaaaatcaaagagcataatgtcagggatcattcacaagattggggagacccttcatgtgggagggcacaagaaggaggaggagcataagggtgagcaccatgctggagaatacaaaggggagcaccatggtgaacacagtatgagtacaaaggagagcatctggtgaacacaaagctggagagtacca

SEQ ID NO: 14745 - DNA, 232 bp, Glycine max
  unsure (1)..(232): unsure at all n locations; Clone ID: 701156847H1
aaggaaagtaataatgatagtgttagtgttggtggtttgcttggggaatgtgacatctttgatgggaaatgggtgagggatgaattcaagccttactatccattggggtcttgtccaaatgttgatagggattttgattgccatcttaatggaaggccttgnagtgattatgtcaagtggaaatgcagccaaatgggtgtgacattccaagtttgaatgcaactgattttct

SEQ ID NO: 14746 - DNA, 244 bp, Glycine max
  unsure (1)..(244): unsure at all n locations; Clone ID: 701156849H1
ggagagaagagagatggatccagacgcgttggcaaaggcattcgtggagcactactacagcaccttcgacaccaaccggaacggtttagcgaatctgtatcaggagggttccatgctgaccttcgaagggcagaagatccagggcgcttccagcatcgtcgctaagctcacttccctccctttccagcagtgccccactccatcnccaccgtcgactgccagccctccggtgtcaacgctggca

SEQ ID NO: 14747 - DNA, 245 bp, Glycine max
  unsure (1)..(245): unsure at all n locations; Clone ID: 701156850H1
gataccaaaaacaaaacacaagccaagtgaaagtgaganaaaataaaaatcaaagagcataatgtcagggatcattcacaagattggggagacccttcatgtgggagggcacaagaaggaggnggagcataagggtgagcaccatgctggagaatacaaaggggagcaccatggtgaacacagtagtgagtacangagagcatcatggtgaacacaaagctggagagtaccatggtgagcacaag

SEQ ID NO: 14748 - DNA, 219 bp, Glycine max
  unsure (1)..(219): unsure at all n locations; Clone ID: 701156851H1
gcatgagacatancacaaaattcatctttctngtacaagagaataatgtagtttagccaacgaattttccactgccaagggacaatatgcaagtttttaaaagcagcaacaaccaaacttgaaatcacattccagtcataagttgcaccagccacaactagcagctatttgattgacttcattgctgccaagagctctgcaaagagagctgtagtgcta

SEQ ID NO: 14749 - DNA, 233 bp, Glycine max
  unsure (1)..(233): unsure at all n locations; Clone ID: 701156852H1
accgacaagcaaacgaaaagtaaatcaatcaatcgttggaatctctcaacttatcgcttcttcctgatttgggggtttccgtttcaatggacgacggcgagctggatttctcgaaccatgaagtgttttcgagtccgaacatgggggagcttccgagcagcggttcaatggacagtttcttcgngagcttctcaaggacacgcacgcgtgcacccacacccacacgtgcaacc

SEQ ID NO: 14750 - DNA, 242 bp, Glycine max
  Clone ID: 701156854H1
ggaacaagcaaaattaagcacaaaagcccaaccctctctctcgctgttggtctctcctatttggcatacgcagatcgattacgaagtaatttcactgaatcttattgaagatgtttctcacaaggactgagtatgaccgaggagtcaacaccttttctcctgaaggccgtttatttcaggttgaatatgcaatcgagccatcaagctgggatcaactgcaattgggttgaagacgaaagagg

SEQ ID NO: 14751 - DNA, 232 bp, Glycine max
  unsure (1)..(232): unsure at all n locations; Clone ID: 701156855H1
ggaggtgtgattgtggattctggaaccgcgataacttcggttgcggactcaggcctacaactcggtgcgcgacgctttcaagaggaagacttcgaacctgcgtcccgcggagggggttgcgcttttcgacacgtgctacgacctgtcgtctctgcagagcgtgcgggtgccgacggtgtcgttcacttcannggcgacaggnnngccggcgctgccggcgaagaattacttg

SEQ ID NO: 14752 - DNA, 232 bp, Glycine max
  Clone ID: 701156856H1
gagtgtggttttgtttgaattaatgttctattttcccactcatctaaaatgttttgtgcaattttcaattgcatgtgcagaagaacatggctacctccagaggtcgaccacctaagagaaaatccccagatgataatgaggctactgataatatccaaatcaatttttctatcatagatcaggtgatgcattactttttctacaataatcctttattttctaactattgctt

SEQ ID NO: 14753 - DNA, 231 bp, Glycine max
  Clone ID: 701156857H1
gacggacgctgctgctataaaaagctcgaatactcggataaggagagtaagggcggtgcagtgcttcaaacccctttttctcttctcatttcctttcatcactctcctgcttcttttcttcttctcgcaattttccattttcacacttttagcgtaagaacatcttttaatggcgtcccaaatctgagtggtctggaatcaatacattcgcacctgctacccagactaagt

SEQ ID NO: 14754 - DNA, 227 bp, Glycine max
  Clone ID: 701156858H1
gagagaaagagagagaaagatgtcgaagcgtggtcgtggtggttcggcggggaacaagttccgcatgtcgctgggtcttccagtggcggcgacggtgaactgcgccgacaacacgggggcgaagaacctctacatcatttcggtgaaagggatcaaaggccgtttgaaccgtcttccctcgcctgcgttggcgacatggtgatggccaccgtgaagaagggaaaacc

SEQ ID NO: 14755 - DNA, 220 bp, Glycine max
  Clone ID: 701156859H1
gctcagatgtttgacaaaccacttcccaacactcccactgtctatgactggctgtacagtggggagaccagaagcaggcaccgctgaagctgaagtctttagctaagatgaccgtgggttgcatgtaaatattgtcgtttttcgttaagcatctgccacgtttgcagctactatactattatgtgtcgggaatttattgctccgttgctgactcaaacat

SEQ ID NO: 14756 - DNA, 237 bp, Glycine max
  Clone ID: 701156860H1
ggtgagacgagggtaaggtcgcgttgtgttgcgtcgtgtcgtgcgctgttcctctgtctgtacgtttttgttttcagaccaaaccctagctccgcatcgcaaccatgtcgaccaagcaaggtggaaaagctaagcctttgaagaaacccaagtctgataagaaggattacgacgaggttgacatggctacattcagaagaaaaaggaagaggagaaggcgctaaaggagttgaaagc

SEQ ID NO: 14757 - DNA, 229 bp, Glycine max
  unsure (1)..(229): unsure at all n locations; Clone ID: 701156861H1
gataccaaaaacaaaacacaagccaagtgaaagtgagaaaaaataaaaatcaaagagcataatgtcagggatcattcacaagattggggagacccttcatgtgggagggcacaagaaggaggaggagcataagggtgagcaccatgctggagaatacaanggggagcaccatggtgaacacatagtgagtacaaaggagagcatcatggtgaacacaaagctggagagt

SEQ ID NO: 14758 - DNA, 230 bp, Glycine max
  unsure (1)..(230): unsure at all n locations; Clone ID: 701156862H1
atattgccaaaatagagcttataaaggttttggcaatctacacctcaaacccaatccaaattcaagaaattccatatttcaacatacannaagagaaatatcacaacagaagtcttacaaacaggnaaacatctcctaacaaaagcataaattaaactatattacaagttttattttgcaatatcggatgagtccgtataggatacaaatattcacggacatcttaattc

SEQ ID NO: 14759 - DNA, 138 bp, Glycine max
  unsure (1)..(138): unsure at all n locations; Clone ID: 701156864H1
gatagatcatttgttaaagttcatgcattgtatggatttggcatatgcagcggcagacttaattgtttctagagcgggcgcaatgacttgcacngaaatatcggcaactgggaaaccatctatccngatgccctcgnc

SEQ ID NO: 14760 - DNA, 248 bp, Glycine max
  unsure (1)..(248): unsure at all n locations; Clone ID: 701156865H1
gaaccacaaaagaacaacaagtagtagtaaactatatgagtgaagagttgcaaacgatttttctgtccaacttggatgangcacccgctagacggcgtgctcgtgaggcttttaaggatattcaacttgccattgatcattgcttgtttcggttatcatcagatggggtgaagacgaaagaggtttatgaagtgaactcagaggattaaaaatattctctaaaagttggctccagaaagttctcattt

SEQ ID NO: 14761 - DNA, 250 bp, Glycine max
  Clone ID: 701156866H1
ggcggaatattagggttttaagggtgggcgaggtagccagagagtgatacaatacagagtgcgttgttgctccttcgccacaactccctgccaacatgggtatctccagagattctatgcacaagaggcgtgccactggtggcaagaagaaggcatggaggaagaagagaaagtatgagcttggtcgccagcctgctaacaaagctgtcaagcaacaagacagtcaggaggatccgggttagaggtggaa

SEQ ID NO: 14762 - DNA, 237 bp, Glycine max
  unsure (1)..(237): unsure at all n locations; Clone ID: 701156867H1
ctactacaaagactactcaaaatgccctgaaatacaaggctaaaaccctatactactagaatggccaaaatacaaggcccaaaagaaggaaaaatctattctaatatttacaaagagtggacccaagcttggcccttgggctcagaaatctaccctgaggttcatgaaaaccctggggtcttctttaggctctagcccaatnctcttggagtcttctatccaatacccttggggggt

SEQ ID NO: 14763 - DNA, 236 bp, Glycine max
  unsure (1)..(236): unsure at all n locations; Clone ID: 701156868H1
gactcaccacttcaaaacactcataacacaaagcacaaagcaaagctcatccttgagttaaaaaatggcagcagcttcttccatggctctctcatccccatccttggctggcaaggccgtgaagctgggcccatcagccccagaagtgggaagggtgagcatgaggaagaccgtcaccaagcaggtcnctcaggaagcccatggtacggcccagaccgagtcaagtacttgggccc

SEQ ID NO: 14764 - DNA, 233 bp, Glycine max
  unsure (1)..(233): unsure at all n locations; Clone ID: 701156869H1
gaccacaccgagtcgcagaaaaagaaaaaagcgatcatagtttcacttcggccttatccagtttagggtttcggttctctaccctatctttcacgtatcgaaaccttaaatttacgatcaggtctgagcaatctggttggtagaacctttggtnntagtgagtcaagttttatgtctgaattagacgtcaaattcctactgcctcgatcctttgctgatgcaaatncngatga

SEQ ID NO: 14765 - DNA, 209 bp, Glycine max
  Clone ID: 701156870H1
gagcaatagacaaacctacaaattaagcaccacaccactctccaatatccccaacatggctcaagtgggttctctatcttccgaaatggagacactgaatcatgtcctagccctagtggaggcattccgagcatttgacgcggacaacgatggccgaatcacaggcagagctaggaggaatcttggggtcactcgggtacaaccctagc

SEQ ID NO: 14766 - DNA, 232 bp, Glycine max
  unsure (1)..(232): unsure at all n locations; Clone ID: 701156871H1
ggagaaagagaaagagagaattcgtaaaccctaatttcggaaagatcggcgatgactgcctccaaggatcgcgagancttcgtctgcatcgccaaactcgccgagcaggccgagcgttacgaagagatggtggaatcaatgaagaacgttgcgaatctcgacgttgaactgacggtggaggagcggtttgccgncctgttgggtnnngaatgtgattggtgctcgcagacgt

SEQ ID NO: 14767 - DNA, 207 bp, Glycine max
  Clone ID: 701156872H1
tccaaacactctagaatttgcatgcactgttcttcatacaatggcattacgcgagcttcttatgatggggatattgctgctggtatgtcttgctaaggtttcatctgatgttaacatgcaaaaggaagaagatgaagaacttcgctttcctaatcaccctttatcgtgagagacgggaacagaaggctaatgcaagacatagattgc

SEQ ID NO: 14768 - DNA, 228 bp, Glycine max
  Clone ID: 701156873H1
cacgttaatatgtaagcaaccacaatatataaattgaaggcagtaataatacaacatgacaatatatacacgatatgtattatctctttatgaaaaaaataacgtgaacaaacgataaataaagtagaaaacagttaaacaaaaacctaaattgactagataacgttggcaaaaggcaatgaggggagtaatacggtgcaatgtttaacagtgcggactggagctttg

SEQ ID NO: 14769 - DNA, 71 bp, Glycine max
  Clone ID: 701156874H1
ataaatgacgaatatgatattaatatatttcagataattcagccattagaaataaaacaataggtcaaata

SEQ ID NO: 14770 - DNA, 235 bp, Glycine max
  Clone ID: 701156875H1
gagtgtgaagataacagttgccggttcaagtgtcagcgttggtgctgccagtgaaacgcgaaccgtgccaggcagtgaggctagtgatattcaaatggttgaagcaggaaatatggtcatttccatacaagttctgaagaatgtcactgacaatttcagtgagaagaatgttctgggacaaggaggtttgaacggtttatagaggtgaactccatgatggtacaagaattgcggt

SEQ ID NO: 14771 - DNA, 225 bp, Glycine max
  Clone ID: 701156876H1
ggacacatggttttaaagaggaggaaggattatgatgaggcgtctgaaggcaatgcttggaggcttcttgctgaggtgtccctttctcaagagaggtttcaagaagtcaatgatcttgtttttgaagccattggctgtggtgaattggaggatgtcaatgttcaaagtgtcaaaaaagagttgatgcagtcagcacaagcgaacaccctactgtggtggtggtgg

SEQ ID NO: 14772 - DNA, 229 bp, Glycine max
  Clone ID: 701156878H1
tgttgacaattctggcctgctctttgatgatcatgcaaggacagcgttgggattttatgctcttaagagtaatggagaacctgaattcatgttttaccgaaatccaagttctgatgtgctccttcgtcctgatgaaattgatatggacctcataaagaaggccacaatatttcattatggttcaaagtttgattaaggaacctgtaggtcagctcatcttgctgcaatg

SEQ ID NO: 14773 - DNA, 242 bp, Glycine max
  unsure (1)..(242): unsure at all n locations; Clone ID: 701156882H1
gaacacgcggcttccgccggaggtgaaccgcgtgctgtacgttcggaaccttcccttcaacatcaccagcgaggagatgtacgacatctttggcaaatacggcgccattcgccagatccncatcggcaccaacaaggacactcgcggaaccgctttcgtcgtctacgaggacatctacgacgccaaaaccgcgtcgaccacctctccggcttcaacgtcgccaaccgctacctcatcgttct

SEQ ID NO: 14774 - DNA, 234 bp, Glycine max
  Clone ID: 701156883H1
ggcacaagtttgttgagatagctagaagcaataagatgaaaatgaaagtgcttgttttgtttgttgctacagttttggtagcatatgaatgccatggctcagactaccagaagttccctctccaaatgaaaactgggtttggtgggcaatacagcaatgaggtggcatgtgccagttggaggcttgcgtggaagcaaacaacgtagtcaagtggcaaactgttcctgcagcttg

SEQ ID NO: 14775 - DNA, 241 bp, Glycine max
  unsure (1)..(241): unsure at all n locations; Clone ID: 701156884H1
gaccactaaaatatctctctattattctcgttttcaatatgcagatcttcgtcaaaaccctaaccggtaaaacgattacgctagaggtcgagtcctccgacacaatcgataacgtgaaagctaaaatccaagacaaggaaggcattccaccggatcancagcgtttgatcttcgccggtaaacaactcgaagagcagaactctcgccgattacaatatccagaaagaatcgacgctccacc

SEQ ID NO: 14776 - DNA, 229 bp, Glycine max
  unsure (1)..(229): unsure at all n locations; Clone ID: 701156885H1
ggagcgaagaagatattagggtttttgagtgcggtgcggcgatcctagcactctcttctgcagctttcgccgacagcttcattcaccatggctgagcaaaccgagaaggcttttttgaaacaaccaaaagtgtttctcagctcgaagaaaactgggaagggaaagagacccggaaagggtggaaccgcttttggaaatccattgggcttggatttaagactcccangga

SEQ ID NO: 14777 - DNA, 217 bp, Glycine max
  Clone ID: 701156887H1
gacaccaaaacaattttcaacactcaattaccattccataaccctaaatctcctctttgtttccgagtcagagagcaatggcacgtaccaagcaaaccgctcgcaagtccaccggcggaaaggcgccgaggaagcaattggcgactaaagccgctcgcaagtccagctcggccaccggcggagtgaagaagccccaccgcttcaggcccggaacggt

SEQ ID NO: 14778 - DNA, 225 bp, Glycine max
  unsure (1)..(225): unsure at all n locations; Clone ID: 701156889H1
ggggtccttctttcgcagaaaaagcgatgattgattgcttctctctccacaattcttgcgtactcttctctnctctnccccaccaaactaaaccttttctcagtntaganttttnagantnngaggtatggggaggctgtttgtgacccatctggaggggcagatctatacctgcaaaactgccgcacccacctcgctctctatgaagacatcgtttccaaggct

SEQ ID NO: 14779 - DNA, 222 bp, Glycine max
  Clone ID: 701156890H1
gatgatggactaagaactctgaacattagccaatgcacagcactcaccccttctgctgtgcaggctgtgtgtgactcatgcccttccctccacacctgttctggaagacactcactcatcatgagtggttgtctgaacctgacttctgtgcattgtgtttgtgctggccaagcacactgctatcactctccctcatgcagctcattgagccagaggggttga

SEQ ID NO: 14780 - DNA, 231 bp, Glycine max
  Clone ID: 701156891H1
gagagtggtggagtgtgcaaaagagcgtcgtagtcgcaaccctaatcagaagaagcgcagttcaagcgagtgacagccaccagccatgggtcgtatgcacagccgcggtaagggtatatcctcttctgctttgccctacaaaaggacacctcctagctggctcaagatctcttcgcaagatgtcagaaaatatctgcaagtttgcgaagaaaggtttgaccccgtctcaga

SEQ ID NO: 14781 - DNA, 223 bp, Glycine max
  Clone ID: 701156892H1
gagattttcaagtaggccttcctggaatagatggtttatcaactgaacaaagaaagagactcaccattgcagtagaattggttgccaatccttctatcatctttatggatgagccaacctccggccttgacgctagagctgcagcaattgttatgcgtgctgttagaaatacagcgatacagggagaactattgtctgcacaattcatcaaccaagcattgac

SEQ ID NO: 14782 - DNA, 223 bp, Glycine max
  Clone ID: 701156893H1
ggtggcaagaagttcataactctcttggacttgaagcgtccatttaaaccaatgaaggatttggacatggacaaggtcatctcggacatcattgaggaaatatcaaagactagttgatttcagctgttttgcaagagccttttatggcttgactcacagtgaagctagatatatttgttcacatggtagaaatcctacaatggaaacttgttcaaaatgtgtt

SEQ ID NO: 14783 - DNA, 235 bp, Glycine max
  unsure (1)..(235): unsure at all n locations; Clone ID: 701156894H1
gggtgtagatcggggtgaggcaagggaagcaaggacgatgagtatagtatgagtaatcagattcagagtgtatagtgattctgattctttcattttccatagattagcaagcaatcnnnnnnnnnnnnnnnnnnnnnnnnnnnnnnnnnnnnatggttcgggaagtatcagagagttgcattgatagctattgacggagatggtggcgtgctattgcaaccgcttctacgcaaac

SEQ ID NO: 14784 - DNA, 229 bp, Glycine max
  unsure (1)..(229): unsure at all n locations; Clone ID: 701156895H1
ggcaagannaaacatccaaaatgttccgtttcgagcaggaaaagatccgaaaacgaatttgattcgtaaagttaatttcttttcgacaatcaaagagttcnccagcttgttggttgtggccgtggtcgacgctctctctttgattccggcagccgtgcttcgcaaccttgctgacaagctctcgagaagcgcaaaaatgctgctcttgannttgaggggatagtgaagc

SEQ ID NO: 14785 - DNA, 231 bp, Glycine max
  unsure (1)..(231): unsure at all n locations; Clone ID: 701156896H1
ggcatcaattcaaaatatatcatcaattataagcatgggtttgtggaacacaacgaatgcagtgtcttgccgctttcacaagtttggtgatgaccaaaagaatctggtcttccaaggtgatgccacgtcttcttccangggcatagaactcacaaagttagacggtggaggaaaaccagtgggtgcatgtggggagagtgttatactcttctccagtgcacctttgggaaa

SEQ ID NO: 14786 - DNA, 99 bp, Glycine max
  unsure (1)..(99): unsure at all n locations; Clone ID: 701156902H1
gaaaggacaaaggcaccgtgtaagagctgtttgaaggatgctaacatatnctatcaaggaagttgatgaggttcttccttgttggaggaatganctncc

SEQ ID NO: 14787 - DNA, 232 bp, Glycine max
  unsure (1)..(232): unsure at all n locations; Clone ID: 701156903H1
gcagtggcaaactangggtgcaagttatgcatanccaganaaaccattgactaattaatctccctcccaacaaatgcaagttgaactttctgaccacttacagtaacatgccaccaacagatagatacattgatccaaatccagatgcnaaanancttgcngcantggacttgtagaccccntgttaacccctaagcnagnnantgggaaaagntcagatgatatanttcnc

SEQ ID NO: 14788 - DNA, 222 bp, Glycine max
  unsure (1)..(222): unsure at all n locations; Clone ID: 701156904H1
tgcaacttcctnctgttttgctacccctgtttaagccttatcataagcttagaatggcacacaaggaattttccattgccctagtgactctcattgttctctttgtcaacacgaacctccaaggtgccacggctgactatggtggtggttggcagagtgcttcatgccactttctatggtgggggtgatgcttctggcacaatgggtggagcatgtgggtat

SEQ ID NO: 14789 - DNA, 248 bp, Glycine max
  unsure (1)..(248): unsure at all n locations; Clone ID: 701156905H1
gataaagagtggatttcttaatcggattggaattggtgccaagtactctactccaaaggatcccctgaatgttcaagtaaccaaaanccaaatgtcttgatgcagaagacacttgtaatattaatatcagtctcaccagtcctgtgtctgctttgggcattggccactggatgggcccaacaacgagaatgtcacttccaagttttagtggagctacagagtataatcctaacctcctcaaatactct

SEQ ID NO: 14790 - DNA, 249 bp, Glycine max
  unsure (1)..(249): unsure at all n locations; Clone ID: 701156906H1
tatctcacgtactgataactttctatctcacgttctgataacaagttgagagctctgtgatgaacagactctataaataggatggagtgctttcagttttgtatcaccaaacccacttctctattcaganaaaatacaccatctattcagagtgagtaagggtctggaagaacaaaactgtctttcaggttcatgtgtgcgccgcttttcattcaatntgcaatgggctggaggtacgctcgtnatatt

SEQ ID NO: 14791 - DNA, 250 bp, Glycine max
  unsure (1)..(250): unsure at all n locations; Clone ID: 701156907H1
ggaanaggaaaanaggattanagggtcgccacgtttagcaataaccaaaccctctctactcttttttcttctccttctcttcgctagggttttagcttcntcctcttcacttcgttctttttcacctctacaatgagcaacgacaaggacacattcaacgtcgccgatctcacttctgctctcaacgaggacaatagagcagaccttgtcaatgctcttaagagcaagatacagagtttggctggacanc

SEQ ID NO: 14792 - DNA, 256 bp, Glycine max
  unsure (1)..(256): unsure at all n locations; Clone ID: 701156908H1
ggggaaatgaaataactgcgtaacacacgcttctcagagcgatagattatttttncatttccccttttttcttcttttatnttctntctgcttttcctttccttttctcttttattattatgctgctanttttcattcatgtgaacatgattgatgctgatagaagcacataacatagggaatcccagatcttcatagccatgttccctcttgcttcttatgattggatctagatggcaaaaccaagttcagctgt

SEQ ID NO: 14793 - DNA, 248 bp, Glycine max
  unsure (1)..(248): unsure at all n locations; Clone ID: 701156909H1
catgggaaggatgattgaagaaatggagagtaagctgaggaactcactagatcaggtatactttggcaaacaagagaaatggtttgcacactgagaccaccatctgaagtggcacagatgagaatgcctgatagcgcctgagagctggcgtgtcgttacttggcgtataagagagaaatttactttgttttcttcatatgtttttgcgtgttggctggtaacntgtgtcacatatttgaaggtngtac

SEQ ID NO: 14794 - DNA, 259 bp, Glycine max
  unsure (1)..(259): unsure at all n locations; Clone ID: 701156910H1
ggaacgcccacttttagcattttgttctctgccactggagttatcttcttgtcttggatgagctttcaggaaatcatagagttcctcaatttcttatatgctgtaggaatgcttcttgagtttgcagctttnatcactttgaggctgaagaagccaaatctttatagnnccttacnagagtncccatggnnaaacntttngggcnncnaatgtctttgttcnccccccggctnaannggnnaanncccgnaanggggnc

SEQ ID NO: 14795 - DNA, 254 bp, Glycine max
  unsure (1)..(254): unsure at all n locations; Clone ID: 701156911H1
ggaggaagcgcanagncagcagctataccacgttgcttgaagaaactgataaaaagcgctgccgttgtgtctttcagtcttcgntggatcatcttcacaattcacatcatcagaacacaaagaagagaagagacccttcatcttgttattccactcgggctagggccaatttttcctctaactgtcaattttncattcagattcgtaaatttnnggattagantcnngaggtgtnggngtgattgtttgtaccc

SEQ ID NO: 14796 - DNA, 249 bp, Glycine max
  Clone ID: 701156913H1
ggggataagactctaaattggttgaaatcaaagaatgttgtggtgaaactagagcaatcagttgacttgaatgcattcaaagatggacagaagatatatcaaacttccaacggagagaccattgaagcagattgtcatttcttatgtatagggaaaccacttgcttcagcatggcttaaggaaactgtgttgaagaatgacttggatggtcaaggaaggatcaaggtagatgaaaaattaagagtcaag

SEQ ID NO: 14797 - DNA, 109 bp, Glycine max
  Clone ID: 701156914H1
gacacattagtagttaaagttctcacttgagttctgaactcctctggcattccttagtgaggctaatggaactacagttaatattggtgaaaatgatactagcactagc

SEQ ID NO: 14798 - DNA, 247 bp, Glycine max
  unsure (1)..(247): unsure at all n locations; Clone ID: 701156915H1
ctatatatagagacagcagataggccgggattgctggttgaaatcatcaaagtcattgcagatgtaaacatgatgttgaatcggctganattgtanagagggtttggttgctaaggatacatttcatgttagttacggcggggctgccattgaacagttcaatggctcaggttttggtgattgtctgcgttactacntgcgaacgccagagacatntttgacnagttntggagaaaccnccttgtga

SEQ ID NO: 14799 - DNA, 99 bp, Glycine max
  unsure (1)..(99): unsure at all n locations; Clone ID: 701156916H1
gattgaaataaatgaaagagtgtgaaaagttggtgggtcagcagtagttgaagataaggagttaaaggtgccacggagaaacaaatactactncattta

SEQ ID NO: 14800 - DNA, 249 bp, Glycine max
  unsure (1)..(249): unsure at all n locations; Clone ID: 701156917H1
tgcccaacttctaagaagtttctttctcttctgttcatctattcaaccaaaaagcaatattagtccaggtttcaagtcacaccaatctagagaaaaattgatggcacatgtgagttaaaacaccatgcaaaggaaagacttgcttaacaatttccactgattccaattttagaagcagattctcccnaatttnccaatggatttcnacnnaccnantttaagggttttactgacttgcggttgttaanc

SEQ ID NO: 14801 - DNA, 87 bp, Glycine max
  unsure (1)..(87): unsure at all n locations; Clone ID: 701156918H1
gatagcagaaacaataggagtaggaaaaccggtggaggaatccgacgtggcaaggctgccataccgcaatcagtgataaaagnntct

SEQ ID NO: 14802 - DNA, 225 bp, Glycine max
  unsure (1)..(225): unsure at all n locations; Clone ID: 701156920H1
tagaatgggatctggaagtggaaaacacactggagagttcttcaggagaagggatgcatggaggaagcatccgatgctcaccaatcagctccgccacgccacccctggccttggcatcgccgtcgtcgccttcggtatctacctcgtcggcgaacaagtctacaataggctctatgctcccgatcctcattcgaannatcgcgtgaaagccggggatcaccacta

SEQ ID NO: 14803 - DNA, 250 bp, Glycine max
  unsure (1)..(250): unsure at all n locations; Clone ID: 701156921H1
ggcgcgcgcacggaggaagagagaccatagacgtcgtgctcagaagtaattttgaagagaaaacgttgatcgattccgaatttgcgttcgntcccgtatcagagtccaggacgatgtcgtttgggtcctctctgttgtctcattcgcatacccttcaattcttgtccaacagaaacagaacctcccgcttcaaagccaccgccgaagttcccgatttcctctctgcagattggtaactattcttcttccg

SEQ ID NO: 14804 - DNA, 246 bp, Glycine max
  unsure (1)..(246): unsure at all n locations; Clone ID: 701156923H1
ggagtttgtgcagactgtcatttgccaggcactctttgtatgtggactgattgcaccacatgctttgagagttgtggaaccatggcaactgaatccggtggttgtttggggggtgctggggaagcagggctaccattattattcattatggctttgattgttctgggactttttacngtaattgggatattctacagtgtattggttgctaccatggtaggtcaacggatatggcaacgtcattat

SEQ ID NO: 14805 - DNA, 253 bp, Glycine max
  unsure (1)..(253): unsure at all n locations; Clone ID: 701156924H1
gacgcaaaggcacaatagatccaaagcaaagacaagttgacaataaactaatctccaccaaagaattacaaggactttgcttataaagtaaatatccattaaaaacaaaactcaactctcaaagctagcaatcttagcagaacaaagatgagtctcaatgtagatgatgatgagttagtgagtgaaatggatgangcacccngttttggnttcatctctacccngtccccattgttccaggaaatggtagggc

SEQ ID NO: 14806 - DNA, 247 bp, Glycine max
  unsure (1)..(247): unsure at all n locations; Clone ID: 701156925H1
cagtatatggaatattggatctgaattctgtacaaaagatgtttcttaagggaatgagtagttttggcagtactgattctgacatagttgagatttaccaatgctcaggtgcgtcaatgcaagcacgatgggagctgttccagaagcaagctgaacttaccaaaaagaatcgtggggaagcnaaacattcggnatgcttggcntgcttcttctaaaggagaactatctacaatgatgactatggact

SEQ ID NO: 14807 - DNA, 76 bp, Glycine max
  unsure (1)..(76): unsure at all n locations; Clone ID: 701156927H1
agttggtcaggacagaggagctctcgttgagttctatgcncctggtgtggacactgnnaaaaagcttnctccagaa

SEQ ID NO: 14808 - DNA, 248 bp, Glycine max
  unsure (1)..(248): unsure at all n locations; Clone ID: 701156929H1
ggagcggaggagataccagtgggcactccgaggcaacttcacactccttttaatctttcatcctatctttgtattgttgaaccctccattctctgcaacattcttcgattcaattgctcttgtgaaattcctcctttattagcggctaaaccctaaatcagaactttggtgtggtgtgttgacttaattgagtgtagaaatagnntatggtgaaagctnatattngggncacgttgaaaacnccttgg

SEQ ID NO: 14809 - DNA, 254 bp, Glycine max
  unsure (1)..(254): unsure at all n locations; Clone ID: 701156931H1
gatgaatgctaggaggcactactactgcacagattaatcatgagtcttccacaaactgcaactagccncctccacatctgtatccacaggaacttcagcttaagctttaccaagccttcatattctcaattccaatactcttctcccatcattctcttcctcttgttttacttgttctaccttaagagaaggggcttcctcnccnatnttcccncttctnaatgggcttccaaggnnccattgcccatccacca

SEQ ID NO: 14810 - DNA, 259 bp, Glycine max
  unsure (1)..(259): unsure at all n locations; Clone ID: 701156932H1
gtaacagagaggagagtgaagttttgtggtgtggtttagtgtccaatggcggcgagtagaaagcacttnntcctctgatgaaatacttgagagtgncgcgtcgacgctcttcccccgcaacactcccttaaccctgcgctcccaacttttcngattcgccgcttctgttaagaggttaggggttgtttnntcgacaagtctgaaggtnacagatcgggtaatttccnggggnaaaaatttccnagaaagttggatcctc

SEQ ID NO: 14811 - DNA, 269 bp, Glycine max
  unsure (1)..(269): unsure at all n locations; Clone ID: 701156933H1
cgaattgagaagaatcaatcaaagctcaggcatagacacaagaagtctggtaacatcactcaaaacaaggtagtgtacaagtgccatttttgtttgcatcagaatctgaagagagggactcctaagggacacataaaaggaatctgtccatcaaaagatnaattcatcgttagagtcaacacctcccatccnaaatccatccncaagtgnntgctnctaaannanaaaaagggcattttaagccnaagatgaagnccantgaantnaat

SEQ ID NO: 14812 - DNA, 120 bp, Glycine max
  Clone ID: 701156934H1
ggaaaatggtggtgttagtctatgaacagtcaccctgacctgagtaaaatttccatttccagaacctcaaatcaaactcttctattcctttctctcatcaatcaattcagttctctcccc

SEQ ID NO: 14813 - DNA, 227 bp, Glycine max
  unsure (1)..(227): unsure at all n locations; Clone ID: 701156935H1
gattcatgagaagangcaaaaacagtgtaacaaaaaggaanagataaccaatatgaagttcactataatcacaatatttttctctttatttctacttgactttggttttgcacaacagggggatcttgaccatatcaagatttggaggaaaaccanatanaaatataggccaggctttcttaagtgcctggactcaagcatgtgcatcaccaactgctgtcaaaatt

SEQ ID NO: 14814 - DNA, 221 bp, Glycine max
  unsure (1)..(221): unsure at all n locations; Clone ID: 701156936H1
tagactaanagtanctgctctatcggttattcgaggatcactttgtccccaaaatgtatgacctacaaataatacaaaatatcaaccaaggaaaaaaatatacaagaaacaaattganaaaaaatggaaagcacagctactaacttctgccgtttattttacagaacaaaacaatatagtataganacannanccatagtctgcatgggatagatttacat

SEQ ID NO: 14815 - DNA, 244 bp, Glycine max
  unsure (1)..(244): unsure at all n locations; Clone ID: 701156938H1
ggaagtgtgctttccaatttcctttactcattcatagttttctttctttctcttgtggccggtgtgaggganactgagaccgaagcaagagtcgatggcggacccctactactcatacggtgctccggtaggcgctgacggagctagcattgcaaggagcagctttgctggttatatcccctctgagccttcaaattccactgaattgaggggcattggatcagattacctgcagagagatata

SEQ ID NO: 14816 - DNA, 267 bp, Glycine max
  unsure (1)..(267): unsure at all n locations; Clone ID: 701156939H1
gttatctttcccaggctctccttatatggaaaattgatgctagatcagtctgaaagtatgctgttgtgttgacatgtgtaaaatcttgtctctttttgtgctttcatagggngggcaagcggtttttcagacggtctttgcttgaaacctctgaattcctcaagaatgattgtttgaaaatcaactgtacagttggagttgtggtttcagcaattgattgtccacaacttcactctattaacatcccggaatctgacattggatcac

SEQ ID NO: 14817 - DNA, 240 bp, Glycine max
  Clone ID: 701156940H1
aactccaacactctaataatcattcggattcaggggaaaaaggacatgcatccgaggacgaggaaggtgttgtacagcttggggttgaggagaagattcagtgctgtgtttgtgaagccaagtgagggaataatggccaagctgcagagggtggaaccatatgtcacctatggatatcctaatcttaaaagcataaaggagctaatttacaaaaaaggacatggcaaggatggaacagcg

SEQ ID NO: 14818 - DNA, 247 bp, Glycine max
  unsure (1)..(247): unsure at all n locations; Clone ID: 701156941H1
gacacacagctattcctcttaagcttgctactgagtttccacactgcatacctaggtcttccgaattcgaagttaatttgcaagatggctaaggaaaaggctcagatcaacattgtggtggttggtcatgtggaccctgaggaggcaaccaccattaacgagctgaagangcctgttgtggagaaagaagctccagggcatgccatatgaggagcatgcacgttacggcctccgnaggggaaccaga

SEQ ID NO: 14819 - DNA, 216 bp, Glycine max
  unsure (1)..(216): unsure at all n locations; Clone ID: 701156942H1
tcagatctggagcaggagaatagcgttgggagcgtcgcgtttgttctgcttttcctatcggcctcagcagacgacgtcgttgtgctctctgaagataacttcgagaaggaagttggtcaggacagaggagctctcgttgagttctatgccccttggtgtggacactgcaaaaagnttgcnccaanantttgaaanncttggtaaccacttccnnga

SEQ ID NO: 14820 - DNA, 260 bp, Glycine max
  unsure (1)..(260): unsure at all n locations; Clone ID: 701156943H1
gggagcatcacaagcaaagcaaacccaaatccaaatggttccttccgacaaagctcgatccgagtgtgatctcatgtttcggctctaactatgtttgatttcgatacccaacaagagtgtcgtgttattaataggactaagagtagcgcaagtagacaacagtggaaaacatgaacatcagtggcggaggagggaattgtgatgggtttcagtagtaatgggaggtccccatttcacagtgtctcattggcaggnactgg

SEQ ID NO: 14821 - DNA, 244 bp, Glycine max
  unsure (1)..(244): unsure at all n locations; Clone ID: 701156944H1
tatatgtatagggacaacatgaaggatttaaaatgagtgcccgaatgcgattctaggcctaggnacccaagcttttgatttcaattcaagaaagcatnaaaatgagggcattatgataagggtttccctttangctagtggctgatttttggggctgcaccatgatgtttgcttagtttgtgtaaagatgttattcaccatgtacgtatatgtataggataggtagctagagaaaggacccttc

SEQ ID NO: 14822 - DNA, 251 bp, Glycine max
  Clone ID: 701156945H1
gaagaaagctgggatcaagctgaactgggccattaggcggaaaattgctattggagctgctaggggattggttttcttcaccacaattgtatcccccacatcattcatagagatatgaagtcgagcaatgtgttacttgatgaaaacctggaagccagagtctctgattttggaatggctaggcttatgagtggctatggatacacatttgagtgtgagcacattggctggcacaccggggtatgttcctc

SEQ ID NO: 14823 - DNA, 212 bp, Glycine max
  unsure (1)..(212): unsure at all n locations; Clone ID: 701156947H1
gaggaaagtagtagaagaatacaggcagagctgcagccaacaccacccatggctgaatccgtttcagtggacatggagatgatctttctcggcggaaaaggaacatccttatnncaacctgggctgtggttcngtntctgnaatagttctgtgggggntnangaaaagacnagctctggttcacttantccanatntagcgctnaaattatt

SEQ ID NO: 14824 - DNA, 122 bp, Glycine max
  Clone ID: 701156948H1
gggctcaagctttatttcacgtagctgactttaccgtcagctcaattggaatagtttttcgctatgttcgcaggcaagtgagacgatccatcaatgcccttatctgcttcgaaagaaccggt

SEQ ID NO: 14825 - DNA, 117 bp, Glycine max
  unsure (1)..(117): unsure at all n locations; Clone ID: 701156949H1
gggaggctcataatgtactagtcccagctgtcaacgggggaatattcgcgaagagagagagggcggttgcaattgcatagagaagtgcagagagagcgcacnaatacgactcagtca

SEQ ID NO: 14826 - DNA, 94 bp, Glycine max
  Clone ID: 701156950H1
ggaaaaaagattgtttgttgctgtgttgtgtgcatagagggggagagagagtgtggaggcgctatggggaacagagctatgttaacgctgctac

SEQ ID NO: 14827 - DNA, 240 bp, Glycine max
  Clone ID: 701156951H1
ggcagcgcttgatttgaggccaggcaagccccactcaaccaccacacctctcctgcgttcagctacccctttctgctcttcttctacctttcaagttttaaaagtataaagatggcagagacattcctatttacctcagagtcggtgaacgagggacaccctgacaagctctgcgaccaaatctccgatgctgtcctcgacgcttgcctcgagcaggacccagacagcaaagttgcctgc

SEQ ID NO: 14828 - DNA, 239 bp, Glycine max
  Clone ID: 701156952H1
gggacatgatcataggatcatcatctgaatctgatagcaacacaaagcttcctttttctgcttgggccttcttgagcactattctgtttggaaatattgtgatattttatgccgacagtattgcagaggagagattacacatggttttctcctcaccaaggcacttagcagcagctggtgcgtgcatcatcataatggagaaagtgtacaagatggatttttctctcacaggattcacg

SEQ ID NO: 14829 - DNA, 241 bp, Glycine max
  Clone ID: 701156953H1
ggtatagagacacatctttctttattccattggatctgaaaaagaccagttacccaacctcatacatcattttattagttcccaatcaccctctttgatgaggatcacaggtgcccatcaaagacacacaggaccctcccttcctttccttccttctatttcttttcctcatgcatgaaatcattcaattggtgagtatctttgcctctgcaaaaggaaactggaaactgaagaaactagc

SEQ ID NO: 14830 - DNA, 248 bp, Glycine max
  Clone ID: 701156954H1
gtagttggggaacatattgccccggggagtatcctagtcctcccccagaatatacaacctgtttgggtgattgtacagtgttgcttggatggaagacagtgacagacacaatttgcgaacagaaactctgcaccaacaatataaattggttaaagagaggactatatctggagattcatactatggctctcacgtgatgcagtatggcgatgtagggctagcagagatgttctcttccattatttggg

SEQ ID NO: 14831 - DNA, 245 bp, Glycine max
  unsure (1)..(245): unsure at all n locations; Clone ID: 701156955H1
acattcacacttatgtgattagtgtcaatgttgatgcttacagtccaaattaatgaacaatcataacaatgcttcttgagagagtaaaaaaagaatgtaaatgcaaggactatattgtattaatgagtttaatattttatattattaatcaattacaaatagtnataattnttaagatgctgggtcgttcnanntnngttancgtngcgcncatggtaggtcagcnganatggcaacctcantnt

SEQ ID NO: 14832 - DNA, 244 bp, Glycine max
  unsure (1)..(244): unsure at all n locations; Clone ID: 701156956H1
ggccattgttgttgctattatcatccgcagctgcttttattcgcaccgcaaacagtgagcctggccgtcggaaagaacaagcgcatctccaaggggaagaagggtggcaagaagaaggcagctgatccctttgccaagaaggattggtatgacattaaggctccttctgtttttcaaagtgaaaantgtcggcaaaaccctcgtctttcggtactcagggtacaagattgcttnngaaaggacc

SEQ ID NO: 14833 - DNA, 245 bp, Glycine max
  unsure (1)..(245): unsure at all n locations; Clone ID: 701156957H1
gatacaccataatattatgaatatgtctttctagctccaaaattcctatgcatgatggcaatcgataccctcatgccagccacaatgagcagcagtcctgcaccttgcagccgatcctggtcaattagtgaggactccctaagaaggtatgtgcagtttgcgagtgaaagctgccatacaaganttattggcagcttccggtcacaaccaaaggcaannggcaccntggntggnaaggtnnnact

SEQ ID NO: 14834 - DNA, 242 bp, Glycine max
  unsure (1)..(242): unsure at all n locations; Clone ID: 701156958H1
gaccaccaccataaatcaattcttgttcactctatttcttagctccaacaacatcactaaaaaaaatggcctctctccgttttctcttctttgtttctttcttcattgttttgtcacttttcatcaacattggtgaggtccaaggtgcaaatagaaaactttggcacaaacatttcctgatatagggcaacattcntggcgtgcnaatatctccctttccccccagtaacgattggccagag

SEQ ID NO: 14835 - DNA, 242 bp, Glycine max
  Clone ID: 701156959H1
ggtagcgccagactgagaggaagagagagggagattctttgtttgctaccttctctcggaaaaatggttacgttcaggtttcaccagtaccaggtggttgggagggctcttcccacggaagcagatcagcaccccaagatctaccgaatgaagctctgggccaccaacgaggttcgcgccaagtccaagttctggtattttctgaggaaactgaaaaaggtgaagaagagcaatggccaagt

SEQ ID NO: 14836 - DNA, 242 bp, Glycine max
  unsure (1)..(242): unsure at all n locations; Clone ID: 701156960H1
ggagggttattggacacattcttcagcgactgcgtttttggatcggaacctcttctgcggcgtanaatgggacactccaacgtttggaactctcacccaaaaaactacggtcctggttctcgcacttgccgtgtgtgtgggaatccacatggactgatcaggaagtatggccttatgtgctgcaggcagtgcttccgtagcaatgccaaggaaattggcttcatcaagtatcgctaaaagag

SEQ ID NO: 14837 - DNA, 225 bp, Glycine max
  unsure (1)..(225): unsure at all n locations; Clone ID: 701156963H1
gcattgggtgttcctgctcttcccctgacatacgtggctcacgttctggcacttgttgccagcatcttggtcgtgctctgggtcctcaattttaggggtggctggcttgggattctgataacaaggccctcatcttcaatccttcatccagttcttattgtcattggcttactagtcctgggggtgaagctattataagctacaangcattacccctgaagaagg

SEQ ID NO: 14838 - DNA, 247 bp, Glycine max
  unsure (1)..(247): unsure at all n locations; Clone ID: 701156964H1
tgaaggagttgaagcttacatttggttactgacaaaggcttacgttgttgtgaatgatgcttgctaccatcaaatcattagccattggctaaacactcatgcggttgtggagccattcgtccatagcgacaaacaggcatcctgagcgtggttcaccctatttacaaacttctgttcntcantatcgggacccaagnaaccntaancncanttgcccnnaaatccttggcaaatcccgggggttntt

SEQ ID NO: 14839 - DNA, 241 bp, Glycine max
  unsure (1)..(241): unsure at all n locations; Clone ID: 701156966H1
ggcacaagtgagtttgttgatcgagataactagaaacagtgtgatgaaaatgaaggtccttgttttcttctttgctacaattttggtagcatggcaacgccatgcgtaacgatatgttccctctccgaatgaacactggctatggtgcccgtactcccggagntnaaatgcgccaanttggaggcttcctgtggaagcacacaacatcttnggcttgnanncatttccctgaaagaggctt

SEQ ID NO: 14840 - DNA, 233 bp, Glycine max
  unsure (1)..(233): unsure at all n locations; Clone ID: 701156967H1
gacatatttctctgtctatctgaaaaggaaaaatatttctatatttgttgttggttcagataatgatgtacttcatggaacttgcctccccgcacactgaagaagcaataaaacttgtggataaagttggaggatttgaatggttgattcagaantatgaaatagatggagtactgcactcaagctggatcttgcactngacactccaattatcattgttccaggattcattg

SEQ ID NO: 14841 - DNA, 238 bp, Glycine max
  unsure (1)..(238): unsure at all n locations; Clone ID: 701156969H1
gatcgaagcaaaaaatgaaaacccaaagtgcttctctcctctgtcttnttctctctcttgtatcctnttggctagtggncctgctgctagtgcaactccaagaagcgcagtgccaagccaccatgtttcaacattcaacagaagcctttttccttccacttttctctttggaattggttctctgcttaccaggcagaaggagcagcaagtgtagatgggagaggaccaagcatatggg

SEQ ID NO: 14842 - DNA, 239 bp, Glycine max
  unsure (1)..(239): unsure at all n locations; Clone ID: 701156970H1
gagttagacgacaatgcccttttcgaagaacaaggtgtcgtcgaagagacacnggntacccctcctcacctccgcgacctctccgccgccgctcaaatcggcgacgcccacgccctccgtctcgctcttgataacttgactggtagtattgatgagccagtggaggatggggatacggctcttcatttgacatgtttatatggccatttggcttgtgtccagctgctaatagaaagagg

SEQ ID NO: 14843 - DNA, 203 bp, Glycine max
  unsure (1)..(203): unsure at all n locations; Clone ID: 701156973H1
tgcaacttcctnctgttttgctcccctgtttaagccttatcataagcttagaatggcacacaaggaattttccattgccctagtgactctcattgttctctttgtcaacacgaacctccaanntgccacggctgactatggtggtggttggcagagtgctcatgccactttctatggtgggggtgatgcttctggcacaaggg

SEQ ID NO: 14844 - DNA, 250 bp, Glycine max
  unsure (1)..(250): unsure at all n locations; Clone ID: 701156974H1
gtgcagtgtgacatccaaatgctcccttgtaagtatgagtttcatcaattaccacaaacctattggttaagatagagtaaacctcaacacaataagaatccattatgcaatattccatataaatcccaantcnnatatggtcgancaaataaccccatataaccacncngggttcgntgaaancccgnaaaaattnttgnaggggngggnnngtattggntggtnnnacnangngggnttgngacccnnc

SEQ ID NO: 14845 - DNA, 238 bp, Glycine max
  Clone ID: 701156975H1
ggcagcatccattcttgttctcttctttctttcgatcagggtttcccctcgtctccgggctcgtttcgttctcgaataatcgatctacgataatgactcgcggtagccagagggatcgtgatcgcgaaagggctcatgctagaactggtgctaaaggcaagcagaaagatgatggattgacccctgaacagcgcagggaaagagatgcaaaggcgctgcaggagaaggccgcaaagaa

SEQ ID NO: 14846 - DNA, 246 bp, Glycine max
  unsure (1)..(246): unsure at all n locations; Clone ID: 701156976H1
gaccacattccaaaacacaaacacatacattgtagtatcacttttgtctcggaatttgttcttttgagtatggcaagcttaaaggttgcatgtgtggttttgatgtgcatggctgtnatgagtgcaccaatgatggtgcaagccgtgtcatgcaatgatgtttctgtgaacctagcaccgtgcctatcttacctgatgcagggtggatngttccagaatcgtgctgtagcggagtgaggaacattc

SEQ ID NO: 14847 - DNA, 250 bp, Glycine max
  unsure (1)..(250): unsure at all n locations; Clone ID: 701156978H1
cagttattgtcttaccanaatagttaacaaaatgtaacaagttacactatcactatttcagcaaagagtaatacaagttgcaattttacactanaaaaggngaatttgcntangattgaaaaaaacntgctgtgnaangaacctcccgatntgggnttgaggaatagtttcattcaccntacnaggaagntnngtggaaagcnacccccngggnngnctnccctggnnntaagggnggggcccnccncng

SEQ ID NO: 14848 - DNA, 246 bp, Glycine max
  unsure (1)..(246): unsure at all n locations; Clone ID: 701156979H1
gaaaggatggcaattcctcgttcactatcttggttggaagaagagatgggatgaatggcttgacctggatcgtttgatgaaacacaccgaggaaaatatgcgcaaaaaacatgaccttgacgagaagcttggcaatgataagaatgcaaaagtcccgncgtggttctctggcgaagtccaagcctactaacgtttcaagaggcagganacgaaggaatgaatctgtcatcaagggaaaacctgcag

SEQ ID NO: 14849 - DNA, 89 bp, Glycine max
  unsure (1)..(89): unsure at all n locations; Clone ID: 701156980H1
ggggtgagttgttgtctatctcttgcttctctttgtgtnttggctgtggacgtaaaataatggctctgtcttttggttttgggctcttg

SEQ ID NO: 14850 - DNA, 240 bp, Glycine max
  unsure (1)..(240): unsure at all n locations; Clone ID: 701156982H1
ttgtagagctttctggtggtattaatcggatctttgagcttgaagagcttctggatgcgcacagtctggggactccatcaatagtagtattacatctccaatatggggttatcatggtaaagatgctatttccttttctaaggttgatattgtaacccctacccagaagatgttggccagggagttgncatgtgnccttgagcttggtaaaaagcctgccttgttacngncccaaanngg

SEQ ID NO: 14851 - DNA, 215 bp, Glycine max
  unsure (1)..(215): unsure at all n locations; Clone ID: 701156983H1
acnaaggaaaggagtgaccaagacttctgctcctccaatagaagttcctggaaatttgactgaagaaacaacgtctgcatctgcccaaacatcatgcacagggtccataaattttgatgaaagagcaagtgaacaaagttatgcagtcaaagagaatccaactgggcatccaggcagtgaaattggtgtagtaatgaaggaatgaatgtgggcct

SEQ ID NO: 14852 - DNA, 233 bp, Glycine max
  Clone ID: 701156984H1
gaaagtgcgactatgctagatagctatatgaaattttttatatttacatttgtctacaaatgagctgtgcatgggtaaccattttttgagatcgatgattttgaacactgttactcattggcaagtacacccgtttgtccgagtaataaagtaaaacggaagtctgagtgtcgagtccacagagactttgtttgtattcggagttgtgtctatccaattttcaagcaattaat

SEQ ID NO: 14853 - DNA, 235 bp, Glycine max
  Clone ID: 701156985H1
ggaacaaagttgaaccttcacttcactcgctacttcacctcaagtgttgatgcctcgttcttgcctcgatcagttgctgattccatacccttttcatcaaacaaggtgaatgaagtgttaaacaagttctccatcaaggaagggtcagatgaggctcaaactgtgaagaacaccatcagtgagtgtgaagtgcctggcattaagggagaggaaaagcgttgcgtgacttcacttg

SEQ ID NO: 14854 - DNA, 239 bp, Glycine max
  unsure (1)..(239): unsure at all n locations; Clone ID: 701156988H1
cagttattgtcttaccaaaatagttaacaaaatgtaacaagttacactatcactatttcatgcaaagagtaatacaagttgcaattttacactataaaaggtgaatttgcataaaatatgaaaaaacatggctgtgaaagaacctcctatatgagattgaggatagtttcattcaccatacaggnagatgtgtgtaatcatctccntggtctgcttccagtctaaagttggatcaaccc

SEQ ID NO: 14855 - DNA, 236 bp, Glycine max
  unsure (1)..(236): unsure at all n locations; Clone ID: 701156989H1
agcgagctttgtgatcgattgcgcgaggccggtggaggataaaattatggacattgcttctctggagaagttccttcaggagaggattaaggttggcggcaaggccggtgcactcggcgattccattactgtnactagggacaagagcaagatcaccgtcacctccgacagcaacttctctaaacggtatctgaaatatttgaccaagaagtacttgaaaaagcacaatgtgaggg

SEQ ID NO: 14856 - DNA, 238 bp, Glycine max
  unsure (1)..(238): unsure at all n locations; Clone ID: 701156991H1
ggcagcgcttgatttgaggccaggcaagccccactcaaccaccacacctctcctcgtncacgctacccctttctgctcttcttctacctttcaagttttaaaagtataaagatggcagagacattcctatttacctcagagtcggtgaacgagggacaccctgacaagctctgcgaccaaatctccgatgctgtcctncgacgcttgcctcgancaggacccagacagcaaagttgcc

SEQ ID NO: 14857 - DNA, 236 bp, Glycine max
  Clone ID: 701156992H1
tgcgccatcttaataccaacattgtggtgtcttacatgctctatcatgtagagcctcaaatggtgtcatcccaatgcttgcatgaaagctattgttgtaggtgaattctacctatcataccctaatttccgtccggggacttttgcttgaaggcatacaacctttgattgaccgcttcaaggtacttggcaccttttgttgcataatatgtgaagtcccgagacgtgcggaaaatc

SEQ ID NO: 14858 - DNA, 74 bp, Glycine max
  unsure (1)..(74): unsure at all n locations; Clone ID: 701156993H1
gtacgatgatacggagaggaagcagcaaaagaatatgcaattgctaancgcggcttttacangtnaggtgaaac

SEQ ID NO: 14859 - DNA, 239 bp, Glycine max
  unsure (1)..(239): unsure at all n locations; Clone ID: 701156994H1
gagtacaaaaatattcatctcttctaacttctaagcattccagtaaaagaactaaacatggcagagaccattcgtttggctgttgctgttcttggcaatgcagcctcagttgccctttatggctgcaccaatggttacctttagaagagttatgaggaagaaaagcacagaggngttttcatgctttccttacatcattggcctcttgaatngtccccttttcattggtaggtttgcct

SEQ ID NO: 14860 - DNA, 253 bp, Glycine max
  unsure (1)..(253): unsure at all n locations; Clone ID: 701156995H1
ggtgcagttcaaagcgaagaaagattcgaaacgaagaaagaaagcgttgtgaagaatggcggaagagggacaagtgatcggtgtccacagcgtagaggagtggaaggancattctcaagaagggagaagagtccaagaaattgattgtggtgggattttactgcttcttggtgcggtccatgccgttttcattgcccccaattcttgncagagtttggctnaaaantttncccnaagtccccnttccctnngg

SEQ ID NO: 14861 - DNA, 241 bp, Glycine max
  unsure (1)..(241): unsure at all n locations; Clone ID: 701156996H1
ggaggaaaggaaaggggaacncaaaccgaaaccctaaccctaacggagagatggcggagacttggcatcgatattcgggacggagaaggacagggtgaactgtccgttctacttcaagatcggcgcgtgcaggnacggcgaccggtgctccccggcnttcacaccaaagccgacaattagcccaacattggtttgtcgancatgttaccagaggnccgacntgaacttgagctntatcacc

SEQ ID NO: 14862 - DNA, 263 bp, Glycine max
  unsure (1)..(263): unsure at all n locations; Clone ID: 701157001H1
aaaganacccggaaagggtgggaaccgcttttggaaatccattgggcttggatttaagactcccagggaagccatcgaaggaacctacattgacaagaagtgccccttcactggcaatgtttccatccgtggccgtatcttggctggaacatgtcacagtgctaagatgaacaggactattattgttaggaggattatctccatttatcaagaataccagaggtacgagaaaaaggcatcccaaattcctgcncatntatcnc

SEQ ID NO: 14863 - DNA, 134 bp, Glycine max
  unsure (1)..(134): unsure at all n locations; Clone ID: 701157002H1
ggtgtcaaganatctcgtccacgtgagcgagttgggaggggagttccagttccagaggccaatgctgaactgcaagcaaatattgatagacggcggctgatcacacatgcaaatgctaagagcaagagtgagaa

SEQ ID NO: 14864 - DNA, 236 bp, Glycine max
  unsure (1)..(236): unsure at all n locations; Clone ID: 701157004H1
ggcacaagtgagtatgttgatcgagataactagaaacagtgtgatgaaaatgaaggtccttgttttcttcgttgctacaattttggtagcatggcaatgccatgcgtacgatatnttccctctccgaatgaacactggctatggtgcccgtactccggaggtgaaatgcgcaagttggaggcttgctgtggaagcacacaacatctttggctttgagaccattcctgaagagtgcg

SEQ ID NO: 14865 - DNA, 227 bp, Glycine max
  unsure (1)..(227): unsure at all n locations; Clone ID: 701157005H1
gcatatgacagggcgaatgcagagaagttngaatctgacaacaaccttggactggttaatcaggttgtatcatccatgtataagcggaatattcagagattgatccagacatacttgaccctttctctccatgatatagccagnacagtgcaggngntatgaccccaaagaagctgaaatgcatgtgctacaaatgattcaggatggcgaatatntgcactnnanac

SEQ ID NO: 14866 - DNA, 250 bp, Glycine max
  unsure (1)..(250): unsure at all n locations; Clone ID: 701157006H1
ggcacaagtgagtttgttgatcgagataactagaaacagtgtgatgaaaatgaaggtccttgttttcttcgttgctacaattttggtagcatggcaatgccatgcgtacgatatgttccctctccgaatgaacactggctatggtgcccgtactccggaggtgaaatgcgcaagttggaggcttgctgtggaagcacacaacatctttggctttgagacattcnngaaaattgcgttaagcaanaagggt

SEQ ID NO: 14867 - DNA, 254 bp, Glycine max
  unsure (1)..(254): unsure at all n locations; Clone ID: 701157007H1
gngattanaagcaagggtagaagttttgcaacgttctccaaaggaacctactcggggaagatcttgcccaaatgaatacaaatgagctagagcagcttgagaatcaactggaggcagcactgaggaatnttaggtcaacaaagactcaattcatgcttgaccagctttctgatcttcaccaccgggaaacattgcttattganactnataacgtgttanggagtaagttggnagnaactgatcactcacaagtt

SEQ ID NO: 14868 - DNA, 246 bp, Glycine max
  Clone ID: 701157008H1
gaatggtgagaaggagaagggtggtgagggggtgcagcggtcttgtggcgaaaggagaagatcgaaggcgaatccgaggctgagcaatcccccgaagcatttgaggggggagcaggttgcagctgggtggccgccgtggctcactgcagtgtgtggggaagcactcagcggctggattccgcgaaaggccgacacctttgagaaaattgataagattgggcaaggaattatagtaatgtgtacaaa

SEQ ID NO: 14869 - DNA, 251 bp, Glycine max
  unsure (1)..(251): unsure at all n locations; Clone ID: 701157009H1
gatatgaaagcaactatgttccaaatcctgcaattcggcctccacttgagcatggctggaactggcaatccagacctggtgcattgcagtccaatgcaagggatgaaatttcaccagaggaccttcaaaagaatgatgatgttgatgacgatgatggngaggaggactctgatgcttttgaagataccgatgatgatctgatgagtgatgactatgattcagatgctagtcaaaagagtcatgagacacgt

SEQ ID NO: 14870 - DNA, 253 bp, Glycine max
  unsure (1)..(253): unsure at all n locations; Clone ID: 701157010H1
ataatgggaataaccaaataatacacataattcacaaataaaaacaaggaaaacaaaaataaaatgcaaaagccaaattgcatttatcgatacgcaacaagggttttcttatgttaaaataatcatcatatgcgcgttcatgttttgcgtttggattccatgagaaaaactttttttttctcctagaatagtcatccattctttgtttctcgttcagtgtttattttttctatggctgttggttntgtttcct

SEQ ID NO: 14871 - DNA, 224 bp, Glycine max
  unsure (1)..(224): unsure at all n locations; Clone ID: 701157011H1
gagactacagcagattcaaggaacatgcttaganaactgccaagcccacccatattctctcaaaactttcaaccatgaactgnnnnnnnnnnnnnnnnnnnnnngggccacccgtacagacccacctccaaagagatcatttttattaccaattttccgatttcacagagaaaattctttgtgggcatctcttcaaaaatgtcaagcttccccaacacggtggc

SEQ ID NO: 14872 - DNA, 245 bp, Glycine max
  unsure (1)..(245): unsure at all n locations; Clone ID: 701157013H1
gataaagagtggatttcttaatcggattggaattggtgccaagtactctactccaaaggatcccctgaatgttcaagtaaccaaaatcaaatgtcttgatgcagaagacacttgtaatattaatatcagtctcaccagtcctgtgtctgctttgggcattggccactggatgggcccaacaacgagaatgtcacttccaagttttagtggagctacagagtnngcnnncctaacctcctcaaata

SEQ ID NO: 14873 - DNA, 249 bp, Glycine max
  unsure (1)..(249): unsure at all n locations; Clone ID: 701157014H1
gacagactcaggaaccaatagacaaatatctattaacaaaacaacgcaacgcttcnnnnnnnnnnnnnnnnnnncctacttcgcctctgtttcatttggcccattgtttctcacaagccacactctttgtttgaagcttaaactccctctaagccccatccttaatttactcaatctcatcaatgtttcatcatctggagttcttcttttgagggntcacagcagattccattccttgagtctcatgct

SEQ ID NO: 14874 - DNA, 251 bp, Glycine max
  unsure (1)..(251): unsure at all n locations; Clone ID: 701157015H1
gacccatccattcttcaaatggaaaagctccatgcttctgtgctcgcccttgtattccttcttgtcatactatttcaggaaggattggtaacatgtatgaagaatgaagacggatcagaagaatggggatatgtgcaagttagaccaaaagcccacttgttctggtggctttacagaagtccatacagagtggagaatccctcnaancntnngcannnnctctgcgggcatgagggacnacgannctcttc

SEQ ID NO: 14875 - DNA, 252 bp, Glycine max
  Clone ID: 701157016H1
cgcgaagaagagcgtggagacctacaagatctacatcttcaaggtcctcaagcaggttcaccccgacattggtatttccagcaaggccatgggcatcatgaacagcttcatcaacgacatcttcgagaagctcgcccaggaagcgtcgcgtttggctcgctacaacaagaagcccaccatcacctcgagggagatccagaccgccgtgcgtctcgtgctccctggtgaattggccaaacacgccgtttctga

SEQ ID NO: 14876 - DNA, 248 bp, Glycine max
  unsure (1)..(248): unsure at all n locations; Clone ID: 701157020H1
aatgctggagttctcaacgagctgttagtggaagctctatttcctaactgtgcacatgcattttatgattataacttatgaattccgcagcttaaaatttttaccctctcagtaactaaattgttnctcanngaagacatccgtggttttcctaggaatagaaccgtgttgagtggagatgtggatttagtagttgaatcaattgaagctccttgtcggaacaaagaatatggttgcaatgaaactgt

SEQ ID NO: 14877 - DNA, 99 bp, Glycine max
  unsure (1)..(99): unsure at all n locations; Clone ID: 701157021H1
gatggtgggaccagtgagacctcantttgtgctctttggttcttccattgttcggctcagttactctctccaaggttggggcgctattcttgctcattt

SEQ ID NO: 14878 - DNA, 261 bp, Glycine max
  Clone ID: 701157022H1
gaaggatcagcagggagaattaggtttttagggtttacaccgagcagccacacctcccgcagcagccatggttctcaaaactgaactatgccgattcagtggtgccaagatctacccaggaaagggcatcagatttgttcgtggtgattctcaggttttcctgtttgcaaactcaaaatgtaagaggtatttccacaatcgcctgaagccttcaaagctcacctggactgcaatgtacagaaagcaacacaaaaaggacat

SEQ ID NO: 14879 - DNA, 254 bp, Glycine max
  Clone ID: 701157023H1
gtcctcaatttttttaacacactaccaaccccaaatcctaaggttcatttcaatatggcaatcttgtcaagttttgctcctttgaccattcttagtttagtcttgttagtggttggaatcattgtgtctggggttgaagctaggccaagagcattctttgtgtttggagattcacttgttgacaatggaaataacaattacttggccaccacggcacgtgccgatgctcctccttatgggattgattaccctcc

SEQ ID NO: 14880 - DNA, 247 bp, Glycine max
  Clone ID: 701157024H1
ggtgtgaagcagatgatctgttgctgtaacaagatggatgccactacccccaagtactctaaggctaggtatgatgaaatcgtgaaggaagtctcttcttacttgaagaaggttggttacaacccagacaagattccctttgttcccatctctggttttgagggtgacaacatgattgagaggtccaccaaccttgactggtacaagggaccaactctccttgaggctcttgaccaaatcaatgagc

SEQ ID NO: 14881 - DNA, 183 bp, Glycine max
  Clone ID: 701157025H1
gtgtagttttgattaggcggaggaacactgcctggagaagctaacttatcactactctgaggctctgaactggtatcttttgtagtagtagtggtcacttgtttagtctttggcttggagcccccatatacgaaactgcatgctaccacctggcactgggcttgaagcaacaagcctagtaac

SEQ ID NO: 14882 - DNA, 242 bp, Glycine max
  unsure (1)..(242): unsure at all n locations; Clone ID: 701157026H1
gaagaagaagaaggagcatggccatgagcatggccatgacagcagcngcagcagtgacagtgattaaactgctgcatcacctatatatttaaaaggtttatgggaccatagtagcgagggctgtgccttaannnnnnnnnnnnnnnnnnnnntttttctcnctctctctctttntcctttntccctatcntgtgatctatntatgagngagaaanacaanagtgaganattgtgcgtgtatc

SEQ ID NO: 14883 - DNA, 242 bp, Glycine max
  Clone ID: 701157027H1
ttatcgaggcaatagatctaaatatctgggaagccatagaaatagggccttatatacccaccacagtagaaagagtttcaatagatgatagttcatcaagtgaaagcataaccatagaaaaacctagagatagatggtctgaagaggatagaaaaagagtacaatacaacttaaaagccaaaaacataataacatctgccctaggaatggatgaatatttcagggtttcaaattgtaagagt

SEQ ID NO: 14884 - DNA, 240 bp, Glycine max
  Clone ID: 701157028H1
gatgagtcatcgtcttcacattcagattctgaacgtgatagtgaagctggaggggaaaactccaaaggtaaatctaggaagcagaaaactgagaaaagtggtgtaattgactttgaggctttgaagcgacacgggtatagaggtggaccttctgtcctaaaagtacccgcaccaaaagaagatgactcaaagcaagattggtcgtggtccactggaaaagaaaagcgtgtagacaaggaa

SEQ ID NO: 14885 - DNA, 242 bp, Glycine max
  Clone ID: 701157029H1
gctctcactctctcagagtcttccacgttattctctctccgagcttcactctcttttcgcctctgccaaagggagaaaaatggggttctcctcctttctgggtcgtgttctctttgcctccctcttcatcctctccgcatggcagatgtttaatgaatttgatgccaatggtggacccatctcgaaagagttgattcccaaactcagtgtggtgaagaataatttatcctctaaattggggg

SEQ ID NO: 14886 - DNA, 245 bp, Glycine max
  Clone ID: 701157030H1
gaggcctccaaatattttcctttttagctttgattagagtggcctagttgttgtttttctcaatgagaagggcttccactatgcattgcgcactttggcgcttctgtgttcccttgttgctacttgctagcttcagttatgcaccttttgttttggcgacaactgaaatttcagggaatgaagtgagcactgatggaaaggttttaaatgaagagttagcaaaacctaatctacaaggacatgat

SEQ ID NO: 14887 - DNA, 247 bp, Glycine max
  Clone ID: 701157031H1
gggcatattccagccgctactaaggaagatgttgaccttgcggtggatgctgctaaaagagccttttcccataacaaaggcaaagattggtcttcagctcctggctctgttcgtgctcgctatcttcgagccatcgcttcaaagataacagagaaaaaggatgaactaggaaagcttgaagcaattgattgtggaaaaccactagatgaagcactggcagacctggatgatgttattggttgtttta

SEQ ID NO: 14888 - DNA, 190 bp, Glycine max
  Clone ID: 701157033H1
tcagatctggagcaggagaatagcgttgggagcgttcgcgtttgttctgcttttcctatcggcctcagcagacgacgtcgttgtgctctctgaagataacttcgagaaggaagttggtcaggacagaggagctctcgttgagttctatgctccttggtgtggacactgcaaaaagcttgctccagaatat

SEQ ID NO: 14889 - DNA, 253 bp, Glycine max
  Clone ID: 701157034H1
ggcacaagtttgttgagatagctagaagcaataagatgaaaatgaaagtgcttgttttgtttgttgctacagttttggtagcatatgaatgccatggctcagactaccagaagttccctctccaaatgaaaactgggtttggtgggcaatacagcaatgaggtggcatgtgccagttggaggcttggcgtggaagcaaacaacgtatcaagtggcaaactgttcctgcagcttgcggagagtacatagctgac

SEQ ID NO: 14890 - DNA, 116 bp, Glycine max
  Clone ID: 701157035H1
ccttttccagaattttgtttcggccacgtattcttattgatgtgagcaggatagacatcacaactactgtcctgggcttcaaaatatccatgccaatcatgcttgccccaacagcc

SEQ ID NO: 14891 - DNA, 251 bp, Glycine max
  unsure (1)..(251): unsure at all n locations; Clone ID: 701157036H1
gggtagggtttcgagttacagccgcaccttgattcagagcagagcgaccttgaagagctatggctgtcggaaagaataagaggatttccaagggaaagaagggtggcaagaagaaagccgctgatccctgcnccaagaaggactggtacgatatcaaggccccttccgtctttcaggtcaagaatgttggcaaaaccctcgtctctcgtacccagggaaccaagattgcttctgaaggactcaaacataga

SEQ ID NO: 14892 - DNA, 251 bp, Glycine max
  Clone ID: 701157038H1
gtccctctccttttcctgatggatcatttgacaaaccagttaatttctcccccccaaagctagtgattcttcatatgaatatggcactacatgtgtatgaagatatcatgaggatgactgaaaacctgagtgagaagtatataattggatatggagcatcaagtacagtttataaatgtgttcttaagaattgcaagccggtggctatcaagaggatctattctcactatccccatgtattaaagattgaa

SEQ ID NO: 14893 - DNA, 51 bp, Glycine max
  Clone ID: 701157039H1
cagatggtgtacaaattaagaaacctattgaggtttctgctccaaaatatg

SEQ ID NO: 14894 - DNA, 246 bp, Glycine max
  Clone ID: 701157040H1
gatcacttgcttagtttgttcttccttctactagcaaagcaaaaaaaaataaaaaaaatagagaaatgcaggggggtgtgaaggagaagttgttgatcaaagagaaaaaaacatcagaacaagaagaagaggaattatcattggtgaagagggtgtggaatgagagcaaggtgatgtgggtagtggcagcaccaggcatttttacaaggttctccacctttggtatcaatgttataagccaagcat

SEQ ID NO: 14895 - DNA, 247 bp, Glycine max
  unsure (1)..(247): unsure at all n locations; Clone ID: 701157041H1
ctccagggttatttttaaattgaattgtcaacaacttttctcaacttggagctggaggccttctaaaggtcttagctatgagttagttagaattgaggatgttcctcctagatttggttcttatgaatgatgatgtaaggccgttggccaaaccattttcttgctaatattgcatcctttacctaaganaaaaaaaaccgacaaaatttntaattctaacagcgntgtctcnattggncgggaagaa

SEQ ID NO: 14896 - DNA, 239 bp, Glycine max
  Clone ID: 701157042H1
ggtttgattagggtttgtcattagcacttcttcttttcacactgccgctgcaacaatggcttcagagaagaaactttcgaacccaatgagggagataaaagtgcagaagctcgttctcaatatctctgttggcgagagtggagatcgtctcaccagagccgccaaggtgttggaacaacttagtggccaaaccccagtgttttccaaagcaaggtacactgttcgttcctttgggatta

SEQ ID NO: 14897 - DNA, 242 bp, Glycine max
  unsure (1)..(242): unsure at all n locations; Clone ID: 701157043H1
ggagtgtgttgtgtctaacggcccaagtctaacgttgtggagcatagaagagaaagggatgatattgaactgtgttagagtgacagctatgcctatgatggctgttccttcatggagatccacgtgctgctgcgnnnnnnnnnnnnnnnnnnnnnnnnnnnnaaccatcaacactgaccaacttcgttctcaacttgatcaccttcattcagaggctgacgccaccagagccaaggcaacta

SEQ ID NO: 14898 - DNA, 240 bp, Glycine max
  unsure (1)..(240): unsure at all n locations; Clone ID: 701157044H1
gcactctcacatatgaatatgaactgtttagaatgaatcaatatgagaccatacaagatatgcaaaaaatatttactcatatagttaatcatcttgcatcattgggaaaaatatttcctaatgaagatctcattaacaaagtgctgagatgtttaagcagacaatgacaaccaaaagtaacagcaattgcagaatcaaaagatctcgnccaacatgtctcttgccactttctttgggaaa

SEQ ID NO: 14899 - DNA, 237 bp, Glycine max
  Clone ID: 701157045H1
ggaaaaggttacttcaagagggggaaaagatggatgggtttcaaataacattaacaagggtcgatttgacaagtactactggcttcttgccacaatgagtgctgttaatgtactgtattatctagtatgcagttgggctatggacctacttctgatcaagaatcaaaggtaactgaagaaaatggttccaatgaggaagaattgccataattcgatccaggactaagggtcatttga

SEQ ID NO: 14900 - DNA, 201 bp, Glycine max
  unsure (1)..(201): unsure at all n locations; Clone ID: 701157048H1
ttggattggttttcttcttcctcttcctaaagagaatctaatctcaatcctcattacacacatatctacagatttcttcattcctctctcaatcttttctgttttcttttcccctctttgacatcctcgttttcgccgaaacaaaaacaactaagattttgttttntgttgtatttttcttcctgttgttatntgactcgg

SEQ ID NO: 14901 - DNA, 193 bp, Glycine max
  unsure (1)..(193): unsure at all n locations; Clone ID: 701157049H1
gcagtggctggtgatctcatgtcaaaaccaacatggtatgctgctagcagaatccacgacgcattaatacgaatggacaatgaatatttgagatcggctcttgactatctagagctgcagnagatctaaanccccttgttcgtggagcacatacttttagatgtccaaatcttggtatcactagcgggcaagg

SEQ ID NO: 14902 - DNA, 256 bp, Glycine max
  Clone ID: 701157050H1
caagtccaaagtccaatgaaattaaaatttattattatattgtgtgcctcaattagcacgtttgtatgtatgggagaatgggagccaacttggagcacaagagctgcagaagaagctgaggctgtggcagcaataccatgttcaggacatggaagagcctacttagatggtcttattcttaaagatatgaataagtctccgttgtgaatgcaattcatgctatgctggatctgactgctcccagtttttatctgat

SEQ ID NO: 14903 - DNA, 240 bp, Glycine max
  unsure (1)..(240): unsure at all n locations; Clone ID: 701157051H1
ttccctaattctttttaattttttaaagtgttgataaaagatgattctttgttaattgctcgagaagtgcatctgcttaatttgctcaatggttcatcaacatttataaacgtagtaattgccaagaacaaacaactaaaatttatatgttttccaccattcgagttttctatctgtgactgatacatggaaattcttggnntattgaattcaatgagattcaaggctacatccaaagca

SEQ ID NO: 14904 - DNA, 238 bp, Glycine max
  Clone ID: 701157052H1
aagctttggaggttctgggctcaagaaaagtggaaagaaataagggctctttatcatgattgtatgcattcaatattgagccctgtaattacagttgctaccatgataacttctcttatcattgtggcctactttattgctaatgtgtactgaactgaggtatgtcgtgatgtaagctgcaataagttaattgtctgtagctttattgtatccccttcatggggttctgataattaca

SEQ ID NO: 14905 - DNA, 192 bp, Glycine max
  Clone ID: 701157053H1
gacttcaaaacactcataacacaaagcacaaagcaaagctcatccttgagttaaaaaatggcagcagcttcttccatggctctctcatccccatccttggctggcaaggccgtgaagctgggcccatcagccccagaagtgggaagggtgagcatgaggaagaccgtcaccaagcaggtctcctcaggaagc

SEQ ID NO: 14906 - DNA, 243 bp, Glycine max
  Clone ID: 701157054H1
acattaatatcgtatcgtgtccaatgatgcttactctcttgaaatctatcatttcaaggatataaagtaaaagtacaaattatatcgcagtggtgctattataaacaaacgctgctccatatatagaaaaggtaatgccatcaagagatgtagtgaactctaaactatatccatcatccatgcaggtgacgtcatcaagagattagaagaatatgctacacccgttcttgttcttgatcaaaa

SEQ ID NO: 14907 - DNA, 253 bp, Glycine max
  Clone ID: 701157055H1
gaaggttttgaaggtagtctagatgttggggctggtcaaactcctcaattgcggttgcctcgaattaaggaagttgaggtcaatggaattactgttaaggtcaagtattgtgatacttgcatgctctacaggcctcctcgatgttctcactgctcaatttgtaataactgtgtggaacggtttgatcaccattgtccctgggttgggcagtgcattgggctgcgtaattatcgcttcttcttcatgtttgtct

SEQ ID NO: 14908 - DNA, 242 bp, Glycine max
  Clone ID: 701157056H1
ggcatcaattcaaaatatatcatcaattataagcatgggtttgtggaacacaacgaatgcagtgtcttgccgctttcacaagtttggtgatgaccaaaagaatctggtcttccaaggtgatgccacgtcttcttccaggggcatagaactcacaaagttagacggtggaggaaaaccagtgggtggcagtgtggggagagtgttatactcttctccagtgcacctttgggaaagctctacag

SEQ ID NO: 14909 - DNA, 240 bp, Glycine max
  Clone ID: 701157057H1
ggcatcaattcaaaatatatcatcaattataagcatgggtttgtggaacacaacgaatgcagtgtcttgccgctttcacaagtttggtgatgaccaaaagaatctggtcttccaaggtgatgccacgtcttcttccaggggcatagaactcacaaagttagacggtggaggaaaaccagtgggtggcagtgtggggagagtgttatactcttctccagtgcacctttgggaaagctctac

SEQ ID NO: 14910 - DNA, 236 bp, Glycine max
  Clone ID: 701157059H1
ggcacaaaaatacaatacaaaacaaaacagagcaaagagagagtgtgtgaaaagtgaaacaaaaaacagaacaacaatggcgacacttaaggttcctcagcctcttccccccgttgcagatgattgtgagcagctccgaaaagccctctcaggttggggaactaacgaggagctgattgtatcgatcttggctcataggaatgctgctcagaggaagcttatcagagaaacttatg

SEQ ID NO: 14911 - DNA, 246 bp, Glycine max
  Clone ID: 701157060H1
cagcatggaggaaatgccttgcattggttccagtattggaagtaaaaggcaaagcggaagagttggtctgttttcaaggcagcgctgattaagtgctacggcgataccggaaggggagatgtttacgaatgtttgatagcgttgcgccaaatgggggactttgactgaattcattcaggaattcgaggtgccgatggctcaagtcttgggtacaaaggaagcgcaattgagaggatattttttggt

SEQ ID NO: 14912 - DNA, 244 bp, Glycine max
  unsure (1)..(244): unsure at all n locations; Clone ID: 701157061H1
ggagaagaatatggaacgaagtggncggaatggtaacggggtcgcatgaaaggaacgaacttgttagagttagacacggttctgacagtgggtctaaacccttgaagaatttaaatggtcagatttgtcaaatatgtggtgacaccattggattaacggctactggtgacctctttgttgcttgtcatgagtgtggcttcccactttgtcattcttgttacgagtatgagctgaaaaatgtgag

SEQ ID NO: 14913 - DNA, 238 bp, Glycine max
  unsure (1)..(238): unsure at all n locations; Clone ID: 701157062H1
ttgtttggaagacctgaaattgttgtaacacctgagggggcagtctctaaggatgaaaacatcaaaattagctttggtggtttaaagaagcttgttttagaggctgtgacatttggttcttttctctgggatgttgagagctatgtggactcaaggtaccattttgtgttgaactgagtaaanctttanaggggnancctttaagtnccccccagtgggagggaccncctgcantcnc

SEQ ID NO: 14914 - DNA, 235 bp, Glycine max
  Clone ID: 701157063H1
gggcagtgagtgacacattcagctgcacaaagaatcccaaagtagagaaacagcacactctcacctcactcacttgtccttgttatatttgttttatatcttgtcacaatctgtgactgttcgagttatccgaggcccctcttttatatggtcgttgataaaatggcttcgacccttttagcaaagatgcttttgggtcaccgattgatacacccttcttcgttcctcactcacc

SEQ ID NO: 14915 - DNA, 186 bp, Glycine max
  unsure (1)..(186): unsure at all n locations; Clone ID: 701157065H1
tgcaacttcctctgttttgctcccctgtttaagccttatcataagcttagaatggcacacaaggaattttccattgccctagtgactcnccantgttctncttgtcaacacgaacctccaaggtgccacggctgactatggtggtggttggcagagtgctcatgccgtttctatggngggggtgat

SEQ ID NO: 14916 - DNA, 255 bp, Glycine max
  Clone ID: 701157066H1
agagttacaatctcatggaaatattcgtttgaagagaatgggggaacttgatactagaccattccttgaagcaatgaagcaaagatataatgaggaggatgctgaagagagagcttcagagctgtgttcattgtgggaagaatatctaaaggacccagattggcatccattcaaagttatcatggttgaaggaaaagaaaaggaaattattagagatgacgatgaaaagctgaatgggttgaaaaatgacttggg

SEQ ID NO: 14917 - DNA, 258 bp, Glycine max
  Clone ID: 701157067H1
gcacagggtgcagcacactaaattgtgtgttattgctgcttcatttttatttctgtggataggtttggttggcaacttggcatgtagtagcatggaaagcttcatctagataattttattacctttatctaccttaaataaatgagctatctaggagttagggaagtgttatgaatatttggtttgtacgaaagcattacttactactgtgctagtttgacaaccactgaaccacctatttgtttttttcttggccgt

SEQ ID NO: 14918 - DNA, 209 bp, Glycine max
  unsure (1)..(209): unsure at all n locations; Clone ID: 701157070H1
gagggagagtgttgacgctccatcaagatgggtatttctagggattccatgcacaagaggcgtgccactggtggcaagaagaaggcatggagaaagaagagaaagtatgagcttgggcgtcaggccgcaaacaccaagttatcaagcaacaaaactatccggaggattcgtgttcgaggtggcatgttaaatggagggcntgaggttgg

SEQ ID NO: 14919 - DNA, 245 bp, Glycine max
  Clone ID: 701157071H1
gatctgaacgaaggagagtgaaagatccttttttgcgttattggatcgaaaatggatcagatattcaataaggtcggatcctattggttcaaccagaaagcctccagccagctcaattccgttggtgatgacatcaattcgatgacaaacagtattgaagggggaaccaaatggttggtcaacaaaataaaaggcaaaatgcaaaaggcattgccagagttactaaaggagtacgatctaccaat

SEQ ID NO: 14920 - DNA, 248 bp, Glycine max
  Clone ID: 701157072H1
ggacgcaactcacaagtgaagaagaacgagagattgagaagagaaagcgttccaaaatgttcacgctatctcgcgtgttccctctcacttccccttccaggcataggctcttggaagtgctgtcctctaggaaagttgaagtcggagaccgtctgcgccaagaggggcgcgattttacctattcagctgccatttctactgctacaaataactatgctgccaaaggacacgcttccgatcgaatattt

SEQ ID NO: 14921 - DNA, 236 bp, Glycine max
  Clone ID: 701157073H1
gagagaaagagagagaaagatgtcgaagcgtggtcgtggtggttcggcggggaacaagttccgcatgtcgctgggtcttccagtggcggcgacggtgaactgcgccgacaacacgggggcgaagaacctctacatcatttcggtgaaagggatcaaaggccgtttgaaccgtcttccctcggcctgcgttggcgacatggtgatggccaccgtgaagaagggaaaacccgatctga

SEQ ID NO: 14922 - DNA, 228 bp, Glycine max
  unsure (1)..(228): unsure at all n locations; Clone ID: 701157074H1
ggtggcaagaagngcataactctcttggacttgaagcgtccatttaaancaatgaaggatttggacatggacaaggtcatctcggacatcattgaggaaatatcaaagactagttgacttcagctgttttgcaagagcctttttatggcttgacttacagtgaagctagatatattttgttcacatggtagaaatcctacaatggaaacttgttcaaaatgtgttata

SEQ ID NO: 14923 - DNA, 225 bp, Glycine max
  Clone ID: 701157077H1
cccctttttgtctacagttgaaataggtcgtgcctttatcagcacaatttgagatgtgccctggcttaccacacttgtaacaagtgatctaagttaagaaagtagtgggtttgctaccattaccaccagcaaactccatagcaatagtcctttgattgttggggtgattaccatattgcttacgaggggttgagtacggtttcccccgatgttgaggtctattat

SEQ ID NO: 14924 - DNA, 243 bp, Glycine max
  unsure (1)..(243): unsure at all n locations; Clone ID: 701157078H1
tatcaaagacaaatcatcttatactttggttcctaagcaagatgatcagcatcttccaaataaagcttcaaacatggcttcttcagatggaaatcaaactcttgatgagaatggagtttctggaaatcatgatgctgggaagaaaaaagtactacttcttaaagggaaggaaagagaaataattactgtatctgatttagatagcntnaacacagcatcacaatgtaacatcttcagctaaaa

SEQ ID NO: 14925 - DNA, 238 bp, Glycine max
  unsure (1)..(238): unsure at all n locations; Clone ID: 701157079H1
gaaggtaggaaacccataaatttattctagtaatacatttctgggttttgtttgccttgtgtgtatctttctattgacgagaataatggaatgttcccaattctctgtttttttgcttttgtccatttttgtgggaatttgtttagcttccactgaggaacaggaaagggacaggattgccaagctgccaggacaaccngaaaatntgctatttgcacactactcaggctatgtgact

SEQ ID NO: 14926 - DNA, 239 bp, Glycine max
  unsure (1)..(239): unsure at all n locations; Clone ID: 701157080H1
agattctgcagcttctgcgtttgagacagatttttaatggcgtctttcttaaagtgaacaaagctaccgtgaatatgctgcatagggtagagccttatgttacctatgggtaccctaatttgaagagtgtaaaagaattgatctacaagaggggctatggaaaagttaacaagcagagattgcctaantgacaactctattgttgaacagactttggggaagctgggatctttgcgttg

SEQ ID NO: 14927 - DNA, 247 bp, Glycine max
  unsure (1)..(247): unsure at all n locations; Clone ID: 701157082H1
ggtggcagttgtgtggcacagaaattaagctagagcttcatagtttcttcttcttttctcaccttccttctctcccttcagacaaagggacaaaaaatcnnnnnnnnnnnnnnnnnnnnnnnnnttccaaaaccatgtcccacagtcatctaagtttcgcctttgggattctaggtaacattgcctccttcgtgtgctttctggcaccactaccaacattttatagagtttgtaagaagaaatcaac

SEQ ID NO: 14928 - DNA, 243 bp, Glycine max
  Clone ID: 701157083H1
tatctcacgtactgataactttctatctcacgttctgataacaagttgagagctctgtgatgaacagactctataaataggatggagtgctttcagttttgtatcaccaaacccacttctctattcagaaaaaatacaccatctattcagagtgagtaagggtctggaagaacaaaactgtctttcaggttcatgtgtgcgccgcttttcatcaatttgcaatggctggaggtacgctcgtaa

SEQ ID NO: 14929 - DNA, 190 bp, Glycine max
  Clone ID: 701157085H1
gttgatggaggcttcagttctcctgcagcatatttacccataacaccactgcaccatcggaaatagtcacttctaataccaactggtgaagccaacaatatatcagtaatccagggggacaacggcctaataggtttcttctcttgctgtgtcaaagaattatgcccagatttcccaggttcactagttg

SEQ ID NO: 14930 - DNA, 237 bp, Glycine max
  Clone ID: 701157086H1
ggcgagagacacgaagagaggtccttggatagtagtacgtggagtacgttttcaggttcagccctttgttttactgttaacgtctccaaaatttggtttacaaaagcaaaacgccataagaatcagaaaaggaaacaaagaccactggttttgagtctgttatctgctgctttacctgatttagcttacaaacacacacctcgagctctgtgttgatcgtttgcagatcacagtgac

SEQ ID NO: 14931 - DNA, 238 bp, Glycine max
  Clone ID: 701157087H1
ggatcggattgaggtttcaatttgtcaacagaaaaacctaatgtctcatcgagactctgattccaagcgtcgccactccaagttcgatcgagaagcaagtcccaagagatatagaagggatagtaacagagtaacctcagatggaggagatcggagaaacccaccacatcattctaggcgtgaacccttcgatgctgctcccaagaaatcaaattcaaatgatcatcatgagaatccg

SEQ ID NO: 14932 - DNA, 239 bp, Glycine max
  unsure (1)..(239): unsure at all n locations; Clone ID: 701157088H1
cgttatcatattccaacatcacattttgcatgagtcattacatcatcatgcatatgctttcaacatactttttgttctacaaactgcataccttttgttttcatgttcgctcatgcatgatccttgcattttcctctgtaaaacaaaaacaaaaaaaagggaagcatgaaaattcacgatgcattctttgttgcatatattcggtaccatgagcccanccaggatgggtcataaacccc

SEQ ID NO: 14933 - DNA, 238 bp, Glycine max
  unsure (1)..(238): unsure at all n locations; Clone ID: 701157089H1
ggcagcgcttgatttgaggccgggcaagccccactcaaccaccacacctctcctcgttcacgctacccctttctgctcttcttctacctttcaagttttaaaagtataaagatggcagagacattcctatttacctcagagtcggtgaacgagggnnaccctgacaagctctgcgaccaaatctccgatgctgtcctcgacgcttgcctcgagcaggacccagacagcaaagttgcct

SEQ ID NO: 14934 - DNA, 124 bp, Glycine max
  unsure (1)..(124): unsure at all n locations; Clone ID: 701157090H1
tttactgattccattcagggaaatcaaggttgaatgtaccagcanctaaggatgatggcaccttgcaatcttatgtagggttcagggttcaacatgataatgccagaggccccatgaaaggagg

SEQ ID NO: 14935 - DNA, 236 bp, Glycine max
  unsure (1)..(236): unsure at all n locations; Clone ID: 701157091H1
gcagaagtccaagggaagctcatcctatataaagacctcagtctcgtattagattcgatcacaaagaaacagcaagaggttttgagggtgaaaccactcttaatttgaagccatggtctcgtttcacaaggcgctggccgagagtactccaaagccagaaattcatgcagaattcgaagcatcatcaaagaaaagaaagtgggaanagccattaaccgaagtttcttcaaggatca

SEQ ID NO: 14936 - DNA, 217 bp, Glycine max
  unsure (1)..(217): unsure at all n locations; Clone ID: 701157092H1
ggacgagaaacagttatgcanaaagagcaataagaacaaanagtgaaaggatgaggtagctagagagggtgggagtgagtgggcagagagaaggtttcaaagaaatggccacatgggtgaatggttggggcaaattactaccatttctggggatgttgatggctatgctaactcaaagtggaagcatggtggtaatcaaatttgctatgactgatgg

SEQ ID NO: 14937 - DNA, 236 bp, Glycine max
  Clone ID: 701157093H1
ggatcctttgtattctattcttcaagattcaggtactgcgtttcggaagcagacacagatggctcgtacgaagcaaaccgctcgtaagtccacaggaggaaaggctcctaggaagcagcttgcaaccaaggctgcgcgtaagtctgcaccaactactggtggtgtgaagaagccccaccgttatcgtcctggtaccgttgctcttccgtgagattaggaaataccagaagagtacc

SEQ ID NO: 14938 - DNA, 202 bp, Glycine max
  unsure (1)..(202): unsure at all n locations; Clone ID: 701157094H1
gggaaaagaaaaggaataattatacataaattttggatttcgcacgtagctagctacagaagacaaaggagccttgagtctcgagatcttgtccagatcggaacgcaaccgcaactgccaccgagattgctttgtgtgttatgggaagggaagttactggcatacaggttatggaaaagaagcnaaatggtgcnataaccgc

SEQ ID NO: 14939 - DNA, 239 bp, Glycine max
  Clone ID: 701157095H1
gagggtgagagagaattatcaaaggtgaaacgaagaagccctaactacgcacgcattcgtgagaaaactcaatattcgtcgctcatggcactctcttctcgtctcttttccaaatccaaattgatctatggcagtcaaatacttctacaaaaggagcatgctattccagttcgtcactttgctaaagagtctgcccctcctgcccttaagggagacgagatgctgaagaacatttttgt

SEQ ID NO: 14940 - DNA, 145 bp, Glycine max
  unsure (1)..(145): unsure at all n locations; Clone ID: 701157101H1
tattgantctcgtgtcaggagaaagtttcaaaggatgcaatttgatgcccaacattggttatggctcagacaagaaaacccgccattatctaccaaatgggttcaagaaatttgtcgtgcacaatgtgaaagacctggaattctc

SEQ ID NO: 14941 - DNA, 245 bp, Glycine max
  unsure (1)..(245): unsure at all n locations; Clone ID: 701157102H1
ganagaagaagcagaaagagaagcattagcaaaagcaaancagaactagtctaagcaganatggcctcttcagtgatggcatctgtggcccttcaaacctgccccttcactgttgagaagtcctcagttanaggccttccctccctctcaagggactcctcttcatcagagttgtggccagtggtggcaagaagatcaagactgacgagcttatggaattaatggtggcatggcttgaggggagg

SEQ ID NO: 14942 - DNA, 262 bp, Glycine max
  unsure (1)..(262): unsure at all n locations; Clone ID: 701157103H1
ggtgagagaagaagagatgggtagaggagaagatcgagaaggggtcgcagtagccgggggcttcttctggtcctacacagacgaaccccatgccacacgacgtcgtcagatcctctccaaataccctcaaatcaaacaactctttgggcccgaccactctggttttcttcaagattagtggagttgttctgcttcagcttggtacggtgctttatttcangangctgggtgggngaagatattttagtaggcatactttttt

SEQ ID NO: 14943 - DNA, 267 bp, Glycine max
  unsure (1)..(267): unsure at all n locations; Clone ID: 701157105H1
ggcatatccaaaggaacaaaaatattattaagatgatcaacattattggagcacttgttctactctttgcatttctcttcctcagttgtgtgtatgcacaagacacaacaacccttgtggctgcaatcataacttttgggtgattctgccgtggatgtagggaaaaatgantatctttccacccttttcnagggctggattacccccnttantgggggggacttngtnaaccaccaaccctacggggngttttnnantgggaaantt

SEQ ID NO: 14944 - DNA, 268 bp, Glycine max
  unsure (1)..(268): unsure at all n locations; Clone ID: 701157106H1
atggcatgcttataataactatttatttatagcacaacgagacacgtaaaactgatcccaatgatgtagtaatactgtgattaatccgattgattgtgatgaaattattaaatgtaataacgntggaatgtgttgttcgcttgtnttcttagacatggttacacgttcggactggccactttaagtttaaggaaactgagagattaggggattcctaaggcagcagagagcgaaataacgntgaganagtcccatgcttttttnagnt

SEQ ID NO: 14945 - DNA, 118 bp, Glycine max
  unsure (1)..(118): unsure at all n locations; Clone ID: 701157108H1
gggagcttttcacttgcatccacagaatcttcgtctctttctctttcttccttttcttggcccatatcactagtcagagtaatgtgttagattccacctccaactccngngtgtacat

SEQ ID NO: 14946 - DNA, 263 bp, Glycine max
  Clone ID: 701157109H1
gaacacgcggcttccgccggaggtgaaccgcgtgctgtacgttcggaaccttcccttcaacatcaccagcgaggagatgtacgacatctttggcaaatacggcgccattcgccagatccgcatcggcaccaacaaggacactcgcggaaccgctttcgtcgtctacgaggacatctacgacgccaaaaccgccgtcgaccacctctccggcttcaacgtcgccaaccgctacctcatcgttctctattatcaacaagcggagg

SEQ ID NO: 14947 - DNA, 253 bp, Glycine max
  unsure (1)..(253): unsure at all n locations; Clone ID: 701157111H1
tccctgggaagatacgagtagaagtaagattgattttgcaccgcacctgtcacttttcagccattgtctgatgttcatgtccgcatatattttggaaactgggttattttcatacgagaatttgatttcgaaacttcgcatanaaaatgggattaagaaacaagttgcagaccacgtgtcttgcctngaaaacaaagcactaaaaagggaccttggtcattcgggaatacctaacaatgagcaatgttgttat

SEQ ID NO: 14948 - DNA, 255 bp, Glycine max
  unsure (1)..(255): unsure at all n locations; Clone ID: 701157112H1
ggatgcataaaccacgatggatgaaaggtggtttttccactttataaatacccaattcttcagccactttgcttttattttctgatatatctccttcctgttctgctaagtggcnnnnnnnnnnnnnnnnnnnatttcaagggctgaaacatctatctttaactgtattctccctttgtttcctcaccagttgattcaggttgcaaacatggcttttccagacccatccatgtcagtttctccacagaggaagat

SEQ ID NO: 14949 - DNA, 255 bp, Glycine max
  unsure (1)..(255): unsure at all n locations; Clone ID: 701157113H1
ggaactcataatattcatcactagaagtgttggatgcatttctatttctaacnnnnnnnnnnnnnnnnnnnnnnnnnngagaaagaaaagaatggcaaagttaataaaattctttgagttgaacacaggggccaagattcctctgttgggttaggcacttggcaagctgagcctggtgttgtagccaaagctgtcacccacagccattctggttgggatacaggcatattgattgtgctcaagcgtataacaatc

SEQ ID NO: 14950 - DNA, 266 bp, Glycine max
  unsure (1)..(266): unsure at all n locations; Clone ID: 701157114H1
gagctcaaggtggagctaaaattaagagcccgggaaagaaaggatcaattcatctggtcgaaaaaaatgaagttgggaatggcgagaggggaagtttgtctaagggtctcagcaatactggttttggtattaacagcatgtttggttgctttagatacccaaaccaaggttgtgttcgtatctattgagaagaaggctacatacaaagactggaacgctctcaagatcttggtgtangttacatgtgcngcngctgggttanaatc

SEQ ID NO: 14951 - DNA, 264 bp, Glycine max
  unsure (1)..(264): unsure at all n locations; Clone ID: 701157116H1
gagaacagagtgtgataatagtaagacagagcacctactcactcgtaaatggcgaggaagaagatcagagagtaccactccaagaggctnctcaaggagcatctcaaacgtctcgccttctatcgacctccaaatcctctcagctcaggtgacagaatctacggatttcactgagancgacagaccagcatccatggctttcgtcaaccagattggtcgtcaagccagacatgctgtttcgggaancccggcaagagtgggcta

SEQ ID NO: 14952 - DNA, 193 bp, Glycine max
  unsure (1)..(193): unsure at all n locations; Clone ID: 701157118H1
gaattcaaaatatatcattcaattataagcatgggtttgtggaacacaacgaatgcagtgtcttgccgctttcacaagtttggtgatgaccaaaagaatctggtcttccaaggtgatgccacgtcttctttccaggggcatagaactcacaaagttagacngtgncangtnaccagtgggtggcaatgtgggg

SEQ ID NO: 14953 - DNA, 89 bp, Glycine max
  Clone ID: 701157119H1
gggaggaagaggaaaagaggattagagggtcgccacgtttagcaataaccaaaccctctctactcttttctcttctccttctcttcgct

SEQ ID NO: 14954 - DNA, 263 bp, Glycine max
  unsure (1)..(263): unsure at all n locations; Clone ID: 701157120H1
gattgggattactatagaaagggaattggcactcgtttggtggatatgtacaaggagcattatgagagcattgagatccccaagtttgttgatacagtaactcctcaatataagcctaaatttgatgccccnttgattgagcttaaagaagcnagagggagaaatcntctgaaggagtcctggagccgnttggnaaanggaattgctgaagtacnagagtgaagaaaaagctagttaccangacggcgangagtactttgaaa

SEQ ID NO: 14955 - DNA, 86 bp, Glycine max
  unsure (1)..(86): unsure at all n locations; Clone ID: 701157121H1
ctccacatcctcctcctttctccattttccagaaacaaanacccccctctgccacctncccctttcttccatntctgcactggcaa

SEQ ID NO: 14956 - DNA, 275 bp, Glycine max
  unsure (1)..(275): unsure at all n locations; Clone ID: 701157122H1
gattcatgagaagtgcaaaaacagtgtaacaaaaagaaaaagaaaaacaatatgaagttcactataatcacaatatttttctctttatttctacttgactttggttttgcacaacagggggatcttgacatatcaagatttggaggaaaaccanatacaaatatagggccaggctttcttaagtgctggactccaagcatgtngcattcaccaactgctgtccaaaattgtgattccagctggcacatacnaaatgggngcnattgtgncaaagg

SEQ ID NO: 14957 - DNA, 257 bp, Glycine max
  unsure (1)..(257): unsure at all n locations; Clone ID: 701157124H1
gaccacattccaaaacacaaacacatacattgtagtatcacttttgtctcggaatttgttcttttgagttatggcaagcttaaaggttgcatgtgtggttttgatgtgcatggctgtgatgagtgcaccaatgatggtgcaagccgtgtcatgcaatgatgttttctgtgaacctagcaccgtggcntatcttacctgatgcagggtggagatgttccagaatcgtgctgtagcggagtgaggaacattctggggtc

SEQ ID NO: 14958 - DNA, 260 bp, Glycine max
  Clone ID: 701157125H1
agggaaatattttgaagagatcagccaggacactgggaaatatgtctttggggttgaggacactttgaaggcactggagatgggtgctgtggaaacactcattgtatgggaaaatttggatattaataggtatgtgctgaaaaatggtatcactggtgagattgtcattaagcacttgaacaaggaacaagaggctaatcaaagcaacttccgtgatttggccacttctgcagagttggaagttcaggagaagatgccct

SEQ ID NO: 14959 - DNA, 255 bp, Glycine max
  Clone ID: 701157126H1
gattcaacggggaggtaccaaggggacaacgagttgcaactcgagcgagtcaacgtctactacaatgaagcgagttgcggaaggttcgtgcctagggcggtgctcatggatctggagccagggaccatggacagcgtcagatctggtccctacggtcagacttttccggccagataacttcgtctttggacagtccggcgccggaaacaactggggccaaaggtcatacaccgaaggcgctgagttgattgactc

SEQ ID NO: 14960 - DNA, 253 bp, Glycine max
  unsure (1)..(253): unsure at all n locations; Clone ID: 701157127H1
ttcgccaatgatacatgcgaaataaaagtgattttgccaatggtacaagcgaaacaacccaaggactcgccattgttactgacgaaataggtgcaactatgacataggggtctttagctgaatgtggggttacgtgctagatatagagagtagaagtgataagcaaatagggagcggtactgcacgagtggaacagacgggtctaaaccaaaaataattaaaatatagaacnaagatgattaattaaacntat

SEQ ID NO: 14961 - DNA, 252 bp, Glycine max
  Clone ID: 701157128H1
ttcttatcattgattcgaccactggtggttttgaagctggtatttccaaggatggacagactcgtgaacatgctctgctttcattcacccttggtgtgaaacagatgatttgctgctgtaacaaaatggatgctactacacccaagtattccaaggccaggtatgatgaaattgtgaaggaagtctcttcctacttgaagaaagtaggatacaaccctgacaagattcctttgttcctatctctggttttga

SEQ ID NO: 14962 - DNA, 255 bp, Glycine max
  unsure (1)..(255): unsure at all n locations; Clone ID: 701157130H1
ttgtcaaactctcacgatgatagatgacaaaaaacaccatagttcctttgccctaaataaagtatcgtatttgtagataaaatttattgcaaaataagttttgtatttagctttttaatgtaatattagttttttctcattaatatttctgataagtgacacttagttattcaatgtaatatgatgttgtaaaatccaatacctttatttatttcntaggtngnnncaatacanggncacacttatttgnaacat

SEQ ID NO: 14963 - DNA, 252 bp, Glycine max
  unsure (1)..(252): unsure at all n locations; Clone ID: 701157131H1
gcaagattttggcagtaaagaagggaatgcaggaagtgctgaaaatggtgaaaagcaatgaacaagttgttcctggagccaaatattgtgtcacaggttccacagggtatatcggctcatggctagtggaggctcttcttgaaaggggatgcacggttcatgtcactgttagagatcctgcaaagtcattgcaccttctgtctctgtggaagggtgtgaccaattgagattttccaagcggnttgcatgnag

SEQ ID NO: 14964 - DNA, 62 bp, Glycine max
  Clone ID: 701157133H1
ggaggaggtggtggcagtctagagtatgaagtagtgtaagcatgcatgggcatgataggagc

SEQ ID NO: 14965 - DNA, 261 bp, Glycine max
  unsure (1)..(261): unsure at all n locations; Clone ID: 701157134H1
ggaacaagattgaaatggcagctactattaacttgtccctgccccttttgtccctctgcaaaccccctaagtttctgaaacctccaacaacaagattttctgcaacatgaatacgtaaacagcctcagcctcagcctcagaagaagaatcactgaattcaaacacttgcagaaaaagaagagggatcgtgtgcggggtgccattgccagttggtccatgggnacctaccattgactcccagagcatcgcatcccagctctt

SEQ ID NO: 14966 - DNA, 273 bp, Glycine max
  unsure (1)..(273): unsure at all n locations; Clone ID: 701157135H1
aagagacgaagctttagtttacagatgtgtatggtggccatcctcgtcctttccctcaccctttccctcgccctcgagtggaggtgctcctacgaagcttccatcactgctccaatctagcatggcaaggcggatctgcactgggtggacatgctgggccagtgggctctggtttgtgggcnattgggntgaggggaaattagaagaaaaatttgaatttcaaaatttgtcgcaattttccccccaattttcgggngatcnnnaaatttgtcc

SEQ ID NO: 14967 - DNA, 86 bp, Glycine max
  Clone ID: 701157136H1
gatcgcatttcatagcacttcacccttcattaccaacacgaaagcatagccaaaaccttttttcgaagtctctgattttcctaatg

SEQ ID NO: 14968 - DNA, 95 bp, Glycine max
  unsure (1)..(95): unsure at all n locations; Clone ID: 701157137H1
ggaacttgatagatactgtgagtgtgtttnttcctcaatcaatctaattctncccatttctgcntccaatggcgtcttctctttncaccaaacgc

SEQ ID NO: 14969 - DNA, 269 bp, Glycine max
  unsure (1)..(269): unsure at all n locations; Clone ID: 701157138H1
gtactaaaaaagttgagtgtgaggtgtgaagtgaattttaacagtgataattggtaaatggggacccaaactatggggactcatggtggtggtggagacagtaatgggaaacagtcaccactccagcctctggtgcncnaaaactcaatgtacagtctcacacttgatgaggttcagaatcaattgggcgatttggggaagccgctaactagtatgaaccatngatgagctnctaaaaaatgtgtgggancncntnggcaagtcnaacc

SEQ ID NO: 14970 - DNA, 145 bp, Glycine max
  Clone ID: 701157139H1
gatgaggtcaaagagagggaaaacaagcaagaatacaacctactctgtgattggataaaacaacaacttggtgacaaggtggccaaagttcaaatctcaaattcgcttgagtttcatctccttgtgtggttgtatcagggaagtt

SEQ ID NO: 14971 - DNA, 255 bp, Glycine max
  Clone ID: 701157141H1
ggccataagaaagagcaagtcgaaaagttcatctctccctctctcttcacacatcccagccatgagcctcttcggtataggcagaaaccagagaacattccgcccgaaaaaaagtactccttctggaagtaagggagctcaacttagaaaacatattgatgccacgttgggtagtggaaatctgaggggaagcagtaaagctacctcctgggggaggatttaaatgagtggctagctgtcaacactgttgatttt

SEQ ID NO: 14972 - DNA, 254 bp, Glycine max
  unsure (1)..(254): unsure at all n locations; Clone ID: 701157142H1
gatagcataacaataacatacataaaccttgttatgttctgccgccaccagcaggatcgcgtattcgtgattgtttccgaaaacccttgtctctgaaatcaacaccaaaatcgtgaagtgtactaagcgaancattgcaggcgtgagaatggggaagaaagcaaaagggtcaaggaagggtaagaagcatggagggctaacatcagcancgaagagatcgaagatttcttcgagaaatcaacaaagggcgctct

SEQ ID NO: 14973 - DNA, 237 bp, Glycine max
  Clone ID: 701157143H1
tgtatggtttttgaaagaaatttttggagcaaaaatggaaatcaagaaagagaaggcattgatggtttaaattccatagcatttgacatatgtgattcattttctaatcattttctcaattcaatgcaaccaagtttcaactcaattgattaatcctaattcctaggtgattagtccttgattttgaagttaatttcataattccttaggtaactggacctagaactcaaaatatgg

SEQ ID NO: 14974 - DNA, 245 bp, Glycine max
  Clone ID: 701157144H1
ggagcctttctccctaaagatagtcctcttcgtaaggatccggcatactatgttcttaaagaagacgagtctccttgcatttttggttctattgaaaaacagaggtggtcttatgcctgtgcgaaacagttgattgagaggctgatttatgctgagggtgctgaaaatggcttggagttcacaattgtgaggcctttaactggattggacctcgaatggattcatcctggcatgatggtccaagt

SEQ ID NO: 14975 - DNA, 246 bp, Glycine max
  Clone ID: 701157145H1
ggtggcaatgactatggaaggtgaatggaaggtgtcgtatggaatttagagcatgattttagagaagtattaaagtgtatagtattcactttgacttgatctcactccccaaaatgggatacagacatagtaatagtatattatacactatgcatcttgcgtaggccaatttgcttgtaacttagtttctcccttgaccccattaagtcctgcatatgtatgcgtagttttttatagtttagtgag

SEQ ID NO: 14976 - DNA, 263 bp, Glycine max
  Clone ID: 701157146H1
ggaagaaaaaaggaagggtaagtaaattgggaatggtggtggtagtgccaggtgtctgtctgaggagaaaatagaataaaaagctatgaaattttggcacaaggtctgattgtagaattgaagaagatgactggggggggtatcactatgcaatcgacgccgggaagctcaggatacttggatttgtatccagagcggaagatgtcctttttcaaaaatccttacattctcggactggctgctgtcgccggcatcggtggtct

SEQ ID NO: 14977 - DNA, 253 bp, Glycine max
  unsure (1)..(253): unsure at all n locations; Clone ID: 701157147H1
ggaggagactgnnaaaacanannanaacaaaatggnagacacagtttctgcgttgaggnctttgatggtttctcactctccgccgctggatgccttagtggtgccctctgaagattatcacctgagcgaatatgtgtctgcacgagacaagcgccgcgaattcgcttccggcttcactggaagtgccgcnttggcacttataacaaaggaannagcactgctgtgnaccgtggacggtatttttncaggntga

SEQ ID NO: 14978 - DNA, 269 bp, Glycine max
  unsure (1)..(269): unsure at all n locations; Clone ID: 701157149H1
atcagtggtgccccccaggataacaacataatgctgtggaatgctgtcatatttggtcctgatgatactccatgggatggaggcacgttcaagttgacactccaatttactgaggactatccaaataaaccaccgactgtacgatttgtgtctcgcatgtttcatccaaatatttatgctgatggaagtatttggtttggatatattncaaaatcagtgggagtccnatttntgangtgggtgctatacccnaatctttcccaatcnat

SEQ ID NO: 14979 - DNA, 234 bp, Glycine max
  unsure (1)..(234): unsure at all n locations; Clone ID: 701157152H1
aagtagtgagaagaagggagagaatggaggaaaaggcaaaagctgagcagaagaagataggtatgaccgagacttggttgaagaagcaccgtctttctttacaatggagccatagacaccctcttattattagcattcgcgatggcaccatccaacaactggcttnccttcaaaacatgggctcgcacaggattacttgttcgttcgggcgtttgtccatttgtggctagtgtg

SEQ ID NO: 14980 - DNA, 259 bp, Glycine max
  unsure (1)..(259): unsure at all n locations; Clone ID: 701157153H1
gctcatcgccctggggggcgtttcacacaagcctcgaggtgatcatggtcagcctttagctttcagagctcctcctcatgccgttgctccatctacgcaatgcggttttggagttgctggagagtattagtatttgtcatggttgctagaggaggattggagcttagaaaggggtctcatgtctgagggccataaaatatgctaaaccataggtgagnaaaganagggtcacaggatatgttttactgcgacccaangg

SEQ ID NO: 14981 - DNA, 257 bp, Glycine max
  unsure (1)..(257): unsure at all n locations; Clone ID: 701157154H1
ggaaaaaangaanaggaacgaancaattcgcaagttgtctgttctgtgcccgcgggagcanacgacctgtcttcatcgccaaacaacctcaaaaacattcatcaacgttcactattaatccatccatcattaagtaagaaaataaggttcgatttttntatctttgtttttgnttctgatcatcatggaggtngccgagttctgggatgccctttcgcnaacaangcaaganaactnnaancnnaagttggntganc

SEQ ID NO: 14982 - DNA, 263 bp, Glycine max
  unsure (1)..(263): unsure at all n locations; Clone ID: 701157155H1
ggcggaagaccgacaagaaggaaacgttatcacaaattggattgttcctccgaacagtgaaccctcacctaacaatcagaacccaggatttggtgaaacgatgaacagcgcggnggaaaattggggttgccttggacttttccaaaggaagcaaaatcgctctgaaatgggctattgacaatcttatcagcaacggtgacactctctacatcgtccacaccaaaccttccggaggaagtgaatcaggaaatcttctctggtcc

SEQ ID NO: 14983 - DNA, 249 bp, Glycine max
  unsure (1)..(249): unsure at all n locations; Clone ID: 701157156H1
gatctacactcataaatcattacatggtcatagtctacacctaattagccaaacacaccacagcaccaaactagttggctcaattctctttgaatggctttggaggctttgaattcaccaacagcagccaccactcccttccgtggttaccnnnnnnnnnnnnnnnnnnnnnnccttcaactacgcgagccttggggcaagaggaaacgctccaaacgacttcgttttgagtcggagaagatattggct

SEQ ID NO: 14984 - DNA, 246 bp, Glycine max
  Clone ID: 701157157H1
gatttgaatcttatgtcactgtataagaaaataggcaaggcggaatacaaatgtccaaactggtttccatttgaagtgcgcagactgttagcgaaaatccttgaccccaacccaaataccaggatatccatggcaaaagttatggaaaattcgtggttcagaaaaggattcaaacctaaatctggtcaagtgaaaagagaggctgttgatgtgggcttagttgtttctgatcaaattttggctgtg

SEQ ID NO: 14985 - DNA, 248 bp, Glycine max
  unsure (1)..(248): unsure at all n locations; Clone ID: 701157158H1
ggggcaaagtaaaaaggaaggaggaagatgacttgagttgagctgttaagacagaaagctaaaacagaagaagcaaagatgatattgcagttcttcgtgctttcacagagaggcgataacatcgtctaccgcgactatcgtggtgaagctcaaaanggaagcgctgagacatttttccgaaaagtaaagttctggaaanaagatgctgagggagatgctccacctgtttttaatatagacggtgtgaa

SEQ ID NO: 14986 - DNA, 259 bp, Glycine max
  unsure (1)..(259): unsure at all n locations; Clone ID: 701157159H1
ccatggtaacaagcaagccagctgtatcaatttaggaaagcactcaacatgcatccattcaaatgcatcccattcaacatgtcccctagcaaaagtggaaaccactcaagatcagtcacaattttggtactgcagtcaagcatagtttgtgtttctacatatgcatgccttcaatacaatgagtcaagcatagaaatctagtgggttctggacaccaaacctgacctgctacctnttcatccattcactttcacctatt

SEQ ID NO: 14987 - DNA, 251 bp, Glycine max
  unsure (1)..(251): unsure at all n locations; Clone ID: 701157160H1
gaggaatcaaaggatgacccagttgactctgatgctgatgaggaagaggaagatgctgatgaagctggcaatgactccgatgctgaatcaaagacggaagctggggaanacaccaaggaagagggtgtacatgatgaactctaggaagtttgcaaaacggataaagagtgagcggaagttatattccggatagttatatttcagtcgtagtgttttttgttttccctagataagcagancgtggaaaactg

SEQ ID NO: 14988 - DNA, 251 bp, Glycine max
  unsure (1)..(251): unsure at all n locations; Clone ID: 701157161H1
ggtcttgcaggcgaagagatggccaccgttccagggcagcttcgtgtgggagatcgtcaagaaaaacaattccttcttggtcaagcagtttggaaggggcacccagagcgtcgaattcagcagagagagcaacaatctctacaacctcaattcgttcaagtactctggtttggcaaacaagaaaactgttactgttcagcctgagggcaaagatcaggctgtgttgttggcnacaaccaagacaaagaagc

SEQ ID NO: 14989 - DNA, 253 bp, Glycine max
  Clone ID: 701157163H1
cccgtttcatgatgcttgaattgcgttttgaagctgcaatgccatgacatgagaacatcaatgcccttttttttcttcttattttgtccaaaaatataatatacgtgtctactttgtaccatgtggtacttttatttatggcacatgataaaccctcgatcttcaaaagtactaaatcaatttgaattctgcacggcttgatcgttaactatgtgaaatcactgccaatatgcctttacaaagtgttgatgct

SEQ ID NO: 14990 - DNA, 260 bp, Glycine max
  Clone ID: 701157165H1
gagagaaagacccttttattattattgaagtccaaacaacatacaagcatggaacaagatcgaaggtttgagctcatcgaccaagcaattcagaagcttgtacacgacaacaccaacaaagtccaagaatccctccataacaatgatgctcaataccaacaccctctttcccaccttctctctgtctctcagttgaaaatgttgaaaggagaagaggtacttgagcaattcgaagcttctagttcttctgaggcggtggg

SEQ ID NO: 14991 - DNA, 220 bp, Glycine max
  unsure (1)..(220): unsure at all n locations; Clone ID: 701157166H1
agggtggttttgatttggagtgcagctatgcgattgtacagagagccaagcagcagttattgtataagcttcgtagatttgagaaactggcngagtggatccactgggaacntgagaaagatgcaggatcaagaggagggcgaggnngacacnttttggaanagggaaganggtcatgntgtnttaaaaccaagccncatgccaangaaatgactttagg

SEQ ID NO: 14992 - DNA, 66 bp, Glycine max
  unsure (1)..(66): unsure at all n locations; Clone ID: 701157168H1
tacggnctgcgagaagacgacaanngggtacggctgcgagaagacgacagaagggtcagtaacaat

SEQ ID NO: 14993 - DNA, 256 bp, Glycine max
  unsure (1)..(256): unsure at all n locations; Clone ID: 701157170H1
cccgtttcatgatgcttgaattgcgttttgaagctgcaatgccatgacatgagaacatcaatgcccttttttttcttcttattttgtccaaaaatataatatacgtgtctactttgtaccatgtggtactttatttatggcacatgataaaccctcgatcttcaaaagtactaaatcaantttganttctgcaanggcttgatcgttaactatggtgaaatcactggccaatnnggccttttanaaggggtggtng

SEQ ID NO: 14994 - DNA, 262 bp, Glycine max
  unsure (1)..(262): unsure at all n locations; Clone ID: 701157172H1
gaagagatatcacaagatgctgcatattngattcgaagaattccacctngnctctgggccactgcttntttngaggggcatangtttggtcatttgacngccnacatagttgaatcttgaaacacttggatattngaggcatctggacttccaataattcanatgatggnatgcattagaaggcagctaatgactggtnttaatgagcgccgggnggcccagtatgcagtggacatcaatantgtaccatctgncgagagng

SEQ ID NO: 14995 - DNA, 245 bp, Glycine max
  unsure (1)..(245): unsure at all n locations; Clone ID: 701157173H1
gatcgaagcaaaaaatgaaaacccaaagtgcttctctcctctgtctttttctctctcttgctatccttttggctagtggcactgctgcaagtgcaactccaagaagcgcagtgccaagccaccatgnttcaacattcaacagaagcctttttccttccacttttctcttggaattggttcttctgcttaccagggcagaaggagcagcaagtgtagatgggagaggaccaagcatatgggacact

SEQ ID NO: 14996 - DNA, 121 bp, Glycine max
  unsure (1)..(121): unsure at all n locations; Clone ID: 701157174H1
aaaggacaaaggagaagtcatggtaaggagtgcacactgattgattggcctaactctctaaaaacagtccccagtggagtcgccaattgtcgcaacctaccctttggngggagggcaacgc

SEQ ID NO: 14997 - DNA, 248 bp, Glycine max
  unsure (1)..(248): unsure at all n locations; Clone ID: 701157176H1
ggacgcaccattgacaattcgcagtttgttacctcactttgttttttttctctgcagtaatagannnnnnnnnnnnnnnnnnnnnnnnnnnnnnnnnnnnnnnnnnnnnnnnnnnngttgcagctagaaggctctcttctctctcctccttctccgtggcggcccaaccacgccgcttccgcttatgtctctcgaaacgcatcgttgatgaccgcagatccgatccttcctcccatccccttttccct

SEQ ID NO: 14998 - DNA, 247 bp, Glycine max
  Clone ID: 701157177H1
gagagcgagagagaatcgtaacaaaagcggtaaccggaataagttgtctctacgatttgagccatggcaacaacaacaccctcaaaccgatcatcagaggcgtttgctctcatggcaatcctcagcactctgctatgcacggcggtggcggcgaaggagagcgtgtacgagatactccccaagtacggcctcccgagcggtctgttaccggacaccgtcaccgactacacgctcgacgaggacgggc

SEQ ID NO: 14999 - DNA, 251 bp, Glycine max
  Clone ID: 701157178H1
ggtgggaaaatgagtttgtgagaaagaaagggaaggaactttagaagggaaatttaattcccttcttgttgttcccctaccacggccaattgatctcgcggtgagggacaataataattaaaaatcacacgaagaagcaaaaatcttaagtcaatacaacgcatgcaacacatgcacgtgggttttttgccaacaaacaaaggtgatcattgcagcaaacaacaacaacagaggactcaatattatcgtat

SEQ ID NO: 15000 - DNA, 239 bp, Glycine max
  unsure (1)..(239): unsure at all n locations; Clone ID: 701157179H1
agaagaatctaatcttaaccactgttagtcattgttgttatttcaattatgatctaagtaatttattgtgttttgcgttctgtttgtgaattcttattatgcttttttttttaaaatcattcaatataatatgtctcttccacctaattatcagttcaaatagtgataatttggtatacttaatgattagtacttggncccaatcctcgtccgcacaacacttaatgtatttctactat

SEQ ID NO: 15001 - DNA, 247 bp, Glycine max
  unsure (1)..(247): unsure at all n locations; Clone ID: 701157180H1
gaggcaaggatgcaggcaatgaccaagccaacttacactgcaattgttcaacatgccaagaatggaaaacctgccctcgtatttgtacctacaaggaaacatgtccgactgacagctgtgganctgattacatactcaggtgcagacagtggggagaagcgntttttattgcggtcagcagaagagcttgaacctttcttgacaagattactgacgaaatgttgaaagttactttacgtgaaggagt

SEQ ID NO: 15002 - DNA, 257 bp, Glycine max
  unsure (1)..(257): unsure at all n locations; Clone ID: 701157181H1
ggtttcggagaagaattaagcactcggttgcagaacagaacaaacttctttcactctttcgcttctgaatcttcaacaatggtgctcgaggcgacgatgatctgtatcgacaattctgaatggatgcgtaacggagattactctccttctncgattttcaagctcaagcagacgctggtcaatctcanatgcngtgctaaaacgcagtctaatccgggaaatacagtgggggntctcacaatgggctgggnaaggng

SEQ ID NO: 15003 - DNA, 269 bp, Glycine max
  unsure (1)..(269): unsure at all n locations; Clone ID: 701157182H1
ctggtctcatcaaagccctaaccactgatgttgaagatttttacaaccaatgtgatcctgagaaagagaatttgtgcttgtatgggctttcccagtgagcagtgggaagtaaatttacctgctgaagaagtaccaccagagcttcctgagcccgtgctgggcattaactttngctanggatggcatgcaagaaaaagactggctatctttagttgctgttcatagtgatgcatggttactgctatgcattctatttggagccagatttg

SEQ ID NO: 15004 - DNA, 275 bp, Glycine max
  unsure (1)..(275): unsure at all n locations; Clone ID: 701157183H1
agttgttgtctatctcttcttctctttgtgttttggctgtggacgtaaaataatggctctgtcttttggttttgggctcttgnnnnnnnnnnnnnnnnnnnnnnnnntatgtgttctccctccatcagaaacccncactttcatgatgagggccttctgcttcttctggtttgcgcatgantgcgtaccagtcgcattacccggttgcaaccctttctcagtcttctaagcnagcccgccaaaatccgtggtatcatgaaaccccgcaaagtctc

SEQ ID NO: 15005 - DNA, 253 bp, Glycine max
  unsure (1)..(253): unsure at all n locations; Clone ID: 701157184H1
ggaactccaaaacacaaacaaaaactcccgttttctctctctgtttttccatgggccatctgatcaaacttttcttgattctctctctcagtttttgctattctgagtgatgggtatgccctgcagctgttcccacacctcccacatcaactgaaaatcatcatcaccagcttcttcggccacaagtcttaattaccaacaaatttcccncaattatttcattcaancaaacccaccntaatnngcttttcca

SEQ ID NO: 15006 - DNA, 245 bp, Glycine max
  unsure (1)..(245): unsure at all n locations; Clone ID: 701157185H1
gactcgcagttgnattgttgaacaagggtttctctgtctgcttcttcactttctctcgtttcaatcgaaaccaaaacaaaaacatgggcagaaaattcttcgtcggtggcaactggaaatgcaatgggaccactgaggaggtaaagaagattgttactactttgaatgaggctaaagtccctggagaagatgtcgtngaagttgtgtgagccctcctttgtggtccttccnggtggtaaaaantt

SEQ ID NO: 15007 - DNA, 249 bp, Glycine max
  unsure (1)..(249): unsure at all n locations; Clone ID: 701157186H1
gacttcttccaatttcaaattcttcactcacccagtcgcgcttttctctgaatttcacgatgcgcacgtccagaaaagcagaaccctccaacaacgacgtcgtctcttcggaacacagaaactggagcaacatcttcaaatcgctggttcagatggtgtgcagcccagcagaaccagttcaactcctttcgcgagccgccaacaagnttctcgaagaccggcttngatgcagcacgagggnngggtcnt

SEQ ID NO: 15008 - DNA, 172 bp, Glycine max
  Clone ID: 701157191H1
gatgaaggctttgagaaaaaaagagcaaagaaattctgtctccccaaacaagacccaagattactcatttcgtgcagggacggttgctgctgcttagttgaaacttgtatggtgattagctattaagaggaaagaagaacgaaaaaaacagtttaaccgctacagccttctc

SEQ ID NO: 15009 - DNA, 243 bp, Glycine max
  Clone ID: 701157193H1
gtagatacaaacataccttgatgtaactaaatgagaaataagtaactaaaattaaacaaacaggaatacctcaaaaacaaacacatatgtccccacatccacattcttcggcaaagcatccaagacatgaaatccactttcttggtcataccggagctcctatcatagaggtcaccagagataagaaagaatcccaggaaactaaatgattgcatctgagggggaaaatattctcaagcctcc

SEQ ID NO: 15010 - DNA, 243 bp, Glycine max
  unsure (1)..(243): unsure at all n locations; Clone ID: 701157195H1
ggcatcaattcaaaatatatcatcaattataagcatgggtttgtggaacacaacgaatgcagtgtcttgccgctttcacaagtttggtgatgacnaaaagaatctggtcttccaaggtgatgccacgtcttcttccaggggcatagaactcacaaagttagacggtggaggaaaaccagtgggtggcagtgtngggagantgttatactcttctccagtgcacctttgggaaagctctacagt

SEQ ID NO: 15011 - DNA, 246 bp, Glycine max
  unsure (1)..(246): unsure at all n locations; Clone ID: 701157196H1
ganantaaaagtgactctcacccggggcatgttctgaagtctgcttctctgcttgtatgcaacggccacacacacccttagtcgcctgaaaacgattgttgttgcagggcaaacacaaagatccgggtcgacccgttcgcagattccgatccaaataanaaagatgaatattttcaggttagccngagacatgacccatttgggcagcgtcttgtcttctcncaagattccacaccatcaaattct

SEQ ID NO: 15012 - DNA, 249 bp, Glycine max
  Clone ID: 701157201H1
ggaggcggagacgaagaagtgaagagaagagaagagaagggatttggatctgaaaagagaagatggggggaggaatggaagcaaacaagaacaagttcatagaggattggggcactgccagagagaatctggagttcaatttccgttggactcgccgcaaccttgctcttgttggcatcttcggcatcgctattcccgtcctcgtctacaagggcatcgtccgtgaattccatatgcaagatgaagata

SEQ ID NO: 15013 - DNA, 249 bp, Glycine max
  Clone ID: 701157202H1
gggcgccgggcggagcggcaagcccctccactacaaaggctcgtccttccaccgcgtgatcccgaacttcatgtgccagggcggcgacttcaccgccggaaacggcaccggaggcgagtcgatctacggcgccaagttcgccgacgagaacttcgtgaagaagcacactggtcccggcatcctctccatggcgaacgccggtcccggaaccaacggatctcagttcttcatctgcacgacgaagacgga

SEQ ID NO: 15014 - DNA, 245 bp, Glycine max
  unsure (1)..(245): unsure at all n locations; Clone ID: 701157203H1
gatagtttccaatctcacatccccttattgttaaaccctttgtttgcacaagaaaagagttannnnnnnnnnnnnnnnnnnnnnngtcgcttcaacaatcagcaagaatcccctgcagtatcatatcctccagcactgtatgttagtgccccaccacctatgggttatccttccaaaggtgatcctacagctgtagggtacccccaacaaagagttccagaagaaaccacaagcaggggtgatgg

SEQ ID NO: 15015 - DNA, 172 bp, Glycine max; identical to SEQ ID NO: 15008
  Clone ID: 701157204H1

SEQ ID NO: 15016 - DNA, 266 bp, Glycine max
  unsure (1)..(266): unsure at all n locations; Clone ID: 701157205H1
agttgttgtctatctcttcttctctttgtgttttggctgtggacgtaaaataatggctctgtcttttggttttgggctcttgnnnnnnnnnnnnnnnnnnnnnnnnntatgtgttctccctccatcagaaacccacactttcatgatgaggccttctgcttcttctggtttgcgcatgatgcgtaccagtnnccattacctgttgcaccctttctcagtcttctaagccagcccgcaaaatccgtggtatcatgaaaccccgcaat

SEQ ID NO: 15017 - DNA, 253 bp, Glycine max
  unsure (1)..(253): unsure at all n locations; Clone ID: 701157208H1
ggcacaagtgagtttgttgatcgagataactagaaacagtgtgatgaaaatgaaggtccttgttttctccgttgctacaattttngtagcatggcaatgccatgcgtacgatatgttccctctccgaatgaacactggctatggtgcccgtactccggaggtgaaatgcgcaagttggaggcttgctgtggaagcacacaacatctttggctttgagaccattcctgaagagtgcgttgaagcaacaaaggaa

SEQ ID NO: 15018 - DNA, 243 bp, Glycine max
  Clone ID: 701157209H1
ggcacaagtttgttgagatagctagaagcaataagatgaaaatgaaagtgcttgttttgtttgttgctacagttttggtaacatatgaatgccatggctcagactaccagaagttccctctccaaatgaaaactgggtttggtgggcaatacagcaatgaggtggcatgtgccagttggaggcttggcgtggaagcaaacaacgtagtcaagtggcaaactgttcctgcagcttgcggagagt

SEQ ID NO: 15019 - DNA, 245 bp, Glycine max
  unsure (1)..(245): unsure at all n locations; Clone ID: 701157210H1
tgctgtcacaatacaccttaactgttggggctatgttgtataatttcaaaaggttttttgcggaggatgcagttccttgtgtaacttgcaactaaaacaactctattgatgatattcagaatgaaatagttcattattttaaaaaaggagttatgcaactcccattagtgtttctctaacataccctagatctcacatatgattaacatgangaggcaaaaagccatcaatggtagcatgcaata

SEQ ID NO: 15020 - DNA, 244 bp, Glycine max
  Clone ID: 701157211H1
gacattccaagtttccaacctaacaagaccttgtccatctaaaatatgagttccaaagcgtggcttgcgttccttctcctggcactggccatggtcgctgaaacatatgccacaatagatgaatttgcaactacgttagaagaatttgaccctattatctctgatggtgatgctgatctcattgtagatgacaatgagtttttgatgagttctgaatcaacacgtcggtcactgatgcatggtc

SEQ ID NO: 15021 - DNA, 243 bp, Glycine max
  Clone ID: 701157213H1
gggtctcgtgcaagtgtaacccaaaaccctagcggcgcctgctttcttcgttcgtcttttgcatcagccatcaggtgcgaactcaccctatggatttctatccaccgctggctgatccttcttctctaactctaatttattattttcatgatggagtctcaggtgaagcatgctcttgttgtcaaagttatgggtcgtactggatccagaggacaggtgactcaggttagagtgaagtttttg

SEQ ID NO: 15022 - DNA, 218 bp, Glycine max
  Clone ID: 701157214H1
cagtttcagacacagagggaggggttgggattggagggattgacgctgcgtctcttcctcttctctttcgatccatccctcattcctaatcctccaatccaaccacctcagcctcacactcacatatacacatatctgaacgcgtatcgtccctcctatggcttcaaagcgcatccttcaaggagctcaaggacttgcagaaagacccaccaacttct

SEQ ID NO: 15023 - DNA, 256 bp, Glycine max
  unsure (1)..(256): unsure at all n locations; Clone ID: 701157216H1
gggtttcctaggaaaaatcatgcccaggctcgtcaaatccatctctggtgacaggacacacgtgncttcgcttcgagaccccagagactatgagcagtcagatttcaattctcaattcatnnnnnnnnnnnnnnnnnnnnnnatatgtatatttaaattcgatgaaagatactcgtggtttagataattttcttaatctgattattaaatggatgatcaaaattaaactcttatattgcatacatatttgtgtgtt

SEQ ID NO: 15024 - DNA, 245 bp, Glycine max
  Clone ID: 701157217H1
ggctgaacaaaaatactagactattcatttggggtccaacttggaagaagactgcggaatcgcgtatcctgattggtcagacaagtgttatgctccggtgactccttccttcgccacccccactcaaattcaaccatggcgttgtacgtgctctcgcgtcgtttatcagctggatccaactcaaccacgctcctcgccttgcgttttgtttcctctaccagatcctactcctcttccttcaggga

SEQ ID NO: 15025 - DNA, 230 bp, Glycine max
  unsure (1)..(230): unsure at all n locations; Clone ID: 701157218H1
ggctncggtttttctttttcnctgttgaggttgtcattgggagcactcaacctaaactattcaagttgtgaaagcacatcacaagaaaattcgcaagcgatggatccgaagctaaaagaggtttctcagctcttcgatcgctttaaggcttcgtttatcaggaacgactttgatacctgttccaatctcctttctcagctaaaggtgttacttacaggtttcagaagcct

SEQ ID NO: 15026 - DNA, 241 bp, Glycine max
  Clone ID: 701157219H1
ggaagagtgaagagaatggctcccaagggtttaacctttctggctgtgttaatatgcgtttcagcactgtcactgagtccttctgttgcgggggaagggcaaaataatggccttgttatgaacttctacaaggaatcatgccctcaggctgaagacatcatcacagaacaagtcaagcttctctacaagcgccacaagaacactgctttctcctggctcaggaacatcttccatgactgtg

SEQ ID NO: 15027 - DNA, 234 bp, Glycine max
  Clone ID: 701157220H1
ggcatcaattcaaaatatatcatcaattataagcatgggtttgtggaacacaacgaatgtagtgtcttgccgctttcacaagtttggtgatgaccaaaagaatctggtcttccaaggtgatgccacgtcttcttccaggggcatagaactcacaaagttagacggtggaggaaaaccagtgggtggcagtgtggggagagtgttatactcttctccagtgcacctttgggaaag

SEQ ID NO: 15028 - DNA, 240 bp, Glycine max
  unsure (1)..(240): unsure at all n locations; Clone ID: 701157221H1
cagatgctttaaaaggagttaaaacttcaaagttttacaaaatcatattttattaataaaaggtttggcatacaaaagtaagcatagatgggaagaccgaagcagaagatgtaaccaagctggggaaatactagataaattgtgacctgattcaattaagacagaaaacaagagcatcaattaattttaaatttttaatcaaacaagtttaaaagaacatgatgttcaggctaganatgg

SEQ ID NO: 15029 - DNA, 155 bp, Glycine max
  Clone ID: 701157222H1
tgatgaaaaagtcaaaagaatcattgaactgaagaataaggtttgttctggtaatgatagcaattttgttgtcatcaaccaaaaaggaattgatcccccatctctggacctgcttgcaagggaaggaataattgcccttcggagagcaaagagga

SEQ ID NO: 15030 - DNA, 215 bp, Glycine max
  unsure (1)..(215): unsure at all n locations; Clone ID: 701157223H1
ggaatcacannggtgcctanatcgctgaggttatcatcttctnctncctctntcttagatctcttctttctctacgccgcacgccgaaaccatggccggaaaaggagagggtcctgctatcggaatcgatctcggaaccacctactccttgcgtcggtgtgtggcaacatnnccgngttgantnntcgccaacgaccaagggaacagnancacgc

SEQ ID NO: 15031 - DNA, 256 bp, Glycine max
  Clone ID: 701157224H1
agaacatgcctttaccaaaggtgcctactttattgggaagatgatatggagcaaaggctacaaggaactgctccaacttcttaaagatcatgaaaaggaattatctgctcttgaggttgatttatttggcagtggagaggactcagatgaagttcaaaaagctgcagaaaagttggaactagcagttagagtccacccagctcgtgatcatgctgatgctctatttcatgattacaaattgtttcttaatccaagc

SEQ ID NO: 15032 - DNA, 240 bp, Glycine max
  unsure (1)..(240): unsure at all n locations; Clone ID: 701157226H1
gagtgcacaagtgagtttgttgatcgagataactagaaacagtgtgatgaaaatgaaggtccttgttttcttcgttgctacaattttggtagcatggcaatgccatgcgtacgatatgttccctctccgaatgaacactggctatggtgcccgtactccncgaggtgaaatgcgcaagttggaggcttgctgtggaagcacacaacatctttggctttgagaccattcctgaagagtgcg

SEQ ID NO: 15033 - DNA, 242 bp, Glycine max
  Clone ID: 701157227H1
gacaagcacgaggcgcaaacgaacccaccaaacgagtattggaatcactctctttctgcaaaacgaaaatggcgcagaagaagaaagctagggtttccgacgacgaggaaatggaagtgcaacatgatcaaaccagcctttaccaggttcttggcgtggagagaacggcgtctcagcaggaaataaagaaggcgtactacaagttggcgttgcggcttcaccccgataagaaccctggtgat

SEQ ID NO: 15034 - DNA, 243 bp, Glycine max
  Clone ID: 701157228H1
ggagagaaagtgagagagaattacagagcattttccaacacgattacacgaccgaatcaaacccctctttctctccgaagctgcttttaatatcgtactggccttcgattgttctcctctttaatacatactgttctctcttcgatttgagggaacagtacaagagtctgagcatcggttaacccaactgcacaggtagtctccaaataatggagcctcatgatgagactggatgccaggctc

SEQ ID NO: 15035 - DNA, 241 bp, Glycine max
  Clone ID: 701157229H1
gacttattaattgtgttaagaaatttaagtgaggagctagagaatgatgatgaagtctgctatgtgtgcagtggtggttgtagcacttcttcttctggcggaggtggggcccatggttgaggctgtgacatgcaccccaacagagttgagtccgtgtcttccagcaatcacttccggtgctaaaccttccaatgcttgttgcacgaagctgaagcagcaaaaaccatgcttatgtggctac

SEQ ID NO: 15036 - DNA, 243 bp, Glycine max
  Clone ID: 701157230H1
ggatccaatcaagaatacaataacatagcatagagtgagaagtgagaagagaaaaatggcaatctccatacccagtagacaacttttcatagatggagagtggaaagtccctcttctcaacaatcggtttccgatcatcaaccccgctactgaagacatcatagggcatattccagccgctactaaggaagatgttgaccttgcggtggatgctgctaaaagagccttttcccataacaaagg

SEQ ID NO: 15037 - DNA, 242 bp, Glycine max
  unsure (1)..(242): unsure at all n locations; Clone ID: 701157231H1
gacctacggaacacaggaaaagcctccaaaaccaacccaccgttggcgcgatggctttcccctccaaaggcgatgacgngcaggttctggtgcagcgtaaatcgaatgcgagagttttgacactaaacaggactaaacagttgaatgccctctctttttatatggtttctcggctacttgaaattttttctgaagatgagaaagattctgatattaaattggttgtcgtgaagggaaatgga

SEQ ID NO: 15038 - DNA, 244 bp, Glycine max
  Clone ID: 701157232H1
gagagaaagagaaggaaccaacaacaaagagcagagagaaagagaggaccattccaaccctaatttctctgctaaaccctagttgtttggcatttcctctcttctccctcgtaaatcttctcccattccctccggtagctttccagatccaaataaatcatggttttctgggtttttggctacggttcactggtgtggaaccctggattcgattacgacgagaagattattggtttcatcaagg

SEQ ID NO: 15039 - DNA, 247 bp, Glycine max
  Clone ID: 701157233H1
ggtgatgtgagagaagaagagatgggtagaggagaagatcgagaaggggtcgcagtagccgggggcttcttctggtcctacacagacgaaccccatgccacacgacgtcgtcagatcctctccaaataccctcaaatcaaacaactctttggccccgaccactctgctttcttcaagattagtggagttgttctgcttcagcttggtacgggtgctttacttcacgatgctggctggctgaagatat

SEQ ID NO: 15040 - DNA, 225 bp, Glycine max
  unsure (1)..(225): unsure at all n locations; Clone ID: 701157235H1
ganagaagaagcagaaagagaagcattagcaaaagcnangnagaactagtctaagcagaaatggcctcttcagtgatggcatctgtggccctcaaacctgcccctttcactgttgagaagtcctcagttagaggccttccctccctctcaaggaactcctcttcattcagagttgtggccagtggtggcaagaagatcaagactgacgagccttatggaattaat

SEQ ID NO: 15041 - DNA, 241 bp, Glycine max
  Clone ID: 701157236H1
gggagaaggatggtgatcaaaagcgtaggtcttattctcctgcttatggcaatggtatcgaacagaatcaaagcaatggatatgctgagaaatctatgtacaagtctgaggctgatcgtagccagtggaagtcatcgagatcaccccctggatctagatcaagatctgctgaattgtcaccaaggcgtggaagatgaggttgcaggtagctggcaatgtgctgctggggcttctgtacatt

SEQ ID NO: 15042 - DNA, 238 bp, Glycine max
  Clone ID: 701157237H1
ggaattcagagtgtagaatccatttacatcagaagaattcgtcagtgaaagaatcgttttcttcagatctcacaattagagagcgatggaatatctagggattgatctaagctgcgccgttggatctctccgccacggccagttcccggagaaggattgcttgctccctctcatttccaaactcctcggctacgccatcgtcgccgcttccaccaccgtcaaacttccccagattatg

SEQ ID NO: 15043 - DNA, 237 bp, Glycine max
  Clone ID: 701157238H1
gagggaagagggaatgctatgaatctctcttatcttactcgcttccccgagcgtctcgttgctcctctttatgccacacttcccactacagctactactagtggaaataggcctgagaattttgcgattgaagggcgtaatttgaaattctcattcacgacgaggcaaacacaggatgtaccggttcttaaggattgttcgattcgcattccttgcgggcagttttggatgcttctt

SEQ ID NO: 15044 - DNA, 240 bp, Glycine max
  unsure (1)..(240): unsure at all n locations; Clone ID: 701157239H1
gggaatttggcagaaccaaaggactctatatacttattggataattgcccgcatgattggcttttcttgcgttgcaaggctgtggttcancccggaggtgctggaacaacagctgccgggctcaaagctgcttgcccaacaaccatagttccttttttcggcgatcaaccattttggggtgagagagtacatgttagaggagttggacctccacctatcccagttgatgagttttcgctt

SEQ ID NO: 15045 - DNA, 222 bp, Glycine max
  unsure (1)..(222): unsure at all n locations; Clone ID: 701157240H1
antggatgggtgtttgtttcaattcgatttcttctcttctctgcagaaaatcgaatcaatcgatggatgctttaatttcgtgcggttattgaggaaatttcatatccgcaagggcagagagtagaaggaagaagagagaaagagggaagctgctgctgaatcgtaatcgatcttatatctacactctaccatggnnnncngatgatgatttcacattttgtc

SEQ ID NO: 15046 - DNA, 239 bp, Glycine max
  Clone ID: 701157241H1
tttggatgaattggtcagaagacaaactcaactgcactccaaaaaggatggggatatgagtaggttgtaaatttgtaatagcgtgtttggttccacatcacagatttgttttttcacgcttagtcagaaactaatgcttacagctttttcacatcccaaacgtgatttctcacttctcaaaaaaattccaaacatgcacttagtgtcttgcttttggaatctacaaagtggtagaacaa

SEQ ID NO: 15047 - DNA, 201 bp, Glycine max
  unsure (1)..(201): unsure at all n locations; Clone ID: 701157242H1
gaaagtggganggtctaganagnnttcgctttctgctatganagatttctgngantgctctncttactagtnanancagaagntcgnggcatatntatgtaactgccgattgtganattngtgtngaggtggaggatattgatcatgtgtntctttgcactttggccagagntgtnnggtacttgctgcntccagctgatc

SEQ ID NO: 15048 - DNA, 246 bp, Glycine max
  unsure (1)..(246): unsure at all n locations; Clone ID: 701157243H1
gggagaaggatgttgatcaaaagcgtangtcttattctcctgcttatggcaatggtatcgaanagaatgcanancaatggatatgctgagaaatctatgtacaagtctgaggntgancgtngccagtggaagtnntcgagatctccccntggcatctanatcaangatcngnntgantgtcaccaaggngtggaagattaggttgnngntngctggcaantnncgtgnnggggttgtgcnannttt

SEQ ID NO: 15049 - DNA, 242 bp, Glycine max
  Clone ID: 701157244H1
gaccctataaaccaaattcgcaatcccgtgttatctacacttcccttcccattcctttcaatttggagaggaattcatttgaattagggtttctcttttcctttgtttcattatggacgctcagagggctttactcgacgaactcatgggtgcagcgcgcaacttgacggaggaagagagaaaggggtacaaggaagtgagttgggacgataaggaagtgtgtggattctacatggtgcgct

SEQ ID NO: 15050 - DNA, 238 bp, Glycine max
  Clone ID: 701157245H1
gacaacgagctgatagaggagacaagaaaagaaagagaaagagtttgcagagttgaattccgaaagaggaatggcgaagacgaggagcttcctatcccgattaacaataacctagaacccgtctatggcggaggttccgcactcgaagaagctcagcttcgtttcgataatttgaagtccaaattcgtcgaaatcttcggtcatcatcctcaaatcttcgctcgctcacctggaagag

SEQ ID NO: 15051 - DNA, 216 bp, Glycine max
  unsure (1)..(216): unsure at all n locations; Clone ID: 701157246H1
gataataacatatnggctgactcaagggtacacctaatcatggtctgctgtttcaagccccttgttcttcaggcctactgatgttgattgggcatttgaccccgattttgggatcttcacatatttgttttgcaaattcttttggtctcggtggtctaagaagcaaactttggtgacccaatggagcaaggagggagagcattgagtttgacacat

SEQ ID NO: 15052 - DNA, 250 bp, Glycine max
  Clone ID: 701157247H1
gtttcctcagtggaacaaacctcagaaaaaggattactagtgaaagtcattacatggaaggtgagaccagcatcattttgtgagcccaataaatttccattgatagtaaaaaatgtgtcaaaggatgggttgctatcatttccctcatcaaatttgttctagtgtttcataatttgatccaaagatatgacactgtagcaacagcttctctgttcatgattttacaaattaaatattgtttaaaagaaag

SEQ ID NO: 15053 - DNA, 160 bp, Glycine max
  unsure (1)..(160): unsure at all n locations; Clone ID: 701157248H1
gatgnacttccttcttcttctcttctttctcgtcattgtgagattctcanttgtttttnctcttcattggatgnacagattctagtacaaanccagaatcaactctgtaatcaattggtttgtgggggnttctgtgattttttaagganggnaaactnaa

SEQ ID NO: 15054 - DNA, 184 bp, Glycine max
  Clone ID: 701157249H1
gaacaccaaaaccaaaaccttgaaagctacttatcatgggcagcaccttggaatatcagactcaagaacaggcaccaaccaacctcaacactctctttcctcatgtttgggttcttctctatgtgtctctcgttttcctcactctggcaggagaggtttgggtgctgcgagagaccttgggagg

SEQ ID NO: 15055 - DNA, 159 bp, Glycine max
  unsure (1)..(159): unsure at all n locations; Clone ID: 701157250H1
agagttgtcacccattgctgagaggaggtaggagaagagaggagaaaggttacaaccatggcttatccaccactcagatgcatgtcatggctgccatatgtgatgccctcattccttccctcccactcaacaaggacnngncacaagaccaagctctct

SEQ ID NO: 15056 - DNA, 241 bp, Glycine max
  Clone ID: 701157251H1
gtagcttgcacctatgtaataatagagttaggcgtagcaaattaatagttgttaggacaaaggatgataaaagaccttgagtttttattcagacaaatcttttagcacacacatcatgtaaaatttcttgaacttattactcctccgaataacgagttcatgaaaatttggcaccttacagatatattttcattgaactttgtattcttagtagtgaattcatgaaaaaattgtttgtctc

SEQ ID NO: 15057 - DNA, 235 bp, Glycine max
  unsure (1)..(235): unsure at all n locations; Clone ID: 701157252H1
gggagcgaagtgaattgaaattgaagtgactcggggtgagttgactcagcaatggcggaagaggtgactcgggtgatggtggcggtgaacgagtcgagcattaagggataccctcatccttcgatcagcagcaaaggggctttcgactggaccatcaacnnnatcgttcgcgacaacgtctctgccttcaaccttctttttcntccacgttcaagtccccgatgaagatggtttt

SEQ ID NO: 15058 - DNA, 234 bp, Glycine max
  Clone ID: 701157253H1
tggctgttgagtggtctgttgatgaacagtacagattggaagaaggccttgccaaatatgctgatgagccaagtatcatgaggtatatcaaaattgctgccctgttgccagataaaactgttcgtgatgttgctttgaggtgtagatggttgacaagaaagcgaagaaaatcagaagaacacaatctggggaaaaaggtcaataatagaaaggataagccagtggaattagctt

SEQ ID NO: 15059 - DNA, 250 bp, Glycine max
  Clone ID: 701157254H1
ggaggaagaatgagtcaaccgacacagcagcgcctctatgatttcgccaaaatggctctcatcaacatcttcgttcacccctacgccacggtgtgcgacttgtactgtggagatgccgacgctgataaatgggcccacgcacaaattggccactatattggaattgatgcgccttcgtctgggatagaccaaatgcgagaaacttgggagactcacaggaaatcctacactgccgagttctttgagcttg

SEQ ID NO: 15060 - DNA, 242 bp, Glycine max; identical to SEQ ID NO: 9280
  Clone ID: 701157255H1

SEQ ID NO: 15061 - DNA, 239 bp, Glycine max
  Clone ID: 701157256H1
ggcccgcagataaaccaaattgcaagtcacacatacacgatatgataccccgtcctccctctcttcacttttgactattgacttcctcaaccgatccactcttctctctatctgcagatggcaagtgggtttggggaatcaacagggagatcacccccaagcccttcctacttcaacaacaataataacaatgatgctgccaattttgaatgcaacatttgctttgaattagcgcaaga

SEQ ID NO: 15062 - DNA, 219 bp, Glycine max
  Clone ID: 701157257H1
aagacgacagaagggtacggctgcgagaagacgacagaagggtacggctgcgagaagacgacagaagggtacggctgcgagaagacgacagaaggggtggatctttttggtgactctgttggtacaaactttatgccccatatcattacagtcaatactggtgaggacattacaatgaaggttatatctttttcccaacaaggaccccgtgcaatatgc

SEQ ID NO: 15063 - DNA, 234 bp, Glycine max
  Clone ID: 701157259H1
tgcgattgttaacatgggttctggagctgctattgttatcccttcggatcctctttatgctgtttatgctgccaccaaagcgtacatcgatcagttttcgagatgtctctatgttgaatacaagaggagtggaattgacgttcagtgtcaggttccattatatgtggcaaccaagatggcatcaatcaggaaatcttcattctttgttccatcaacagatggctatgccaaagc

SEQ ID NO: 15064 - DNA, 244 bp, Glycine max
  Clone ID: 701157260H1
gggaaggaggaatggcaggaatacacgattacacagagtagagagggaggggagggcaaagccaaaggggtttcgttgtgttgtgttactccgccagcggtagagatgagctcagccgataccttcaatgcgagttctgctgagtctgtcaaagaacctgttatagggtcaagtctagaagtaaaacaggatgatgctgaaataaaagctcaagttgatgccatgtgggaacaaatgaataaag

SEQ ID NO: 15065 - DNA, 244 bp, Glycine max
  unsure (1)..(244): unsure at all n locations; Clone ID: 701157261H1
gaagcttagtgaggtgcaagttaatttacttgaacaaaactttggaaatgaacgcaaacttgagtccgaaagaaaggataggctggcaatggagcttggtttggaccctcgacaagttgctgtgtggtttcaaaacagaagagcccgttggaagaacaaaaagttggaagaagagtactccagccttaaaaaaaaatcatgnagccaccttgcttgagaaatgttgcctggagagtgaggtgtt

SEQ ID NO: 15066 - DNA, 235 bp, Glycine max
  Clone ID: 701157262H1
cagatcaagcttctcatgctgagcctatttggaagcttggtggtttgcaggtgacttgtggaactatgggttcttcaacagcaactatcaaacttgttactagtgatggtagcacacatgttgcttgttctgttggtgtaggaccagtagattcagcttacaaggctattaatctcatagtgaaggaaaccgtaaaagtacttgaatactcaccaagtacagttacaggaggcac

SEQ ID NO: 15067 - DNA, 240 bp, Glycine max
  Clone ID: 701157263H1
gagaggagtgaagcagcagagggaggagcggcattaaaaatgcagatcttcgtgaaaaccctaacggggaagaccataatcctcgaggtcgaaagcagcgacaccattgacaatgtcaaggctaagattcaagacaaggaaggcatccctccggatcagcagcgtttgattttcgccggaaagcaacttgaagatggaaggaccttggccgattacaacatccagaaggaatcaaccctt

SEQ ID NO: 15068 - DNA, 240 bp, Glycine max
  Clone ID: 701157264H1
aacgatgtgagcgtgaagaggataaaggagtataggctgaaggtggagttctgagttgtccaatatctgcagtgatatcatgactgttattgatgaataccttattccctctagctcatctggtgaacctagtgtctttttctacaaaatgaagggggactattaccggtacctcgcagagttcaagtccggtgatgagagaaaagaggctgctgatcattccatgaaagcgtatcagtt

SEQ ID NO: 15069 - DNA, 244 bp, Glycine max
  Clone ID: 701157265H1
ggaacataaagtgaggaaaacgagtcaattcatcatttgccctctgctctgcttgttcaaattttaggagcggagaatccagagaaagagagatgtctggtatcgcccgtggacgtcttgccgaggagcgaaagtcatggcgcaaaaaccaccctcatggtttcgttgccaagcccgagactctccctgatgccaccgttaatttgatggtctggcattgcactattcctggcaaggctgggat

SEQ ID NO: 15070 - DNA, 262 bp, Glycine max
  unsure (1)..(262): unsure at all n locations; Clone ID: 701157266H1
ttattgaattattatttgtgaactcgtgttatcaactttaatacctcaattgttattttgaattttggagtataaatgaatatnttttaatcanataatatttgtnnnnnnnnnnnnnnnnnnnnattttgaattttttaatatatattaaggcaaacgaaatcaattattcatctacccgttaaattacttaaccccaatttactatctcaactagatcactgcccggagaccatgcttcataactttggacaatagtata

SEQ ID NO: 15071 - DNA, 236 bp, Glycine max
  Clone ID: 701157267H1
ggcacaagtttgttgagatagctagaagcaataagatgaaaatgaaagtgcttgttttgtttgttgctacagttttggtagcatatgaatgccatggctcagactaccagaagttccctctccaaatgaaaactgggtttggtgggcaatacagcaatgaggtggcatgtgccagttggaggcttggcgtggaagcaaacaacgtagtcaagtggcaaactgttcctgcagcttgc

SEQ ID NO: 15072 - DNA, 234 bp, Glycine max
  Clone ID: 701157268H1
aagagaccacaaagagacgatagtgaacggaataaaagatgcggcagaaaagtacgggtgcgtgtacgtgttctccttcgagaatatgaggaatcagaaattaaaggagttcagggaacagttgaaatcgaatagcaggttctttctgggttctaacaaagtaatgcaagttgctttaggtcgctccgcttcagatgagatcagacctggccttcacaaggtttcaaagctatt

SEQ ID NO: 15073 - DNA, 232 bp, Glycine max
  Clone ID: 701157269H1
gggggaacaaaagatttcttagatgaagatgatattcaaaaacttccctatttcaaggcaatgataaaagagacgttgagattgcacctaccaggtccactacttataccaagagaatcaactgaagagtgcattgtagatggctaccgaattccagccaagacaattgtgtatgtgaatgcttgggttattcaaagagaccctgaagtttggaaaaatcccgaagaatttt

SEQ ID NO: 15074 - DNA, 232 bp, Glycine max
  unsure (1)..(232): unsure at all n locations; Clone ID: 701157270H1
cggtgttatctcctttaacacattgcattgcacttgatcttgggagcaagagctaatcaaattgtgctcacagtcttcctttgtatttgaacccattccctttcacctataacagtcatttttcatcttctaaagctagatcacgaccttgctacactaaaagtctaaaccaacaacaatataatacaaaanaacacaataccacttgagtcagttaggattatgaattgaa

SEQ ID NO: 15075 - DNA, 234 bp, Glycine max
  Clone ID: 701157271H1
aacgatgtgagcgtgaagaggataaaggagtataggctgaaggtggagtctgagttgtccaatatctgcagtgatatcatgactgttattgatgaataccttattccctctagctcatctggtgaacctagtgtctttttctacaaaatgaagggggactattaccggtacctcgcagagttcaagtccggtgatgagagaaaagaggctgctgatcattccatgaaagcgtat

SEQ ID NO: 15076 - DNA, 232 bp, Glycine max
  Clone ID: 701157272H1
ggcacaagtttgttgagatagctagaagcaataagatgaaaatgaaagtgcttgttttgtttgttgctacagttttggtagcatatgaatgccatggctcagactaccagaagttccctctccaaatgaaaactgggtttggtgggcaatacagcaatgaggtggcatgtgccagttggaggcttggcgtggaagcaaacaacgtagtcaagtggcaaactgttcctgcagc

SEQ ID NO: 15077 - DNA, 241 bp, Glycine max
  Clone ID: 701157273H1
ggcgagaggactatggaatgaagtaactaacccaaacctagtccccttacttggctcgctggttggatttgattcgactcgattctcgctgatgaagaagcatttgatgcacagctatggcgttgccgtgattgtggtgttggctttgagtttgagtttgggtgcatcagcggaacaactcagttcacgagaatacgagaatctcggtttcaccggactcgccttgtgctccgactgcaac

SEQ ID NO: 15078 - DNA, 231 bp, Glycine max
  Clone ID: 701157274H1
ggagtacgatcaccaggagaaggaattgattcggttgaaacgcgaggccaagctgaaaggtggtttctatgtggatccagaggctaagctgttgtttattattcgcattcgtggtattaatgccatggaccccaaatcaaggaagatcctgcagttgttgcgattgagacagattttcaatggtgtatttctcaaagttaacgaagccacagtgaacatgctgcacagagt

SEQ ID NO: 15079 - DNA, 240 bp, Glycine max
  unsure (1)..(240): unsure at all n locations; Clone ID: 701157275H1
ggctgcgagatttagaaattgaatccctaatttcgaggttccgactcctgtggagtgatcatatagcgaattttgtgttagcgaatcaatttgcagagtaaggaataaggatgggaaaaaaccaagcctgcaaagctatgcagagagccaggctcggcggcgcctccgccggccccgacgaggttnaagacggcatggtggatggttcatttcattcaccagatggcgtgcagctcgttt

SEQ ID NO: 15080 - DNA, 231 bp, Glycine max
  unsure (1)..(231): unsure at all n locations; Clone ID: 701157276H1
agaggaaaagaggatnagagggtcgccacgtttagcaataaccaaaccctctactactcttttttcttctccttctcttcgctagggttttagcttcttcctcttcacttcgttctttttcgcctctacaatgagcaacgacaaggacacattcaacgtcgccgatctcacttctgctctcaacgaggacaatagagcagaccttgtcaatgctcttaagagcaagataca

SEQ ID NO: 15081 - DNA, 233 bp, Glycine max
  Clone ID: 701157278H1
gaggcccaaaaccaaaaaaagcttctttgtctctcgtgccgattctccaccactattcccttcaccccaatcacactttccggtagttgttgctattagtgtagaagatgagtacgctggatgcaacaagggctgaacttggtcttcttgttttatatttgggcaaggctgaagcaagggacaaaatatgcagggcaatacaatatggttccaaatttttgagtaatggggac

SEQ ID NO: 15082 - DNA, 236 bp, Glycine max
  Clone ID: 701157279H1
gagaggaaacatttgcaatggctaacaacgtcgttgttgttcttaaggtagctcctgtttctctgcctccatttcccataacaaacaatgctctcactttcaagagccaaagacacacacttcatctgaattgcttccaaaccaaaaacagaacaatcctcattcccttcttcctcgtcaatcctcagaaacaaagctagttgctctgtgttggcgtgtctccctcctgaatcctc

SEQ ID NO: 15083 - DNA, 235 bp, Glycine max
  unsure (1)..(235): unsure at all n locations; Clone ID: 701157280H1
gatcaattcanaatatatcatcaattataagcatgggtttgtngaanacaacgaatgcngtgtcttgccgctttcacaagtttggtgatgaccaaaagaatctggtcttccaaggtgatgccacgncttcttccaggggcatagaactcacaaagttagacggtggaggaaaaccagtgggtggcagtgtggggagagtgttatactcttctccantgcacctttgggaaagctc

SEQ ID NO: 15084 - DNA, 238 bp, Glycine max
  Clone ID: 701157282H1
gaagggagttggcacaaggaggataagattcttgatgacaaatgtgttcaacaaagatggaaaaaaggtcaggaaagagggtcaccgactgatacttcacatttggttggattgaattgggaaattttggtggtaaatgagccagttcttaatgccttctgcttacctgatgggaagatagttgtgttcactggtttgtttgatcatttaaaagagatgcagaaatagcaactattat

SEQ ID NO: 15085 - DNA, 229 bp, Glycine max
  Clone ID: 701157283H1
atctcagtttgcatggcaataacagggttgacgatgcatattggaattggatttaatgcagctgcaagcgtgagggtgagtaacgagttgggagctgagcatccaaagtctgcagcattctcagtgattgtagtgaatatgatatctttcataattgcggtgatagaagcagtggtggtccttgcactgcgtcgggttgtaagctatgcattcacagatggtgaaaccg

SEQ ID NO: 15086 - DNA, 234 bp, Glycine max
  Clone ID: 701157285H1
tgacatgatacttaattggaatatttatatttgtacgtacaaaacaaggtgccatggactgtagttacatcatcattttctgtccgttgtttaactagttggaggatacacttgactgtttaagagactgctcattctagagacttggttcgtgctattaaccccatttctttgatggtgggttgcagctgtagcaaaggggtacttagcttgattgtccaaatggtcatcctc

SEQ ID NO: 15087 - DNA, 230 bp, Glycine max
  unsure (1)..(230): unsure at all n locations; Clone ID: 701157286H1
ggggggagtttcttcttggatcttaccctcttgtttgctaatattctcattcttctgtctctgcttcttctccttgtaagttnnctcgctcgctctctccgcctgtttcttctccttgtggactgtaagagctgaactaagagatggggttgtctttcaccaagctttttagccggctctttgctaagaaagagatgcgtattctcatggtaggtcttgatgctgctggt

SEQ ID NO: 15088 - DNA, 230 bp, Glycine max
  Clone ID: 701157287H1
gttgtaaggaaagattttacagagatcatttcaatctcctgtctgagctttgatgttcctggctgacgaaccacttcaattatttaattattttgaaggtggaggctatacaggcttgtggaggccagatgactgttgatggtaggcgatttcgaacagggggtggtgtattgtggagtatcattaaggttcgcgaaccaaatgcttacaaagagataataaagaaagca

SEQ ID NO: 15089 - DNA, 235 bp, Glycine max
  unsure (1)..(235): unsure at all n locations; Clone ID: 701157288H1
ctataaacaatttgaagaatatccaaatgcactccaaattgcattgttcatggataacatgcagcacgtgaggnaggtgttcacctcttgtaatgatgtgctgcggaagaagcaattctgttacatgcttgcacgtcatggaattacttttgagcttgatgggaagatggtttcagacgatgaggacagagaattgttgcaggaaatcataaacaattctaagttaagtgaagga

SEQ ID NO: 15090 - DNA, 206 bp, Glycine max
  Clone ID: 701157289H1
aagtagtgagaagaagggagagaatggaggaaaaggcaaaagctgagcagaagaagataggtatgaccgagacttggttgaagaagcaccgtcttctttacaatggagccactagacaccctcttattattagcattcgcgatggcaccatcaacactgcttccttcaaaacatggctcgcacaggattacttgttcgttcgggcg

SEQ ID NO: 15091 - DNA, 231 bp, Glycine max
  unsure (1)..(231): unsure at all n locations; Clone ID: 701157290H1
atgactaatggtagagaggtcgtctagctctacgggacactgaaagttcagtatcaattttgaccctgaatagtcccagaagaatcaacttcaaaagttaaaaataattgtaataatcatatcaataatgcaaagaaaaaatgcaagagngngggagacatacagatagctaatcactagcaaccaccattaaacatcattgactactagaaaacaagaagagagatgccc

SEQ ID NO: 15092 - DNA, 231 bp, Glycine max
  unsure (1)..(231): unsure at all n locations; Clone ID: 701157291H1
atatatctaaatagattaatatattctttattttttgcatagtatccaaagcagttttatcattaagatgaaaggtggaaacctcatccattttttgtggagacaccaataaataaagcaagccaaaagagaaaaaaacaacacagcttgtgataataacagtttttaccatcncatgcnatggtggatttataaatcaagcataccaatcatccactgaaagaaagccag

SEQ ID NO: 15093 - DNA, 230 bp, Glycine max
  Clone ID: 701157292H1
gggagggggttgaacataatgaaccaaaatccagagtaaaaggcgaacagcggtgggagcgatgcgcatcatggttgctcccataaactaaatggctatgtctttacctcttcgtttctattcctcctcgtctttctctctcacttctcttggggttgtgagaaaagtgctcgggactcttacaacagatattgttcaaccaaggagtggaaattggcacttagcaaaaa

SEQ ID NO: 15094 - DNA, 235 bp, Glycine max
  Clone ID: 701157293H1
ggagagcgaggtggtgtccattgcagttttctaatgaaaacaacaaaatagacacctgttaagaaggaggacaacgatggtgctgccgctatttactgctttcattctctttgcttttattccgaatggattgttagcagttccttccaccgtcccggcattcctttggtcatcacattatgaactggcctctgaaaatatattgaaggaatctgtaaattaccaagtcatttct

SEQ ID NO: 15095 - DNA, 218 bp, Glycine max
  Clone ID: 701157294H1
aagacgacagaagggggcttcaaggttgtcgttaagacttaataagacaacccgaagaagcaaacgcagccgcagcgtagaggaagagtgctcaagaaagctcgttctcgatggcagaagggaacggtgacaaaactctgcgaaagatcgcagaagcattcaaggaccttgcaaacgttgtcaccgattctcagagcgcagaggttaaggttttcccc

SEQ ID NO: 15096 - DNA, 230 bp, Glycine max
  unsure (1)..(230): unsure at all n locations; Clone ID: 701157295H1
taatttgggaattattgctcccatcgccattggtttcattgtcggcgctaacattttgttgggtggggccttctctggagcggccatgaaccccgctgtgacatttgggcctgctgtcgtgagctggacctggaccaaccactggatctactgggccgggcctctcatcggtggtggaatcgctggccttgtttacgaggttgtcttatnnagcaacacccagggnnntt

SEQ ID NO: 15097 - DNA, 274 bp, Glycine max
  Clone ID: 701157301H1
gggcaagaagcttgtctctgccaccaaggagggtctcaaacttgaacgagagtgaagatgagaagaagaagcaagaggagttgaaggagaagtttgacaacctatgcaaggtgatcaaggatgttttgggtgacaaggttgagaaggttgtagtctctgaccgtgttgttgattcaccatgctgtctggtgactggagaatacggttggactgcaaacatggaaaggatcatgaaagctcaagccctaagggacaacagcatggcaggatacat

SEQ ID NO: 15098 - DNA, 272 bp, Glycine max
  unsure (1)..(272): unsure at all n locations; Clone ID: 701157302H1
gatcacaaccacatttgcaaaacaaaagccatagtttgttacttctcttcgccttttgtttgccaattgtcaccaaacaattcttgcttagctctcacaagcaagcattatcaacaatgaagaaaattgtgttaaaggtggacttacatgatgacaggatcaagcgaaaagctatgaagacagcatctggctttcgggggttcaatccagtttctgttgacattaatgacaagaaaatgaccttattgggggatgttgatccagtgagtgnc

SEQ ID NO: 15099 - DNA, 167 bp, Glycine max
  unsure (1)..(167): unsure at all n locations; Clone ID: 701157303H1
atggcaatcactgnacctcacacanataaanaaaaaaggtcattcacttaccacaattcttgtgtgggttgctctcccagtcaataaaatcttgaccaagtcntcccttcggttcttcccaattgttgtaaaattnntaaaaattactaatctaccngaaaaattaa

SEQ ID NO: 15100 - DNA, 272 bp, Glycine max
  Clone ID: 701157304H1
ggcacaagtgagtttgttgatcgagataactagaaacagtgtgatgaaaatgaaggtccttgttttcttcgttgctacaattttggtagcatggcaatgccatgcgtacgatatgttccctctccgaatgaacactggctatggtgcccgtactccggaggtgaaatgcgcaagttggaggcttgctgtggaagcacacaacatctttggctttgagaccattcctgaagagtgcgttgaagcaacaaaggaatacatccatggcgaacaat

SEQ ID NO: 15101 - DNA, 271 bp, Glycine max
  unsure (1)..(271): unsure at all n locations; Clone ID: 701157305H1
ggagaaagagaagcaagaacttgaggagganttggaagagtataggcagaaggtaatggaatatggaagcaaaagagcaactaagggtgcctgagaagaatgaaagatggaagtgtgagaagtagagactcctcctcttcttgcagcaatatgaactacactgatgagctatccattgatcttaaccgcgaggcacaggacgaagataatgtcttattcaaccatgaggagagcagccacattaatgcaactgatgacacagtttctaata

SEQ ID NO: 15102 - DNA, 269 bp, Glycine max
  unsure (1)..(269): unsure at all n locations; Clone ID: 701157306H1
tcgtgatgtgttggaattaaattttgatatagaaagcttagacaccaacaccaacttggtggttgaaaaggtttcaatttcaagtaacaaggatgttgctattgctaaggagggtagcgaaagttcaaccaataacaaactggcttcagttgggcatgcaatgcaagagaggcattgctcattgaggttctcttcacataacacaaaattcttattttccaagcgtancagggagccagagtttaactcttccattgtgaactagaagc

SEQ ID NO: 15103 - DNA, 272 bp, Glycine max
  unsure (1)..(272): unsure at all n locations; Clone ID: 701157307H1
ggaggagagaattacagagcattttccaacacgattacacgaccgaatcaaaccctctctttctctccgaagctgcgtttaatatcttactcgccttagattgttcttctctttcattatactgttctcttttcgatttgagggaacagtacaagagtgtgaggatcggttaacccaactgcacaggtagtcactaaaataatggagtctccacgatgagactggatgccaggctcctgaacgccccattctttgcataatattgtggctnc

SEQ ID NO: 15104 - DNA, 138 bp, Glycine max
  unsure (1)..(138): unsure at all n locations; Clone ID: 701157308H1
gacgnagaagaaggagcatgggccaagagcatggccatgaacagcagcngcagcagtgacagtggttaaactgctgcntcacctatatatttaaaaggtttatgggaccatagtaccgagggctgtgaccttaatttc

SEQ ID NO: 15105 - DNA, 51 bp, Glycine max
  Clone ID: 701157310H1
gggctttcatcaattacacccttcattcgcttcattcccacccttcacctg

SEQ ID NO: 15106 - DNA, 250 bp, Glycine max
  unsure (1)..(250): unsure at all n locations; Clone ID: 701157311H1
ggacagtatgatgangttgtggcggtggcaatctcantgtcactgctggctggctgcttctctcttgttttacagaaatagccttggctggctgccgataaggctccagtgctgttcgtncttcggcgattccaactcggacacgggtggactcgcctccggactcggtttccctataaatctcccaatggccgcaatttctttcacagatccatgggccgttgttccgatggtcgctcctcatcgacct

SEQ ID NO: 15107 - DNA, 275 bp, Glycine max
  unsure (1)..(275): unsure at all n locations; Clone ID: 701157314H1
ggaacaacagttgcgggagtacaatcganatcgggcgganatggtnnccatgacgtntccaccagnacctggtggtggggaagnggtnttcctaccgaatccgatgagcatcctnaagatctaccgccatgaaactctgggccaccaacgaggtccgtgccaaatccaagttcnggtattttntgagaaaattgangaaggttaagnaangcaatgggacaagtgcnagccatcaatgngatttttgagaagaatcctaccaagattaagantnt

SEQ ID NO: 15108 - DNA, 268 bp, Glycine max
  unsure (1)..(268): unsure at all n locations; Clone ID: 701157315H1
gacgatcgttaagtctcactctcaacacctttcgaaccctagcacagccccgtgccgtcaatgtcaaccaccctccgtccaccgcacgcgcaccctcgccaccaacatccagcaactcgcaccagaacagcacctcccatcgttgacgcacaaagtagcaggccgtcgcactcgcnccctcccgtccacagtngcagtcggaccagccaccagtnatgggaaanatgtgcaagantaaganacaagctggtgggcatggactccaaga

SEQ ID NO: 15109 - DNA, 269 bp, Glycine max
  unsure (1)..(269): unsure at all n locations; Clone ID: 701157316H1
ggatgcacaagtttgttgagatagctagaagcantaagatgaaaaatgaaagtgcttgttttgtttgttgctacagttttggtagcatatgaatgccatggctcagactaccagaagttccctctccaaatgaaaactgggtttggtgggcaatacagcaatgaganggcatgtgccagttggaggcttggcgtggaagcaaacaacgtagtcaagtggcaaaccgttcctgcagcttgcggagagtacatagctgactacgttctagg

SEQ ID NO: 15110 - DNA, 265 bp, Glycine max
  unsure (1)..(265): unsure at all n locations; Clone ID: 701157318H1
ggcagttcaattccaatatattccattctctctgtgtatttcnctacctctccttcaagatgcagatcttcgtcaagaccctcancggcaagaccatcacccttgaggtggaaagctctgacaccatcgacaacgtcaaggccaagatccaggacaaggaaggaatccccccggaccagcaacgtctnattttcgcnggnaagcaattgaggacggccgtacncttgctgactacaacattcagaaggagagtactcttcacctc

SEQ ID NO: 15111 - DNA, 249 bp, Glycine max
  Clone ID: 701157319H1
gtaaaagtaaagttttatattgtccttcaaagtacaagttttatattgtccctcagtcaattgatatatcacatatcaattgaatgatttctgattaaatggcaatattgacggtacatgatgattaaactctaattgtattattacttgattttgttataaacttatgaattttgcatacatgatggttacaggttcaagtgattactaggaaagtttgtgagccactagaggaagattcctttagac

SEQ ID NO: 15112 - DNA, 273 bp, Glycine max
  unsure (1)..(273): unsure at all n locations; Clone ID: 701157320H1
gctctacaattgattcgatgctctaatctatctctttttcttcttatttaaaatttcatcttcaatttcaattctctttctgtcaccgttcctcattcgcatggagaacgacactgccgccgccgttaacaataacaccaccgccaccgnccaccgctaaagcaggttctggaggagtgaaatcgaacaaccataacctagaagaggagcattccaatttgaatggcgaggagcacatggcagaacaagtggaggcagaagaagnggaagatc

SEQ ID NO: 15113 - DNA, 279 bp, Glycine max
  unsure (1)..(279): unsure at all n locations; Clone ID: 701157321H1
tacgatgatggtaattgangcccctcggcaatcagacttaatgatagaactaataaagaaattgaagcctaaagtggtggtgactggggattgctcattttgaggctgttactagttcagcttttgtgcaccttttagatacaacacgagacattggatctcgtcttttcttggacatatcagatcactttgagctatctagccttcctgggtcaaatggggtcctgaagtatctttcaggaactcctctgncctctcatggcagcaattatatgtgga

SEQ ID NO: 15114 - DNA, 268 bp, Glycine max
  Clone ID: 701157322H1
gagaacgaataggaaggaagagtaagaaccaagaacaaagaagagaagagtttcttcgtgaatatcagtattaagcggtgtgagcatttgttgatgtatagagcggagacatgggcgagtcaagcgactctgtctccattgacattgatttgattcctttaggaggaaaggaatgcacggtgaaaacaagtaaaggctccatgtctgtgcttgtttgtggggatcgagaaaaacccgctctaataacctacccagacgtggctctcaa

SEQ ID NO: 15115 - DNA, 224 bp, Glycine max
  unsure (1)..(224): unsure at all n locations; Clone ID: 701157323H1
gatccttcgtccagctagcaccacattcacctgagggcttccaaagcaatgggcttcccttggcagcatccactgctgctgcttcccttggcatgtcagaaatgcttggaaaccccatcaacttcagtggtgccacaaggccagctccatctgcttctagtcctgctcttcangactgtggctcttttctccaaaaagaggctacaaccaacactccaaaaaaa

SEQ ID NO: 15116 - DNA, 236 bp, Glycine max
  unsure (1)..(236): unsure at all n locations; Clone ID: 701157324H1
gataatggtgtttttgaagttcttgccacaaatggagatactcatcttggaggtgaggactttgatcagagaataatggagtacttccattanattgatcaagaaaaagcatggnaaaggatattagcaaggacaacagagcacttggccaagctgaggagagangctgagcgtgcaaagagggctctcagcagccagcaaccaggtccgcgtggaaattgnntcnctttnnggtg

SEQ ID NO: 15117 - DNA, 264 bp, Glycine max
  unsure (1)..(264): unsure at all n locations; Clone ID: 701157325H1
gttcgaggttctctacatggttgatgctattgacgagcatgctgttggtcagcttaaggaattgagggaaagaagttggtctctgctactaaggaaggcctgaaacttgacgagagcgaagacgaaaagaaaaagaaggaagaattgaaggagaaatttgagggtctctgccatgtgatcaaggatgtgttgggtgacaaggtggnnaaattgtggtgtctgatcgtgttgtggattctccttgcctgtctcgtgacctggtga

SEQ ID NO: 15118 - DNA, 269 bp, Glycine max
  unsure (1)..(269): unsure at all n locations; Clone ID: 701157327H1
ggtgggaaaatgagtttgtgaganaganagggaaggaatttagaangganatttaattccccttcttgttgttcccctacccacgggccaattgatctcgccggtgagggacaataataattaaaaatcacacgangaagcaaaaatcttaagtcattcaacgcatgncacacatgcacgtgggtttttgccaacaacanaggtgttcattgcangcaacaacaaccaacagagactcatattatcgtatggccatatgttcaccaacc

SEQ ID NO: 15119 - DNA, 62 bp, Glycine max
  unsure (1)..(62): unsure at all n locations; Clone ID: 701157328H1
ggtggccggacatncnatggaggttgtaganagcnaagattgtagccccacgaaagcccaaa

SEQ ID NO: 15120 - DNA, 270 bp, Glycine max
  unsure (1)..(270): unsure at all n locations; Clone ID: 701157330H1
gatcgaagcanaanatgaaaacccaaagtggcttctctcctctgccnttttctctctcttggctaatccttttgggctagtngcactggctgcaagtgcaactccaagaagcgcagtgccaagccaccatgtttcagcattcaacagaagcctttttccttccacttttctctttggaattggttcttctgcttaccaggcagaaggagcagcaagtgtagatgggagaggnccaagcatatgggacacctacactagacagcatactga

SEQ ID NO: 15121 - DNA, 278 bp, Glycine max
  unsure (1)..(278): unsure at all n locations; Clone ID: 701157331H1
ggagcgaagaagatattagggtttttgagtgcggtgcggcgatcctagcactctctttctgcaagctttcgccgacagcttcattcaccatgggctgagcaaaccgagaaggcttttttgaaacaacccaaaagtgtttctcagctcgaagaaaactgggaagggaaagagacccggaaagggtgggaaccgcttttggaaatccattgggcttnnntttaagactcccagggaagccatcgaaggaacctacattgacaagaagtgccccttcactg

SEQ ID NO: 15122 - DNA, 271 bp, Glycine max
  unsure (1)..(271): unsure at all n locations; Clone ID: 701157332H1
gacaactacatttacaanacaaaagccatagtttgttacttctctttcgccttttgctttgccaattgtcaccaaacaattcttgcttagctctcacaagcaagcattatcaacaatgaagaaaattgtgttaaaggtggacttacatgatgacaggatcaagcgaaaagctatgaagacagcatctggcctttcgggggttcaatcagtttctgttgacataatgacaagaaaatgacttattgggggatgttgatcccatgagtgcagt

SEQ ID NO: 15123 - DNA, 254 bp, Glycine max
  unsure (1)..(254): unsure at all n locations; Clone ID: 701157333H1
gctgncacaatgttgatgcattccctatcaangttatgtttggcatgtgctcaattttccttttggtggcttgtatcttgcaaaggcgactgatggtgatttcggataagccaaaaacagaagattggcaaatgaaggatagggataangagtcagaaccgttgaacatttaactggcttttgcctatgtttggaggaggcactgaactttagctacttcagtcttactaatgaagtttccgtctacgactgtg

SEQ ID NO: 15124 - DNA, 268 bp, Glycine max
  unsure (1)..(268): unsure at all n locations; Clone ID: 701157334H1
gatcaacgaatagagaaagaantanagcgaaatcaaattgttagagaaacgcgagttaatccagaaatcaaagaaagcgttacttgacgttcgtttgaacattaacaacattaacacaaatggcaacacgaactggtcgcttgtttcaaaatcaaaacctgaatgtccacgttaatggaggaggaactgtttctgagaaggctgatttaacaggacagaggaaagttagggctgggggaagaaaaccacttggagatctatccaatgc

SEQ ID NO: 15125 - DNA, 265 bp, Glycine max
  unsure (1)..(265): unsure at all n locations; Clone ID: 701157335H1
gagagcagagaagagaagagagtttcaagaatggggagcgaagangagaagggtgaattctacttgcgatactacgtgggccacaagggcaagttcgggcacgagtttctggagttcgagttcagacccgacggcaagctccgctacgcgaacaactccaactacaaaaacgacaccatcatccgcaaggaggtttacctcaaccctgccgttttgcgtgagtgccgccgtatcatcgccgagagcgaaatcatgaaggaagacg

SEQ ID NO: 15126 - DNA, 269 bp, Glycine max
  unsure (1)..(269): unsure at all n locations; Clone ID: 701157336H1
gnaangggaattgctgttgaagattccattttctccacatgggcttaaagcttaaccattcaagactaatccttttgcccaatggatggactccttctgtgggatgctataaagctatgggtcatgactatgtcaaccactactaccctgaaccaagtcttgtagagtcagatgaagagctgcaggcatggtggacagagattagaacccttggtcatgctgacaaaaagatgagccatggtggccacatcttaaaaccccaaaaaacc

SEQ ID NO: 15127 - DNA, 264 bp, Glycine max
  Clone ID: 701157338H1
ctatacaatacagcagcaactatatgtctggtaacacagactgaagtacatataggactcaaaacaacttatcgaggactaactcttaaaatcttaagcttttacataatgacatttgaatggcttcattacatctctaacatgccctttcaaacataaccaccctctaatttgagcttgactcgtatttaccatgtaaagtacaacgttttatttagaaaaatgaacaaggatcaaactctacattacttgatcaagattctc

SEQ ID NO: 15128 - DNA, 270 bp, Glycine max
  unsure (1)..(270): unsure at all n locations; Clone ID: 701157340H1
gggacatcgaagcaaaaaatgaaaacccaaagtgctttctnctcctctgtctttttctctcctcttgctatccttttgggctagtgngcactgctgcaagtgcaactcccaagaagcgcagtgccaagccaccatgtttcaacattcaacagaagcctttttccttccacttttctctttggaattggttcttctgcttaccaggcagaaggagcagnaagtgtagatgggagaggnccaagcatatgggacacctacnctaganagcnt

SEQ ID NO: 15129 - DNA, 261 bp, Glycine max
  unsure (1)..(261): unsure at all n locations; Clone ID: 701157341H1
gagtgtgaaataaccaaacaaaccataaaatggaaaaggtgaacaganntaatttgaagtaaacattgtattgttcttatttgtctcaccccatgctcaccatgctggccttgtcgcagaatgcagataatgcagctaccgtgtctaatncngatttgaggcacgtaaactacgcttttcatgccaaatgctgttgcctantgaagaatgagttgatgtttaacacttggcacatgtgaactngtatcaaaatacnnagtc

SEQ ID NO: 15130 - DNA, 272 bp, Glycine max
  unsure (1)..(272): unsure at all n locations; Clone ID: 701157342H1
gatgggcagcatgaaggtgcatcagttcacacgtggattctgctgggagcacgaacctttcctcacacttggctgcaagagattacgccctcttgctcccaagcttcccaacacccaaactaatactatccctaccaccccttctgttcctttcgatctcaagagcttcatcaggcctgaaagtggccccagaaaaccgtttcctcttgacgacagtaagaaggnatccactttcaccccaagggccaggttgaaacgcatccaggagggac

SEQ ID NO: 15131 - DNA, 137 bp, Glycine max
  Clone ID: 701157344H1
ggggatcatgaacagcttcatcaacgatatattcgcgaagcttgcgccaggaagcagcgcgtcttcacgaggtataacaagaagccgacccattacatccagggagatccagaccgctgtcaggttggtgctgcccg

SEQ ID NO: 15132 - DNA, 266 bp, Glycine max
  Clone ID: 701157345H1
gggagacttaaatgaaaaggaaataatcttaagtggaaccttctgcgaaattagcttccttcgtcccttgattgaagtataaattaggggtgttgaaattcaaagccatatccgtcattaaccaaatttgtgtttctccgattgcaagcaatggagtccttcaattccttcttcgattcaacaaaccgatggaattacgatactctcaaaaacttccgtcaaatttctccggtcgttcagaatcacctcaaacaggtttattttac

SEQ ID NO: 15133 - DNA, 279 bp, Glycine max
  unsure (1)..(279): unsure at all n locations; Clone ID: 701157346H1
ggagnacntcgacagacacagcacctctnggttgccgtggccaaccatcttcttccaaagttaatcnataattcgaaagagcannaaaggagtgactgtcccnggttggggcaattagggacggaaaaggagcaaacacgaaaatgtttttccacatagtactggagcgaaatatgcagcttcatccacgctatttggtcgtaaccttcgcgataatctcgtttccaagcttatgaaagacgtggaaggcacttgcagtggccgacatgggatttgtgg

SEQ ID NO: 15134 - DNA, 261 bp, Glycine max
  Clone ID: 701157351H1
gagagagcttccatctgatgatcctcgaagtttcaagcaacaagctgatatccattgtgcttattgtgatggtggctataagcaattagggttcccagttgagctagacttcaaagtccacttttcatggatatttttccctttccaccgttggtacctctatttctatgagcgaatcttgggtagcttgattgatgacccaacctttgcacttccgtattggaactgggacaatcctgatggtggcatggtatgccttcc

SEQ ID NO: 15135 - DNA, 259 bp, Glycine max
  unsure (1)..(259): unsure at all n locations; Clone ID: 701157352H1
ggtgtacatgatgaactctaggaagtttgcaaaacggataaagagtgagcggaagttatattccggaaagttatacctttttcagttgtagtgtttttttgtttttatttttccctagataagcagaccgtggaaaactgcaagtnaaagctggagcttttgcttcaatcacatttgactatttcactgattagaacaggcaaagatgtctcttttgggttgatctttttatgtttcgatcaattgaattttccatatg

SEQ ID NO: 15136 - DNA, 266 bp, Glycine max
  unsure (1)..(266): unsure at all n locations; Clone ID: 701157354H1
ggtgatttgagaggatcgtgaganggacggtagcagagattccgtgagttgcaaaaatgaaaacaattctttctgcagagaccatgaacatcccggacggcgtgagcgtcaaggttaatgccaaggtcatcgaagttgagggcccccgcggaaaattggtgcgagacttcaagcacttgaatctcgattttcagctcatcactgacgaaaacggtaaaaggaagctgaaggtggaggcctggttcggttctcggaaaacatccgcc

SEQ ID NO: 15137 - DNA, 261 bp, Glycine max
  unsure (1)..(261): unsure at all n locations; Clone ID: 701157355H1
ggcacaagtgagtttgttgatcgagataactagaaacagtgtgatgaaaatgaaggtccttgttttcttcgttgctacaattttggtagcatgggcaatgccatgcgtacgatatgttccctctccgaatgaacactggctatggtgcccgtatccggaggtgaaatgcgcaagttggaggcttgctgtggaagcacacaacatctttggctttgagaccattcctgaagagtgcgttgangcaacaaaggaatacatccc

SEQ ID NO: 15138 - DNA, 259 bp, Glycine max
  unsure (1)..(259): unsure at all n locations; Clone ID: 701157356H1
gggtgattttctatgttcacatggtgatggcatctgtatacctgcatcttatgatctatcaaggaacagcagganacttgcagaacctgtagggttnactgggaaaagggcaattatagacactgttagaggtcctgaaattgggcnaaggaatatgacatgtcaccaacgatgtgagtttagtcctaccaggactgagcgtgaggntaatctnaattncaattncaggtaagagcaacacaggatgagcgtttgtntc

SEQ ID NO: 15139 - DNA, 155 bp, Glycine max
  unsure (1)..(155): unsure at all n locations; Clone ID: 701157358H1
ggaagcaanacaacattacccaggtacagtttcanctaacttctgcatcacttggtagttgantggttctagtattcagtgctgntagaagatggaaactagtgaatggcatatcgagcgangatctagcttcggcttctgaatccccttnncac

SEQ ID NO: 15140 - DNA, 161 bp, Glycine max
  unsure (1)..(161): unsure at all n locations; Clone ID: 701157359H1
gggattttngattagagattgagagggaggnagtacgtngaaggcattttgagctatcgctcgcgcgaaaccanatctctttgggtntcttnattcctttatagtagccaagtgaagttgaagttgcaggtgtgtgtctcatggcgtctgtnattcctcga

SEQ ID NO: 15141 - DNA, 147 bp, Glycine max
  Clone ID: 701157360H1
ggcaaaagttagtagtagtgaagaaaatgaaagtcctcgttttctttgttgctatagttctagcagcatgggcattgccatgggctcagaccatgaccatgaccatggcaacacctaccaaattttcctctgagaatgaaaaactgg

SEQ ID NO: 15142 - DNA, 262 bp, Glycine max
  Clone ID: 701157362H1
gagcgaaacagagagtgatttcagtgagtgatcggtgttcacttgatctcatccataatcggtcagcgtcaattgaagaagatgccgatcagaaacatcgccgtcggaaggcctgaagaggcgactcaccccgacacgttgaaggcggctttggctgagttcatctcaaccttcatcttcgtgttcgccggctcaggctccggcatcgcctacaacaagctcaccgacaacggcgctgccacccctgccggcctcatctccg

SEQ ID NO: 15143 - DNA, 134 bp, Glycine max
  unsure (1)..(134): unsure at all n locations; Clone ID: 701157364H1
gaagaagaagaaggagcatgggcgcaagagcatggccatgacagcagcngcagcagtgaccagtgattaaactgctgcatcacctatatatttaaaaggtntatgggaccatagtagcgagggctgtgccttaa

SEQ ID NO: 15144 - DNA, 164 bp, Glycine max
  unsure (1)..(164): unsure at all n locations; Clone ID: 701157366H1
acacacaacggatattacccagggaagctggttaataccccccaatttcgaaaatggtgagcgtacttcgaccanaaaggatacgaatagaaaggtataggaaaaggagcagaggcagtgaccaaaaaaaanancnaaanaacaaaaaaannggggncccccnc

SEQ ID NO: 15145 - DNA, 240 bp, Glycine max
  unsure (1)..(240): unsure at all n locations; Clone ID: 701157367H1
gattgaggcaaatgnctgtncccaattcacaggcctcgatggaggaccacttgaagatgtttcagatggcaggtgcattgaaaagaaaagaacctgatggtggttggggggagggagccgagagattcggttacacgcaacattcatggcagtagtgtcatggctcttcaacgcaaatattcaagagcagctttttatggaaaatgtcgaaaaattggggatatttttgagtgttgagcc

SEQ ID NO: 15146 - DNA, 260 bp, Glycine max
  unsure (1)..(260): unsure at all n locations; Clone ID: 701157368H1
tcccaattgaaatgtgtattaattagtaaaattttcagatccacggtggtctaattaataactttatacaaagaagctcatgttaggacatgagtacaatatccatttaattactggttcaatattgagtgagagtgaaaactaatgtaagtaatgcaatctgatttgatgatgcatttgccagcagttatttgatatttaaagaaacnnaagtaaaacatttaaagaaaagtatttatttcatcaaatatatagactat

SEQ ID NO: 15147 - DNA, 259 bp, Glycine max
  Clone ID: 701157369H1
gactcactcaacaaaaactatcagtgaggtcagtggcactgggagaaaaccttggaatcaaaagggaactggtagagcaaggcatggttcattgcgtgggcctcagttcaggggtggtgccaccatgcatggccctaagccccgaagccatgctttcaaagtcaataagaaggttcggcgtctagggctgaagattgctttatcagctcgtgcagcagaaggaaagcttcttgtttttgaggatctggcggttcccaca

SEQ ID NO: 15148 - DNA, 258 bp, Glycine max
  unsure (1)..(258): unsure at all n locations; Clone ID: 701157370H1
gatcgcaattttttttttcttttttcttttaattttcctctnaagtggagcattcaggttccgttgggctttcaatctgtggctggattttgatttctctgcgtttaaaatggatccaaaaggaagcttatgtgctaaaaactgcacaaggacctcttccttaacttctcctgggaatggactacaaacaaatttgtcctctgatcctccctctttctatggggtcaggattgaatcacctttcaaagaattcatcca

SEQ ID NO: 15149 - DNA, 262 bp, Glycine max
  unsure (1)..(262): unsure at all n locations; Clone ID: 701157371H1
ggggaatgtactgtgcaacagaaatgggcggcaccaaccttgaatgtttttccttcttcttctctaagactaagactcgaattgccntctcttcttcactcgaagctcaaacaagcacgctttccgtttccgtcgtcctcgcttcaaaaccctaccttccgtcctgttatctgcaagagcctccgagtcacccacgttccacctaagaagcgttcctctaacaacagaaaccctaaaaacaacagcaaaaaagaacagtaag

SEQ ID NO: 15150 - DNA, 118 bp, Glycine max
  Clone ID: 701157372H1
ctcatgtcctcagtgacttgttcctctggtgaatgcttgttttcgagctttagcacatcagaactaggtatggaggcagtcgttcctccagcatgctgcttgtctgacaaagaatctg

SEQ ID NO: 15151 - DNA, 124 bp, Glycine max
  unsure (1)..(124): unsure at all n locations; Clone ID: 701157374H1
gaaacatttctcaccctcttcctccccactantacaattnacaatctgctaaaaacanaatatnatnataatnntantaanccaaaaccctctgtgccaggtcctaacccagattgttattgcc

SEQ ID NO: 15152 - DNA, 91 bp, Glycine max
  unsure (1)..(91): unsure at all n locations; Clone ID: 701157375H1
gatganaggtttgggaacacctcagagatcancagggatttggtaatagacagcaggatgtaatcacggaggacctactcctacgctggtc

SEQ ID NO: 15153 - DNA, 110 bp, Glycine max
  unsure (1)..(110): unsure at all n locations; Clone ID: 701157376H1
gatcgaagcaaaaaatgaaaaccccaaagtgcttctctcctctgtcttttctctctcttgctatccttttggctagtnggcactgctggcaagtgcaatcccaagaaagc

SEQ ID NO: 15154 - DNA, 256 bp, Glycine max
  unsure (1)..(256): unsure at all n locations; Clone ID: 701157377H1
tatacngatattggttnccttgcttgatgcaaaaacttgtgttgacaaancccggttgatagagtattctctccaagatgttggcatattacaggtaaggaaaatgtctgtttaagtttttatggttgaactcgtgtctgcattgagtgttcatgctcatggtaaactaatatggcaattccctgtgcacaattgcagggatgttgcttgaagctccatcatatacaaagaggcattgtttccttttcagtatcat

SEQ ID NO: 15155 - DNA, 262 bp, Glycine max
  unsure (1)..(262): unsure at all n locations; Clone ID: 701157378H1
tgcgccacgtcgctgaaaccctcaacatcgatttgggaggaacttctatattcacattggatggncctttgtatcgcaaatatggtcacgctttcgangctttcaaaataattgtgactgatcctgatactgttttaagtactctcactcgtgaagttaaggaagttggccctgatgggcaagaggtgactagtgtggtgccagctgtatcagaagaagtgaaggnctctcttgtgaagaatattagaagccgaatngcccc

SEQ ID NO: 15156 - DNA, 258 bp, Glycine max
  unsure (1)..(258): unsure at all n locations; Clone ID: 701157379H1
ggaacttctcacgttcatttctacacatcnctagctctgtcgttccgtcgttgacgangggcgttccggtgncnaaccctgaccctccgnnctctctttcttctctctctcttgtccatcgcttccgccaatgtcttcttcgaagagcgtttcgatgacgggtgggaaaatcgatgggttaaatcagattggaaaaaagatgagaacgtggctggggagtggaaccacacctctggtcaatggaatggggacgctaat

SEQ ID NO: 15157 - DNA, 260 bp, Glycine max
  Clone ID: 701157380H1
gaacagccacaaacactttccacttgtctccgaattagttatcttgagaaacattattccccattgctatatattatggctagcatgaaggttacatgggtggttgtgatcatgtgcatggccgtggtgggtgcaccgatgatggcgcaagcatgacatgcaatgatgtgacggtgaacatggcacagtgcctatcctacctgatgcagggaggaacaccttcaacactttgctgcagcggagtcaagaacattcttggc

SEQ ID NO: 15158 - DNA, 192 bp, Glycine max
  unsure (1)..(192): unsure at all n locations; Clone ID: 701157381H1
agagagagagaagtggatgatggaganagaggaagcgaaagaggtggttggtgtgagtgcgctgcacggtggtatgatcataacgatggacgangaagcagcgagtgtatagggacgggggaatcgtggttgancatgataaaatcaaagcaatcggacaatctgctgatatcctgcggagttttctgatgt

SEQ ID NO: 15159 - DNA, 256 bp, Glycine max
  Clone ID: 701157384H1
ggcagcagcacctttaaacgccgaagttcatccaatctccgaaggccttcaccggattgcaaccatgtcgaggagaaaggttagagagccaaaggaggaaaacgtgactctgggcccagctgttagagatggtgaacatgtttttggagtcgctcgcatctttgcctccttcaatgacaccttcattcatgtcactgatctgtctgggagggaaacacttgtccgcatcactggcgggatgaaggttaaagctgac

SEQ ID NO: 15160 - DNA, 258 bp, Glycine max
  unsure (1)..(258): unsure at all n locations; Clone ID: 701157385H1
gggagaagaattaagcactcggttgcagaacagaacaaacttctttcactctttcgcttctgaatcttcaacaatggtgctcgaggcgacgatgatctgtatcgacaattctgaatggatgcgtaacggagattactctccttctccgatttcaagctcaancagacgctgtcaatctcatatgcggtgctaaaacgcagtctaatccggaaaatacagtgggagttctcacaatggctgggaaaggcgttcgcgttt

SEQ ID NO: 15161 - DNA, 258 bp, Glycine max
  unsure (1)..(258): unsure at all n locations; Clone ID: 701157386H1
gatgtattgaagatcttatacccgtggatattggaaggtatctaaaggccctgattgcctgaaatatgcagcttgcctgaaattgaaggctcagatatatcagagagtatcatatatgggtaataaggtttaaacaaatatgatatttttgaacaaattgtgttcactgaacttcttttgtttggatggatcgtnncttgtcagatggcatgacttttggttattgctggttcttgattgagatattggttaaatacc

SEQ ID NO: 15162 - DNA, 258 bp, Glycine max
  unsure (1)..(258): unsure at all n locations; Clone ID: 701157387H1
ggcacaagtanagtttgttgatcgagataactagaaacagtgtgatgaaaatgaangtcccttgntttcttcggtgctacaattttggtagcatggcaatgccatgcgtacgatatgttccctctccgaatgaacactggctatggtgcccgtactccggaggtgaaatgcgcaagttggaggcttgctgtggaagcacacaacatctttggctttgagaccattcctgaagagtgcgttaaagcaacaaaggaatnc

SEQ ID NO: 15163 - DNA, 268 bp, Glycine max
  unsure (1)..(268): unsure at all n locations; Clone ID: 701157388H1
ggagctgggtttgttttcggccantgatcttcgattctcnctcttnttctctncgcgaaanccgtatcagcaatgtctggagaatcagccagcggctattcacaagggtcaagtcgatctcttagacttcattgactggtctggggttgaaatggcctcaatcaaagctcccacccantctcctcccccaatgctatccaaacagggttatagagaagacgatggtttgcntctggagagtgatgcagacgagcagcttttgctctat

SEQ ID NO: 15164 - DNA, 254 bp, Glycine max
  unsure (1)..(254): unsure at all n locations; Clone ID: 701157390H1
gatgcccaaattgtcatcataacataactccttcantattcaatnttccagaagcatggtaacttcaccaccagccatgcccaccaagggtcgtgttctcatcatcggagcaacaggtttcataggcaaatttgtggccgaggaaaagctcatctcagcacaccccacttatttgcttgttcggccaggacctcttaacccttccaaggatgcnattgttaaaaacttccaagacaaaggtgccatgtcattca

SEQ ID NO: 15165 - DNA, 254 bp, Glycine max
  unsure (1)..(254): unsure at all n locations; Clone ID: 701157392H1
gagaatagtgagagtgagagatggatcagtttttgtggagggtgttgcctttgcttacaatcctgtttcctttggagtggttcttctacttgctggattcttacacagcacagttatttcctctcataaagttaccgcggganaagtgcagccttcttccccatcgccacttctggatatccagncaaacgtattgtgaccccacaagggatcatttcaggttcagtggagataaatggatggggaaatatanc

SEQ ID NO: 15166 - DNA, 268 bp, Glycine max
  unsure (1)..(268): unsure at all n locations; Clone ID: 701157394H1
ggggcngcagaagaacaagtagttgagaactanagaagggagaagcgaatgngcttcctccaatgnatctcttccccccagctgttacccactgtncaaccgtgccggtgccggcatggttgctccattccactgggcctcaagtccatggctggcttccccaccagaaagaccaacaatgacattacctccattgctagcaacggtggaagagtgcaatgcatgcaggtgtggccaccagttggcaagaagaagtttgagactcttt

SEQ ID NO: 15167 - DNA, 266 bp, Glycine max
  unsure (1)..(266): unsure at all n locations; Clone ID: 701157396H1
gncggatagngctngagaaantaagaggttgcttcngcgacttccttcgaggacaccangggctcaaccanggggacagcctgtttcgangctccgggtgagaagctcatagaatccgctggcttcccctactgcatcaccaagtggcttctccatcgccgcttccaggttggctctgcccgaacaccggcttcatctcctacggcgaaatgctggagcagggccaactcatcacccaagccgtttccatcccgtccatggcganc

SEQ ID NO: 15168 - DNA, 229 bp, Glycine max
  Clone ID: 701157401H1
gaaaatgatagtgaccatgcctgagagagtggaagaaggagttgttgccttgaatcagcactttgtgcttgtacatggcataggtggaggaagttggtgctggtacaaaatccggtgccttatggagaattctggctataaggtctcatgcatagacctcaaaagtgctggaattgatcaatctgatgctgattccgtgctatcccttgatgattacaataaaaccact

SEQ ID NO: 15169 - DNA, 258 bp, Glycine max
  unsure (1)..(258): unsure at all n locations; Clone ID: 701157402H1
ggcatcaattcaaaatatatcatcaattataagcatgggtttgtggaacacaacgaatgcagtgtcttgccgctttcacaagtttggtgatgaccaaaagaatctggtcttccaaggtgatgccacgtcttcttccaggggcatagaactcacaaagttagacggtggaggnnaaccagtgggtggcagtgtggggagagtgttatactcttctccagtgcacctttgggaaagctctacagtggtcgcaagctttga

SEQ ID NO: 15170 - DNA, 252 bp, Glycine max
  unsure (1)..(252): unsure at all n locations; Clone ID: 701157403H1
gtattgtggaaggaagttttcattgaagacagtattaatgttggctgatcaaatgatcactagaatagaatatgtgcattctaaaggatttttacacagggatattaaacctgataactttctcatgggacttggtcgaaaggccaaccaggtttacatnattgattttgggcttgcaaaacgatatcgggattccactaccaatcgccacatcccttacagggagaacaaaaacttaacgggtactgctcg

SEQ ID NO: 15171 - DNA, 262 bp, Glycine max
  Clone ID: 701157404H1
ggaaattgaaatatagatcatcataagatattaagataaggacccatttcctcttctaagctatataatgctcgtctagcctacccactacaagcaacattgctaaccattctcttcactttaaagttacatagtttttcattgttttacttaatctacaatggctgcttcaacaatgactctctcttcatcatcattggctggccaagctatcaagcttgccccctccacccctgagcttggtgttggaagggttagcatg

SEQ ID NO: 15172 - DNA, 249 bp, Glycine max
  Clone ID: 701157405H1
aaggtgcatggatggatgaagtctttgctcgtagtcgtgtgttatcgcgcgatggtacctcagcaagattgcctgttgctcacatggtgtgcaatcaaactcctccagtaggaaacaagccaagtctaatgacattccgtgaggttgagattgttttccatgaatttggtcatgcacttcaacatatgcttactaagcaagatgagggtctggttgctggtattagagggatagagtgggatgctgttg

SEQ ID NO: 15173 - DNA, 244 bp, Glycine max
  unsure (1)..(244): unsure at all n locations; Clone ID: 701157406H1
gaanagttttaatattattgtattantagtagtaancatggggactttcaatcactatgtgattgttaagttcanagatggtgtggcagttgatgatctcattcaagggttggagaagatggtctttgggattgaccatgtcaagtcctttgaatggggaaaggacattgaaagtcatgatatgctaagacaaggtttcactcatgctttcttgatgacattcaatgggaaanaggagtcancg

SEQ ID NO: 15174 - DNA, 241 bp, Glycine max
  unsure (1)..(241): unsure at all n locations; Clone ID: 701157407H1
tactgatcctaatattttacctgttttaantccagacatantttntggatctaacatggatgtcgacaacgaggcttttcgacgcatggtccnattgacagatggtacattaagtaatgtgttattgccaagaatatctgatgttgatatacagacctctcgtcagcgtatttctgcattcctatctatgagtacagcatatgaattacttcctgagtcaggcaaggtttggaacttttac

SEQ ID NO: 15175 - DNA, 244 bp, Glycine max
  Clone ID: 701157408H1
gggagctgagctgagaaaacccccaaccccaacctcaaccttaacctctcctcactttcttttcaaccagagctatgattaagctttttaaagtaaaggaaaaacagagagaactggcagaaaatgcgagtggcggaccacccgttaagaagcaaagtgccggcgagttgcgtcttcacaaagatataagcgagctgaatctaccaaaatcatgtaccatgcaattccccaatggcaaagatga

SEQ ID NO: 15176 - DNA, 242 bp, Glycine max
  Clone ID: 701157409H1
gggcattggagagattggaacacccccccaaaacaagccccaattatggctctgaatctttgtatctcacctaactgtaaatgggtttcatctcctgcttccttagatagtgcatcttctttgagatcttcacttggttcttgttttggtaacataaacattgctagtgtgagtttaagcactagtagaagtttgagtttgaggaggagtgggagtgttagtgtaagatctagtttggagac

SEQ ID NO: 15177 - DNA, 245 bp, Glycine max
  Clone ID: 701157410H1
actctacacaacttatgtaaactatgtctttttcaagaaattttcattcagaagagtttataaaccagtataccttcaattatcaaacaagtataaatctttggttaagacttaagaggttttcctgcgacgtgaagatttatagtgcgaattagaataaaatgaatagccacaaaatctaatctaatttcccaagattgtctactttagcaaaatgcaacgtatcacaggctttttgcacctaa

SEQ ID NO: 15178 - DNA, 253 bp, Glycine max
  unsure (1)..(253): unsure at all n locations; Clone ID: 701157411H1
agnggatctctggagatgctttganngntctgtacaagtcatttgtgtcanagtacccaattgtnncaattgangatccatttgaaccaggatgactgggagcactangcnaagctaactgntgaggttggagccatgtacaaattgttggtgntgatctcttggttaccaaccccaagagggctcagaaggcaattgatactaaagcntgnaatgcncttctnctcaaggtnaaccanattggttctgtgnc

SEQ ID NO: 15179 - DNA, 248 bp, Glycine max
  unsure (1)..(248): unsure at all n locations; Clone ID: 701157412H1
tgttctgtttgtctatatcataggttcctggctgtatatttctctaaggactctcttgaatgggatgagggtggggggtggatgtgccaagtgtgagaaattgtgaatgtctaattttaattttgattgtctttgtagactatcacaccttttcgtggacacttggatttctcatttgcatctgcatggcatcctgatggccacatatttgctactnngaaccaagacaaaacatgtcgtgtttggga

SEQ ID NO: 15180 - DNA, 248 bp, Glycine max
  Clone ID: 701157413H1
gatccccaatcagagagaaaagttagggttcacaacttttccttttccttttgcttgcgaatctgaatcaaataatcaatcatccattcattattcatcatgtcgtcggcgaagaaaatcacgctgaagagttcggacggcgaggctttcgaggtggaggaggcggtggcacctggagtcgcagacgataaagcacatgatcgaggacgactgcgccgacagcggcatccctctgccgaacgtgacga

SEQ ID NO: 15181 - DNA, 225 bp, Glycine max
  Clone ID: 701157414H1
gggcacaagtgagtttgttgatcgagataactagaaacagtgtgatgaaaatgaaggtccttgttttcttcgttgctacaattttggtagcatggcaatgccatgcgtacgatatgttccctctccgaatgaacactggctatggtgcccgtactccggaggtgaaatgcgcaagttggaggcttgctgtggaagcacacaacatctttggctttgagaccatcc

SEQ ID NO: 15182 - DNA, 229 bp, Glycine max
  unsure (1)..(229): unsure at all n locations; Clone ID: 701157415H1
ggggagggcgtgggcgagggatatctatcttcattttcgtcgtcgttcattttttttattttttanttctgttttccattcgcttcttctctcagaaaagctcgccaatcgatcttgctctcttctacgcttttcgaattccttccgttccattatggacgcagattagattcacgttcacattcacttctcttcgtttgcttcaaccactctgcnctgctctgctcta

SEQ ID NO: 15183 - DNA, 252 bp, Glycine max
  unsure (1)..(252): unsure at all n locations; Clone ID: 701157416H1
ggatttggagtagaaagagaaagagaaagagaagagaataataatttttccgggaaaattcaagttccaatcggaatcggaatcggaatctgaaatgagtagtagggtttggtttctactattccttctgctgatctcgaaatgccatcaagtgtggggctcctacgcnggttccgctagctccatcgtcaacccttccaaggtcaaacagatttcctggaagccaagagctttcgtttatgaaggtttcct

SEQ ID NO: 15184 - DNA, 256 bp, Glycine max
  unsure (1)..(256): unsure at all n locations; Clone ID: 701157417H1
ggtgctggaagaagaatctgcccaggaagcacctttggtttagcaagtgttgagctgatacttgcatttttgttgtatcactttgattggaagcttccaaatggaatgaaaaatgaggactttgncatgactgaggaatttggagtgactgttgcaagaaaagatgatatatatttgatacctgtcacttataatccttcctgggaaatggtgcagacagtagggaagtgagtagtgcaagcaaagaaggctgagt

SEQ ID NO: 15185 - DNA, 251 bp, Glycine max
  Clone ID: 701157418H1
ggtctcgtggaagtgtaagcaagcaaaaccctagcggcgcctgctttctttgttcgtgttttgcatcaggatggagtctcaggtgaagcacgcacttgttgtcaaagttatgggtcgtactggatccagaggacaagtgacccaggttagagtgaagtttttggatgatcagaaccgtcacatcatgaggaatgtgaaaggacctgtgagagaaggagacattctcaccctactcgagtctgaaaggaagc

SEQ ID NO: 15186 - DNA, 263 bp, Glycine max
  Clone ID: 701157420H1
gagggtttttgagtgcggtgcggcgatcctagcactctcttctgcagctttcgccgacagcttcattcaccatggctgagcaaaccgagaaggcttttttgaaacaaccaaaagtgtttctcagctcgaagaaaactgggaagggaaagagacccggaaagggtgggaaccgcttttggaaatccattgggcttggatttaagactcccagggaagccatcgaaggaacctacattgacaagaagtgccccttcactggcaat

SEQ ID NO: 15187 - DNA, 207 bp, Glycine max
  Clone ID: 701157421H1
agggtggttttgatttggagtgcagctatgcgattgtacagagagccaagcagcagttattgtataagcttcgtagatttgagaaactggcggagttggatccagtggaacttgagaaaagaatgcaggatcaagaagaggacgaggatgacacatttatggaagaggaagatggtcatgatgagaaaaaccaagcatcatgcaaag

SEQ ID NO: 15188 - DNA, 242 bp, Glycine max
  Clone ID: 701157422H1
gacaagtttgttgagatagctagaagcaataagatgaaaatgaaagtgcttgttttgtttgttgctacagttttggtagcatatgaatgccatggctcagactaccagaagttccctctccaaatgaaaactgggtttggtgggcaatacagcaatgaggtggcatgtgccagttggaggcttggcgtggaagcaaacaacgtagtcaagtggcaaactgttcctgcagcttgcggagagta

SEQ ID NO: 15189 - DNA, 244 bp, Glycine max
  Clone ID: 701157424H1
gacacacagagcggttctcatattttggagaatccgaaaaacacgttaaagaaagtcccattcccactaccgaagcaaattaagaagatgaagcagcagagagtggagtttatgggcatgggcatgggcatgggcatgggcctgggccttttggtggtgatgatggcatgtgggtcggcgagtggtgcggatgatttggcaaccaagtgttcagcggtgattcagaaggtaataccgtgtttgg

SEQ ID NO: 15190 - DNA, 243 bp, Glycine max
  Clone ID: 701157425H1
ggaggaaacatttgcaatggctaacaacgtcgttgttgttcttaaggtagctcctgtttctctgcctccatttcccataacaaacaatgctctcactttcaagagccaaagacacacacttcatctgaattgcttccaaaccaaaaacagaacaacctcattcccttcttcctcgtcaatcctcagaaacaaagctagttgctctgtgttggcgtgtctccctcctgaatcctcaacctcatc

SEQ ID NO: 15191 - DNA, 230 bp, Glycine max
  unsure (1)..(230): unsure at all n locations; Clone ID: 701157426H1
gctctctttgactatgtctcgctttgtctctctcactctctctcacgctgtctctctcactctgtctctctctcancgctctcattctctctcgctcttccttaaacatgatcccagtcatttttaacatgcaaatattttgcatacacagtgtattaagatttgttgtgtcaatgtcatgcattgttatgagatatcaaagaaagattcaataagcccaatataactct

SEQ ID NO: 15192 - DNA, 244 bp, Glycine max
  Clone ID: 701157427H1
gacccaccacacaatctcaaccaaagccttgaccatgaaagcaacccctttagtgctcttcctcctcttcaccatagccaaagggcttcacaaccccaaatgtgatgctacccatcaacatgaccatgatggctcaaccctccaagtgttccatgtgttcagcccatgttccccatttaggccctcaaagccaatgtcatgggaagagagtgtcctaaagctacaagccaaggaccaagccagg

SEQ ID NO: 15193 - DNA, 240 bp, Glycine max
  Clone ID: 701157428H1
tgcatacatgatttatagtaaacgattaactaatttatcacaaccttatgattaaagtatcaatacatataaaagtacagaaacattgactaagtgtgaaatctaagacatgattaaaaatatattttccctgtatgaaatgtgcgtaaatttaatttactaaacaaaattctcaaaggagtacttaagagtagtgtgaaccgtgaagaggtggggaaaatgtagaagtgtgaagaacac

SEQ ID NO: 15194 - DNA, 195 bp, Glycine max
  unsure (1)..(195): unsure at all n locations; Clone ID: 701157429H1
tttgacaacatttttcgaatgttgcaaaaaatatattttgttgtagtgattactagttgaagtgtattcttcctttttctcaatcaaaatctttttctcaaacagatagatagatannntaaataaatttattataattcttgggatgatctactttaacgtatacatctaattaattcttaaagtcaatcaatt

SEQ ID NO: 15195 - DNA, 245 bp, Glycine max
  unsure (1)..(245): unsure at all n locations; Clone ID: 701157430H1
gacaactacatttacaaaacaaaagccatagtttgttacttctcttcgccttttgctttgcaattgtcaccaaacaattcttgcttagctctcacaagcaagcattatcaacaatgaagaaaattgtgttaaanctggacttacatgatgacaggatcaagcgaaaagctatgaagacagcatctggcctttcgggggttcaatcagtttctgttgacattaatgacaagaaaatgaccttattg

SEQ ID NO: 15196 - DNA, 233 bp, Glycine max
  unsure (1)..(233): unsure at all n locations; Clone ID: 701157431H1
gaganctggatgtgggaatannaaagcctaactgccatttacttgaaactactccatttgcttcttatagtgcttgtagggagggatagtgaaatgttgaagaatgttttctcattgtcatttctctactgttaataaaagttggcaagtgctaaattgctaaaaagcaggtgagacttttttagccaacaaatccttcacagtatttcatcgtttgctatcttcaagcatat

SEQ ID NO: 15197 - DNA, 267 bp, Glycine max
  unsure (1)..(267): unsure at all n locations; Clone ID: 701157432H1
gagatcaaacctgaaagatggtcatacagtgcttgatgtgggatgcggttggggatcgttggctctatacattgccaagaattacactaactgtagggttacaggaatctgcaattccacaactcaaaaggcttatattgaggagaagtgtagggatcttcagctgcaaaatttgaatattananttgctgatattagcacatttgaaatggagacttcttatgacagaatattttccatagaaatgtttgagcatatgaagaacta

SEQ ID NO: 15198 - DNA, 257 bp, Glycine max
  unsure (1)..(257): unsure at all n locations; Clone ID: 701157433H1
ggagcaatttgttatgactatttcagctggtggtttggttgttaatgacactactttacatcttgcagttcatactttaccatttggtggagttggtgagagtggantgggtgcataccatgggaaattctcatttgaagcttttagccacaaaaaagctgttctcnatcgcaaatttattggtgatgcnccagtaaggtacccaccatacacaaatacaaagangtgtttncggaaacctatnanggggggggnna

SEQ ID NO: 15199 - DNA, 248 bp, Glycine max
  unsure (1)..(248): unsure at all n locations; Clone ID: 701157434H1
gagtgcacaagtgagtttgttgatcgagataactagaaacagtgtgatgaaaatgaaggtccttgttttcttcgttgctacaattttggtagcatggcaatgccatgcgtacgatatgttccctctccgaatgaacactggctatggtgcccgtactccggangtgaaatgcgcaagttggaggcttgctgtggaagcacacaacatctttggcttganaccattcctgaagatgcgttgaagcnnac

SEQ ID NO: 15200 - DNA, 246 bp, Glycine max
  Clone ID: 701157436H1
tattccatttttctctctatctctcttcaatttttctaattcttgatctatgttattgattcaacggctaggaccctcagaatcagttaatgtttcttgcttcacctcacgcacacccctctcaagagtagtttctctgccttgcatgccaagactaaccctcttggactcaccttgaccaccctcagaaccccagcaattcatcaccataaaatccaacacaatgatcgaggccgtgatacgtac

SEQ ID NO: 15201 - DNA, 248 bp, Glycine max
  Clone ID: 701157437H1
gagtgagagagagagaaggcaagatgtcgaagagaggacgcggtggttcggcggggaacaagttccggatgtcgctgggtctgccggtggcggcgacggtgaactgcgccgacaatacgggggcgaagaacttctacatcatatcggtgaaagggatcaaagggcgtttgaaccgtctcccctcggcttgcgttggcgacatggtgatggccaccgtgaagaaggggaaacccgatctgaggaagaag

SEQ ID NO: 15202 - DNA, 244 bp, Glycine max
  Clone ID: 701157438H1
actctacacaacttatgtaaactatgtcttctcaagaaattttcattcagaagagtttataaaccagtataccttcaattatcaaacaagtataaatctttggttaagacttaagaggttttcctgcgacgtgaagatttatagtgcgaattagaataaaatgaatagccacaaaatctaatctaatttcccaagattgtctactttagcaaaatgcaacgtatcacaggctttttgcacctaa

SEQ ID NO: 15203 - DNA, 244 bp, Glycine max
  Clone ID: 701157439H1
ggggttttgggtcctagaacaacatatgtgcttgctctaaaagacttccctggcacccatgaatttcttctgcttgatgaaggaaaatggcagcatgtcaaagagaccacagaaattggtgaaggaaaactgttctccccaggaaatttgagagccacatctgacaaccccgattatgctaagttgatcgattactatgtcaatgaaaagtacacattgagatacactggaggaatggtgccag

SEQ ID NO: 15204 - DNA, 239 bp, Glycine max
  Clone ID: 701157440H1
cggtctcatttatacaagaagtggaggggttcagaattcggtctcacattggagaccactggatgtgggaggcatattcaagtggacagtatccagttaggagtgcatacagtttgcttagacaacaagtagtagaggaggcccaggttgaataatatagggagttatggaagcttaaagttccatctaaaatggctatattcgcttgaagattactcaaggacaaactaccaaccaga

SEQ ID NO: 15205 - DNA, 236 bp, Glycine max
  Clone ID: 701157441H1
gggatgcgagagttctgagaagaaaagagaagatcggtgagtgaggaagcaaatagcaatagcaccgccaccgtcaccactgccactgccactgccactagcaacagcagaatgggaaccttgggcagagttttctacgccgtcggattttggatccgcgagaccggccaagccatcgatcgcctcggctctcgtctccaaggcaactacctctttcaagaacagctgtctaggca

SEQ ID NO: 15206 - DNA, 235 bp, Glycine max
  Clone ID: 701157442H1
agaagagtccaagaaattgattgtggtggattttactgcttcttggtgcggtccatgccgtttcattgccccaattcttgcagagtttgctaaaaagttgccgaatgtcaccttcctcaaggtggatgtggatgaattggagactgtttccaaggagtggggaattgaggctatgccaaccttcctgttcttgaaagaaggcaagctggtggacaaggttgtgggtgccaagaaa

SEQ ID NO: 15207 - DNA, 234 bp, Glycine max
  Clone ID: 701157443H1
gatcacttattaattgtgttaagaaatttaagtgaggagctagagaatgatgatgaagtctgctatgtgtgcagtggtggttgtagcacttcttcttctggcggaggtggggcccatggctgaggctgtgacatgcaccccaacagagttgagtccgtgtcttccagcaatcacttccggtgctaaaccttccaatgcttgttgcacgaagctgaagcagcaaaaaccatgctt

SEQ ID NO: 15208 - DNA, 234 bp, Glycine max
  Clone ID: 701157444H1
gacacacagagcggttctcatattttggagaatccgaaaaacacgttaaagaaagtcccattcccactaccgaagcaaattaagaagatgaagcagcagagagtggagtttatgggcatgggcatgggcatgggcatgggcctgggccttttggtggtgatgatggcatgtgggtcggcgagtggtgcggatgatttggcaaccaagtgttcagcggtgattcagaaggtaata

SEQ ID NO: 15209 - DNA, 249 bp, Glycine max
  unsure (1)..(249): unsure at all n locations; Clone ID: 701157445H1
ggtcaagcctgccgagaaaaccctagttcgcttgcagtcacacaagaggccaatcctattcatagctcgagatgggtgaagaagtgaaggtagttgttccagaatcagtgttgaagaagcgcaagagggaggaggaatgggcgttggccaagaagcaagaactcgatgcnggggagaagaagagagccgagagccgcaaactcatctacaacagagctaagcagtacgctaaggagtacgatcaccagg

SEQ ID NO: 15210 - DNA, 240 bp, Glycine max
  Clone ID: 701157446H1
agcgtcggtttggtccttccgacaaattaagttactggtacaattgcgattccaactattggagtgctgtctacaagcgcacctatggtaaagatttcaaatttaaagctggttatgattcagagattcgccttggctgggcatctctttgggctggagatgaaggtgggaaagccaaaacagctccgatgcagatgaaagttcaattcatgctacaagtgccacaggacgacataaaat

SEQ ID NO: 15211 - DNA, 245 bp, Glycine max
  unsure (1)..(245): unsure at all n locations; Clone ID: 701157447H1
ggaagcactgagcagttgaggaaatgggaacccttgggagagcgatctacagcgttggtaactggattcgagaaactggacaggccattgatcgtctcggttcccgtcttcagggcggttactacttccaagagcagctctctaggcatcgaactctgatgaacatatttgataaggctcctgttgttgataaggatgtatttgttgcgccaagcgcntccgtcattggagacgttcaacttgga

SEQ ID NO: 15212 - DNA, 251 bp, Glycine max
  unsure (1)..(251): unsure at all n locations; Clone ID: 701157448H1
ggcnacaaactcggagatctcagattcgacgcgccaaaccatgtcgaaggcgcgtgtctacacagatgtcaatgtccttcgccctaaagagtattgggattacgagtctctcacccttcaatggggtgatcaagatgattatgaggttgtgcgaaaagtgggcagangggaaatatagtgaagtttttgaaggcataaatgtcaatagcaatgagcgctgtataatcaagattctgaaacctgtcaagaaa

SEQ ID NO: 15213 - DNA, 222 bp, Glycine max
  unsure (1)..(222): unsure at all n locations; Clone ID: 701157449H1
agggtggttttgatttggagtgcagctatgcgattgtacagagagccaagcagcagttattgtataagcttcgtagatttgagaaactggcggagttggatccagtggaacttgagaaaagaatgcaggatcnanaagaggacgaggatgacacatttatggaagaggaagatggtcatgatgagaaaaaccaagcatcatgcaaagaaaatgactttagaa

SEQ ID NO: 15214 - DNA, 244 bp, Glycine max
  unsure (1)..(244): unsure at all n locations; Clone ID: 701157451H1
agcgtcggtttggtccttccgacaaattaagttactggtacaattgcgattccaactattggagtgctgtctacaagcgcacctatggtaaagatttcantttaaagntggttatgattcagagattcgccttggctgggcatctctttgggctggagatgaaggtgggaaagccaaaacagctccgatgcagatgaaagttcaattcatgctacaagtgccacaggacgacataaaatcttct

SEQ ID NO: 15215 - DNA, 228 bp, Glycine max
  Clone ID: 701157452H1
aagacgacagaaggggacacacagagcggttctcatattttggagaatccgaaaaacacgttaaagaaagtcccattcccactaccgaagcaaattaagaagatgaagcagcagagagtggagtttatgggcatgggcatgggcatgggcatgggcctgggccttttggtggtgatgatggcatgtgggtcggcgagtggtgcggatgatttggcaaccaatgttcag

SEQ ID NO: 15216 - DNA, 56 bp, Glycine max
  Clone ID: 701157453H1
gaagtttgtgattactagaatcctgtactaccattttatttttttaatttacatgc

SEQ ID NO: 15217 - DNA, 236 bp, Glycine max
  Clone ID: 701157455H1
gggaagcaaaaaatgaaaacccaaagtgcttctctcctctgtctttttctctctcttgctatccttttggctagtggcactgctgcaagtgcaactccaagaagcgcagtgccaagccaccatgtttcaacattcaacagaagcctttttccttccacttttctctttggaattggttcttctgcttaccaggcagaaggagcagcaagtgtagatgggagaggaccaagcatatg

SEQ ID NO: 15218 - DNA, 236 bp, Glycine max
  Clone ID: 701157456H1
gcgcagtagaaactcgaaaggaatcagtgtttgtgtgtttcgcatattcttctccgttttagatttgagagagaagaagaaagagaaaattggataagatagttttcgttttcggcgaagaattgaaatctgagtgaacgatgggagtcccagcgttctaccgatggctggcggagaagtatccgatggtgattgtggacgcgatcgaagaggaagcggtcgtaatcgacggcgtt

SEQ ID NO: 15219 - DNA, 237 bp, Glycine max
  unsure (1)..(237): unsure at all n locations; Clone ID: 701157457H1
ggtgatttgagaggatcgtgagngggacggtagcagagattccgtgagttgcaaaaatgaaaacaattctttctgcagagaccatgaacatcccggacggcgtgagcgtcaaggttaatgccaaggtcatcgaagttgagggcccccgcggaaaattggtgcgagacttcaagcacttgaatctcgattttcagctcatcactgacgaaaacggtaaaaggaagctgaaggtggagg

SEQ ID NO: 15220 - DNA, 235 bp, Glycine max
  unsure (1)..(235): unsure at all n locations; Clone ID: 701157458H1
taagaagcagtttgttaccttcatgaagaggtttatcaagaatttgactcccaagctcgatgcagagcaacaggagttgtttaagaagcacatcgagggagcaactaaatacctgctctctaagattacagatttccaattttttgttggtgagagcatnggtgatgatgcttgcttggtctttgcctactacaaggacggcgctgctgatccaacattcctgtactttgcatat

SEQ ID NO: 15221 - DNA, 239 bp, Glycine max
  Clone ID: 701157459H1
ggccgacaccattaacaaacgggaagtgcggtttaggacctccatgatcaacaagaacatgctagagctactcagctagttactatttttttttatctgtaagaattgaagacaaattatctcttacatgctcaatagactaagctagctagtataagaaaaggccctccctgccctactcctttttcactacactttctcacccactacactacactatgtttccccagccatggatt

SEQ ID NO: 15222 - DNA, 234 bp, Glycine max
  Clone ID: 701157460H1
gaatgagcaattaatcaatcacattaagaaattaacttgctttcatagttttcacatatttgaagtgacgtcatgaatatggaggggcagaagaaaaacaagagggtggctgttttggtgggttgcaattaccccaacactagcaatgaattgcatggttgcataaacgatgtgttggcaatgaaggacacgctggagaagcgctttgggtttgatccctctaacattgagctt

SEQ ID NO: 15223 - DNA, 248 bp, Glycine max
  unsure (1)..(248): unsure at all n locations; Clone ID: 701157461H1
gaagaacaattatacgagaggtagtattctacctcttcacatccatatcacagaaaactattttggtttaatttgcctttccttttcaagggagctcattgaagagacaaaaaacaatggctgaaacaaagttgagcatgatgaaggacaaaagatggtcactccgtggantgactgctctcgtcacaggagccacccgaggcatagggcatgccattgttgaagaattggcagactttggagcaact

SEQ ID NO: 15224 - DNA, 247 bp, Glycine max
  Clone ID: 701157463H1
ggagtttcgtaagattaggtttttgttctctctctctctgattcgatcgatttcgattgttgaattcatcacatcacggagccttgacaacgatggtgctgccgctatttactgctttcattctctttgcttttattccgaatggattgttagcagttccttccaccgtcccggcattcctttggtcatcacattatgaactggcctctgaaaatatattgaaggaatctgtaaattaccaagtcat

SEQ ID NO: 15225 - DNA, 245 bp, Glycine max
  unsure (1)..(245): unsure at all n locations; Clone ID: 701157464H1
gggagatagcaatctcattctcattcatttcaatggcaactcaaggtcaagtcattacctgcaaagctngcggtgggcctgggaacccaacaagcccttaactgtccaagacgttcaggtggctccgtctcaggccgnngaggtccgtgtccaaatcctcttcaccgctctctgccacaccgatgcttnnncttggggnngnaaggntcccgaagtctcttcccctgtattcttggccatgaagc

SEQ ID NO: 15226 - DNA, 227 bp, Glycine max
  unsure (1)..(227): unsure at all n locations; Clone ID: 701157465H1
acaaaacaagtgttncgaatagattatcctaagtctttgggaatagtgctgcaatggcttcaagtcagaaggaggtgacccttttgggagctactggaagcccatttgtgtgcagggttcatattgccctcaagttgaagggagttcaatacaaatatgtcgaagaaaatttgaggaacaagagtgaactgcttctcaaatccaacccattcacaagaaggttccag

SEQ ID NO: 15227 - DNA, 244 bp, Glycine max
  Clone ID: 701157466H1
gcattaaaggctgttgggacagggttggggactgcagctgtaattgtaatggataaatctacggatgttgtggatgctattgcaaggctttcctacttctacaagcacgaaagttgtgggcagtgcacaccatgcagggagggaactggttggctttggacaatcatggaaagaatgaaagttgggaatgccaagctagaagaaattgatatgcttcaggagttgactaaacaaattgaagggc

SEQ ID NO: 15228 - DNA, 233 bp, Glycine max
  unsure (1)..(233): unsure at all n locations; Clone ID: 701157467H1
ccgcccaataatatctggcattaaattcagtggacaaattcaacttggttttatatggactgaccttcattgaatccgaaaaataacgtcttcttnnaagaagaaaacgacctcggtagaacagcttcttttaatttttanttactccatatactaaggacatgttaatttccaaaaggaaaaacaaaaaattaaaagagagagacaatgtacagtgtatgctaaaataattg

SEQ ID NO: 15229 - DNA, 247 bp, Glycine max
  unsure (1)..(247): unsure at all n locations; Clone ID: 701157468H1
gaagcttagtgaggtgcaagttaatttacttgaacaaaactttggaaatgaacgcaaacttgagtccgaaagaaaggataggctggcaatggagcttggtttggaccctcgacaagttgctgtgtggtttcanaacagaagagcccgttggaagaacaaaaagttggaagaagagtactccagccttaaaaaaaaatcatgaagccaccttgcttgagaaatgttgcctggagagtgaggtgttgaa

SEQ ID NO: 15230 - DNA, 246 bp, Glycine max; identical to SEQ ID NO: 11663
  Clone ID: 701157469H1

SEQ ID NO: 15231 - DNA, 114 bp, Glycine max
  Clone ID: 701157470H1
tcctccaacatcttgcagtgccggtcctgttcatgaagatatgtttcattggcaagctacaattatgggtcctccagacagtccctatgctggaggtgttttcctagtgactat

SEQ ID NO: 15232 - DNA, 237 bp, Glycine max
  Clone ID: 701157471H1
accatgacctattcaatttccttcgttttaattttccaacccataacaggttgtcatcatgtcagcatattccatcaaattcttgatcagatgttcatcttggttcatatttcatacctgttttgaagttatacgatgtcaattcctgctccttggttatacttatgtgatgtgtacaagagatataaatttggtctaatgataaaagaaaaaaaaatctcattcaaattcacacta

SEQ ID NO: 15233 - DNA, 230 bp, Glycine max
  Clone ID: 701157473H1
ggttttgattagggtttgtcattagcacttcttcttttcacactgccgctgcaacaatggcttcagagaagaaactttcgaacccaatgagggagataaaagtgcagaagctcgttctcaatatctctgttggcgagagtggagatcgtctcaccagagccgccaaggtgttggaacaacttagtggccaaaccccagtgttttccaaagcaaggtacactgttcgttcc

SEQ ID NO: 15234 - DNA, 225 bp, Glycine max
  unsure (1)..(225): unsure at all n locations; Clone ID: 701157474H1
ggtggcagttgtgtgacacagaaattaaanctagagcttcatagtttcttcttcttttctcaccttccttctctcccttcagacaaagggacaaaaaatcnnnnnnnnnnnnnnnnnnnnnnnnnttccaaaaccatgtcccacagtcatctaagtttcgcctttgggattctaggtaacattgcctccttcgtgtgctttctggcaccactaccaacattttat

SEQ ID NO: 15235 - DNA, 232 bp, Glycine max
  Clone ID: 701157475H1
gaaagcagaataaaaataaaacaaaaatctgagcatagttagttagcatcaggagaaaaagaaaaaacaaaaacagaaatgtcaatggcatgttcaatcccatgcatcaaaatcccgacatgttcttcttccccatcttgcacttcatcatcaacttcatcctattctttgaggttttcttcttccaagcctcacagtgtcactataaggaattctcaagctgaagggccta

SEQ ID NO: 15236 - DNA, 212 bp, Glycine max
  unsure (1)..(212): unsure at all n locations; Clone ID: 701157476H1
ggggggatcctgctangtcactattccacaaagttangcctacaatctcctttaagatgagggtaattctattgcggaagacagcacttccaagatcatttggagactgaaaatccccccaagagcaagtgctttctcttggagaattttcaagaacagacttcctactagggataacctaaggaggagacatgtggagctgccctcttata

SEQ ID NO: 15237 - DNA, 252 bp, Glycine max
  Clone ID: 701157478H1
gagatcaaacctgaaagatggtcatacagtgcttgatgtgggatgcggttggggatcgttggctctatacattgccaagaattacactaactgtagggttacaggaatctgcaattccacaactcaaaaggcttatattgaggagaagtgtagggatcttcagctgcaaaatttgaatattatagttgctgatattagcacatttgaaatggagacttcttatgacagaatattttccatagaaatgtttga

SEQ ID NO: 15238 - DNA, 237 bp, Glycine max
  Clone ID: 701157479H1
ggccttcaaaacttccacagtttccactcttcatttgtgttgtagtaacttgtgatgagcctgaaaagcagtgaaaggaaaattatgagaaggggtttcatgtgtcgctctcaggcttcaacagctgtgtgcatgagtactcgtgaccctcgatctgtagttgtgcctaagaagcttgaaagaagagtgtttcttgatgatacaaggttgatcaactatgccaagtactccaaactt

SEQ ID NO: 15239 - DNA, 240 bp, Glycine max
  Clone ID: 701157482H1
gtatgcattattggcctggtgaacaaacaagcaaaatgtccaaattagaccttattgctgaggtaatttttttaatgtttagttaaaatctcaagggcttatattatagacctggccaggcacaaacactttcccctcatactcaacgggaggaaatgggctcccacttgcaaaaatggcacgtccctgatggtgatacacaagaataagggaacaaagttaaacatttagtatggtcaa

SEQ ID NO: 15240 - DNA, 239 bp, Glycine max
  Clone ID: 701157483H1
ggcatcaattcaaaatatatcatcaattataagcatgggtttgtggaacacaacgaatgcagtgtcttgccgctttcacaagtttggtgatgaccaaaagaatctggtcttccaaggtgatgccacgtcttcttccaggggcatagaactcacaaagttagacggtggaggaaaaccagtgggtggcagtgtggggagagtgttatactcttctccagtgcacctttgggaaagctcta

SEQ ID NO: 15241 - DNA, 255 bp, Glycine max
  Clone ID: 701157485H1
acattgcagggccacggagcagtattatcgcaacaatcagacaaacttgggccgatttcttctccagttgtgcaccatcctcaagagaaatctacccaacaagagtgacatttccctggagattcgacagaatttcagtagtaaaattaaggatttcacgcaattaacttggcccaaagacacttgatatacacatgaaatttttagcaaaaagaaaacttaaatatctttttcatacatgcaatataatccatt

SEQ ID NO: 15242 - DNA, 231 bp, Glycine max
  unsure (1)..(231): unsure at all n locations; Clone ID: 701157487H1
gatctacactcataaatcattacatggtcatagtctacacctaattagccaaacacaccacagcaccaaactagttggctcaattctctttgaatggctttggaggctttgaattcaccaacagcagccaccactcccttccgtggttaccnnnnnnnnnnnnnnnnnnnnnnccttcacctacgcgagccttgggccaagagaaaacgctccaaacgacctcgttttgag

SEQ ID NO: 15243 - DNA, 211 bp, Glycine max
  unsure (1)..(211): unsure at all n locations; Clone ID: 701157488H1
ggagagagagaaaganaagtgtgtagttggtgaannttttgagaagaatatggaacgaagtggtggaatggtaacggggtcgcatgaaaggaacgaacttgttagagttagacacggttctgacagtgggtctaaacccttgaggaatttaaatggtcagatttgtcaaatatgtggtgacaccattggattaacggctactggtgacctc

SEQ ID NO: 15244 - DNA, 226 bp, Glycine max
  Clone ID: 701157490H1
gaccacattccaaaacacaaacacatacattgtagtagcacttttgtctcggaatttgttcttttgagttatggcaagcttaaaggttgcatgtgtggttttgatgtgcatggctgtgatgagtgcaccaatgatggtgcaagccgtgtcatgcaatgatgtttctgtgaacctagcaccgtgcctatcttacctgatgcagggtggagatgttccagaatcgtgc

SEQ ID NO: 15245 - DNA, 209 bp, Glycine max
  unsure (1)..(209): unsure at all n locations; Clone ID: 701157491H1
gggtgtttgtgagtaactggcaaagacaccaacacnccttatctctctctgtccaattctgacctcaagttctgttggatcttgcatatagttaccgtttattgattcgcaaagatgaaggtcacagtggtttctcgaagtggaagagaagtggttaaaggtggcattgagctcagcgattctgctactgtagcagatttgcaggaggc

SEQ ID NO: 15246 - DNA, 64 bp, Glycine max
  Clone ID: 701157493H1
gaagtttgtgattactagaatcctgtactaccattttatttttttaatttacatgcttcttttt

SEQ ID NO: 15247 - DNA, 255 bp, Glycine max
  unsure (1)..(255): unsure at all n locations; Clone ID: 701157494H1
ctggtctcatcaaagccctaaccactgatgttgaagatttttacaaccaatgtgatcctgagaaagagaatttgtgcttgtatggctttcccagtgagcagtgggaagtaaatttacctgctgaagaagtaccaccagagctnccctgagcccgtgctgggcattaactttgctagggatggcatgcaagaaaaagactggctatctttagttgctgttcatagtgatgcatggttacttgctattgcattctat

SEQ ID NO: 15248 - DNA, 236 bp, Glycine max
  Clone ID: 701157495H1
gacacacagagcggttctcatattttggagaatccgaaaaacacgttaaagaaagtcccattcccactaccgaagcaaattaagaagatgaagcagcagagagtggagtttatgggcatgggcatgggcatgggcatgggcctgggccttttggtggtgatgatggcatgtgggtcggcgagtggtgcggatgatttggcaaccaagtgttcagcggtgattcagaaggtaatacc

SEQ ID NO: 15249 - DNA, 240 bp, Glycine max
  unsure (1)..(240): unsure at all n locations; Clone ID: 701157496H1
ggcagcaacagcagcattcactgaaagcactcagtagggtttgcggtttcagagtttgtgacgcacgcatccatggnnnnnnnnnnnnnnnnnnnnnnagccccgccgcgccagttctcccagaaggaagccgacatccagatgatgttagccgccgacgtccacctcggcaccaaaaactgcgacttccaaatggaagttacatcttcaagcgccgcaacggacgggatttacttatta

SEQ ID NO: 15250 - DNA, 237 bp, Glycine max
  Clone ID: 701157501H1
tgaagagacgaggtggcccaggaggtctcaccaaaatctgtggtgtttcgcctgaacttcaggtcattgttggccagccagcattgtcgaggactgagattgtgaagcaactgtgggcttacataaggaagaacaatctccaagatcccagcaacaaaaggaaaataatttgcaatgatgaactgcgtgtgggtgtttgagacggattgtactgatatgttcaggatgaataagttg

SEQ ID NO: 15251 - DNA, 90 bp, Glycine max
  unsure (1)..(90): unsure at all n locations; Clone ID: 701157502H1
gtatacatttgaaaataaataataattccatatttgatttatttttagcataataaaattcatttgaatatntgatttntcttcttaaaa

SEQ ID NO: 15252 - DNA, 139 bp, Glycine max
  unsure (1)..(139): unsure at all n locations; Clone ID: 701157503H1
ggggagaggagagagagtgggagtcagagagcaaagtaaagcagccgattggactttgagtccgtttgttccttggtnttgtnttcttcanatatttttctttncttcgatttttctgtcgtttcaccccaaacagata

SEQ ID NO: 15253 - DNA, 241 bp, Glycine max
  unsure (1)..(241): unsure at all n locations; Clone ID: 701157504H1
gaaatacaacacaaacaattaacacacacaaacagaggctacgtacgatcaaattaattangatggcggaagtgaggaacaaacaagtggttctgagggactatgtgagtggttttcctaaggaatccgacatgaacatagttgaaggaaccacaatattgaagcttccacaaggttccaatgatgtgcttctaaaaaatctctacctttcctgtgacccttaccatgagaatgctcataa

SEQ ID NO: 15254 - DNA, 241 bp, Glycine max
  unsure (1)..(241): unsure at all n locations; Clone ID: 701157505H1
gaggaaccaaagtgaataactcttattacgataaattgaaattggtactgatcattgctgtgctcaactgttcattgtnaatttttagcgtccctatactaattaaacagcatgagtgtggatttgaacaaaactgcctccaacggtcatggataaaatggtaatatcacnagancatcagggcnaagatccctanggttagagggttgatagggccactntcagataaggnatctgtgtt

SEQ ID NO: 15255 - DNA, 237 bp, Glycine max
  unsure (1)..(237): unsure at all n locations; Clone ID: 701157506H1
gagagtggtggagtgtgcagaagagcgtcgcagtcgcaaccctaatcagaagaagcgcagttcaagcgagtgacagccaccagccatgggtcgtatgcacagccgcggtaagggtatatcctcttctgctttgccctacaaaaggacacctcctagctggctcaagatctcttcgcaagatntcgaagaaaatntctgcaagtttgcgaagaaaggttgaccccgtttcagattggt

SEQ ID NO: 15256 - DNA, 237 bp, Glycine max
  unsure (1)..(237): unsure at all n locations; Clone ID: 701157508H1
gagtgcaataactcgttgtacattcctagtgtgtgggagagacatggctaagatgtgtgttttggtgttggttcttgctctggctgtggccacaagtgccagaaacgttcccaaccccaaggatnctggtcttaaggaccagaagaacttcatcagctatggtggagttggtggttattccgggnttgggaacaatggactgctttttggaggagctggtgccggaataggtggtgg

SEQ ID NO: 15257 - DNA, 237 bp, Glycine max
  unsure (1)..(237): unsure at all n locations; Clone ID: 701157509H1
ggaggcaggacgggaacctaaaaagcttgatgtgcacattgatgttcctgatatcatagatatcagtcacatgcgcagaaaggtcagcagtctggggaagagctattacctgatggtgttcctggagagcaagattctaacaaaatttcggccaacgaagaaattgttgcccagctggttnccatgggctttaaccatctccattgtcagaaagctgctataaatacatcaaatgtt

SEQ ID NO: 15258 - DNA, 237 bp, Glycine max
  Clone ID: 701157510H1
ggcgcattgaacgaaaattagggtttgtagtgtagcaggaagaagcagcaatggcgccgaagataacacgtaaggttagcagaaaccctgaattgataaggggaatcggaaagtactcgaggtcacagatgtaccacaagaggggcatttgggctatcaaggccaaaaacggtggcgttttacctcgccacgaccctaaacccaagcctgaagctcctgctgaaaaaccacccaaat

SEQ ID NO: 15259 - DNA, 237 bp, Glycine max
  unsure (1)..(237): unsure at all n locations; Clone ID: 701157512H1
caccccttatgagtatgtgacttgatgctaattgtatctgcttgcagcttgctctaacatatattgaggcattgatgactggaaaattatccgctccaaaaggaggaattgtgcaatcatcatttgttggttcacttcggaagcaggtagaggagctcctaaattgttcccagganttgaaggatgattttcataactatttgaaattgggaaaatggcctgatggagaatcccaag

SEQ ID NO: 15260 - DNA, 235 bp, Glycine max
  Clone ID: 701157513H1
gaatgaagaacatcgacgaacagatgatcaatgtgcagaacaagaactcctcctactttgttgagtggattcctcacaacgtgaaatccacagtctgtgacattcccccaactggcttgaagatggcttcaacattcattggtaactctacctccattcaggaaatgttccgtagagtgagtgagcaattcactgctatgtttaggaggaaggctttcttgcattggtataccgg

SEQ ID NO: 15261 - DNA, 238 bp, Glycine max
  Clone ID: 701157514H1
ggagaaagacacgatgcaggaagcgacgaaggtgataataatcggtgccggaacttctggtatcgccaccgccggttgcttaacgaagcaatcaataccttacataatgctcgagagagaagactgtttcgcttcgctgtggcagaaatacacctacgatcgtctccaccttcatttgaggaagcaagtttgcgagttaccgcacttaccgtttcccaagtcttaccctcactacgtg

SEQ ID NO: 15262 - DNA, 240 bp, Glycine max
  Clone ID: 701157515H1
ggaggagcaagcaaataaaacccaaacaaacgcttctcattctctctctactcgttttgaagatgtttctcacaaggactgagtatgaccgaggagtcaacaccttttcccccgaaggacgtttgtttcaggttgagtatgcaatcgaagccatcaagctgggatcaactgcgattgggttgaagaccaaagagggtgttgtcctcgcagttgaaaagcgcatcacttcgccgctcctgg

SEQ ID NO: 15263 - DNA, 252 bp, Glycine max
  unsure (1)..(252): unsure at all n locations; Clone ID: 701157516H1
ggatgagcaacaaaaaaattaaattcttatcatttacagaatatggagtcccagacttccacacgagagaaggagtctctcaatctcagggaagtcccagaagcagataaaaccttgggcttggacatggccaagggcagcgcattctgcaagatgggtgaaggttggacatgcatcataactaaaactgaggggcctgatgctggcaaagttttctntnnatgtggtgaaaattgcacctgtaccattgag

SEQ ID NO: 15264 - DNA, 246 bp, Glycine max
  unsure (1)..(246): unsure at all n locations; Clone ID: 701157517H1
atcgactcaacgaacacttccaagagttgggaaacgcgttagatcctgatagaccaaagaatgacaaggcaactatcctcactgagaccgtccaaatgctaaaggacttaaccgctgaagttaataggcttaanaacagagcataanacantttctgaagagtcacgcgaactaatgcaaganaagaatgaactccagagaagagaagaccatctcttaaatctgatatagaaaaatcttaatgtg

SEQ ID NO: 15265 - DNA, 204 bp, Glycine max
  Clone ID: 701157518H1
gcattgggtgtacctgctcttcccctgacatacgtggctcacgttctggcacttgttgccagcatcttggtcgtgctctgggtcctcaattttaggggtggcttggcttgggattctgataacaaggcctcatcttcaatcttcatccagttccttattgtcaattgggctactagtccttggggggtgaaagctaattataag

SEQ ID NO: 15266 - DNA, 243 bp, Glycine max
  Clone ID: 701157519H1
ggaacacaaacagcagcgtcttggtttgtgagagagacagaggcacagagagaaaatggtttcggggtcaggaatctgcgcgaagagggtagttgtggacgcgcggcaccacatgctggggaggctggcatcgatcgtgggcgaaggaacttctgaatgggcagaaggtggtggtggtgcgctgcgaaggagatttgcatctccggtgggctcgtcaggcagaagatgaagtacttgccgttt

SEQ ID NO: 15267 - DNA, 238 bp, Glycine max
  unsure (1)..(238): unsure at all n locations; Clone ID: 701157520H1
ggcgganaaatcatgtaattatagaagatagagaaatcgcaacacattaattgcaatttcaactcccatatatcattctcgttaatttcttaacccatcttccaagcattcttatccgacaaggattcctttctctctctcttgatccaatcttttcgtccattaaaattaggattttaaattctcaattttcaattttcaactcccaatccctccggcgagctttccaggaagctcg

SEQ ID NO: 15268 - DNA, 242 bp, Glycine max
  Clone ID: 701157521H1
gacgcaactgaaaaagaaaagccttccactattccatatatagcagccaaaaaagaatgaagaatactgcgttgttcactatctttctactccttgctttcacctcatacctaccttcagccaccgctgctagtgtgtacgatacggatggtaatattcttcaaaagggttgcacatattttgtgttggcagctacaagaggaaacggcggtggaatagaatttgccgcaactggaaacgac

SEQ ID NO: 15269 - DNA, 248 bp, Glycine max
  unsure (1)..(248): unsure at all n locations; Clone ID: 701157522H1
ttttttttcttgaattgctggaatcggtatctcaccaatcccaactactattacgtaaaacatgcaaatacttggggatatggggtagagacggttaaccaactgaaatatcctctacaaggctctaaaaattattatcagttttaacttttaattcaaaaaatttgattttttttataacttgtactccttttatataattatttntctctattattttcatcncattattttttgttctttcctta

SEQ ID NO: 15270 - DNA, 238 bp, Glycine max
  unsure (1)..(238): unsure at all n locations; Clone ID: 701157523H1
gacctccaacacatcatctccttccttcaccttcttcccatacacccaaaggaaaaatcttccatctccactttcttttcaatgggccactctctttancttcaactccacccttcgcccctcttgttatcatccctcctcaccctcctcatcttatccccacttcttcaagacactctccacaactttcttgggccacaccgtaaccctcaaatatgctgccacttccgcaagcatc

SEQ ID NO: 15271 - DNA, 236 bp, Glycine max
  Clone ID: 701157524H1
ggaggaaaggaaaggggaacccaaaccgaaaccctaaccctaacggagagatggcggagcacttggcatcgatattcgggacggagaaggacagggtgaactgtccgttctacttcaagatcggcgcgtgcaggcacggcgaccggtgctcccggcttcacaccaagccgacaattagcccaacattggttctgtcgaacatgtaccagaggcccgacatgaacatgagcattatc

SEQ ID NO: 15272 - DNA, 235 bp, Glycine max
  Clone ID: 701157525H1
atatatattaattatattaattctattttataaaataaaatatttattttagattttcttaagattttgttttaatgagtcaactagtttgttacatttattgtgacaaccgtatgttgatttccaacggtcgtattttatttttgcataaatacaatctagtttgattctcctaaaaaaaattctcttcattttcctataaaaaacttattttttgagagcaagagagttgatg

SEQ ID NO: 15273 - DNA, 238 bp, Glycine max
  unsure (1)..(238): unsure at all n locations; Clone ID: 701157526H1
ggggacaataataacacacaaaatcaattccacacctacatatccatcnacaccatggccaccaccaccatgttctcatcaccatcagccattttatcctcaaccactacaaccaccacaccaaaaccatcatcttcagcaccaccctccccatcatgcaaacctcttctacccttcaaacaacccttaacaaccttaactgccgccgccgccatcgcntcccattttaaccaccgca

SEQ ID NO: 15274 - DNA, 233 bp, Glycine max
  unsure (1)..(233): unsure at all n locations; Clone ID: 701157528H1
ggaacttctcacgttcatttctacacatccctagctcngtcgttccgtcgttgacgatggcgtttcgggtgcgaaccctgacctccgctctctctttcttctctctctcttgtccatcgcttccgccaatgtcttcttcgaagagcgtttcgatgacgggtgggaaaatcgatgggttaaatcagattggaaaaaagatgagaacgtggctggggagtggaaccacacctctg

SEQ ID NO: 15275 - DNA, 237 bp, Glycine max
  Clone ID: 701157529H1
atatggttcgattgtttagcaactcggagaaccatttccaatggaactgcagcaattcgagtctcataaattaatcctggcctcagaattactcctccaaatggaaatctggtcagaagctctgtttccgcagctctctttcctatattacagccctgcagtaagtaattaactacaccaaagtcagcagtagagatatagacaaatcttttaacaccttgatctgaagctgctcta

SEQ ID NO: 15276 - DNA, 237 bp, Glycine max
  Clone ID: 701157530H1
ttacacccttggtggctgcttggtgagttggaaggcaacacttcaaccttctgttgctctctcaactattgaggctaaatatatggctcttattgaagctgcaaaggaaggaatttggctgagaggtctgataaatgatctcgaaattaatcaagaatatgctaacatctactgtgacagccttagtgctatatgcttggccaaggattaggttcatcatgatagaaccaagcatat

SEQ ID NO: 15277 - DNA, 178 bp, Glycine max
  Clone ID: 701157531H1
ggaagcttgtgagccaattaagtaacgtgacgtggcaagagagaagtgggaaggcatgggaatagaataagcgatgggattgggaaatgggaacaccacccatacaatacaacacagttatccattcacatttcacagttagcacttagcagactctgctgcagtgaggtgaggggag

SEQ ID NO: 15278 - DNA, 247 bp, Glycine max
  unsure (1)..(247): unsure at all n locations; Clone ID: 701157532H1
ggaggcttaggcaactaagaaagaaagatgaagctgaaggtatatgcggaccgcatgtcccagccatcccgtgcggttctcatattttgcaaagtgaatggaatagattttgaggagatcaaagtcgatttatccaaacgtcagcagttatctcccgaattncgagcggttaaccctttaaggaaagtccctgctattgttgatggannngacaagctatttgagagtcatgctattctcatatatc

SEQ ID NO: 15279 - DNA, 219 bp, Glycine max
  unsure (1)..(219): unsure at all n locations; Clone ID: 701157536H1
catgttaaaggantcagcttactttgtctatncgcttctcaagaagaggccacaaaacagaaggatgcattggctagtgaagttacatctctccgagtagagttncaacaagtgagggatgatcgagaccgccaattatctcaancgcaaactttaacatctgaattagagnagtctaaagattttacagaaaagtcctgctctgaactgaaccaattg

SEQ ID NO: 15280 - DNA, 237 bp, Glycine max
  unsure (1)..(237): unsure at all n locations; Clone ID: 701157537H1
ggaggagaaaaacccttagccgccagcattcgttgaactcattcttcttcaactcaacagagcaagggttcgcactcgcagattcttgagcaagaataatggggaagaaaagaaaacacagtgagactactcaagctgtagcanaacccanaaaggangaggctgctccagagagaccggctaggacccttttggggtggaaggataagnntcaagttgaggatgattcaccatttt

SEQ ID NO: 15281 - DNA, 239 bp, Glycine max
  unsure (1)..(239): unsure at all n locations; Clone ID: 701157538H1
ggactctaattcttctgctgaatgatatgccaaagacaccccaaaactaagaccatttatcctcttnctctttttccccttccaaacatttcaaagaacagcatcntccaagactaaatccagcacnatctgtccatgagttatgtnctttaaagttttaacaataaaggccacggaggttctccataggtgnctaagtgaagntatgtttggatatatatgcagtgttgnagacatgt

SEQ ID NO: 15282 - DNA, 249 bp, Glycine max
  Clone ID: 701157540H1
agtttgttgatcgagataactagaaacagtgtatgaaggtccttgttttcttcgttgctacaattttggtagcatggcaatgccatgcgtacgatatgttccctctccgaatgaacactggctatggtgcccgtactccggaggtgaaatgcgcaagttggaggcttgctgtggaagcacacaacatctttggctttgagaccattcctgaagagtgcgttgaggcaacaaaggaatacatccatggcg

SEQ ID NO: 15283 - DNA, 234 bp, Glycine max
  Clone ID: 701157541H1
gagggtattgcactgcggctgctacttcggctccatcttctccgatctcctcaaactctatcagcgcagaaccaagcctctatcaccatggggaagacacatggaatgggagctgcccgcaagctgaagtctcaccgtaggagacaaaggtgggctgacaagtcatacaaaaagtctcatctgggaaatgaatggaagaagccttttgctggttcatcccatgccaagggtatt

SEQ ID NO: 15284 - DNA, 234 bp, Glycine max
  Clone ID: 701157542H1
aggaaactaggcattggtttctctctctagcttggacgagtgaattagattcatcatcaagatgtcgtctctgatagcagaagatgtgaagagcagatcagaggtgtaccacggggacgaaatgtgccaagtgaagtccaaggagcttctcaaggaaatcgccctccccaacggccttcttcccctcaaggacatggaggagtgcggctacgacagacaaaccggcttcgtctg

SEQ ID NO: 15285 - DNA, 223 bp, Glycine max
  Clone ID: 701157543H1
agactttgttgatcgaggttacaatagtcttgaagtttttaccatccttttacttctaaaagctagatacccagctaatattactcttttacgtggaaatcatgaaagtagacaattaacccaggtctatggattttatgatgaatgccagaggaagtatggcaatgccaatgcttggcggtattgtacagatgtgtttgactatttaacactttctgcaatt

SEQ ID NO: 15286 - DNA, 235 bp, Glycine max
  Clone ID: 701157544H1
ggcagcatccattcttgttctcttctttctttcgatcagggtttcccctcgtctccgggctcgtttcgttctcgaataatcgatctacgataatgactcgcggtagccagagggatcgtgatcgcgaaagggctcaggctagaactggtgctaaaggcaagcagaaagatgatggattgacccctgaacagcgcagggaaagagatgcaaaggcgctgcaggagaaggccgcaaa

SEQ ID NO: 15287 - DNA, 237 bp, Glycine max
  Clone ID: 701157545H1
ggaggcaaatcacttcatccttgggcaataaaaagctgattggatcatttgatctaaaaaagcttcaaccatcatattgttaattacttccaattaatatgggctgtgctatcattaaccttcccctaataatttttatatatgaagccagcgccgacacacaaactgcaacagaaccagaagtggtcagaacttcacaagacttccactactgctgtgattataagcaggctagag

SEQ ID NO: 15288 - DNA, 231 bp, Glycine max
  Clone ID: 701157546H1
gaattcaatatcgagaagctgcagttggtcgaagccgacaagaagaagatcaggcaagaatacgaacgcaaagagcgccaagttgaaattcgcaagaagattgagtactcaatgcagctgaatgcttctcggattaaagttcttcaagctcaagatgacgtgatcggttccatgaaagaagctgcatccaaggaacttttgactgtgagtcatcatcatgatgatcatgtg

SEQ ID NO: 15289 - DNA, 236 bp, Glycine max
  Clone ID: 701157547H1
gacaagtgagtttgttgatcgagataactagaaacagtgtgatgaaaatgaaggtccttgttttcttcgttgctacaattttggtagcatggcaatgccatgcgtacgatatgttccctctccgaatgaacactggctatggcgcccgtactccggaggtgaaatgcgcaagttggaggcttgctgtggaagcacacaacatctttggctttgagaccattcctgaagagtgcgtt

SEQ ID NO: 15290 - DNA, 238 bp, Glycine max
  unsure (1)..(238): unsure at all n locations; Clone ID: 701157549H1
ggaagcaaaaaatgaaaacccaaagtgcttctctcctctgtctttttctctctcttgctatccttttggctagtggcactgctgcaagtgcaactccaagaagcgcagtgccaagccaccatgtttcaacattcaacagaagcctttttccttccacttttctctttggaattggttcttctgcttaccaggcanaaggagcagcaagtgtagatgggagangaccaagcatatgggg

SEQ ID NO: 15291 - DNA, 234 bp, Glycine max
  unsure (1)..(234): unsure at all n locations; Clone ID: 701157550H1
aaaganacccggaaagggtgggaaccgcttttggaaatccattgggcttggatttaagactcccagggaagccatcgaaggaacctacattgacaagaagtgccccttcactggcaatgtttccatccgtggccgtatcttggctggaacatgtnacagtgctaagatgaacaggactatnattgttaggaggaattatctccattttatcaagaagtaccagaggtacgagaa

SEQ ID NO: 15292 - DNA, 241 bp, Glycine max
  unsure (1)..(241): unsure at all n locations; Clone ID: 701157551H1
gatcgaagcaaaaaatgaaaacccaaagtgcttctctcctctgtctttttctcnctcttgntatccttttggctantngcactgctgcaagtgcaactnccaagaagcgcagtgccaagccaccatgtttcaacattccaacagaagcctttttccttcccactgtctctgtgggnattngttcttctgcttanccaggcagaaggagcagcaagtgtaagatgggagaggacnnggcttt

SEQ ID NO: 15293 - DNA, 223 bp, Glycine max
  unsure (1)..(223): unsure at all n locations; Clone ID: 701157552H1
ggacttcatgtccatttaaanttttcatgtgaagtatatccctagggaaaaataatttcttcacatgtacaatgaagcaatccactctattcctgttcctattcctattccccctcgttcatggctcttncttacgaagctgcgatattagagatggcctcaaatcctattcccagcttgatctccctccactcggtttttggttctgaaagtgtagccttcg

SEQ ID NO: 15294 - DNA, 157 bp, Glycine max
  unsure (1)..(157): unsure at all n locations; Clone ID: 701157553H1
atgggtattatgctcatnactgattcnttgatcatngnnttacgtatcagggttgggggataatgnntanngtaatcntatgtntaaatnatgtatatgtgattaggactcantntgaaagttnggttgatacatattatntgttgncagctnttaa

SEQ ID NO: 15295 - DNA, 238 bp, Glycine max
  Clone ID: 701157554H1
ggtttttctttctgttattacacaacacactctgtgaaaaagggggagtttcttattccttctagacgcttccattgatcggcgatttctgatacatggcggagcatcacgaacacgaggaagtgaagggtgagtccttgttggagaagatttctgggaagatccacgaccacgattcctcgtcttcgtcggattccgacaacgacaaaaccagcgccactgattccttcaagtctaa

SEQ ID NO: 15296 - DNA, 232 bp, Glycine max
  Clone ID: 701157557H1
ggcacaagtttgttgagatagctagaagcaataagatgaaaatgaaagtgcttgttttgtttgttgctacagttttggtagcatatgaatgccatggctcagactaccagaagttccctctccaaatgaaaactgggtttggtgggcaatacagcaatgaggtggcatgtgccagttggaggcttggcgtggaagcaaacaatgtagtcaagtggcaaactgttcctgcagc

SEQ ID NO: 15297 - DNA, 244 bp, Glycine max
  unsure (1)..(244): unsure at all n locations; Clone ID: 701157558H1
gttgtattgacaccgatgcattcccatcattctccgacgatgagttacctctatttgggcttacccaataacaccaaaggaatcatagngcctttcaaagtcacaacttgcattaccaattcagcttgcatcggcaaataaggttccttcaaagttcagtctttgtttgccttctttaaacaaccaaggtttcactaacttgctcgttagagctggagaagaacatcctcagggaatatccaat

SEQ ID NO: 15298 - DNA, 255 bp, Glycine max
  Clone ID: 701157559H1
gttgtattgacaccgatgcattcccatcattctccgacgatgagttacctctatttggcttacccaataacaccaaaggaatcataggcctttcaaagtcacaacttgcattaccaattcagcttgcatcggcaaataaggttccttcaaagttcagtctttgtttgcccttctttaaacaaccaagggtttcactaaactttgctcggttagagctgggagaaagaacaatccctccaggggaataatccaaat

SEQ ID NO: 15299 - DNA, 99 bp, Glycine max
  unsure (1)..(99): unsure at all n locations; Clone ID: 701157560H1
ctttctttgtgtttggagattcacttgttgatagtggaaataacaattacttggctacccacggcacgtgctgatgnccctccttatggggattgatta

SEQ ID NO: 15300 - DNA, 231 bp, Glycine max
  Clone ID: 701157561H1
gaccgataattctctttcccatactctctctgtgttcttctgttctctctgtttcttcagattttctccctcctcagcgcctgtgaagtttgattgcttcattctttgaagtgaatttgacaattaagtaaattggttgagaagggttcattcctcttcattggaagaataaaacaaatattgcaggtggattttttctgatggcaactaacgaaaatcttccaccaaatg

SEQ ID NO: 15301 - DNA, 214 bp, Glycine max
  Clone ID: 701157562H1
tccagagagaagaagaaacttaatcgatcatcacttcacttcactaatacatcatggcagacgagacccagaacaagtatgagagctctgaggttgaggtccaggatcgtggtgtttttgactttctcggtaagaaaaaggatgaagaagacaagcctcatcctcaggaggaggtcatcgccaccgagtttcaaaaagtcactgtctcagacca

SEQ ID NO: 15302 - DNA, 237 bp, Glycine max
  unsure (1)..(237): unsure at all n locations; Clone ID: 701157565H1
acttgatgttgaagttggctgtgaagaggattctccttatgtgcctgagccacaggcaagtgagaaacaattagaagatgcttcctttcctgatactcagctgcatgaatatgtgggagaagagcatggtcatgacaaagagagtgggcaaagaaaaggtcgtagccggggncggggtaagggacgtggccgagtacattgtcatccaaataatcgtgtgggaacacctcttcaaat

SEQ ID NO: 15303 - DNA, 238 bp, Glycine max
  unsure (1)..(238): unsure at all n locations; Clone ID: 701157566H1
gctctgaataccataatggagttgagagaaaaggagagagaagagaaaactgagattgagaaatcttgtattatttagcccaactggccaagttgttaaaagactttatatagacagttatgttaactgtcaactaactctaacaaaccctgagttagttaacataccnanagaagaggaatccactactaaccatagtgaggatcnagaataccaaccggaanngtaaaaaccacag

SEQ ID NO: 15304 - DNA, 126 bp, Glycine max
  Clone ID: 701157567H1
gatgaatgctaagagagaaaagggagagtgctttgaaaatgggaaagtttagttcaagctacagtacttctgattttgttcactttggagttctacttccctttcttctgttatcacagttgttct

SEQ ID NO: 15305 - DNA, 240 bp, Glycine max
  Clone ID: 701157568H1
aatctctccataccatccttgtcttgtttctataatataaaccacattgaaccatagtgtttctccaacttttctgattgttgttgtcacttcatggcctacttaatgctaagtggtgctgaaagtacaaagctcattagtggtagtggcatagctcccacctgggtttgggctcggttggtcttaaactttccataagagggtgacttcttgaaagaggaatgtcgtggtcatatgggt

SEQ ID NO: 15306 - DNA, 232 bp, Glycine max
  unsure (1)..(232): unsure at all n locations; Clone ID: 701157569H1
ggcatcaattcaaaatatatcatcaattataagcatgggtttgtggnacacaacgaatgcagtgtcttgccgctttcacaagnttggtgatgaccaagagaatctggtcttccaaggtgatgccacgtcttcttccanggggcatagaactcacaaagtnagaccgtggaggaaaaccagtgggtggcagtgtggggagagtgtatactcttcttccagtgcacctttggga

SEQ ID NO: 15307 - DNA, 233 bp, Glycine max
  unsure (1)..(233): unsure at all n locations; Clone ID: 701157570H1
ggtcgcagcattccatacgaggccgaagggaagagtttttgttgggtttgggaggctaagtagggtttgcgttgagaaagagagagatgggaagagaaaaggagacnacaaaggtagcttacacagtggagcagcttgtagccttcaatccatacaatcccgatattcttccagatctcgaaaactatgtcaacgaccaggtttcgtcgcaaacttacagcctggacgcgaat

SEQ ID NO: 15308 - DNA, 229 bp, Glycine max
  unsure (1)..(229): unsure at all n locations; Clone ID: 701157571H1
gactgcgttgtgttgtgttgtgtctcttgtgtgtgacagcttcacctccgtgcaataatttattcaattttctnctncacaacatgatgcggaagctgaaataatcaggaaaaagaaaaganaaaaaaagattctttcttggcttgtctaatgaaggantaagagcctccaagcaaggaggaacgtgtctgaatctccttataaacaccgagntttcagagngaagcag

SEQ ID NO: 15309 - DNA, 238 bp, Glycine max
  Clone ID: 701157572H1
ggaatgaagagtgagtagtgtagtgtgcacctaacaagagagaaagaagcaatcgctgccatgtttcctttcccagtgaagttgaaaattgagatcaatcaattttttattattttatctttcatcattttgtagagcgaattctgtgttgaagggccttccttattgattgtaaaagaacaatcttggccattgaaattggtgggccatgcttgtgattgcctatcatattctccgg

SEQ ID NO: 15310 - DNA, 189 bp, Glycine max
  unsure (1)..(189): unsure at all n locations; Clone ID: 701157573H1
actcgcaacaaattcggactgccaagatatagggaggaaaatcaatttaagaacacattaataaacaacatgaaacccactttcacattaggacattctcgaacaccancaaaactcaactacataaatgacattctgcataaatacttctactgctgcttgcactctggaggtcgctcaccctgctgg

SEQ ID NO: 15311 - DNA, 228 bp, Glycine max
  unsure (1)..(228): unsure at all n locations; Clone ID: 701157575H1
gggtattgcgtgttggtgtgaatcaagaaccgctctgctatggctgctctgcaatacttggaatcgctgcgtaattcgcaccctgagctctccgattggtacaattcgctggcggatctgtaccagaagaagctctggcaccagctcactctcaagctcgagcagtttgtgggctctcgccgtcttccaggctggtgatnctttaatacaattatatcacaatttcac

SEQ ID NO: 15312 - DNA, 218 bp, Glycine max
  unsure (1)..(218): unsure at all n locations; Clone ID: 701157576H1
gaaaanngaattatctcaaganctcacgagtgagcatgctgaagactggtggagggaaccttggtcggttgangaaataaacaagcttgccatcaaaatgtccgatttcgaggaagcagctaataaggtgcaaccttcattaagaagagaagggttctcttccattcctaatgtaaaatgggacgacgttggagggcttgatcttttaagaaaggagt

SEQ ID NO: 15313 - DNA, 227 bp, Glycine max
  unsure (1)..(227): unsure at all n locations; Clone ID: 701157577H1
ggacgcgagcaagcggcgaagattcctgagaagagtgggattngcttgagtcattctcttccctnctagctacgtaacgactaangacgcactctactcttncttanggtttcctctcncgccaatttaccctttccccaattcaattccaaccctancctcactccactctcgncggaacggcancttcgattcgactanggtttcaggaattcacgaggccgcgg

SEQ ID NO: 15314 - DNA, 211 bp, Glycine max
  unsure (1)..(211): unsure at all n locations; Clone ID: 701157578H1
catgactcctanatctgaaacatttactgttgatattaattcaaagcttgatagggaactgatgaatgagatattggagaaagggcacagcagagtcccagtctattatgagcagcctacaaacattattggacttgtactggtcaagaatttattgacagttcatccagaagatgaagcacccatgaagagtgtaaccatacgcaggatt

SEQ ID NO: 15315 - DNA, 240 bp, Glycine max
  unsure (1)..(240): unsure at all n locations; Clone ID: 701157579H1
ggcagcgaaaatttcncagaagtatcttttttctctctctcatccgcgccccaaatcttagggtttcacccaattcaattcctggaactctcctcgattcgattccacatccccnccnctgntnagatttgtgtgattggnacgnacgatggnggcgccgagnaatntnacggcgangagggangnagataagggcnnggaagacgnttcgccctccgcnaagnagnccaaatcggagtg

SEQ ID NO: 15316 - DNA, 249 bp, Glycine max
  unsure (1)..(249): unsure at all n locations; Clone ID: 701157580H1
ggaggaagacaccaatcttctctccacgcccttcttgggtaaccgtctgaagtgcagcaatggcagatggattgcattcgcagcatccatcggtagttcagaagttatctggacagtcttatcttgtgtccaggcttgctcctaatcactccagaaactgttctaccactggtagttacttcaatggaggtttgcagtcttcaggtttggnttccctcacggcacacgcgccggctgagaaaggggtgt

SEQ ID NO: 15317 - DNA, 235 bp, Glycine max
  unsure (1)..(235): unsure at all n locations; Clone ID: 701157581H1
gaaggtgctttggctgaagaaaacatgagagccatctgctttgaagtatgtgatgttgtgctgcacgctgatgctatccacagaggaggtggtcaaatcattcctactgccaggagagtcttctatgcttcccagattactgccaaacccagggtttcttgagcctgtctanctggttgaaatacaggctcctgaacaagctcttggtgggatctacagggttcttaaccagaag

SEQ ID NO: 15318 - DNA, 229 bp, Glycine max
  unsure (1)..(229): unsure at all n locations; Clone ID: 701157583H1
ggttgtgtgagtgaagaagcagagggagtagcggcattaaaaatgcagatcttcgtgaaaactctgacagggaagactataaccctcgaggtcganancagcgacaccatcgncaatgncaangccaagattcaagacnaggaaggcattcctccggatcagcagcgtttgattttcgccggaaagcagcttgnagatggnangacctggncgattacaacatccagaa

SEQ ID NO: 15319 - DNA, 211 bp, Glycine max
  unsure (1)..(211): unsure at all n locations; Clone ID: 701157584H1
gccactatgggaccaagtgatcaaacactccnnttcttcactcagttctttcagtttgaggctagttatgatagcttcactacttttcagtatgtgaccttctaaactctatttttctatatacgcttttcaaaacatgagtgttatgttagaaagtcttaatccaattttttntttgaaaatatagtgcgggtagaatggttnagtttct

SEQ ID NO: 15320 - DNA, 229 bp, Glycine max
  Clone ID: 701157586H1
cctctgtgcattcttgaactatgtcactagttgtgtgctcatgatcatggttcatctgtaatgaactttgtgcctttctcaatgcttccaattctgttgaaacctctttcattgttggtcttttcttcccattcagcctcaagcatctcattgcaagatttgcaatggcaagaatgtcatctttccttgcttccttaagcaaactggcatctaaaatttcaaaaacttg

SEQ ID NO: 15321 - DNA, 231 bp, Glycine max
  unsure (1)..(231): unsure at all n locations; Clone ID: 701157587H1
tgtctctttaaggtgggtagggaaaagaaaagtgtccatgtccaccctcattttcattttagaccacttcttacctcaattgctagctttagaaatnaatttgtaacttaaccagggccactttgaacttgaaggaaaacaaagagggtcaggggatgaaaattattgtttatagtcaacgtttgtatcaccttaagtggtctcaacctaacacaattttagtctcatttt

SEQ ID NO: 15322 - DNA, 239 bp, Glycine max
  unsure (1)..(239): unsure at all n locations; Clone ID: 701157588H1
gtataagtgtaacaagctcaattttgcacaattcacataattttataactcattgcgtaacatcacttatctcaagaatttaatcataaaatcatatttcacacattcacattaancacttgttcggaacaataaatttcaagtacaacatcttacactcacacaattcattactcaccattaccntagcagtcacaatgatcattaccccaagggttatgcaacatataccattaaga

SEQ ID NO: 15323 - DNA, 224 bp, Glycine max
  unsure (1)..(224): unsure at all n locations; Clone ID: 701157589H1
agctcctcgacatcgtccaccccgctgcaaaaatcctcgccganatcgccaagtctcaggactccgaggttggcgatggaaccaccactgtggtgttgcttgcagctgagtttttaagggaggccaagccattcattgaagacggtgttcactctcaaaacttgatacggagctataggacggcctgctccttggctattnannagattaaagatctngctgtt

SEQ ID NO: 15324 - DNA, 251 bp, Glycine max
  unsure (1)..(251): unsure at all n locations; Clone ID: 701157590H1
agagcacttgtccatgaatagtaacgccataatttgtttcagaatccatctggtttgcgagtttgacagatatttacaacttatacattcataataattatctgcagatataatttattaaaaattacaanacaaataaaanaganttaattaattaaaagaagttttctaaataaatatgtttattcgatgcagtcaaaacaaatatatgttcatttgattaaatttttatttgaacaattaatagagtt

SEQ ID NO: 15325 - DNA, 220 bp, Glycine max
  unsure (1)..(220): unsure at all n locations; Clone ID: 701157591H1
gattgactctgaattttctgcancatattgcacacagagatcgtgatncganaatggcgacgttgaaggttcctgcacaacttccttctccattggaagacagtgagcaattgcgaaaagcttttcaagggtggggaacgaatgaaggattgataatatcaatcctgggtccacagaaacgcgggctcagcgtaagttgattcgtgaagcttatagtact

SEQ ID NO: 15326 - DNA, 179 bp, Glycine max
  unsure (1)..(179): unsure at all n locations; Clone ID: 701157592H1
taagtnttcatgctgatatcaaaatgaganaaaaaataattttggatatttaattaaaaaaaggtaaaattaaaattaaagatcacagaaaaaaattaaaaananattaatttattaacgaatatcctantagcggctaatatttatctttaaaaaatatgtgcatgttttggagaaga

SEQ ID NO: 15327 - DNA, 230 bp, Glycine max
  Clone ID: 701157593H1
gatgaggaaacctgaagagattacgaaagaagaatatgctgctttctacaagagtcttaccaatgattgggaagagcatttggctgttaagcacttttctgttgagggtcagctggagtttaaggctgtcctctttatccccaagagggcaccttttgatctctttgacaccaggaagaagcctaacagcatcaaactgtatgtccgccgtgtcttcatcatggacaact

SEQ ID NO: 15328 - DNA, 236 bp, Glycine max
  unsure (1)..(236): unsure at all n locations; Clone ID: 701157594H1
gagaactagaaattgcaatgaagaagaggagctgcagcagtagtagttcagtttttgaggaggcgaatggagtggaggatgaggccgaacctcaacaaccttcatcttgtgcagcagcagcacttgatgagttgcataaagagaacaatgagattagagcagaaaccctcgtgcctcccaatccccaatcttgacgatggcttctatgaaatcgaaacaatacgccgtaagaggnt

SEQ ID NO: 15329 - DNA, 176 bp, Glycine max
  unsure (1)..(176): unsure at all n locations; Clone ID: 701157595H1
gggatatggataggnatggagaaagttaaggtgcntcggcgactcctcnanacaccangggctcaccatgggccagcctgtntcgncgctctgggtgngaactcatagnatccgctnggntcccntactgcatcancagnggcttacnccatngccgcttcaangntagnnctgnc

SEQ ID NO: 15330 - DNA, 233 bp, Glycine max
  unsure (1)..(233): unsure at all n locations; Clone ID: 701157596H1
gggcaatggcaatggcaatggcacttggcaggctttcatcttccttcaacaagcctttacgtcctctcttcaatgctggctcagtttactacaagtcctctttgcctgctgaagctgcgtacgacaatgagaaaagctgtgatacggaattgaatgctccacttgaggttgttgatcctgagattgctgatatnnntgagcttgaaaaagctagacaatggaagggactggaa

SEQ ID NO: 15331 - DNA, 120 bp, Glycine max
  Clone ID: 701157601H1
gacacatcaaacacataagtttgattgtcctagctttgagcaaacattcatggaaagatctcccattctctttatcacaatcttttcttgtggttttcttggaaatgttgtttcaaatgc

SEQ ID NO: 15332 - DNA, 130 bp, Glycine max
  unsure (1)..(130): unsure at all n locations; Clone ID: 701157602H1
ggcatggacggttcnaggagtatcagnanactcattggcnnaccatttcagaacacnatggcacaggaagctggcgtaccttggccacaaaaancaggtgcttcaaagatgtggncaagagttgcaggct

SEQ ID NO: 15333 - DNA, 121 bp, Glycine max
  Clone ID: 701157604H1
ggtggaatggttggcttgttggtagaagaaattgggcgtgtgggagttgttgaatccgggaagcaaaaaaaatgagaatccatcacatagcatgcctccaagacaattattcctatctgat

SEQ ID NO: 15334 - DNA, 115 bp, Glycine max
  Clone ID: 701157605H1
gatccttcgtccagctagcaccacattcacctgaggcttccaaagccaatggcttcccttgcagcatccactgctgctgcttcccttggcatgtcagaaatgcttggaaacccca

SEQ ID NO: 15335 - DNA, 114 bp, Glycine max
  unsure (1)..(114): unsure at all n locations; Clone ID: 701157606H1
ggagaaagacacgatgcaggaagcgacgaaggtngataataatcggtgcccggaacttctggtatcgccaccgccggttgcttaacgaagcaattcaataccttacataatgct

SEQ ID NO: 15336 - DNA, 109 bp, Glycine max
  unsure (1)..(109): unsure at all n locations; Clone ID: 701157608H1
gagggagaattaggtttttaaggtttacaccgagcagcganacctccctcccgcagtagccatggttctcaaaactgaactatgccgattcantngtgccaagatctac

SEQ ID NO: 15337 - DNA, 102 bp, Glycine max
  Clone ID: 701157609H1
tttcgtgggctgttcaaaggaaatggtactaactgtggcgcgaattgtcccaaattctgctgtgaagttcttcagttatgagcaagcttccaaaggcatact

SEQ ID NO: 15338 - DNA, 133 bp, Glycine max
  Clone ID: 701157610H1
ggcacaagtttgttgagatagctagaagcaataagatgaaaatgaaagtgcttgttttgtttgttgctacagttttggtagcatatgaatgccatggctcagactaccagaagttccctctccaaatgaaaac

SEQ ID NO: 15339 - DNA, 108 bp, Glycine max
  Clone ID: 701157611H1
ggatccattcagacaatggggttcagcctgctgaagattgttcccagccatcagcttacatggctggtgaagacttcaatcagaacagccccaaaaagaaaaggcgta

SEQ ID NO: 15340 - DNA, 117 bp, Glycine max
  unsure (1)..(117): unsure at all n locations; Clone ID: 701157612H1
ggcaaaaatccgatcagaagacaggttcaaaccggagcaaaaaaacttgttacgatggtttcttccgacaaggatccacgagaggaagtccttcangcaaggtantggntgatagtg

SEQ ID NO: 15341 - DNA, 100 bp, Glycine max
  Clone ID: 701157613H1
gagagaagcgtcttaataaacgctaacctctgtacccttcgctaaaatgagagagtgcatttccatccacattggccaggccggaattcaggtcggaaat

SEQ ID NO: 15342 - DNA, 107 bp, Glycine max
  Clone ID: 701157614H1
ggcacaagtgagtttgttgatcgagatgactagaaacagtgtgatgaaaatgaaggtccttgttttcttcgttgctacaattttggtagcatggcaatgccatgcgt

SEQ ID NO: 15343 - DNA, 67 bp, Glycine max
  unsure (1)..(67): unsure at all n locations; Clone ID: 701157615H1
gaagaaaggaagaaacataccgaatgagagaatcaaactcttcttcttcgatttccattgcgaangt

SEQ ID NO: 15344 - DNA, 68 bp, Glycine max
  unsure (1)..(68): unsure at all n locations; Clone ID: 701157617H1
gattgagganacaacgnagaagnnggtgnngtcgaagnagtganggtgtttagtgtcttcttcttgtg

SEQ ID NO: 15345 - DNA, 114 bp, Glycine max
  Clone ID: 701157618H1
tggttgttgctgtgtttccttcttcataacattcccctcccataacagtaacattgtattaacaaagcaaatggttggcgtcaacatgctcaagattctttgcagcatgtatag

SEQ ID NO: 15346 - DNA, 111 bp, Glycine max
  Clone ID: 701157620H1
gtatgtctcatgtcttgctcaaccaggtgaaccagttggtgtattagcttctcaatctgtttggagaaccggcaacgcagatgaccttgaatactttccaccttgctggtc

SEQ ID NO: 15347 - DNA, 112 bp, Glycine max
  Clone ID: 701157621H1
gataagtcggttaatcaatccctcggatataaacttggtgtttttctttcttgtggctaggaaggatctatttctatctcctttttttgtcttttcttttctttctttctaa

SEQ ID NO: 15348 - DNA, 111 bp, Glycine max
  unsure (1)..(111): unsure at all n locations; Clone ID: 701157622H1
ggcacaagtttgttgagatagctagaagcaataagatgaanatganagtgcttgttttgtttgttgctacagttttggtagcatatgaatgccatggctcagactaccagt

SEQ ID NO: 15349 - DNA, 76 bp, Glycine max
  Clone ID: 701157624H1
ctatgccatcatgacataggtaagtatgcatgtgggctcaatttatttttgatgccatctactatttgcagggatc

SEQ ID NO: 15350 - DNA, 124 bp, Glycine max
  Clone ID: 701157625H1
gagaggaaggaagcaatggcgagcaggtactgggcagtgtctctttcccgtccccaacttccgcatctcagctctggaaccaattccaggaacgaatctccaagcattccttcgacactcctct

SEQ ID NO: 15351 - DNA, 107 bp, Glycine max
  Clone ID: 701157626H1
ggaaagcgtcagcaaacaaaactaaagaaagcggtttcacagaccgagaaatcccaatcctatggcagaggaagggaaacccgatgaacagctctttcagcttctct

SEQ ID NO: 15352 - DNA, 105 bp, Glycine max
  Clone ID: 701157627H1
gatagcaatccttatagtcggcttatggcacttcagagaatgggtattgtggacaactatgaaagaatacgcgatttctccgttgccatagttggagtaggtggt

SEQ ID NO: 15353 - DNA, 107 bp, Glycine max
  unsure (1)..(107): unsure at all n locations; Clone ID: 701157628H1
ggactcacagtagagagagtgttggtacgaaaaatgtcgaagctgatcttcgtgttcctttcgctcattcctctctctggcacctccttctcccnagagagaccctc

SEQ ID NO: 15354 - DNA, 112 bp, Glycine max
  unsure (1)..(112): unsure at all n locations; Clone ID: 701157629H1
gatctctgtcatcatagtcatatgagaacactgaactactttaggagaacctggcaacagtgtaataacaccatggngatgacttaacggcattgaacccatgtctgctgca

SEQ ID NO: 15355 - DNA, 93 bp, Glycine max
  unsure (1)..(93): unsure at all n locations; Clone ID: 701157634H1
ggctgtgggaagangtaccctagctagggtttngaagaagctgatccgagaagatggtgcagcgtctcacctaccgcaaacgccacagctatg

SEQ ID NO: 15356 - DNA, 115 bp, Glycine max
  unsure (1)..(115): unsure at all n locations; Clone ID: 701157635H1
gggaaaagttagaagtagtgaagaaaatgaaagtcattgttttncctccgttgcctataataattttaggtgcagaatggcaatgcaatgggtcagagcatgagcatgagcatgg

SEQ ID NO: 15357 - DNA, 108 bp, Glycine max
  Clone ID: 701157636H1
ataataaatactttatcattttaattccttaattaatatcgtaagggcactgattagcatgaccctagaatgaatatatgcaattagttcattaactttatatacatt

SEQ ID NO: 15358 - DNA, 115 bp, Glycine max
  Clone ID: 701157637H1
gggagcagaggacaagatgggtagtgtgagttatagcaatctgaagaacgccatgatagcattcttggtccctctaccctccatcctattctacctctcattccaatcggccatt

SEQ ID NO: 15359 - DNA, 130 bp, Glycine max
  unsure (1)..(130): unsure at all n locations; Clone ID: 701157638H1
tgcttaatttcatcatattttttattgttgccctagtgtttgcaaaatggtttgcagtcatgtaggtngatttggttggggcttttaggtttgtgtgctttggttcgttgaagcctcgtattatgtaaaa

SEQ ID NO: 15360 - DNA, 106 bp, Glycine max
  Clone ID: 701157639H1
atcgttaataaaatagtctacgtgtcacggatggatgaatttgttaatgaaatgattgtcaatgtgaccatctctaattgccaacataaggacatatttgtcatat

SEQ ID NO: 15361 - DNA, 111 bp, Glycine max
  Clone ID: 701157641H1
gtgcagtgtgacatccaaatgctcccttgtaagtatgagtttcatcaattaccacaaacctattggttaagatagagtaaacctcaacacaataagaatccattatgcaat

SEQ ID NO: 15362 - DNA, 104 bp, Glycine max
  Clone ID: 701157642H1
gagcccaattgaatcaacgaatcaatcatcatcacatcacgacgacgcatgattctggtcttgctctgttccaaaactgaatcccaatcacgaagaaaagaatc

SEQ ID NO: 15363 - DNA, 109 bp, Glycine max
  Clone ID: 701157643H1
tatgttctttcggggatgtatgggcagtgtggggcaacttggagtagggaatgccatcctcatcatcatccagctatgttttgcgggtataattgtgatatgtctagat

SEQ ID NO: 15364 - DNA, 103 bp, Glycine max
  Clone ID: 701157644H1
gacacaccgtttgttctattcttaactcaacttctgctacccactctcttcttccaagtccaaccacgcttttctctacagtcatgggcaaggtcaagatcgg

SEQ ID NO: 15365 - DNA, 103 bp, Glycine max
  Clone ID: 701157645H1
atattgcaaaaataaagagagaaggaaaaaaatttgaatcccacggtcattttattttcttgctcaactggcaggattttctacattaatacatttttcacct

SEQ ID NO: 15366 - DNA, 104 bp, Glycine max
  Clone ID: 701157646H1
ggggtgcgtagtgcgtaccccagcaggaaacggattacactaggatacagaagtaatctgttatcgttattccttccaccctgcccggtggaaccaaacgaaga

SEQ ID NO: 15367 - DNA, 99 bp, Glycine max
  Clone ID: 701157647H1
acttcctggtcttaagattgcggttttcgacatttacaagcctctctatgaccttgttcaatccccttcaaaatctggttttgtggaggcaaacagagg

SEQ ID NO: 15368 - DNA, 91 bp, Glycine max
  unsure (1)..(91): unsure at all n locations; Clone ID: 701157649H1
gaacaaccatactctgaagaccntgctctgaangttncaagggagcttaaagttcccattatncaaagtatttgtataggagttagtaatc

SEQ ID NO: 15369 - DNA, 110 bp, Glycine max
  unsure (1)..(110): unsure at all n locations; Clone ID: 701157650H1
caccaatattaagtgaaatatgccatcccaagatntttcgaanattttancggaagccccggatgccctcaattccattttttaacaaaatggaggtggttgcttcttga

SEQ ID NO: 15370 - DNA, 87 bp, Glycine max
  unsure (1)..(87): unsure at all n locations; Clone ID: 701157652H1
ggaccctttancttctttttcagataaatatcggtttagtctgcagcagaagtcgtcgttttcgtgaagctgatgctgaagaaaatg

SEQ ID NO: 15371 - DNA, 112 bp, Glycine max
  unsure (1)..(112): unsure at all n locations; Clone ID: 701157653H1
gacagcaaaacaattttcaaacttcaattnccattccataaccctaaatctcctctttgtttccgagtcagagagcaatggcacgtaccaagcaaaccgctcgcaagtccac

SEQ ID NO: 15372 - DNA, 100 bp, Glycine max
  unsure (1)..(100): unsure at all n locations; Clone ID: 701157655H1
tatctgtcgtgttcgatataacttaatttctgnccaattttcttgacagactttaataatttgtctgtgttagtccttgaagggaatgggactgctgatt

SEQ ID NO: 15373 - DNA, 108 bp, Glycine max
  unsure (1)..(108): unsure at all n locations; Clone ID: 701157656H1
tcgttggcgagaatgggaagnaagaaggggtatgttgagttcgaggagtcgccgccngacgatttttcatcccggcgaatccgtacaaggacccggtggcgatgctgg

SEQ ID NO: 15374 - DNA, 83 bp, Glycine max
  unsure (1)..(83): unsure at all n locations; Clone ID: 701157657H1
gaaagagacccngaaagggtgggaaccgcttttggaaatccattgggcttggatttaagactcccagggaagccatcgaagga

SEQ ID NO: 15375 - DNA, 66 bp, Glycine max
  unsure (1)..(66): unsure at all n locations; Clone ID: 701157658H1
ctgagaganattcgcaaaccctaatttcggaaagatcggccgatggctgcctccaaggatcgcgag

SEQ ID NO: 15376 - DNA, 101 bp, Glycine max
  Clone ID: 701157659H1
ggggagaatcaccaccatgccatcacacaccttcaaccagaggagttatcatcctcactgcttgcatttaaatcccatatgtccaaatcaattgaccaact

SEQ ID NO: 15377 - DNA, 102 bp, Glycine max
  Clone ID: 701157660H1
gacggcattgttaacaatcacaagatgtaaattgtcgtgtgagagagacagtgggtgagatctagagaacaataggtccttattattactattattaaccac

SEQ ID NO: 15378 - DNA, 102 bp, Glycine max
  Clone ID: 701157661H1
ggcagcgcttgatttgaggccaggcaagccccacttcaaccaccacacctctcctcgttcacgctacccctttctgctcttcttctacctttcaagttttaa

SEQ ID NO: 15379 - DNA, 109 bp, Glycine max
  unsure (1)..(109): unsure at all n locations; Clone ID: 701157662H1
gtgcagtgtgacatccaaatgctcccttgtangtatgagtttcatcaattaccacaaacctattggttaagatagagtaaacctcaacacaataagaatccattatgca

SEQ ID NO: 15380 - DNA, 69 bp, Glycine max
  Clone ID: 701157663H1
gatgtccagcgtggtggtgagcctgacgatgacgataacgactcagacgaccgactcagtcgacgacga

SEQ ID NO: 15381 - DNA, 104 bp, Glycine max
  Clone ID: 701157664H1
gatcatcacaaacctgtggaaggcaggcaaaggttgaagactgaagagactgctaagaggttgatgactgaagagactgccaagaggttgatgactgaagagac

SEQ ID NO: 15382 - DNA, 108 bp, Glycine max
  unsure (1)..(108): unsure at all n locations; Clone ID: 701157665H1
gaaagaaaaganaaatggcaacagaaacaaaagtgacagtattaggtggcatcaccgaagtgcagggagctgccaacagcgtcgagatcaacaatctcgctcgctttg

SEQ ID NO: 15383 - DNA, 116 bp, Glycine max
  unsure (1)..(116): unsure at all n locations; Clone ID: 701157666H1
gacctcacagcagagcaaaagctnaganagaaacnggcaacttcctnctgttttgctcccctgtttagngccttttcataagcttagnatgacacacaaggaattttccattgctc

SEQ ID NO: 15384 - DNA, 88 bp, Glycine max
  unsure (1)..(88): unsure at all n locations; Clone ID: 701157667H1
ggaagcaagtattccctggagtgtntgggtgnngtgttgnctgttgcaaattgcaacactcagtcagcactgcaccactgcatttcat

SEQ ID NO: 15385 - DNA, 105 bp, Glycine max
  unsure (1)..(105): unsure at all n locations; Clone ID: 701157669H1
cctcaacgcttgataatcttattgaaccatttanacaaacggatccaatagaataattccacaccttaacttgagtctaccctgttacattactgatcagctact

SEQ ID NO: 15386 - DNA, 120 bp, Glycine max
  unsure (1)..(120): unsure at all n locations; Clone ID: 701157671H1
gataccaaaaacaaaacacaagccaagtganagtgaganaaaataanantccatagaggcataatgtcaggngatcattcacaagattggggagacccttcatgtgggganggcncaaga

SEQ ID NO: 15387 - DNA, 94 bp, Glycine max
  Clone ID: 701157672H1
ggagcaaaaccctaatccctatttttcttcctcagtagtgtcatttacgcttctcttctctgcagcaactatgcctaaccctaaggtcttcttc

SEQ ID NO: 15388 - DNA, 114 bp, Glycine max
  unsure (1)..(114): unsure at all n locations; Clone ID: 701157674H1
ggtgcaattagctcagtatgttccagcacttgaaagactggctaccatgaggttgctgcagcaggtgtctaatgtgtaccaatctatgaagattganaccttatcggggatgat

SEQ ID NO: 15389 - DNA, 101 bp, Glycine max
  Clone ID: 701157676H1
ggaagctagaagctgatattgaaatgacaaggaaggagatagaagagccaacagaagtggaagttgagctcaagcgaaggcttcaacaaatgactgaccat

SEQ ID NO: 15390 - DNA, 100 bp, Glycine max
  Clone ID: 701157678H1
aatgaaggaaaatctgaacaccgtgaagccgaaaatgaaccagatgttcaattttggtcacaatctggagggctactacagcccaatagatcaggtggaa

SEQ ID NO: 15391 - DNA, 114 bp, Glycine max
  unsure (1)..(114): unsure at all n locations; Clone ID: 701157679H1
gtgcgaggtttgtacagaggaattctgccggaatactacaaggttgttcccggcgtgggcattgtctttatgacttatgaaacattgaagatggctctatcannncatttcaag

SEQ ID NO: 15392 - DNA, 117 bp, Glycine max
  unsure (1)..(117): unsure at all n locations; Clone ID: 701157683H1
ggaagcccaaaatattnncatagcattttcagaggaaaatgggcgggtacggttnngacttgttacttcctctcntgtttcttcnntctctccttacttcctttncagatctccgct

SEQ ID NO: 15393 - DNA, 112 bp, Glycine max
  unsure (1)..(112): unsure at all n locations; Clone ID: 701157685H1
ggaagcccaaaatattttcatagnattttcagaggaaaatgggcgggtacggtttcgacttgtttcttcttcgtgtntcttctttctctccttcttccttttcagatctccg

SEQ ID NO: 15394 - DNA, 109 bp, Glycine max
  unsure (1)..(109): unsure at all n locations; Clone ID: 701157691H1
ggaagcccaaaatattttcatagcattttcagaggaaaatggcgggtacggtttcgacttgtttcttcttcgtgtttcttctttctctccttcttcccttttnagatcc

SEQ ID NO: 15395 - DNA, 109 bp, Glycine max
  Clone ID: 701157693H1
ggaagcccaaaatattttcatagcattttcagaggaaaatggcgggtacggtttcgacttgtttcttcttcgtgtttcttctttctctccttcttcccttttcagatcc

SEQ ID NO: 15396 - DNA, 108 bp, Glycine max
  unsure (1)..(108): unsure at all n locations; Clone ID: 701157696H1
tcgttggncgagaatgggaagaaagaaggggtatgttgagttcnaggagtcgncgccggacgattttgatccggcgaatccgtacaaggacccggtggcgatgctgga

SEQ ID NO: 15397 - DNA, 259 bp, Glycine max
  unsure (1)..(259): unsure at all n locations; Clone ID: 701157701H1
gagatacaatggtggnaagctgtctgatcggatttnaatctcancttnctcattaagcnattgatcgatcgctaaaaaaaatcatcaacaacaatgaaatacgaacaaaatatgacatgctttccattcaagatggttcataaaaaccngagatnagctcatcataggtgaatactcgggtaaagcaatcaagaaacntgaattgagttgaacacaaccatttggtcaaagcccacnatttccaagtaacaagacanct

SEQ ID NO: 15398 - DNA, 241 bp, Glycine max
  unsure (1)..(241): unsure at all n locations; Clone ID: 701157702H1
atatcttgacctttttcctctccaaacatttcatcagatcctttgctgcttcttctgtcctccttttcatgtgtgtctccttgtgtttcttcactttacctttttnctctcctttttgttgatacacaggncctcctcntcctcttcttcatcttcatcatcttttttcttcacccctttcattattttctgtgtaccttctatggcggttttaccaagtagctcctcaaacttggaattg

SEQ ID NO: 15399 - DNA, 228 bp, Glycine max; identical to SEQ ID NO: 12226
  Clone ID: 701157703H1

SEQ ID NO: 15400 - DNA, 245 bp, Glycine max
  unsure (1)..(245): unsure at all n locations; Clone ID: 701157704H1
ggaatgaagagtgantagngnagtgtgcacctaacaagatagaaagaagcaatcgctgccatgtttcctttcccagtgaagttgaaaattgagatcaatcaattttttattattntatctttcatcatnttgtagagcgaattctgtgttganggnccttccttattgatngtnnaanancaatcctggccantgaaattggngggccatgcttgtgattgcctatcatattctccggttctcaa

SEQ ID NO: 15401 - DNA, 240 bp, Glycine max
  Clone ID: 701157705H1
gcaccacactcttattgttttcttcatatcttccttgtcactgcccgtgtgtcgccgccatggccaccgtcaccacccaagcctccgccgcaattttccggccatgtacctcgaaatcgaggtttttgaccggctcttccggtaaacttaaccgggaagtgactatgcggccaatggggtgccctccttctgcctctttcaaggttgaagccaagatcggagagtggttacctggcttgg

SEQ ID NO: 15402 - DNA, 241 bp, Glycine max
  Clone ID: 701157706H1
ggcgtttgggagaagaagagcaaaatcgctgtgaaaatgagcggaacggtgaagaaagttagcgatgtagcattcaaggtgggaaggaacatcgattgggatggaatggcgaactttctggtctccgatgaggctcgcagggagttctccaatctccgtcgcgctttcgacgaggttaactcccaactccaaaccaagtttagccaggaacctgagcccattgattgggattactatagaa

SEQ ID NO: 15403 - DNA, 239 bp, Glycine max
  unsure (1)..(239): unsure at all n locations; Clone ID: 701157708H1
ttgtgacgcttttagtcattaatatctttatttactaacaatgttaagtgtgtattaacaaaatgatcattttgatcttcttttttaaacataaaagattaaaatggattttctaaaaaataaataatcaaattaagcttaananaagataagtgatcaaatagattatttggtctatatagattatagaatatacgtatagcnnccgacttctaaaataaatatgttaaaagtcatgt

SEQ ID NO: 15404 - DNA, 239 bp, Glycine max
  Clone ID: 701157709H1
gaacggaaaagcactggcgcagtaccctgaggcttctcttctcttctcttctctgtcgtgagtcaccatggtgagggttagtgtgctgaacgatgctctgaagagcatgtacaatgctgagaaaaggggaaagcgccaagtcatgattaggccattctccaaagtcattatcaaattccttttggtgatgcaaaagcacggatacatcggagagtttgagtatgttgatgaccacaggg

SEQ ID NO: 15405 - DNA, 242 bp, Glycine max
  Clone ID: 701157711H1
gaggactgtagaggaaagaatgaagcatgcggtgccagctaagctgtatgtcggttcctcctcaataatcgtctttccctgccccatgccatcatccagtggttagggttggagaacttgccctcacttttttcttccttcttcactcttagtctcactcactcaccattcaccattgtccttgcatcgctctaagcaacacgtccttttcttcacatattccagtgtgctgttctgagatt

SEQ ID NO: 15406 - DNA, 235 bp, Glycine max
  unsure (1)..(235): unsure at all n locations; Clone ID: 701157712H1
gaagtccgttttgattgccaaggtggattgtgatgaacagaaaagtgtttgtagtaaatatggggtatctggttaccctaccattcaatggtttcctaagggatctctagagcctaaaaagtatgaaggtgcacgtactgcagaagcccttgcggcgtttgtgaacattgaagcaggtacaaatgtgaagatagcttctgttccatccagtgtggnagttccccctcccagataa

SEQ ID NO: 15407 - DNA, 222 bp, Glycine max
  Clone ID: 701157713H1
ggctccgccatttttcgtggctgctgttcttgcgcgtgaacaagcctcaggtaagccaaaaccatggttaagcataacaatgttatcccaaacggacacttccgtaagcactggcagaactatgtgaagacttggttcttcagccagcacggaagacaaggagacgattggctcgtcagaagaaagctgtgaagatattccccagacctacggctggacctc

SEQ ID NO: 15408 - DNA, 243 bp, Glycine max
  unsure (1)..(243): unsure at all n locations; Clone ID: 701157714H1
ggcacaagtgagtttgttgatcgagataactagaaacagtgtgatgaaaatgaaggtccttgttttcttcgttgctacaattttggtagcatggcaatgccatgcgtacgatatgttccctctccgaatgaacactggctatggtgcccgtactccggaggtgaaatgcgcaagttggaggcttgctgtggaagcacacaacatctttggctttgagaccattcctgaagagtgcgntgaagc

SEQ ID NO: 15409 - DNA, 243 bp, Glycine max
  Clone ID: 701157715H1
gaagactttgattttggaggcggttttagcggaacgcattcaggtaataagaggtcatctcccgactatgacgaggatgaatatgaaaatgatccttttggacacaagaaggccaaatctaaagctgaagaagctgcttctggtgtgacaacaggaaagattttgtctcttcgcgagagtcttcagaactgtaaggacatgcttgttacatgccaaaatgaacttgaggctgcaaaatctgag

SEQ ID NO: 15410 - DNA, 245 bp, Glycine max
  unsure (1)..(245): unsure at all n locations; Clone ID: 701157716H1
ggagttcagagttcagaactcagaagttgggtttttcttccgcttcgctatctatgacacaatttgaattcattgcttctcatatgattgtgtttatttgagaagttaggcgtttcctggatgctggcagttatgaaggagctattttgattgaatctgaattataaattcatcaccaatgggttacagatgcattcagtgtgggtgtcctgtcaaaacactttacgtgcagtattntccaggca

SEQ ID NO: 15411 - DNA, 243 bp, Glycine max
  unsure (1)..(243): unsure at all n locations; Clone ID: 701157717H1
agatgaaaaataaaggaaggaatgttgtgtggtcaattgcgatggataagtgtctaattgaagccctggcagctcaggcaaaacgtggaaacaaaattgacaaatgtttcaatgaaaatgcatacacggancngangtgtagcagtaaacacttgcttcagctgaatttgagtaatcagaaagttatcaaccgtttgaaaacaattaagaagaggtatagagtaataaaagatatcctaagtc

SEQ ID NO: 15412 - DNA, 238 bp, Glycine max
  Clone ID: 701157718H1
gatccataaccatggcgtctaactctgcttccgctctttacttccttttatgcctatcgcccatcactttgcttctttctgcgtttcgtgctcaagctcaatctcatgctccagctcccactttcaagtactgtgaaaagaatgcagactatgctgtgaaggtgagtggagtggaaatattgcctgaccccgtggagagaggagtgccattcacctttaagatcccagcttatactcc

SEQ ID NO: 15413 - DNA, 238 bp, Glycine max
  Clone ID: 701157719H1
gatagctattcgcagttcccaaattcattttaatcctaattctgcacttcttgatcattcgatttttctcctcaagatgcagatattcgtaaaaactttgaccggcaagaccatcacccttgaggtggaatcctccgacaccattgacaacgtaaaagctaagattcaagacaaggaagggatcccacctgaccagcagagacttatctttgcgggtaaacaacttgaggatggtcgc

SEQ ID NO: 15414 - DNA, 235 bp, Glycine max
  unsure (1)..(235): unsure at all n locations; Clone ID: 701157721H1
gagagtggtggagtgtgcaaaagagcgtcgtagtcgcaaccctaatcagaagaagcgcanttcaagcgagtgacagccaccagccatgggtcgtatgcacagccgcggtaagggtatatcctcttctgctttgccctacaaaaggacacctcctagctggctcaagatctcttcgcaagatgtcgaagaaaatatctgcaagtttgcgaagaaaggtttgaccccgtctcagatt

SEQ ID NO: 15415 - DNA, 239 bp, Glycine max
  Clone ID: 701157724H1
atcagtggtgccccccaggataacaacataatgctgtggaatgctgtcatatttggtcctgatgatactccatgggatggaggcatgttcaagttgacactccaatctactgaggactatccaaataaaccaccgactgtacgatttgtgtctcgcatgtttcatccaaatatttatgctgatggaagtatttgtttggatatattacaaaatcagtggagtcctatttatgatgtggc

SEQ ID NO: 15416 - DNA, 242 bp, Glycine max
  Clone ID: 701157725H1
gatcgaagcaaaaaatgaaaacccaaagtgcttctctcctctgtctttttctctctcttgctatccttttggctagtggcactgctgcaagtgcaactccaagaagcgcagtgccaagccaccatgtttcaacattcaacagaagcctttttccttccacttttctctttggaattggttcttctgcttaccaggcagaaggagcagcaagtgtagatgggagaggaccaagcatatgggac

SEQ ID NO: 15417 - DNA, 220 bp, Glycine max
  unsure (1)..(220): unsure at all n locations; Clone ID: 701157726H1
gncggtcgttcatgttgcncgaagatgttcctcctagtcanactgctgttgttgatgctgacattagtgtcagcaaagaagtgagtcaaccactggagaatggaaatgtatcagttactganaaggtggttcctgttaatgctgttaaagaatctagtcatcaggagcatagtcattatcatgctgagaaagctgcttctaataatgcactggaagatag

SEQ ID NO: 15418 - DNA, 199 bp, Glycine max; identical to SEQ ID NO: 11438
  Clone ID: 701157727H1

SEQ ID NO: 15419 - DNA, 238 bp, Glycine max
  Clone ID: 701157729H1
gggcatcaaattattgtcagatatgctgaatgcatgggattgccattgttcaggaggcgaatacaaggatcctcaaggcatcaggagcttggttacaaagaaactcaaggtgatgaagttgaagacctgtgcattttgttacgtgaagttaaaaggcagataccctcagttagtgcagtttcttctggagccattgcatctgactatcagagattgcgggtggaaagtgtttgttcaa

SEQ ID NO: 15420 - DNA, 244 bp, Glycine max
  unsure (1)..(244): unsure at all n locations; Clone ID: 701157731H1
gctttgatttggacaattgataaactttcagacatatgaagttctttttagttccaatacacctcaacaccgaggtattacatatcttctcttctaggagttacaacaaacattggcataggcaaatatcaagggcgaacatctagtattgggataangaaaaaaaatctatttacagtttcctcaaagatagggtttggaatgggattcaccatcagtcaacaaagttcatctccaaagtggg

SEQ ID NO: 15421 - DNA, 244 bp, Glycine max
  unsure (1)..(244): unsure at all n locations; Clone ID: 701157732H1
gattactaccaagtnaaaaagcaattaactaagcatatatagcgtgtaagacagtgagaaaaaaagtgttgtgtagagagaaatggctaggtggtgcatcttggtggttcttgcccttgtcgtggttgcaagtgccagaaacatgcccaatgacgcaggtttggaggaccagaagaacttcctcgggtatgggttctctggnggctgcaacaatgggcttccctttggaggatgggttctgggt

SEQ ID NO: 15422 - DNA, 257 bp, Glycine max
  unsure (1)..(257): unsure at all n locations; Clone ID: 701157733H1
gagatacaatggtggtaagctgtctgatcggattttaatctcaactttctcattaagcaattatcaatcgctaaaaaaaatcatcaacaacaatgaaatacgaacaaaatatgacattctttccattcaagatggttcataaaatcngagataaactcatcatagtttaatactcgagtaaagcaatcaagaaacttgaattgagttgaacacaaccattttggtcaaagcccactatttccaagtaacaagacatc

SEQ ID NO: 15423 - DNA, 248 bp, Glycine max
  Clone ID: 701157734H1
accgtttgttctattcttaactcaacttctgctacccactctcttcttccaagtccaaccacgcttttctctacagtcatgggcaaggtcaagatcggaatcaacggatttggaagaattggccgtttggttgccagagtcgctctgcaaagagacgatgtggagctcgttgccgttaacgaccctttcattaccaccgattacatgacatacatgtttaaatacgacagtgttcacggacactggat

SEQ ID NO: 15424 - DNA, 236 bp, Glycine max
  Clone ID: 701157735H1
gatcccaatcagaaaaagttagggtttgtaactttgtcttttgcttgcgaatctgaatcgaataataatcaatcaatcatcatgtcgtcggcgaagaagatcacactgaagagttcggacggcgaggctttcgaggtggacgaggcggtggcgctggagtctcagacgataaagcacatgatcgaggacgactgcgccgacagcggcatccctctgccgaacgtgacgagcaagat

SEQ ID NO: 15425 - DNA, 235 bp, Glycine max
  unsure (1)..(235): unsure at all n locations; Clone ID: 701157736H1
ggatattatcatttcatatcacacattcacatcctatcatcatcgacaacacgctatccccattgcttcttctcttctccctctctcgtttcctacttgacggcgccgtttcgttctccagaagatgcttctgagtncttcgcgctgcaactagacatgatgagttcaagtttcaagacatgggctgtgggatttgcacttggaaatgaaggagaggcaacgttggagagctgaa

SEQ ID NO: 15426 - DNA, 242 bp, Glycine max
  unsure (1)..(242): unsure at all n locations; Clone ID: 701157737H1
ggaaaaatgatggaaaggctctggggtgaaaacttctttgatccagccacaaagaaatggtccagcaagaatactggttctgctacctgcaagcgtgggtttgttcagttctgttacgagcccatcaagcagattattaaacacttgtatgnaatgatccaggaaggataaagccgttggcctatggctgcaaaancttgggggtcaccatgaaatctgaggagaaggacctaatgggcaaa

SEQ ID NO: 15427 - DNA, 235 bp, Glycine max
  Clone ID: 701157738H1
atgcagaatcaaagtacctagcaggccttggagtttctcgtcagcgccaagccatagttgatgggctaagagacagtgttctagcattttctggtaatgtgcctggaacatcatcaaaggatatcatggacatggttctcatgactcaatattttgacacaatgaaggagattggtgcatcctccaaatccaatgctgttttcattccacatggacctggtgctgtgagtgatgt

SEQ ID NO: 15428 - DNA, 240 bp, Glycine max
  unsure (1)..(240): unsure at all n locations; Clone ID: 701157740H1
ggcgtgtgagcaaacacacaacactgaagaaacaagcttcacttccaccccttaatggcccgaggcaaggcgaagaagaaggaagaaggtgaagacaccgatgtcgcaaacccagaaacgttagagcggaagaggctgaaatccttggccatttccaacaagattctctcggagacccctgcacggagctccgttcacctnangnnnaantccgttgtggccaagcaccacggcaaagat

SEQ ID NO: 15429 - DNA, 235 bp, Glycine max
  Clone ID: 701157741H1
tttcaagttattgtgagcaaagaaagatagtgagtgaagtaactgaagagaagaaaaaatgccgtgcctcaacctcagcaccaacgtgtccctcgaaggcgtcgacacctcttccatcctcgccgaagccacctcctccgtcgccagcataatcggcaaacccgaagcctatgtgatgattgtactgaaaggatcagtacccatagcttttggtgggaatgagcagccagcagct

SEQ ID NO: 15430 - DNA, 234 bp, Glycine max
  unsure (1)..(234): unsure at all n locations; Clone ID: 701157743H1
ggtagagaaagagagaggaagatgtcgaagcgtggtcgtggtggttcggcggggaacaagttccgcatgtcgctgggtcttccagtggcggcgacggtgaactgcgccggcaacacgggggcgaagaacctctacatcatttcggtgaaagggatcaaaggccgtttgaaccgtcttccttcggcctgcgttggcgacatggtgatggccaccgtgaagaagggaaaacccgnt

SEQ ID NO: 15431 - DNA, 234 bp, Glycine max
  Clone ID: 701157744H1
tactgattatctaataggtgtttttccctatataaattgaattagatgatatgtgtcatagaatcccttactgatacttggtatttgatgggttcttttaaactgtgaatttcatttggaactgcttgtgagctccaccctgtatataactcttcaaaataatattccttttacgtgtggcaccctcacggaaccattgtgaattggtggttttaatttcaaaactccatgttg

SEQ ID NO: 15432 - DNA, 179 bp, Glycine max
  unsure (1)..(179): unsure at all n locations; Clone ID: 701157745H1
ggcagaaggttctagaagccgccaatttttattnctttnaatttgtctgantcaganacgttcgtgattntaaccatggnttcttcgtgtgtcccaaanggcgacgtttctgggttcaaagataaggagtcaatggttgaccctttcttggncgaggctcttgagaacccncggcaccg

SEQ ID NO: 15433 - DNA, 216 bp, Glycine max
  unsure (1)..(216): unsure at all n locations; Clone ID: 701157746H1
ggtacaagtgagtntgttgatcgagataactagaaacagtgtgatgaaaatgaaggtccttgttttcttcgttgctacaattttggtagcatggcaatgccatgcgtacgatatgttccctctccgaatgaacactggctatggtgcccgtactccggaggtgaaatgcgcaagttggaggcttgctgtggaagcacacaacatctttggctttga

SEQ ID NO: 15434 - DNA, 242 bp, Glycine max
  unsure (1)..(242): unsure at all n locations; Clone ID: 701157748H1
gtaactacattttttttttcaatctaatcagtaaattttcaaaaaaattagtatcaagcttgagttttgaagcactttctttatttccagaacatgaacaagtaaaaataaattatgaagaagaaaaaaaacaaataataaaaatattatttgatgcaattagaactgatttgaacgaaaaaacaatagtaaatggaaannttccaaagtgtattagaataaacgaaatccgtaaaaaagtt

SEQ ID NO: 15435 - DNA, 244 bp, Glycine max
  unsure (1)..(244): unsure at all n locations; Clone ID: 701157749H1
gatggatgtgtaattgtgtaggtggcagaaaaaatgaacttcatagaacaactcaagttggaaaaggaaagacaacaaaaggtgcactatctttacctttctaaaacatatttccatgacaaatgacatgctctgagttaaacattaatgtcttgtacttctctcccttgtgtagttnnnnnnnnnnnnnnnnatcaggaggttgaggaaggaactcattccaaaagctcaaccaatgccttat

SEQ ID NO: 15436 - DNA, 236 bp, Glycine max
  Clone ID: 701157750H1
ggtgttgacaaaggaaacgtgtagtacgagggccaatttccaaaaaccttttgtctcgcaacctcacctcttcctccttcaatctctttcggaatttcccaaaatccttagtgggaggaagagatggttctgactcagaagattcacgaagctttcaaaggcaccgtcgagaggatcactggcccccgaaccgtttccgccttcaaagaaaaaggagttctcagtgtctccgagtt

SEQ ID NO: 15437 - DNA, 239 bp, Glycine max
  Clone ID: 701157751H1
gtgaccacatataccatggtgttcatttccatggccgtggccactgactcaaacgtgacaggacagctatcaggagtagcagtaggttcttctgtttgcatagcaagcattgtagccggaccaatatcagggggatcgatgaatccagcaaggacattaggtcctgcaattgcgacatcatactacaagggactttgggtatattttgttggacctattactggggcggttttagcagc

SEQ ID NO: 15438 - DNA, 234 bp, Glycine max
  unsure (1)..(234): unsure at all n locations; Clone ID: 701157752H1
ggatgtagaaaagtgaacggcagctgggaagctaaacgacggcgtggagtgatgatattggaggagatgttcttctgcagcagcagtagcagtagccagcagcttcaaccatttgaaaatccttcttccaatcggctccttctctctggccctccttcttctgggaagacttctcttcttttccaatttgcattcaatgtagcactgcancccgactcaaataacaaagtcatc

SEQ ID NO: 15439 - DNA, 233 bp, Glycine max
  Clone ID: 701157753H1
gggtgtagcgcagagaaagaactagaactagaactagggtttcatctttgccatcagaaacaacaatgatttacgacgttaactctccccttttccgatccttcctcagccagaagggaggctcctccgataagaggaaaacggatgaacagaagccaaaagagcagaaacccaaagccagcgagaacaaacctataatgacagagtgacaacaaatttgctgcattcagttg

SEQ ID NO: 15440 - DNA, 230 bp, Glycine max
  unsure (1)..(230): unsure at all n locations; Clone ID: 701157754H1
ggaggcagcgtgagcgtggnagatgccttgggcacggctnncngggtcncccnggctcggcgttgctaattgncgtgggcctccatttctccgtctcctgttgntggtttcctttggctcggngctgtcgcngccncgcggtcngctgctgaagnttcttntcgtcttntccancnggggagtctctcgcgtcctggtttcgagnatcgttgncgacnntgtnngtnnga

SEQ ID NO: 15441 - DNA, 232 bp, Glycine max
  Clone ID: 701157755H1
ggcatcaattcaaaatatatcatcaattataagcatgggtttgtggaacacaacgaatgcagtgtcttgccgctttcacaagtttggtgatgaccaaaagaatctggtcttccaaggtgatgccacgtcttcttccaggggcatagaactcacaaagttagacggtggaggaaaaccagtgggtggcagtgtggggagagtgttatactcttctccagtgcacctttgggaa

SEQ ID NO: 15442 - DNA, 210 bp, Glycine max
  unsure (1)..(210): unsure at all n locations; Clone ID: 701157756H1
ggggggaaggagtnnntgatggtttntctggncntngaccaaatgnttcacttattcctggtcttattgatgatgtagccttgaattgtcttgcttgggttagtggatctgattatgccgtgctatcgtgtattaataaaaggttcaataaactgntcaatagtgggtatctatntgggttgnngaaacaattgggggcngtggagcatt

SEQ ID NO: 15443 - DNA, 230 bp, Glycine max
  unsure (1)..(230): unsure at all n locations; Clone ID: 701157757H1
ggaggaatgaaatggccaatggtaacaacattagtcatttcttcaagctcttgcttttccttctaactttccactcttgtctcgctgagattttcttccaagagagattcgaagatggatggaagagccgttgggtgctatccgattggaaaaggagcgagggaaaagcgggtaccttcaagcacacagcagggaaatggtntngggatcctgatgacaaaggtcttcag

SEQ ID NO: 15444 - DNA, 232 bp, Glycine max
  Clone ID: 701157758H1
ggttgattggaggaaggaaggtgctgttcctccagtcaaagaccaaggaggctgtgggagctgttgggcattctcagcaatcggtgcagtggaaggaataaataagatagtgacaggtgaactgatttcgttatcagaacaagaattggtggattgtgatacaggatataacgaaggatggcaatggaggacttatggactatgcatttgagttcattatcaacaatggcgg

SEQ ID NO: 15445 - DNA, 231 bp, Glycine max
  unsure (1)..(231): unsure at all n locations; Clone ID: 701157759H1
gacccatacaatacaacacagttatccattcacatttcacagttagcacttagcagactctgctgcagtgaggtgaggggagnnnnnnnnnnnnnnnnnnnnnncctttcctttccgccagaatccgttgagaatggcgttgccggtagtcgtcgatgcagagtacctcaaggaggtcgacaaggctcgccgcgatctccgcgcactcatcgctaacaggaactgcgctcc

SEQ ID NO: 15446 - DNA, 134 bp, Glycine max
  unsure (1)..(134): unsure at all n locations; Clone ID: 701157760H1
aatgcatgactctccaaacgaggagaaacatttganccccctacggggggctncttatgctggaaaaagtccaaatgccattgatggactttgtttaagtgttagtgaaagagtgggtgggtgtgtgaganaga

SEQ ID NO: 15447 - DNA, 234 bp, Glycine max
  unsure (1)..(234): unsure at all n locations; Clone ID: 701157761H1
ggatgctttcccaaattactgtttactattgggattgatctaggttgggttcgcttgattacaccagaaaatgttctaagttgttattgctttactttggttggtgttggaattttactgacanccctctgctggtttgttcgtcaattggttggatttctcatagcgaggggggatttttcaatgctattatgagtttcccatccaattacccaaatagtccaccttcagtta

SEQ ID NO: 15448 - DNA, 223 bp, Glycine max
  unsure (1)..(223): unsure at all n locations; Clone ID: 701157762H1
ggaacaactaaaggagagtgacattacgtagtgtgtgggaaacaaagagagatggctaagtggtgtatgttggtgttggttctgctctagctctggctgtggccacaagtgccagagatgcacccgaagatgtancgactcaaggaccagaagaacttcatcagctatgctggagttggtggctattcaggaattggaagcaatggactaccttttggaggtg

SEQ ID NO: 15449 - DNA, 224 bp, Glycine max
  unsure (1)..(224): unsure at all n locations; Clone ID: 701157763H1
ggaactaactaaaggagagtgaaattacgtagtgtgtggganacaaagagagatggctaagtggtgtatgttggtgttggttcttgctctagctctggctgtggccacaagtgccagagatgcacccgaagatgttggtctcaaggaccagaagaacttcatcagctatgctggagttggtggcttntcaggaattggaancatgggtnacttttntgggggcg

SEQ ID NO: 15450 - DNA, 246 bp, Glycine max
  unsure (1)..(246): unsure at all n locations; Clone ID: 701157764H1
ggattactaccaagtgaaaaagcaattaactaagcatatatagcgtgtaagacagtgagaaaaaaagtgttgtgtagagagaaatggctaggtggtgcatcttggtggttcttgcccttgtcgtggttgcaagtgccagaaacatgcccaatgacgcaggtttggaggaccagaagaacttcctcgggtatgggttctctggnnntngcaacaatgggcttccctttggaggagtgggttctgggt

SEQ ID NO: 15451 - DNA, 235 bp, Glycine max
  Clone ID: 701157766H1
ggcatcgaaccaaaattagggtttttgtcgtagcaggaagaagcagcaatggcgccgaagataacacgcaaggtcagcagaaaccccgaattgataaggggaatcggaaagtactcgaggtcgcagatgtaccacaagaggggcatttgggctatcaaggccaaaaacggtggcgttttacctcgccacgaccccaaacccaaacctgaaactcccactgaaaaaccacccaaat

SEQ ID NO: 15452 - DNA, 206 bp, Glycine max
  unsure (1)..(206): unsure at all n locations; Clone ID: 701157767H1
cagcacccatttggatcctctcttctcttctttgatctccgttaccctttttgttttctcannnnnnnnnnnnnnnnnnnatctttcgaagttcgtttgcgtgtgttgtgtggtcagtcaccgatggcagcaccacctgcgagggcacgtgccgattacgattacctcatcaagcttcttcttattggcgatagcggtgtgggaaa

SEQ ID NO: 15453 - DNA, 216 bp, Glycine max
  unsure (1)..(216): unsure at all n locations; Clone ID: 701157768H1
atacatgatgatcctgaaganagcagcacagcagggatgangatggtcgtggagatagaaagcacagaagggaggaggaagagcggggaaacaaaggttatgagagggaaagccgtggagattactccaagagaggcagatactaaggttctcgttcgagtgagaggtgtgaaagtgactcatgaactgtgatccaggcatcttgagaatgtttac

SEQ ID NO: 15454 - DNA, 232 bp, Glycine max
  Clone ID: 701157769H1
gggtgatggaacagcaggttggcttcttggagttgtttgtgatctcaaattatctcatcctccaccaatagccacggtccctttgggcacagggaataatctaccttttgcatttggttggggaaagaagaacccagcgacagatcaaagatccattgaggcatttttagatcaagtcatgaaggctacaaaaatgaaaatagacaactggcacattctcatgagaatgaga

SEQ ID NO: 15455 - DNA, 232 bp, Glycine max
  unsure (1)..(232): unsure at all n locations; Clone ID: 701157770H1
gggggctttgtacagttcagcctatcactctctcgaagcttcctaacgcctcctcttttcttcctaaacctaaaccctctcttcctcagtcttacactccctccgccgcacacttatctcgtactttctctattccttttaatttccccattcaatcctaaccataacctaggattcgttctatntggtgtttttttttaattgttctcttcttaattttgcnnntnnncgt

SEQ ID NO: 15456 - DNA, 235 bp, Glycine max
  unsure (1)..(235): unsure at all n locations; Clone ID: 701157771H1
ggaagcaaaaaatgaaaacccaaagtgcttctgctcctctgtctttttctctctcttgctatccttttggctagtggcactgctgcaagtgcaactccaagaagcgcagtgccaagccaccatgtttcaacattcaacagaagcctttttccttccacttttctctttggaattggttcttctgcttaccaggcagaaggagcagcaagtgtagatgggagaggaccaagcatnt

SEQ ID NO: 15457 - DNA, 236 bp, Glycine max
  unsure (1)..(236): unsure at all n locations; Clone ID: 701157773H1
ggaataaaaagatggaagaaaatgaganatttgcagtatccaaagctggagcagtcgatgcatacgccatggttgattcgttcaagattcatgaaaaagtgaactctcaaatcttcactggtgtgatggcctttgtgatgggcatagtgacaatggtgaggatgactaagaacatgccaaagaagctcacagacgccaacttctactccaactttggtggcgaatataaagggcag

SEQ ID NO: 15458 - DNA, 229 bp, Glycine max
  Clone ID: 701157774H1
gatagatagctccttcaattagggtttttgtgatctgcaagctacgatgggtaagggaacggggagtttcggtaagagaaggaacaagacccacaccctctgtgtgaggtgtggccgccgcagtttccacctccagaagagtcgttgcgccgcgtgcgctttccccgctgcgcgcaccaggaaatataactggagcgtgaaggccattaggagaaagaccaccggaact

SEQ ID NO: 15459 - DNA, 211 bp, Glycine max
  Clone ID: 701157775H1
gacaacatcatcatcaacaacaagcagatcaatctctctctctctcaaccataatagtcatgggtttgaaggaggattttgagcagtatgctgagaaagcaaagactttgccaccgactcaatcaagcgaagacttgcttatcctttatggattgtacaaacaggccaccgttggacctgtcaacaccagccgtcctggaatgttcaacat

SEQ ID NO: 15460 - DNA, 210 bp, Glycine max
  unsure (1)..(210): unsure at all n locations; Clone ID: 701157776H1
catgactcctatatctgaaacatttactgttgatattaattcaaagcttgatagggaactgatgaatgagatattggagaaagggcacagcagagtcccagtctattatgagcagcctacaaacattattggacttgtactggtcaagaatttatngacagttcatccagaagatgaagcacccatgaagagtgtaaccatacgcggttt

SEQ ID NO: 15461 - DNA, 235 bp, Glycine max
  Clone ID: 701157777H1
gtgacaaaggaagaggacgttgaaaactgcgtgaacacaacggtttccaagtatggcaaattagatatcatgtttaacaatgcaggtgtatctgatgagatcaaaacaagcattcttgacaacaacaagtctgattttgagagagtgataagtgttaacttggttggtccttttctgggaacaaagcatgctgcaagggtcatgattcctgctaaaaagggatgcataatcaaca

SEQ ID NO: 15462 - DNA, 248 bp, Glycine max
  Clone ID: 701157778H1
ggcacaagtgagtttgttgatcgagataactagaaacagtgtgatgaaaatgaaggtccttgttttcttcgttgctacaattttggtagcatggcaatgccatgcgtacgatatgttccctctccgaatgaacactggctatggtgcccgtactccggaggtggaaatgcgcaagttggaggcttgctgtggaagcacacaacatctttggctttgagaccattcctgaagagtgcgttgaagcaaca

SEQ ID NO: 15463 - DNA, 240 bp, Glycine max
  unsure (1)..(240): unsure at all n locations; Clone ID: 701157779H1
gtcgattccaaagtcatcaaggcccagatctgggacaccgcaggccaagaaaggtatcgtgccatcaccagtgtatactatcgtggggcagtcggtgcacttctcgtgtatgatgtcactcgccatgcaacatttganaatgttgacagaaaancaaaaagaattgcggaaccacacagatgccaacattgttgtgatgctcgtgggtaataaatcagaccttcgtcaccttgtagccgt

SEQ ID NO: 15464 - DNA, 232 bp, Glycine max
  Clone ID: 701157781H1
gacagctattcctcttaagcttgctactgagtttccacactgcataccttaggtcttccgaattcgaagttaatttgcaagatggctaaggaaaaggctcagatcaacattgtggtggttggtcatgtggaccctgaggaggcaaccaccattaacgagctgaagaagcctgttgtggagaaagaagctccagggcatgccatatgagggcatgcacgtacggcctcggagg

SEQ ID NO: 15465 - DNA, 231 bp, Glycine max
  Clone ID: 701157782H1
ggaatatcgcttgactatttttgttcttgcgcactctcctttgttgactccttttctctctgtgtctacaaacctagcttctcttgctctcactctttgttaaagctccctccagtgccgcgtagttgaaactacctctcgccctcactctctgcaaagttaagatccctctctcccccttgaaccctctcgttgtgtttctctcaccatcgaaccttctctcgctctctg

SEQ ID NO: 15466 - DNA, 229 bp, Glycine max
  Clone ID: 701157783H1
gtaagagaaggaacaagacccacaccctctgtgcgaggtgtggccgccgcagtttccacctccagaagagtcgttgcgccgcgtgcgctttccccgctgcgcgcaccaggaaatataactggagcgtgaaggccattaggagaaagaccaccggaactggaaggatgaggtacttgcgtaacgtgccccgtagatttaagagtggcttcagagacggtaccgaagctgc

SEQ ID NO: 15467 - DNA, 228 bp, Glycine max
  Clone ID: 701157785H1
gatagtagcaaagtgttacaattcaaaagtcacatgtaaacaggaacaaagaggtgttccaagaaactacaaaactagtactcaatcccatctttttgcaatcccagtttcaccgatctctaggagaggatggattatcagtacattctaggagggattatggcttgtagttttgcttttttgtatgttgtgtacagttttggagcaaaggtcacagattcaagttca

SEQ ID NO: 15468 - DNA, 230 bp, Glycine max
  unsure (1)..(230): unsure at all n locations; Clone ID: 701157786H1
ggcagccaaagaaaagaaaatcctcaattttctgagcagccaaacactctctctctgtctctcgaaaattctcagtttgcagagaaaatctgaatcatgtcgtggcaagcgtatgtcgacgatcaccttctgtgtgacatcgaaggtaaccacctcactcacgctgctatcatcggccaagacggcagcgtttgggctcagagtaccgacttccctcagttcaaanntna

SEQ ID NO: 15469 - DNA, 228 bp, Glycine max
  Clone ID: 701157787H1
ggcgtgttttcatcattgtcgttctgaacggaaaagcactggcgcagtaccctgaggcttctcttctcttctcttctctgtcgtgagtcaccatggtgagggttagtgtgctgaacgatgctctgaagagcatgtacaatgctgagaaaaggggaaagcgccaagtcatgattaggccatcctccaaagtcattatcaaattccttttggtgatgcaaaagcacggat

SEQ ID NO: 15470 - DNA, 243 bp, Glycine max
  Clone ID: 701157788H1
gcgtctggaatgtcaccaaacgtgctgttggcgtcgaagtcaacaagcaggttggcaacagaattataaggaagaggattcatgtgcgggtagagcatgttatgccttcaaggtgcactgaggagttccgcctcaggaagattaagaatgatcagctaaaggccgaagccaaggtcaagggtgagaagatcggcaccaagagacagcctcagggtcccaaacccggtttcatggtggagggtg

SEQ ID NO: 15471 - DNA, 230 bp, Glycine max
  Clone ID: 701157789H1
gatgtcatagtattatcattcattctcatctttctctcttctctctccacccaaaccctaactcccgaccctgttcccctctcgtatccgtcatgaaaggaggaaagtccaagaccgaatctaagagagccgatcccaaacttgctgtgaataagaagggagccgccaccaaggctaggaaacccgccggcaaggggaaggcagcgaaagaccctaacaagccaaagagg

SEQ ID NO: 15472 - DNA, 229 bp, Glycine max
  Clone ID: 701157790H1
aacaaagaagaagccaaagaggaaaagaaggaagaagagaagaaagaggagccaccaccggaaatggtgcccaaagttgatatgcattgtgaggcctgtgcaaggaaggttgcaaaagcattgaaaggattccaaggagtggaagaggtgagtgcggatagcaggacaagcaaagtggtagtgaaaggaaaggcagcagaccccataagggtgtgtgagaggctacaaa

SEQ ID NO: 15473 - DNA, 231 bp, Glycine max
  Clone ID: 701157791H1
ggaatgaggagaagagaagaaggctgagaacaacaacgaaaaagggtttttggttttggactctgaaagaaactcaaagtgatgcgtttcatcgttctttcgcccaaaccctaacctcgtcctcgtgcattcattccccgcgatcaggtgtgtttttttccattgcaaacagcatgaattttgcagcatcattgtgcagaagattgaatatcaaggaacttgtgacatatg

SEQ ID NO: 15474 - DNA, 236 bp, Glycine max
  unsure (1)..(236): unsure at all n locations; Clone ID: 701157792H1
gggttgagctatgatgaagtggaacaagatgatatagaactacttaaactggaaacctccttagattacttatgtaacttgccacctcatagatttgtgactctgtatgctaagacaattcctgagtccattgttggtgagacatttttggagcaatatcaaaatcataattgncccggtcannantntnggatcccgaagggganttnagggtntnaggccccccnaaanggnnc

SEQ ID NO: 15475 - DNA, 235 bp, Glycine max
  Clone ID: 701157793H1
gacgtacgcaactgaaaaggaaaaccctaagagatgaagagaactcctatcttgttccctctcttctttcttctttgtgccttcacctcatatctaccttcagccaccgctgatgatgatcatgtgtacgacactgacggcgataagcttcaatacggtgtcaattatttcgtgttgccagtgataagaggaaatggcggtggaatacaagtagcaaaagcaggaaacgaaactt

SEQ ID NO: 15476 - DNA, 236 bp, Glycine max
  unsure (1)..(236): unsure at all n locations; Clone ID: 701157794H1
gaccacactcttattgttttcttcatatcttccttgtcactgcccgtgtgtcgccgccatggccaccgtcaccacccaagcctccgccgcaattttccggccatgtacctcgaaatcgaggtttttgaccggctcttccggtaaacttatcncggaagtgactatgcggccaatggggtgccctccttctgcctctttcaaggttgaagccaagaagggagagtggttacctggct

SEQ ID NO: 15477 - DNA, 218 bp, Glycine max
  unsure (1)..(218): unsure at all n locations; Clone ID: 701157796H1
gggtattattttttatcatcactaggaaaaaaatttagatccgcccagtgacattcccgttttcggctctctccgaaatttcttagattgcttctgtgtcagagaaatcagtgcaacaaaaatggacgacaccgaaaccaaaggaagaatcgaagagactgtgcgtaggattttgcaagantggacnatggncgggttctgaggtnnanttccaantc

SEQ ID NO: 15478 - DNA, 265 bp, Glycine max
  unsure (1)..(265): unsure at all n locations; Clone ID: 701157801H1
ggaagcccaaaatattttcatagcattttcagaggaaaatggcgggtacggtttcgacttgtttcttcttcgtgtttcttctttctctccttcttccttttcagatctccgctgaggaatcctcggngaaggagttcgtactcacattggatcactctaacttncagaanactgtcagcaagcacgatttcancgtcgtcgagttctacgccccatggtgtgggncactgtaanaaagcttnccccggnttntaaaaaaaccggc

SEQ ID NO: 15479 - DNA, 268 bp, Glycine max
  unsure (1)..(268): unsure at all n locations; Clone ID: 701157802H1
ggacggtgaagaagcctaacagcagcacagagcgtnagagctgatcgcttgagataaggtcaatttgcagttgcacgcttcccaattcgcacacccatattcacatcacatctttctccacacgcaacgcaacctntttatanncaatcatncntnacttgcattcnangangcagcnatctttnccgtgaaaggggaccatggngggcanattcaggnggcnangggccnaaatttngantatncgcnggncaccttnggcccnnag

SEQ ID NO: 15480 - DNA, 253 bp, Glycine max
  unsure (1)..(253): unsure at all n locations; Clone ID: 701157803H1
atagctagtaattataaatttggaaattaataattaggggtaatacttaaaaaatatagttacaaatatagatatactttttgcngaattaatatatatacttatttcgattgatatcatttattcagtttttttataaagggatttattcagttattcttaccaagacgtctctactatttaaagaattttgtctttggtaagcgtacgatagtgcttcttcatatcaaancagntcttttgatgaaatttg

SEQ ID NO: 15481 - DNA, 249 bp, Glycine max
  unsure (1)..(249): unsure at all n locations; Clone ID: 701157804H1
gaacacactcatcaaaaaacccttctttctttcaggttcattacttgatcagtgtcaaaagggtagttgcaaattgcaatggctaagcatgatgttgagggtggttccttctcagcaaaggactaccatgatcctcctccagcacctttgattgatgctgaggaatcacacagtggtccttctacagggctttgattgctgaattcattgccacattacttntccttncctcacagtgctcactgtgat

SEQ ID NO: 15482 - DNA, 235 bp, Glycine max
  unsure (1)..(235): unsure at all n locations; Clone ID: 701157805H1
ggcgagataganananaaagccgtgcgctatcctagtctcttcttcccctctacccatttcagtttcaggatggaatctcaggtgaagcacgcccttgttgtcaaagttatgggncgtactgggtctagggggnaggtgacnccaggttagnntgaagtttttgggatgnncaaaaaccgacacatccatgagggnacntgaagggcncccgtgaagataaggnanctttcctcc

SEQ ID NO: 15483 - DNA, 245 bp, Glycine max
  unsure (1)..(245): unsure at all n locations; Clone ID: 701157807H1
ggatgcatctcaatctacttcatctctcagttncnaagtctgccttatnctgctgttctagtttattngcattgggatcagtaactgcaattcccaatgcaaattttcatcgggcgccaaggagcactantgtgcttctggttgnngtctgtganttntgtggtaacaggattcaacatgaagagcacaggacagtggaggtagttggcctaggagaatgcgcagactgcaaggcagaacaatat

SEQ ID NO: 15484 - DNA, 244 bp, Glycine max
  unsure (1)..(244): unsure at all n locations; Clone ID: 701157808H1
gcacctaactccgccatggcttctcttcccaccactttcgctataaccaaatctgcatcctccataaacaaggtgcaccactctctggtcaagatcaaaccatacaacttctctctcaatctaaatcgtcaagggaccatgcaaacatctttaaccagaaggcctctaacaattcaagctacgtatagtgatggtggaaggcccagcagtgctagtgtatttnttggtgggtttctcttgggag

SEQ ID NO: 15485 - DNA, 236 bp, Glycine max
  unsure (1)..(236): unsure at all n locations; Clone ID: 701157809H1
ggtgtcccatacttgaacttggtcagnntaatggaatgattcatggaggcataactctttcatttgccaaactctacatcaatatcgtacagtgtagtttatatatgacaaactcataaacaagcaaaataatgaatgagtttattgtcaatattgatgaattcattgttacttttgtgtgtttattgagtgaaatgtgaccataagagattcagatgtacttggtcaaaattatc

SEQ ID NO: 15486 - DNA, 245 bp, Glycine max
  Clone ID: 701157810H1
catctaaatcaactctgtattcaaaagcttacacccaacatagagcacctgacactcggtcaacatgaactcaacatgattttgagtggagaattccagggaaaccacttaaacaagttaaaagttcttgccctgttctttcatattgaaaccgatgtatttctacaacgggtgcccaatatagagaagcttgaggtgtgtggtggttacttcaaagagattttctgctttgatagtcataatgt

SEQ ID NO: 15487 - DNA, 234 bp, Glycine max
  unsure (1)..(234): unsure at all n locations; Clone ID: 701157811H1
ggaacacaattaaagatgataagattgcttccaagctgtctgctgatgataagaagaaaattgaggatgcaattgagcaggctatccaatggctcgatggaaaccaacttgctgaagctgacgaattcgaggacaagatgaaggagttggagagcatttgtaaccccatcatagcaaagatgtaccaaggagctggtggtnntgcgggtggagccatggatgaggatggtcctg

SEQ ID NO: 15488 - DNA, 246 bp, Glycine max
  Clone ID: 701157812H1
gtagtatcacttttgtctcggaatttgttcttttgagttatggcaagcttaaaggttgcatgtgtggttttgatgtgcttggctgtgatgagtgcaccaatgatggtgcaagccgtgtcatgcaatgatgtttctgtgaacctagcaccgtgcctatcttacctgatgcagggtggagatgttccagaatcgtgctgtagcggagtgaggaacattctgggttctgccagcaccacctttgacaaa

SEQ ID NO: 15489 - DNA, 239 bp, Glycine max
  Clone ID: 701157813H1
ggttctagtgtgtgattgtttgttgttgtaactcgttcttcttcttttgttgctctgtgtttgtgtttgttttttctctcacctgaaaatgtcttgctgcggtggtaactgtggttgcggaagctcctgcaagtgcggcaacggctgcggaggctgcaagatgtacccagacttgagctacactgagtcaaccaccaccgagaccttggtcatgggagtggcacctgtttaaggctcaa

SEQ ID NO: 15490 - DNA, 241 bp, Glycine max
  unsure (1)..(241): unsure at all n locations; Clone ID: 701157814H1
ggcagtagcaagcagcgaggagaggaatcagaatcgcgttagggagaagaagagaaaatcgcaggtgaaaatgggcggaacggtgaagaaagtaaccgatgtagcattcaaggtgggaaggaacatcgattgggatggaatggcgaanttctcgtctccgatgaggctcgcagggagttctccaatctccgtcgcgctttcgacgaggttaactccccaacttcgaaaccagtttcagcca

SEQ ID NO: 15491 - DNA, 229 bp, Glycine max
  unsure (1)..(229): unsure at all n locations; Clone ID: 701157815H1
ggatggtgcacttcacaaaaaattgattcaggcaaaaatagtaactgtagaagatttcctacgtcctcttgttcgtgagccacaaaagttaagaagtatacttggtagtggaatgtccaatagaatgtgggagaatacgtggagcatgcccagaacatgtgtcttgggtggcaagctcttgtatactacactgatggaancccatagtgcngggcattgtgttccacca

SEQ ID NO: 15492 - DNA, 249 bp, Glycine max
  unsure (1)..(249): unsure at all n locations; Clone ID: 701157816H1
ggagctctacttaaagtctgtggctagagcaaaggcagcaaaacttgcttaattgagcaaaagaagggttccctgtgcaatggttcaattttgtcagtttctacatagagacaagagttcagagttaaagctcaattcagcaggntttcactgaccataccagccattcaagaacttctncagattgggaatgcattnaattagaaaatttanattccnaacngggnngnngaaagnnntgnccnaatc

SEQ ID NO: 15493 - DNA, 257 bp, Glycine max
  unsure (1)..(257): unsure at all n locations; Clone ID: 701157817H1
ggagagtcagattcgcacgcattgcttcgcctcacaacagcagctgcagcagcaatggctcccaaacgaggtggaaaggctccggctcttgccgctaagaagaagcctgagaaggtcacgaatccgttgttcgagaagcgtccgaagcagttcggaattcgnagnnatcttgcctccgaagagaganttgactaggttcgtaaaagtgnccaaaaaattttcaatttcagaggaaaaaaagtttttaanccaggntt

SEQ ID NO: 15494 - DNA, 250 bp, Glycine max
  unsure (1)..(250): unsure at all n locations; Clone ID: 701157818H1
catctaaatcaactctgtattcaaaagcttacacccaacatagagcanctgacactcggtcaacatgaactcaacatgattttgagtggagaattccagggaaaccacttaaacaagttaaaagttcttgccctgttctttcatattgaaaccgatgtatttctacaacgggtgcccaatatagagaagcttgaggtgtgtggtggttacttcaaagagattttctgctttgatagtcataatgtggatg

SEQ ID NO: 15495 - DNA, 245 bp, Glycine max
  unsure (1)..(245): unsure at all n locations; Clone ID: 701157820H1
ggcacaagtgagtttgttgatcgagataactagaaacagtgtgatgaaaatgaaggtcctgttttcttcgttgctacaattttggtagcatggcaatgccatgcgtaacgatatgttccctctccgaatgaacactggctatggtgcccgtactccggaggtgaaatgcgcaattgggnncccncngtggaancacacanncnnnncagctngagaccattccggaagatgcgttgaagcaacaa

SEQ ID NO: 15496 - DNA, 222 bp, Glycine max
  unsure (1)..(222): unsure at all n locations; Clone ID: 701157821H1
ggatgnatacaacacaacacaanatangagacttctctcatctatcgtnataatttactttgatacgaagctctctcgatctaattttccgactaacactaacnatgncggcngcagctgnngacgctacacgacgcgtaatgcggtggcanagtaccgnnananncntntttcaacaccgnggattggaanccagagtccanccggnnagngnaanttnga

SEQ ID NO: 15497 - DNA, 247 bp, Glycine max
  unsure (1)..(247): unsure at all n locations; Clone ID: 701157822H1
ggcagcatccattcttgttctcttctttctttcgatcagggtttcccctcgtctccgggctcgtttcgttctcgaataatcgatctacgataatgactcgcggtagccagagggatcgtgatcgcgaaagggctcaggctagaactggtgctaaaggcaagcagaaagatgatggattgacccctgaacagcgcagggaaagagatgcaaaggcgctgcaggagaaggccgcnaanaaagcggcaca

SEQ ID NO: 15498 - DNA, 243 bp, Glycine max
  Clone ID: 701157824H1
ggactctaattcttctgctgaatgatatgccaaagacaccccaaaactaagaccatttatcctctttctctttttccccttccaaacatttcaaagaacagcatcatccaagactaaatccagcacaatctgtccatgagttatgttccttaaagttttaacaataaggccacggaggttctccataggtgactaagtgaagatatgtttggatatatatgcagtgttgcagacatgatcata

SEQ ID NO: 15499 - DNA, 211 bp, Glycine max
  unsure (1)..(211): unsure at all n locations; Clone ID: 701157826H1
ggcacaanaatacaatacaaaacaaaacagagcaaanagagagtgtgtgaaaagtgaaacancaaacagaacaacaatggcgacacttaaggttcttcagcctcttccccccgttgcagatgattgtgagcagctccgaaaaagcctttctcaggttggggaactaaccgaggagtggattgtatcgatcttggctccataggaatgctgc

SEQ ID NO: 15500 - DNA, 235 bp, Glycine max
  unsure (1)..(235): unsure at all n locations; Clone ID: 701157827H1
gattggaattagaattgtaaaaaggaaaggggaaggaagcaaggcaaggaaggagagtggatcgattcctcagcagcaccagacatttataaaagctctttcccttccctcaaatcgctcatactcttccaatcttttttttnttttttttnacctttcncccgngttcaatantacaaancaaaaaaggggaagaaaaaggttttcgcgtnggttnaaaaggttctttagggac

SEQ ID NO: 15501 - DNA, 225 bp, Glycine max
  Clone ID: 701157828H1
gcattgggtgttcctgctcttcccctgacatacgtggctcacgttctggcacttgttgccagcatcttggtcgtgctctgggtcctcaattttaggggtggcttggcttgggattctgataacaaggccctcatcttcatcccttcatccagttcttattgtcattggcttactagtcctgggggtgaagctattataagctacaaagcatacccctgaagaagg

SEQ ID NO: 15502 - DNA, 254 bp, Glycine max
  unsure (1)..(254): unsure at all n locations; Clone ID: 701157829H1
ggaagacctaagatacaatagagatggcaaagctatttttgaaacaggcaaagcaatacgcagatgcaagaccaagctatcctccacaactcttccaattcattgcttccaagactccctctcactacctcgcnnggacgtcggcactgggagcggccaagctgccaantctttagctgcaatatacaagaatgtgatagccacagatgctagtgacaaacaacttgaatttgcagccaagctcccaaatgtga

SEQ ID NO: 15503 - DNA, 241 bp, Glycine max
  unsure (1)..(241): unsure at all n locations; Clone ID: 701157830H1
gggagcgaagtgaattgaaattgaagtgactcggggtgagttgactcagcaatggcggaagaggtgactcgggtgatggtggcggtgaacgagtcgagcattaagggataccctcatccttcgatcagcagcaaaggggctttcgactggaccatcaacagatcgttcgcgaacanngtctctggcctanaaccttctttncttnangttcaaatccccgatgaanagggttttnannana

SEQ ID NO: 15504 - DNA, 245 bp, Glycine max
  unsure (1)..(245): unsure at all n locations; Clone ID: 701157831H1
tactaatatataatcatttaactaattaatatatacatacttatcggtataatatcatattattcttgatagatatatagatcaaaattattttgtatataaagttaaatatgtcattttataaacctttgacacttaatatcaactaatccttatgtcatagagagagataatataacataaaagccaccaaaaatcatactattatcgtgaaantgatttattttattttattcttaattaat

SEQ ID NO: 15505 - DNA, 263 bp, Glycine max
  unsure (1)..(263): unsure at all n locations; Clone ID: 701157832H1
gactatgggacttgatganaggtgttagaaatcagttaactgaantcatatctggtcnaagctgttcaagacatggcccccatgantttgggttatctcanagcttattcccggataccaaattgangtttantgccacaacaagggnggntaaccatgttttccnaggccaatgggttnannnngtgntccttaaaaaaagggttgnacanccnnancccnatggggggtcnnaaaaatnnttgggnggagantttnccccc

SEQ ID NO: 15506 - DNA, 246 bp, Glycine max
  unsure (1)..(246): unsure at all n locations; Clone ID: 701157833H1
ggcaacagagacagaaaaaaggactcaatcacgaagcagaagaaacccaataagtatttctcatttttatggctcttgccctgaagtcaagttgcttattgcaattgaagaaacctgaggctggtttcaatgtttgtttttcatctaagaaagctataatctccgtgaaaagatacactccggtggccgctatcaggatcatggacgcagtgggatctctgcaacattcaccgntgnaaaaagagg

SEQ ID NO: 15507 - DNA, 250 bp, Glycine max
  unsure (1)..(250): unsure at all n locations; Clone ID: 701157834H1
ggcatcaattcaaaatatatcatcaattataagcatgggtttgtggaacacaacgaatgcagtgtcttgccgctttcacaagtttggtgatgaccaaaagaatctggtcttccaaggtgatgccacgtcttcttccaggggcaaagaactcacaaagttagacggtggaggaaaaaccagtgggtggccagtgtggggagaatgttatactcttccccagtgcacctttggggaaanctctacagtggtc

SEQ ID NO: 15508 - DNA, 245 bp, Glycine max
  unsure (1)..(245): unsure at all n locations; Clone ID: 701157836H1
aaatcggagcttgcgagagaggaggccaagctggaaagagaagtcatcaagatcgtccctaagcggaaacggcgagtccgtcctcaagcccaattcgggccaggccgtgtcggttcgcgaccaccacatatgtgtcgggtttccaagacgaagaggattctgggtatcgcgtgtgggagtggcatggccacatcatgtctttnatgaggnatttnggtataaccctgagtatatatacggcaatt

SEQ ID NO: 15509 - DNA, 249 bp, Glycine max
  unsure (1)..(249): unsure at all n locations; Clone ID: 701157837H1
gaggaaactaggcattggtttctctctctagcttggacgagtgaattagattcatcatcaagatgtcgtctctgatagcagaagatgtgaagagcagatcagaggtgtaccacggggacgaaatgtgccaagtgaagtccaaggagcttctcaaggaaatcgccctnccccaacgggcttcttcccctcaaggacctggaaggagttccgnctaccgacagaanaaccggnnttcgtttgggnanaaaa

SEQ ID NO: 15510 - DNA, 244 bp, Glycine max
  Clone ID: 701157841H1
aggaaccatgctgacggttaattcctatccaagattcttcatctggatcatcaaatgaagaaagatcaacattcctagaccaacctgataatggaatcccatctttgtcaacaagccctaccccatctaacttttttatgccacaagaagtgtgggctagatgaggaacagccatgattctagattttgattttaagtaggtcaacagggtagaagtagtcttgactcttctccatagaacctc

SEQ ID NO: 15511 - DNA, 251 bp, Glycine max
  unsure (1)..(251): unsure at all n locations; Clone ID: 701157842H1
gacgcaaatgattaancatgggcttcttctacatcacatccatcctcttnntccctacctgaacctgtctggcatccattcccatttcttcttccgtatgcatgttcccaccgtctaaanaaacctaggcaaagcaacaaaacggcgtcatgccttgggaagtagcatgcaatggtaaaccctagaattaggagggacattctgatcgggncttggagggactctatggtggtagcaacaagttctcncaa

SEQ ID NO: 15512 - DNA, 252 bp, Glycine max
  unsure (1)..(252): unsure at all n locations; Clone ID: 701157845H1
ggggtcccaaaaaaaaaagtgatcccaaccaaaaaagccgttcaaaacaacatcggaacctangatccacagaaccttgttaagctcgagtccgaagttgtccaaaacctaatccccgtaatantcctcgtatnatccgaaatttctcngncnatttnttttggtttggtttcccgnagnttttgtcgnagagggttctttggngtaggattgtgggtatatcccggngatggaagctntttgggannaaaa

SEQ ID NO: 15513 - DNA, 250 bp, Glycine max
  Clone ID: 701157846H1
ggaggaaagtgagtgagagaaagagatcgcagacacagagcagaatggcttctacccaatgtttcttgcaccaccatgctcttaccacccctgccagtgccagatccccatcactacgcatcttggttagcaccaagcctaaccagcttgtttgcaaggcacagaaacaacaaacaccacaagaggatattgatgtcagcccaatctctcgccgtttagctctaactgtgctcattggtgctgctgctgg

SEQ ID NO: 15514 - DNA, 255 bp, Glycine max
  Clone ID: 701157847H1
gggctttcccttcatacaaaaccctacaagtcacgaatttgagattctaagaccctcctctctctcgtacttcatcggaaccgaaacccttcgccgcaaaaaatgcctcccaaatctgccaaatccaaggaagctccagctgagcgacccatcctcggtcgattctcttctcacctcaaaattggcattgttggcttgccaaatgttggaaaatctactctctttaatactctcaccaagttgggcaatacctgc

SEQ ID NO: 15515 - DNA, 257 bp, Glycine max
  unsure (1)..(257): unsure at all n locations; Clone ID: 701157848H1
gggagtagggtttttttgcgtttgagagaagcatgagcaggagtttgggaattccggtgaagctgctccacgaggcttcggggcacgtggtgacggtggagctcaagagcggagaactctacagaggcagcatgatccgagtgcgaggacaactgganctgccaattcgagagcatcaccctacantgcnanggntgnnaaaaantncgcaattgngcttntttttnttcgggggacaccatgtcctgttttntccc

SEQ ID NO: 15516 - DNA, 245 bp, Glycine max
  Clone ID: 701157850H1
ggcagcgcttgatttgaggccaggcaagccccactcaaccaccacacctctcctcgttcacgctacccctttctgctcttcttctacctttcaagttttaaaagtataaagatggcagagacattcctatttacctcagagtcggtgaacgagggacaccctgacaagctctggcgaccaaatctccgatgctgtctcgacgcttgcctcgagcaggacccagacagcaaaagttgcctgcgaaa

SEQ ID NO: 15517 - DNA, 252 bp, Glycine max
  unsure (1)..(252): unsure at all n locations; Clone ID: 701157851H1
gagaaaaatcaacacaacactgaactactcccaagagaccattctacagcctctattctcagtcagttcctcatgctccgcttactttctcnctcttcaactnctatttcttttcaaacactgaaatcngggtttctncgtttcggcaatantcatttnctntaaaacccaaacccgaaccaatttnttcccgnggtagnttctatngcccctnccncggaggtntccgaggggtattgccacctggggatt

SEQ ID NO: 15518 - DNA, 248 bp, Glycine max
  unsure (1)..(248): unsure at all n locations; Clone ID: 701157852H1
gggcctagggtatcacttatcattcattagtgtaactaaaaagccagaaagatagagaaaattaataaaatcgaagtgaactgctaatcattgagatctcatatcacttgtaattaattaagaaaaggaaaaaggaaaaaggaacgcaaacgaaaagacataaactaaactgaactatgagcattcgaattgtccaaaccttttacncnttccagtttgataaatgatgtatccntattttaganggc

SEQ ID NO: 15519 - DNA, 243 bp, Glycine max
  unsure (1)..(243): unsure at all n locations; Clone ID: 701157853H1
ggcacaagtttgttgagatagctagaagcaataagatgaaaatgaaagtgcttgttttgtttgttgctacagttttggtagcatatgaatgccatggctcagactaccagaagttccctctccaaatgaaaactgggtttggtgggcaatacagcaatgaggtggcatgtgccagttggaggcttggcgtggangcaaacaacgtagtcaagtnggcaanctgtttcccggnagtttgcggag

SEQ ID NO: 15520 - DNA, 243 bp, Glycine max
  Clone ID: 701157856H1
ggtgcagttcaaagcgaagaaagattcgaaacgaagaaagaaagcgttgtgaagaatggcggaagagggacaagtgatcggtgtccacagcgtagaggagtggaaggaacatctcaagaagggagaagagtccaagaaattgattgtggtggattttactgcttcttggtgcggtccatgccgtttcattgccccaattcctgcagagtttgctaaaaagttgccgaatgtcaccttcctcaa

SEQ ID NO: 15521 - DNA, 223 bp, Glycine max
  unsure (1)..(223): unsure at all n locations; Clone ID: 701157857H1
ggnangcgaagangaagaananggcattgggtgtncctgcacntcccctgacatacgtggctcacgntctggcacttgtngccagcatctnggtcgtgctctgggtgcntcaattttaggggtggcttggcttgggntntgataacaanggcctcatcttcaatctgccatccnnttctnantnccaatcncntactagtcctgtnncctgtagctantataa

SEQ ID NO: 15522 - DNA, 244 bp, Glycine max
  unsure (1)..(244): unsure at all n locations; Clone ID: 701157858H1
tttgggtgcttatcaaacaactcctgttttattcacttggatggagcatttttagcttctgttcctgtttagtcactgtaatttcgtctttaaaagttctgtggtttataattgcttaatcaatttaatttatatgcagacgaataatttggtttggtgatctgaattatcgtatcaacttntcaaatgtggaaacgaaagctcttatctcaaaaaaacagtggtcaanaattggttgaggaaa

SEQ ID NO: 15523 - DNA, 243 bp, Glycine max
  Clone ID: 701157859H1
gacactagacaagttaaaagaagagcatcactgaactaacaaagcaaccctatgtcgaaggtggtttgtgtcaccggagccagcggcgccatcggatcatgggtggtcctactcctcctccagcgtggttacaccgtccatgccaccgtccaagatatcaaggatgaaaatgagacgaaacatttggaggaaatggaaggagcaaagagtcatctccatttttttgaaatggatcttcttgac

SEQ ID NO: 15524 - DNA, 236 bp, Glycine max
  unsure (1)..(236): unsure at all n locations; Clone ID: 701157860H1
cccaatgaattgggatttccctattgggccaggtcatttcgggacaagcggatcatttatgatgaagaggatgagcttcaagagaatgattcagagttcttgcagggtggaaccatgcagtaccagacacgagatagatcttccaaagaacagggctttttttcgaataagccaattcattgggaccccgcggatcnatctttttcctattcaaagatcagccttttgtctctgtg

SEQ ID NO: 15525 - DNA, 249 bp, Glycine max
  unsure (1)..(249): unsure at all n locations; Clone ID: 701157862H1
gatagttacatacgtaaaaaaacttgcaattgttttataaggaatcagattagttacacttccattcccttccagcagctgggtttgagaagacaattgattatataggttttgttagtaaacaaaagaaaaggaaacatgaaggacgcagatgtgtccaaggcagatccagcagatgatcaggttcatccgtcaagaggctgaagaganagctaatgaaatatctgttgctgctgaagaggattccat

SEQ ID NO: 15526 - DNA, 203 bp, Glycine max
  unsure (1)..(203): unsure at all n locations; Clone ID: 701157863H1
atccagcggtgccccccaggnttaannacataatgctgtngatgctgacatatttggtcctgntgatactccctgggatggggacacgntccgttgactctcnatttgctgagaanttcccaatgnaccnccaactgtgcggttnntggacncnctgntncntccaataattatatgctggtagnaagtnttngnnnggnttc

SEQ ID NO: 15527 - DNA, 256 bp, Glycine max
  unsure (1)..(256): unsure at all n locations; Clone ID: 701157864H1
tactgaatgatggattaaagatgctagtttttctaaaactccctggctgcgatgtttcatttgtttctccataggaaagttttgctgcacctatgattttttcttaccagatctgtttatattgatgattggactaggttttggaaagccaatgcaacattgcttatttctntgttgattatgtggcagcatagtggtaaaagtgacttggcgaactaataggcaccactcatgattaggnccaattacaaggggg

SEQ ID NO: 15528 - DNA, 247 bp, Glycine max
  Clone ID: 701157866H1
ggtagatgtagacgcagacgccccagatcagatcctctctcttcaattcaacttcaagccaagccaagcaacatggctcaacaacaggaggacgaaatggagtatgttgctgatgataatgaaatggcggaagtagaagatgacatgtatttccgtggtagagtgtttggtgattcagagtccgaatcagatggacgatgatgaatatgactcccatggaaatcgggatgaccagattactctgctg

SEQ ID NO: 15529 - DNA, 252 bp, Glycine max
  unsure (1)..(252): unsure at all n locations; Clone ID: 701157867H1
gtagttggggaacatattgccccggggagtatcctagtcctcccccagaatatacaacctgtttgggtgacttgtacagtgttgcttggatggaagacagtgacagacacaatttgcgaacagaaactctgcaccaacaatataaattggttaaagagaggactatatctggagattcatactatggctctcacgtgatncagtatggtgatgtagggcttagnaganntaaaccgcttcccatnatngggg

SEQ ID NO: 15530 - DNA, 238 bp, Glycine max
  unsure (1)..(238): unsure at all n locations; Clone ID: 701157869H1
ggagatgaccctaatggaattgctttggtgaaaagaacatgaagtgtgatattttatgatgctctcttaaaaggagcagcattgacaggcaatatatatcttgtaacaaatgtctaggaaatgcaaagaagctgtcaagtgagtcctatgcggttaggaccctatgatgcagcatttaccaaatacgtgtggtttagatcatattaggttcagtatataaaanatatttgaagttcac

SEQ ID NO: 15531 - DNA, 239 bp, Glycine max
  unsure (1)..(239): unsure at all n locations; Clone ID: 701157870H1
ggagtggcgaggatggcaaacacaaacagcgacaccaaagaagaaagcaaaaaaatggatgaaagagagacaatacctctcctcacctcatacaagatgggaaattttaatctatcccacaggattgtgttggcaccgttaacacgatcaaggtcttacaacttcgttcctcagccgcatgctgctctgtattattctcaaagaactactaagggtggcttcantnnnnaaaaagctac

SEQ ID NO: 15532 - DNA, 238 bp, Glycine max
  unsure (1)..(238): unsure at all n locations; Clone ID: 701157871H1
ggcacaagtgagtttgttgatcgagataactagaaacagtgtgatgaaaatgaaggtccttgttttcttcgttgctacaattttggtagcatggcaatgccatgcgtacgatatgttccctctccgaatgaacactgggctatggtgcccgtactccggaggtgaaatgcgcaagttggaggcttgctgtggaagcacacaacatctttngcnttgnagaccattcctgaagagtgcg

SEQ ID NO: 15533 - DNA, 249 bp, Glycine max
  Clone ID: 701157872H1
gggagagaatagagatccagtcaaaacaatatctttctctctctgtttggtttggcctcttgctgtaagaagccagccacagtactgttgcgctcctgtggaaccatcgatgggctttaacaggttccacatcggttgagctttgtgtcagatatgccaatagtgttatccttattcttgtgatatactagtttgtatgatcatattttctcggattgtctagcaagtttagctcaattgggacgttga

SEQ ID NO: 15534 - DNA, 264 bp, Glycine max
  unsure (1)..(264): unsure at all n locations; Clone ID: 701157874H1
gacgcaaatgattaaccatggcttcttctaacatcacatccatccncttngtacctcctgaanctgtctgcatccatttcccattctncttccgtatggcatgtttccccaccgtctaataaancccagcanaaggcaacanaaaacggcgtcattgcttggggaagtagccatgncaatnggtaaaccctagaaataagganggggcattntgattcgggctttggaggacnctantggtgntancaancaagttctccacaa

SEQ ID NO: 15535 - DNA, 218 bp, Glycine max
  unsure (1)..(218): unsure at all n locations; Clone ID: 701157875H1
gacctccaagagaatcaattgcggataacaatgataacaaaaggtctggtcagcaaacaatagtatagcagttgcagattagatttctcagcagtgtaagcaaattgagctttcaacaatgacaataccaaatctcacccattttcaggtaacggtggataaggaacaattngttnattttnnnccntggagtgatgataagngttccttggtnnctt

SEQ ID NO: 15536 - DNA, 244 bp, Glycine max
  Clone ID: 701157877H1
caagacaaagacgggtctcaaggtaaagtagaagtttcttctgttgtttataaagttggcgaaagcatgcaagaactgataaagttgtggaaggaacatgaatcatctcaatctgaaatggagaaaaatggtgaaagctctaataatggtcccactctggaaattcggataccatctgagcatgtaacgggctacaaaccgccagttcagaggtggccagctttgggggacgatgtgtacactt

SEQ ID NO: 15537 - DNA, 243 bp, Glycine max; identical to SEQ ID NO: 11080
  Clone ID: 701157878H1

SEQ ID NO: 15538 - DNA, 245 bp, Glycine max
  unsure (1)..(245): unsure at all n locations; Clone ID: 701157879H1
cctcaacgcttgataatcttattgaaccatttaaacaaacggatccatagaataattccacaccttaacttgagnctaccctgttacattactgatcagctactccataacttattctcctttgatattttctgttggagaacattgcataagaaagctgcagcacatttaacagagaaacaagtagccctttttatggtccttaaagcgtaggtgccttgccagttgcatgaagatcttttttg

SEQ ID NO: 15539 - DNA, 263 bp, Glycine max
  unsure (1)..(263): unsure at all n locations; Clone ID: 701157880H1
gaatgaagaacatcgacgaacagatgattcaatgtgcagaacaagaactcctcctactttgttgagtggattcctcacaacgtganatccacagtctgtgacattccccccaactgggcttgaagatggctttcaacattcatggtaaatctaccctccattnaggaanttgttcngtaagaagtgagtgggcntnttccancggctttttnaagnggnaagggntttcntcgcntgggataacccnggggaaacantgnccc

SEQ ID NO: 15540 - DNA, 251 bp, Glycine max
  unsure (1)..(251): unsure at all n locations; Clone ID: 701157881H1
ggaggcggagacgaagaagtgaagagaagagaaganaagggatttggatctgaaaagagaagatggggggaggaatggaagcaaacaagaaccaagttcatagagggattngggcactgccagagagaatctgnagttcaatttcccttgganctcgccgtaacttncctcnttgttggcnatcttnggccttcacnattcccgtcctngtttacaagggcnncgcccgtgaattcnatatgcaagatgna

SEQ ID NO: 15541 - DNA, 243 bp, Glycine max
  unsure (1)..(243): unsure at all n locations; Clone ID: 701157883H1
ggggcgaggtagccagagagtgatacaatacagagtgcgttgttgctccttcgccacaactccctgccaacatgggtatctccagagattctatgcacaagaggcgtgccacaggtggcaagaagaaggcatggaggaagaagagaaagtatgagcttggtcgccagcctgctaacactaagctgtcagcaacaagacatcaggaggnccgggttaagaggnggaaatgtnangnggagggcc

SEQ ID NO: 15542 - DNA, 206 bp, Glycine max
  unsure (1)..(206): unsure at all n locations; Clone ID: 701157884H1
gtgtccttgaagcttcagaagcggctcgccgctagcgtcctaaagtgtggcagaggcaaggtctggctcgatccaaatgaagtcaatgaaatctccatggccaattctgacaaaacataagaaagttggttaaggatgggtttattatcaggaagccaactaagattcactctcgctctcgtgctcgtcgaatganggaggccaac

SEQ ID NO: 15543 - DNA, 235 bp, Glycine max
  Clone ID: 701157886H1
gatcaattcaaaatatatcatcaattataagcatgggtttgtggaacacaacgaatgcagtgtcttgccgcttccacaagtttggtgatgaccaaaagaatctggtcttccaaggtgatgccacgtcttcttccaggggcatagaactcacaaagttagacggtggaggaaaaccagtgggtggcagtgtggggagagtgttatactcttctccagtggcacctttgggaaagct

SEQ ID NO: 15544 - DNA, 236 bp, Glycine max
  unsure (1)..(236): unsure at all n locations; Clone ID: 701157887H1
gagagagcgtggccttatcatatcataatcggtgagcagccgagatccgttgccggtgcatcaaggaaagtaagagtttagagtttgaactctgtttttcaaatgcacaaagcgcagatctctgtgatataatggaatacaggaaaatcanagacgaggatgaagttagagatgcgggcgttgaggacgttggaaaatcatttttgctgtcagtcccagataacgatttgagtgct

SEQ ID NO: 15545 - DNA, 238 bp, Glycine max
  Clone ID: 701157888H1
gggcgtgagtagttctgttgagatccgcataagcaaatccaatcatcctgttccttccttatctctgtctctgcatttccctccctaaaaccctaattctacatttggaaaggaaatctcaaatctaatgactaattaatcaatcaatcgtattaataatccatcgatcaagtatggagtccgaactcaaagacctcaattcgaagccacccaactgcaacggcaacgccaacagcgt

SEQ ID NO: 15546 - DNA, 234 bp, Glycine max
  Clone ID: 701157889H1
ggccatccatctccttctcttcgctattatgttttctaatgtttctctgtttgaaattttcagagaccatggccaaaagccccttcaagcttgaacatcccttggaaagaaggcaggctgagtctgctcgcattagagacaagtatcctgatagaatacctgtgattgttgagaaagctgaaagaagtgacatcccagacatcgataagaagaagtaccttgtcccagcagatt

SEQ ID NO: 15547 - DNA, 240 bp, Glycine max
  Clone ID: 701157890H1
ggcagccaagaaaagaaaatcctcacccattttcttcgtagccaaacactctgaaattctcagttatgtcgtggcaagcgtatgtggatgatcacctactgtgtgaaatcgaaggtaaccacctcactcacgccgccatcatcggccaagacggaagcgtttgggctcagaacaccaacttccctcagttcaaacctgaggaaataactgccatcaataatgactttaatgagcctggat

SEQ ID NO: 15548 - DNA, 240 bp, Glycine max
  Clone ID: 701157891H1
ggagcaaaaccctaatccctatttttcttcctcagtagtgtcatttacgcttctcttctctgcagcaactatgcctaaccctaaggtcttcttcgacatgaccatcggcggtcaatctgctggccgcatcgtgatggagctctacgccgacgtcactccccgcaccgccgagaacttccgcgcgctttgcaccggcgagaagggcgtagggcggagggcaagcccctccactacaagggt

SEQ ID NO: 15549 - DNA, 241 bp, Glycine max
  Clone ID: 701157892H1
caagcaaaagctgtcaacggatttgatgcgagaattaggttgtaatcttgggacaatacgagctcctgggattggtttgctttataatgagttggtaaaaggaataccggcaatttttggtcattttctgaccacacttcctgcaatacactccatgattatatttgtgagtatcaagtatgttccagttcctatggtgctgcaaagtgaaaggtttcttttcggcgagtctgccccaaaa

SEQ ID NO: 15550 - DNA, 241 bp, Glycine max
  unsure (1)..(241): unsure at all n locations; Clone ID: 701157893H1
gaacgagcactgtccttcccttcctccaacttatgataggccattgaaatgttagatacgtctcttctccggcattaccattttctgatttgtctgttatccgtgatctcatggcacctaannagtttgctgttgtggaattgtctacaaaccgagggagaaagtgcagtacggaacttcaccttagccttctcaagttgactaaggggcatgtatataaganatttatattggtgggata

SEQ ID NO: 15551 - DNA, 244 bp, Glycine max
  Clone ID: 701157894H1
ggagaggaatagcagcagcagcaagctatggcggaagaaccgaaagttccaccaccttccaatcctacgttgtcgtttgatcctagtcgaacggttggtattatcaagaggaaggccttgatcatagacttagctgcggtataccatgccgaatgccttgcatactgtcaagagcttttggaacttcaaactaaatgggaagagccatatattgacttaaaaactccagaggaatcaaaaaagg

SEQ ID NO: 15552 - DNA, 249 bp, Glycine max
  unsure (1)..(249): unsure at all n locations; Clone ID: 701157895H1
aagacgacagannggtacggctncgagaagacgacagaaggggagagaaatgggtggtatcctcattgagcacacagaaagccaagtgtctctcctaacctctgcaaaanttccanggttgncncggttttaaanggcttaaggcntttgtcctncaaaaattaaaactgtggcaactttggttgcagagtccataagtgctaantnggtgtatgcntganaagnggggcttgagttaattggnccctt

SEQ ID NO: 15553 - DNA, 251 bp, Glycine max
  unsure (1)..(251): unsure at all n locations; Clone ID: 701157896H1
gtcagaaggtgcagaaattgatgagcgtgtggaccttgatgaggaaaattatatggaagagatggatgatgatgttgaagnacaaatagacgatgatggagtggatggagttgaagaagaaaatgcctgaaggtagttttgaagaagatgaatatgaggactccagctgctgangctggtgggaaagaccagttgcctgaagcagaaaaaagtgaccttgcctactgaatttggggatgatgagccaaaat

SEQ ID NO: 15554 - DNA, 262 bp, Glycine max
  unsure (1)..(262): unsure at all n locations; Clone ID: 700967502H1
attggagtctannatggcaagaccttcaaccaggttgaaatcaaacccgagatgattggacattatctcgctgagttctctatttcatacaaacccgtcaagcacggtaggcctggtattggngccactcactcttccaggttcattcctctcaagtgaaaaaaacctctgcaaaatccccatctttttcagattttgtttttatttcagctgcctattgtatggttatcatgactgatccatagtatcnacatttatttaa

SEQ ID NO: 15555 - DNA, 264 bp, Glycine max
  unsure (1)..(264): unsure at all n locations; Clone ID: 700967503H1
gacacagagagtgagagagggagatggggagcgacagcgagngcagagaagtcggtgcnnnnnnnnnnnnnnnnnnnnnnnnnnttggccctggctcccattgctaaacctcttgctgggaagaagctttgcaagcgaaccctaaaacttgttcgtagagctgccgaacacaaatgcttgaaaagaggagtgaaggaggtcttaaaagtataaggagaggtcataaaggntgtgtgtgattgctggggacatatccccgttgat

SEQ ID NO: 15556 - DNA, 264 bp, Glycine max
  unsure (1)..(264): unsure at all n locations; Clone ID: 700967504H1
gtttgttgtgagctataagctagtttatcgtgaggagaatatgaagttgtttgttttctttgttgctgcagtagttttggtagcatggccatgccatggcgcaggctaccaaaggttccctctccgaatgaaaactggctatggtgagcgttcttcggaggtaaaatgcgcaagttttagggcttgctgtggaagcacacaaacatccgagcctttaaaaccantcctgaagantgcgttgaaccnacnaagggctacataatt

SEQ ID NO: 15557 - DNA, 266 bp, Glycine max
  unsure (1)..(266): unsure at all n locations; Clone ID: 700967506H1
gttaagtctgcagacaggatctcagatgctgctctagaatctgcggttctgcaatttatcccatgcatccgttctggtagttttgctgacattgggccacggagatacatggaagatgaacatataaggatagatgatttgtcgtctcatctgggatctctatacaactttccaaanccaagtgccttctatggggtgtttgatggtcatgggaggaactgaagctgcgggnttantataaggaaaaccagttgattaaatttctt

SEQ ID NO: 15558 - DNA, 265 bp, Glycine max
  unsure (1)..(265): unsure at all n locations; Clone ID: 700967507H1
gaattccactagcaaaacctggncaaagttgttgggcccgttgttccttacgagtacggtaacattgtcaaggattcatatgatcctaggtcatttatcagaggttctgtgcttcctacacaacctgttccnccagcatattattatcaaagatccngcactggaaaccaagaaagggcccatcaaacagaagctggacaagagtgtgcctttgccaggcaaaacatgcacaacaatgtngagttatgcccagatggcaccanat

SEQ ID NO: 15559 - DNA, 251 bp, Glycine max
  Clone ID: 700967508H1
tggtgttagatctgtacctgcctagccattgatttggaaaagtccaagcttcaaagatgagtaagcttcagagtgatgctcttagagaagctatctcaggaatcatgactgattccaaggaaaagaacaggaaatttgtggagaccattgaactccaaattgggctgaaaaactatgatccccagaaggacaagcgttttagtggctctgttaagttgcctccacttcctcggcccaagatgaaggtttgt

SEQ ID NO: 15560 - DNA, 255 bp, Glycine max
  unsure (1)..(255): unsure at all n locations; Clone ID: 700967509H1
atacaatancatagcntagantgagnagtgagaagagaaaaatggcaatctccatacccagtagacaagctttcatagatggagagtggaaagtccctnttctcaacaatcggtttccgatcatcaaccccgctactgaagacatcatagggcatattccagccgctactaaggnngatgttgaccttgcggtggatgctgctaaaagagccttttcccataacaaaggcaancttggtcttcagctcctggctc

SEQ ID NO: 15561 - DNA, 254 bp, Glycine max
  unsure (1)..(254): unsure at all n locations; Clone ID: 700967510H1
gggtcatgagaaaatggtaacatcacaagaagagcaggcaaagatcactgaggttagagggttgatagggccactatcagataaggaatctgtgtactgttctgatgcttccatctcaaggtatttaaggtcgcgaaattggaatgtcaagaaggcagctcaaatgttgaaacagagcctaaaatggagaaaagaatacaaacctgaagagattcgctgggaagaggttgctgaggaagcacagaccggggnga

SEQ ID NO: 15562 - DNA, 117 bp, Glycine max
  unsure (1)..(117): unsure at all n locations; Clone ID: 700967511H1
ccganggatccagatctgcgacgaacggggtgctgcctctggcgcgcaaggtggcattgattaccggaattaccggccaagacggttcgtacctgacggaattccttctagacaagg

SEQ ID NO: 15563 - DNA, 120 bp, Glycine max
  unsure (1)..(120): unsure at all n locations; Clone ID: 700967512H1
gaatcccttaaccacccttttgtgcaagangtccttcctcctagagacccactttttaccttcttcaaagcccgctatgaaagtntttctggcttcaaaatagacttatttaaggatatt

SEQ ID NO: 15564 - DNA, 119 bp, Glycine max
  Clone ID: 700967513H1
gaaaaagaaaaaagcgatcatagtttcacttcggccttatccagtttagggtttcggttctctaccctatctttcacgtatcgaaaccttaaatttacgatcaggtctgagcaatctgg

SEQ ID NO: 15565 - DNA, 259 bp, Glycine max
  unsure (1)..(259): unsure at all n locations; Clone ID: 700967514H1
tccacacccaacattctcacaagtcacagccaaacaccatttcattaattcttgcagaatattgcttagttttgttttatctgaatttggaaacagcttttgaatggctttttcaagagttgcactgctaatatgcacggtcgggtattttgtgattgcctctgccggcaatttccaccaagattttgatatcacatggggagatggtcgggctaagatactcnacnatggagagcttctcaatcngtcacttgacaaa

SEQ ID NO: 15566 - DNA, 130 bp, Glycine max
  unsure (1)..(130): unsure at all n locations; Clone ID: 700967515H1
cgcaaacatgtccaccgcaacaactncacntgctcgcttatcccttccctacctccggtcacgtgaatccctctnctttagaacttncaccaaaaccctaggtctctcgcggnggtccatgtnancgttt

SEQ ID NO: 15567 - DNA, 264 bp, Glycine max
  unsure (1)..(264): unsure at all n locations; Clone ID: 700967517H1
aacgtttncgggttcgagaagggcacttgtgttgtttttcgtacganatggagactaaacagagttcggtgacggttacgctcagttacggcgcgttgacgtgcgccgcggaatttctcgcgactttgctagcttctgctgtcgtcaaagcctcgcttttggccccggatctctaccggctgctattgatcaaacacgcctactgcccaaggagagagcaaaattcagagtgnagaccagcaacgtgatgcngaggggagcaga

SEQ ID NO: 15568 - DNA, 118 bp, Glycine max
  unsure (1)..(118): unsure at all n locations; Clone ID: 700967518H1
gcaancgcaggcaangtgagnnccgncgcagttanngtctcagctccccaagccacaaggttctgcggcatcaaggcttccctcaaagacgttggagtcgctgttgtggccaatgctt

SEQ ID NO: 15569 - DNA, 254 bp, Glycine max
  unsure (1)..(254): unsure at all n locations; Clone ID: 700967519H1
attctgggctgattctcttggatccaagtacatatattcaagattggagaaatggtcagagttgtatggggaattcttcaagccttgtgcctacttggctgcaagagctgccaaaggaattcctctgagtgcctctttggagcagcaggcaaagtctcgcatgtaagaaaaaaacagctcatacgtgttactggattgaatttccttccccggtatatctccttcagatggtagggatatagtggtgantgaga

SEQ ID NO: 15570 - DNA, 260 bp, Glycine max
  unsure (1)..(260): unsure at all n locations; Clone ID: 700967520H1
gaacaaatccagcattgttcttttctctgcaacattttccactctcaaccatggcttcaaagcttttactcatcactgtcttcgtttttgatttgattgcttttggactggctgtggctgctgaacagagaagaagcactgctagcattgtgccggacaatgaaaagaattataattactgtgtctataaatctgatatagcaactgggctatggtgttggagcnnttttgttccncctgggtagtccagtcctgataat

SEQ ID NO: 15571 - DNA, 266 bp, Glycine max
  unsure (1)..(266): unsure at all n locations; Clone ID: 700967521H1
ctgctgccttctatagccatactccaatcaatgttgtttcttctactccataccatacacactaactaacgcaatttgcaacttgcaacaaaccatgctactcacgtgttaccaccatcccttccctcattcactttcttcaacctcaacccactcgctcttcaccacaaacagaaaactggcaaacnnnnnnnnnnnnnnnnnnnnngtaaactcgnggcccctctccaacttcanaaaggcacacggctccacggnttcaattc

SEQ ID NO: 15572 - DNA, 116 bp, Glycine max
  unsure (1)..(116): unsure at all n locations; Clone ID: 700967522H1
gcttcttctcaatcagcttccgctcatcgctaaaagnaaaaggagggaggtaactcagtccctctccttctccctctccgcccgtaacggaatcagcccatgagctcctctttcat

SEQ ID NO: 15573 - DNA, 252 bp, Glycine max
  unsure (1)..(252): unsure at all n locations; Clone ID: 700967524H1
aagtccttctgcaccatctctctctncactctctttcctcttttaccccaaccaaaaagaaacatatccattttcctctttaatttcttcaacttatttactcctatgctcacactgatccattagttaacttctcttaatctctctgtagccacaactacctaccatatttgcttcagaaaaacatggaatttggagagaacaactgttcagcttaacacccacacaaagagggaanntggaacatggcgt

SEQ ID NO: 15574 - DNA, 117 bp, Glycine max
  unsure (1)..(117): unsure at all n locations; Clone ID: 700967526H1
gccctgatagccgtcagcacaggtctatggtatacacatgaaattcacgccttcctccaaattcttaggctcttcaaatcacttccactaccctnctcgcacaccnctttctctccg

SEQ ID NO: 15575 - DNA, 250 bp, Glycine max
  unsure (1)..(250): unsure at all n locations; Clone ID: 700967527H1
gggaggaagagagaaaaaccatggcaacaacactcaacaatggcttcaagatgcctatcattggattgggcgtgtggcgcatggaaggaaacgaaatcagggacctaattctcaattccatcaaaattggttatcgccattttgattgtgctgctgactacaaaaacgaagccgaagttggagatgcgctaaggaggctttgatagtggccttgtgaagagagagggnctctccttaacnacnagcttgg

SEQ ID NO: 15576 - DNA, 244 bp, Glycine max
  unsure (1)..(244): unsure at all n locations; Clone ID: 700967528H1
gtgagtggttcctccccactaacttcgaagaggagaagggtcaccaacttttgttccaccgacatggacgctnnnaactgctaaggccaagcttgctgctgtgaaagaaagatttggacgagagatccatgtttttgaaacatcagttctttcttccatcttcaaagggtgcgttatccnatgaangagaggagacgggngacttctatgagtttaangctgaagantataccaacttttggct

SEQ ID NO: 15577 - DNA, 118 bp, Glycine max
  unsure (1)..(118): unsure at all n locations; Clone ID: 700967529H1
aggagaaaagaaanaanaanangaactggactcctnccaattagtgcattgttncttttcttcaaatggtngcaagangacattgtnaatttgggngatggcnatttacgaggctatt

SEQ ID NO: 15578 - DNA, 263 bp, Glycine max
  unsure (1)..(263): unsure at all n locations; Clone ID: 700967531H1
tgaacatcttctttatcctcagatccctctcttctcccctgattctctcctacatcatcatcttctatctccttgccaaaaacacctcctgtggtgtggacccaaaatttcttgcatgtccacccacaacctgcgccaacaacaatcaaagtataagttatcccttttacatccaaggaaaacaagaacctttttgtggggatcccggttttgggcanctcttgtggcccaaatggttttncaatccttaatcngtcnaatac

SEQ ID NO: 15579 - DNA, 266 bp, Glycine max
  unsure (1)..(266): unsure at all n locations; Clone ID: 700967532H1
cggaaaaaaaaacttgaaatttctcccttcggcacaaagtttagggtttttcannnnnnnnnnnnnnnnnnnnnnnntcgttccgttccgtcactatccaagtatggaagaaacacccgaacacgtctcatactgtccgttgtcgctgccgccggaagacgaaaacaacagcggcgccaaattggcgaaatcggtgaacgaactcaacganctcggcgttgcaatacaagcctttcaagaaacaggtatgacgaatttgcagaaac

SEQ ID NO: 15580 - DNA, 260 bp, Glycine max
  unsure (1)..(260): unsure at all n locations; Clone ID: 700967533H1
ggtcattacaataggttctgagagattccgttgcccagaagtactgttccagccttctctaattggtatggaagctactggaattcatgaaacgacgtacaactccatcatgaaatgtgatgttgatattagaaaggatctgtatggaaacatcgtgcttagtggagggtctactatgtttccgggaattgcngatcgtatgagcaaggaaattggtgctcttgcacccagcagctgaaaatccaggtggttgcncctcc

SEQ ID NO: 15581 - DNA, 260 bp, Glycine max
  Clone ID: 700967534H1
attgaagtctaaagaaaacatagaacgaagaagaagaacagatcagaaaaatggcgtccaaagttccaaagaaggccaatctcctggatcaccactccatcaagcacatccttgacgagtctgtctccgaggtcgtaacgagtcgtgggtatgtggaagacgtgagattgagcaatgcgaggcttttcattggggcaatcatcatcgtcatgctttattcgctcaattctacaagaagaagttccccgaaaatagggatt

SEQ ID NO: 15582 - DNA, 259 bp, Glycine max
  unsure (1)..(259): unsure at all n locations; Clone ID: 700967535H1
cagctttgaaatattgtagagtagagcngtcgattccnccaaaattctgtgnttcattngctaacanannaganctcgtttttacttggtgaattccgcaataactcacaattctatgacgaggacatttganattgctaaattcaccaagtaaaaacgagttcttttttgttagcgaatgaaacacagaattttggtggaatcgactgctctactccacagcttgaaatatgtnnncctggttaataacanttttntt

SEQ ID NO: 15583 - DNA, 258 bp, Glycine max
  unsure (1)..(258): unsure at all n locations; Clone ID: 700967536H1
gcaatcaaccatctttggatcaaccctccaatttgtttacaatatggaacagaccctctcctttgaatttgagcatgaatttgttcaaaacacggcaagagtgaaatctgttgatatgcatccaactgagccatggattctactgggtttgtattcaggaactatttctatttggaactatcagacaaaggactgaagagaagtcttaaaaatccagcgaatctccagtgagatcagcnaagttcntgctncggggaa

SEQ ID NO: 15584 - DNA, 252 bp, Glycine max
  unsure (1)..(252): unsure at all n locations; Clone ID: 700967537H1
tcgatatgaaggagatgaggtcaacttgaccctggcaaaaactgaggcaaaattgccgcatgagaagatttcaaacaaggcttatnatgatgacgacttcatcaggattttggccacaaggagcagagcacagattaatgctactttgaatcactacaaagntgcatttggacaagncatcaacaagggacctgaaggctgatccaaagggacgagttcctgtcttactaagagnaatgtgagtgctgnncg

SEQ ID NO: 15585 - DNA, 253 bp, Glycine max
  unsure (1)..(253): unsure at all n locations; Clone ID: 700967538H1
gtctatctgtggagattttggccgtgtttttgagattggtcctgtgtttagagcagaagactcctacactcacaggcatctgtgtgagtttacgggccttgacgttgaaatggagatcaagaagcattactttgaggttatggatttagtcgatagattgtttgttgcaatgtttgacagtttgaaccagaattgtaagaaggatctggaagctgtggggtcncagtaacccattgaaccttaaagtaatctg

SEQ ID NO: 15586 - DNA, 114 bp, Glycine max
  unsure (1)..(114): unsure at all n locations; Clone ID: 700967539H1
cagtgttggtnagatgggtatgtcatggctgtgctgctgagaatggctcagcctcacaatggcaacaccaatagcactgcgaaccagcaattggtccttcatgactttctgggt

SEQ ID NO: 15587 - DNA, 232 bp, Glycine max
  Clone ID: 700967540H1
cctgtatgaaaatgccatagtcaaatttttcctctcaagccactgagagttgtgtcctattgagtacttgaagtgctttcttgctattttttttggaggtagtcgctcggttttgctgtctaaagttatagtgttgttgaatgcaatttggtatctttagacgattgatatatttgattttatgtaatgtttccccctcaagattaatgaaatgtaatctccaaattatatc

SEQ ID NO: 15588 - DNA, 100 bp, Glycine max
  unsure (1)..(100): unsure at all n locations; Clone ID: 700967541H1
gtttccgacgngaaatgctaaatcctcctaacaggtgaagaccttacagcgttaacagtanacacaacnagacagangngcngtggcggtaaacaataac

SEQ ID NO: 15589 - DNA, 249 bp, Glycine max
  unsure (1)..(249): unsure at all n locations; Clone ID: 700967542H1
gttgcgaatcactgtccaatcccgatcgcttgatccagacagtgaatcagaatcagaatcagaatcagaatcagagagaaacgatgagggcagtaagtgcgttaatggtggctcggatgttgacgcgggaccactcgctccctgtccttggcaacgaaagcatacccttcggatcggtgtggtggttcgcctatgccggcgtctcctgtttcctcgtcctcntcgctggcatcagtccggtcttcaacc

SEQ ID NO: 15590 - DNA, 252 bp, Glycine max
  unsure (1)..(252): unsure at all n locations; Clone ID: 700967543H1
gacgtccgcaatgaccctctctctcaatactttctctctctaaaacgcacggcatnnnnnnnnnnnnnnnnnnnnnnnnnnnnnnnnnnnnntacgttgtttcactgagattaaagacgatgctgcttctgcactgagaaaaccctagacacttatagtggacgcgaattcagaaaccccaagtggaaagtccgagccttttcgttccttctcagttcctttgatcagttcccagattctgttactgttcna

SEQ ID NO: 15591 - DNA, 253 bp, Glycine max
  unsure (1)..(253): unsure at all n locations; Clone ID: 700967544H1
caaataccattcaactcttgtcatttttttcactttctctttttcaaaatactcttagtctctnctctaaccttcttccagttgtctctaaacctcttgaaatccgtgatggataccaggataggttcactcgacgcggccaancccgcctgcaacgacgtcgtatcgtgcaaccacaccancagcggccgccanccaaccctgcgtgccggcgacggtgatcnacggcggcggcggagattcaatttagggc

SEQ ID NO: 15592 - DNA, 264 bp, Glycine max
  unsure (1)..(264): unsure at all n locations; Clone ID: 700967545H1
ccaactccaagtcacattggtgacaaagttagaaacaaggagaaagaaagaagatggcaggaaagaaaatcccagatgtgttgctgaattcaggacacaaaatgccagttataggcatgggaacttcagtggagaatcgtccatcaaatgagacccntgctttctaatctatgtgaancccttgaggtggggttaacggtcaattttgacnantgctngngtggtaatggacnggagggaggccnataaggcctangccggggg

SEQ ID NO: 15593 - DNA, 252 bp, Glycine max
  unsure (1)..(252): unsure at all n locations; Clone ID: 700967546H1
cgaccttgggttatagatgatcttgaaactttcaaaatgaaatggagcaagaagtcctggaagaaggtaatcatatttgttgataactctggtgcagatatcattttgggtattctgccatttgcaagggagctacttcggcatgggagtcaggttatattggctgctaatgactaccttccctcaatgatgtgacttatgctgagctactgaaattatatcnaagttaaagggtgaagaaagtgtcnccnt

SEQ ID NO: 15594 - DNA, 116 bp, Glycine max
  unsure (1)..(116): unsure at all n locations; Clone ID: 700967547H1
ctcanttatagnttactattganggatgggtttganaatggcaatactgatnctaggcntgctggccatgntcctttnggnctcctcagaggtggcatccgcganttcaaaagngg

SEQ ID NO: 15595 - DNA, 259 bp, Glycine max
  unsure (1)..(259): unsure at all n locations; Clone ID: 700967549H1
ggacagactcgtgaacatgctctgctttcattcacccttggtgtgaaacagatgatttgttgctgtaacaagatggatgctactacaccaaagtactccaaggccaggtatgatgaaattgtgaaggaagtttcttcctatttgaagaaagtaggatacaaccctgacaagattcctttgttcctatatctggttttgagggagacaacntgattgagaggtccacaaaccttgactgggnacnaggggcctaatctgc

SEQ ID NO: 15596 - DNA, 258 bp, Glycine max
  unsure (1)..(258): unsure at all n locations; Clone ID: 700967550H1
accagtagggactcccattccgactcttagccgccgatctctcagggcttgcatcttctcagctgtgaagatgtacacatcaaggaagaaaatccacaaggataaggatgctgaaccaactgaatttgaagagtcagttggacaggcattgtttgatctggaaaataccaatcaggagcttaaangtgtctgaagggtttatactaaactccgccgtgcaagtttgatgttctgggaaaacgccaagctgttgttatc

SEQ ID NO: 15597 - DNA, 255 bp, Glycine max
  Clone ID: 700967551H1
ttcaaagcgaaaagagattcgaatccaaggaagggaaaggaaagtaagagaagagaagaatggccgaagagggacaagtgattggtgtccacagcgtggaggagtgggaggaacatctcaagaagggacaagagtccaagaaattgattgtggtggattttactgcttcttggtgcggcccatgccgtttcttgccccaattcttgcggatatggctaaaaagttgccgaatgtccacttcctcaaggtggatgt

SEQ ID NO: 15598 - DNA, 257 bp, Glycine max
  unsure (1)..(257): unsure at all n locations; Clone ID: 700967552H1
aaagagaaggcaatggctatcaggttgatggatttggactctccattcttcaacactctgcacagaatcatggatctgacggaggacgccgagaagaacttgaacgctccgactcggacatacgtgcgcgacgccaaggcgatggctgcgactcctgctgacgtgaaggagtaccctaaatncgtacgttttncgtgatcgacatgcctggcctgaaatctggggacnntaaagtgcnngtggaaggacnaacaant

SEQ ID NO: 15599 - DNA, 112 bp, Glycine max
  unsure (1)..(112): unsure at all n locations; Clone ID: 700967553H1
actccccctcccattttggaaggtcgtggcgttgttaagcgctttggaactaaggttcttgtagttccaatgcattcagattggttttcgnctgccacggtgcacaggttgg

SEQ ID NO: 15600 - DNA, 254 bp, Glycine max
  Clone ID: 700967554H1
gctgttcttgcgcgtgaacaagcctcaggtaagccaaaaccatggttaagcataacaatgttatcccaaacggacacttccgtaagcactggcagaactatgtgaagacttggttcaatcagccagcacggaagacaaggagacgattggctcgtcagaagaaagctgtgaagatattccccagacctacggctggacctcttcaggccccttgtacatggtccaacttgaaattacaacatgaaagtggagag

SEQ ID NO: 15601 - DNA, 249 bp, Glycine max
  unsure (1)..(249): unsure at all n locations; Clone ID: 700967557H1
ttttgctctttcttcaagccaacctcttncccaactctttgttcctttcttcctctcactctcaccatgattacagtaagcgtaagatggcaaaaggagattttcaaagatgtagaacttgacactacccagtctccttatgtttttaaatgccaattgtatgatttgactggtgtgcctcccgaaagacaaaaaattatggtcaagggtggtctttgaaggatgatgctgattggtccaacagtaggg

SEQ ID NO: 15602 - DNA, 250 bp, Glycine max
  unsure (1)..(250): unsure at all n locations; Clone ID: 700967558H1
ctttttttcaatttccaaatcacgaaactcaagaagatggagaaagcgatcaacagacagaagattttgcttcatcatctcaacccttcatcatccacccaccccaacgaatcatcctccctccatgcttcagcatgtgtggcgggggatagcgctgcttatcaaaggacatcgacattcggggacgatgttgtgatcgtggctgcttatcggactgctccnttgcaaagctaaacgaggtgggtttcaa

SEQ ID NO: 15603 - DNA, 246 bp, Glycine max
  unsure (1)..(246): unsure at all n locations; Clone ID: 700967559H1
gacaggtgggagctggagatcgtcccttgctttttctatttgaacgtggaaggaagaagttaatggaggagaatgttatttttaaagatgcatcggacatttcttcctattcagggaagatcattgaatgctactgggattccgcggagcatcattgggttgtatgcggatcagaatagacnaagccgctccaaatgatnccatanctatanaaaggtaatgcggagataaagggttaccncnccg

SEQ ID NO: 15604 - DNA, 251 bp, Glycine max
  unsure (1)..(251): unsure at all n locations; Clone ID: 700967560H1
gaagacccaagctcgtgtctaagcgctacggtttatgtgatgtcttcgtctattcccaattccaaattcaagaaattttttaaacttgacatatctgctatcaccttttccgtttcttgcgattcgacgatggccgatcaaaagctttcagaaccggcgcttaaacgtgagcagctgatgaattcgtgagtagtcnatattttgaacaacgaatttctggactccggacnttcnttcnaggactcnggaac

SEQ ID NO: 15605 - DNA, 255 bp, Glycine max
  unsure (1)..(255): unsure at all n locations; Clone ID: 700967562H1
ggtttcacttgtactcactcactccaagaccaaaacggcgccatgcctaccgtcagtgtggggcgtgatcgcctgtatgctgctctaggaaagacttacacgcaagaggaattcnccagacttgtgcttcagtttcgggatcgagctcgacgaacgttacgacgggagaaggcnattgtgagaaaagagaagcnttngatgaagaagaagcngacgangacgaaggaagtttctacaaancggagtcccggccac

SEQ ID NO: 15606 - DNA, 121 bp, Glycine max
  unsure (1)..(121): unsure at all n locations; Clone ID: 700967563H1
gcagantcaattttctctctcaatcgtctttcatggctcgtaccaagcaaaccgcttcgcnaattccaccggtgggaaggctccttaggaagcaaacttcgccancaaggctgcaagaaaa

SEQ ID NO: 15607 - DNA, 256 bp, Glycine max
  unsure (1)..(256): unsure at all n locations; Clone ID: 700967564H1
tactggagatggcgcttgatcgactcagctacctccgatgaagacaaagtcacacctgtctacaaactcgaagaaatctgccaactcctactctcttcccacgctactatcgtcanggagctctcagaattcatccttaaacgcctcgaccataaaaaccccatcgtcaaaacacaaggctttaagattgatcaaatacgcggttggaaagtgtggtgtggagttttagaggggaatgccgagacntcggtgggaa

SEQ ID NO: 15608 - DNA, 260 bp, Glycine max
  Clone ID: 700967565H1
gctacgcaacgacggacaccatcaccaagggtcagccactccctgatgatggcaacaccttgctttccaaggacggaacctttgagttgggtttcttcaaccccgggagttcaaataaccgctatgtcggaatttggtacaaaaacattgtggtcaaaacagtggtttggatcgccaaaccgtgacaacccaatcagaaacaactccagcaagttggtcataagccaagacgggaaactcgttctttcttagccagaacg

SEQ ID NO: 15609 - DNA, 109 bp, Glycine max
  unsure (1)..(109): unsure at all n locations; Clone ID: 700967566H1
ttcttccaccgcctgactgagcnacatgcaggnaatttaaaggtgncagaggtatacaacttctcccaggangatttgatgacagaagatattttcatcttggattggc

SEQ ID NO: 15610 - DNA, 257 bp, Glycine max
  Clone ID: 700967567H1
cgacgatgacgccaatttcggcgacttcgaggaggacccggaggcgtacaagcagcccgaggtggacgagaaggacgtcgtcattttgaaggagaagaacttcaccgacaccgtcaagagcaaccgcttcgtaatggtcgagttctacgcgccctggtgcggccatgccaaggcccttcgcccccgaatacgccgccgccgcaaaggagcttcaagggcgaagacgtaattttggcgaaagtggatgccacggaaga

SEQ ID NO: 15611 - DNA, 252 bp, Glycine max
  Clone ID: 700967568H1
ccgtcatcaactagaagaagaagcttcaatttctgcaaaatggatccgtctgcggcattgctgtttaaccacctcaaaggtgcagacccgttcttcctgctagcgggtcctaatgtgattgaatcagaggagcacattctgcggatggctaagaacatcaagactattgcatctgaagttggaataccgttggttttcaagtcaagctttgacaaagctaaccgaaacatcatccaaatcattcgtgggccg

SEQ ID NO: 15612 - DNA, 252 bp, Glycine max
  unsure (1)..(252): unsure at all n locations; Clone ID: 700967569H1
gttgttgtggtgtattccttgctttggcatggaagagagtagtggggcatgccgaggaaaaggacggtggcatccgaacgaaagcggtagcaaaatccgtttaagttaattcttttgacgcatacaaaggaaaacattttcttattcaaatactcaccaataccnaatccaacacccacncccacacccataacaagctggttggtattattctacaatctgcanccagggaggtgttaattctgagaangg

SEQ ID NO: 15613 - DNA, 253 bp, Glycine max
  Clone ID: 700967570H1
ttgttaaagaggttgacccaaccactggtgagacagaagatgatggcgttgaagatgaataccaactagaggatttagaggttgtcaccgcagactacatgttgaaagtgggagtgtctaatttcaggagtgcatgggaaagcattggccctgactgtgagcgagtggatgaatatggtcttggccccagggagagttttgggctgaagctgtaaatacccgtccattaatccttcctggggatgcagcctgt

SEQ ID NO: 15614 - DNA, 156 bp, Glycine max
  unsure (1)..(156): unsure at all n locations; Clone ID: 700967571H1
cgctctgccttgctgcgctacggtggcggcgcacttcgccgggacgtgcttgctcccatttcctcttctcacttagcagctaagtcacaggcgggtgaaaatgacaccaaagcagctagatggttttctattatgagctctgatagatccacnttt

SEQ ID NO: 15615 - DNA, 253 bp, Glycine max
  unsure (1)..(253): unsure at all n locations; Clone ID: 700967572H1
cgttgccacataacacacattgaaactaaactccaacaagttcctaccatagtctgaggaaagtgagtgagagaaagagatcgcagacacagagcagaatggcttctacccaatgtttcttgcaccaccatgctcttaccacccctgccagtgccagatccccatcactacgcatcttggttagcaccaagcctaaaccagcttgtttgcaagggcacagaaacaacaaacacccacaagaggatantggtgt

SEQ ID NO: 15616 - DNA, 245 bp, Glycine max
  unsure (1)..(245): unsure at all n locations; Clone ID: 700967575H1
ggtttggcaatggttttctggcatagattttgcaaccctggaagaccacagctgcattgccgaaaatgaagtccacagttccatagatttcacattgggaaatacttggcttcctgacacagatataccttacactgaaggactactaagatagacagctgaaagcttaaattgaaaaaaataaatttgtttcnnttattgttagatgtaatgtaacnaccnggntttccntttaaagggatagc

SEQ ID NO: 15617 - DNA, 251 bp, Glycine max
  unsure (1)..(251): unsure at all n locations; Clone ID: 700967576H1
tgttaccatttgctcccagtacagagcttaaccgagcttcacaaagatgaatcgggaaaagttgatgaagatggccggttcggttagaactgggggaaagggtaccatgagaagaaagaagaaggctgtccacaagacaacaaccacagatgacaaaaggcttcagagcaccctgaagagaataggggtgaatgccntcccggcnattgagggaggtccatancnttaagggntgacgtanttatccnatt

SEQ ID NO: 15618 - DNA, 250 bp, Glycine max
  unsure (1)..(250): unsure at all n locations; Clone ID: 700967577H1
gtcgttgataacagatttgctccgtcaaaccggcggcaccgccgtcatcgacggcggtctggcgacggagctggagcgccatggcgccgacctcaatgatcctctttggagcgccaagtgcctcttttccttccctcacctcattcgccaagtgaccccttgattacctggaaaatggtgcagacattataatcacagcatcttaacaagccaaccattcaagggnttaaagcccaagggtattctgatg

SEQ ID NO: 15619 - DNA, 62 bp, Glycine max
  Clone ID: 700967578H1
gagaaagaaaagaatggcaaagttaataaaattctttgagttgaacacaggggccaagattt

SEQ ID NO: 15620 - DNA, 255 bp, Glycine max
  unsure (1)..(255): unsure at all n locations; Clone ID: 700967579H1
gggaaatggctcccaaaccgcctagtacgggtctgtttgttggactgaacaagggtcacgtcgtcaccaagaaggaattgcccccacgcccctcagatcgtaaggggttcttacttcaggtgttgtttgccaaaaacaagcaagagggtgcactttgtgaggaacctcataagagaggttgctggttttgcnaccctatgaaaagcgtataactgagttgctgaagggtggggagggtaagagggccctgaaggg

SEQ ID NO: 15621 - DNA, 258 bp, Glycine max
  unsure (1)..(258): unsure at all n locations; Clone ID: 700967580H1
cttggcatctccgcagcaccaccacccaccaccctgcttagaccaggtcctctctctctctagagagnnnnnnnnnnnnnnnnnnnnnnnnnnnnnnnnnttaagcttttaatagtaagacatggctcaacccagtttccaacggggatctgaataataaccagcagcagggtcnggttcagcaacaacagcagcagggttcgtgggcggcnggggcgcnnccatccagtattcagcngcnatgggtggntatgccnt

SEQ ID NO: 15622 - DNA, 235 bp, Glycine max
  unsure (1)..(235): unsure at all n locations; Clone ID: 700967581H1
aaccatatctatctattgagaaacangaagaaggtttcacccttggcattttccattctctttttggccttcaccatagaaccctttattggcattgctgcagcagcaccagaagcagtgcttgacacctcaggccagaagctgagaacaggtgtcaagtactacattctgccagtgttcagaggcaaaggtggaggcctaacagtttcaagcagtggcaacaacacatgccccc

SEQ ID NO: 15623 - DNA, 251 bp, Glycine max
  Clone ID: 700967583H1
attgattccatctctcacatcatttcccactctcgcgtttcctttatcatatttatattctttggttattcaattcatattacgccatgtcccagttgaacggagcctactacggcccctccatcccgccgccgaaaacttcctaccaccgtcctgggcgcggcggaggcctcggctgctgctgcgggtgcctcttcagcctcatcttcaagctcatcctaaccgtgatcatcatcatggcatcgccgtgt

SEQ ID NO: 15624 - DNA, 250 bp, Glycine max
  unsure (1)..(250): unsure at all n locations; Clone ID: 700967584H1
gagcaagcttccagagacccagataactatttcaacattagaatgcttacatgccccgcagcggagctagtggatggttccaaggtcttgtattttgaacaggctttttggaggactccacaaaaacccttcggcagaggctttttatggtgaaaacttgtcctaaaganctgaaatgtgatgttgagttaagtacatatgcccatagagacngggagggagtaacaaaatttcngtggatcgaccaagg

SEQ ID NO: 15625 - DNA, 251 bp, Glycine max
  unsure (1)..(251): unsure at all n locations; Clone ID: 700967585H1
gcaagttccgagttcttgcactccttggaccaattcctcgttttgacattcattcccagnaaacttttccacacaccaaattccancatataccaaaattccaattttccttcacaaagaacacaacacaaacatgaagactcgcacctctgccaaaatctctgcaacatggattccaattttctctgtcttttccttcatattggtatgctcgtcacaagcaggtctcntcctttccctctcnttctctg

SEQ ID NO: 15626 - DNA, 58 bp, Glycine max
  unsure (1)..(58): unsure at all n locations; Clone ID: 700967586H1
acataatgggaataccaacaacaganacaacaatggaagaggtcacaaaggacaaaac

SEQ ID NO: 15627 - DNA, 249 bp, Glycine max
  unsure (1)..(249): unsure at all n locations; Clone ID: 700967587H1
gcttacccaagtactgtgcagaatgatatcttgtggttctggccaaatactgatcctcaatacaaagatattattacaagaaaaagacccccattcataccagaaatagatgatccatcgtatactaaatcaatgggaaacagagacattccttatgggtatgaagtactgatagaaaatcntatggatcctgcacatgttccctatgcacactatgggactaatgcggantccggaacccaaagtgga

SEQ ID NO: 15628 - DNA, 267 bp, Glycine max
  unsure (1)..(267): unsure at all n locations; Clone ID: 700967588H1
gccattcgtattgtcgcagagaaagaaaaccctagctcaccgtttcaagatgcaaatcttcgttaagaccctcactggtaagaccatcactctcgaagtcgagagttcagataccatagacaatgtaaagggccaaaattcaagacaaggaaggggatcccaccagatcnagcaacgggctcattttttgctgggccaaggcagcnttnanggatgggacgntacccttnggctggttaangaacatnccaaaaaggagtccnacnt

SEQ ID NO: 15629 - DNA, 241 bp, Glycine max
  Clone ID: 700967589H1
ttgtttgttgttgtaactcgttcttcttcttttgttgttctgtgtttgtgtttgttttttctctcacctgaaaatgtcttgctgcggtggtaactgtggttgcggaagctcctgcaagtgcggcaacggctgcggaggctgcaagatgtacccagacttgagctacactgagtcaaccaccaccgagaccttggtcatgggagtggcactgttaaggctcaattgagggtgctgaaatggg

SEQ ID NO: 15630 - DNA, 113 bp, Glycine max
  unsure (1)..(113): unsure at all n locations; Clone ID: 700967590H1
gttttagttagacagtggcggggcagtgatacagtgtgggcataaaattttcgaagttgnagcgaganacttgaccatttacaagggttttaagggttagggttttnctcaaa

SEQ ID NO: 15631 - DNA, 54 bp, Glycine max
  Clone ID: 700967591H1
tcatttcttctcatcttctttttcttccctttaaaattattattccgtgcaaac

SEQ ID NO: 15632 - DNA, 243 bp, Glycine max
  unsure (1)..(243): unsure at all n locations; Clone ID: 700967593H1
atttgccatgtgctactagagcatantatacgttgtagtgtcactggttgatgtcagtggaaaaatggatttggcatctgttcttttgctattgactagcttatgctcttcttctgcactgcatgagctgcttcacaagaagatgcattgtatgctttgaaggtatcattgaatgtttctgccaaccagctacaaactggaataaaaatctagtaaaccctgtactgggtccaatgtgaatgt

SEQ ID NO: 15633 - DNA, 250 bp, Glycine max
  unsure (1)..(250): unsure at all n locations; Clone ID: 700967594H1
attgagtccaattctccttcgctttccctctttatctgaaaggtatggagtgttttgacttctggaagagataatggtgcagtgcctagacggattaaagcatttgtgtgctgctctggtaaattgttgtgatgccgattcgtcaaagcaacctacaggtttagaaaatccagaagttcttgcaagagaaacagtgtttagtgtaagtgagattgaagcgctatatgaattgttcnagaagatcagcant

SEQ ID NO: 15634 - DNA, 253 bp, Glycine max
  Clone ID: 700967595H1
gcacaatcaagagatagccctgatgaggacactgggcatctcattccaaaactgctcaatcatagcaacccttgatctctattccaactctagtagcttcaagagctaccttgggaggccatggaggatctattctcgcaccgtttaccttgagtcctacattgatgacttcattgacccaaagggttggacaaagtggtctaatgagcaaggatgggaactttgtattatggtgagtatgacaactatggga

SEQ ID NO: 15635 - DNA, 268 bp, Glycine max
  unsure (1)..(268): unsure at all n locations; Clone ID: 700967601H1
atggcttcaactctgcttcccctggcaaccttcttcttagttctctccgcttcttatctccagattgctggggcgaaagcacaaccgttgactagtctcaagcttaactctccgatccttcaggagtctattgctaaagagatcaatgaaaatcctgaggcaggatgggaggctgctataaatcctcatttctccaattatacagttgaacaaatttaagcgccttcttgggagtcaaaccaaggcctaaagaanggaattgagaagt

SEQ ID NO: 15636 - DNA, 263 bp, Glycine max
  unsure (1)..(263): unsure at all n locations; Clone ID: 700967602H1
accaatcttcttccactactttcccttcgntccctctcactctcttcatttgtaagctttttgcgctagggttttctctgcaatctcttgtactcgaagttcgttccttcttccggatctcaatctatggatatccgcaagaggggaagacacgaaaccggcttcagcttaaatggaggattcaagagatccaagcaagaaatggagtccttatcaactggtgtaggaagcaaatcgaagccatgtaccaagtttttcagcat

SEQ ID NO: 15637 - DNA, 209 bp, Glycine max
  unsure (1)..(209): unsure at all n locations; Clone ID: 700967604H1
gagaagtatcagatctggagcaggagaatagcgttggcagcgtttgcgtttgctctgctgttcaatcggcctcagcagacgacgtcgttgtgctctctgaagataacttcgagaaggaagntggtcaggacagaggagctctcgttgagttctatgctcccttggtgtgggacactgcaaaaaagcttgctccagaatatgaaaaagtt

SEQ ID NO: 15638 - DNA, 209 bp, Glycine max
  unsure (1)..(209): unsure at all n locations; Clone ID: 700967605H1
caggtaactaatgatttaaggggaaagccattgagtagagcaactgaggattcatcactaccaatttgttggaggggtccaaagcctttcaaatctctgcatgatgtcactagcaattttaagccactattactgagcttcacaaaatcaaagaactcgctgctgcagctaccancagaaggctatcctaattgtcactgtgagaacct

SEQ ID NO: 15639 - DNA, 258 bp, Glycine max
  unsure (1)..(258): unsure at all n locations; Clone ID: 700967606H1
gaagagcatcactgaactaacaaagcaaccctatgtcgaaggtggtttgtgtcaccggagccagcggcgccatcggatcatgggtggtcctactcctcctccagcgtggttacaccgtccatgccaccgtccaagatatcaaggatganaatgagacgaaacatttggaggaaatggaaggagcaaagagtcatctccatttttttgaaatggatcttcttgacatcgactccattgccgctgccataaagggttgtt

SEQ ID NO: 15640 - DNA, 270 bp, Glycine max
  unsure (1)..(270): unsure at all n locations; Clone ID: 700967607H1
agtggagcatgtggatcatgcccgtcgctctgcacagcactgtgtgaaagcattactcagtgcacaaactcacacgtatgattatcttccatacttctactcgaggatttttgaatatgaaggaagccctagaaaagtgtggtggcagttctttgggagacaatgttggagaaaanagttgaaatgggaaatttttgtcctaaaatatctacccttcntggattgaaatcctggtaagntgaaaaggagttccttcttgaaaagtggggg

SEQ ID NO: 15641 - DNA, 130 bp, Glycine max
  unsure (1)..(130): unsure at all n locations; Clone ID: 700967608H1
agaagatcaagtgnagtatctgtncttatcagtttantatcngatatgtggggtccagggngaggattctnncagcagtagcttggctnccttnganatccatgcattgtagtgtgcgctccaagtagnt

SEQ ID NO: 15642 - DNA, 256 bp, Glycine max
  Clone ID: 700967609H1
tcatatctcatctccttcagcaaccacaacaaaccacttcaaaggtcctatattgctgatccttgtttctaaattcctctgcatggccaacaatggtgcaaaggatcccttgctgtcaggatcacttgatgcgactcaaaagactaaacagcagttattaaacaagagaaggctcctccgttctagaagtgctcctcacggcagagttgttcctaacagagacaattgcaatgaatcaattcctcgtactgcatcc

SEQ ID NO: 15643 - DNA, 236 bp, Glycine max
  unsure (1)..(236): unsure at all n locations; Clone ID: 700967610H1
ttcaacaacacactactttccttcncnccaataatgtcttcntcattctctgttcgttttcttgctcctccatcatcatgcttccccagctctcggccaagacatggctctgcgccgccaccaccccaacggtggctccggcaactgcctcctcggaggtggaggcttcaaggttggagctagagtggaggagagagatgggttctggggtttgaaaggaagagtaacnggggagg

SEQ ID NO: 15644 - DNA, 256 bp, Glycine max
  Clone ID: 700967611H1
aaaaacgtggctctgcattatcgctagcggccgacaccatttctgattgtagcatcattattattactgaattctgcagtttcaaggtgaagcctgaagcgccatggaagctcaagcggttcaagtcttgcgatattcagctacgctgcattccaataatcccaagcttgagaaaacagggaccaatggctctctccgaatgtttggtggatttaagaaacagctttttgttttcgtctaagttgcagagtgcaat

SEQ ID NO: 15645 - DNA, 254 bp, Glycine max
  Clone ID: 700967612H1
cttccacaagagttcttgcagttgggagcagctgcaatttgtgtcaaggatcctgttccttctgctgaagacttagcagatcaaataattgaggtcctcaactattttgggcttggtgcagtgatgtgtatgggagtgacagctggtgcttatatccttactctttttgctatgaaatatagggagcgtgttcttggtttaatacttgtatctcccttatgcaaagcaccttcttggacggaatggttttataa

SEQ ID NO: 15646 - DNA, 254 bp, Glycine max
  Clone ID: 700967613H1
acttcttctctcctcaacgctggttccagagaaacccaaaacaaaactgcgtcctctttaaaacgcaccatcaatacaaagaaagaaagttttcaaaacgcaaaagccaagaaccaaacaagaagaacaatgccattttttttctagcacccttttgtttccttccaccaagaaccggttttgccaccgacccatttctccaaatgcttcccctccgcctaagcgccgtcgtttcctcactcattctctgcttc

SEQ ID NO: 15647 - DNA, 254 bp, Glycine max
  unsure (1)..(254): unsure at all n locations; Clone ID: 700967614H1
catatactcaccatggaggctaagttggccancaccataatacttattttctccgtaatttggcttatgagggtgaatgccatagacccttgtgcctctcaagcggataattccgacctgaacgtgattcccatctacagcaaatgttcaccgttcaaaccaccaaagtcagactcatcgtgggacaacagaattataaacatggcctccaaagacccactccgattcanatacttgtccaccttagtgggcca

SEQ ID NO: 15648 - DNA, 255 bp, Glycine max
  unsure (1)..(255): unsure at all n locations; Clone ID: 700967615H1
gaacaagctgggaagcaaggaattatggtggcgtctcagagtcaaaaccccattgagcaaatccaagcgcgcttcaaggacttannaactggattccgcctctggctctccaagcagtccctccccgtcgaggccgccgtcgtcaccaccaccagcgccgcccagggcgccgccatcgggccttcatgggcaccctcaccgccgacgcctcctccaccttccccacccctcctcccaacgcctctctcaatcccc

SEQ ID NO: 15649 - DNA, 261 bp, Glycine max
  unsure (1)..(261): unsure at all n locations; Clone ID: 700967616H1
cngtctaccactctcctccaccaccaccatacaatnaagccttataagtacaagtctcctcctcccccagtccactctccacctccaccacactactactacaaatcaccccctccaccctaccactactagaatatagccctttcatatcacacccccacatggatgtatacagaaagtgtgaaaatgaaagccatggagggggaaggtgcagttgcagtttgcaaatccacaaagaagtataaatgtttgattattgtt

SEQ ID NO: 15650 - DNA, 111 bp, Glycine max
  unsure (1)..(111): unsure at all n locations; Clone ID: 700967618H1
gttctacncagaganaccctaactcatatatttattnttaatattacttcgcttcttnatctgtnaatttaccgntttgtntatntnttnatccctttgtttctacactga

SEQ ID NO: 15651 - DNA, 266 bp, Glycine max
  unsure (1)..(266): unsure at all n locations; Clone ID: 700967619H1
ggactgtaactagccgcagcacgaggagcagcctcaggaggagaaggatgtctcacaggaagttcgagcacccaaggcacggttcactgggatttcttcccaggaagcgtgctgctcgtcacaggggaaaagtgaaggcattccccaaggatgacccatccaaggcacccaagctcactgcattcttgggttacaaggcccggtatgactnacattgttagaagaggtcgagaaagccaggatcaaagtttcacaaagnggggaac

SEQ ID NO: 15652 - DNA, 110 bp, Glycine max
  unsure (1)..(110): unsure at all n locations; Clone ID: 700967620H1
cgcgaagaatgtgaagccgaaganaccgaagaagcctaaggtgacggtcgcggangccgcggcgaagatcgacgccgctgatctgggcgctttccncatcgagatatcag

SEQ ID NO: 15653 - DNA, 261 bp, Glycine max
  unsure (1)..(261): unsure at all n locations; Clone ID: 700967622H1
cctttcattccattccgatgcgatgacgacgatgagttccctctccctctctcttgactggcacaatgaatcctaccctgcctatcatgatttctaccttctccccattttcgctctcttcttcccctcccttcgcttctttctcgaccgattcatattcgagaaagtgggctaagacgattgatttttggaaaaggggaatgcngcgctggactaaccagaactgacgagagangaaaaaagattagcaaatttaaggat

SEQ ID NO: 15654 - DNA, 256 bp, Glycine max
  unsure (1)..(256): unsure at all n locations; Clone ID: 700967623H1
cngagaaggcatgttcgtccgcgatgctgttcatgaggactgggacctgcagtgttgtnagggttgccaaggtgaggatggagagggatgagattgttgagaatgtcgttgccgcgttgaaggcgctgtggaggttgtcccgaagaagtgggggaatgtgaggtccttgcatttgaagctgctggagagcctggcgctgccggtgtaacagacggttccggatgtgaaattgaagattgatggatttaaantccgg

SEQ ID NO: 15655 - DNA, 259 bp, Glycine max
  unsure (1)..(259): unsure at all n locations; Clone ID: 700967624H1
attctttcgcaccttcgaaaatcaattttntgtcttctctgcgtctncttcctctntnantngtgtnngatggntcgttccatgcnnacngctcgcaaatncaccggtggaaaggctcctaggaagcaactngccaccaaggctgcaaggaaatctgcaccgacaaccggtggagtcaagaagcntcatcgctatcgccnctggaaatgttgctccttcgtgagatccgaaaataccaaaagagcncagagcttctgnt

SEQ ID NO: 15656 - DNA, 255 bp, Glycine max
  unsure (1)..(255): unsure at all n locations; Clone ID: 700967625H1
anatagtgtaaataaatactcaattatatatgattcactatagtatttttaaataatgaaaaagaaaatatagtaaatgtttatggcaaaataaaaatagggaggacttccgtaactatgctgacttttgcttcaagacatttggtgatcgggtgaagcactgggtaaccctaaatgaaccatatggctacagcgtgaatgggctacagtggtggaagtttgcacccaggtagatgttctaactacgttggaaaa

SEQ ID NO: 15657 - DNA, 253 bp, Glycine max
  unsure (1)..(253): unsure at all n locations; Clone ID: 700967626H1
ggcgctgctgcccttcagtccttcagcaatggtttacgtgaagtcacagaaatcaaaagcctacttcaagaggtatcaagtcaagttcaagagaagaagagagggaaaaaccgattaccgtgccaggattcggttgattaatcaggacaagaacaaatataacaccccgaaatatcgctttgttgttcgttcagcaacaaagacattgttgcaccaaatnatatctgctagcattgctggcgatattgttcct

SEQ ID NO: 15658 - DNA, 256 bp, Glycine max
  unsure (1)..(256): unsure at all n locations; Clone ID: 700967627H1
gttttgtcgtttgcttctttctttgattaatgatgactagctttaaggttgcatgtgtggttgcgatgatgtgcatggttgtngccatgagtgttacacccatggcacaggccgcaatcacgtgcgggcaggtcgccggcgacgtgtctccgtgcctcagttatcttcgaagcggcggaaaaccgtcggacgcctgctgcaaacggagtgaaagtcgctcagcgggcgcggcgaagaccaaccgcccgaccgcaag

SEQ ID NO: 15659 - DNA, 251 bp, Glycine max
  Clone ID: 700967628H1
cgacatcgttggttctcaccctcttcaatcttcactccaatctacaaggagaatggatgaagcgatgaagaggcaatgcaaagttaacctgtacggaactgcttttcccatgaaggaggagcttgacaggcaaatcctgtccaggttccagcggcctcctggaccaattccttcttcaatgctgggtttggagactgttacaggaagtgttgatcactttggttttgaggattgtctaaatgacccccgtg

SEQ ID NO: 15660 - DNA, 251 bp, Glycine max
  Clone ID: 700967629H1
ctcacactgtgtttggagcagaatcagatcgtgtgttccgtacgttcgttcgttcatttccagtgtcaaacatggcgtctcagatgagcaagaagagaaagtttgttgcggacggagtgttcttcgccgaactgaacgaggttctgacacgtgaattggcggaggacggttactccggcgtggaagttagggttacgccgatgcgcaccgagatcatcatcagagccaccagaacccaggctgttctaggt

SEQ ID NO: 15661 - DNA, 254 bp, Glycine max
  unsure (1)..(254): unsure at all n locations; Clone ID: 700967630H1
ctccgcatacactctgctcgtagggtttctccacctagagggaaatggctcccaaaccgcctagtacgggtctgtttgttggactgaacaagggtcacgtcgtcaccaagaaggaattgcctccacgcccctcagatcgtaggncngaaaacaagcaagagggtgcactttgtgaggaacctcataagagaggtagccggttttgcaccctatgaaaagcgtataactgagttgctgaaggttgggaaggataa

SEQ ID NO: 15662 - DNA, 254 bp, Glycine max
  unsure (1)..(254): unsure at all n locations; Clone ID: 700967631H1
atttctgtgccaacaaaagaagatggcctcacaggtttgcaaagctgcttccagagccgcgaggtcccttctctccgcttccagagcctcccatggacgtgcggttggggctgctacggctgtttcattgagctgcaaagtgcctcttttctacggaaagaacggttctggaagtggtnnnnnnnnnnnnnnnnnnnnnnnnnggatttcaggagcacttgctcttcctgccgcagcttacatgttccaagatc

SEQ ID NO: 15663 - DNA, 255 bp, Glycine max
  Clone ID: 700967632H1
ttctaacatggatatgcatgcagactagccttgttggtttattaattgggaattcttaactcatcagccttctgcaacagctacaaaagaagccaacaacaaccttcggaatttcgtatctgggtttgctcattggatcctgcaagaaatgacaggagggtggaaccaattctgttaaagttttactatgcttatgtcaaccgagcgattggtttggggtctcaagtggtttttgtaaagttttctattgattag

SEQ ID NO: 15664 - DNA, 259 bp, Glycine max
  Clone ID: 700967633H1
ctttttcttctctctcaacaacttcaccttcttcctcctcgatcatgtctcacttcaagggcaagtaccatgatgagcttatcgccaatgctgcgtacattggcactcctggaaaggtattcttgctgctgatgagtcaacagggacaattggcaagcgtttggccagcatcagtgtagagaacattgaatccaacaggcgagctcttagggagctgcttttcactgctcctggtgttcttcaatatctcagtggtgtc

SEQ ID NO: 15665 - DNA, 257 bp, Glycine max
  unsure (1)..(257): unsure at all n locations; Clone ID: 700967634H1
atcgcttctgtctactgggatgcagcagtcatttaatgattttttgaatgatagatcatggcattatcaggatccaactgggaagattcaaggacctttttctatgttgcagctgtacaagtggaatgcaagtggatgtttccctccagatctcagaatatggagggtaggtgagaaacaagataactctatactgtaaccaatgcactaagtgagaagtgttccanaaatgtgtcattgccattcaacagccaatt

SEQ ID NO: 15666 - DNA, 260 bp, Glycine max
  unsure (1)..(260): unsure at all n locations; Clone ID: 700967635H1
cgaatgaagagtctgaaatcgaacggcagagctctcagccatgggtcgagaaataccggccaaagcaagtgaaagatgttgcccaccaagatgaagttgttcgagtactaacaaacacccttgaaactggaagttgcccccacatgctcttctatggtcctcctggcacgggaaaaacaactactgcccttgctatcgcccatcagcttnttgggtcctgagtatataagtctaggggtggttggagttgaatgcaagtg

SEQ ID NO: 15667 - DNA, 259 bp, Glycine max
  Clone ID: 700967636H1
acgtgaataccctaattcggagggtttcagttttcgccctcttttctcatctccaacatcttcgtcgtcacggaggctagtcttcctgttatcacaaacaatgtctgacggtcagaatcagacaagaatattgagatatggaagatcaagaaattgataaaggcattggaagctgctcgaggtaatggtaccagcatgatttctctgataatggcctccacgtggatcaaatatctccgggtccactaagatgttggga

SEQ ID NO: 15668 - DNA, 259 bp, Glycine max
  unsure (1)..(259): unsure at all n locations; Clone ID: 700967637H1
catgtgatgcatcattcatatgttgtctattgtnatgntaattggtcntgctagttgctagcacatcaatttctattatgtgttggatgacatcatggttcagccagattctattttgttctggttctnttccatttncatctttggttctatgatngancattgctgagaaaattatccctcaactggggatntnccatncccggggggagcatgacctgnaattggcatggttnntttnttggtntnngggcaagat

SEQ ID NO: 15669 - DNA, 258 bp, Glycine max
  unsure (1)..(258): unsure at all n locations; Clone ID: 700967639H1
ggaagcacaccctgcacaaggttacccaatacaagaagggtaaagatagcattgctgcccaaggaaaacgccgttacgatcgcaaacaatctggttatggcggacaaactaagcccgtcttccacaagaaggctaagaccaccaagaagattgttctgaggttgcatgccagggttgcaagcatgtctcccaacacgctattaaggaggtgcaagccatttgagattggtggtgacaaagaangggcaagggaacctt

SEQ ID NO: 15670 - DNA, 258 bp, Glycine max
  unsure (1)..(258): unsure at all n locations; Clone ID: 700967640H1
gggttttggttttggtgtgattccaacaaatccacgtttgagccacacacactttgtctttctggctttgtttnctttgtcccattcctatcccaaactttcttgtggctctgagattcaattccccgtnttgttttnnactcttnagactctcngcnanctgaancatttagnccatccatctcatagccatcacccagnaaaagcacgtcnantgttcggtttccaacgtncttctaattganacggnaatggctt

SEQ ID NO: 15671 - DNA, 250 bp, Glycine max
  Clone ID: 700967641H1
gcggaaccatgatggctgcgtatttgcgtgtatccatgcccacttccccacagtcccccaccactacgaggaggagatgcagaaatctgaaaacttcttgctccgttaacagacccaaaattccaatgccccctctcaaccctaaagacccctttctctccaagctcgcttccgtcgctgcttcttcccctgaaacgtcctcaacatcccaaaaactccgacacccttccttatctcgacatcttcggat

SEQ ID NO: 15672 - DNA, 249 bp, Glycine max
  unsure (1)..(249): unsure at all n locations; Clone ID: 700967642H1
ctgaaccagcagcaacatttgcgcaaatcgaaattgattctctgccacttaacctaaaatggaaatctttccgattcccgccgaatcctacactctcggcttcatcggcgcggaaaaatggccgagtccattgcccgangcgccgtccgctccggcgtcctgccgccttctcgcattcggaccgccgtccacttcaacctcgcccgccgtggcgccttcgagtcctttcggcgtcaccgttctccttca

SEQ ID NO: 15673 - DNA, 251 bp, Glycine max
  unsure (1)..(251): unsure at all n locations; Clone ID: 700967643H1
cctaatagaagaaaaatgatgggcattgaatcgacggggagtaaatggcttgnnttggtggcggcggtgtggatacaagcaatctccggcaacaactacactttctcgaattactcggacgctctgaaatccctcatgagcctaacccaaatcgagctcaacaatctgtccgtggccaaggatgttggctgggctggcctcagacaaattcccgactttgggccattctcctccattgggtccctccaaag

SEQ ID NO: 15674 - DNA, 247 bp, Glycine max
  unsure (1)..(247): unsure at all n locations; Clone ID: 700967645H1
gcgtcgcagtcgcaaccctaatcagaagaagcgcanttcaagcgagtnacagccaccagccatgggtcgtatgcacagccgcggtaagggtatatcctcttctgctttgccctacaaaaggacacctcctagctggctcaagatctcttcgcaagatgtcgaagaaaatatctgcaagtttgcgaagaaaggtttgaccccgtctcagattggtgtcattctcagagattctcacggtattgctcag

SEQ ID NO: 15675 - DNA, 250 bp, Glycine max
  unsure (1)..(250): unsure at all n locations; Clone ID: 700967646H1
cngttcgaagccaaaaccctagcagccggcgagaatggcagacgttgaggttgatgcggcggcagcggcaggggcagcgcagccgaagaagagaacgttcaagaaattcagcttcaggggcgtggatctggacgcgcttctggacatgtccaccgacgaactggtgaagatgttcagtgcgcgtgcacgtagaaggttccagagaggtctgacgaggaagcccatggccttgattaagaagctccgcaaa

SEQ ID NO: 15676 - DNA, 79 bp, Glycine max
  unsure (1)..(79): unsure at all n locations; Clone ID: 700967647H1
cttcaacaatngcattgttnnagaacaatnaancctntattgatnntcnaaagtgacatttttccacacaacatacgaa

SEQ ID NO: 15677 - DNA, 253 bp, Glycine max
  unsure (1)..(253): unsure at all n locations; Clone ID: 700967648H1
ctccgattgagaggataaagtctgtgattcaaaaaccaaaccagttgttaganctgggtcggataggcaatcaacatgattggtcccgacccagtttaagtagttggatgtgagtgcgcttcttcaatctaggtaagcgaaagcaagcagtagatcgagaaaagaaagaatacggattgcaacctacagatgaagaatagaattanataagaagaggaatcaatcgttcagtgatcgctacgcttgattgggg

SEQ ID NO: 15678 - DNA, 255 bp, Glycine max
  unsure (1)..(255): unsure at all n locations; Clone ID: 700967649H1
tgttctcaagagggacattgttcttaagagggagagttatggggaagaatttgcaaatcagataccttcatctcctccatatttttgtggttctcctccagttcgggcttctaatcccttaatccaagatgctcgatttggagacgaagagtactctcttatatnaacaatttcatcgcctncaggtttanttgtctccatcttcagcatctggcaaagcaggatgtgctaggatgaagtttggacttaaaccgg

SEQ ID NO: 15679 - DNA, 258 bp, Glycine max
  unsure (1)..(258): unsure at all n locations; Clone ID: 700967650H1
cgagcctcgaaatcttgctacncatcttcttcatctggaaatccganacgaagcaaccaacnnnnnnnnnnnnnnnnnnnnnnnnnnnnnnnnntgctcgtcggtgttcgttccgattctccntnaccttcttntgtcttcttcttctncgcntcgnnatcggtnccaacattcnaaancctaaatntgtngccncggtcttccattcccaatntccggtattcngangcgggattggnagcagagaanaaanatttc

SEQ ID NO: 15680 - DNA, 260 bp, Glycine max
  unsure (1)..(260): unsure at all n locations; Clone ID: 700967651H1
cgtcaccatgacttttaagcgcaggaatggaggtcgcaacaaacacggccgtggccacgtcaagttcattcgatgctccaactgcggcaaatgctgtcctaaggacaaggctatcaagaggtttctggtgaggaacattgttgaacaggctgcagtcagagatgttcaggaggcttgtgtctatgaaacaatacacgcttccgaagctttatgtgaangatgcagtattgtgtttccntgtgctatccactcgcaatggt

SEQ ID NO: 15681 - DNA, 252 bp, Glycine max
  unsure (1)..(252): unsure at all n locations; Clone ID: 700967652H1
ctctttcacagcacactcctcccagggtttctccaccaagagggaaatggctcccaaaccgcctagtacgggtctgtttgttggactgaacaagggacatgtcgtcaccaagaaggaattgcccccacgcccctcggatcgtaaggggaaaacaagcaaganggtgcactttgtgaggaanctcataagagaggttgctggttttgcacctatgaaaaagcgtataactgagttgctgaagttgggaaggnt

SEQ ID NO: 15682 - DNA, 256 bp, Glycine max
  unsure (1)..(256): unsure at all n locations; Clone ID: 700967653H1
cccgcaatcgtcttctgcttcaaggaaggagagcttgttattctctatcaacaaggaaaatgtcaggtgaagaggttgttgttgcagctgagccagctgctgccatcccaggcgagcctatggatatcatgactgccttgcaacttgtgctcagaaaatctctggcttatggtggtcttgcacgagggccttcacgaaggggcaaaagtgattgagaagcatgctgcacaactctgnncttctagcagaagactgt

SEQ ID NO: 15683 - DNA, 254 bp, Glycine max
  Clone ID: 700967654H1
cagaggttgatcttcgccgggaaacagctggaggatggccgtaccctcgccgattacaacatccaaaaagagtcaacattgcatcttgttttgaggcttcgtggtggtattattgagccatctttgatggcactggcgaggaaatataaccaggataagatgatctgccgcaagtgctatgccccgtttacacccccgtgctgtgaactgcaggaaaaagaagtgtggtcacagcaaccagttgagggccaaag

SEQ ID NO: 15684 - DNA, 260 bp, Glycine max
  unsure (1)..(260): unsure at all n locations; Clone ID: 700967655H1
gattatcctaagtctttgggaatagtgctgcaatggcttcaagtcaggaggaggtgacccttttgggagctactggaagcccatttgtgtgcagggttcatattgccctcaagttgaagggagttcaatacaaatatgtcgaagaaaatttgaggaacaagagtgaatgcttctcaaatcccaaccccagtttcacaaagaagatcccagtggtttantnccacattgagaaagtcccataagcagagtctnttgtgatt

SEQ ID NO: 15685 - DNA, 244 bp, Glycine max
  unsure (1)..(244): unsure at all n locations; Clone ID: 700967658H1
caaattggtctcttgtcttcctcctcatctctacactactccacatancagcccagcctctcaagcccaagcccaagcccaagcccaagcccgttcataaaatcctctgcagcagcacccagtacccagccctctgcgtctcatccctctccgtctacgcctccagcatccaacaggaccctcaccaactggttcagacagcactctcctctccttgaacggcacccaagccnacaaaaacttt

SEQ ID NO: 15686 - DNA, 250 bp, Glycine max
  unsure (1)..(250): unsure at all n locations; Clone ID: 700967659H1
gatgactagtttcantagtgtacttcacttctccaactatgatacaaccaacaggacggagatatctagtactttgcctgctaacgagattctagttgctatgggatatcttttgcaaattgaatatgaggttattggagaagacttggtaaatctgtggcttctcatgttgtcatgctctgcnatcanttgcnatttggtgaatgtcctgnnccaatgccccattanccttcccacacaaacatacgnt

SEQ ID NO: 15687 - DNA, 249 bp, Glycine max
  unsure (1)..(249): unsure at all n locations; Clone ID: 700967660H1
cttaatgttagcaatgtcttcctctttctccatccatttcttcctcctcctctcaatagccctttnnctcagtttgttgcttagcagcatctcaagctcccaccaccaaatcacacccctatatccttcccattaagaaagaccccanaanaaatttgtactacacttcagttggcattggaactcctaggcacaactttgatttagtcattgatctttctggtgaaaacttatggtacgattgtggac

SEQ ID NO: 15688 - DNA, 246 bp, Glycine max
  Clone ID: 700967661H1
tcttccaccaccatccaccacaacggctcccacatacccaaaaaacccaaactctcttccttggaaatcgaatcagaattcggccaccacgactcctccgtcgcccgatcaacaacggcagcttcgggtgctgcccggcctccatcctctccgctcaacgccgctggcagctccagtacctccgccagcccgaccacttctacttcaacgacctcaaatccgccgtcctccaatcccgaaccttaa

SEQ ID NO: 15689 - DNA, 248 bp, Glycine max
  Clone ID: 700967662H1
atccactctctcttaattaaattaaaacaaaaaatgtgcgctgccatatccgaagtggaacaagaagagttgctcgaaaaattggaggtgttcaagatcaaaggcagggacaagcatggccgcaagatccttcgcattatcgccaaattcttcccagcacggttggtgagtgttgaggttctgaaaaagtacctggaggagagggttttcccgaagctgatggggaagaggaaattcgcggtgctgta

SEQ ID NO: 15690 - DNA, 239 bp, Glycine max
  Clone ID: 700967663H1
aaacactctgacacaacaaacacaaacacaatcgtcaattaaaacaacaacaatatcgaagctgcacaaattaatatccaacactctcaagctttcgagttcaaactctgggcgctgaatttggttcatttttctaagagttatatatacttttattgaaattgttgcggttcaagtctgaactaaaacattaagtttgcggaggctggtgcttttctgatttgccagtcaaattatta

SEQ ID NO: 15691 - DNA, 250 bp, Glycine max
  unsure (1)..(250): unsure at all n locations; Clone ID: 700967664H1
tcactcccaactttcatgccatcngnantnnctatcctcctctctggntnaagtcccaaaacaaacttgataacatctncaaattaatagtgccaganacaccagtcaataatttccccgacttcgaaatcacgaattttgaaactgaagagagaatatgctcaaattgcgtntgaatatggctataagctgcaacagacaagaattcttgctacgacccgtttttcacgctagagactccancacagng

SEQ ID NO: 15692 - DNA, 254 bp, Glycine max
  Clone ID: 700967665H1
gacttattttggaggagatagctgaaaagcagaggcagagagaaagggaacttgaagaaaaagagaaacaaaggagagaagcattgttgggtagagctgctgctgaaccagctcctcctgcccgtccattggaatcgggatctgctgctcctgctgcagctgcagctgccgccgcagctccaacaccagggaaatatgtccctaagttcaggcgacagagaactgaaagcacaggagtgcgcctcctccagaga

SEQ ID NO: 15693 - DNA, 253 bp, Glycine max
  Clone ID: 700967667H1
cacaaacccgtccctcacactctccaaaccctagcggcactacacactagttctatcgctatctccccaagatgtcgagcgccgatcccgagcacagagaagaggaggaggcacccgccgttggcgacgacgaggacaccggagctcacgtcgctccaatcgtcaagctcgaggaggttgctgtcaccaccggcgaggaggacgaagatgcaatcctggatctcaaatcgaagctttaccggttcgacaagga

SEQ ID NO: 15694 - DNA, 251 bp, Glycine max
  Clone ID: 700967668H1
cgagaggggcagtagccgagattccgtgagttgcaaaaatgaagacgattctttccaccgagaccatgaacatcccggacggcgtgagcatcaaagttcatgccaaggtcatcgaagtcgagggcccccgcggaaaattggtgcgagacttcaagcatttgaatctcgattttcagctcattactgacgaaaacggtaaaagaaagctgaaaatcgacgcgtggtttggttctcggaaaacatccgccgcc

SEQ ID NO: 15695 - DNA, 247 bp, Glycine max
  unsure (1)..(247): unsure at all n locations; Clone ID: 700967669H1
caaattgaatcgagcgaattcacaaaccctagttttcgacgatgggtcagatccagtactccgagaagtacttcgatgacacttatgaatatagacatgtggttcttctcctgaagtcgcaaaactgcttcccaagaatcgtcttctctccgaaaatgagtggcgagctattggggttcagcagagccgtggctgggttcatatgcaattcatcgccctgagcnacacataatgcttttcaggaggc

SEQ ID NO: 15696 - DNA, 248 bp, Glycine max
  Clone ID: 700967670H1
cgatctcaaaatgcccgccgtttatggagctcgcttgaccaccttcgaagactccgagaaggagagtgaatacggttacgttcgcaaggtttcaggacccgtcgtcgttgcggatggcatggctggtgctgctatgtatgaactcgtgcgtgttggtcatgataatcccattggtgaaattattctctccaaaggggatctgctaccatccaagtttatgaggaaactgctggttttgatggttaatg

SEQ ID NO: 15697 - DNA, 247 bp, Glycine max
  unsure (1)..(247): unsure at all n locations; Clone ID: 700967671H1
anactcaggcgctgctgcccttcagtccttcagcaatggtttacgtgaagtcacagaaatcaaaagcctacttcaagaggtatcaagtcaagttcaagagaagaagagagggaaaaaccgattaccgtgccaggattcggttgattaatcaggacaagaacaaatataacaccccgaaatatcgctttgttgttcgtttcagcaacaaagacattgttgcacaaataatatctgctagcattgctgg

SEQ ID NO: 15698 - DNA, 249 bp, Glycine max
  Clone ID: 700967672H1
gcagaacaaagctgaagcagacagaggtggactgcgagttcctaaagaaatgttgtgaaacattaacagatgaaaacagacggttacagaaggagcttcaagagctgaaggcactgaaactggctcagccgttgtacatgcctatgcctgcggcaacactcgccatgtgcccctcttgcgagaggctcggcggcaagggcgtccaacgtgccggcggttccccccaagacatcattctccatgggccct

SEQ ID NO: 15699 - DNA, 245 bp, Glycine max
  unsure (1)..(245): unsure at all n locations; Clone ID: 700967673H1
attttcnnctttctctctcccttantcaaagggactcattgttcttctcccaggttatgtagaaaagcaaaatggtgaaganttgctgcattggtgctggatatgtggggggtcctactatggcagtcattgcacttaagtgcccatccattgaagttgctgttgtttgatatcnctaaatcccgcattgcagcctggaacagtgaccagcttcctatctatgaactggccttgatggtgtggtg

SEQ ID NO: 15700 - DNA, 244 bp, Glycine max
  unsure (1)..(244): unsure at all n locations; Clone ID: 700967674H1
cagcngcttccttatcagaagcgcttcgccccagagattctcgcttcctctccttcaatccttcttccaacgctattaatnacaaaattaacctctccgcttccctccgatccattcactccctccctcttaaaacctccttgcgcgatcgatcgccatcgtaactatcgaagtgtcttgttagggcgtgtttggtaggatgcgacccgagtataggaaaagtggtagctgctacaaagatcaa

SEQ ID NO: 15701 - DNA, 246 bp, Glycine max
  unsure (1)..(246): unsure at all n locations; Clone ID: 700967675H1
gagcacgcaatcttgcataaatacagagaagaagagaagagtgaagagacgaaggatggggaaggcaaaagaagcngcggtggtggcgggagccctagcattcgcgtggctcgctatagagctcgctctcaaacccttccttaccaaggcacgtgcttccatcgacaagtccgacccggcacgtgaccccgacgacgatgctcttcctaaaaaccaccgncgacgangttcccgaagccttccgtt

SEQ ID NO: 15702 - DNA, 243 bp, Glycine max
  Clone ID: 700967676H1
agaattatcatacccttcaagatgaaaccgtacctacgtccaatattcctattattccttatccttctcgaccaatccatttcggcgagtgctgctataaatattaatggtctgagaaacaaaattagagaagttctaaacaagcacccgagcatcaatcttccggcagataaactgaagaaggtgaagagaccactgaaggcatggattatctgcttggcgaatgtaaggacaggccgcctc

SEQ ID NO: 15703 - DNA, 242 bp, Glycine max
  Clone ID: 700967677H1
tggtggtacatgtgaagaatattttttggattttggatttgctgacaaatttgaggaggtactaggctctggtccttttgtaggttcactcttgcaaaactcaagttctgaaagtcattcttccggattaagcggaagtagcattgttgatggggtattagaatcaacagaagtacctattgcacaatctgaatgcaaaaatgattctctagatgagacaataacctatgaatcacatggtg

SEQ ID NO: 15704 - DNA, 224 bp, Glycine max
  Clone ID: 700967678H1
gagagagtattggcgcttcatcaagatgggtatttctagggattccatgcacaagaggcgtgccactggtggcaagaaaaaggcttggagaaagaagagaaagtatgagcttgggcgtcaggcagcaaacaccaagttatcaagcaacaagacaatcaggaggattcgtgttagaggtggcaatgttaaatggagggcattgaggctggatactggcaattact

SEQ ID NO: 15705 - DNA, 246 bp, Glycine max
  unsure (1)..(246): unsure at all n locations; Clone ID: 700967679H1
cttaactcaacttctgctacccactctcttcttccaagtccaaccacgcttttctctacagtcatgggcaaggttaagatcggaatcaacggatttggaagaattggccgtttggttgccagagtcgctctgcaaagagacgatgtggagctcgttgccgttaacgaccctttcattaccaccgattacatgacatanntgtttaaatacgacagtgttcacggacactggaagcatcacgatgtc

SEQ ID NO: 15706 - DNA, 250 bp, Glycine max
  Clone ID: 700967681H1
caagatatcatcacattgcaaagaaaatacacattacattactaagtctttgttcatttgagtagtagtgatggctagcctcaaggttgcatgtgtggttgctgtgatgtgcatggttgtggtggccatgagtgctgcacccatggcacaggccgcaatcacgtgcgggcaggtcgccggcgacatgtctccgtgcttcagttatcttcgaagcggcggaaaaccgtcgcaggcctgctgcaacggagtg

SEQ ID NO: 15707 - DNA, 249 bp, Glycine max
  unsure (1)..(249): unsure at all n locations; Clone ID: 700967682H1
tgtgacattacaggcaccatagacttcatattcggcaatgcagcngctgtgttccaaaactgcaaaataatgcctagacagcctctaccaaaccagttcaacaccatcacagctcagggcaagaaggaccccaaccagaacaccggaatcataatccagaaatcaaaattcattccccttggaaacaatctcacagctcccacatacttggtagggccatggaaagatttctccaccactgtgatcatg

SEQ ID NO: 15708 - DNA, 250 bp, Glycine max
  Clone ID: 700967683H1
tttagtattcttataatcccccctccctgtgcgtggggagcatcttctttgtattgagcgtggagaaagagaaagatgatgaggttaaggtggagtttagtcgtaacggtcacgttcgctgttttgctgttttggattggatcgctgcaagttcaagcctctaattctgtttccgccttcgttcaaaacgccatctactcccaacagaatcgccgtttctcccaaatcctattgcccctaactgttgcgg

SEQ ID NO: 15709 - DNA, 247 bp, Glycine max
  Clone ID: 700967684H1
ggagggagccgtagcagcggaagctctagcttgggtagcgaatcacaatggcgagaggattaaagaagcatctgaagaggcttaatgccccaaagcattggatgcttgacaaactgggtggtgcatttgctcctaagccctcatctggaccacacaaatcgagggaatgcctgccactcatactcattttgcgaaaccggctgaagtatgctctaacataccgtgaagtcattgctattctgatgca

SEQ ID NO: 15710 - DNA, 247 bp, Glycine max
  Clone ID: 700967685H1
caagatttggattcctgagaaaacatcaaataaaatcaaaacccaaattcgcaggttattgaaaattgaaatcctaggagaaacacatccacagcaaaagaagaagaaggaagaaaccagcgtcactcatctcatcgtggttctgcaaagtcttcttttcttttcggtgaattaataaagggtttttgcgtggtgattgtgttgtgttgtgctgtgctgtgtatctgaatccgcgcaattaggtttg

SEQ ID NO: 15711 - DNA, 255 bp, Glycine max
  unsure (1)..(255): unsure at all n locations; Clone ID: 700967686H1
cggaaaaggaggaaaaattgggagaaaagttaaggcgaggggtattggtagggaaaagtaggggcccctttactccagtgccctcttggtcttgggctcacaacaaccatagcagcagcgttctttctctttctgtagaaagctcgcccggggtctctgggaattcaaaccnattctttccccactccttncnaatgcantcatcatngttcngctaaaaaacgctgcccgcnttgnggcggaatccggcgcgat

SEQ ID NO: 15712 - DNA, 247 bp, Glycine max
  Clone ID: 700967687H1
cacaaactagtaaatagtaatattattcttcgaatccattttattattcataatgggtgttttcacatttgaggatgaaaccacctcccctgtggctcctgctaccctttacaaagctctagttacagatgccgacaacgtcatcccaaaggctgttgatgccttcaggagtgttgaaaaccttgaggggaacggtggccctggaacccatcaagaagatccatttcgttgaggatggagaaagcat

SEQ ID NO: 15713 - DNA, 174 bp, Glycine max
  Clone ID: 700967688H1
gaaaccccaatcccaatacactcccaactcacaaagccatgtctccaggtcctgttgtcgacgcttcccctgaggttgaagcagagcaacaacttccctccgtcgatgacgcaacccagttgaagaaatcccaaccgcaggaggatgatgctcccgttgtcgaggacgtgaggg

SEQ ID NO: 15714 - DNA, 246 bp, Glycine max
  unsure (1)..(246): unsure at all n locations; Clone ID: 700967689H1
caatatattccattctctctgtgtatntccctacctctcccttcaagatgcagatcttcgtcaagaccctcaccggcaagaccatcacccttgaggtggaaagctctgacaccatcgacaacgtcaaggccaagatccaggacaaggaaggaatccccccggaccagcaacgtctcatttttcggccggaaaagcaacttgaggacgggcgtacccttgctgactacaacattcagaaggagagta

SEQ ID NO: 15715 - DNA, 241 bp, Glycine max
  unsure (1)..(241): unsure at all n locations; Clone ID: 700967690H1
ctgaaacaaacgctctatcccattactccttcgcttcactcaccggattctcactctcaactcatataccaactcggagtttcggtcttaccgtttccgattcaaaccctaactcggatcctcaaactcagttgatttcatacaacatggcttcngatgctgatatggaggactatggatttgagtactcagatgaggagcaagaggagcaagatgttgatattgagaatcaatattacaa

SEQ ID NO: 15716 - DNA, 243 bp, Glycine max
  unsure (1)..(243): unsure at all n locations; Clone ID: 700967691H1
tgaaagaagccaaaaatttattagctgtgatgacgaaagaaggagtaaaacctaatgttgtttcttataatactttaatggatgggtattgtttaattggtgagtgcagaatgcaaaacaaatgtttcacactatggtccaaaagggagtaaatccctaatgtntacagctacaatataatgattgatagattatgtaagagtanaagggtggatgaggccatgaatcctcctaagagaagtg

SEQ ID NO: 15717 - DNA, 240 bp, Glycine max
  Clone ID: 700967693H1
catgctgtcacagttatccaacaaacccggaaagtgggttggctaaattaaggttagcttctgaagaaggctggtcaaatttggctcacaatcttgggatccaccgcttttatttcgactaggaggtatctatggccccggtagaaggtacttaccttttgttattgtaatttatttttcaagtaatgcttctattattagtttctttctaggatctgcaaaagcctataaaagttttgt

SEQ ID NO: 15718 - DNA, 95 bp, Glycine max
  unsure (1)..(95): unsure at all n locations; Clone ID: 700967694H1
caaggtgntactatgtttgntaagtaaggtaaggcacgcgaactaatgcaacaagatagngagtaaagtcaaantggtgcgtttcccaaacttga

SEQ ID NO: 15719 - DNA, 205 bp, Glycine max
  Clone ID: 700967695H1
gcgctttctgcaaaccgaacatttcatctccaaagggatcaacaggtcgaaggagaaatggggcgacattcacgaagcttttcagccggcttttcgcgaagaaggaaatgcgaattctgatggttggtcttgatgctgctggtaagaccactatcctctacaagctcaagctcggagagatcgttactacaattcctaccattgg

SEQ ID NO: 15720 - DNA, 98 bp, Glycine max
  unsure (1)..(98): unsure at all n locations; Clone ID: 700967696H1
ccgcatggggtaaagatgttatataaggggagaccagttgatttgactcctgagcaagaggaggttgcnacaatgtatgcagncatgcgagatacaga

SEQ ID NO: 15721 - DNA, 180 bp, Glycine max
  unsure (1)..(180): unsure at all n locations; Clone ID: 701043701H1
atttcctcttcacaaaactcagtttccaattcaccaaactcacaatggttgatctagattggcaaacaaagatggttcactccaacatcatgcntccaatgtcccccaaactctctctcccggatcataacattccaatcccaactttgcnactcccccttcgccaaaacgacatcaccg

SEQ ID NO: 15722 - DNA, 274 bp, Glycine max
  unsure (1)..(274): unsure at all n locations; Clone ID: 701043703H1
gttctgctctggcggccggctgtgctgcaatattgaagccctctgagttggcatctgtgacatgcttggaggctggctgaaatttgcaaagaagtcgggcttcctcctggcgtgttgaacattctcactggattaggacctgaagcgggtgctcctttagcagctcatcncgatggtaagacaagattgcctttactggaagctctgcaactgggagcaaaattatgacagctgcagctcagctgatcaagcctgtttcactagagcttggtgg

SEQ ID NO: 15723 - DNA, 164 bp, Glycine max
  unsure (1)..(164): unsure at all n locations; Clone ID: 701043704H1
cgaagaaacaaagananaagaaaaactatatcagcgattctcgtgatcttcggcctcgaatcgagaagtaaaagacccaactccgcctctgtnttngtgatcgaaaaccataaaaaagttgtttccgatcacagccttaatcggattcagctgttgttcctcct

SEQ ID NO: 15724 - DNA, 109 bp, Glycine max
  unsure (1)..(109): unsure at all n locations; Clone ID: 701043705H1
gtcaccgttttgactccttcttttggaaccactctgcctagatgctctgcaagtattgggccgtgaacgcngttgtccatccaccgacgcgtcagcnctaacaaacccg

SEQ ID NO: 15725 - DNA, 154 bp, Glycine max
  unsure (1)..(154): unsure at all n locations; Clone ID: 701043706H1
ggtttccttctctctttcaccgataaaacaaactaaattcttcttctttctactgaaaacgatagtanatggcgacgaatccaatcgaagcggggaacggcgacgccgctcctaaccctaacgcgactaccaaaccctccgtctacctccaaga

SEQ ID NO: 15726 - DNA, 267 bp, Glycine max
  unsure (1)..(267): unsure at all n locations; Clone ID: 701043710H1
gcgaagagaatggctcccaagggtttaatctttttgggctgtgttatgcttctcagcactgtcactgagtcgttgtcttgcggaggataatggacttgttatgaacttctacaaggaatcatgccctcaggctgaagacatcatcaaagaacaagtcaagcttctctacaagcgccacaagaacactgctttctcctggctcagaaacatcttcccatgactgtgctgttcaagagttgtgatgcttcactgttgccnggactccaa

SEQ ID NO: 15727 - DNA, 147 bp, Glycine max
  Clone ID: 701043711H1
gtccaagcagcctccaattcgtgccactctcttcaaaatggccgttaccttctcaaatctccacacagaatcaggtctcaagtccctcgacgacttcctctctgggaaggtctacgtttctggggatcagttcacaaaggacgacat

SEQ ID NO: 15728 - DNA, 264 bp, Glycine max
  unsure (1)..(264): unsure at all n locations; Clone ID: 701043713H1
gcagcagcagagagtgcggtaggctcatccgagaccggaagcagcaatggggatcgatctcaaggccggaggtaaaagcaaaaaaaccaaaagaacagcacccaagtccaatgatatctatcttaagctcttggtcaagctttatcgcttccttgttcggagaactggcagcaaattcaatgccgttatactcaagagattgttcatgagcaaggttaacnagcccccattgtctttgtcaaggttgattaagtataccaaggg

SEQ ID NO: 15729 - DNA, 263 bp, Glycine max
  Clone ID: 701043714H1
aaactaaagatcaaaccaaaggggacaagaaaaagccaatgtcgagaatgaaagagctacttagatgggctgcttctgccaagacagagaaaggagggaaattcaatggaagaaaggttttaatgttcagaaggcgtggaaccctgaaagcagttccagatgatgaccaaggttgcactgactcacccaagatcagtttcagatgggatgtggaaagttgctccaccacttcctctgtctactctgctatctcaatagcttcc

SEQ ID NO: 15730 - DNA, 239 bp, Glycine max
  Clone ID: 701043716H1
aatcagttgactcttcgttcctccctctattcatctgtgcgcgttcttctatctttctcttttctctcagatctgtgttcccggtatcgtcgttttgttcattcttttttttggatctcaggatggagcccatggacatcgttgggaaggccaaggaagacgcttctcttcctaaagcgacaatgacgaaaattattaaagagatgttgcccccggacgtgcgtgtcgccagagatgca

SEQ ID NO: 15731 - DNA, 165 bp, Glycine max
  Clone ID: 701043717H1
tagtctccatacatcaacttgggaggttaaagagacggcaacgttgtgctgtccgccttgaccgagccagagcttcgtcttggccctcgattttgccctgtaaaactaatcccagtaacaacagaaataatcaatggcaccgaaacagaccaaggctgagaagaa

SEQ ID NO: 15732 - DNA, 109 bp, Glycine max
  unsure (1)..(109): unsure at all n locations; Clone ID: 701043718H1
ggtgaagcatgcccaataccaatgcntcaacttattcaaccttttngctagacttgtccgtcaagcaactcctcttgnggtgaattggcagttcttnagactcatncga

SEQ ID NO: 15733 - DNA, 148 bp, Glycine max
  unsure (1)..(148): unsure at all n locations; Clone ID: 701043720H1
tggagaggtggaagagctgcttcgttcaatataattcctagcagcactggagctgctaangctgtaggaaaagttcttccagcgctgaatggtaaattgactggaatgtccttccgagtccccactgttgatgtttcagttgttgacc

SEQ ID NO: 15734 - DNA, 111 bp, Glycine max
  unsure (1)..(111): unsure at all n locations; Clone ID: 701043721H1
gttctattcttcttccacaatgggtatctctcgtgattccatgcacaagaggcgcgccaccggcggcaagaagaaggcttggaggaagaagaganagtatgagcttgggag

SEQ ID NO: 15735 - DNA, 160 bp, Glycine max
  unsure (1)..(160): unsure at all n locations; Clone ID: 701043722H1
gccacatagagacacaatacagagtgagttgttgctccttcgccacaactctctgccaacatgggtatctccagagattctatgcacaagaggcgtgccactggtggcaagaagaaggcctggaggaaaaagagaangtatgagcttggtcgccagcctg

SEQ ID NO: 15736 - DNA, 160 bp, Glycine max
  unsure (1)..(160): unsure at all n locations; Clone ID: 701043723H1
cacccttttgcgtagtagaaactttgagtctttctttgaaactttttaagtcagagagtctttgtngatgacgaanaacgnaaccatgtcatcatcaacaatacggagagatctagaaagtggaggggcgaacaagaacatcancaacataagctacagt

SEQ ID NO: 15737 - DNA, 142 bp, Glycine max
  unsure (1)..(142): unsure at all n locations; Clone ID: 701043724H1
atccggtgctgtagtctctacattctgtgatggcaccaaaaccgataacgagtccagtccccgattcgtggtaaccccanacttctccgtcttcactctcgccatcggcctcgtcttaaaccgnctctttcttcatttatga

SEQ ID NO: 15738 - DNA, 145 bp, Glycine max
  unsure (1)..(145): unsure at all n locations; Clone ID: 701043726H1
cttttctactttgagtctncttgatccttctttttctccttgaactccaaacatggcagatgaggtggttctgctagatttctggccaagtccatttgggatgagggtcaggattgcacttgctgaaaagggtatcaaatatgag

SEQ ID NO: 15739 - DNA, 145 bp, Glycine max
  unsure (1)..(145): unsure at all n locations; Clone ID: 701043727H1
gggtttgantcgaagcgattcatcgatcgatcgatggctcttgtaggagttgaactgaagcatgcggcggagggcgtaccggaggagaattgctccgccaagcccaccaagcagggcgagggcctccgnggactactattctctc

SEQ ID NO: 15740 - DNA, 156 bp, Glycine max
  Clone ID: 701043728H1
tgctctgctcgtgcctctagggttatcatatctccatttccatttcctctctctcagtttccaagaatcttaagctatgggaaagtcttacccaaccgtgagcgctgattaccagaaggccgttgagaaggcgaagaagaagctcagaggctcatt

SEQ ID NO: 15741 - DNA, 260 bp, Glycine max
  unsure (1)..(260): unsure at all n locations; Clone ID: 701043730H1
ctaaaacccagaaccagatctagggtttattttccttttcttttagaatttgaacaagttttgcgtcttcaaaggaaataggatgggagaattgaaggacactgaggcttacgaggaagagctcatcnnnnnnnnnnnnnnnnnnnnnnnnnctcccgattccgctaaacccgttactgaatctggcaagaagggttatgttggcatccatagttcgggatttcgagactcctgttgaaaccagagcttcttcgagccat

SEQ ID NO: 15742 - DNA, 264 bp, Glycine max
  Clone ID: 701043731H1
gttgagagagcgctgaacagcttaggaaagggcttcgacttggcctcagatttcaggctcaagttctgcaaaggcgaagagcgtttggttcttctcaacgaaacagagaaacgagagctcatggtgccaggtttcagacccatcagagatgtctccgttgacatcaaatgcgacaagggcgatcgcacccgctaccaatccgacatcctcaccttcacccaaatgtcagagctctttaaccagaaaagttcaatccctgggaga

SEQ ID NO: 15743 - DNA, 149 bp, Glycine max
  unsure (1)..(149): unsure at all n locations; Clone ID: 701043733H1
gcagagaagagccatggtgcacgtttctttctaccgnaactatgggaaaacgttcaagaagccctcgtcgtccctacgagaaggagcgtttggacgccgagttgaagctggtcggtgagtacgggcttcgctgcaagagggagttatgg

SEQ ID NO: 15744 - DNA, 268 bp, Glycine max
  unsure (1)..(268): unsure at all n locations; Clone ID: 701043734H1
ggcttcagagaagaaactttcgaacccaatgagggagataaaagtgcagaagctcgtcctcaatatctctgtnggcganagtggagatcgtctcaccagagccgccaaggtgttggaacaacttagtggccaaaccccagtgttttccaaagcaaggtacactgttcgttccttgggattagaagaaatgagaagattgcatgctatgtcactgtcagaggtgacaaggcaatgcaacttttggagagtggtttgaaggtgaaggaat

SEQ ID NO: 15745 - DNA, 264 bp, Glycine max
  unsure (1)..(264): unsure at all n locations; Clone ID: 701043740H1
ctcctcccatctctctgctctaaacgacaccgttttagtcttctcctcaagtcatggccacacttcaagagcctnctgcttcagaggaactgcctttcccgtttgcccctccaatgtcaccaacaatagaaactccaggagctcatattggaggcctgcacaagcagccgtgaagcccaatttccatctcccaatgcgcattttgagttaaaaaataggattctccagaggacataaaggctctgagattgataactgccatta

SEQ ID NO: 15746 - DNA, 259 bp, Glycine max
  Clone ID: 701043742H1
attccaatatattccattctctctgtgtatttccctacctctcccttcaagatgcagatcttcgtcaagaccctcaccggcaagaccatcacccttgaggtggaaagctctgacaccatcgacaacgtcaaggccaagatccagggacaaggaaggaatcccccccggaccagcaacgtctcattttcgcggaaagcaattgaggacggccgtacccttgctgactacaacattcagaaggagagtaccttccacctcg

SEQ ID NO: 15747 - DNA, 143 bp, Glycine max
  Clone ID: 701043743H1
ccgattcggctccgcgtcacagccacaagcacagccacagccacagcgggagccagcgggagcagccggtggtggacgtgaagatcaacgacctcgtcgggaacggaatctccggaatactgtacaagtgggtgaattacggg

SEQ ID NO: 15748 - DNA, 141 bp, Glycine max
  unsure (1)..(141): unsure at all n locations; Clone ID: 701043744H1
gagaagcactcttcgttcttcgactgtctacgatctgctttctctgaattgtgaaaatgtcgctcggagaaactgcttgttcatacgcagctctcatcctcatgaagatggaattagtgtaactggngacaagatcagcac

SEQ ID NO: 15749 - DNA, 256 bp, Glycine max
  unsure (1)..(256): unsure at all n locations; Clone ID: 701043745H1
ctcacactcactttctctctctataactctttctcacccgctagggtttccttttcatcgcatcttgagtttgcaacctcgtcttgtgatttccatggagggtgctgggatggaagagaataatattattaatgatgatgataataataacaagtctgaggcgcatttgacttctgccgctgcttttgtggagggtggaattcaggacgcttgtgatgntgctgcagtatatgccntgaagctttctgtgatagtg

SEQ ID NO: 15750 - DNA, 203 bp, Glycine max
  unsure (1)..(203): unsure at all n locations; Clone ID: 701043746H1
gagaaagaaaagaatggcaaagttaataaaattctttgagttgaacacaggggccaagattccttctgttgggttaggcacttggcaagctgagcctggtgttgtagccaaagctgtcaccacagccattctggttggatanaggcatattgattgtgctcaagcgtataacaatcaagcagagatggttctgctcttaagaa

SEQ ID NO: 15751 - DNA, 262 bp, Glycine max
  unsure (1)..(262): unsure at all n locations; Clone ID: 701043747H1
cgcgctcagccgcatccgcaacaacgcgcggaacctcctcaccctcgacgagaagaacccgcgccggatcttcgagggagaggcgctgctccgaaggatgttccganacggtctcctcgatgagacacagaacaagcttgattacgtcctcgccctcaccgtcgagaactttctcgagcgccgcctccagacccttgttttcaagtccggcatggccaagtccatccaccatgctagggttcttatcaagcagagacatatt

SEQ ID NO: 15752 - DNA, 262 bp, Glycine max
  Clone ID: 701043748H1
ttctcttctcttctcttctgggtttttgctttttcctcattctctcattctcaaacaccacaaaaaaatgggccttgtttcccaggatgccctcaaccaactccaagctctcatggatcaagtgctacttgaggaggagccactgcagagaacgtttcagaatgttcatcaaggatgtgtcaccgaaaccttaacacggtttctaaaagcaagggagtggaatgctaccaaggcccataaaatgatagtcgattgtttgaag

SEQ ID NO: 15753 - DNA, 265 bp, Glycine max
  Clone ID: 701043749H1
gcagatcgctattctcttcattccatgggctttgcccaaccagcaaaccgtggattacccctagtttcaaactcgttatcgtcggcgatggtggcacaggaaagacaacctttgtgaaaaggcatctcaccggagaattcgagaagaaatatgagccaaccatcggtgtggaggttcacccattggattttttcacaaactgtggaaagattcgattttactgctgggatactgctggacaggagaaatttggtggctcagagat

SEQ ID NO: 15754 - DNA, 262 bp, Glycine max
  Clone ID: 701043751H1
caaaaatggcacctgcaacactgtctctgtctctcctcctcctgttctcactcagcatcgccgtaaccgttagatcgagcgactacgactacgattgtgtgtacactgcatacgttagaaccggttcggtgttgaagggcggaacggactctaagatcgggctgaagctgtacgacaagtacggctactacatctacattaaaaacctcgaagcatggggcggcttgatgggcaagggctacgactacttcgagcgcggcaa

SEQ ID NO: 15755 - DNA, 99 bp, Glycine max
  unsure (1)..(99): unsure at all n locations; Clone ID: 701043753H1
gcgactaagagttgctgcttcttccgccantcagcacttcgctccctctgtgttcaccaaccaatggnccgaaatcgaagctaaccgttccagatccct

SEQ ID NO: 15756 - DNA, 144 bp, Glycine max
  Clone ID: 701043754H1
cactaacagtagggatacacaagaggtaatgttggagcctggcctgaaattaatcaaaattttcaaggaatataccagcaagacatgcattctggatgattttggcttctatgaggcccgtcagaagactattttggagaagaa

SEQ ID NO: 15757 - DNA, 100 bp, Glycine max
  Clone ID: 701043755H1
ggaagctgcacagtggagtaaaaaaaaactgtgtaagaaattagaaagggcgaacggcgcactttattctgaaaagcgaaaaaccctagggtcaaccgtg

SEQ ID NO: 15758 - DNA, 75 bp, Glycine max
  unsure (1)..(75): unsure at all n locations; Clone ID: 701043756H1
ggggggtcacggcgtttaggtgtacagatgttgcacagttanaaggttttctctattcatggcatccaaacatcg

SEQ ID NO: 15759 - DNA, 100 bp, Glycine max
  Clone ID: 701043758H1
ggcgaaaaccctaatcctgaggcactgaaagtgtgatatggcaagagtcatttccttctttcctgcgcacgccttcgcaatgcgccttctttcttccacc

SEQ ID NO: 15760 - DNA, 152 bp, Glycine max
  Clone ID: 701043760H1
cgagattccccctaaacccgtttgcgttgttgtttgcgaagaaatggcgactaagaggagcgtgggaacgttgaaggagggtgatttgaaagggaagagggtgttcgtgagggtcgatctgaacgtgcctttggatgacaaccttaacatca

SEQ ID NO: 15761 - DNA, 186 bp, Glycine max
  Clone ID: 701043761H1
cctccctcccgcagtagccatgtttctcaaaactgaactatgccgattcagtggtgccaagatctaccccggaaagggcatcagatttgttcgtggtgattctcaggttttcctgtttgccaactcaaaatgtaagcggtatttccacaaccgcctgaagccctcaaagctcacctggactgctat

SEQ ID NO: 15762 - DNA, 257 bp, Glycine max
  unsure (1)..(257): unsure at all n locations; Clone ID: 701043762H1
gtttctgtgtctgtttccttctggggttgccaccatcaatggaacaggaaggacatcaatggatagtgcatcctcatgatgaagaagaaggagaagaaattatggaagatggtgctttgataagaaagcaaactgtgtcacataacaagggcaatcttattatggaggaagtaacatttannnnnnnnnnnnnnnnnnnnnnnnntagtagcaatggcagtgagcatagtaatggaattgttcagtagcccccccag

SEQ ID NO: 15763 - DNA, 142 bp, Glycine max
  unsure (1)..(142): unsure at all n locations; Clone ID: 701043764H1
gngaganacatggcttccttaagctccttagtgctgctccttgcagctctanttntnnnccctcaagttcttgcaaactatgagaatnccccngtgtacaagcntcccantgagaaaccaccagtttataagcccccagncg

SEQ ID NO: 15764 - DNA, 262 bp, Glycine max
  Clone ID: 701043765H1
gttgttgcgattaagaagatgaagagagtggagtttatggggctggggctgttagtggtggtgatgatgggatgttgtgggtctgcgactgctgcggatgacttggcaaccaagtgttcggcggtgattcagaaggtaataccgtgtctgaacttcgcgacggggaaggaagaaatgcccaaaaaggaatgttgcgacgccgccacggccataaaggagagcaacccagagtgctgtgctacatcattcaagagacccacaa

SEQ ID NO: 15765 - DNA, 267 bp, Glycine max
  unsure (1)..(267): unsure at all n locations; Clone ID: 701043766H1
ggcagagtgttattttgagtatcagcatcaatggctccaattgcagtgggaaacgtgatttcccagacggcattttgggcttacttggatgaagaaaacaaaccccaaactgtctccattcactctctcgccaccggcaagaaagtcatcatctttggggttcccggtgccttcaantcctacttgcagcttgaagcacgttcctggcttcatgagagagcagaagagctgaaagggaagggtgtggacgaaataatctgtatcagt

SEQ ID NO: 15766 - DNA, 263 bp, Glycine max
  Clone ID: 701043767H1
gcaagtttgttctttcgccgccgtcgctcacaactcgcaaaccacaatgcctaagcagatcccacgagattaaggatttccttctgacggcacggaggaaggatgcgaggtcggtgaaaatcaagaggagcagggatgtcgttaagtttaaggttcgatgctccaagtatttgtacacgctttgtgtctttgatcctgagaaagccgataaattgaagcaatctcttcctcccggtttgagtgttcaagacctgtagaggtgc

SEQ ID NO: 15767 - DNA, 260 bp, Glycine max
  Clone ID: 701043768H1
ctgaaacagagcatggctcctctcacattctccttcttcttcatccttatctcttacattttcttcatcatcagaagcgggatcaatcggaataaactatggaagaattgcgaacgacctacctacaccggcgaaagtggtggagcttcttaagagtcaggggctgaaccgtgtgaggctctacgacaccgacgccaccgtcttaaccgcgtttgccaactcaggaatgaaggtggtggttgccatgccaaacgagcttc

SEQ ID NO: 15768 - DNA, 95 bp, Glycine max
  unsure (1)..(95): unsure at all n locations; Clone ID: 701043771H1
aaacatcataancataaatagtactaaatccttgngntgtggtctaagtcctcaatccgacttttcagctatcnatcttgaaaggaagaagaaat

SEQ ID NO: 15769 - DNA, 96 bp, Glycine max
  Clone ID: 701043772H1
gctcgctctctctcgctctttcagctttgactttggtggaaactaaagactagtcaaaatggtgaagtttcacagctgaagagctgcgtcgcatta

SEQ ID NO: 15770 - DNA, 153 bp, Glycine max
  Clone ID: 701043773H1
ctccatttctcactcgccgtcgtctcttccgtctagggtttctcctcttcacaaaaatggttgccgcaaaaaaaactaagaagacccatgagagcatcaacaacagggctcgctctcgtcatgaagagtggcaaattcaccctcggttacaag

SEQ ID NO: 15771 - DNA, 139 bp, Glycine max
  unsure (1)..(139): unsure at all n locations; Clone ID: 701043774H1
cgagaccaccgcagtcatcactcgcgacgtgagacggcgagacctccacctccnncaccgctgccttgctgcgccgccgcgacgcgagagtgaaagacggcgagacctccgcaccgtgcgccgccactagagctcctcg

SEQ ID NO: 15772 - DNA, 94 bp, Glycine max
  unsure (1)..(94): unsure at all n locations; Clone ID: 701043775H1
gtgattgtntgtngttgtaactcgttcttcttcttttgtnngttctgtgtttgtgtttgttnttttctctcacctgaaaatgtcttgctggcgg

SEQ ID NO: 15773 - DNA, 251 bp, Glycine max
  Clone ID: 701043776H1
tacaacttgaagaagctgacttatgaggagaggaaggctaagttgattgcacgtgtggcatctctcaactctgctgctgataacgatgaagatgatgagtgaaagttcattgaagattccgtatcatcgttgcacaactagaaactatctattttgcgtctaggggagtcatttcttgaaaattatttaccatgtactgttattttcctaggtccgaaattttggatacatttttgaagttggagtagccg

SEQ ID NO: 15774 - DNA, 254 bp, Glycine max
  Clone ID: 701043777H1
tacgctttctattcctttcattgtttcttttctcttcgttctgaaatttcgtttctctctccaacgctacaatgtcggaagctaagacccaaattgaatccataaggaagtgggtcgtcgagcacaagctccgtactgttgggtgtctgtggctcagtggtatttcgggttcaatcgcttacaattggtctcgacccaatatgaaaactagtgttaagatcattcacgcaaggttgcatgcacaggctcttacg

SEQ ID NO: 15775 - DNA, 255 bp, Glycine max
  unsure (1)..(255): unsure at all n locations; Clone ID: 701043779H1
cattttctagcttccaaaccctaacactcctcttcctcttcgatcatcacctnctccacaatgccgccgaagttcgacccctcccagatagtcgacgtcttcgtccgcgttaccggcggcgaagtcggcgcggcgagttccctggccccgaagatcggtcccctcggtctctcccccaagaagatcggagaagacatcgccaaagaaaccgccaaggactggaaggcttcgcgtcaccgtnaagtncacgttcag

SEQ ID NO: 15776 - DNA, 219 bp, Glycine max
  Clone ID: 701043780H1
tattgtatggccgccaattccagtagccgagggatcaccgccttagggaagcgagtcgccaaccggatctggacttccaacgcacctcctctcacttcaaggaggggagcatacagtagcggctcagtgtacgacaagaaccctgatgatgagatccagtctgggcaggtcccagacgatgtgatccaggcggcaacacaatccggcaaatatgggccc

SEQ ID NO: 15777 - DNA, 259 bp, Glycine max
  Clone ID: 701043784H1
aacggtcacgggtgcttccctcgctgcgttactgaaaacatcagaaatcatgtcacgcttgagaaatctgagttcagactcagagccttttgttgttcctaatctccctcacagaatcgaaatgacaaggtctcggcttccggtttttctgaggaacccgtcttcagttccctgataggatgaagcaatgggacgacaacggtttcggcattgtcaccaacagcttctatgacttagaaccggattatgctgattacga

SEQ ID NO: 15778 - DNA, 109 bp, Glycine max
  Clone ID: 701043785H1
gcttttgatcccagcatctcctcaaacacaaacatccctcttgatttgaaggttgttttgtgcttatagataaaagttctgccaaatcaagaggggttttcagatcata

SEQ ID NO: 15779 - DNA, 152 bp, Glycine max
  unsure (1)..(152): unsure at all n locations; Clone ID: 701043786H1
ttcccgtgtccgatcgaatccaatccaccaaatcggcgacgtcgccttccgctacagatccggggngggaaccaccgtatctgactatcnccgattgatcttccgataaaagtggaccggaaatgccggttgccgcttccgccatttacttt

SEQ ID NO: 15780 - DNA, 258 bp, Glycine max
  unsure (1)..(258): unsure at all n locations; Clone ID: 701043787H1
aacaaaatgtgccttttcctcttcctgttttttatggaatgctatctggccacggcaaagggaattgtggtgcaacaaaagtcagaagctgcaatcccagtgacaacattgtcaccacctgaaggcaacactacattcattgatggcacaacttggtgtgtggctctgctggtgtttcccaagctgacttgcagaatgctcttgattggggcntgtgggacttggaatggcagattgcacagccatcccaacatggtg

SEQ ID NO: 15781 - DNA, 258 bp, Glycine max
  unsure (1)..(258): unsure at all n locations; Clone ID: 701043788H1
cacactccttcttccaccttaagctgcgcanttcttcactctctctcattctctacgacgccgtttccaagcgaccattaccaacgcttcctcgagcttccaaagctgctcagagaggttttgtgttttctgaatggcaaccgcaccggctcatgctccggtgaagtcgcagcctctgcacaacttcgccctccccttcttgaaatggggcgccagggcaagaacaacaccaccaccaccggcggctcaccaccaacg

SEQ ID NO: 15782 - DNA, 234 bp, Glycine max
  unsure (1)..(234): unsure at all n locations; Clone ID: 701043789H1
cagtttgcggttaaatctgcggaatnccaatctgcaggcgaangctaacttgaggaaagctgctcaggaggagagagaactacttctaggtggcggagaagagtccacagtccgcagacgcaatttacagaccaaaagccgggattgacatccgctgcagagagcatccacggaaagccttcgtcgtactcgtcaattgatggttcaggaggttgaaagaaacacaagcacact

SEQ ID NO: 15783 - DNA, 94 bp, Glycine max
  unsure (1)..(94): unsure at all n locations; Clone ID: 701043790H1
atttgtgatggcagacgatctgtttgatggattgccccctccttccttcaagcactctcattcttccctcaacaacaaacaaacancaacnaca

SEQ ID NO: 15784 - DNA, 148 bp, Glycine max
  Clone ID: 701043792H1
cttctgtcacatcaagcattctcataccgcttctcagtttctcattttcccaatcgcagctaaaaaatcctttgagccctttaacctattctcaataagcagaaattagggaacgcaacaatggctcaagcggttgaagaatggtata

SEQ ID NO: 15785 - DNA, 147 bp, Glycine max
  Clone ID: 701043793H1
ccgggagttctatctggagaaaagcaacgcacacaacgagcatatgattttacgggtgtaacatcttggtttgctgctaagtgtgatttgattctccttctgtttgatcctcacaaacttgacatcagtgatgagttcaatcgtgtg

SEQ ID NO: 15786 - DNA, 253 bp, Glycine max
  Clone ID: 701043794H1
ctttttgttcattgttgatgatgtcacgcgccgccgtgctattacacgcgccggaggaagatgcggcggcggaggagtgctgtacctcgacttcgtcgtcgtcgatcgggaggaacagcgacgtgtcgtcggagagatcaatggaggaaggagaaaacgaggtggaaagtgcttaccatggacctttgcatgccatggaaactttggaagaggttcttcccatcaggagaggcatctcgaacttttacaatgg

SEQ ID NO: 15787 - DNA, 257 bp, Glycine max
  Clone ID: 701043796H1
atcacttaatgttcgccattttgttccaggccagtatgttgatatcacaggaataacaaaaggaaaaggttttcagggtgtgatgaagcggcatggatttagtggagggccagcatcccatggtaattcattggcccatcgaacacttggttctgtaggtcatttaactagtcatggaaaggtttttaaaaataaaaagatgcctgggcgaatgggtggagaccaaagaacagttaaaaatgtatgggtctacaaaa

SEQ ID NO: 15788 - DNA, 198 bp, Glycine max
  Clone ID: 701043801H1
gtgaccaaactccatttctcactcgccgtcgtctcttccgtctagggtttctcctcttcacaaaaatggttgccgcaaaaaaaactaagaagacccatgagagcatcaacaacaggctcgctctcgtcatgaagagtggcaaattcaccctcggttacaagaccgttctcaaatctcttaggagctccaaagggaaat

SEQ ID NO: 15789 - DNA, 172 bp, Glycine max
  Clone ID: 701043802H1
caaagcgtggggaagctgctcttgctcgtttgaaggtttatgaaggaatccctcctccatatgacaagaccaagagaatggttgttcctgatgcactcaaggtgttgaggcttcagaagggacacaagtattgtgtgctgggcaggttgtcatctgaagttggatggagcta

SEQ ID NO: 15790 - DNA, 298 bp, Glycine max
  Clone ID: 701043803H1
aaaaaaaaatagaagaggggacgcagtgctatcgagtttttttttcttaatgccatggctgctctgcaatacttggaatcgctgcgcaacgcgcatccctgagctctcccgattggtacaattcgctggcggatctataccagaacaagctctggcaccagcttaccctcaagcttgagcagttcgtggctctcgccgtcttccaggccggtgatgcattaatacaattatatcacaatttcatcacagactttgagaccaaaatcaaccttctcaagcttgcgcatttcgctgttat

SEQ ID NO: 15791 - DNA, 146 bp, Glycine max
  unsure (1)..(146): unsure at all n locations; Clone ID: 701043804H1
caatgattttggtgttctatntattgatgcatcagcagactgtgaacatcttcctcattacgcttatttctntntatattggttacaaatacatgaacattgattatagtaagggggaanggtnttacncaacgcgtgctaacaga

SEQ ID NO: 15792 - DNA, 155 bp, Glycine max
  Clone ID: 701043805H1
tttatggtgagtctgagggcttggaggcagagaagagatagagatggaaatagagaggctaagaagaaatgcagaggcgctggttgagaagaccatgaaagggaacgatgcttctcatgatgctgctcatgtttggagagttcgtgatctgctct

SEQ ID NO: 15793 - DNA, 157 bp, Glycine max
  unsure (1)..(157): unsure at all n locations; Clone ID: 701043806H1
agtgccaatgcgagctaccagaatcttacgaagcttacaggaaacagcagcatagatgncattctgggccaatgcaactgttccgcttgtgtttgcctgatatcatcagggccaagataagtgtgtggaagaaattcaacatgatattcctcttctt

SEQ ID NO: 15794 - DNA, 191 bp, Glycine max
  unsure (1)..(191): unsure at all n locations; Clone ID: 701043807H1
ccatctctcacatcatttcccactctcgcgtttcctttatcatatttatattctttggttattcaattcatattacgccatgtcccagttgaacggngcctactacggcccctccatcccgccgccgaaaacttcctaccaccgtcctgggcgcggcggaggcctcggctgctgctgcgggtgcctcttca

SEQ ID NO: 15795 - DNA, 147 bp, Glycine max
  unsure (1)..(147): unsure at all n locations; Clone ID: 701043808H1
ccaacttccgctacttccctactcccaacccactttcttttttcccgcagtcatgggcaaggtcaagatcggaatcaacggatttggaagaattggnccgtttggtggccagggtggctctgcagagagacgatgttgaactcgttg

SEQ ID NO: 15796 - DNA, 156 bp, Glycine max
  unsure (1)..(156): unsure at all n locations; Clone ID: 701043809H1
ctcatctgcttcccctagcaaccttcttcttacttctctccgcntccttatctccagattgctggggcggaagcacaaccgttgactagtctcaagcttaactctcatattcttcaggagtctactgctaaagagattaatgaaaatcccgaggca

SEQ ID NO: 15797 - DNA, 290 bp, Glycine max
  unsure (1)..(290): unsure at all n locations; Clone ID: 701043810H1
gagaaccttcacatccataaaaggcatatatggtatcacagaaggaaccgagagggaagcaaaactaaaattggtctcagtcacatatgtgctttaccaattctttctcccattccttttgcttcaattctttgtgcctactactaaggctcggggtatagctcggttggattgaggaggatgcaagagttgttgtaaatcccttaatattcattttcgatttccacgaatannatatactatttgtgcccattcttgttccatctcgtcacattcatccaacctatntt

SEQ ID NO: 15798 - DNA, 239 bp, Glycine max
  Clone ID: 701043811H1
ttcaccatttttctcttttccgttctgttctgttctgctttgcccctcttttctcccaatgactactcaccattctctctctttccaactcctctgagcctcgctcgttaggttctctgtctcttctcggagacccacaaaacaatttcttatttatttccttctcaaacaaagaacctctatttccccttggctgctcagatctagtattcctcaagtcacaacctttttttgttcgt

SEQ ID NO: 15799 - DNA, 290 bp, Glycine max
  unsure (1)..(290): unsure at all n locations; Clone ID: 701043812H1
caaaaacccctcgtccgctccaaaaccctaaaacctgaaagcatacgctacttctgcttcgttgcgatgttggaaatcaaaaccgccaagacccgcaanggcaagcgggagctagagaaacgcgctcccaagctcgtggaatcggggaagaagacgctgatcctgcacggaacgatgaccagcggcgtgctgaacgccgtgctggcgcagatttatcacctgaagaaggactgtgccgtcaatacagccgcagaacgagaacgtcaagcccttcgaggccggcgggagac

SEQ ID NO: 15800 - DNA, 294 bp, Glycine max
  Clone ID: 701043813H1
gaacagcgggaagaatacaccgccacacgctgcaggccctttaccttgtgcttcctgcgttcctgtgagaacccacgttctctaacgcgcttctccttcaaagttcaaattcctatacatttgcgtaatcgcttctcaaatctcaacaaaagtattcccaaaaaaccctaattattattattaaacatgaggccgattctgatgaaaggccacgagaggccactgacgttcctcaagtacaacagggacggcgatctccttttctcctgcgccaggaccacaaccccaccgtct

SEQ ID NO: 15801 - DNA, 293 bp, Glycine max
  Clone ID: 701043814H1
gtagcaacacaaccttaaagttaaaactcagatatggtttggtttcaatgcgaagattgcggagacaacctcaaaaaacccaagttgtctagtcacttccgaacttgctctgcctacaaattgtcgtgcattgactgtggggaaatatttgggcgtgacaccgttcaggatcacacgcaggtatcacagaagcggagaaatatggaccaaaaggccaaggcaaaactttgaacgttgcaactgcaaaccctaataaggatagcaaacaaaggcccgacttgatattaatgtgg

SEQ ID NO: 15802 - DNA, 297 bp, Glycine max
  Clone ID: 701043815H1
gttagaacttagaagagaagagaactagagaagtgattttttgcaaagacaaagcgagggtttctattgttttgttgagaattcaattcaaagcttttgatttgatgatcataacataacacaatgagagatatttgtaggaacttccagcgaggcagctgtcaatatggagaaaggtgtagatatttacatgttcagcaacagcgaaaacctaatgttaatgggtttggaggtcagagcagttcttatcaacagcaaaatacaaatccctttggatttggctctggctcacaacaa

SEQ ID NO: 15803 - DNA, 296 bp, Glycine max
  Clone ID: 701043816H1
cttctccattttccaacaccgttctatcatgggcacaccactccacacaacgtcggaatctagcagctccagaatctaaccctacaaccccaaactcaaacccagatctcattcaaacatataaaaccctctttcttggtaaaacacttgacaaaccttaactgagtcaaacacacaaaacccgtccaccccacaaacactctcctcttattgacacccatttgcaggcaaagccatggcaacctctgccatacagagaaagagagtaccgtgctgtgagagaacccacaagagag

SEQ ID NO: 15804 - DNA, 291 bp, Glycine max
  Clone ID: 701043817H1
caatctcccccttgggcgtccaatttccatttccattcttctctctactataaattctccttcaccttcgcttctctctcgttctcagctccttcaccatgatgagtttctccttggattcagtttcggtgttaaaccctaaactctcccactcccatttctctctcccattcaacaggttcccccattccctcaacttccaccccttactcaaaccccgcgcagttaacgccgccgtcccccctaacggctcgcggcctgctacctcaccctccacgaggaaacgttaac

SEQ ID NO: 15805 - DNA, 294 bp, Glycine max
  Clone ID: 701043818H1
atctccccttgctgcggttgctccatcacctaatcacttccccacttcccctgtaaatcacgtttagttcgcacaaggttttaaaaaatggctgatgctgaggacattcaacctcttgttgttgataatggaactggaatggtcaaggcgggttttgcaggtgatgacgctcctagggccgtgttccccagtattattgggcgaccacgccatactggtgtaatggttgggatgggtcagaaggatgcttacgtgggtgatgaagctcaatcaaaaaggggtatactcaccttg

SEQ ID NO: 15806 - DNA, 290 bp, Glycine max
  unsure (1)..(290): unsure at all n locations; Clone ID: 701043819H1
cttcgtttctgtacttttcggtctcggtgaaaatgcgggaatganagcattgggcgtgtacncgccctgggcaccgtacttgcggcacagcatgcgaaacggcagctccgagttgtcgaccatcggggccactatgaacctgggccggcccagcttggcccagtgggcccacgcccgctccgcccaagatctccgctcaggctccgggccggaaagcccacgtgctggtcggcggcggcggggtgctctgcatcgagagaattggggtttgggccatgagggacaagatt

SEQ ID NO: 15807 - DNA, 142 bp, Glycine max
  unsure (1)..(142): unsure at all n locations; Clone ID: 701043820H1
ccaattaaaagcaatatagtttgtttaattgtngcttcatttctattgtgtgaatggcatttgggaagttcattatgaatataggggtagtggcaatggttctgggtttatggattcgggttggatttgcacaacaagtacc

SEQ ID NO: 15808 - DNA, 142 bp, Glycine max
  Clone ID: 701043821H1
gggttttaggaaaagacactgtctcgcgagtgaacacaggttacagcaatggctttctttggtagaattgggatttattaagacagacagcaagcaggcaggttagttcagaattgcgatcatccccttcgttttttcaggg

SEQ ID NO: 15809 - DNA, 288 bp, Glycine max
  Clone ID: 701043822H1
tagactcttctttttctctaagtctaaggggtgccctgagatcactttgagcaatggtgaaggctgtggcagttcttgggcagcagcgagggtgtcactggaactattttcttcactcaggagggaaatggtccaaccaccgtaactggatctcttgctggtcttaagcctggtctccatggcttccatgtccatgccttgggggacactaccaatggttgcctgtcaactggagcgcatttcaatcctaataacaacgagcacggtgcccctgaggacgagatcgtt

SEQ ID NO: 15810 - DNA, 286 bp, Glycine max
  Clone ID: 701043823H1
cttgggtgaggaattggacacccagaagaattgaatggccatggaaaatcaaaattttctagagtattgggttttgccactacttatgatgcttttgttgggtcattggatctctgttcaagctgccccttcaccctctctcatcactcaactccctggctttaacgccaatttcccatccaagcactattccgggtatataagtattgatggaaatgctgaaagtgggaagaacctgttctactactttgttagttcagaaagtagtccagagaaggacccagtt

SEQ ID NO: 15811 - DNA, 284 bp, Glycine max
  unsure (1)..(284): unsure at all n locations; Clone ID: 701043825H1
ggaatttgtaaaacagttggcattagaaaaacgtgggctctgcattatcgctagcggccgacaccatttctgattgtagcatcattattattactgaattctgcagtttcaaggtgaagcctgaagcgccatggaagctcaagcggttcaagtcttgcgatattcagctacgctgcattccaataatcccaagcttgagaaaacagggaccaatggctctctccgaatgtttggtggattaagaaacagctttttgtttcgtctaagtgncagangcaaacctt

SEQ ID NO: 15812 - DNA, 290 bp, Glycine max
  Clone ID: 701043827H1
ctttgtttgcttctcaagtctctcgaagcctctttctctctcttactagaagctatctgtgtttggtgttactaagtctccaacaagcaaagtacatggttgatttggaaatccaggtccccaccccattcgacccgtttgccgaggcgagagaatcggatgcccccggagcaaaggagtatgtgcatattcgaattcagcagaggaatgggaagaagagtctgaccacagtgcaagggctgaagaaggattcagctacgagaagatcctcaaggacctcagaaggattt

SEQ ID NO: 15813 - DNA, 231 bp, Glycine max
  Clone ID: 701043828H1
tgattgaagaagatgccgatcagaaacatcgccatcggaaggcctgaagaggctactcaccccgacacgttgaaggcggggttggctgagttcatctccaccttgatcttcgtgttcgccggttcaggttccggcatcgcctacaacaagctcaccgacaacggcgccgccactcccgccggcctcatctccgcttccatcgcccatgctttcgccctcttcgtcgccgtc

SEQ ID NO: 15814 - DNA, 191 bp, Glycine max
  Clone ID: 701043830H1
atggcttcaactctgcttcccctggcaaccttcttcttagttctctccgcttcttatctccagattgctggggcgaaagcacaaccgttgactagtctcaagcttaactctccgatcctcaggagtctattgctaaagagatcaatgaaaatcctgaggcaggatgggaggctgctataaatcctcatttc

SEQ ID NO: 15815 - DNA, 292 bp, Glycine max
  unsure (1)..(292): unsure at all n locations; Clone ID: 701043831H1
ttgaacctctccttctcgcagagtgagcgagcaagcgaatatcccaatcccacaccaatggcatgctacagccacctctgcttccctcttctccgcaaacccaacacccctcttctctcccaaaccctctctctccctccaccttaaccctctccccacgcgccttctccctccctcacgcgcccttctctctccctcacgcgcccttctcactctcgccgctccttcgttgtcaaagctcctccagcgagttccgctggttggtaacncgcacggatttcgaagcagaggt

SEQ ID NO: 15816 - DNA, 293 bp, Glycine max
  Clone ID: 701043832H1
ctgcgaaggtgatcaagaaggattcggccaagaagacggccaagaagtcgcgtgtgaaggcgttcgtgaagctcgtgaactaccagcacctcatgcccacgcgctacacgctcgatgtcgatttgaaggacgcggttacccccgacgtgctccaagccaaggataagaaggttactgctctcaaggagaccaagaagcgctcgaggagaggttcaagactgggaagaatcggtggttcttcaccaagctcagttctgagcatatattatgcattttgttttcaaatgttttgg

SEQ ID NO: 15817 - DNA, 102 bp, Glycine max
  unsure (1)..(102): unsure at all n locations; Clone ID: 701043836H1
cgaaaaggtaaaaacaganagaaccagtgttccgaaagatggagacaatgatgcgactgagaccattgntccgatccactgagttgccagatcttatccatt

SEQ ID NO: 15818 - DNA, 189 bp, Glycine max
  unsure (1)..(189): unsure at all n locations; Clone ID: 701043837H1
cttcagaatcctaaaacaaagtctataaaagggataaaaaataaatnataaacagcgaagttacgaagattctgtagagaagaagagcaatggcgtccaacgattccgattcgcagatgaagatcgtacatggcgatgctggttacatacttgaagacgttcctcacttcgccgactatattccaaatc

SEQ ID NO: 15819 - DNA, 152 bp, Glycine max
  unsure (1)..(152): unsure at all n locations; Clone ID: 701043838H1
agtcgcaaccctaatcagaagaagcgcanttcaagcgagtgacagccaccagccatgggtcgtatgcacagccgcggtaagggtatatcctcttctgctttgccctacaaaaggacacctcctagctggctcaagatctcttcgcaagatgt

SEQ ID NO: 15820 - DNA, 99 bp, Glycine max
  unsure (1)..(99): unsure at all n locations; Clone ID: 701043840H1
acgaggataaggcattttcattttgaagacttcacagtactttttccttaatttcagtttttccacatggttgttgcctttccncaatcccattggcga

SEQ ID NO: 15821 - DNA, 285 bp, Glycine max
  Clone ID: 701043841H1
aaaaaaaacacctaatctgatctgagttcctgacatgtccatcgaatttgattctgaatccattcccactcccacggcccaagcccaagcccaggagcgatccaactctcgctgcgccttgttattttcttcctacaactgcttcggcggccaacgacgtcgttcctcatggtgggagcgcgtccgctcccactcccactccgctccagcctcagccggtgaccggtggtggtcgcgtgggctcagggcgctgaagaagcttcgcgagtggtcggagatcgtagg

SEQ ID NO: 15822 - DNA, 285 bp, Glycine max
  Clone ID: 701043842H1
tttgtaccattgaggagtctggtgaacacattgttgctggtgcaggagagcttcatcttgagatctgtttgaaggacttgcaggatgatttcatgggtggagctgagatcattaaatctgaccctgttgtgtcattcagggagactgtcctggagagatcatgccgcactgtgatgagcaaatcacccaacaagcacaatcgtctgtacatggaagcaagaccattggaggagggtcttgccgaggccattgacgatggcaagattggaccaagggatgacccca

SEQ ID NO: 15823 - DNA, 286 bp, Glycine max
  Clone ID: 701043843H1
ctattctattccatcatcaatggagaacaccgagggatccggatctgcgacgaacggggtgctggctccgccgcgcaaggtggcattgataaccggaattaccggacaagacggttcgtacctgacggaattcctcctggacaaggggtacgaggtgcacggcctgatccgccgctcgtcgaacttcaacacgcagcgcatcgaccacatatacgtggatccccacaacgcccacaaggcccgcatgaagtccactacgccgatctctccgacgcctctcctccgt

SEQ ID NO: 15824 - DNA, 285 bp, Glycine max
  Clone ID: 701043844H1
cttcctcagtagtgtcatttacgcttctcttctctgcagcaactatgcctaaccctaaggtcttcttcgacatgaccatcggcggtcaatctgctggccgcatcgtgatggagctctacgccgacgtcactccccgcaccgccgagaacttccgcgcgctttgcaccggcgagaagggcgtagggcggagggcaagcccctccactacaagggctcgtccttccaccgcgtgatcccgagtttcatgtgtcaggtggcgattcaccgccggaaacggaaccggcg

SEQ ID NO: 15825 - DNA, 153 bp, Glycine max
  unsure (1)..(153): unsure at all n locations; Clone ID: 701043845H1
cttgtactagcagcagcaatttgtntcgtgaacacttgcagcttcggtttcttaattcatcttcgctagggtttttgaagttgacgatggctncccctcctcatttcgagcgacgactntgattttggaggcggttttagcggaacgcaatca

SEQ ID NO: 15826 - DNA, 289 bp, Glycine max
  Clone ID: 701043846H1
gctctagagaattatcatacccttcaagatgaaaccgtacctacgtccaatattcctattattccttatccttctcgaccaatccatttcggcgagtgctgctataaatattaatggtctgagaaacaaaattagagaagttctaaacaagcacccgagcatcaatcttccggcagataaactgaagaaggtgaagagaccactgaaggcactggattatctgcttggcgaatgtaaggacaggccgcctcaagatttcaagattttgcccgaatttaagaacgattat

SEQ ID NO: 15827 - DNA, 193 bp, Glycine max
  Clone ID: 701043848H1
caaccaacaacaaacgcaacattttcatttcccattatacccctctgcgcagaagacctcagaaaatatttcgatggcgggaaccctaaatctcacgcctctcaccggtgccggcaggactctccggcctccgttcaggatctcaattcgggcattcacggcgacggcgatcgattcccggcgagcggcgagc

SEQ ID NO: 15828 - DNA, 96 bp, Glycine max
  unsure (1)..(96): unsure at all n locations; Clone ID: 701043852H1
cacaacacaaaattaaaattccccaaaagcaaaananganaaggnggattaggggaaggccgacnctccgtngaggangaaggngtttcccangag

SEQ ID NO: 15829 - DNA, 93 bp, Glycine max
  Clone ID: 701043853H1
atctaaactaattcctggccctcaccaaagtcgatttctgtttagatggtagtcttggtttgtgaacattgaggggagacatttgaaggtttt

SEQ ID NO: 15830 - DNA, 210 bp, Glycine max
  unsure (1)..(210): unsure at all n locations; Clone ID: 701043854H1
ggaaaggctcctgccaatcctcacccgacttcccttcctccctctgcaacaacaaaatcatcggcgccaaagccttctacaaaggctacgaatcctacctcgaaagaccaatcgacgaatctcaggaatcgaaatcgccacgcgacaccgaaggccacggcacgcacaccgnctccaccgccgcagggcgtcgtctccaacgcaagcctt

SEQ ID NO: 15831 - DNA, 282 bp, Glycine max
  Clone ID: 701043855H1
cgctctctaattacatttctaatctcattctccttctgttcaaacactctcatggcatcagataagaagattaggatcggcatcaacggatttggaaggattggccgtttggtggccagggttgcccttcaaaggaatgatgttgaacttgttgctgtcaacgatccttcatcaccactgattacatgacatacatgttcaagtacgacaccgttcatggccagtggaagcattttgatgtgaaggtgaaggactctaagacccttctctttggtgagaagc

SEQ ID NO: 15832 - DNA, 143 bp, Glycine max
  unsure (1)..(143): unsure at all n locations; Clone ID: 701043856H1
ctcgtctttggttctggcntatagatctctgtgaagtcgctttataacactcaacctaaagatgcagaaacgaggaaaggacagatcaccgagctttacattccctaggaagtggctctgccacaaaccgattgattaccgct

SEQ ID NO: 15833 - DNA, 160 bp, Glycine max
  unsure (1)..(160): unsure at all n locations; Clone ID: 701043857H1
cccagctctagaganattatcataccctttcanagatgannancggtaccntacgtccnaataattccctnantaattcccntatcccntctccgacccaatcccatttcggccgagtggctgctataaatattaatggtctgaggaaacaaaattagag

SEQ ID NO: 15834 - DNA, 286 bp, Glycine max
  unsure (1)..(286): unsure at all n locations; Clone ID: 701043858H1
cagcttcagcagcagcggcaagcaactccatccgcaatgggaatcgatttgaaggcaggaggtaagtccaagaagaccaaacgtacagcccccaaatncaatgatatttacctcaagctcctcgtcaagctgtaccgtttcttgttcggangactggtagtaacttcaatgccgtcatcctcaaacgccttttcatgagcaaggtcaacaagcccncgctatccctctctagattgattcgttacaccaagggaaaggaggataagtagctgtggtagtcggggcc

SEQ ID NO: 15835 - DNA, 115 bp, Glycine max
  unsure (1)..(115): unsure at all n locations; Clone ID: 701043859H1
ccagtctgttactnaccctaattanttnttcaagattactcantagcaaaaccccaggtgagggtgagggaagatcagagatgtggtggagatcagcatcattcatcatggacag

SEQ ID NO: 15836 - DNA, 141 bp, Glycine max
  Clone ID: 701043861H1
tgcaccgtaagggttgtgaagcaggcagagaagagccatggtgcacgtttctttctaccgaaactatgggaaaacgttcaagaagcctcgtcgtccctacgagaaggagcgtttggacgccgagttgaagctggtcggtga

SEQ ID NO: 15837 - DNA, 155 bp, Glycine max
  Clone ID: 701043863H1
gtcaaaactttcatctttgtcatccacttaacccaggtgtaaaaatgtcagcagtgaacatgtccactatgagacttccaagagcttccttgtctggaacaacaccagctaggagatcatgtgctcttacaaagagtccatcatctttgaggtct

SEQ ID NO: 15838 - DNA, 286 bp, Glycine max
  Clone ID: 701043864H1
aattttcttcatccttctctgttctcctagaacttgattacttgaacattccctatgacagatgaggtggttcttctggattctggccaagtccatttgggatgagggtcaggattgcacttgctgaaaagggtatcgaatatgagtacaaagaagaggacttgaggaacaagagtcctcttctcttacaaatgaacccggttcacaagaagattccggttctcatccacaatggcaacccatttccgaatcctcatgctgttcagtacttgaggagtttggatga

SEQ ID NO: 15839 - DNA, 285 bp, Glycine max
  unsure (1)..(285): unsure at all n locations; Clone ID: 701043865H1
anagttttcgcctttaggatccaaaccatgttggtgaaacaaacaaggacaatgggagtngtcctatttcttccccagttccacagcncacaaccacaacctttgcccaaagtgatgaagaatacaaatgatgatatanaaaaggacaatgattcagctcctccagtgagtatacctcctccaccgaaaaatgatgatggtggtgacagggtatgcataaagggaaggacaaaactgagggcatgaagttttnacatcatagcaccatgagattgtgacgggttc

SEQ ID NO: 15840 - DNA, 92 bp, Glycine max
  unsure (1)..(92): unsure at all n locations; Clone ID: 701043867H1
gcaaangattctacccgccgctcgatgggaattgcgcttcaaggcgtctcgtagggctaatccgcctcacgagggtcaccaacggcacgtgc

SEQ ID NO: 15841 - DNA, 184 bp, Glycine max
  Clone ID: 701043869H1
ctcgtatttggggaacgaaaatcagttggttcctttttaagagattactatggcttccggcatgacagattaagccttgtggctgtggtgctcattgtgtacccaattgtctacgcttctctgtttgcctatttcatatagaaaatgaattaccaaaagagataagatagacacagacaaagac

SEQ ID NO: 15842 - DNA, 160 bp, Glycine max
  Clone ID: 701043870H1
tccttttcttcattcttttcctcctcgttcattcttcttctgttgcttccttctccttccactcttgctcttgctcttgctcttggtggcaccttcttcttcaggtgctccaaatgaaaaggtaaccgtgtcactctattatgaaagtttatgtccctat

SEQ ID NO: 15843 - DNA, 282 bp, Glycine max
  Clone ID: 701043872H1
gctgcagtagagaagcactctttcgttcttcgactgtctacgatctgctttctctgaattgtgaaaatgtcgctcggagaaactgcttgttcatacgcagctctcatccttcatgaagatggaattagtgtaactgctgacaagatcagcaccttgttgaaaactgcaaaggttccagtagactcttattggccaaccttgtttgctaaacttgctgagaagaaaaatcttggcgatttgatagcaatgcggcaggcggtggtgcaccagttgctgttgcac

SEQ ID NO: 15844 - DNA, 282 bp, Glycine max
  Clone ID: 701043877H1
gtcactcttcctgcagaacccagatctgtagacaatatgggaagcactggtttgctacatttgatatgccttgtcattgctttagtaagtgtgtcgcttgtgcaagcagaagatgcgtataagtatttcacatggacggtgacttatgggactcttatcccttggctagtccccagcaggttattctatcaatggtcagtttcctgggcctagacttgacttggtaactaatgaaaatgtaattctcaaccttatcaacaagctggacgaaccattttactc

SEQ ID NO: 15845 - DNA, 121 bp, Glycine max
  unsure (1)..(121): unsure at all n locations; Clone ID: 701043879H1
cacttgcagaattcaaagaaggcgacctcataaacgccttanttctccgtttccgtttccancccggaattcgatttttcatctctgaaaatgagagagtgcatctcgatccacattggtc

SEQ ID NO: 15846 - DNA, 285 bp, Glycine max
  unsure (1)..(285): unsure at all n locations; Clone ID: 701043881H1
ctaagtccaggtctgtcaagaggaagaaggtancaatgaatttgcaaatgggggtgtaggtcttcatgaaattgattgaatgaccaaggggatgcnactgattcctgattgagnaattaagctactctttagttggaattggatgatgagtttggagttgatgctacgagaagataaacccatttgagcttgaaaacagttttttctggaactggtcatgcgttatttgagtggttgaatttgcagggttgagcgaactagttttcatctacaccaccctaagtg

SEQ ID NO: 15847 - DNA, 280 bp, Glycine max
  Clone ID: 701043883H1
cgtcgctccgcaccagtttcaccgcacgaaatatcttgttgtttggagcgatccgagaaaaactctgtaaacatgttggtttaccaggacctcctacaggtgatgagcttctctctgactccttccgttacaaggaaattgagaatggaatgctgtgggaagttgaggggaagtgggttgttaaaggagcagttgatgtagacattggtgcaaacccttctgctgagggtggaggagaagatgagggagttgatgatgcagctgttaagttgttgacatg

SEQ ID NO: 15848 - DNA, 148 bp, Glycine max
  Clone ID: 701043888H1
ccaattctcaagccaaccatgtcttccttcaagagcaagtaccaagatgaactcattgccaatgctgcttacattggcaccccagggaagggtatccttgctgctgatgagtcaactggtacaattggcaagcgattggccagcatta

SEQ ID NO: 15849 - DNA, 282 bp, Glycine max
  unsure (1)..(282): unsure at all n locations; Clone ID: 701043889H1
gacgactactatgtctgcagatttcaganaccaggggaaatggaggctcagatggctgaagttggcactgagtatgttctcgaaaacatccttacaactcgcaatcctggtcctccaattcttcccaagggaaggtttcaattcaatccagaaatgcccaacaccttgccctcttggctcacagaagaagatctcgcctattatgtctccaaatttgagaaaaccggattcactggacccttgaactactacagaaatttcaacttaaattgggagtgacgg

SEQ ID NO: 15850 - DNA, 280 bp, Glycine max
  unsure (1)..(280): unsure at all n locations; Clone ID: 701043890H1
atttttcatacaacacattctttctagacacgcaacacctanaagatttccttattctttttggtgctaaaccgttgggatatagcaacaacatgttaggnatgaaganacatagagataatgaagggtcagagagcttagatttggcaaaatgtctgtgctgttctctgtccaatagaaagcaacaaggcacaacagaaaggntttggggctgtggaatttgagtgcaagacgtgcagccgcaagttctcttctttcaagcatnggagggcacagggca

SEQ ID NO: 15851 - DNA, 278 bp, Glycine max
  unsure (1)..(278): unsure at all n locations; Clone ID: 701043891H1
gcaactcactgtcttccttctctagggtttttaactcccccaatttcttcgctcaacatggttcttcaaaatgatattgatttgctagatcctccggttgagcttgagaagaggaaacacaagctcaagcgtcttgttcagtcaccaaactcttcttcatggatgttaagtgccaggttgcttcaacataaccactgtctttagccatctcagactgttgttgtatgcggaaactgccagactgtcttgtgtcaancaacggtggcgggcaaggctna

SEQ ID NO: 15852 - DNA, 196 bp, Glycine max
  unsure (1)..(196): unsure at all n locations; Clone ID: 701043892H1
ttcagccttctttctctcacacacactctctctactaaagtcgcaaacacaaacactttgtgaagtgaagcaatggagtttcagatttagatctcgtgctaaatcatcgatccgagagagagaaagagagangtgttggattattgattcgncgaagcatttgagggtttatcacagactcatctcaaaccctcgt

SEQ ID NO: 15853 - DNA, 151 bp, Glycine max
  Clone ID: 701043893H1
ccgcaacacttacaacgatttaatgctagttccaacatggaaaatggtgcagctgtttccaggcagaggagtaattatgtcctttctcaacaacagaagcgcaacctcaaatctcagccagcagtgtaccatgagattaggctgccacagg

SEQ ID NO: 15854 - DNA, 289 bp, Glycine max
  unsure (1)..(289): unsure at all n locations; Clone ID: 701043894H1
attttgtccatccaaaccttaaaaagattcagtgaagaacaacgttaatggcatctcttggtgtgcaagcagttcatcctcctccattaacatccacctccgacccacctcctctttttgatggcaccaccaggttgtacatcagttattcttgcccctatgcacaacgtgtatggatcgctcggaacttcaagggactaaaagacaagatcaatttggtccctataaaccttcaagacaggccagcttggtataaggtgnnagtctaccctgaaaataaggtgccatc

SEQ ID NO: 15855 - DNA, 153 bp, Glycine max
  unsure (1)..(153): unsure at all n locations; Clone ID: 701043895H1
agccactctaaagaaaatggcggtgcctctactctcgaagaagatcgtgangaagagggtgaagaagttcaagaggcctcagagtgacaggnaaatttctgtcaagacaaactggcgcagaccaaagggtatcgattcccgtgttaggagaaa

SEQ ID NO: 15856 - DNA, 93 bp, Glycine max
  Clone ID: 701043896H1
gttaagtgataacagaagggagaagcaaaacctagaaatcgcgctcgttggttttgacttggagtgagtgggtgaaaccgaaaccctaactaa

SEQ ID NO: 15857 - DNA, 119 bp, Glycine max
  Clone ID: 701043901H1
gttagctagttctactcccaaaaagggcttcatttattagtattttggtcggttctatatccttccttttcttattttgtcttctttccatttccctcctcacttgttctgagatcttg

SEQ ID NO: 15858 - DNA, 255 bp, Glycine max
  unsure (1)..(255): unsure at all n locations; Clone ID: 701043902H1
ttncnncattccctntnacanatgangtgnttcttctggatttctggccaagtccatttgggatgagggtcaggattgcacttgctgaaaagggtatcgaatatgagtacaaagaagaggacttgaggaacaagagtcctcttctcttanaaatgaacccggttcacaagaagattccggttctcatccacaatggcaaacccatttccgaatgccctcatgctgttcagtacnttgaggaggttnggaatnacc

SEQ ID NO: 15859 - DNA, 264 bp, Glycine max
  unsure (1)..(264): unsure at all n locations; Clone ID: 701043903H1
gctttgcttccttcaaagtgaggtctctaagtttcacnttctttgcatagggcaacctcctttctctgtgactctgagtatcgtatcgttttattattatttctaattctctctnatcaggnccattgaatatgtctccgtcgntggancttccncccaagggtggcttcagttttganctatgccgaagaaacgcaatgcttcnaaacnagggcctcaaagcnccaacctttctcaaaactggttnnactngtgncggnagag

SEQ ID NO: 15860 - DNA, 252 bp, Glycine max
  unsure (1)..(252): unsure at all n locations; Clone ID: 701043904H1
accaatttgggaagaccaaggtccacttgcacggttgcatcttttttnggcagcctgacccgcccgcaccctgcacctgtcctctncagacaggcttgggggagtcttgatgctctcatcggacggcttagggctgcctatgaagagcacggaggctccgccgaaactaatccctttggaagtggagctattcgcgtgtaccttcgcgaagtcaaggagtgtcaannaaaggccagnggggntcnttnnccc

SEQ ID NO: 15861 - DNA, 264 bp, Glycine max
  Clone ID: 701043905H1
cttgaatcttcgttatccttctttttttctccttgaactcgaatattcactatggcagatgaggtggttctgctagatttctggccaagtccatttgggatgagggtcaggattgcacttgctgaaaagggtatcaaatatgagtccaaagaagaggacttgcagaacaagagccctttgctcctcaaaatgaacccggttcacaagaaaatcccggttctcatccacaatggcaaacccatttgtgaatctctcgttgctgtt

SEQ ID NO: 15862 - DNA, 263 bp, Glycine max
  Clone ID: 701043906H1
cttgcatcctcccatgcgtctgaatgaaggtgatgatttaagggtttcttttctaatgagtcgctcaaaggaaaaccatcgtttgatggaggttgaacttggatgtgagattcatcagcattctggcaagatacttgcacctttcaaaaataagtactacattgagtagcaaactggatttcaaattctggggactgcaagatacaaggaaacggctcatattttgtaatcatatagaattgtatggttcttaattatgtgta

SEQ ID NO: 15863 - DNA, 258 bp, Glycine max
  unsure (1)..(258): unsure at all n locations; Clone ID: 701043907H1
ggcgaggcggaccttcgggcgttgctcgctctcgacaccagcactctctctgtgttctcattggttctggctctcaagnnnnnnnnnnnnnnnnnnnnnnnngagaaggaacacaaggaatcaacaaccatggattcacagggccagacaacttcattgcagagacttcagaatgtagaaaagagaattgtganggtttnggantttccgggagganncaggtggntttaaacccntgtggcccnaagagntttgncc

SEQ ID NO: 15864 - DNA, 267 bp, Glycine max
  Clone ID: 701043908H1
cgatatcatcttcttatagccactcgaaaatgaccaagagaaccaagaaggccggtattgttggaaaatacggcacccgatatggtgctagtttaaggaaacaaatcaagaagatggaagttagtcagcacagtaaattcttctgcgagttctgtggaaagtatgctgttaagaggaaggctgtgggtatttggggctgcaaagattgtggaaaagtgaaggctggaggtgcttacacattgaacactggccagtgctgtcactgtc

SEQ ID NO: 15865 - DNA, 266 bp, Glycine max
  unsure (1)..(266): unsure at all n locations; Clone ID: 701043909H1
gcctttcgaatcctctcacccagangtacgattcgtaccatgtagttgtgggatttcggctttgccacttcttgattccaataattttggnttcnntttttcccctaatttgatttccccagttagggtttttaactctattcgatcggcgatttcgaatactcggaggctcgaatcgtgttgggggttttccgttttgattaaaaaagtttccgttttttgtgttgggtgatcaagggttgtttgatttttttcttgcgatcgag

SEQ ID NO: 15866 - DNA, 267 bp, Glycine max
  unsure (1)..(267): unsure at all n locations; Clone ID: 701043910H1
ggagaattaggtttttagggtttacaccgagcagccacacctcccgcagcagccatggttctcaaaactgaactatgccgattcagtggtgccaagatctacccaggaaaggncatcatatttgttcgtngtgattcttaggttttnctgtttgcnaactcaaaatgtaagaggtatttccacaatcgcctgaagccttcaaagctcacctggactgcaatgtacagaaagcaacacaaaaaggacattgctcaagaagctgtgagg

SEQ ID NO: 15867 - DNA, 177 bp, Glycine max
  unsure (1)..(177): unsure at all n locations; Clone ID: 701043911H1
gacgatgattcngatnagttttctgatgaggatgaagatgaatcnggagaaggaggntcaaggggtatggaggaggatgaaantgatcatgtgatgnggaagagtgcttgggagnanaancagtggntgaagnagaaggtggtgcagttggnggagcngcacgtgagttntcnaatg

SEQ ID NO: 15868 - DNA, 135 bp, Glycine max
  unsure (1)..(135): unsure at all n locations; Clone ID: 701043912H1
cacaaacaaacactcccattttctctctttctctttctctccgacctagcgagaccgagcgatccgatcctaaccccgcgatgctccgccgcgcaaccaccnccctcatctccggcgcntcccgcngccgcctct

SEQ ID NO: 15869 - DNA, 275 bp, Glycine max
  unsure (1)..(275): unsure at all n locations; Clone ID: 701043913H1
gnacagcggnaggatancaccgncanacgtcgnangcactttcaccttgnggcttcctagcgntcctgtgagaacccangttctctaacgcgncttctccttcaaagttnaaattcctatacatttgcgtaatcgcttctcaaatctcaacnaaagtattcccaaaaaacgctaattnttattattaaacatgaggccgnttctngatgaaaggcnagagaggccatggagttcctcaagtncaacngggangggnntnnccttttctctggggc

SEQ ID NO: 15870 - DNA, 277 bp, Glycine max
  Clone ID: 701043915H1
gaacccttccactgtggtgactctgcgatgggtgcctacaagtatgtttcagagctatggcgcaagaagcagtctgatgtcatgcgcttcttgcagcgggtgaggtgctgggagtataggcagcaaccttccattgttcgtttgacaaggtctacccgccctgacaaggctcgttcgcttgggcttcaaggctaagcagggctatgtgatttaccgtgttcgtgttaggaggggtggccgaaagagaccattcccaaaggtattgtttatgggaagc

SEQ ID NO: 15871 - DNA, 132 bp, Glycine max
  unsure (1)..(132): unsure at all n locations; Clone ID: 701043916H1
gcnagtcaaccaaatggnttgagtttttatcgtgtgtttaganatcttgagananaaaaaannccttgtcctaccttgacatctgttttaaattnctgnntcctntactacaggnttactcttattcagaag

SEQ ID NO: 15872 - DNA, 269 bp, Glycine max
  unsure (1)..(269): unsure at all n locations; Clone ID: 701043917H1
tncnnttngggtttntctctctttgtaacttgtaagcatggagtcctcaaagatctatgcttacctcttcctttgcatgctcttcctctcctccgccactcccattctcggttgtggctactgtggcaaaccccccaaaangcacaagcctngtaanacaccaaagacacccacagtacccgttgttanncnaccagtcacaatccctcccattgttnatccaccagttcacaatcnctcccangngaanccancagtnactnttcnnc

SEQ ID NO: 15873 - DNA, 134 bp, Glycine max
  unsure (1)..(134): unsure at all n locations; Clone ID: 701043918H1
ctctctcttctcttacacacacaagcactacnccattttctttngtctctccattttctctatagctcagatgggttctggtgctttacaacttcttctgatcttgggtcttctggctagctcatgcttagcac

SEQ ID NO: 15874 - DNA, 263 bp, Glycine max
  unsure (1)..(263): unsure at all n locations; Clone ID: 701043919H1
gcaagatgtcgaagagaggacgcggtggttcggcggggaacaagttccggatgtacgctgggtctgccggtggcggcgacggtgaactgcgccgacaatacgggggcgaagaacctctacatncatatcggtgaaagggatcaaagggcgtttgaaccgtctcccctcggcttgcgttggcgacatggtgatggccaccgtgaaaaaggggaaacccgatctgaggangaaggttttgccagctgtcntgttcgccancgcac

SEQ ID NO: 15875 - DNA, 261 bp, Glycine max
  Clone ID: 701043920H1
ttcggatctagagtcttcagtttctcctcgttgttcttcgctttcctgttttcaatttcgattctttcgttaatttaataagatgtttgggagggcaccgaagaagagcgataatacgaggtactacgaaatcctcggcgtctccaagaacgcttcgcaggatgatctgaagaaggcttacaagaaagccgccattaagaatcaccccgacaagggcggtgatcccgagaagtttaaagagctggcgcaacttatgaggtt

SEQ ID NO: 15876 - DNA, 259 bp, Glycine max
  unsure (1)..(259): unsure at all n locations; Clone ID: 701043921H1
tagactcttctttttctctaagtctaaggggtgccctgagatcactttnagcaatggtgaaggctgtggcagttcttggcagcagcgagggtgtcactggaactattttcttcactcaggagggaaatggtccaaccaccgtaactggatctcttgctggtcttaagcctggtctccatggcttccatgtccatgccttgggggacactaccaatggttgcctgtcaactggagcgcattcaatcctaataacaacgag

SEQ ID NO: 15877 - DNA, 122 bp, Glycine max
  unsure (1)..(122): unsure at all n locations; Clone ID: 701043922H1
ctcaagcacttttgttgaatttanntaattcaaaatgcccactacatatttcccactaacggtgggagagcactgggncaccaatggtggtatgcatcaccaatagattgtgctgctgcaaa

SEQ ID NO: 15878 - DNA, 134 bp, Glycine max
  unsure (1)..(134): unsure at all n locations; Clone ID: 701043924H1
cttgagagaaaatggcggtgcctctgctctcaaagaagatcgtnnaagaagagggtaaagaagttcaagaggcctcagagtgacaggaaaatttccgtcaagactaactggcgcagaccaaagggtatcgattc

SEQ ID NO: 15879 - DNA, 132 bp, Glycine max
  unsure (1)..(132): unsure at all n locations; Clone ID: 701043927H1
gatccttctgcatcatcacccttcgtatnataccgnctctccctntttgcntttttctctccatcattgacttctgccaagtctttcnaaaagctagctgntcgaggnataatatagcatgcncgaggtctt

SEQ ID NO: 15880 - DNA, 266 bp, Glycine max
  unsure (1)..(266): unsure at all n locations; Clone ID: 701043928H1
tgaaaccctaaagtttgcccccttacacgttttttgtcttcttttttctcccatctttgtttcgagaagcatttgacgaagagaagagacagtgaatcgcggtttcaattcaacccacttcatctcaggtgtttgaagttgagataaaaatgagcggaacagagaaagcaggatcaggaaccaanaaaacccccgggntttcctacaaatccattcgtgggaggncggttgtcgncaagctnattnctggtgttgatacngaggta

SEQ ID NO: 15881 - DNA, 268 bp, Glycine max
  Clone ID: 701043929H1
aaataacatcttcacaaggttttttatgtggtccatatattgaactggccacaatgatatctgaacatttcaactacttcacgaaagtaaattatggtatgtagcttaatgaatttaagtagagcagttcagttaccgacttcaatccacccagaaagatcaaacctttgagatttgcaaacttgtgcttgttgcaaacaatccaacttttttcatcagtctctgtgtccatttcgttcaaaagtctaaaaattttccccacaattca

SEQ ID NO: 15882 - DNA, 148 bp, Glycine max
  unsure (1)..(148): unsure at all n locations; Clone ID: 701043930H1
ctcgtgactacgaacattgcaggaagaaagaaaganaggcgatggacctcggaacctatgacgtgccagaaggagtggacattctgggaagatacgatgcagagtttgcanaaatcctcgcaaaagcatgctttgaaattcgntgctg

SEQ ID NO: 15883 - DNA, 279 bp, Glycine max
  unsure (1)..(279): unsure at all n locations; Clone ID: 701043931H1
cgggtgaggtagaacccttccactgtggtgactctgcgatgggtgcctacaagtatgtttcagagctatggcgcaagaagcagtctgatgtcatgcgcttcttgcagcgggtgaggtgctgggagtataggcagcaaccttccattgttcgtttgacaaggtctacccgccctgaacaangctcgtcgcttgggcttcaagggctaagcagggctatgtgatttaccgtgttcgtgttaggaggggtggccgaaagagaccattccccaaaggtattgt

SEQ ID NO: 15884 - DNA, 81 bp, Glycine max
  Clone ID: 701043932H1
aagtaacaacaatggtggcgggaactgcaaccttgaagcttaatctctccgatttttcttctccaatgtcaagtttcagcg

SEQ ID NO: 15885 - DNA, 266 bp, Glycine max
  unsure (1)..(266): unsure at all n locations; Clone ID: 701043934H1
atcacctccaccaccagtacaccctccttacactccccacccagtttatcactctcctccaccacctcctaccaacaagccttacatctatgcgtcacctccccctccttaccactattagctagcatagctctatggatatgaagaatatgtgcaacgaataaaagaaagcgatagaaaaggaagaagaagcgctcgcgatggcacgaaagagaagattggaagcaaagtttcggcgttttgnctttataaaaaaaaatgttanc

SEQ ID NO: 15886 - DNA, 130 bp, Glycine max
  Clone ID: 701043935H1
cacaaagaaaacagagattcgcattattagcagatcggactcaaccgatgaagttgaagccgcagtgaaacaaaccagaataattgacgcatcatcaattagatcgagctgctagaaatgaaggatgagg

SEQ ID NO: 15887 - DNA, 217 bp, Glycine max
  unsure (1)..(217): unsure at all n locations; Clone ID: 701043936H1
aggctgccgaaaccccgagaccaagttccaatttcgagttgaactcatgttccaaagccaaggacctccgcggcggatatccctctatgacgatgccgtttcgaacaacacccgcctcaaccagcaccacttcaacgccctcctctacctctgctccaactccgtcgcngacccntcccttaagccnantgcctggatagggnttcggggntttcga

SEQ ID NO: 15888 - DNA, 259 bp, Glycine max
  Clone ID: 701043937H1
aatcacttttctactttgagtcttcttgatccttctttttctccttgaactcaaacatggcagatgaggtggttctgctagatttctggccaagtccatttgggatgagggtcaggattgcacttgctgaaaagggtatcaaatatgagtacaaagaagaggacttgaggaacaagagtcctcttctcctccaaatgaacccggttcacaagaagattccggttctcatccacaatggcaaacccatttgtgaatccct

SEQ ID NO: 15889 - DNA, 260 bp, Glycine max
  unsure (1)..(260): unsure at all n locations; Clone ID: 701043938H1
gcagggtgttattggtgggtgtagaaagtagcagaaaatggctgtgatcccgtgtcactgttaccgtaccgtcggatcagacaaaccctacctctccggtcagagtctccgccgtcgcgctcctttccccgccgtctctgtttcatttcgacgccgaatatcatgcgtcgcctcttctgccatcgctcacaaagttgggctgaaagattttccttcacttagatgattttgaaagggacntttttnnananncgggccgg

SEQ ID NO: 15890 - DNA, 140 bp, Glycine max
  Clone ID: 701043939H1
ggagccgtagtgccagtcttgattacaagggtcgtggtagaggacgctatgatgatgagcgtaatagtagaagccggagcagatcagttgatagccgctcccctgcacgacgcagtcctagtcctcgaaggagtccctcc

SEQ ID NO: 15891 - DNA, 263 bp, Glycine max
  Clone ID: 701043940H1
gttttctgattaactctttcttctcataactctgccgccgcaacagccccaaatccaatggcttcagagaagaaactttcgaacccaatgagggagataaaggtgcagaagctcgtcctcaatatctccgttggcgagagtggagatcgtctcaccagagccgctaaggttttggaacagcttagtggccaaacccctgtgttttccaaagcaaggtacacggttcgttcctttgggattagaagaaatgagaagattgcatg

SEQ ID NO: 15892 - DNA, 238 bp, Glycine max
  unsure (1)..(238): unsure at all n locations; Clone ID: 701043941H1
gnccaaanaagccatttcaggtcactaaactcctattatcntggatgtggagagtgtgtnntcaaccgaatcagcccttgtttggagtnagttganccaagccattatgaacaaagattgggaaagagcaagagaagcaaagcaagacgtggaagaaagacagaggaatatgttgagagacgagcctganaggagaaantggtttcnaagantttanggtgtctcacagtaaagacac

SEQ ID NO: 15893 - DNA, 262 bp, Glycine max
  unsure (1)..(262): unsure at all n locations; Clone ID: 701043942H1
aaaattattcacacattctccataagaactgagggaggggagactgctgctatacagttgaaagaaaagctggcagcatccctatccaaaaatcgatagtcagatcatnatcatatttatntttagcatctcanggntattgnaaaccatattagacatactactgtttgtcttgtnggctaagtagctgacctaatattgtnatnaatgnacttagttttttnttacagtantgtactttgttngttgtaatctgttttna

SEQ ID NO: 15894 - DNA, 270 bp, Glycine max
  unsure (1)..(270): unsure at all n locations; Clone ID: 701043946H1
gggattttttccttcgctacgaagatatccctctttctttctcatagttttctgcgaaatcgccgatgctagaatcggagctccacgatttatccgacgacgccgattacgccgcgtctcaacaacaaggntctgctagcgtgatgctgcgtagtgacagtgccaaacagagctcccctcgggaaggtgctgaaaattgtatttttgaaggacaatgtcgcaattcatgccgactcagtttgcgtctgaaagaatcagtggaagactgaa

SEQ ID NO: 15895 - DNA, 275 bp, Glycine max
  unsure (1)..(275): unsure at all n locations; Clone ID: 701043947H1
atccaagcttgggagacagagaaagagaaagagaatggacgccattgattctgtgttcgatccgctgagagaattcgcaaaggacagcgtgaggctcgtgaagcgctgccacaaacccgatcgcaaagaattctccaaggttgccgtccgtactgcaattggttncgtcgtgatgggattcgtacggtttcttcgtgaagatcattttcattccaattaacaacatcatcgtcggattctggttaggatgaagggaactacattgcctcagaatt

SEQ ID NO: 15896 - DNA, 276 bp, Glycine max
  unsure (1)..(276): unsure at all n locations; Clone ID: 701043948H1
acgaaaccctcttcatcttgttctatctgtgacgagcatcatggcctcaagagcagtgttattgttggctatgtgtgtgcttccggcgatggttgtggccattcgcccagcaaagaaccctttttgcgtgaagggtcgtgtctactgtgacccttgccgtgctggttttgagacctcagctaccacctacattgctggtgctgagattatgttgcaatgcaagagcaggttagcaacgangttgtgtacacgaagaaggggtacaccgactcaacc

SEQ ID NO: 15897 - DNA, 142 bp, Glycine max
  unsure (1)..(142): unsure at all n locations; Clone ID: 701043949H1
gccattcgtattgttcgcagagaaagaaaaccctagctcaccgtttcaagatgcaaatcttccgttaagaccctcactggtaagaccatcactctcgaagtcgagagttcagataccatagacaatgtannggccanaattc

SEQ ID NO: 15898 - DNA, 261 bp, Glycine max
  unsure (1)..(261): unsure at all n locations; Clone ID: 701043950H1
gtttttcttcttcagaaagattgtgaatatctaagtngccatnaggtgttcctcaggcgtgctgccttctgccttacaacaactttgcagaatctactgaaaaatcatgccgtgaaaagttnaccaccacttgtccccattngctacnaatttgtttctatatggcaaatgaattttntaatgaaanatatataantgaataatcntgacntgantttnagtatgaggaatntngtgcntagcttggctttaaaagagggt

SEQ ID NO: 15899 - DNA, 117 bp, Glycine max
  unsure (1)..(117): unsure at all n locations; Clone ID: 701043951H1
ccatagtccccactgaaactggcgctacatcagcttttaactcaactgcttctcnaacaaaagattttgatccaaccggatgggagcttgccctggtcagcactccaagtactgata

SEQ ID NO: 15900 - DNA, 257 bp, Glycine max
  Clone ID: 701043952H1
acctcattcatactcttagcttatgctaaatacttgaccaaagcccatgtggttgtgaactgtggtggaaccatagtaactccaaagagactccgagctatagcccaaaaacaggtggattacttgctgggagacaaccccttgaagatgtcttatatggtggggtatggtccacggtacccgcaaaggatacaccacaggggctcatcgctgccgtccgttgctgttcaccctggcaagatccaatgctcagcagg

SEQ ID NO: 15901 - DNA, 256 bp, Glycine max
  Clone ID: 701043953H1
atttcatcgtgcattcaatggccaccacagcagctctatccggaaccatggtgagcacctccttcatgaggaggcaacctatgaccaccacaagcctaaagacattccccaacgttggtgaagctctttttggtctgaaaagtggacgaggtggtcgtgtcacttgcatggcctcgtacaaggtgaagctcataaccccagaaggagaagtggagtttgaatgcccagatgatgttttcattgttgacaaggcgag

SEQ ID NO: 15902 - DNA, 240 bp, Glycine max
  unsure (1)..(240): unsure at all n locations; Clone ID: 701043954H1
atacccttcaagatgaaaccgtacctnacgtccaatattcctattattccttatccttctcgaccaatccatttcggcgagtgctgctataaatattaatggtctgagaaacaaaattagagaagttctaaacaagcacccgagcatcaatcttccggcagataaactgaagaaggtgaagagaccactgaaggcactggattatctgcttggcgaatgtaaggacaggccgcctcaaga

SEQ ID NO: 15903 - DNA, 259 bp, Glycine max
  unsure (1)..(259): unsure at all n locations; Clone ID: 701043955H1
gcgaaagccaagggtcaccaaaaccatcattcataacccaaacccaacccaacccaacacaacacaacaccacctcctatcacataataacaaccttaaccttaaccttaaaccccccaattttcatgtctcggatcccgtgattcggatccccaacaaaaaaaganacctcgtatttgttattttngtcggatccggttgggaacgctcatgacgcggcgttgctcgcattgcagccacatgggnacaactccagaac

SEQ ID NO: 15904 - DNA, 262 bp, Glycine max
  unsure (1)..(262): unsure at all n locations; Clone ID: 701043956H1
gtagattcttttttctctttagcgtttggtaagggtgcctatatttattctgcattcgtcctcgatccttaggcggagatttcaaacacaacttcgcttattaaatctcttcttccannnnnnnnnnnnnnnnnnnnccaggctgagatggcagcggnaccagcngctacttcattntggnaaccacgggttcccnnggcaaangnggaaatcggttccccaaaaaaangttntcnggggtaaanattcancccccaaaatt

SEQ ID NO: 15905 - DNA, 137 bp, Glycine max
  Clone ID: 701043957H1
ctcgccctaaaaccaaaatctcgttgcagtgttttcgcctttcctctcacaccaatggccgactctgtaatttcgattcagtacctcaaagatttcgttaattctcaaatctatgacgatgagaaatgggccttcaa

SEQ ID NO: 15906 - DNA, 259 bp, Glycine max
  unsure (1)..(259): unsure at all n locations; Clone ID: 701043958H1
gccagcacaaagggcgtaggagaagagggtttcgttccgtttcaatggggagcgaagagcagaacggcgaattctacctgcgttactacgtcggtcacaagggcaagtttggtcacgagttcctggagttcgagttccgcccagacggcaagctccgctacgccaacaactccaactacaaaaacgacaccatcatccgcaaggaggtttacctaacccccgttgttctccgagagtggcgtcgcttcntcgccgagng

SEQ ID NO: 15907 - DNA, 258 bp, Glycine max
  unsure (1)..(258): unsure at all n locations; Clone ID: 701043959H1
gctcccagcactgagcttaaccgagcttcacaaagatgaatcgggaaaaattgatgaagatggccggttcggttagaactgggggaaagggcaccgtgagaagaaagaagaaggctgtccacaagacaacaaccacagatgacaaaaggcttcagagcaccctgaagagaataggggtnaatgccatcccggctattgaggaggtcaatatctttaaggatgacgtattntccatttctaantcccaaagttcaagct

SEQ ID NO: 15908 - DNA, 261 bp, Glycine max
  unsure (1)..(261): unsure at all n locations; Clone ID: 701043960H1
antcttaaaaatattcagtgaagatcaacctcaatggcatctcttggcgtgcgaccagttcttccccctccattaacttccatctccgacccacctcctcttttcgatggcaccaccaggttgnacatcagttattcttgcccctatgcacaacgtgtgnggatcgctaggnnntacaaggggctanaagatangntcatttgggcccctataaccttcaagacggnccagcttggtanaaggagaaatctnccctaaaaa

SEQ ID NO: 15909 - DNA, 265 bp, Glycine max
  Clone ID: 701043961H1
gcgcagggttaggaaatctggccaagatacagatcaagctaagaagcaacccaggcccaaaaaaccccgaagggcccaatgacaaaccaccagcacaatctgacaatgaaatttcacttgttgagccaagaagcaatgggctcaatatgaacccgacagaagcacaaatgggtggagtccagattcatggaaatgagcagagcaatgagacagattctgctgcaggccactggaaagaggacttgaggtgtctgcacaataccag

SEQ ID NO: 15910 - DNA, 271 bp, Glycine max
  unsure (1)..(271): unsure at all n locations; Clone ID: 701043963H1
ctcaagtatccaccacctaaagtgatgcnggtggataagtctgcatggatgactgatgaagaatttgcaagagaaacgattgctggnttaaatccaaatgtcattacgattatagaggagttcccactaagtagcaagctagatactcaagcctatggtggatcatacctgtatattagcaaangaactttggagcctaattagggngggctcactgttgngcgggtatccaaaaacaaggagttgttcatctagtcnccatggtatctct

SEQ ID NO: 15911 - DNA, 275 bp, Glycine max
  unsure (1)..(275): unsure at all n locations; Clone ID: 701043964H1
accgggatttcggtgccgatgcggcgagctcttctgcgccgagcaccggtactccgaccgccacgactgcagctacgactacaaagccgccggaagagaagccattcgcgagggagaatccggtgattagagccgcgaagatcgtcaaagtctgaaaaaaaacaaaaaagaggaaaaancccgaacggaacggatctcaaaaacgacgtnttgacggttgactttcgcgcgntcgggttcagtcacgggttngcttttttcttttcaaatnaaaa

SEQ ID NO: 15912 - DNA, 264 bp, Glycine max
  unsure (1)..(264): unsure at all n locations; Clone ID: 701043965H1
gggagatgatccttctgtgaagagtgagcccacaaatatggacacatcaaatccaacccaagtagatgacgagaaagctgttgttgagaatgaaaactctagtaataaggaggatgatgtgaagatggaagatggatcagacgaggaagaagatccagaagaggatcctgaagagttngaggaaatggaaaatggtagtccccagcatgaggcatcccatgataataatgctgagcaagaagtgaaagcagatactaaatctgt

SEQ ID NO: 15913 - DNA, 123 bp, Glycine max
  unsure (1)..(123): unsure at all n locations; Clone ID: 701043967H1
cacaaacagaggctacgtacgatcaaattaattaagatggcggaagtnaggnacaaacaagtggttctgagggactatgtgagtggttttcctaaggaatccgacatgaacatagttgaagga

SEQ ID NO: 15914 - DNA, 254 bp, Glycine max
  unsure (1)..(254): unsure at all n locations; Clone ID: 701043968H1
gagaggaagcagagtgtgtgactgttccccaatttcctgtgcttagagtgaagaagcatttagaaaaagcaagtcacgatgccttcggctcaagatccattctacgttgtcaagcaagaaattcaagaatctattgataagctaaaatccacttttcaccaatgggaaaacactgctgatgttggcgagcgatcnagtctatcaaggaagtccttgctagttgtgaaagcattgcatggcaggtggatgantgg

SEQ ID NO: 15915 - DNA, 255 bp, Glycine max
  unsure (1)..(255): unsure at all n locations; Clone ID: 701043969H1
gagagaaccaagcccgaaaaagctgagaactttggcacaaaaccaacaagcccaccttcaaatcaccccatattccccattcccatgcagagattccatctgggtctccctcattcaccaccaatggacaccagcacaccctnngnngnnnttccagangcatctccaaagcncttcttcaaganaaccacactcacttnnttcatcatgtnttcaanacttccttcaaggaagacacctactacatctcccact

SEQ ID NO: 15916 - DNA, 134 bp, Glycine max
  unsure (1)..(134): unsure at all n locations; Clone ID: 701043970H1
agacaacaaanactgcccacccctaccaacccattaccntcatcgttcaaccaaccaactaacctcatcgcatttcntttgtcaccaacnatcccntttttctcttattcaaatcctctctcatctctnccttt

SEQ ID NO: 15917 - DNA, 258 bp, Glycine max
  unsure (1)..(258): unsure at all n locations; Clone ID: 701043971H1
tacacctgtttctttctctgaaatggtgggaaaacgtgagagttcaaaacgctgagtttcgggttccacaacactgggctcaagtgtacttaagtcgtgagttgttcaggtcctcaagatgcttgcactgacagattctcctctacttattgctaaaacatttgaagcaactaaaataccaacaagcacacgaggcactgtggtatgtgctgccaaaggtccaagaccangatatcccccgantttggaagcncccat

SEQ ID NO: 15918 - DNA, 136 bp, Glycine max
  unsure (1)..(136): unsure at all n locations; Clone ID: 701043972H1
cacaaacagaggctacgtacgatcnaattaattnagatggcggaagtgaggnacaaacaagtggttctgagggactatgtgagtggttttcctaaggaatccgacatgnacatagttgaaggaaccacaatattga

SEQ ID NO: 15919 - DNA, 251 bp, Glycine max
  unsure (1)..(251): unsure at all n locations; Clone ID: 701043973H1
tttgcatgtttaaaattatgcaaaatggttgagtttgatgaaactagatgaatttatgtctggatatttgcttatcgattgatagatgggtaacattctattgacttgccaattgggtcttgattcgncattgtgttttactgctaaatttctacagcatattngaattcttngtaggtcgaaacctgattatggaaccctgactgtancagtttaattgtaacatggatactgnagtagctgcattgggc

SEQ ID NO: 15920 - DNA, 172 bp, Glycine max
  unsure (1)..(172): unsure at all n locations; Clone ID: 701043975H1
ttgatgcancgctgncactnagaaaggatctctntctacgaaggacgcggaatanaacccttctctctgtgantaanannatggcttcagatgcggaanctatcacncttttgacgaggtggcanagcacaaccaggaccaaggattgttgnctcatgcatttctgganagg

SEQ ID NO: 15921 - DNA, 258 bp, Glycine max
  unsure (1)..(258): unsure at all n locations; Clone ID: 701043976H1
gggagagactaatgaaggcgcaagccttggggacactgcaagtttggagtttatgagggggaggagaatattggaaattaatacagatcacnctattatcaaagacttgagtgctgcctgcaagaatgcacctgacagcagcgaantaagcgagcagttgacctcttatatgacacagcactaatttctagtggattttctcctgacagccctgctgagttgggaaataagatttatgaaatgatggccttggcttgg

SEQ ID NO: 15922 - DNA, 259 bp, Glycine max
  unsure (1)..(259): unsure at all n locations; Clone ID: 701043977H1
tctgagggagaaggtgccgganatattggaggtggaggtggaccccaagggtgggcccgggatgatggaggcggcgatgaaggtttactcggagaaagagaaagggaaggttcatgttttgcaggggatgcaggggattgaggtggcgatgaagaggttcttctacgcgtataagcaggttgtgacggttatgatggggagctccgaggccgataatgggttcaccaagatattcctgaacccacttatttccctagct

SEQ ID NO: 15923 - DNA, 261 bp, Glycine max
  Clone ID: 701043978H1
cgaacaactggtgaagtcattgatggctacagaggaagagagtgcggtgaaggagcctttggatctcattaggctcagcctcgacgagcgtatctatgtcaaactccgttccgacagagagcttcgtggcaaacttcacgcttatgatcagcatcttaatatgattcttggtgatgttgaagaaattgttactacagtggaaatcgatgatgagacatacgaagaattgtgaggactacaaagcggacattctttctgttt

SEQ ID NO: 15924 - DNA, 248 bp, Glycine max
  unsure (1)..(248): unsure at all n locations; Clone ID: 701043979H1
ctgagcttccattgtgctcactcanctcttacaacgaaacacctcttcatcttgttctatangtgacgagcatcatggcctcaagagcagtgttattgttggctatgtgtgtgcttccggcgatggttgtggccattcgcccagcaaagaaccctttttgcgtgaagggtcgtgtctactgtgaccctggccgtgctggttttgagacctcagctaccacctacattggtggtgctgaaattatgttg

SEQ ID NO: 15925 - DNA, 270 bp, Glycine max
  Clone ID: 701043980H1
aaccaatcacatcaaattccactcagtactactaatttctctttccgttgttgtttgtccccttaagagaagaaaacatgagtgtggaaattcttgacggtgcaaccatcgtaggtttcgtggaggacgaggaagtcttcaacgtgtgcgtgaggacctcttttctcaactggacaccgacaaggacggtcttctctctacgcggagatgctgaaggattgcagaggctgagggtgttcgagaccattcggcgtcgacgtgaagcgtgcc

SEQ ID NO: 15926 - DNA, 137 bp, Glycine max
  unsure (1)..(137): unsure at all n locations; Clone ID: 701043981H1
ggcaccttntcaaccgttcactccttcttctgcgtcaccgtcaccatcataatcaccatccctttccttattcttcttctgtttcatccctntccccattttctcgctctcgttncttgtcctctactcctttctcc

SEQ ID NO: 15927 - DNA, 255 bp, Glycine max
  Clone ID: 701043982H1
acaaggaacccttcctttttccatcactactaagtactaacactgaaacttgtgcttactcttgcagcaaagtgaataatggcttcactttccaccttcctcacactcactctcttcttcctctcacacgttaacgccaaagaaatcgtcatcaccgaagagggttacaccgtgaccaccgtattcgacggccacaagcctcacatcttccctttcaccgttctccagcgacccttttcctccgatctcatcctt

SEQ ID NO: 15928 - DNA, 250 bp, Glycine max
  unsure (1)..(250): unsure at all n locations; Clone ID: 701043983H1
agatatccaatggcctcttgggtggcctgttggtggtttccctggacctcagggtccatactactgtggtgttggcgctgacaaggcttttggccgtgacattgttgacgcacactacaaagcctgtatttatgctggcatcaacatcagtggaattaatggagaagtgatgcccggtcagtgggaattccaagttggaccttcagttggaatctcactggtgatgaaattggggcanctcgttaaatct

SEQ ID NO: 15929 - DNA, 134 bp, Glycine max
  unsure (1)..(134): unsure at all n locations; Clone ID: 701043984H1
gnttcttacaattacaaatcccttcatctctctctctctattctcanttcaatccccttcttcaacccctctctctctctccaaaacgccaaaccaaaaaatggctcagaaggccgagaaaaacgacaccgact

SEQ ID NO: 15930 - DNA, 234 bp, Glycine max
  unsure (1)..(234): unsure at all n locations; Clone ID: 701043985H1
ctgcgacatcactcaggttgcaggaccttatgggacttcctcctacccctgcgagncgtgctcttttcgttgtatatcagactgctattcctatattgcagaacgaattagttctagaattgcttcgcgaggcattgtccttgctgactatgagtctgctgagggttttggtgaaaaatgcccacaggagccatagtgctccagatttctggcacagtccttncatcctngtcg

SEQ ID NO: 15931 - DNA, 253 bp, Glycine max
  unsure (1)..(253): unsure at all n locations; Clone ID: 701043986H1
ctttaaacgccgaagaaagttcatccaatctccgaagcccttcaccgcattgcaaccatgtcgagaagaaaggttagagagccaaaggaagaaaacgtgactctgggcccagctgttagagatggcgaacatgtctttggcgtcgctcgcatctttgcctccttcaatgataccttcattcatgtcactgatctgtccgggagggaaacacttgtccgcatcacaggtggaatgaaggttaaggctnacanat

SEQ ID NO: 15932 - DNA, 255 bp, Glycine max
  unsure (1)..(255): unsure at all n locations; Clone ID: 701043987H1
caagctgggaagcaaggaattatggtgacgtctcagagtcagaaccccatagagcaaatccaagcgcgcttcaaggagttggagactggcttccgcctctggctctccaagcagtccctccccgtcgaggccgccgtcgtcaccaccaccagcgccgcccagggcgncgctatcggcgccttcatgggcaccctcaccgccgacgcctcctccacttccccacccttccgcncaangcttntntnaaccccnagg

SEQ ID NO: 15933 - DNA, 134 bp, Glycine max
  Clone ID: 701043988H1
gaaagacacagccattgtttgtttactttccattgattgagcgaaagtttgttttttctgcgatcattttccattgggtggaagaaagtctcaacctttagtcgaaagagcaaggatctgagtgagtgagcgat

SEQ ID NO: 15934 - DNA, 253 bp, Glycine max
  unsure (1)..(253): unsure at all n locations; Clone ID: 701043989H1
tcttacccctcttaataccaattttctagggnttatacaattttcgatggcttcttcagatgttgagtaccgttgctttgtcggtgggctcgcttgggccactgacgaccaagctctcgagagagccttctctcagtacggcgaaatcgttgaaacgaagattatcaacgatcgtnagactggaagatccaggggttttggatttgtgaccttcgcctcggagcagtccatganagacgccatcgaagggatg

SEQ ID NO: 15935 - DNA, 251 bp, Glycine max
  unsure (1)..(251): unsure at all n locations; Clone ID: 701043990H1
tgaagatcgttcggagagacctagtacctaatggacctggcagcgttaagatggtggcagtggattcggatgatctctggtttgcgtataacttgatagctcccggagactctgtcatggccgttactgtcaggaaggttctaagagaagctgctaatggcggacgggaagcngncacgcgtcaagctcannttggaattnaagtcgancagctgntgattntnacaaagtncgttctanttncctnggaa

SEQ ID NO: 15936 - DNA, 132 bp, Glycine max
  Clone ID: 701043991H1
aggaaatagctttcctcggttataaccttcaaggtggaaagaaaaacccacccactatcccaattccaataaataccttcctctctatattttcgcacaataccctctcacccttcaacgatgagttactac

SEQ ID NO: 15937 - DNA, 260 bp, Glycine max
  unsure (1)..(260): unsure at all n locations; Clone ID: 701043992H1
aaaacactcataacacaaagcacaaagcaaagctcatccttgagttaaaaaatggcagcagcttcttccatggctctctcatccccatccttggctggcaaggccgtgaagctgggcccatcagccccagaagtgggaagggtgagcatgaggaagaccgtcaccaagcaggtctcctcaggaagcccatggtacggnccagaaccgagtcaagtanttgggcccattctntggcgagcccccgtctaacctaagggtga

SEQ ID NO: 15938 - DNA, 262 bp, Glycine max
  Clone ID: 701043993H1
cacaacaaaaaaagacaacccagagagcgcgtcttaataaacgctcttctctgaaaacccccatttcttttcttctttcttcttctctttcgcttcttcgatcttcgatcttcgtcgctgaaaatgagagagtgcatttcaatccacatcggccaggccgggattcaggttggaaacgcctgctgggagctttactgcctcgaacacggcattcagcctgatgggcagatgccaagtgacaagaccgttggtggaggtgatg

SEQ ID NO: 15939 - DNA, 262 bp, Glycine max
  unsure (1)..(262): unsure at all n locations; Clone ID: 701043994H1
angatggagatgtatcagatctggagcaggagaatagcgttgggagcgttcgcgtttgttcctgcttttcctatcggcctcagcagacgacgtcgttgtgctctctgaagataacttcgagaaggaagttggtcaggacagaggagctctcgttgagttctatgctccttggtgtggacactgcaaaaagctgctccagaatatgaaaagcttggtagcagcttcaagaaagccaaatctgttttaatcggcaagttgactg

SEQ ID NO: 15940 - DNA, 258 bp, Glycine max
  unsure (1)..(258): unsure at all n locations; Clone ID: 701044001H1
cccgaaactgaaactgaatcganattcaatacaatgagttcctcaactacagtgaggnagttgcaggtggtgtcccctgttcctgcggacatagacattgcaaactccgttgaacccgttcatatctcccagattgccaaagacctcaaccttagtcccaatcactatgacctttacggtaaatacaagggctaaggttttgtngtcggttcttgatgagcttcnaggatcagaagatgggtattatgttgtggtcgg

SEQ ID NO: 15941 - DNA, 109 bp, Glycine max
  unsure (1)..(109): unsure at all n locations; Clone ID: 701044002H1
cagacatnaatagantgctacggngnccctcatgncananaganagcngcagcngancatgcagctgagggagcattattgtncctaaaagtatacaagatgtntgatg

SEQ ID NO: 15942 - DNA, 251 bp, Glycine max
  Clone ID: 701044003H1
tacgcatactcaaagtagcttcgaagttcgtatttttattggcatatcatggagaataataatcagtcgttttggcaattcagtgaccagctgaggttacaggcatctaatttggcgaacctttctctaaacgattcgatttggagcaacagttacatctccaagaggcgtgatgaaaggattaattttgacatcaaagttgggggtgagatcaactctttcaagtcaaaggagccagcttgtgattacaa

SEQ ID NO: 15943 - DNA, 252 bp, Glycine max
  Clone ID: 701044004H1
gctaaacacagagaaaggcacagcacgatgacgatgaagataatggtagcgattaagcgagtggtggactacgccgtgaaaatcagggtgaagggcgacaagacaggggtggtgacccataacgtgaaaatgtcgatgaaccccttctgcgagatcgcgctggaagaggccctccgcatcagggagtctggcttggcctccgaggttgtcgccgtcaccatgggaccctctcaatctgtagacactctccga

SEQ ID NO: 15944 - DNA, 253 bp, Glycine max
  Clone ID: 701044005H1
gagaggaagagagagggagattctttgtttgctaccttctctcggaaaaatggttacgttcaggtttcaccagtaccaggtggttgggagggctcttcccacggaagcagatcagcaccccaagatctaccgaatgaagctctgggccaccaacgaggttcgcgccaagtccaagttctggtattttctgaggaaactgaaaaaggtgaagaagagcaatggccaagtgcttgccatcaacgagatttttgag

SEQ ID NO: 15945 - DNA, 253 bp, Glycine max
  unsure (1)..(253): unsure at all n locations; Clone ID: 701044006H1
ctctcattctcttctccatcgcgcgtaagaaacacattttagntgctactaatgggaactgttgaagctgcaaacaaggatgcaaatggaagtctcctagagaaaaatccttcagttgtttttgtgttaggtggcccaggaagtggaaagggtacccaatgtgcaaatattgtccaaaattttgggtatactcatctcagcgctggtgatcttctgcgagcagaaatcaaatctggttctgaaaatggtacaa

SEQ ID NO: 15946 - DNA, 232 bp, Glycine max
  unsure (1)..(232): unsure at all n locations; Clone ID: 701044007H1
cgcggttcccaccatacaccaactcatacttgatcgcanctccagcaaccccgaacangtttacccgcggctccggttcatccgaagctgcagcgcctcgctcgcaccggttatactcggtaaactcgaggaggctttcggtgcaccggttttagaggcctatgcgatgacggaagcgtcgcatttgatggcttcgaacctttgccacaagatggggcccacaagtccgggt

SEQ ID NO: 15947 - DNA, 178 bp, Glycine max
  unsure (1)..(178): unsure at all n locations; Clone ID: 701044008H1
accctcanaacacacattgagaaaaacaancctcactcccncgatggggccttccganaacgagccacttgtaaattcccantttttcagttganttttaactgcaattggtagattncgatttcccctacctgaaaccctagccatttgtagatgactcattgtaaattcgcaattt

SEQ ID NO: 15948 - DNA, 257 bp, Glycine max
  Clone ID: 701044009H1
aaaatgttcaaaaaattttcaggtgaagatgtatctgcacagaaccaagtgaaggcatctgttcaacgaaaaatacggacaagtattgctgaagagtatccgggtcttgaacctgtgttggatgatatacttcccaagaagtcccctctaatagttgctaaatgtcagaaccatctcaatctggttcttgtgaacaacgtgccactgtttttcagtgtccgtgatggaccatacatgcccaccttgcgtcttctcca

SEQ ID NO: 15949 - DNA, 256 bp, Glycine max
  Clone ID: 701044010H1
gaagaagaaaaagagaagaagtagtttggtgtgttaattgttcgagagagaaatggacgactacacgagggaaatgatggacctgaagacactggtcactcgcactctcgagaagaaaggcgtccttgccaggatccgtgccgaactcagagcgagtgtgttcgaggccatcgaagaggaagatcatgtgattgagaaggaacaagccctacctcctgcattgcttggtagctgcaacgatcgagctaaacagctt

SEQ ID NO: 15950 - DNA, 256 bp, Glycine max
  Clone ID: 701044011H1
aggatgacagtgttttagtgaaagacttggttaagcaaactgtagctgcacttggagagaacattaaagtgcgccgttttgttcggtttacgcttggggagacatctgaaaaagaaacaacagtaccagcataactttaggataagtaccatcaagcatgaatggtaactggggaattcatatgcatgttccaaaagcatatatgcaagagactaatgttggaaacagcaattgaattttcataaccaattgtgcc

SEQ ID NO: 15951 - DNA, 258 bp, Glycine max
  Clone ID: 701044013H1
tgttagtatttgaaaaataaacaagaagagcaagagagtaaagcagcagaaggggtgaagatagggatggcgggcatgtctggatgtagttgccgttggcagtgggcggaggcgaaatccatgggagtgggctgttggttcccttcctcaactaccaaaaggagtttccggcctgtgattgtttctgtttctgctatctccgataataactctcactcttacactagcagcggaagaaagctagaagaagaaggcatc

SEQ ID NO: 15952 - DNA, 261 bp, Glycine max
  unsure (1)..(261): unsure at all n locations; Clone ID: 701044014H1
gggagctctgatctaccagagaaatagtaataattgaggccatgtcaaaaatttctggtcctagtggtccagatgagatagaagagaagagagtaacaaaggaaganaaaatcaaatctgctaaaactgagatgggtgaggtgaaggaagaaaatgagagattgaagatgatgctggaaagagtagaaaaggactaccactcccttcaactccgtttctttgacatccatcacgaagatgtttcaaagaagggtttagctg

SEQ ID NO: 15953 - DNA, 262 bp, Glycine max
  Clone ID: 701044015H1
gcaaaaataacaagaatcccggagattacaggcctgacattactcatcagtcccttttatctattttggatagcccactaaataaagctgggagattgcggtcggtatacataaggactgaaaaaggtgttcttatagaggttaagccctttgttcgtattccaagaacattcaaacgctttgctggtgtcatgttggaattgcttcaaaaattgagcatatctgctgttggcaagcgcgagaaacttctccgaaccatcaa

SEQ ID NO: 15954 - DNA, 255 bp, Glycine max
  unsure (1)..(255): unsure at all n locations; Clone ID: 701044018H1
gtnaaaaccctaacggngaagnngatancncctagangtagagtcttcgganacgattcgacaatgtnaaggcgaagatccaaganaangagggcatcccgccggatcagcagcgcctgatcttcgccggaaagncgctggaggacgggngcacccttgncgactanaacatccagaangagtccaccctccacctcgtcctccgcctccgnggcgtgcgncaanaagcgcaagaagaagacctatacnaagcct

SEQ ID NO: 15955 - DNA, 250 bp, Glycine max
  Clone ID: 701044019H1
ggcggattcttctcgggaggagaacgtttacatggcgaaattggcggagcagggccgagcgttacgaggagatggttgagttcatggagaaggttgcaaagactgtggaggttgaggagttgacggtggaggagaggaatctcctctctgtggcttacaagaacgtgattggtgcgaggagggcttcgtggaggatcatatcctccattgagcagaaggaggagagcaggggcaatgaggaccacgtggc

SEQ ID NO: 15956 - DNA, 213 bp, Glycine max
  unsure (1)..(213): unsure at all n locations; Clone ID: 701044020H1
gttctatncttcttccacaatgggtatctctcgtgattccatgcacaagaggcgcgccaccggcggcaagaagaaggcttggaggaagaagagaaagtatgagcttgggaggcagccagcaaacacaaagctatcaagcaacaagacggtgaggaggattanggttcgcggtggnaacgtgaagtggcgtgctttgaggcttgataccgggaa

SEQ ID NO: 15957 - DNA, 250 bp, Glycine max
  unsure (1)..(250): unsure at all n locations; Clone ID: 701044021H1
ggaggganccgtancancggaactctagcttgggtagcgaatcacaatggcgagaggattanagaagcatctgaagaggctaatgccccanagcnttggatgcttgacaaactgggtggtgcatttgctcctaagccctcatctggaccacacaaatcgagggaatgcctgccactcatactcattttgcgaaaccggctgaagtatgctctaacataccgtgnagttcattgctattctgatgcagcga

SEQ ID NO: 15958 - DNA, 251 bp, Glycine max
  Clone ID: 701044022H1
gataaatatgcagcggacgaagatgccttctttgctgattacgctgaggctcaccaaaagctttccgagcttgggtttgctgatgcctaagcaacgtttaggggattgttgaagaggcatggtgcccataatatttctctaaaaaattgtatggtcatggtttttaatgccaatgtgggttccccagattttagatagcttttgaatgtattttgctggacgtgacgatgattgggaagttgggttgttgt

SEQ ID NO: 15959 - DNA, 252 bp, Glycine max
  Clone ID: 701044023H1
caagaatgacactaaacaggttcggcaatacttctagcagttccttgtggtatgaattggcctacactgaagctaaaggaaggatcagaaagggtgacaggacttggcagattgcatttggttcagggttcaagtgcaacagtgctgtgtggcgtgcattgaggaccattaatccagcaaaggagaaaaatccttggatggatgagattcacgagtttcctgttcatgtgcccaaagtggcaaccattggtt

SEQ ID NO: 15960 - DNA, 253 bp, Glycine max
  Clone ID: 701044024H1
aaggtttagggcactgaactcaagtgaagtggcgacaaacaccgcacttcaacggctggcaccgagccaggaccacaccggtggttctataaggctacatctatatggaatcccaattagttgatggtaatgatgatatgggagtttctggggatgtgggtttgagtacgtatgaagttcagatgcatcaagaaacatatgaagtggatccaaatgaggagtgtagagtactagagagttcttctgggggaga

SEQ ID NO: 15961 - DNA, 253 bp, Glycine max
  unsure (1)..(253): unsure at all n locations; Clone ID: 701044025H1
gaaatttaactcgaccttgtatgatgaatgggttaacaagggcaatgcaccggcactgcccgagactcttaagaattacaacaagctggtgtctcttggcttcaagattatattcttgtcaggaagaacactggacaaacaggccgtaacagaagcaaacttaaagaaggctggctaccacacatgggaaaaattaattctcaaggatccacaagatcctccactccaaatgcagtttcatacaanacagcag

SEQ ID NO: 15962 - DNA, 257 bp, Glycine max
  Clone ID: 701044028H1
gtcttcgagtttcacagcgaagtcgtaggagggtttcaaaagatggagaacatgcagagcttctggcaattgggcgatgaactccgtggacactcaaaagcatcggaggatcacaaatggttaatggttgcttcgaaattggcggaacagacaagattgaagggggagcgtgtgaacaaccttgatctttcaaagggccccattgaaacaaggtcaagggataaatttgggttccaggaagagaacaaatttgattc

SEQ ID NO: 15963 - DNA, 257 bp, Glycine max
  Clone ID: 701044029H1
cagaaaacagtgtctagtgttctctatggaatatggaaaagggagggcttactgggatatttcaaaggattgcatgctcagatcttaaaaactgttttgagctcagcactgctcttaatgatcaaggaaaagatctctgctactacctgggtgcttatccttgcacttaaaaggtacctattacttccaaggggtaggattaagaacttgtaatttataatagcagttactggaggaagaagcttcaattcgttgcg

SEQ ID NO: 15964 - DNA, 259 bp, Glycine max
  Clone ID: 701044030H1
agccatcagacattgttcctgaagtactatggaacaccatgaacaatattgatgcattaacattgcaatttagacagctaaacttaaacgcagaagccagagaccttgcatttcatgaggagaatgcacttgtcccttataaacagaaaaacagccttatccatggagatggggtcatcgttccctttcacattaagaaacagcatctacgaccaaaggtcaaccttgatgatgagactgatagagtgtggaagctttt

SEQ ID NO: 15965 - DNA, 259 bp, Glycine max
  Clone ID: 701044031H1
tgtgatcttctcaggatcaacactgataggggtgtcatgatccatgacagccaaacaagattttctattaagggacaacctatttaccattttgttggtacctccacattcagtgaatacactgttgttcatgccggatgtgttgccaaagtcaaccctgctgccccacttgacaaaatttgtgttctcagttgtggaatttgcacaggtcttggggctactatcaatgttgcaaaaccaaaacctggttcttctgttg

SEQ ID NO: 15966 - DNA, 262 bp, Glycine max
  Clone ID: 701044032H1
ctggaaactgagggagatatttgctactggcgttgtgctaggaagttacatggcactaatgacagtagtatttttctgggcaatgaaagataccaacttcttctcgaacaagtttggtgtgaggccattgagagatagccccgatgaaatgatggcagccttataccttcaagtcagcataattagccaggctctaatcttcgtcacaaggtcccgcagctggtcttttgttgaaagacctggtcttctcctactagtgcat

SEQ ID NO: 15967 - DNA, 253 bp, Glycine max
  unsure (1)..(253): unsure at all n locations; Clone ID: 701044033H1
tcttgcatgggaagctgctgaagccgagagaaagcacaaggaagaggaggcggctcgtgaaagagcagcacaagaagctgcagagaaacaagctgcattggctaaaatacgtcaagagaaagcccaatctcttggtgaagaacctgaaaaaggacctaatgttacacaggttttggtacggtttccaactggtgaacgcaaggnaaggaggttctacagcacagcgacaattcagtctttgtatgactatgtt

SEQ ID NO: 15968 - DNA, 250 bp, Glycine max
  Clone ID: 701044034H1
accaaatcaaagcaagccaattggtctctctcttacaccatgagtgcatcaaccaaagcttggattgtggcatcaagcataggggcagtggaggccttgaaagaccaattaggtgtatgcagatggaactatgctttaaggtcactacaacaacatgcaaagaacaacatcagatcttatagtcaagctaggaaattgtcctctgcatcctctgctgcggtttccaacaaggtcaagagaaccaaagaag

SEQ ID NO: 15969 - DNA, 250 bp, Glycine max
  unsure (1)..(250): unsure at all n locations; Clone ID: 701044035H1
ccgacgcctcctccctccgccgctggctcgacaccatcctccccgacgaggtcnacaacctcgccgctcagtctcacgtcgccgtctccttcgagatacccgactacaccgccgacgtcgtcgccaccggcgccctccgcntcctcgaggccgtccgttcncacatcgccgcctccggccgctcccacatccgctactaccaagccggctcctccgagatgttcggcgcnnacccctccgccgcagtccg

SEQ ID NO: 15970 - DNA, 248 bp, Glycine max
  Clone ID: 701044036H1
ctgaagattggtcccaacgagccatctgagctggctatccatgagaatgcctatggcttggccagatacgctgtcatatgccaggagaatggcctggttcccattgttgagcctgagatccttgttgatggatctcatgacattcacaagtgtgctgccgtcaccgagcgtgtccttgcagcatgctacaaggctttgaatgatcaccacgtccttcttgagggtaccctattgaagccaaacatggt

SEQ ID NO: 15971 - DNA, 247 bp, Glycine max
  Clone ID: 701044037H1
gcttattatggttgggtggctttgaaccacaaaatgggcatgttcgatagctacccagggtctcccactttgggacttgttgatttgggtggctcaccgttgcaggttgtggtagagatagatggttctggggatgatgtgcacatgatgagattgaagctcagctcaacagaacctcggattttggcatactcattgcctgcatttggcttaaatgatgcgtttgataggacagtttctcatgctc

SEQ ID NO: 15972 - DNA, 249 bp, Glycine max
  unsure (1)..(249): unsure at all n locations; Clone ID: 701044038H1
aacagaatctactctctattttcctagcttagattccttctccaatggcncttgccgtttccactacttcttcctcttcagctgcagcagnagcagcagcgtcgagctctttcttctcgcgcctnggatcttcatcggncgctaaagctccgcaaattggttccnttcggtttccggagaggcctcaagtttcgnctggtgttgttaatttaactccaagacgctcctcggtgaggncactcaatgccg

SEQ ID NO: 15973 - DNA, 230 bp, Glycine max
  unsure (1)..(230): unsure at all n locations; Clone ID: 701044040H1
cctagttctgcagcagccatccnntttgtaaggaggttnnaagaattgccggtgagtgattacaatggctcctgctaaggcggacaatgccaaaaaggctgatcccaaagctcaggctttgaagacagcaaaggctgtcaaatcaggtggccaagtgtttaagaagaaagctaaaaagatcaggacatctgttacatttcacaggccaaggacattgaagaaagaaagga

SEQ ID NO: 15974 - DNA, 250 bp, Glycine max
  unsure (1)..(250): unsure at all n locations; Clone ID: 701044041H1
ccagatcttgccaaggctgctgaatatacagaaaaacagcttcttataaatgtatctgcacagctcagtcttactggaaaaggttatagtaatttttctgtgctttttctggagggtctttatgatccacatgtgggaaagttgtatctaattggttgcagagatgttcgagcaccatggaaggtctatatnngagctatgacctgaggctggaatggactgtttgattcaggtggttgtggcttatccc

SEQ ID NO: 15975 - DNA, 232 bp, Glycine max
  unsure (1)..(232): unsure at all n locations; Clone ID: 701044042H1
ctctacaaaacccacaatcctctccttcaacanttcacgatgatgcagatcagctccaccgtaccagcccacaaacttcacaagttccaggcaataaggtgccccagcttcagcttcagatgccaacaagcttcctcttcctccctcaaacaaccttcaatttttcagacgaagcccttcatctccaccgagtcaactcgcctgcacctcgccaacctcgacaagctcctcg

SEQ ID NO: 15976 - DNA, 255 bp, Glycine max
  unsure (1)..(255): unsure at all n locations; Clone ID: 701044044H1
cttatctcttcantttccctaaacccctaaacccttccccttctcatttncaccacngtaacccgnnacgcnctncgcnattcttccancgccgntccctcancatncccaaatccttcagctccgacgagttcccggtggacgagaccttcctggagaacttcggcnccaaggncaaaganaccgaggacgaagcccgccgcngcaactggatcgagngcgggtgggcnccatgggaggaaatcctcactcngg

SEQ ID NO: 15977 - DNA, 255 bp, Glycine max
  Clone ID: 701044045H1
tagccgtcgcactctgtgttttctgcgccgtctccgatctccgacaatggcgacccaaatgagcaagaagagaaagttcgtagctgatggagtgttcttcgctgaactgaacgaggttctgacaagagagttggccgaggacggttactccggcgtggaagttagggttacgccgatgcgcaccgaaatcataattagagccaccagaacccaagctgttctcggtgagaagggaaggagaataagggaacttac

SEQ ID NO: 15978 - DNA, 257 bp, Glycine max
  Clone ID: 701044046H1
aaaaccttagcccaaccggatcttcacgattaggagatggctaagtcgaagaaccacaccgctcacaaccagtcctacaaggcccacaagaatggcatcaaaaagccaaagaggcaccgccacacttccaccaaagggatggatccaaagtttctgaggaaccaaaggtacgcgaggaagcataacaagaagagcggtgaaacagccacggaagaagagtaaagtgtcactctcaaatggggctattaggatttgat

SEQ ID NO: 15979 - DNA, 258 bp, Glycine max
  Clone ID: 701044047H1
aaactgggttcattcttgatggattccctcgaacaaggattcaagctgagattcttgaccacattgctcatgttgatctggtggtgaatttcaaatgttcagaagaggagttaatgaaaaagaatctaggaactcgaaaatttaatgcttaccaagaatatattcttatgactagctccaggtcaacaaaacaattgcaggatgatcatgaccaaagtcatgcagaggagtgcaagctgttggaagattactacagga

SEQ ID NO: 15980 - DNA, 262 bp, Glycine max
  unsure (1)..(262): unsure at all n locations; Clone ID: 701044048H1
cttcttctatctccttagttcccggcgagttcgtgcatcggagactctaaatcgcattaacatcatcgaatcaaaccttccttctctttctcaactccagaatctcgtcctcgtgagagaaaaaaaaaaagttagttagggttacgcacagttaattaattatttaataatngaaaaatgagctttcaggacatcgaggccggccggtccttcgctgcccgacgcaacctcatcaanggcaaacaagaccccacgcaggcgg

SEQ ID NO: 15981 - DNA, 247 bp, Glycine max
  Clone ID: 701044049H1
acgctttctattcctttcattgtttcttttctcttcgttctgaaatttcgtttctctctccaacgctacaatgtcggaagctaagacccaaattgaatccataaggaagtgggtcgtcgagcacaagctccgtactgttgggtgtctgtggctcagtgtgatttcgggttcaatcgcttacaattggtctcgacccaatatgaaaactagtgttaagatcatcacgcaaggttgcatgcacaggctc

SEQ ID NO: 15982 - DNA, 192 bp, Glycine max
  unsure (1)..(192): unsure at all n locations; Clone ID: 701044050H1
tagtgcctccttgccagaagttaaaatggcccaagaaactttcctattcacatctgaatcagtgaacgaggggcaccctgancaagctctgtgaccagatctccgatgctgtgctcgatgcatgcttggagcaggaccctgacagcaaggttgcctgtgaaacctgcaccaagaccaacatggtgatggttt

SEQ ID NO: 15983 - DNA, 246 bp, Glycine max
  Clone ID: 701044051H1
ttcttcctctttcaaactccatcgcagattcttcgctcctttccattgattcaaaacatggctaccactcctgccagatctttcctccaagtcgccgcaacggaggaggctgcgccgcctctcagagtcgtccagattgaaggactggttatcctgaagataattaagcattgtaaggaccactcgccttctttagtcactggacaacttcttgggttggatgttggcagtgttcttgaagttacc

SEQ ID NO: 15984 - DNA, 248 bp, Glycine max
  Clone ID: 701044052H1
gccatacttagctgacaagcgaaaactgtaccaactcgtggatcctcgccttgaactaaattattctctaaaaggagtgcagaagatttcccagttagcttataattgccttagtagagaccccaaatcccgtcctaacatggatgaagttatgaaggctctgactccattgcaggattttaatgaccttggcaatcttgtcttatcactctcgcttatctcaacaagggaggcggaagaagaaagat

SEQ ID NO: 15985 - DNA, 247 bp, Glycine max
  Clone ID: 701044053H1
caaactccttccaagaggagagtcatcagtttctgggcccgtagttaggctgttcaagccattcgatgaactttttgttgacttccaggatttcaatgtggaagctctagagaagtttgttgaggaatctagtacccctgttgttactgtctttaacaatgaaccgagcaatcaccctttcgttgtcaaattcttcaacagtcccaacgcaaaggcaatgttgttcatcaacttcactgccgaagtg

SEQ ID NO: 15986 - DNA, 249 bp, Glycine max
  unsure (1)..(249): unsure at all n locations; Clone ID: 701044054H1
gccagagcaaggaggacagagccctctgggtcgttcacaaacccgattggcacgcgcagttctcccttgatgtcaccgatctctacattaggtatctgaagagtggacctgggaaccttgaaaaggatgtggagagaaggtttagttatgctttgagcagagaagacattgagaatgctgtacttggaggaccatagccatttttctttctatctgtcatatacaaacaatggantaattccttgttga

SEQ ID NO: 15987 - DNA, 251 bp, Glycine max
  unsure (1)..(251): unsure at all n locations; Clone ID: 701044055H1
aacccaataagtgattctcatttttatggctcttgccctgaagtcaagttgcttcttgcaattgaagaaacctgaggctggtttcaatgtttgtttttcatctaagaaagctataatctccgtgaaacgnccacactcccgtggctgctatcaggaccatggaagcagtgggactctctgcaacattcaccaggttgaaaaaagaaggaaaagtagcttcatcccgtatgtcatggctggtgatccctgac

SEQ ID NO: 15988 - DNA, 250 bp, Glycine max
  unsure (1)..(250): unsure at all n locations; Clone ID: 701044056H1
gtgaaanatacgttaattacttctgtagagaaccanncanctcctccggtngtgttgtaatccagtcaaaaagtatttttcactggattacaacactaccgaggagttgttggctctctacagaagtnnttaacgtattggatatactgcagatttttttggtaaattatatttgagatttaatgaggttttgtgaggtnctttcatttgattattattaacattctcggatattttnttgttgaggggg

SEQ ID NO: 15989 - DNA, 252 bp, Glycine max
  unsure (1)..(252): unsure at all n locations; Clone ID: 701044057H1
tnttattagggtttngcgattcagagagaaagagaaatgggagaacgannaggnatcccaattgctctggggctctttgcgatgctcctcntcttcattgcttcttncctcttcctctcacctcgttcgtgcttccgatgangccnacgncgcgatcttctacgngtcattcgnngaggattntgacggacggtggattgtgtccgacaangaggattacaacggtgtctggaaagcagctaagagtgatgg

SEQ ID NO: 15990 - DNA, 251 bp, Glycine max
  Clone ID: 701044058H1
caagaaaaccttggaactacacgaaaatggtgtcggcgaacaaggagatggtcgtgtactgcttcgacaccctcctcgctcactacaacagcacggaagctccttcccctgccttcgatcaggctcaacatccattgtttgttacatggaagaaagtggtgaatggtggagatcctcgtcttcggggttgcatcggaactctggaagcacgcagcttgatcaatgggctcaaagattatgcactgaccagt

SEQ ID NO: 15991 - DNA, 252 bp, Glycine max
  unsure (1)..(252): unsure at all n locations; Clone ID: 701044059H1
gaaaaacccttgttcttctctcgaggattaggattagggcttccattaccaacaccaacaccatcaccatcaccatctatggcttgctcaagcgcccaaatacacggcctcggaaccccttccttttcccgaaccctatttttaggtcagaggctaaataccaaggccgcctttatcaaggtcaagtccgcacccactcccaggaggctccgncctctcagagtcgttaatgagaaagtcgtcggtatcgat

SEQ ID NO: 15992 - DNA, 252 bp, Glycine max
  Clone ID: 701044060H1
aaaaaaagcctcgtctctcgtgccgattctccaggacaattcccttcacccaacctaattggtacttgcttgagatagtaaagttgcaaactttgaagcaattagtgtagaagatgagtacgttggatgcaacaagggctgaacttggtcttcttgttttatatttgggcaaggctgaagcaagggacaaaatatgcagggcaatacaatatggttccaaatttttgagtaacggggaacctggtactgctc

SEQ ID NO: 15993 - DNA, 253 bp, Glycine max
  Clone ID: 701044061H1
atcaaaacaaggcacagcaacgctcaactgcgccgtgagtggggttccgaggacgggagtgggattccgtggcacaaactcttcttctcttgcacgttcagttgcgcgaacagcgtcaggctctgcaaatgtcaatggtggatttggagggcaaagaaggttacaggccttccacggagtacgtggaagacagcaacgaaacactcattaacttgactgactcaaccgagcttttgtttcttaagttgccttc

SEQ ID NO: 15994 - DNA, 257 bp, Glycine max
  Clone ID: 701044063H1
gtggttcttgctaaaaagcttgccagagccatcaatgtctgatgacccattgtggaagaagctttcaggccatatggcactgaaagatggccccgtgtattcccactaaccataagtgcgaaccttgtgggttcggctttgcagttggagaacccagtggtgtgttctgttaggaacaatattgtcatacctaagctagtcagtctcgggccattgctggagcatacaaattttacctgtgagggtctataaacaag

SEQ ID NO: 15995 - DNA, 261 bp, Glycine max
  unsure (1)..(261): unsure at all n locations; Clone ID: 701044064H1
gtacataggtaaggtcatatttactgagcgttntgcgctatantgactgcatctgggttgagtggttgtcccacaagatgtccacagctaccttttcatcccatgggatcacgccatgcccgggttatggccttctctgtggctgggagaaataaacaagggatagcatttcgtcaagtggaaagaacgagttttttgtctcctatattaaaatgcaatagacaacttcagttggtcaaaagtgccatggatgctcatatg

SEQ ID NO: 15996 - DNA, 153 bp, Glycine max
  unsure (1)..(153): unsure at all n locations; Clone ID: 701044065H1
gcggtgttggaatttctctccatagcatcgtttcctagctctacactcgcgctttgctacttgagcnccccattcatcggaaactccattcttctctttctctctctnttttnccgtttcgtttaccgatgncccttctcgatngnggngatg

SEQ ID NO: 15997 - DNA, 245 bp, Glycine max
  unsure (1)..(245): unsure at all n locations; Clone ID: 701044066H1
acatggatcccgaccctatctgtgccttttcctatgtttgcgaattaaatgaagcattcataaaccataactgaagaannnnnnnnnnnnnnnnnnnagtgagcgtgaaagatgccttgggcgaggctttcagggtctccaaggctcgacgttgctattgacatgggcaatccatttctcaatctcactgttgatggtttcctaagatcggagctgtcgcagccacgcgatcagctgctgaagat

SEQ ID NO: 15998 - DNA, 244 bp, Glycine max
  Clone ID: 701044067H1
tggcctaccatggtggtgacgggtgacggagaattagggttcgattccggagagggagcctgagaaacggctaccacatccaaggaaggcagcaggcgcgcaaattacccaatcctgacacggggagggaatttaactactgagaccttcatggttgactgtaagggtcataacagctttttagttgcccttctgtagtttttctttaatctcaaatgtcttttagtttgtgacagataaccct

SEQ ID NO: 15999 - DNA, 247 bp, Glycine max
  Clone ID: 701044068H1
ctctccttttctctctctagaattctcagatttgcggggcgagatgatgcagcagccaggacccggcatggcacctcccaccatgggccagcagccgcagcaacagtaccagcagcagcctccgccgcagcagcaacaaccctacgtcatgatgccgccgcagcatcaggcgccgcagcctatgtgggccccatccgcccagcctccgctgccgcagcagcctgctagcgccgacgaggtccgaacc

SEQ ID NO: 16000 - DNA, 246 bp, Glycine max
  Clone ID: 701044069H1
tctctatcgagtaaattaactatgaagcctaccctactattatccctttccttcctgcctctctttgctttcctggctctttcagaagatgttgaacaagttgtggacataagtggcaaccccattttcccaggtggcacatattacattatgccatcaacttggggcgctgccggtggtggattgaaactaggccggacaggaaactcaaactgcccagttactgttttgcaagattactcagaa

SEQ ID NO: 16001 - DNA, 250 bp, Glycine max
  unsure (1)..(250): unsure at all n locations; Clone ID: 701044070H1
ggaagaaccaccactaccttatccatttccactcctcaccaagccncaccatggcctcaaccaacgccctctcttcagcttccattctacgctctcccaaccgccagtctctgaccagaagagcgaaccacaacggaagagtaanttaccgtcaaccgaatagccgtttctccgtcaaagcctccgccaaagagattgcctttgaccagcattcccgctactgctntgcaggccggcattgacaagctcg

SEQ ID NO: 16002 - DNA, 245 bp, Glycine max
  Clone ID: 701044071H1
gattcaacacccatgttgaagcgtggatacaaaccaaagccatggagtggagctcagaattgccgggtttctgtgttcctcatgttttttacattggttctaatgttagtggttttcctttagtatttcgttatgacagtgatggtgctaatcccattttagcttatgaacttcctaaacaaaaatggaatagctttgactctttggtgcatttgcatccaacaaaagagttccggaatgaaact

SEQ ID NO: 16003 - DNA, 250 bp, Glycine max
  unsure (1)..(250): unsure at all n locations; Clone ID: 701044072H1
gnaagagacnntgagtaggtgngtatcttaccngtanngngtcngcgctgattcacaataagantttgttgatatcaccaattcataatgcattaaaggtgaggggcaacaatagaagttgtggcttgcgtgttcaggtttctatggtggactcttcctccgctgatttcaccagacgcatcgaacgagcttggtcaatttctaagcaaccaaggccaatcgtgtgttcgtcttgcgnctcnaaagggca

SEQ ID NO: 16004 - DNA, 249 bp, Glycine max
  unsure (1)..(249): unsure at all n locations; Clone ID: 701044073H1
gcaatngctgatgcaaaggccaacggnttctctgatgtgctgttcttagactcagcaactggaaaacatatagaggaggcctcagcatgcnatgtatttgttttgaaggacaatgctatctccactcctgcaatagatggaaccatcctacctggtatcacccgnnaatccatcattgacattgccattgatttgggttatcaggtcatngaacgttccgtatcagtggaggagatgctaggtgctgat

SEQ ID NO: 16005 - DNA, 249 bp, Glycine max
  Clone ID: 701044074H1
gttgcaaactgaagccactaatgttggaggcaatgcaaccataggaaccggaggaaggtttcccgactttgtacgcattgctagtggcaagcaagatattggaagttctggtgaaggccgaggaggaagctctagtggccattctggtgatggtggtgaaacccttaattacctgaaagctgctggtgatggaaactgaactagccagggagaatggtaaaagtttccttggcctttttagccgtttat

SEQ ID NO: 16006 - DNA, 252 bp, Glycine max
  unsure (1)..(252): unsure at all n locations; Clone ID: 701044075H1
cgcagaagcctcctctgcctcgcaatcatcggcattgtcgtcgcngccgtcggaggtcagtctccagcggcggctcccaccacttcctcggcatccccagccacagccccttctaaacctaaaccaaaatcacctgcgccagttgcttctcccacttcatctcctccagctacatcccccaatgctgcaaccgcaacccctcccgtttcgtctcccacggtagcatctcctccgtctaaagctgctgctccc

SEQ ID NO: 16007 - DNA, 253 bp, Glycine max
  unsure (1)..(253): unsure at all n locations; Clone ID: 701044076H1
cctcagtaatctgagagagaaacaaaaacaatgaaggtttccattgccaagttccactncccttcccctatgtttttnccttctcttggccttcaacacaaaacccctcctagcagcagaaccagagccagtggttgataagcaagggaaccctttggagccaggagtagggtactacgtgtggccactttgggctgatgaaggaggcctcacactaggccaaacaaggaacaagacatgccctctttatgtt

SEQ ID NO: 16008 - DNA, 251 bp, Glycine max
  Clone ID: 701044077H1
cagaaaccatggagaatgtggaattcgatgcttctgagattgagtacgttagttacggtggcgagcatcacctccctctcgtaatgaacctggtggaccaagaactcagcgaaccttattccatcttcacgtaccgttacttcgtctatctctggcctcagctttcattcctggcgttccacaagggtaaatgcgtgggcaccgtggtatgtaagatgggggaacaccgtaacactttcagaggctacatt

SEQ ID NO: 16009 - DNA, 254 bp, Glycine max
  Clone ID: 701044078H1
ctcatctagtagtcctccaagaaacttacctgttcaaatgaagtcagaaaaccaaactagagttactggagatcctgttcatgtcaggaaaacatcttttggtgtctcacaatcaactgataaagaggcgtcttcatcttcaacttctgtatcacaagtaacaattggtccaaaaacagaaatccagaaagcttcacccccaagactaaccgaaagatccatggcacaagtggctatgttgtcaaggccatcta

SEQ ID NO: 16010 - DNA, 254 bp, Glycine max
  Clone ID: 701044079H1
ctcttccattcacaaccttaaacctttctttcttgtaaactttattgattgattctgagaatagaactaagagggtatagacatggctagcgcaattgcagcttcttttttggttctgcttctggctttccccactgtatttggagctgaccatgaagttggtgacactagtggatgggccctcggagttaattacaacacctgggcctctgggaaaactttcacagttggtgacactttggtgttcaagtatg

SEQ ID NO: 16011 - DNA, 257 bp, Glycine max
  Clone ID: 701044080H1
gacaaatttgaggattcatacagagtaatggtgttttctaatggtgataaatgctggaatggtcctgataggagtttgaaggtcaagctaagatgtgggttgaaaaacgagattactgatgtagatgaaccaagccgttgcgaatatgtagcagtattatctaccccagccctttgtcaagaggaaaggctgaaggagttacaacacaagctagacttgttgaattcggaaataccatcaaaccatgatgagttgtg

SEQ ID NO: 16012 - DNA, 246 bp, Glycine max
  unsure (1)..(246): unsure at all n locations; Clone ID: 701044081H1
cagagagaatggctgcggaaaacgttgttgagttcacagacttacccgtcaagaggccaagagaagaagaagaaggaaccaatggcgtctccaacgacgccgtttcagcgctccccaatgaccctcaataccctggcatctctgcggttattcccggttggttctccgaaatcagcccaatgtggcccggggaggnacattccttgaagatggaaaagattttgtttcaagggaagtctgactatc

SEQ ID NO: 16013 - DNA, 141 bp, Glycine max
  Clone ID: 701044082H1
gtgtattagctatcttttctccctttggatttgttatacggaatgcttgagttgggtagttttcatttttaacttttctctctaatgttgaaaccgtcctcaatgttggttctcattgaaaaaaaaatgtagattaattac

SEQ ID NO: 16014 - DNA, 222 bp, Glycine max
  unsure (1)..(222): unsure at all n locations; Clone ID: 701044083H1
agcatatgctcaggatgaagaganatctaaggatatggaacagaaatgagtgaccttgtgnngcgtatgtgttggaaagtagctgcaaagaggaaccaaactgttgtctggcaaaaacctccaacaaatgactgctatatggaaagagaacctggtactcgccctcctctttgccagtctgacgatgactcagatgcagtatggggagtaaatatgaaagca

SEQ ID NO: 16015 - DNA, 244 bp, Glycine max
  Clone ID: 701044084H1
gtcaagcgacgccgtttgggtcctcttccacctcgccttcttctcccaatgccttccctccgcctgggcccactcggcgatcctcctcccgggtcaactcgcccgtgactcaccgcagagctgccccgcccctgaccccaacctctactacaagccagtcatcggaatcgtcagccatcccggcgacggcgcctccggccgcctcagcaacgccaccggcgcctcctacatcgccgcctcctat

SEQ ID NO: 16016 - DNA, 245 bp, Glycine max
  Clone ID: 701044085H1
gccaccgtaccgtgttgcctctctgcaatctacagccaaaatgcctttcaagaggtacgttgagatcgggagggttgcccaaatcaactacggcaaggaatatggcaggctcgtcgtcattgtcgacgtcattgaccagaacagagctcttgtcgatgcccctgatatggtgaggtcccaagtcaatttcaaaaggctttccctaaccgatattaagattgacattaagagggtccctaagaaga

SEQ ID NO: 16017 - DNA, 246 bp, Glycine max
  Clone ID: 701044086H1
aaaattttcaaatggaaggcccaactagagtgatgaatcagttgcgagcattatggcatattcttgaactgttagacaaagaaatgtttgcccacctgtcaaaaattggtgctgaaagccttcattttgcatttcgtatgttgctagttctctttcgaagagagttgtctttcaatgaggctctttcaatgtgggagatgatgtgggcagctgactttgatgaatccatggcttatgatttagaag

SEQ ID NO: 16018 - DNA, 248 bp, Glycine max
  unsure (1)..(248): unsure at all n locations; Clone ID: 701044088H1
gcagattctttcctcttttnttatngtacagtactaggtgatanctanatggtaagctgacctaagcgaaaatttgttccattctttccaatttcttaaaagaagttagctcacagcagatccatncaaacatgatgactccaaacttgaatctggaaccagaaggtggtttaaaagtcctcagccaagtaggtttcgataaatcntacaagagacatctcatgatcttaccaaggacagcactgcta

SEQ ID NO: 16019 - DNA, 250 bp, Glycine max
  unsure (1)..(250): unsure at all n locations; Clone ID: 701044089H1
ggaagaaccaccactaccttatccatttccactcctcaccaagccncaccatggcctcaaccaacgccctctcttcagcttccattctacgctctcccaaccgccagtctctgaccagaagagcgaaccacaacggaagagtaaattaccgtcaaccgaatagccgtttctccgtcaaagcctccgccaaagagattgcctttgaccagcattcccgctctgctatgcaggccggcattgacaagctcgc

SEQ ID NO: 16020 - DNA, 238 bp, Glycine max
  unsure (1)..(238): unsure at all n locations; Clone ID: 701044090H1
gtgaaggaagcacgccatcatgaggnggacgggactccccgcgcgtganctgantatattggaccctctcttgtcntacccttctacccttctgggtcgtgagagggncatcgtcatcaacttggagcacatcnaggccatcatcaccgcncacgaggtcctccncctcnactctcgnganccctccgtcacccccttncttcaggagntccaggccaggatccttccgccaccagca

SEQ ID NO: 16021 - DNA, 248 bp, Glycine max
  Clone ID: 701044091H1
aggaaagaccatgcaaaggatatttcttcagaaaatacaaatgaaaacgataaggaattgaatcctcttccttctgcatatcacgatgtcaattttgacaatgccttggaggcctctgcaagtaaacactcgaggacgcaaaacctccctgctattaatttttctccaaaatttgaatttattgatggagatgttgacgatgatttagatcctgcgatgaaagaggagcttgacagggaagtggaaga

SEQ ID NO: 16022 - DNA, 251 bp, Glycine max
  unsure (1)..(251): unsure at all n locations; Clone ID: 701044092H1
ctagttcattgcactgcaacttagccacttaaaccccattcgttagcctctccacatcttcactgcttcttccatacaaatccgaaacnagacggaattcacaaaagacgttaccatgtcggacgatgagagagaggagaaggaattggatctcacttctccggaagttgtcactaagtacaagagcgccgctgagattgttaacaaggccttgcagttagttatttcggaatgtaaaccaaagacaaaga

SEQ ID NO: 16023 - DNA, 251 bp, Glycine max
  unsure (1)..(251): unsure at all n locations; Clone ID: 701044093H1
ctttgcttccccttagtcaaacaaagtaacacaccatccatcctcnctctcttctcttcttctgttctctagtttcctgctcttgtttcttagaatccgtacggtctaatcaacacaacaaaatggatgcaattagttgcctggatgagagcaccaccaccgagtcactctccataagtcaggcgaagttncttcgacgattatgtcgtccgagaaggcttctccttccccgccgccgccgaacaggctgt

SEQ ID NO: 16024 - DNA, 250 bp, Glycine max
  Clone ID: 701044094H1
aaaaacagaagcattaagttggaaggcaggctgtgttattgttgcaatcaatacaactagctggtgacatgacccagtatattgtttgtatttggttatcattattatttttgttattacatacttctttcttacagtgtcatttttctagtaatgatcacccattgtttgctccattttcttgcaatctactcatttgactttttatgcacgatataaaatttcttgtttctctgggtcacgcgtgcac

SEQ ID NO: 16025 - DNA, 252 bp, Glycine max
  Clone ID: 701044095H1
gcttcggtgttgaatcatggatcagaaagtcgatttcagtgctccgcattccatgggaaccactatcatcggcgttacttacaacggcggtgtcgttctcggagccgactctcgaaccagcactggagtgtatgttgccaaccgagcatcggacaaaatcacacagctcactgataatgtttacgtgtgtcgctctggatcggctgctgattctcagattgtctctgactatgtgcgctattccttcaccaa

SEQ ID NO: 16026 - DNA, 191 bp, Glycine max
  Clone ID: 701044101H1
gtggggtgggaggcacacgcacaaacgcagagtcagaatctccattctccaatcggagacaaagcgagctcgaacgaacgaagtagagtagtgtgctacggaaaatgtggcggtgcattgctcgtggactccgtggacctgcttccaccagatccacctccaatcactcacttggatctcacttttataga

SEQ ID NO: 16027 - DNA, 189 bp, Glycine max
  Clone ID: 701044102H1
cgaggtagcccaaccaccctctgattctatttcgagtctttgtttcagtcccaaggccaatttcctcgtcgctacttcatgggacaaccaggtgcggtgttgggagataacaaggaatgggactgttgtcaacagcactcccaaggcttcgatttctcatgaacaaccggttttgtgctccgcttggaa

SEQ ID NO: 16028 - DNA, 186 bp, Glycine max
  unsure (1)..(186): unsure at all n locations; Clone ID: 701044103H1
tttttttctaattaaatattcttctaagatcttgtgtcagcttagttggtggaactgggacatgcaacaaggatgcatgggttcaaacttcataattcactccaccccttttcccattggggcttcccctggggtttgtctcaatagtgggtcctccctttaactanaaaaaaaaatctattaggg

SEQ ID NO: 16029 - DNA, 186 bp, Glycine max
  unsure (1)..(186): unsure at all n locations; Clone ID: 701044104H1
gttgaacaagggtttctctgtctgcttcttcactttctctcgtttcaatcgaaaccaaaacaaaatcatgggcagaaaattcttcgttggtggcaactggaaatgcaatgggaccactgaggaggtaaagaagattgttactactttgaatgaggctagagtccctggagaagatgtcgtagaant

SEQ ID NO: 16030 - DNA, 188 bp, Glycine max
  unsure (1)..(188): unsure at all n locations; Clone ID: 701044105H1
tccaaatacagaaatatcattttccgagacaatcccatcttccatttccatcttcaatatttcttctcatcgagaagcttcgcgaacgaaaacaaagaaccctagacagntccattccatagccatgtcaggtgttggccctctatctcaggattgggaacccgtcgtcctccgcaaganggntccca

SEQ ID NO: 16031 - DNA, 185 bp, Glycine max
  Clone ID: 701044107H1
atcaatctcgtttgttctcactaactattacttcatcatgtcgtcgagcacagttggtcaagtcatcaaatgcaaagctgcggtttcatgggaggcagggaagccacttgtgattgaagaagtagaggtggcaccaccacaagctggtgaagtgcgtttgaagatcctctacacctctctttggc

SEQ ID NO: 16032 - DNA, 187 bp, Glycine max
  Clone ID: 701044108H1
caaaacaacagaaccaaactcagaaccaaactcagaaccaaactcgccaaaactagggttttgcattgatggcactgtgcaaccgcgtcagatcgggaatctctctcttcaccaaatccacgttccttacttcccagcgatccagtctccaacgatccctcgttgcccctttcatttccctcgcctc

SEQ ID NO: 16033 - DNA, 185 bp, Glycine max
  Clone ID: 701044109H1
cggtttcttacgatactattcttggttgtcttagccgagcaggtctatttgaagaggctgcaaagcttatgcaagaaatgggttcaaaaggattccagtatgacctcatcgcctactcttcagtaatcgaggcagtcggaaaggttgatgattgtaaaaaggtagtcatgagagcaatctggttt

SEQ ID NO: 16034 - DNA, 185 bp, Glycine max
  unsure (1)..(185): unsure at all n locations; Clone ID: 701044110H1
cttcctctgcgcaggaattaggaatattcgacaggtagagtttcttcaatggctcctaaagttgataagaagaatganccaaaggcccaggccttgaagactgctaaggcagttaagtcaggtgctacctttaagaagaaggtaaagaagatccgaacttctgtcactttccacaggccgaagac

SEQ ID NO: 16035 - DNA, 182 bp, Glycine max
  Clone ID: 701044111H1
cgctgctggatgaattgcagacggatcaatggccggttccgcctgggcgccgccctgcacgctgcaccggagttgctttgagtgttgccgcagggttgctgagtgcttgcaatcctgggactggtgctagaatcgtagctttggttggtgggccatgcacggaaggacctggcgcaattttt

SEQ ID NO: 16036 - DNA, 184 bp, Glycine max
  unsure (1)..(184): unsure at all n locations; Clone ID: 701044113H1
gccgttgctctgcttcaaccttgcggaagaagaagacgccgcagccatggtgaagtactccagagaacccgacaatcccaccaagtcctgcaaggccagaggcgctgaccttagagtgcatttcaagaacactagggagactgcctttgccatcaggaagttnccccnggttaaagctaaaagt

SEQ ID NO: 16037 - DNA, 183 bp, Glycine max
  unsure (1)..(183): unsure at all n locations; Clone ID: 701044114H1
ctttccctctctttgctgcttgctccaaaaccccttattagggncaccgctgtttgggttagggttagggtttctccacacattctttatctaccaatcttcttccactactttcccttcgttccctctcactctcttcatttgtaagctttttgcgctagggttttctctgcaatctctngt

SEQ ID NO: 16038 - DNA, 184 bp, Glycine max
  unsure (1)..(184): unsure at all n locations; Clone ID: 701044115H1
acacccttcaacagtttttccccactcgttgcttattgacacttctccttcttcggaattcaccccttttcgaaataatttattcgtgtttccctccaaaaaaaccctagctagcttccatggcgtccaagaagaagcactcagagggcatcgccttgtngtccatgtacaangangngganga

SEQ ID NO: 16039 - DNA, 186 bp, Glycine max
  unsure (1)..(186): unsure at all n locations; Clone ID: 701044116H1
ggaagtgagccagcagaggaaggactacgtagaccctccgccagcccccctcatcgacttggccgagattaagctctggtccttctacagagccctcatcgccgagtttatcgccacactcctcttcctctacgtcaccgtcgccaccgtcattggccacaaaaaacagacnggaccatgtgaggg

SEQ ID NO: 16040 - DNA, 188 bp, Glycine max
  Clone ID: 701044117H1
gagaaataccaaaaccttggcgcatcatattctttattccctcacttggatcgttaattccgcgaacgagcttctgcccttcaaattaaccatggagaatattggtgaggagtacggctactggccggagaacgacatgcttttccaaaacgaagaccttggcagctgggcgataatggatgaggcag

SEQ ID NO: 16041 - DNA, 185 bp, Glycine max
  Clone ID: 701044118H1
cggagtatgacattatgatatggtctgcaaccagcatgaagtggattaaagtcaagatggaacaacttggggtgttgggcaatcctaactacaaaatcaccgcacttcttgaccacatggcaatgatcacggttcagacttcttctcgtggggtcttgattgcaagcctcttggtttgatctggg

SEQ ID NO: 16042 - DNA, 184 bp, Glycine max
  unsure (1)..(184): unsure at all n locations; Clone ID: 701044119H1
aaatgagtggtttttgagcagaagcagttaaaagagaaagggattcagcgaagatgacatcngttggtgtggcaccaacttcgggtttgagagaagccagtgggcatggagcagcaggtgttgatagattgccagaggagatgaacgatatgaaaattagggatgatagagaaatggaagccac

SEQ ID NO: 16043 - DNA, 183 bp, Glycine max
  unsure (1)..(183): unsure at all n locations; Clone ID: 701044122H1
tttgatactactttgtaattgacaatttctcagaacagttatgctggcttgcatttaatgtataattngtttctcgatgtgcaggttttaaaggacggtatgcaacatttagggaatataatatgtagcaagttgggtgcaagaatggattctgagcctaaacgttggagaatcttagctgat

SEQ ID NO: 16044 - DNA, 183 bp, Glycine max
  Clone ID: 701044123H1
gcttcatatatccaaaggaagtgtccatgagttgctgtttattttactgccatttatcaggaagtagtactgtgaacgctgatttagtgcttgtctactaatgaatttttatttcctatttaatggccattcccattagatccccattctaactacattattggcctcgaggtgaatcacagc

SEQ ID NO: 16045 - DNA, 186 bp, Glycine max
  unsure (1)..(186): unsure at all n locations; Clone ID: 701044124H1
tnaataaggaattaagtggaaaagcccttaaaagtagcacctgatgatcagactttatctctctgctgggcatggtaaaagacctttcacaagcttacgcgaagtcaggaaatacttcnngcctgtggcacttagtttcaccaatggtggaagagttaaagctcatttgngatccctccgaagctt

SEQ ID NO: 16046 - DNA, 181 bp, Glycine max
  Clone ID: 701044126H1
gactgttgtcgtgtttgtggctctatgcttggttggggtttggatgatgacatcatcttcagttgtccctgtgcgtaatggagatgaggcccaggagaataagaaccaagtgaaagaacaaacagagcctacagaggtgaaagaagcagtgagtgaggtcagcaatagcaatatgcggcag

SEQ ID NO: 16047 - DNA, 161 bp, Glycine max
  unsure (1)..(161): unsure at all n locations; Clone ID: 701044128H1
tgaagatgtgcaagggaagaatgtcctgacaaatttctggggaatggattncacaactgacaagctgaggtcattggtgcgaaaatggcaaactctaattgaagcccatgtggatgtgaagacaactgataactacacattgaggatgttttgcattggat

SEQ ID NO: 16048 - DNA, 181 bp, Glycine max
  Clone ID: 701044130H1
ctttgtcgtccatcccgtaaccatgtctcagactgttgtcctcaaagttggtatgtcatgtgaaggatgtgttggagcagtgaagagagttctaggaaaattggatggtgtggaatcatatgacattgatttgaaggaacaaaaggtggtagtgaaaggaaatgtccagccagacacagtt

SEQ ID NO: 16049 - DNA, 184 bp, Glycine max
  unsure (1)..(184): unsure at all n locations; Clone ID: 701044131H1
ggctgttcttgtgggtgttgttggattggaatcggagagaaatggagagcagcgccgtctacggaagcattcgaccaagttacccgatctgcccctctcgacgttcttcctctcttctctctcaccaatctcccttcctattcgagccttctctttctctnaagcttcgnaaagcantttccnc

SEQ ID NO: 16050 - DNA, 184 bp, Glycine max
  unsure (1)..(184): unsure at all n locations; Clone ID: 701044134H1
agagatcatagagaggaaggaaatgaagcagatggtttttatggaggaatcagaaagattaagagtgagactgagatttccatttggaaaagcatttggccttctgaagtcttggactaatcagatctaattttccacttagcattatgtcaagactagtattcttattaagcattggcagngg

SEQ ID NO: 16051 - DNA, 184 bp, Glycine max
  Clone ID: 701044135H1
gtctcttcctcctctctccgcatagctgcgttttccgaatcgaaaggtgacgttagtaagtaacaatggtggagaaggccaagggtaggaaggaggaggttgtcactcgagagtacaccatcaacctccacaaacgcttgcatggctgcacatttaagaagaaggctcctaaagcaattaaggg

SEQ ID NO: 16052 - DNA, 183 bp, Glycine max
  unsure (1)..(183): unsure at all n locations; Clone ID: 701044136H1
tgaaggttagaagtgctacaaacaatggcaactaatcaggaagaggtgtctcttttgggagttgttggaagcccatttgtgtgcagggtgcagattgccctcaagttgaagggaattcaatacaagttttttgaagaaaatttggtcaacangagtgaactgcttcnnaaatacaaccctgtt

SEQ ID NO: 16053 - DNA, 184 bp, Glycine max
  unsure (1)..(184): unsure at all n locations; Clone ID: 701044137H1
gcctgtgccttgttctctaaaacttggattgaagtctctggttcatctgctagagatgttgcaaagcagctgaaggaacaacaaatggtaatgcctggacatcgggaatcaaacttgcagaaagaactgaaccgatacattcccaccgcggcagcatttggaggcatatgtatcggngcattga

SEQ ID NO: 16054 - DNA, 181 bp, Glycine max
  unsure (1)..(181): unsure at all n locations; Clone ID: 701044138H1
tccaaattcaagaaattttttaaacttgacatatctgcnatcaccttttccgtttcttgcgattcgacgatggccgatcaaaagctttcagaaccggcgcttaaacgtgagcagcttgatgaattcgtgagtagtctatattttgaacaacgaattcttgaactccgacttcttcaagacc

SEQ ID NO: 16055 - DNA, 182 bp, Glycine max
  Clone ID: 701044139H1
gacgacgatctgaaactgcgagcattttgggacaagaggatctcacaggaggtcatcggagatgcactcggtgaggaatttaagggctatgtcttcaaaattaccggaggttgtgacaaacaaggatttccaatgaagcagggagtgctgactcctggtcgtgttagacttttgcttcacag

SEQ ID NO: 16056 - DNA, 161 bp, Glycine max
  unsure (1)..(161): unsure at all n locations; Clone ID: 701044140H1
ctgatatccttcaaagaaccatcacntccacagttagctcccttgaatggtggattaaangnaccaaatcagctgcctgatgtatgggaggatgaacttcacaatgttgtacagatgagctttgcaacaactgctccccttactagccaagattttgatgg

SEQ ID NO: 16057 - DNA, 288 bp, Glycine max
  Clone ID: 701044141H1
tctacactcccctctctcactcactcacactctcttctgtcatagctgtaccacgtttttcttctccatctcagcctctgtcccaacaccattctcatggctgctctagctctagcactgcttcttctggctttcactggcacttcaagtgctacatggtgcgtttgcaaggatggaagcgacgcgatcctgcagaaaaccttggactatgcttgtggagctggtgctgactgtaatcctctccaccaaaacgggccttgtttccagcccaacaccgttagggcccca

SEQ ID NO: 16058 - DNA, 286 bp, Glycine max
  unsure (1)..(286): unsure at all n locations; Clone ID: 701044142H1
caacaatgtctccattttctctcttcctcttcaccacattgctatcttttctcggcgccgccaacgcgcgactcaccttggacttctacaaggacacttgtccgcagttcagccagatcataagggacaccgtcacaagcaagcagatcgccagccccaccaccgccgccgccacgctccgcctcttcctccacgactgcctcctccccaacggtgtgacggctcnatcntctctcttccaggcctttctccagggcngagtngggaggccganattnaactttnt

SEQ ID NO: 16059 - DNA, 217 bp, Glycine max
  unsure (1)..(217): unsure at all n locations; Clone ID: 701044143H1
tgnaccagttattttcagaatacagcaanagggagcatcanattcaagcatttccttgcatcagaggtcactttccgaaagaagtattgcccattatattcttcactaccaagggtcaagcaagtaagtaggcgnctaatttgttcagttgccacagaggatttaccaaaggaagttgaaaaatctnacatggagacacccaaggggaatttttctt

SEQ ID NO: 16060 - DNA, 286 bp, Glycine max
  unsure (1)..(286): unsure at all n locations; Clone ID: 701044144H1
tttggtgctactgtgcgacacattgtggaaggagagaccaaggtgtcgaaactgggaaagttgaagtataagaatgaaaatnattctgtgcaagatgtgaaagcagaagatcttcggcaaatgtttctggctatgactgaggaggttcgtgttataattgtcaaattggcagataggttgcataacatgcgcacgctatcacatatgcctcctcataaacagactagcnnttgccgatggaaacttggccnggtnttggcccctttgcnaagttgctggggtttgt

SEQ ID NO: 16061 - DNA, 192 bp, Glycine max
  unsure (1)..(192): unsure at all n locations; Clone ID: 701044145H1
ggggattcggcgcgtacatggacaagaaacttcagagttgcaacaattcctaaagagagntaganacaagaaagagagattggagaaaaagataacacgctctactaaaaaaattcgaaactcttcagtttcaattttgaatttgagaaggtgggtgtgcatggnttaaattagcagaactagatttcattt

SEQ ID NO: 16062 - DNA, 180 bp, Glycine max
  Clone ID: 701044146H1
aggaaattagccatcattaaaatttgttgatttattgatgaagtgagatacagatatatgaagtctcagaaaaagcaagagagatagtgatgataatcatgaagttgatcgaattggattagttgtaatcgggattggccaaaaggtaagcctcaatggccttgaagagagcatcagcct

SEQ ID NO: 16063 - DNA, 134 bp, Glycine max
  unsure (1)..(134): unsure at all n locations; Clone ID: 701044147H1
ggttttccaattcacagagcaacacaacgaaccaacaatggcgcagttcagccgcagtcgcagccgcagcacgggcaagcagcgctggagcaggtgcagtgcttcggtccgcaagangaccgccgtggccgtga

SEQ ID NO: 16064 - DNA, 181 bp, Glycine max
  unsure (1)..(181): unsure at all n locations; Clone ID: 701044148H1
gtttttatttctctcttctctctgnatcgcntcaggttcttctgaaaagatgtctcgcgtgtatgntggtaacttggattcacgagtcaccgagagagatctcgaagacgaattccgtgttttcggagttattcggagtgtttgggttgcacgtagaccacctggtnatgcttttattgat

SEQ ID NO: 16065 - DNA, 183 bp, Glycine max
  Clone ID: 701044150H1
gcgagaaatggacatttgggaggttgtgaaagcgcttctggggaaggagccttcagttgcaacacggactgataagaagggacaaacagcaattcacatggcagtgaagggacagagtcttgaggtggtggaggagttgataaaagctgatccctcaacaataaacatggttgataataaggg

SEQ ID NO: 16066 - DNA, 166 bp, Glycine max
  unsure (1)..(166): unsure at all n locations; Clone ID: 701044151H1
acggcaaaggcatgtacgttattccgtttactttgctgttagcttcagttcaaattaagtatacagaggcagngaccaatcccntcctatcaactccaggcnangccccttttgancgnctcnatcacttgccatggggtggnatccatggcaganacganntggg

SEQ ID NO: 16067 - DNA, 182 bp, Glycine max
  unsure (1)..(182): unsure at all n locations; Clone ID: 701044152H1
ctggaatcacaatcctgaaacaaaaacatcttagcatttaacatactactagacaacatgaccaccacattggaaagaggtttctcggaagagcaagaagctctggtggtgaagtcatggaatgtcatgaagaagaattctggagagttgggtctcaagtttttcttgaaaatatttgngat

SEQ ID NO: 16068 - DNA, 181 bp, Glycine max
  unsure (1)..(181): unsure at all n locations; Clone ID: 701044153H1
agctaaccaagtgaagagaacctgctatgcacaatcaagccagattagacagattcgtaggaagatgagggagatcatgaccaaccaggcaacatcctgtgatttgaaggagttggtccgcaagtttattcctgagattattggaaaagagattgagaaggcgacatctagtatttncccc

SEQ ID NO: 16069 - DNA, 179 bp, Glycine max
  Clone ID: 701044154H1
ctaaaccttagctactagctggtgcagtgtcatacctgaaggaacaactattcagtgtttgtaacttgtgctcattccaatggcgtgtctttcttttccccagtttctcttacttcataggtaccacatgacttggtcctattgtttcacttcttttaacacagtacaacttgggaaac

SEQ ID NO: 16070 - DNA, 149 bp, Glycine max
  Clone ID: 701044155H1
tcacatttttcactattatctcgttttctactatttcctcatgaacactaacatcctcggcgactgcaagtccggaaacagtgacatcgggtgtcccccgaatggcaccgtctcggtgatcaagaactccgtccctgccaccacaaaca

SEQ ID NO: 16071 - DNA, 150 bp, Glycine max
  Clone ID: 701044156H1
cgtgcgcaagccataaaccctaacacagggcttttccccttctatctctctctgcgtcctcggttatggcttctcgcaggctctcatcatctctgctccgaccattcctccctcgatctccgccggaatttcaagcttcgatcccttccc

SEQ ID NO: 16072 - DNA, 278 bp, Glycine max
  unsure (1)..(278): unsure at all n locations; Clone ID: 701044157H1
ctgaggagagtgagagaaaagagaagagaagatgacaacacgcttcaagaagaacaggaagaagaggggccacgtncagcgctggccacggtcgaatcggaaagcacaggaagcaccctggaggacgcggtaacgccggaggcatgcaccaccacaggatcctcttcgacaaataccaccctgggttcttcggcaaggtaggaatgcgctattttcacaagcttcgcaacaaannngactctccgatcctcaacatcgacaagctgtggtccctggtc

SEQ ID NO: 16073 - DNA, 139 bp, Glycine max
  Clone ID: 701044158H1
gtgatggctgagtacgacctaactccgcggatggcgccgaatctcgacaggcaccttgtgttccctctcctggagttcctgcaggagcggcagtctacgacgacgaccacatcctgaaggcgaagatcgacttctcaac

SEQ ID NO: 16074 - DNA, 190 bp, Glycine max
  unsure (1)..(190): unsure at all n locations; Clone ID: 701044159H1
ccttcagaaaccctaatttctcaaacattcagagggcacccggcaacaccaaaaccaccaccgcctctcctacctcccggagccatggccgccaccgactcctccgctgcttcgtcacgccagctttcgcagagggagacggacatccagatgatgctcgcagccgacgttnacctcggcaccannnnnt

SEQ ID NO: 16075 - DNA, 190 bp, Glycine max
  unsure (1)..(190): unsure at all n locations; Clone ID: 701044160H1
gggtttacagagaagcgaagaggcgcaccgtnagcagtaactcgtggaattgctagcaatggcgaggatcaaggtttacgagctgaggcagaagacgaaggctgatctgttgaatcagctgaaggacctcaaggccgagcttgccttgcttcgtgttgctaaggtcaccggcggtgcacctaacaatctc

SEQ ID NO: 16076 - DNA, 202 bp, Glycine max
  Clone ID: 701044161H1
gtagagtggtatgtgggttgctgcggcaacaaaaccattcatcaaattccaattccacagacacactacttctcttccgcttcttctgatggcaaaccaagcttcactctccttttcttcttccgtgtctcctgttcacgcgcctctcaagcgcgtgggcacgcacaacggaagctttcattgcgacgaggccctcggctgt

SEQ ID NO: 16077 - DNA, 202 bp, Glycine max
  unsure (1)..(202): unsure at all n locations; Clone ID: 701044162H1
aattaaattaccatatatagtcacattttctttacactttgtgaggtctaaaatgttgtccatttttcacaaggggtttgctcacccacctgaagagcttaaaagccctgcatctaacagtggctccaacaagcctaagattcctgaggaaactctaagagaatttctttctcatcatccccataacactttttctctgngt

SEQ ID NO: 16078 - DNA, 179 bp, Glycine max
  unsure (1)..(179): unsure at all n locations; Clone ID: 701044163H1
ttttggttgattgcgggatggaagtggaggcagtgcaacaacagcgcaaaggagcgcacctgaagaagagggctctgaagaacaaagctttgggcatcactttcaacgagaaagatctcactgactacgtcaccggctttcacaagcgcaagaagaagagaagaaaggagncccaganc

SEQ ID NO: 16079 - DNA, 194 bp, Glycine max
  unsure (1)..(194): unsure at all n locations; Clone ID: 701044165H1
cgcgtcgctgctccgtaccagtttcactgcataaatttnagagaaaactctgcaaacatgttggtttatcaggacctccttacaggtgatgagcttctctcggactccttccgttacaatgaaattgagaatggaatgctgtgggaagttgaggggaagtgggttgttaagggagcagttgatgttgacattgg

SEQ ID NO: 16080 - DNA, 189 bp, Glycine max
  unsure (1)..(189): unsure at all n locations; Clone ID: 701044166H1
gcggaattttcgagaagtttgaatgttcgttcatgcatgagtggttctgaaagtttcctngggaattttcgattgcgatattgacactgtgatggcctcagccgtcgtgaatttcttgaacgcgacgttggattggatgacgttcgcgtcgganggnccttctgcgcgagtgnagttttcgntccatat

SEQ ID NO: 16081 - DNA, 181 bp, Glycine max
  unsure (1)..(181): unsure at all n locations; Clone ID: 701044167H1
gcaaaagaaaaaaacaagaagaaaaacacagcaatggagggtgggaacaacagcagcatcaacagcaaccctgaggagttggcggtggggtgcttgctttcgatcaggacaacgttgggcgacgaattcgaaggccaggtcgtgaccttcgatcgcccctccaacatcctccgtactccng

SEQ ID NO: 16082 - DNA, 190 bp, Glycine max
  unsure (1)..(190): unsure at all n locations; Clone ID: 701044168H1
atcgagattaggacgttgttccctttgcgctgtcccacaagcaattaagcacagcgcacaaaggtgtggtgggcaaagggaagtttcaagttggtgttgttgcaggtgaaaaatgtggttcgtgtacgtgtgcgacgaggaagagaaggaacttggaagacnacaagctccgggtcgtgtccctactgng

SEQ ID NO: 16083 - DNA, 148 bp, Glycine max
  unsure (1)..(148): unsure at all n locations; Clone ID: 701044169H1
gcaatggcgaagaagaaggagaagaaggtgaacgtctccggaaaacctaagcactctctcgacgtaaaccgcagcaatgacgcgaagaaggagtcgcgctccgccgccaccgtgcgccgcctcaagatgtacaacacnaggcccgtgg

SEQ ID NO: 16084 - DNA, 190 bp, Glycine max
  unsure (1)..(190): unsure at all n locations; Clone ID: 701044170H1
tgggcccaagangcccactggtccatgggcggcctcagcttcaagcgcctccgtctccagggcaaaattgaaggcaatgtcgaaaggcttcgctcccagcgcgagaagttccaggctcaaagcccaagcccaagcccaccggcacgcgccgacctccgcagntccaaaagagctgcttcccctctgactc

SEQ ID NO: 16085 - DNA, 178 bp, Glycine max
  Clone ID: 701044171H1
tgaaggttagaagtgctacaaacaatggcaactaatcaggaagaggtgtctcttttgggagttgttggaagcccatttgtgtgcagggtgcagattgccctcaagttgaagggaattcaatacaagttttttgaagaaaatttggtcaacaagagtgaactgcttctcaaatacaacc

SEQ ID NO: 16086 - DNA, 157 bp, Glycine max
  Clone ID: 701044172H1
ggcaattgccagccacaatgatgatcgagacattctgttatcctcactttcaaacaagctgcagagtttgtggtcttgcactatggatatttgcggctcacagccttattggtagaataatggctatgtggatcaaagaaaatatacagcatttatt

SEQ ID NO: 16087 - DNA, 278 bp, Glycine max
  unsure (1)..(278): unsure at all n locations; Clone ID: 701044173H1
gagcttcacattcaacctccatgttcccaaagctctgcctcctcttccctcttcatcacgtggaacaacttctctcttcttttcttccaagcacaaatcataccacaacaacactagtcctagccaatcactacgtataacatgcagcagccagaaatcaaatcatgatgatgatggcagcctaaagtatacaagtttggcatgcaaatagggtactcttggccttggctgagcagnccgcattggctgtgatggagagaataacgggcagaactcct

SEQ ID NO: 16088 - DNA, 176 bp, Glycine max
  Clone ID: 701044174H1
cattaaccaaaaaaagatcatcaaaattaaaagaagcaagtatgggggaatccaatgtcatgaccaagactgaggatggtgcttgtctgtctgcaatgctgcttagtactaatctagtgtaccctgcagtactgaatgctgctattgagctcaacttgtttgagatcattgctaag

SEQ ID NO: 16089 - DNA, 199 bp, Glycine max
  unsure (1)..(199): unsure at all n locations; Clone ID: 701044176H1
cgaaagatcctggggatcactttctttgagtcccaaggaaaatggatagcgcaactactgtctgggaaaaaagttttgccatcatatgaggaaatgatggaatccatcgaggagttctatcattcaaatgaagtagctggcattcctaaacgctacacccatgtggttgatgcctttgattatngngacaaatacggag

SEQ ID NO: 16090 - DNA, 175 bp, Glycine max
  unsure (1)..(175): unsure at all n locations; Clone ID: 701044177H1
tccaaattcaagaaattttttaaacttgacatatctgctatcaccttttccgtttcttgcgattcgacgatggccgatcaaaagctttcagaaccggcgcttaaacgtgagcagcttgatgaattcgtgagtagtctatattttgaacaacgaattctngaactccgacttcttc

SEQ ID NO: 16091 - DNA, 176 bp, Glycine max
  Clone ID: 701044178H1
gttcttccacccccgtaccgtctctgcctctctgcaatccacagccgaaaatgcctttcaagaggtacgttgagatcgggagggttgctcaaatcaactacggcaaggaatatggcaggctcgtcgtcatcgtcgacgtcattgaccagaacagagcacttgtcgatgcccctgat

SEQ ID NO: 16092 - DNA, 165 bp, Glycine max
  unsure (1)..(165): unsure at all n locations; Clone ID: 701044179H1
taaatcttgagttgagcctgcgcaaaaaccctaaaccctgtgaatgaagaagacgaagaagagtggcgaagaaaatgggggcaagctcaanttcaagggcncggagaggtcagcttacttcgcacgcagagangcagcgaaggttttgaaagtnattcncgaagg

SEQ ID NO: 16093 - DNA, 145 bp, Glycine max
  unsure (1)..(145): unsure at all n locations; Clone ID: 701044180H1
ctttctcttctcacattgcgtacntcctnnngtttctncaaatggaaaaaaaggtccttttttttgtctccatnctcttattcattgctctgcnatttcatggaggaaaggttttaggttttcaagagccaagacggatcagngg

SEQ ID NO: 16094 - DNA, 93 bp, Glycine max
  unsure (1)..(93): unsure at all n locations; Clone ID: 701044181H1
cccaagatgtcgagcgccgatcccgagcaccgagaagaggaggaggcacccgccgtnggcgangatgaggacaccggagcacacgtcgttcca

SEQ ID NO: 16095 - DNA, 157 bp, Glycine max
  unsure (1)..(157): unsure at all n locations; Clone ID: 701044182H1
gagggagagtgttgacgctccatnaagatgggtatttctagggattccatgcacaagaggcgtgccactggtggcaagaagaaggcatggagaaagaagagaaagtatgagcttgggcgtcaggccgcaaacaccaagttatcaagcaacaaaacta

SEQ ID NO: 16096 - DNA, 163 bp, Glycine max
  unsure (1)..(163): unsure at all n locations; Clone ID: 701044183H1
atgtttaataatgctgcaaggnaattttttgacaaatttgttctgggaaaggtttactacatttcaaggggaactttgaaagttgctaacaagcagttcaaaactgtgcaaaatgattatgaaatgacgctaaatgagantccgnggtggaagaggtggtcgg

SEQ ID NO: 16097 - DNA, 166 bp, Glycine max
  unsure (1)..(166): unsure at all n locations; Clone ID: 701044184H1
ctgaaattttaattgacttttctcccctcataaaaaaaacctaccaatggctcccgcaaaggcagagaagaagcccgcggagaagaagccggcagagaaggccccagcggagaagaagccgaagggnagaagaagatatcgaaggaaggaggaagcgagaagaaga

SEQ ID NO: 16098 - DNA, 165 bp, Glycine max
  Clone ID: 701044185H1
agcaattcacactggtctttgcttctcgttactcatttctcacctaactttctattcttctcagtctcagatcagaaccttggccatggcagcgttccagaagatcaacgtcgccaaccccatcgtcgagatggacggagatgaaatgactagggttatctggaa

SEQ ID NO: 16099 - DNA, 165 bp, Glycine max
  Clone ID: 701044186H1
ctggaatcacaatcctgaaacaaaaacatcttagcatttaacatactactagacaacatgaccaccacattggaaagaggtttctcggaagagcaagaagctctggtggtgaagtcatggaatgtcatgaagaagaattctggagagttgggtctcaagtttttc

SEQ ID NO: 16100 - DNA, 176 bp, Glycine max
  unsure (1)..(176): unsure at all n locations; Clone ID: 701044187H1
gtgtctgcctncagtctccnacaaaanagagtctataagattcattcatcacataaccggaaaaccttcgctcgcgttcacaacanaanccctagaagccaacgtttttcagggaaggttgttagagcacgatggttcagtataattttaggaagatcactgtggtgccaaatggg

SEQ ID NO: 16101 - DNA, 176 bp, Glycine max
  unsure (1)..(176): unsure at all n locations; Clone ID: 701044188H1
caatttatgcagtatcaattacaattcgtattgtgcttggttttatgttgctggctctcatttggaagtttgactttccaccctttatggtgcttattatcgctatcctaaatgatggtactattatgacaatttcaaaagatcgtgtaaaaccatcacctctgccagatagcngg

SEQ ID NO: 16102 - DNA, 281 bp, Glycine max
  Clone ID: 701044189H1
cgacgagtcttgtgtgtgacctcaaaaccctgccgtcagtcaccgtcttctctgccgccatgaagctcgtcaggtttctgatgaagctgaacaacgaaaccgtatcaatcgagctcaagaacggcacagttgttcacggcaccattacaggtgttgatatcagtatgaatacacatttgaaaacagttaaactaactctgaaagggaaaaacccagttactttggatcatctcagtgtgagaggcaacaacattcgatattatatccttcctgacagcttg

SEQ ID NO: 16103 - DNA, 275 bp, Glycine max
  unsure (1)..(275): unsure at all n locations; Clone ID: 701044191H1
cgagcacttggagattatcttggtgtgaaggtgcacgcatgtgtgggaggtaccagtgttcgtgaagaccaacgcattctatcgagtggtgttcatgttgttgttggtactcctggtcgtgtatttgatatgctgcgcagacagtcacttcggccagactacatcaagatgtttgtattggatgaggctgatgaaatgctttcccgtggttttaaagatcagatctatgaaatatccagttgcttcnatctananatccaggggggnnttnnctc

SEQ ID NO: 16104 - DNA, 186 bp, Glycine max
  unsure (1)..(186): unsure at all n locations; Clone ID: 701044192H1
gcaaaatgggatgctgagttctatgtcaaagtggatgatgatgtccatgttaatttaggtgtacttgcaacaacccttgctcgtcatcgttccaaaccaagggtctatgttggatgtatgaaatttggacctgttctttctcgaaaggatgttaaatatcatgaacctgagttttggaagttnggg

SEQ ID NO: 16105 - DNA, 172 bp, Glycine max
  unsure (1)..(172): unsure at all n locations; Clone ID: 701044193H1
gagagagagagagatggtgatgcattcacgggtcagaagcgtcgccggaaacatcaaatgcgcacgagactcttctgttcatcttcgacgaccacgccgccggtgcgccgttgcagttcccgcagactctggcggggctccgggcgcggctggcggaggagtcgccgtcnct

SEQ ID NO: 16106 - DNA, 187 bp, Glycine max
  Clone ID: 701044194H1
gcggcgcgagctagctagggtttagaacctcgcagttacagaaaacatggcgactgtggtgccaacctccgaagaagacgctgcactctccgtcgttcgattcgcctctgaacttgcctgggccgatgccggtcccgaggttgctgagccccaagttagcagactctgcgtggaggctgaagaattt

SEQ ID NO: 16107 - DNA, 200 bp, Glycine max
  unsure (1)..(200): unsure at all n locations; Clone ID: 701044195H1
cgctgagagaacatcacaacacaacaaacaaaggagcctctcggtttccaatgtgaagagagcgaacatggctctaatcgctgccaggattctcggttccaattcgaggccggcggtcgcgctccaccgctggcagtggctggcgtactcctccgcctccgcgggcggtggcggagccngngaccacngaggtgaaggat

SEQ ID NO: 16108 - DNA, 178 bp, Glycine max
  unsure (1)..(178): unsure at all n locations; Clone ID: 701044196H1
caaagtgcaacgtactttgcaaaaaccctanaccctctctttctctctccgcgactctgtactcatcaatggcgacgcaatcgttagacgaagaaacaactaagaaagttcatacgacaggtcgagttttatttcggcgacagcaaccttctcaccgatggtntncatgaggaagagt

SEQ ID NO: 16109 - DNA, 321 bp, Glycine max
  unsure (1)..(321): unsure at all n locations; Clone ID: 701044201H1
cttcttcagtggtggaagctactagaanactagtttgttgaagcactgcgatgagngaagtnggacngttacttccgcnctncctncttctctctactccacnttctactttgcagatcaaggtcgaaagtttcaggcgaatgccgaggganatnccgangagcttgtagatcctccgaaggtggaggncaagatcggtgctgtgcctcatggcctttccaccgattcagatgtcgtcaagagggagtcggagtcgatctcgaagagatcttctccggagcnatgcggagaagtntgaggtcncaagcgganatgtcacgg

SEQ ID NO: 16110 - DNA, 306 bp, Glycine max
  unsure (1)..(306): unsure at all n locations; Clone ID: 701044204H1
cttctaattnacaaagttaagcaagcattgacttggtacctataactngtaatggctgtnggtttgacgatngtgttgaagcttgctctcggttcncnctnctgcatcttgtgcacgaatggtgggggggaagacggaggtccccgacgtgagaacaaacagggaagtgcangagcttggaaggttcgcggtggaggagtacaaccgcggtttgaaacagtggaagaacaatgggagtgaacagttgaacttttcggaggtggtggaggcgcacaacaagtggtgtcaggaatgaagtactacttg

SEQ ID NO: 16111 - DNA, 311 bp, Glycine max
  unsure (1)..(311): unsure at all n locations; Clone ID: 701044205H1
ctattatcatccgcagctgcttttattcgcaccgcaaaacagtgaacccatgggccgtcgganagaaacaagcggcatctccaaggggaagaagggtggcaagaagaaggcagctgatccctttgccaagaaggattggtatgacattaaggctccttctgtttttcaagtgaaaaatgttggcaaaaccctcgtctctcgtactcagggtaccaagattgcttctgaaggactcaagcatagagtgtttgaggtctccttggctgatcttcaaggggatgaggatcatgcattcaagnagattaggntga

SEQ ID NO: 16112 - DNA, 305 bp, Glycine max
  unsure (1)..(305): unsure at all n locations; Clone ID: 701044206H1
tgctggtgcttggggcagtgtttttnctgctttgctgcaagatacttatgggccaattccgtgataagggtggcaaatcaggatatggagaagggccaggaaagacagttgatngagccactgcagagcacctcttcgaagttatcaattctagggaggatgtgttgaggaggttgataaggcgctgtgcttatctgaaatacgtcgaagccaggcttggtgataggactcttctggctgatgagattttgaaagatgggttttgctgaatatgattgacacaccactttgtccatgaaggtggt

SEQ ID NO: 16113 - DNA, 304 bp, Glycine max
  unsure (1)..(304): unsure at all n locations; Clone ID: 701044207H1
ctgattagnagtnattaggggtcaagaaacnaagtggagatcggagagagagaganatncgagannggagggaaangatgggtgttgccantcatcgacgttgctgagagtgggagagngggagactcaccctgaaaaggaanaggaaaaagancaccagaggctctctgaggccgagaaagagggctttgatttctccttctctgagttctcgctggctgagctgaaggcggccaccaacaatttcagctctgactatntcgtgtctgagatggngagaaagcacccaaccntgtttncaagg

SEQ ID NO: 16114 - DNA, 309 bp, Glycine max
  unsure (1)..(309): unsure at all n locations; Clone ID: 701044208H1
ctcattccccatttcctcanctccttncaaccgctgctaaatntcnaacggttnccgaaatgggacgctggcggaaagatcaagaagggcgccggaggtagaaagggcggcggcccaaagaagaagccggtttcaaggtccgtcaaagccggtctccaattccccgtcggaagaattggccgttatttgaagaaaggaaggtacgctcagcgtgtcggtaccggtgctcccgtatacttggctgcagttctcgaatacctagctgccgaggtgcttgagttggctgggaatgccgcacgtgacaacaag

SEQ ID NO: 16115 - DNA, 306 bp, Glycine max
  unsure (1)..(306): unsure at all n locations; Clone ID: 701044209H1
ctttgtgagctatgtttgtggtatcagattgatgagaatgttcancgggagataattaaccaccgatctttaagggcatccaaatataatcaggtttaaagaggtgttactgacccctacacatttagctatcgtcttggagtatgcttcaggtggtgaactttttgagaggatttgtactgctggntcgatttagcgaagatgaggcaaaatatttttcccnaggggnaaatatgntggggttagctactgtcattcaatggaaatttgtcatagagatctaaaattggaaaacactctcttgga

SEQ ID NO: 16116 - DNA, 302 bp, Glycine max
  unsure (1)..(302): unsure at all n locations; Clone ID: 701044210H1
cagttatacagctctagagaattatcatacccttcaagatgaaaccgtacctaacgtccaatattcctattattccttatccttctcgaccaatccatttcggcgagtgctgctataaatattaatggtctgagaaacaaaattagagaagttctaaacaagcaccgannatnaaacttncggnagataaactgaagaagggtaaagagccctntnagggcngggattctctgcttggcgaatgtaaggacaggccgcctcaagaatttcaagaattttgcccgaaatttaagaacgattat

SEQ ID NO: 16117 - DNA, 282 bp, Glycine max
  unsure (1)..(282): unsure at all n locations; Clone ID: 701044211H1
tgaganttccaagttctgttctgacgaagaattcacaacaacnaccctnctctgttttntcntattccttcactctgtgaaaacaaaacatcatgtctcagaaccagaatggcaagtgggtgcgaattgccccagaacaagttcgaggctcctccaatggacacgtggaagtgggaggttccaacaggctctgcataaaccctcagaaagatcacaagtccgaaagctatgaggaccttcaattggagttcaaccctcttgtgttcagctctctggagcagt

SEQ ID NO: 16118 - DNA, 301 bp, Glycine max
  unsure (1)..(301): unsure at all n locations; Clone ID: 701044212H1
ctcacgaggctatgttaaanatgaaaactgaattcatgggctctgtgggatggatttacaacagatcagaatgctcangttatggttcttgcagcaactaatcgtccttcagaacttgatgaagcaatacttcggcgtctncctcaagcctttgaaattgganttccagancanagggagagggctgaaatattgaaggttgtcttaaagggtgagagggttgaagacaacatagactttggtcatatagctggtttntgtgagggttacactggttcagatctatttgatctttgcaaga

SEQ ID NO: 16119 - DNA, 292 bp, Glycine max
  unsure (1)..(292): unsure at all n locations; Clone ID: 701044213H1
tgcgaatatgttgcttttgtgataaacctttctctgtctctcgctcttatcgaagaagcagcagaaaatgggtttcgcgatgcaatgctcaagctatggcacttgtatttctatttgtgtccctcatcgattcccccaaanccctctatcttttcacgttccagcttatcactggaaccgattcagagtgcgcgaaagatcagaggatgatggttcttgtagcgtggagacnggagcacanctanggtncccaaggaaaggaaaattggggaacgtttgttccncaaagnaa

SEQ ID NO: 16120 - DNA, 185 bp, Glycine max
  unsure (1)..(185): unsure at all n locations; Clone ID: 701044214H1
gtggcaaatggccttnccagaaggtgcattgtccaagtttcctatgccattggtgtccctgagcccttgtcagtgtttgtggacacttatggaactgggaagattcctgacaaggagattcttcaaattgtgaaggagaatttcgacttcagacctggaatgatcaccattaacttggncttaaa

SEQ ID NO: 16121 - DNA, 127 bp, Glycine max
  unsure (1)..(127): unsure at all n locations; Clone ID: 701044216H1
caaatccaacccagttcacaaganaggttccagtgtttattcacaatgagaagcccatagcagaagtnctcttgtgattgttgaatacattgatgagactggaagancaaccccatctngcctttcg

SEQ ID NO: 16122 - DNA, 314 bp, Glycine max
  unsure (1)..(314): unsure at all n locations; Clone ID: 701044217H1
cttcancagctatagtttttctnaactaactgccctgccactggaaccacacagccaatgggcagcttacttcttcncnttnctcctcttcaatgcatatggagatgtttgctccaaagacatcaaagtgtccccaaaattttgtatgctgtcatagcaaaatctcctatatagaacctaattatttaaaaccagtatgctgtcctaattcaagatctttaagtatgaatatgtcatcaaaatgggaacaaacggatcgaagagatgcattgcattgccgcgctttgaaattgagcctgcacctnccttttcgg

SEQ ID NO: 16123 - DNA, 304 bp, Glycine max
  unsure (1)..(304): unsure at all n locations; Clone ID: 701044218H1
tgtatactataatagcagaatcgtgagtnacagcagagcagaacaccgataaatcgctatgactgctcagacccaagaggagcttcttgcggccgaccttgagcaacaaaagatccatgatgatgagcctgtannnnnnnnnnnnnnnnnnnnnnnnnnnnnngacgacgatgaggatgacgacaatgttgaagaaggtgatgcatctggtaggtccaagcagaccagaagcgaaaagaagagtcgcaaggcaatgctcaaacttggaatgaaacctgtcacaggtgtcatcgtgtgactgtta

SEQ ID NO: 16124 - DNA, 306 bp, Glycine max
  unsure (1)..(306): unsure at all n locations; Clone ID: 701044219H1
ctttcttttgctcttcatccattccacaccaaaaagtaacagtttcngtttcggagggaaaacacaanacaaaaagccccctccccccaaagcaaatcacctttttttctttcagttattcaaaaaatgttcgccgaagagaatggactcaagggagaccctagactccaagccatttcccaagccatcagagtcgtccctcacttccccatacatggaataatgtttccagacataacgacattgttgttggatcacaaggcgtttaaagacactgtcgacatttttgtngatcgttacagagac

SEQ ID NO: 16125 - DNA, 304 bp, Glycine max
  unsure (1)..(304): unsure at all n locations; Clone ID: 701044220H1
caacatagcatagagtgagaagtgagaagagaaaaatggcaatctccatacccagtagacaatttttcatagatggagagtggaaagtccctcttctcaacaatcggtttccgatcatcaaccccgctactgaagacatcatagggcatattccagccgctactaaggaagatgttgaccttgcggtggatgctgctaaaagagccttttcccataacaaaggcaaagattggtcttcagctcctggctctgttcgtgctcgctatcttcgagccatcgcttcaaagataacagagaaanagga

SEQ ID NO: 16126 - DNA, 302 bp, Glycine max
  unsure (1)..(302): unsure at all n locations; Clone ID: 701044221H1
ggttgattagggtttcttcggctgcgtgctgatgctcttgttttctcanagtcacaccaanagnatggaaagcatcacagagggagtgaacaacatcaacatctctgattcttacaagaagaatcgcattcaggtctccaacaccaaaaagcctctcttcttctacgtcaatctcgccaagaggtatatgcaacagcataatgaggttgagctctcagcactaggaatggctattgctacagtggttactgttgctgaaatcttgaaaaacaatgagcttgctattgaaaagaaatcaggac

SEQ ID NO: 16127 - DNA, 304 bp, Glycine max
  unsure (1)..(304): unsure at all n locations; Clone ID: 701044222H1
ggaaaaataaatttcagttttttctcataatgggttccaccaatgcnaatnatgaaacggtcggcagagattcggngtggatccgcgtcttcaaagatggcaccgtggaacgcccacttgattttccgatcgtgccanccactctcaacactggactctcatccaaagacatcaccatctcacaccaccctccaaaaccaatttctgcacgcatttaccttccaaacatcaccaattcccagactaagaaacttcccatctacgtctactttcacggtggtggcttcttctttgaatccgcttt

SEQ ID NO: 16128 - DNA, 303 bp, Glycine max
  unsure (1)..(303): unsure at all n locations; Clone ID: 701044223H1
caatctgagtatagtggagtagggttnttttgcgtttgagagaagcntgagcnggnatttgggaattccgggtgaagctgctccacgaggcttncggggcacgtggtgacggtggagctcaagagcggagaactctacagaggcagcatgatcgagtgcgaggacaactggaactgccaactcgagagcatcacctacactgccaaggatggcaaaacatcgcaacttgagcatgtttttattcgaggacagcaaagtcaggtttatggtcatcccagacatgctgaagantgngctantgtt

SEQ ID NO: 16129 - DNA, 298 bp, Glycine max
  unsure (1)..(298): unsure at all n locations; Clone ID: 701044224H1
ganaatgccatggggtttcaanatggaaatgagagcattctgacttgtccaacttccggtctcagtggtgcaaatgttaatgtttcagaaatggctattagttctgtgtctatagccaagccttcagatgtagttaacccttttattgcttcttccgcttgggatccacttgtttcattgagtcaggttcaatcttttggaggctcttcaatggtttctcatagtgagtttgccaattccaactcatcttaccctcttgttttggataaccaagggataagcaacacgtctcacctgg

SEQ ID NO: 16130 - DNA, 297 bp, Glycine max
  unsure (1)..(297): unsure at all n locations; Clone ID: 701044225H1
ctttctattccaaaacatgccccaagcttgagtccattgtgagganacatctcaagaaggtgttcaaggatgacaatgggccaagctcctgccttactccgcattttcttccatgattgttttgttcagggatgtgatggatcattgctgctagatgggagtccaagtgaaagagaccaaccagccaacggaggcatcagaactgaggccttgcaaaccattgatgacatcagagctattatccatntggagtgtggaaggatcgtttcttgcgcagatatcactgttttggcagca

SEQ ID NO: 16131 - DNA, 295 bp, Glycine max
  unsure (1)..(295): unsure at all n locations; Clone ID: 701044226H1
ggaggttggtgctggtgaccagggtcacatgtttgggctatgccactgatgaaacccctgagtacatgcccctcagccatgtcttgcaaccaaactcggtgctcncctcaccgaggttaggaaaaatggtacctgtgcttggctgaggccagatggcaagacacaagtaactgttgagtactacaatgacaatggtgccatggttccagttcgtgtccacatgtcctaatttccacccaacatgatgagcctgtgagcaatgaccaaattgctgctgaccttaaagagcatgtta

SEQ ID NO: 16132 - DNA, 126 bp, Glycine max
  Clone ID: 701044227H1
gaggtgacccacaaggtttactttgatgttgagattaatggaaaagaagcaggtcgtattgtaatgggtctttatgggaaggctgttccaaaaactgcagaaaacttccgagcactttgcacaggg

SEQ ID NO: 16133 - DNA, 299 bp, Glycine max
  Clone ID: 701044229H1
ttcatctcccttaaatatgtttccacaggagacgatttctagcactggtgctgggacttggatcgctagacttccttagaaataacccccagtttcaagcattgcgttcaatggtggcaatccaatccacaaattctacagcctgtgcttcaggaacttggtaagcagaatcctggtcttttaagactgattcaagagcatcatggggagtttctgcagttgataaatgaacctgttgatggttctgaaggagatatatttgagcagcccgagcaagacatgccccatgccatcaatgt

SEQ ID NO: 16134 - DNA, 145 bp, Glycine max
  unsure (1)..(145): unsure at all n locations; Clone ID: 701044230H1
cgaaananttgactctggtacccggggacatctctcgtgaagacttgggnttggaggattccattctaagggaagagattatgtccaaacagatgtcattattaacttagctgcaacaactaactttgatgaaaggtatgatata

SEQ ID NO: 16135 - DNA, 101 bp, Glycine max
  unsure (1)..(101): unsure at all n locations; Clone ID: 701044231H1
caaagcttnatnatcatcttcttcttctctgnatcatcacaatggctgaaagtacgttcacnanaanaanaaccccagcatgtgcaagtccacgcnancac

SEQ ID NO: 16136 - DNA, 102 bp, Glycine max
  unsure (1)..(102): unsure at all n locations; Clone ID: 701044232H1
ctttgcttgatagtacttcaattaggctaggttnattgttgatgttccctagtgttttggtgaataaagacagggaatggtgttagatgtttatgagttnat

SEQ ID NO: 16137 - DNA, 306 bp, Glycine max
  unsure (1)..(306): unsure at all n locations; Clone ID: 701044233H1
gagagttctacagaaganaaacaaaaccctccttcttgagagagaaagaaganaagatggtnccgaatcttgaatgtcgcatgtacgaaggcgaagtacccggaggtggacatggcggtgatgatacaggtgaagaacatngcggacatgggggcctacgtgtcgctgctggagtacaacaacatcgagggaatgatcttgttctccgagctctcccgccgtcggattcggagcgtgagcagcctcatcaaggttggacgaatcgagccggtgatggtgctccgtgtcgacaaggaaaagggttac

SEQ ID NO: 16138 - DNA, 304 bp, Glycine max
  unsure (1)..(304): unsure at all n locations; Clone ID: 701044234H1
gnaaaacagatagtgtgggagagagaagagcggaagagaaaatgacgaccangttcaagaagaacaggaagaagagagtcacgtcagcgccggacacggccgtatcggaaagcaccgcaagcatcccggaggtcgcggtaacgccggtggcatgcatcaccaccgtatcctcttcgacaagtaccatcctggtttcttcgggaaggtaggcatgcgctacttccacaaacttcgcaacaaattctacaatccgatcatcaacatcgacaagctgtggtccctcctcccccangaggccaaagat

SEQ ID NO: 16139 - DNA, 300 bp, Glycine max
  unsure (1)..(300): unsure at all n locations; Clone ID: 701044235H1
gttaattcanaaacttgagttggattttggtgatcttgtgaattgatctgcgatgtcggaccaaggtagtctgtnggatacatgggctagcatgtatggtatgagggctaggattgcattggctgaaaagggtgttaggtatgaatacaaggaagagaatctcatgaacaggagtcctttgcttttgcagatgaacccaattcacaagaagattcctgttttgatccataatggcaaacccatttgtgaatctgcaataatagtgcagtacattgatgaggtctggaatgacaagtctcc

SEQ ID NO: 16140 - DNA, 301 bp, Glycine max
  Clone ID: 701044236H1
ttcgcaaagaacctttcttttatggtcatgacaaccatgatcagcttgtccaaatagctaaggtgctgggactgatgaactgaatgcatatcttaataagtatcatctggagcttgatcctcaacttgatgcacttgttggaagacacagtcgaaaaccctggtccaaatttatcaatgcagataatcagcatcttgtgtctcctgaggcaattgattttcttgataagctccttcgatatgatcaccaggacaggctaacagctagagaagcaatgggcacatccatatttctctcaggt

SEQ ID NO: 16141 - DNA, 299 bp, Glycine max
  unsure (1)..(299): unsure at all n locations; Clone ID: 701044237H1
caagacgccgctcaaatacacttttaatagaactctctcacagtttcactcactgactgaanctggtgtgtttttgcaacaatggctcagttgaaagcttcccctgcgtgttcaacccgtgccactgctccctcatttcatacaacagggcacctgtatcatcatttctggnaggcaaaaccttcgtcattcaaagagttggggctaagaacaagcgttggtgccaataaacttcaagttattaaagcagctgcacgcngtgatacagaggtagtttctgaaaccacaaaggctggtgg

SEQ ID NO: 16142 - DNA, 297 bp, Glycine max
  unsure (1)..(297): unsure at all n locations; Clone ID: 701044238H1
gagagagagagagatggtgatgcattcacgggtcagangcgtcgccggaaacntcaaatgcgnaggagactcttctgttcatcttcgangaccacgccgccggctgcgccgttgcagttcccgcagactctggcggggctccgggcgcggctggcggaggagtcgccgtcgctgtcggacttcctcgcgttaaaatcggagagcgcgtactcggtggaggtcgggactaagaagaagccgcttccgaanccgaagtggatgaaggaggccgttcccggcggcgagaagtacgtgcaa

SEQ ID NO: 16143 - DNA, 302 bp, Glycine max
  unsure (1)..(302): unsure at all n locations; Clone ID: 701044239H1
gtaggataagtaggagcccagttcgtagtaggagtccagttcgcagtcgttccccaatttgatcgatacccgcnccactcgtgtggagaggcgtgcatcttcttctcgggagcaggagtccatccaaatcccggtctaggtctaggtccaggtcatccgtggaatctctaccaagagcaagtagagacagcaggtccaggtcatcgtccagaagcccagatggaaagaaaggcttggtctcatatggcgatggttctccatantaaatgtgaaaggtggaaattgtggtgctgagggctttg

SEQ ID NO: 16144 - DNA, 301 bp, Glycine max
  unsure (1)..(301): unsure at all n locations; Clone ID: 701044249H1
tagtttgttccatcatttacacctaggcggccttncctatgtaaaaatgttgtttttcatatttaaagacttgggtcagcatttttntatttgatttgtggtatgtatctagggttttctcatcccntctgtctnctatgtttctcttggtcattggcaatgtcaatttttggaaaagtacctagttattttattagattttatganaacttgtgtttaatgtagactacacactacgtatttatacttacatgagtgggatacaataataaatgctggataaagtcctaaggacatgtta

SEQ ID NO: 16145 - DNA, 302 bp, Glycine max
  unsure (1)..(302): unsure at all n locations; Clone ID: 701044250H1
gaattgtgtaaacctgacttgggaggagagaatganagtnttggcaatgagcaacaacagnaagaggangnaatggggagacacttttgctgaaagagcagaaacttactaccaaaagaggcctcagctactgtcccttctgcaggacttgtacaatggctacataaccttatctgaccgttacatccaaacactggccaagcacaagcaccatagtagacactcttctcaagtttcaactgtagatgaaggttctcctgaccagaagaggctattggtgtgnnccncgtgnttcgnncttt

SEQ ID NO: 16146 - DNA, 300 bp, Glycine max
  unsure (1)..(300): unsure at all n locations; Clone ID: 701044252H1
gttttctctctccacactctgcctctaacttgaaaaanaaactcaaaacactctgttctcgtcggcatgcacataaacaataacaaatggcttccacaactatgttgttgctggtcgtgttcatgattctatgtatatcacacccctcatttcaaatggttcttgtgcctttaacacacacactttccaaagcccaattcaacagcacccaccaccttctcaaatccacttccacccgttccgcaaaacgcttccgccgccaactctccctcccactctccccgggcagcgactacactc

SEQ ID NO: 16147 - DNA, 296 bp, Glycine max
  unsure (1)..(296): unsure at all n locations; Clone ID: 701044253H1
ctcactgaaaaannatagcttgttcacaccatcctattttttcaactcatatatacaaatatatataacatggcttctaccttctctcgaagcctagcacttgtaagcttttncattgtcgtttgtgctgccggtaacttgaaccaagactttcagcttacgtggggagatggtcgtgctaaaatactcaacaacgaaaatcttctcactctctcccttgacaaggcctctggctctggcttccaatccaaaaacgaatacttatatggcaagattgacatgcagctcaagctcgt

SEQ ID NO: 16148 - DNA, 292 bp, Glycine max
  Clone ID: 701044254H1
acattctcataatcaaataccatttcattcattcttacatattgcttaattttatctgaattttgaaacaccttctgaatggctttttcaagagttgcattgttaatatgcacggtaattgggtattttgtgattgcctctgcgggcaatttttaccaagattttgatatcacttggggagatgggcgtgctaagatactcaacaatggcgagcttctcactctgtctcttgacaaagcctctggctcgggtttccaatccaagaacgaatacctttttggtaaaattgata

SEQ ID NO: 16149 - DNA, 179 bp, Glycine max
  unsure (1)..(179): unsure at all n locations; Clone ID: 701044255H1
gaatgcaaagcgaactattctttcgccttttactaaagaataccgtgtattcgtcatcttaagcggcatacgtcaattttttaaagagnccttctgttttgaaggctctgcaatgtattttcaatagttgatcttgctcatgaacttcngtncatgnnnattnntgtcctanacggnag

SEQ ID NO: 16150 - DNA, 294 bp, Glycine max
  unsure (1)..(294): unsure at all n locations; Clone ID: 701044256H1
gcggctgcagtagagaagcactcttcgttcttcgactgtctacgatctgctttctctgaattgtgaaaatgtcgctcggagaaaactgcttgttcatacgcagctctcatccttcatgaagatggaattagtgtaactgctgacaagatcagcaccttgttgaaaactgcaaaggttccagtagactcttatnggccaaccttgtttgctaaacttgctgagaagaaaaatcttggcgatttgatagcaaatgcggcaggcggtggtgcaccagttgctgttgcagctgccccc

SEQ ID NO: 16151 - DNA, 295 bp, Glycine max
  unsure (1)..(295): unsure at all n locations; Clone ID: 701044258H1
tcttgttcaatacaattttnnttttttttcagtggaaaaatggctagttagtggaatgtggagttgtgaattgtgatagtggccaaacttaaagctccgtaancgtgactgcttaccattgccttgagaagatactgctgatcaagccgtgcaacatggttgtttcagacttgtctgagcnttaagtgtggccaanccgaaacattngnnccncatatntaanncgatgtccgggacnanataaaanaccngaaacaaggttgtgggttggtagtaaaacaaactgnaaatagtt

SEQ ID NO: 16152 - DNA, 94 bp, Glycine max
  unsure (1)..(94): unsure at all n locations; Clone ID: 701044260H1
ctgctgccgaaaccccttccggaaccctaaggtaagtgagtcatcagtggttgagaatggtggcgaaggcgaagggtagaaaggnggaggtggt

SEQ ID NO: 16153 - DNA, 294 bp, Glycine max
  unsure (1)..(294): unsure at all n locations; Clone ID: 701044261H1
actcgttcttcttcttttgttgttctgtgtttgtgtttgttttttctctcacctgaaaatgtcttgctgcggtggtaactgtggttgcggaagctcctgcaagtgcggcaacggctgcggaggctgcaagatgtacccagacttgagctacactgagtcaaccaccaccgagaccttggtcatggggantggcncngttaaaggnccantttnagggggctgaannggntgtccccgttnaanaccggnggntncaaatgggggacnaanatgcnngnaaaacccgnaanttna

SEQ ID NO: 16154 - DNA, 119 bp, Glycine max
  unsure (1)..(119): unsure at all n locations; Clone ID: 701044262H1
gtcgtttccaanaatcaggaagaatcccctgtatcatatcctccagcactgtatgttagtgccccancanctatgggttatccttccaaaggtgatcctaacagctgtagggtaccccc

SEQ ID NO: 16155 - DNA, 98 bp, Glycine max
  unsure (1)..(98): unsure at all n locations; Clone ID: 701044263H1
gtcnaagnagcctccaattcgtgccactctcttcaaaaatgggccgttaccttctccanatctnnananagaatcaggtctcaagtccctcgacgatt

SEQ ID NO: 16156 - DNA, 299 bp, Glycine max
  Clone ID: 701044265H1
tcttatgcaactatagtgaggctcagagattggtccataattaatcaaaatgttggctatattccacaaagcttttgctcatccacctgaagagctcaacagccctgcatcttacaaaggttccaagaagcctaaggttcccgaggaaactctcaaagatttcctttcccaccatcctcacaacacttgctctatgagctttggtgatgctgctgttctagcttatgtccgtcctgatcaatctttctctcgtcatcaaaggctgttttgtgggatcgatgacatatattgtctcttct

SEQ ID NO: 16157 - DNA, 297 bp, Glycine max
  unsure (1)..(297): unsure at all n locations; Clone ID: 701044266H1
tggtaaaggtgacaagttagcgggtgacaataatgggccgtagcatcaatccttaaatangtnttttctacttcggagcaattctaactaaaacactgctgaacttcaaagtgtggcagcagatcctgctcttcttcttcaccatcagaatcctccagaagaccaagcctctcctctctgcaaataccagcgttgtcagtggaaaatgcattatcttcttttaacaagacagatggtcctatattgatatcaagtccaggttccagtagaggactgcccccaaggccaaattcagcc

SEQ ID NO: 16158 - DNA, 299 bp, Glycine max
  unsure (1)..(299): unsure at all n locations; Clone ID: 701044267H1
cttcgttttctccttaaccatgaagaagctctaccgtaaaggaaccgtccanccctctaccttcggccgtctcngccaaccatctccgaccacctctccttcctccccgccgccatcctcaccctcactctttccctctcttcggaggacagagaagtccttgcatacctcatctcatgctcatccaacaacaacttttccggcaaccctcgccggaaacctaaggttgtcgcggacggcgatcaccctcctctcttcaactgcagttgcttccggtgctacatgagctactgggtccg

SEQ ID NO: 16159 - DNA, 296 bp, Glycine max
  unsure (1)..(296): unsure at all n locations; Clone ID: 701044268H1
cctcaacccaacacacctaagacggttatctccaagcctcactccctcgttntcttccggcccctntcacnncancttctatctgccaattctcttctattaataacacccacctctttggttcctcttcccttcaattcatcacataataacgacnctacaaaacattgtttttagctcttttttgttgcagcgaaaccaaaatgtctttcactgcaactaagtttgcaccttctcctctccctctcaattccaccagccccagatccaatgacaagctctctctnnctcttgga

SEQ ID NO: 16160 - DNA, 295 bp, Glycine max
  Clone ID: 701044269H1
gccaaacagtatacttggggctttcccatggttttcttcttgggcatttacaatcattggggacttgactttccaaagaacattagtgtaattgctgtgtgcccaaagggaatgggtccatctgtaaggaggctctatgtccaaggcaaagagataaatggtgctggaattaatgcaagttttgcagtccaccaggatgtggatggcagggctactgatgttgctttgggatggtctgttgcccttggttctccattcacttttgccactacattagagcaggaatacaggagtg

SEQ ID NO: 16161 - DNA, 294 bp, Glycine max
  unsure (1)..(294): unsure at all n locations; Clone ID: 701044271H1
ggaagtgttcgagcgacacatggaatccgttggtggccttcganaccccaatttggttcctcttagggcttatttccagggccaagcacgagaggctcataatctacgactttcagcccaatggcagcctcttctccctcatacacggttcgagatcaagcagggcaaggccattgcattggacatcgtgcttaaaaatagcagaggacgtagcacaaggtctggccttcatccaccaggcatggagactggtccatggcaatctccaagtctccaatgttctcctnggaccaa

SEQ ID NO: 16162 - DNA, 290 bp, Glycine max
  unsure (1)..(290): unsure at all n locations; Clone ID: 701044272H1
gtgaataattaanatgacgtgtcggtgagtgtgttttataagagagaaaggtgaggctgagctcataagtggtgaggtctggccgggttaaaaagaatagcagcggtgccacttgnnnnnnnnnnnnnnnnnnnnnnnnnnnnnntcaacaacacatcaccaaacaaccttatggagatttgggccaacatgttttttcccctcaggcgtgtctggctttctctctctgctcgcctcaagcctcgcaaaaacggagcagggctgctcaagcttcaggatgatgtacagac

SEQ ID NO: 16163 - DNA, 295 bp, Glycine max
  unsure (1)..(295): unsure at all n locations; Clone ID: 701044273H1
gctnnaattttcanaaggcagaagtagagtcancttaaggcgancattctggataatggatntggtaanatccattnctcnntaatctacanncangtcatccatgggnccagataggtacagatattgaagatttcaagtgctcttggttaattgtgaaagccttggaacttagtaatgaacaanaaaaganagntctacaagaganctatggtaagccagatccagnaaatgatgctcaagtnaaggccctgtacaatgagcttaatcttcaggtgtatttgaggagtacgag

SEQ ID NO: 16164 - DNA, 280 bp, Glycine max
  unsure (1)..(280): unsure at all n locations; Clone ID: 701044274H1
gnacgaannagatncacacaagcactgaagaaacagagtgaagtagtaaattgatggcttcagaagaagngagcgctgtgaaggagcctttgaatcncatatggcttagcctcgacgagcgtatctacgtcaagctccgttctgacagagagcttcgcggcaaacttcacgcttatgatcagcatcttaatattgttcttggtgntgttgaagaaattgttactactgtggaaatcatgctggcaaatttgaataatnnaanaanttttnntcggannaa

SEQ ID NO: 16165 - DNA, 294 bp, Glycine max
  unsure (1)..(294): unsure at all n locations; Clone ID: 701044281H1
gagaattatcatacccttcaagatgaaaccgtacctacgtccaatattcctattattccntatccttctcgaccaatccatttcggcgagtgtgctataaatattaatggtctgagaaacaaaattagagaagttctaaacaagcacccgagcatcaatcttccggcagataaactgaagaaggtgaagagaccactgaaggcactggattatctgcttggcgaatgtaaggacaggccgcctcaagaatttcaagattttgcccgaaatttaagaacgattatcaacaaaatt

SEQ ID NO: 16166 - DNA, 295 bp, Glycine max
  unsure (1)..(295): unsure at all n locations; Clone ID: 701044282H1
ggacgnagcatacgaggnagagcttctcgatttacgnaggnggaagacgaaaaaggccccgactccgaccggagctaaagtcaacggcgaagtaaccaagaagggctctgttggaattcacagttcgggattcagggacttccttctgaagccagancttcttcgggctattgtggactcgggatttgagcatccatctgaagtgcaacatgagtgctaccacaagcaattctcgggatggatgtattngtcaagcaaattcnggaatgggaaagcctgctgtnttttttccccc

SEQ ID NO: 16167 - DNA, 293 bp, Glycine max
  unsure (1)..(293): unsure at all n locations; Clone ID: 701044283H1
caagcttcgccgtttganacagtgcctcaaccatgggcagaaacaaacagagaaggntttctgaaagcaancaaaagtgtttctatgctctaagaaaggtgggaagggaaagaggcctgggaaaggtgggaatcgcttttggaagtcaattgggcttggattcaagactcccagagatgccattgaaggaacctatattgacaagaagtgccccttcactggcaatgtttccattcggggtcgtatcctagccggtacttgtcacagtgctaagatgacaaggaccattattg

SEQ ID NO: 16168 - DNA, 292 bp, Glycine max
  unsure (1)..(292): unsure at all n locations; Clone ID: 701044284H1
cttccttcgatggcccggccttgatgggttcttcaggcttttcgtggttgtgcttctgtggtctaacacaatccgagctncgcttcataccctcatcttctatgtaccccacccttcgtgttggcgaccgaattattgtcgaaaagttgatactatcatattgaaaggtaaagccttcaagatattttacattaagtgtcatagcttcatattacatcaggagtccagctatacatgatattgtaacatttaaggatccaacacagtcctctggggaaaacacagatgctgt

SEQ ID NO: 16169 - DNA, 289 bp, Glycine max
  Clone ID: 701044285H1
gaaaagcatcgttatctgaagatgatgcatttgcctttctgaagggtgacaactatgctgattctgtgacatattttagcttctccgaagcacttcggcaggtgaagttaattggtgtgccttatggactacgttttcaacagttgcaagatctatggaatcaagcagatgctgatggaaatggtgtcatagactttgaagaattcaagcagaaaatatggaattctacatgtccagagcatgtgttggaaaatctgaatggttgcacggaagattgtaacacagaaca

SEQ ID NO: 16170 - DNA, 294 bp, Glycine max
  unsure (1)..(294): unsure at all n locations; Clone ID: 701044286H1
ctttcttnactttcttcctcnacatgggcagagacannaancctcagnctcnacgaagtctgcccnatctacgncggccacaagaaaccccatcaaccactattcccttcancttcttcgacgtcctatggctacgcctccccccagtggagcgtctgttcttctattccttcccaaacncaacaanaacctcttcattcttcgacancancattctcccaaatctcaaanactccctctccctnactctccagcattccctcctctcgngggcanccatcacatgggccattt

SEQ ID NO: 16171 - DNA, 295 bp, Glycine max
  unsure (1)..(295): unsure at all n locations; Clone ID: 701044287H1
cccccctttgctctcaaaccttatcacctaatcnttatcctcncaaaccagaaaaccatgtctantgcgcagttccctcgcaantcccaaccctcactctccgaanccgacaacctctatgttctccccaatgcttctcctcgtccctctccctcananccaacaanaaaacccatttncatttctggtgtttttctncaanaccaaacaactctgtcgtcgtctcgcttcgttcccccacgtcgtggtgtcgtcggatttggggcaggaagaggacacctttcagtgacggagt

SEQ ID NO: 16172 - DNA, 289 bp, Glycine max
  unsure (1)..(289): unsure at all n locations; Clone ID: 701044288H1
catctcattctcattcgttcactgtcactttacccaatcctaaacactttcttctctctgtnttccttcatcctcgcatcaatggagttggacggcgttctcctcggcatgtgcaaccctctcctcgacatctctgccgtcgtcgacgacgctttcttgcaaaaatacggtatcaagttgaacgatgcgattctcgccgaggataaacacaaacctatgtatgaagaattggctaacaatcctaatgtggagtacattgctggaggtgctactcagaattcaatcaggg

SEQ ID NO: 16173 - DNA, 283 bp, Glycine max
  unsure (1)..(283): unsure at all n locations; Clone ID: 701044289H1
tcgatcttgagcttcaacaatggcgaaaccaaggtactctcgtcttccacctcgcaagttcatcgtcgtcttccacgctgattctgactctcttcctggtcttcaccttcctcgttctcattctcctcgctctcggcatcctcnccattcccagntctcgcgcggcaattgcccaaacctaangatctcggcatccatcgctcgcaanacaatcgagattccgacagtgacgagaagggggagcagtgggttgaagtagtgtcgtnggagcccagagcctttg

SEQ ID NO: 16174 - DNA, 280 bp, Glycine max
  unsure (1)..(280): unsure at all n locations; Clone ID: 701044290H1
gaaattggactttaaacctagtatgaacacttcgntttattgtacgcaatctgtatgtggcttcacaatgtncgatgctanatacctncccattctncggtggtcncctaagttttttggnggatttgcttttgcaccaacaacatacttacnccccnnagtcatnnggcttgcganctacaaaccaaggngattcggcctgtcttggtgtgccaactggatctgcttgtgtttggcctttgttgatgtttnaanccccaattggaggttggggccatcc

SEQ ID NO: 16175 - DNA, 287 bp, Glycine max
  unsure (1)..(287): unsure at all n locations; Clone ID: 701044294H1
ctttgaaggttgttgccgganatgaattctatggcggtgagacttgtgaagcatctccaactctctgcaccgacctcatcttcattcggtggtgtgccgagaagtggagcgtcatgggtattcgacctctctatctggaggtgaatatcagccntncacaagataaaggtggcnctaagaatgaaaacttggggggnnancttagaggantntnttggnaaaaagggcngcncnanntncnaagggggnccccnaaaggggtggggntttgggggnncnaanaaant

SEQ ID NO: 16176 - DNA, 285 bp, Glycine max
  unsure (1)..(285): unsure at all n locations; Clone ID: 701044301H1
cgcattttgtatctgaaagaaaaagagggttctcatttcgcaaccatcggccgcacttactcttgttctcaagggattcgattttctctgcactcacttctagggtttcctccgcgctatcagcaatcatggccgacgaaacaccaaatgagatgaaggaggaggttccagaaattgttccttttgatcctaccnnnnnnnnnnnnnnnnnnnnnnttacaattgtagatcctgctgatgaccctgtggagaaattggctgagaagacagaaaacctctcagttt

SEQ ID NO: 16177 - DNA, 281 bp, Glycine max
  unsure (1)..(281): unsure at all n locations; Clone ID: 701044302H1
ctctgctgcgtttgcttctcctccacccatccacaaacgaacacacactttgattgagaatggggcgtgttcgcacaaagacagtgaagaagtcctcgcggcaagtgatcgagaggtactactctcgcatgacgctggacttccacacgaacaagaaggttctggaagaggtggccatcattccctccaagaggctccgcaacaagatcgngggnttctccacccacctcatgaagcggatccagaagggtcccgtacgtggaatctccctcaagctgcag

SEQ ID NO: 16178 - DNA, 275 bp, Glycine max
  unsure (1)..(275): unsure at all n locations; Clone ID: 701044303H1
caactcttcttctattctgattctnatttgtcacacacacacacgcagaaaggttgaaagtagagggacttgattcagtggaggtggagagagatggctaacaacgcagctgcttgtgctgagagagcaactagtgacatgctcattggtcctgactgggcaatcaacatagagttgtgtgatatcattaatatggaccctgggcaagcaaaggatgctttgaagatactcaagaagcgtttggccagtaaaaatccaaaaatacagttnggttt

SEQ ID NO: 16179 - DNA, 270 bp, Glycine max
  Clone ID: 701044304H1
gaggcggcacgtgtgacggctgaggtcatagcggacatacggtgagggcgctgcagaggaccgtgcctcccgcagttccggcgatcgtgtttctctccgggggacagagtgaggaagaggcgacggtgaatttgaacgcgatgaatcaactgaaggggaagaagccgtggtcgttgactttctcttatgggagggcgctgcagcagagcacgctgaaggctggggtggaaaggacgagaatatccccaaggcgcagagccgttgcttgtg

SEQ ID NO: 16180 - DNA, 272 bp, Glycine max
  Clone ID: 701044306H1
caatttccaattagggtttcgcttagagtaaccaattaccatgggagtcttcacctttgtcgtttcgcaaatccggcgccgaatggagcgccaagcaacattccggcgacatcgaggcctccgccgactccacctacgatctccaaaggaagctcgtgcaagccgctctcgccgttgattcctccggtggagtccagtcctccttctctcccgtgtctcctacctccgctgtgttccaggtgatagtgggtggtgctgtattcgttggaggt

SEQ ID NO: 16181 - DNA, 281 bp, Glycine max
  unsure (1)..(281): unsure at all n locations; Clone ID: 701044307H1
gnngctaccagcagcgcgangtcctagnnngggccagngnattcncaatggcgatcaggnttgancgaagccatttgcaagaggcttaatggnnccaaagcantggatgcttgacaaactgggtggtgcatttggctcctaagccctcatctggaccacacaaatccagggaatgcctgccactcatactcattttgcgaaaccggctgaagtatgctctgacataccgtgaagtcattgctattctgatgcagcgacatgtccttgttgatggcaaagtc

SEQ ID NO: 16182 - DNA, 266 bp, Glycine max
  unsure (1)..(266): unsure at all n locations; Clone ID: 701044309H1
aatgaatagcaataccaccggcgctgcagcaatgaacgaccagctctccaacaccacctccatcttcggcctccgcctatgggtggttctcggggtgtgcgtgggcgccgccatcgtcctcatcctcttcctcatctctgtctggctcgccttcaagcgctcttccaaaaccaaccctgtttccatccccgacgtctccaaagagatccaagaaatcaggctcgacacnaacccnattctccggncnttaccggannggnnntcnt

SEQ ID NO: 16183 - DNA, 262 bp, Glycine max
  unsure (1)..(262): unsure at all n locations; Clone ID: 701044310H1
aaaatagaaacacaacacaacacaacacagagaatgggtgagtgtaaacgctgctctctcacaattgccgccatagaacaaccttcttcaagccaacattccatttccaagaaaagaaaaaccaccgcttccttccagttacgctcttccgatacgcagtttcccgacactatcgtctcgccggaagcttccgtcagttctagnggnanggttttcgcgggtttttnccgnncgttnttntggnngnncnnccaataaggac

SEQ ID NO: 16184 - DNA, 261 bp, Glycine max
  unsure (1)..(261): unsure at all n locations; Clone ID: 701044311H1
acacgtcgtttttntctttttgttgcttcggagccaactcaacaacaacgccgtgcctaatccttaagaataacgaattacaacaaccaaccatgttgcattgtctcaacacttcctgttcggacatcacagtcttggaaagacaacgggaagcaaccatcaagtgccagaaccaccaaccaccctncttnngggacttnagngncgncttcccttcntctncntcttncccnnnttttnnnnnngggggggggagagggg

SEQ ID NO: 16185 - DNA, 263 bp, Glycine max
  Clone ID: 701044312H1
agcttttgaggttgttgcgagaaatgagaatgaagaagctgattttaatactcatagcagcatttaccttcgtttctgtggctagatctgcgtctgatcatttcttcgaaaacgatggcgtttcactggcagttgctgcaacgcccggacctccacctctcatggtccccctcactcttattcagggagctgcttccaaaggagccgtctgtttggatggaacattgcctggttaccactttcatcctggatttggatctggg

SEQ ID NO: 16186 - DNA, 264 bp, Glycine max
  unsure (1)..(264): unsure at all n locations; Clone ID: 701044314H1
acgaaacaggcgttgggttgagaatagaggggcgcgtaagaataaattagagggaaagggggggttgacacttccattttacgaaactcaattaacgtgaaatcaggtctacgaaaatcaccttttggacacctgatttcagttctttttcttctcaataattattattngtatttgtaaacacacactatcanggcaaatggggtgctcattctccgggttgaacgcactttanggntcngtgnntgtggangcnacnccccc

SEQ ID NO: 16187 - DNA, 264 bp, Glycine max
  unsure (1)..(264): unsure at all n locations; Clone ID: 701044315H1
gacgagcacaagatccagttacatactatgtnccctgcnttgtctactcgaataatatgtaactggntcttgtgctcgagtagacaaggcaggcacatagtatggctggaccttttgagttgggttcatcaaagaagaaaccaggngatggagtgaatgatttactcacttttaangctgaaaatntgcaaagcaacatgaaanttatttattacngccgaanntttttgnntanatggggggattntggcggnatttggggnc

SEQ ID NO: 16188 - DNA, 274 bp, Glycine max
  unsure (1)..(274): unsure at all n locations; Clone ID: 701044317H1
gaatcagcaccacattcacctgagctttttgtgaggattccaaagcatggcttcccttgcagcatccactgctgctgcttcccttggcatgtcagaaatgcttggaaaccccatcaacctcagtggtgccacaaggccagctccatctgcctctagccctgcctccttcaagactgtggctcttttctccaaaaagaaggntgcacctccaaaaaaagcggnanttncnnctcannncatgatgagtggncngtgnttcntnagacaaaaggnt

SEQ ID NO: 16189 - DNA, 273 bp, Glycine max
  unsure (1)..(273): unsure at all n locations; Clone ID: 701044318H1
caaagaagacccgataaacaaaaaacgagctctgaactctgaactctgaactatagctactctacccattacattacacacttagctcaacaacaaccatatttccaacggtgcatggcaatggtgatctcttctgttcatgccacactatttgccagggcctctttcttttgccaaagtagtggcctangaagctttngatcgtgtttacctttctcatcttcagctgcttctgtctcctctcacaatctttcacggaagaaatggaggcag

SEQ ID NO: 16190 - DNA, 272 bp, Glycine max
  Clone ID: 701044319H1
attttaaagcttcaaacatcttgttagactcggattataatgcaaaactttccgattttggcttggccaaagatggtcctgaaggagatgacacacacgtttcaactagagtcatgggcacacaaggctatgcggccccagaatacatcatgacaggacacttgacagcaatgagtgatgtgtacagttttggagtcgtgctcttggagcttctaacaggacgaaggtcagtggacaaagggcgcccacaaagagaacagacctcgtggatt

SEQ ID NO: 16191 - DNA, 270 bp, Glycine max
  Clone ID: 701044320H1
aaccagtcatctatagagattttaaagcttcaaacatcttgttagactcggattataatgcaaaactttccgattttggcttggccaaagatggtcctgaaggagatgacacacacgtttcaactagagtcatgggcacacaaggctatgcggccccagaatacatcatgacaggacacttgacagcaatgagtgatgtgtacagttttggagtcgtgctcttggagcttctaacaggacgaaggtcagtggacaaagggcgcccacaaa

SEQ ID NO: 16192 - DNA, 268 bp, Glycine max
  Clone ID: 701044321H1
aaaataatggcgggagctactccgtcctgtgttttctgtgcgattgccgccaaatccacctctagcaatactcttctttactccgacgataaggttgttgcttttcaggacattaatccatccgctttcaggcattacttggttgttcctgtggcgcacattcctactgttaaatatcttcagaggaaaactgacgactattctttggtgagtcacatgttagaggtggggaagacgttattaaatagagatgcacctcagtcccagc

SEQ ID NO: 16193 - DNA, 270 bp, Glycine max
  unsure (1)..(270): unsure at all n locations; Clone ID: 701044322H1
caattctccaccctctcattgaaaaaaaaaacaaccaaacaaaaaaaatcaatcattttatttnatttttctacgaaaatggttgatttacattggaaatcaaagatgcctagttccaaaacaccaaaactctctctctccgacaacaagtccttaccctctttgcaactacccttcngcaccacagatatctctcccgcngntccttccgttnngaacgcttacgactatatnnncgtnttcctcanctcaganngctttggnactccc

SEQ ID NO: 16194 - DNA, 265 bp, Glycine max
  unsure (1)..(265): unsure at all n locations; Clone ID: 701044324H1
tatcttgtagccctggacagaaaatctcatcaatcaaatttgctagctttggtactccagtaggttcttgtggaaacttccatgaaggaagctgccatgctcacatgtcttatgatgcctttgaaaggaattgtgttggacagaacttgtgcacagtagctgtgtcacctgaaaattttggaggagatccatgtccaaatgtcttgaagaaactctcagtggaagctatttgttcctgatcattttaacctcagaaaatagnggt

SEQ ID NO: 16195 - DNA, 240 bp, Glycine max
  unsure (1)..(240): unsure at all n locations; Clone ID: 701044325H1
ggttaggtttcgggagaaaaagcaatccactcagagagctagaagaattcaacaatgcctcgctatgatgataaatacggcaatacccgcctctatgtgggacacttgtcttcgaggactcgttcccgtgatctggagcgtgcctttagcagatatggaagagttcgaggtgtggatatgaagaatgatttcgcttttgttgattttagtgcncctcgagntgctgntnangaaaancnc

SEQ ID NO: 16196 - DNA, 260 bp, Glycine max
  Clone ID: 701044328H1
cagagaatggagttggacatccaatgtatggtcccttaagaattggcaaggcagaacctataaatcttcagtttggtttttatgggatcagtgcatggccaagtgatggtggcactagtcgtgctggaagtgttgacgagtctagagccgatggaactgatacaggtagtagatatgtatcctcttgctgtagctcaccaaggatgtcggatgttgccgcaaaggagctcaaggaagacttctcagtgcatggtagtgat

SEQ ID NO: 16197 - DNA, 264 bp, Glycine max
  unsure (1)..(264): unsure at all n locations; Clone ID: 701044331H1
cgcggcacttccttgaacaagaagaggaagtttcaatttgagtgataataaaagtataaaagctccttcattcccttcgcagttcgcagccaatcaaatccattgttttctcttctcctcctccttcaatggattctctgacttccatcaacggcgatttcngcttcgcggcggcaccgatcgcagattcgcgttttcgngccaagcctccttcnancagcntcacacgcngatanacatgncggggcacggccatnatggggg

SEQ ID NO: 16198 - DNA, 276 bp, Glycine max
  unsure (1)..(276): unsure at all n locations; Clone ID: 701044333H1
tttcttcttcaacgtcctcttacgagcagatcccaattctccttcccagtttcaaaccctaattccctcattcccatggcctcagaagagcccactgtngcggtggaacccgctcccgaacctgccaccgccgagcctcccccggaggagaaggaggagcccaaacctgaagccaaggctaagaaaaccaaggaacccaaacctaaaaaggtttccagaccangcaaccctcccantctncttnttaggggggggttntaaaannccttttnntng

SEQ ID NO: 16199 - DNA, 272 bp, Glycine max
  Clone ID: 701044334H1
acgctttctattcctttcattgtttcttttctcttcgttctgaaatttcgtttctctctccaacgctacaatgtcggaagctaagacccaaattgaatccataaggaagtgggtcgtcgagcacaagctccgtactgttgggtgtctgtggctcagtggtatttcgggttcaatcgcttacaattggtctcgacccaatatgaaaactagtgttaagatcattcacgcaaggttgcatgcacaggctcttacgctgggagcattagccggag

SEQ ID NO: 16200 - DNA, 269 bp, Glycine max
  unsure (1)..(269): unsure at all n locations; Clone ID: 701044335H1
ggtcccacgccgtgttgaagtttttcaaaatagaaatgttttgccgcctgattcagtcatatcagctggttctgtgaattcttcatgtactgcaggtggagggcagttgtatatgtggggaaaattaaagaacactggtgatgactggatgtatccgaagcctctaatggatttaagtggttggnatctacgatgcatggattcaggcaatatgcaccattttgttggggctgattcctcttgcataagttggggacttgctcagaatg

SEQ ID NO: 16201 - DNA, 239 bp, Glycine max
  unsure (1)..(239): unsure at all n locations; Clone ID: 701044336H1
gatagatagggcatancattcatcaccaacancggctcttctaggcttaatannttttgctgctttgacccttttcttggtcctaacaactgtgcctcgtcaagcacacgcttcaagccgtggcaacttaggcagaaacatcaacccttcagtgtatggcatatgtgcctcttcggtcattgtgcatggatacaagtgtcaagaacacgaggttacaactgatgatggttacattctga

SEQ ID NO: 16202 - DNA, 266 bp, Glycine max
  Clone ID: 701044337H1
cgtttccctttcattttccctcactttctcgctcgccaaacgcccctctctctcctccaatggccgaccagctcaccgacgaccagatcgccgagttcaaggaggccttcagcctcttcgacaaggacggcgatggttgtattactactaaggaacttgggactgtgatgcggtcactagggcaaaacccaactgaggcagaactgcaggatatgattaatgaggttgatgctgatggcaatggaaccatcgacttcccagagttc

SEQ ID NO: 16203 - DNA, 267 bp, Glycine max
  unsure (1)..(267): unsure at all n locations; Clone ID: 701044338H1
gccaaacccacgtcaagagcacttgggttcccgcagccaagcgccgcgaacgacaccaacaactcgctgcgttgcagcaacaacatcaacatcctaaacgacatcacagagacactactactactcaacttgcctccgctccacaacccatcatagggttagagctgggacaattcccacctgaagtgagcacttcggcggtgtttcggtgtgtganagtgagcgcagggancgcttnagatgaacngtgggggtatcanncctntg

SEQ ID NO: 16204 - DNA, 267 bp, Glycine max
  Clone ID: 701044339H1
aattaacctcactcaaactcgggatcacagaaaccaacaacagttcttgcactgaggtttcacgatgttgctggaacttgcacttggtttgtttgtgttagctttgtttctgcacttgcgtcccacaccaagtgcaaaatcaaaagcacttcgccacctcccaaaccctccaagcccaaagcctcgtcttcccttcattggccaccttcacctcttaaaagataaacttctccactatgcactcatcgatctctccaaaaagcatgg

SEQ ID NO: 16205 - DNA, 220 bp, Glycine max
  Clone ID: 701044340H1
tgaaggacgccggacaagagccacaaggcgaatgcaaagctgtcgccggagacgcggaaggatcggaaatcggcgacggggctgagtggatcgccgaagaagggaggccacggcgggaagttcacgtggatcggcaacggctacgagaacgtcgagatggagcacggtgctatggacgccaaggacccgaacttcgaggatccagcggagatcgccgccg

SEQ ID NO: 16206 - DNA, 169 bp, Glycine max
  Clone ID: 701044341H1
cagaaaatcaaagagaaaagaaaagaaaagctaataatctctttgcaattcaaaccgagagagagagcaaaaaaaaagaaaaagaaaaagaaacttctctgtggagaaaacctttgtgttctcttcagcacttcaacgttgacgctttctgaagaatcacaaaggctcg

SEQ ID NO: 16207 - DNA, 248 bp, Glycine max
  unsure (1)..(248): unsure at all n locations; Clone ID: 701044342H1
gatgatgtcaacttggaagaatttgttatgactaaagacgaattctccggagctgatataaaggcaatatgtactgaagctggtttacttgctctacgagaacgtcgaatgaaggtgactcatgccgactttaagaaggccaaggataaagtgatgtttaagaagaaagaaggggtgcctnangggctgtatttgtnaaaaactccccntntnttnnggccccccctntttttaaaaccnannttggg

SEQ ID NO: 16208 - DNA, 257 bp, Glycine max
  unsure (1)..(257): unsure at all n locations; Clone ID: 701044343H1
cagtggtgttagatctgtacctgcctagccattgatttggaaaagtccaagcttcaaagatgagtaagcttcagagtgatgctcttagagaagctatctcaggaatcatgactgattccaaggaaaagaacaggaaatttgtggagaccattgaactccaaattgggctgaaaaactatgatccccagaaggacaagcgttttaggggctctgtaaggtgcatcanttcccncgcncnaagtnntgntttgttggcc

SEQ ID NO: 16209 - DNA, 261 bp, Glycine max
  unsure (1)..(261): unsure at all n locations; Clone ID: 701044344H1
caagcactgggacttgaaaaaagaaccacttccagagaaacatgatttagacgaagggctaacaactgtaaaagaaaataaggatgagaaccacgcaaaagtatttactcttctccaggaggtaccctgttcctctgnatcttcagcaaatgagagttcaataacaatgtctgtgccactgggaaatccatgtgccttcaaggagattacaccttccgtganagaggtaatagcacgagatgaaaaaactgaatcttttgt

SEQ ID NO: 16210 - DNA, 260 bp, Glycine max
  Clone ID: 701044345H1
aaacaactatggaaggagaaaatggaaagaagctgaaaatattgtgcctccatggattcagaacaagtgggagttttcttaaaaagcaaatcagcaaatgggatccttctatattcactcaatttgatatggttttcccagatggtaaataccctgcaggagggaagtctggcatagaaggcatcttccctccaccttactttgagtggtttcaattcgaaaaggacttcacagtgtactttaacttggaagaatgcatc

SEQ ID NO: 16211 - DNA, 230 bp, Glycine max
  unsure (1)..(230): unsure at all n locations; Clone ID: 701044346H1
tcacactccaacaccgagcgagccatggcgaagccgangaaccgcactaacttagcttcgtgtttcgtggccaccgttttcttgatcttccttctcattgtggtcttcatcgtttacttcactgtgttcaagccgcagtaccccaaaatcgccgtgagcgccatccagatcccttcnntntcngggantaggggnanggtcaatttcacnttgcccagnggggngacaaa

SEQ ID NO: 16212 - DNA, 259 bp, Glycine max
  unsure (1)..(259): unsure at all n locations; Clone ID: 701044347H1
gtcttgtccctggtgaggaaagagcngcatgnaagtagcgaaagaccctaactcacaggcggattcagattcggaactggaantctacaccatcccaagctctacaagatggttcgcgtgggaagaaattcacgaaacggagagagcagcattcaaggaatacttcgacggaagctcnatatcgcgaccccgtngntatacanagagtaccganatttcatcancaacaagtanngcgcccngcnntccnaatgtcnnt

SEQ ID NO: 16213 - DNA, 238 bp, Glycine max
  unsure (1)..(238): unsure at all n locations; Clone ID: 701044348H1
gattctctctggcactcacttctagggttttctctgcgctataagcaatcatggcggatgaaacaccaaatgagatgaaggaggaggttccagaaattgttccttttgatcctaccnnnnnnnnnnnnnnnnnnnnnnttacaattgtagatcctgctgatgaacctgtggagaaattggctgagaagacagaaaacctctcagtttccgagggggttgagactgcatttactggttt

SEQ ID NO: 16214 - DNA, 272 bp, Glycine max
  unsure (1)..(272): unsure at all n locations; Clone ID: 701044349H1
aattaacctctccgcttccctccgatccattcactccctccctcttaaaacctccttgcggatcaaatgctcccaaacagatgggaatggaagtcctgcaaagaggacagtgcttcatgatctttatgagaaagaagggcagagtccatggtatgataatctctgcagacctgttacagaccttcttcctcttatagcaagnggtgtnagaggcgtcactagcaaccctgcgatttttcaganagctatctcatcatcgaatgcttacaatg

SEQ ID NO: 16215 - DNA, 268 bp, Glycine max
  Clone ID: 701044350H1
ctcgacgtcgagtcgtcccatggtgacatgttcacggaggaacagaatgagttgattgaatcagcggcggaaatgctttatggtctgattcatgccagatatgtgttgaccagcaaaggaatggctgccatgcttgacaaatacaagaactatgattttggcagatgcccaagagtttactgctctggacagccctgccttccagttggtcaatcagacattcctaggtcaagtactgtgaaaatatactgccctaggtgtgaagatc

SEQ ID NO: 16216 - DNA, 266 bp, Glycine max
  unsure (1)..(266): unsure at all n locations; Clone ID: 701044351H1
agctgatggtgaatgaaggaaacaacacagcacaaaggctttgcaattncactctcccgagtttctacctcatcacaatattgtgaagaagaaattgggagagtgttatcattgcatcgcggggaattgagggtagcggtccgaattacctttaaagtttaggtccttaaattttgtattttacttcttcttacgtatttgccaatgatttttttttctntgggttatttatttttatgttaatgttatgatggaagaagaatcat

SEQ ID NO: 16217 - DNA, 265 bp, Glycine max
  Clone ID: 701044352H1
tttcagagtagaaccttcactctgctatcccccatattcctgtgtttcctttgaaaaaaaaagaagaagaaaaaacatgtctaggttttttggattcttctttgtgggtcttacgttgatgttggtcggtgtggcaaatgctatggctaactcttccaacaaatttgatcaactcttccaaccaagttgggcttttgaccactttattcatgaaacggatcttctcaaactcaaacttgacaaattttccggggctggttttact

SEQ ID NO: 16218 - DNA, 261 bp, Glycine max
  Clone ID: 701044353H1
caggaatgtattggcctccatctccataagaagctatagctgctgcatgcattacttgtgatcaattgtatgcttttctactcttgtaactaatgcttcttctactttacttttatgtggtgctctatgaatgatatgtttttccttcaagtaatgttgggcttgctctgcctagcatatgcataactgagtgagattgttattgaccttaccttagatttcttacttaagtaggaaaaggaagggaagagaaggctcctt

SEQ ID NO: 16219 - DNA, 262 bp, Glycine max
  unsure (1)..(262): unsure at all n locations; Clone ID: 701044354H1
gcgactgcgcttcacgatgggtgcttacaagtatgtttcggagctatggcgcaagaagcagtctgatgttatgagattcttgcagcgggtgaggtgctgggagtaccgccagcaaccttctattgtccgtttgacaaggtctactcgcccagacaaggctcgccgcttgggtttcaaggctaagcagggttatgtgatttaccgtgttcgtgtacgaaggggtggccggaagagaccagttccaaaaggtattgtttntggt

SEQ ID NO: 16220 - DNA, 259 bp, Glycine max
  unsure (1)..(259): unsure at all n locations; Clone ID: 701044355H1
atgatccgtacactatgaatgcgtgggctgagaagcttcaagccanagntnctattgacgtttatggggacttgatggganctttcacnaaagtttggaattagttactgatctctctggtgcattgcttggaactcgatctgaaagatggtcagcatatgtggtagatggaaaggttaaggctcttaatgttgaagaagctccatctgatgttaaagtttctggtgcagataccgttttgggacagatttgaatttct

SEQ ID NO: 16221 - DNA, 261 bp, Glycine max
  unsure (1)..(261): unsure at all n locations; Clone ID: 701044356H1
caggcaggcacaaagggcagaaggcccagcaaccatccttgccattggaactgcaaacccaccaaaccgtgttgatcagagcacctatcctgattactacttcagaatcaccaacagtgaccacatgaccgagctcaaagagaaatttcagcgcatgtgtgacaagtctatgatcaagacgagatatatgtacctaaacgaagagatcttgaaagagantccaaacatgtgtgttanatggcnctccttgggatgnnngga

SEQ ID NO: 16222 - DNA, 256 bp, Glycine max
  unsure (1)..(256): unsure at all n locations; Clone ID: 701044357H1
ggcgggagcagcctcgtataaagcggccaccatcgcctgtagtgctttgtgttccacgtgcacctcgttccncccccaccatcccctgtgagtgactccaggaaacacaggggttttcccactgttagatctggtagttccagccctaggcactggggaatgcgaggctggtatcatgatgggagtantttngaggaatctntnnaagaatgggggntnntgtngtagtgtnggaaaanaaaaatttttggggggg

SEQ ID NO: 16223 - DNA, 253 bp, Glycine max
  unsure (1)..(253): unsure at all n locations; Clone ID: 701044358H1
agagatccatcgatcaattaatttccaatggccgatcagctcaccgacgaacagatctctgagttcaaggaagcctttagcctcttcgacaaggacggcgatggttgtattaccaccaaggaacttgggactgtgatgcggtcgcttgggcagaacccaactgaggctgagctgcaggacatgataaatgaggttgatgctgatgggaatggtaccattgatttcccagattcctcaatctcanggngngnag

SEQ ID NO: 16224 - DNA, 254 bp, Glycine max
  unsure (1)..(254): unsure at all n locations; Clone ID: 701044359H1
caagccccactcaaccaccacacctctcctcgttcacgctacccctttctgctcttcttctacctttcaagttttaaaagtataaagatggcagagacattcctatttacctcagagtcggtgaacgagggacaccctgacaagctctgcgaccaaatctccgatgctgtcctcgacgcttgcctcgagcaggacccagacagcaaagttgcctgcgaaactgcaccaaaaccaatgggtcangntctnagaaa

SEQ ID NO: 16225 - DNA, 164 bp, Glycine max
  Clone ID: 701044360H1
caatgtatgatgttgagtgtttacttacccttgagttgcttttggagaaaaagtctgtgttgcgatcaaccagaaatgttaaaataaaccaagtgtgacaacctatttccaataatttcataaaatatgagttttatgtgctaataaagttgtatatggattgg

SEQ ID NO: 16226 - DNA, 258 bp, Glycine max
  unsure (1)..(258): unsure at all n locations; Clone ID: 701044361H1
acttaattgccttaaggaacgttcgagaccacagaggtttctctagtcttcttctgtggagagcttgttttctcttgttcattcatctcacttccaattaaggaacaagctttccaccaatttgaatcaccaatggctcgctctttctccaacctcaangttctctctgctcttgtcgccgacggattctccaacactctcacnaggcgtgggtacgcagtagcgacacaangcgcaacaagnggnggagcncccncc

SEQ ID NO: 16227 - DNA, 259 bp, Glycine max
  unsure (1)..(259): unsure at all n locations; Clone ID: 701044362H1
gccaagatccaggacaaggagggaatccccccagaccagcaacgtctcatcttcgccggaaagcaacttgaggacgggcgcaccctcgccgactacaacatccagaaggaatcaacccttcacctcgtcctccgtctccgtggtggcatgcagatcttcgttaagaccctcaccggcaagactataaccctagaagtcgaganctccgacaccatcgacaacgtcaaggctaagatcnaggnganggncccccnccnnc

SEQ ID NO: 16228 - DNA, 257 bp, Glycine max
  unsure (1)..(257): unsure at all n locations; Clone ID: 701044363H1
tggttctggtggtactatactgtttgnnggtgatttgcattggtggactactgatgctgagcttgaaactgagcttagtaagtatgggcctgttaaggaggtgaagtttttcgatgagaaggcgagtgcggaagtcgaaggggtattgtcaggctgagtctnntgacgcntctgcngccactgcttgtaaggaagggatgaatgggcatgtttttaatgggangccgtgtnttgtngcgttngcntcnccaaaaana

SEQ ID NO: 16229 - DNA, 221 bp, Glycine max
  unsure (1)..(221): unsure at all n locations; Clone ID: 701044364H1
cactgatanaaaagaaaattcaccagtgaacaacgaaggatagaagaaaaaaaagcttcagtgaaagaaaatggcgttgtacctggacgaagaagagatttggaagtgcccgaagcatccatcgaagcgaagaagaagcggaatttgccatatttgccttcgcgaccgtctcgtaactctttgccctgactgtgctaacgtgcgcncctgttcctgctacg

SEQ ID NO: 16230 - DNA, 270 bp, Glycine max
  unsure (1)..(270): unsure at all n locations; Clone ID: 701044365H1
cgaaagggtctgtgtcttcactcattcttctattctattccatcatcaatggagaacaccgagggatccggatctgcgacgaacggggtgctggctccgccgcgcaaggtggcattgataaccggaattaccggacaagacggttcgtacctgacggaattcctcctggacaaggggtacgaggtgcacggcctgatccgccgctcgtcgaacttcaacacgcagcgnattcgaccacatatacgtggatccccacaacgcccacaaggg

SEQ ID NO: 16231 - DNA, 262 bp, Glycine max
  unsure (1)..(262): unsure at all n locations; Clone ID: 701044366H1
tggtcttttgttgaaagacctggtcttctcctactaggtgcatnttttattgctcagttggtggcaacttttatagcagtgtatgctaactggggctttgcaagaataaagggaatgggatggggttgggctggtgtaatctggctgtacagtgtggtaacctatatccctcttgatttactcaaatttgctatccgctatattctaagtgngaaggcttgggataatctttggagaacaagactgccttcactacaaagaa

SEQ ID NO: 16232 - DNA, 263 bp, Glycine max
  unsure (1)..(263): unsure at all n locations; Clone ID: 701044367H1
cgacggtggagctctggtggatgacgtgcnttctctaacaactgctcttagaaaagagagagagaatggcggtggagtacacatgctgctcaacggcgttcttcgttcacatagtggtaatcgtgctgctggtgctgttcgcgggcctcatgtcgggcctcaccttgggcctcatgtcgctcagcctcgttgatcttgaggttctcgctaagtccggcactcctcaggatcgtaaacacgctgagaagatattaccagntgtc

SEQ ID NO: 16233 - DNA, 262 bp, Glycine max
  Clone ID: 701044368H1
attcttctcactcttcagatctctctcccttccttccatcccaaccacaaggttgctgagaagacataaaaaatggtgaagatttgctgcattggagctggctatgttggtggcccaaccatggctgtaattgccttgaagtgtcctgagatcgaggtggtcgtggtggacattgctgcaccgcgaatcaacgcgtggaacagcgaccacctcccgatatatgagcctggccttgatgatgtggtgaagcagtgcaggggga

SEQ ID NO: 16234 - DNA, 262 bp, Glycine max
  Clone ID: 701044369H1
ctaatcaatcgcaagttcgaatccctaatttcaacctgttcttcctacaacgtgcgtcgtgagcgagttaaggttaagcagggaaagacaaagcgattatggacggttcacgacggctactaggacagtctgtaggggttttcaatgaagggatttgtttagttttatctcgctggtcggctcttcgatcggctgttgagaatgaatggggcggccgtgagtcccgccttaaagccgatcaacttgccggtgacattcttac

SEQ ID NO: 16235 - DNA, 261 bp, Glycine max
  unsure (1)..(261): unsure at all n locations; Clone ID: 701044370H1
gcgggaaaagagaaaaaacagagggttttgtttctcttttgcagttgcactcttgcgttgcaggcaggggcatctgtttcccgttctgctccgagcgatcaagtgagtgagtgagtgagtgtcatatatatatacatagtgcgttcgagaaatgcagcagcacctgatgcagatgcagcccatgatggctgcctactaccccaacaangtcaccactgatcacattcaacagtacctggatgagaacaagtccttgattct

SEQ ID NO: 16236 - DNA, 262 bp, Glycine max
  unsure (1)..(262): unsure at all n locations; Clone ID: 701044371H1
cttctctctgagaacaacaccccacactcctctctctctctccgcntccttctcttctncacacctccatggcccacacttcccttccctccgccgatgccggcatggacgctgtccagcgccgtctcatgttcgaagacgagggatggcactcccgtctaaggcagggaaacgcttacatttaccttgtctcaaggagacgtgtgagactcaaatctgcgacctggcagatgcaagaccctgtcttgttctatttgancaa

SEQ ID NO: 16237 - DNA, 259 bp, Glycine max
  Clone ID: 701044372H1
ctttgttctccgctaggttcgtcattcacttgcattgcacgccgccacctctgcggcttcgctgtagtcaatgaaccagaggtccctctgtaaaaagggtttattgtgttttggtgacacattgaagctgagatagaaagagggatggagggttcgcgacggctacggggacattctataggagttttcagtgaagggattggtttagttttatttcgctggtcgactcttctaacggctgttgagaatgaatggggtg

SEQ ID NO: 16238 - DNA, 253 bp, Glycine max
  unsure (1)..(253): unsure at all n locations; Clone ID: 701044373H1
ctcgagtagtgttaagatttctagggaagagtctgctagaaccgtagattcgtcggatgaaaaatgtaaagtggttgagtcggagcttgaggacctttttaggctaaggattgaagctgaggttgaatgcctagccatctcaaaggtaatgcagaacttgaaggatggggcagttttccatcagacattattggaagaacaagagaaactgtccaaaagtcangtggggttccaaaattttttgnagnagnag

SEQ ID NO: 16239 - DNA, 255 bp, Glycine max
  unsure (1)..(255): unsure at all n locations; Clone ID: 701044374H1
aatgaattcatttgtttatcttcttctcaatgactaacctagactgaccgcatgtggaagatgaacctccttttcttgtgtatgatccaaatttagaagtacggaaaattaccattcacatcaaattttcctatcataggatccattttgaaatttttttaagagtagtagctatatatttncattggaatatggtgccaggttcccanagtggnggnaaccnncccngggggggnaagggntcnntnncnctnc

SEQ ID NO: 16240 - DNA, 254 bp, Glycine max
  unsure (1)..(254): unsure at all n locations; Clone ID: 701044375H1
atgggatttgctctcaatctctccctctcaccctttaccttctttccattcgcaccctttccttcaaaccctaagtnccccatttcctcctccttcttcacccccaaaccccattcangcttctncaaannctccaaaanccccgcaaggtgtgtcttcacggcctcgccaatcccctcnaaaatcccanangngggtctnaatctngganncngggcntntttggggncngaaagtntcnagggggggggggg

SEQ ID NO: 16241 - DNA, 254 bp, Glycine max
  Clone ID: 701044376H1
cttaaaaatattcagtgaagatcaacctcaatggcatctcttggcgtgcgaccagttcttccccctccattaacttccatctccgacccacctcctcttttcgatggcaccaccaggttgtacatcagttattcttgcccctatgcacaacgtgtgtggatcgctaggaactacaaggggctacaagataagatcaatttggtccctattaaccttcaagacaggccagcttggtataaggagaaagtctaccc

SEQ ID NO: 16242 - DNA, 256 bp, Glycine max
  unsure (1)..(256): unsure at all n locations; Clone ID: 701044377H1
aattttcattttgtattattttggtcatgcgatttcttccagttgggaaagagattcgagagaaattctctggtgcagttgaagcgttctcccggaggaaccctgcaaatgctagtccttgtggtgatcacaccaaacacaggagttttgaggatnntaccagtgcaaaaggatttgcactatgcgcaacacaattccactcgatatggcagcagttcaagaagagccatgatctcatcaaacaagccaatatcct

SEQ ID NO: 16243 - DNA, 256 bp, Glycine max
  unsure (1)..(256): unsure at all n locations; Clone ID: 701044378H1
aagtaaagagggttagagaaataaaaagagaaagccgacagcacatagatagagagaggaaaacgacttaatattctttttccttgagacctgaaggggctaaggaaaattagaaggacacacaagtataaaggcggtgaaataaaagagaaagacaagaagacgacatgggaagnccaccttgttgtgacaaagaaggggtcaaganagggccttggactccngaagangnctcntntttgtgtctatattcngg

SEQ ID NO: 16244 - DNA, 254 bp, Glycine max
  unsure (1)..(254): unsure at all n locations; Clone ID: 701044379H1
acgttattctctctccgagcttcactctcttttcgcctctgctaaagggagaaaaatggggttctcctcctttctgggtcgtgttctctttgcctccctcttcatcctctccgcatggcagatgtttaatgaatttgatgccaatggtggacccatctcgaaagagttgattcccaaactcagtgtggtgaagaataatttatcctngggttgggggaagcnntancaganagagatgcccggcaannnatttt

SEQ ID NO: 16245 - DNA, 265 bp, Glycine max
  unsure (1)..(265): unsure at all n locations; Clone ID: 701044381H1
gaaaatggcgggtacggtttcgacttgtttcttcttcgtgtttcttctttctctccttcttccttttcagatctccgctgaggaatcctcggagaaggagttcgtactcacattggatcactctaactttcacgacactgtcagcaagcacgatttcatcgtcgtcgagttctacgccccatggtgtggtcactgtaagaagcttgctccggagtatnagaaagctgcttctatcttgagtagtcatgatcctcctattgtttng

SEQ ID NO: 16246 - DNA, 261 bp, Glycine max
  Clone ID: 701044382H1
tcgtttctggtccaaattcattgatgacaagattgtgggtgctgcatggaatgctgttttcacggttgatgagaaagagcgtgagaagaatgttgtagaaacatatgaggctctgcagtttcttgagaatgagatcaaggacaagaaattctttggaggagaagaggttgggttggtagatatagctggtgtctacatagcattttgggtccctttgattcaagaaattgcagggttggagctattaagcagtgagaaatt

SEQ ID NO: 16247 - DNA, 260 bp, Glycine max
  Clone ID: 701044383H1
gaaagagagtggcaaatcttctgttctgcttgacgttaagccttgggatgatgaaacagacatgaagaagctggaagaggctgttcgcagtgttgagatgcctggtctattgtggggagcatccaaactggttcctgttggttatgggatcaagaagttgcagatcatgttaactattgtcgatgaccttgtatctgtggacacccttgttgaggagactctcacagttgagcccatcaatgagtatgtccaaagctgtg

SEQ ID NO: 16248 - DNA, 259 bp, Glycine max
  unsure (1)..(259): unsure at all n locations; Clone ID: 701044384H1
cggaaccgaaacccttcgccgcaaaaaatgcctcccaaatctgccaaatccaaggaagctccagctgagcgacccatcctcggtcgattctcttctcacctcaaaattggcattgttggcttgccaaatgttggaaagtctactctctttaatactctcaccaagttggcaatacctgctgagaacttccccttttgcaccattgagcctaatgaggcacgggtcaatgtacccgatgaacggttcgagtggctttncc

SEQ ID NO: 16249 - DNA, 258 bp, Glycine max
  unsure (1)..(258): unsure at all n locations; Clone ID: 701044385H1
gagaaattgagaagatgggaagaaaggccaactgtgacaatcaatatgctatgaacagaggtccttggtctgctgaagaagacaaaattcttatgaactacgttcaagtccatggagaaggaaaatggagagagctttccaaaagagcaggcttgaaaagatgtgggaagagttgtagactccgatggctgaattatctcaagccagatatcaagagaggaaacatttcttcggatgaagaagatctcattatnagac

SEQ ID NO: 16250 - DNA, 257 bp, Glycine max
  unsure (1)..(257): unsure at all n locations; Clone ID: 701044386H1
ctttctgtgttgttcacttgtttggtctctttctttcaaccttaacccttccaaaccaacacatatanaaatcaaccctctcttcttcttctctctccgcgggttgagttgaacttcaagaacctcataaaannnnnnnnnnnnnnnnnnnnnnnnnnnnnntcaaatccgaaaccatttccgctctaatttccaagagcaaaccctaatccgctctctctgtatgatactagatttcccctcctcaaaggcgtagt

SEQ ID NO: 16251 - DNA, 257 bp, Glycine max
  unsure (1)..(257): unsure at all n locations; Clone ID: 701044387H1
aaaaatattattaagatgatcaacattattggagcacttgttctactctttgcatttctcttcctcagttgtgtgtatgcacaagacacaacaacccttgtgcctgcaatcataacttttggtgattctgctgtggatgtagggaacaatgactatcttcccacccttttcaaggctgattaccctccttatgggagggactttgttaaccaccaacctactgggaggttttaaaagggnaannggnnnttttccng

SEQ ID NO: 16252 - DNA, 257 bp, Glycine max
  Clone ID: 701044388H1
gttgtgacaaatgattcgatgaagtctgataaaagtgaggacacatcaaaggaacgaacctcaaagaagagcaagaagaaggaaaaggaacctgtggaaaagcctccgagcaagtcacaaattaagaaaaggcttttggttttacctctggaaacatccatcattgctattgtgttgcttgtgttgctaggtgccttctatgtggttcacagtgtatgggcagcagcagaagcttattcagccccttctattgttct

SEQ ID NO: 16253 - DNA, 252 bp, Glycine max
  unsure (1)..(252): unsure at all n locations; Clone ID: 701044389H1
ctttctctcaatatcccattacatgaggcaactaacaaagaagaattagaatcctttcacaaactgaaagcagagaaacttgcagaaggaaaggaaataaatgccaatgagattgtgcgtccaagggtacctttagaaacttgccttgcgaatttctcagctcctgaggagatacatgatttttacagtacngctttgaagacnaagacaacancantgangnnggggggccnnattccggttnangggggg

SEQ ID NO: 16254 - DNA, 194 bp, Glycine max
  unsure (1)..(194): unsure at all n locations; Clone ID: 701044390H1
tggangaggtggatttggtggaggtggtggctttggagcnagtggtngttttggtggtggcggnggtgctggatttggtggcggagttggtggtggccactaggttgaatgttgatatgaatatggtatccacgagtcattatatncaaattgtncnactcccntctntttacgaaaananccngggantnttt

SEQ ID NO: 16255 - DNA, 251 bp, Glycine max
  unsure (1)..(251): unsure at all n locations; Clone ID: 701044391H1
cngggtatgcataccctgatacgtgattctcaaacaacgaaacatgactttgtattttattctgaccgtttgattcgtttggttgtagaacatggcctagggcatcttccatttacagaaaagcaagtaaccactccaactgcatcggtatacagtggtgtggatttctgcaagaggttgtgtggtgtctctatcatccggagtggggagagtatggaaaatgctctacgagcatgctgcaaaggtatcaa

SEQ ID NO: 16256 - DNA, 252 bp, Glycine max
  unsure (1)..(252): unsure at all n locations; Clone ID: 701044393H1
ataagctgctgtctattgcttttgaacagacccttgttgagcccaatatgctggttgttgatgttgagaaatttgtttcaccacagcaagagtcttggttcaaggtggatgagaaggaacctgttgcttatgcaaaagtagaagttattgaagcatctgacatgaagccatcagacctaaacggatnagcggctccttatgtgangggncaanngggtgtanacannntnaggacaaaaatnnggggncccc

SEQ ID NO: 16257 - DNA, 253 bp, Glycine max
  unsure (1)..(253): unsure at all n locations; Clone ID: 701044394H1
ctctagagaattatcatacccttcaagatgaaaccgtacctacgtccaatattcctattattccttatccttctcgaccaatccatttcggcgagtgctgctataaatattaatggtctgagaaacaaaattagagaagttctaaacaagcacccgagcatcaatcttccggcagataaactgangaaggtgaagagaccactgaaggcactggattatctgcttggcgaatgtaagggcnggccgcntaatt

SEQ ID NO: 16258 - DNA, 255 bp, Glycine max
  Clone ID: 701044395H1
cgagtatccactcaaatacttctctcaaaagtggtgctttgtgacactaattatgccattccattgtctctcttgtggttagttgtgcacaaattttgtatatttaaacaccaaaaaagagatcatgtgatcttaattattaagttacgttgattccatgcgttgcacacacaacttctatcgcaagatggttccattcgcatcttaactactggacttgtgacaatagtgctcctggacccaccctttatttct

SEQ ID NO: 16259 - DNA, 264 bp, Glycine max
  Clone ID: 701044396H1
cttgcttcccggagctctgaacttgaccgacgccattttcacatcaaaacgcttcaactagaaaaatggcgttcttgtggaacaaaactagtatcgcttcccattttcgatctcactctcagaagactgagggtttggcttcttttccgcgccgtcgattccacgtcgaacccggggctcgtgaaaaagctctcttggcagaagatgcaacgctgaaaccgttcaaatcatataagaagagtgtcaaacagctcagaaaaattg

SEQ ID NO: 16260 - DNA, 278 bp, Glycine max
  Clone ID: 701044401H1
atcatttcactcagccgctgcgaggcgaacagagagacccgaagccagatttcaagatgaagttcaacattgcgaatcccaccactggttgtcagaagaagctggagatcgatgatgacctgaagctacgagcattttgggacaagaggatctcacaagaggttgttggtgatgctctgggtgaggaattcaaaggctatgtcttcaaaattactggaggttgcgacaagcaaggatttccaatgaagcaaggagtgttgacccctggtcgtgttcgc

SEQ ID NO: 16261 - DNA, 274 bp, Glycine max
  Clone ID: 701044403H1
attacctttctctgagtccaagttccaacgaaatgtgaacagtgaaagaaacaaaaaaaacaccatgatgctgaaggcggcaccgcgtgcagtaatctactacctctcggagcacccggctatcgtggggttccggtggagccacgcccaatcatggggcgccacgtggtccttcctcttctcctcaattgcctcctacctcttcctctcagtcttcctatacttctctctttctctcctcttccgccgccgtcaaatccctctcggccccctt

SEQ ID NO: 16262 - DNA, 271 bp, Glycine max
  Clone ID: 701044404H1
cacactctcatagctgtagcggcgacactaagatcggagaaagaatggcgaaaacgacgtcgttgctgctctttacactgctcctcttcggaaccctagctctcatccaggcgaagaaatcgaaggaggatttgaaggaggtgacccacaaggtttactttgatgttgagattaatggaaaagaagcaggtcgtattgtaatgggtctttatgggaaggctgttccaaaaactgcagaaaacttccgagcactttgcacaggggaaaaggg

SEQ ID NO: 16263 - DNA, 269 bp, Glycine max
  unsure (1)..(269): unsure at all n locations; Clone ID: 701044405H1
catttctctcttctcacttccttgtcttcctctctctcaccctttgaaattctctncacttctattttagattctcaattcgttattgtttttggttcacttggttcatattcaagcccaattttggtgtctcacttattggttttccaattggagtgattaaaaagttgattttgggaaatgggtatgtgaagtttggttttttgatttctgggtcttgaaattgaggtaaaaaagttgtcaaattggagagaaaattcggggttttt

SEQ ID NO: 16264 - DNA, 267 bp, Glycine max
  Clone ID: 701044406H1
ggaagtctcttcttacttgaagaaggttggttacaacccagacaagattccctttgttcccatctctggttttgagggtgacaacatgattgagaggtccaccaaccttgactggtacaagggaccaactctccttgaggctcttgaccaaatcaatgagcccaagaggccctccgacaagcctctaaggcttccattgcaggatgtctacaagattggtggtattggtactgtgccagtgggacgtgtagagactggggttgtgaa

SEQ ID NO: 16265 - DNA, 267 bp, Glycine max
  unsure (1)..(267): unsure at all n locations; Clone ID: 701044407H1
ggcataatntngnctttttgtccactccacgancttngttattgcnggttggnnangattcctnccaatatnttaaantaatgcctgctctctgtgttttgatattctttctttaattcttatttnttaaaagtgaacgctgttaatcgatgcttctcgttggtctcacgtgtgtttcnactactccttattgtgatcttctttctcccttnagtttttattttctttttccaattgatggtgggtttgcaacactggtttgtataa

SEQ ID NO: 16266 - DNA, 270 bp, Glycine max
  unsure (1)..(270): unsure at all n locations; Clone ID: 701044408H1
taagcttcaatcacatacttcttctcctagatctagaacttgttgtgaactgaacaacatatatattctaagctctttgaacttatccttcattgatcagattcaggatcttttgtctcttaccctttgaaggaccctgccccttatagtgttgttgatttcagagaaatggaaaacatcaaagatccatcaatttaccgcaatccagtcatattgcagagcgaggacttaaccaagtatatctggaaactggcggtttanccctagaga

SEQ ID NO: 16267 - DNA, 270 bp, Glycine max
  unsure (1)..(270): unsure at all n locations; Clone ID: 701044409H1
ctaatgtctagttctgagagcacaaacgcgagaactagaacagcgtcatggttttctaccccattctttgttatcgttctcccggtggccgtggctgcgcttctctaccggctcgaaccattcaagccggttcttttgccggtccagctgggccggtccaccgtggcggttccggctcgtaacggccacatgcaagatggatcggaacgtgtgggtgagggacacttggagggcccggaagacttggcctacgacgctgcggnacgtgtt

SEQ ID NO: 16268 - DNA, 269 bp, Glycine max
  unsure (1)..(269): unsure at all n locations; Clone ID: 701044410H1
gttgatggcgtcacaagcaagcctcctccttcagaagcagctcaaagatctttgcaagaaccccgtcgatggcttttccgccggtttggtcgacgaaaccaacatttttgaatggagtgtgactataattggacctcccgatactctttatgaggggggatttttcaatgccattatgagctttccacccaactacccaatngtccacaatcagtggaatttacctcagagttatggcatcccaatgtgtatcctgatgggcgagtttg

SEQ ID NO: 16269 - DNA, 268 bp, Glycine max
  unsure (1)..(268): unsure at all n locations; Clone ID: 701044411H1
gcttcgtgaatcttagtgcatcaagatctctgtctctctgtctctctgcaatcgaaaatgagcaagggaccgggtctcttcaccgatatcggcaaaaaatccaaagatcttttgactaaggactacagctccgatcagaaactcaccgtttcctcctanagcgtctccggantgaccctnanttcaacatctgtgacgaaaggaggactctcaacaggggatntggaagcatgtacaagtntagaaccntgttatnggtgtaaactgg

SEQ ID NO: 16270 - DNA, 270 bp, Glycine max
  unsure (1)..(270): unsure at all n locations; Clone ID: 701044412H1
gcgacacgtcttcttcggatttcttctgccgccgccacgtgttcctctgctacaagaaccccgccgtgtggccgccgcgcattgaggctgccgagtttgatcgcctgccaaggttgctccacgccgccatcaatgccagaaagcctcatatcaagaaagagacctgcttaacaatatgtgaggggcatgatgggactgaaacatcaaatggagatgtattaatttttccagacatgatcngatatnggagnttanccctttggatgtgga

SEQ ID NO: 16271 - DNA, 272 bp, Glycine max
  unsure (1)..(272): unsure at all n locations; Clone ID: 701044413H1
atgccttgaaagagggaaaacagtggaaaaccattttaagaaattttgtgacagtaaatgatattcagaagctgacttttgcatcgaggtgcatattgaacaagtattcaattgatgagctgctaagtgagagtgacaggtcaacaatgctaagggttttgaattttcatcctcataaaagtgagaagtttggcattggaccacaggacattaaggttggatggcatccaaaatacaaggatagccggtgcttccatatataagactggtng

SEQ ID NO: 16272 - DNA, 271 bp, Glycine max
  Clone ID: 701044414H1
cagccaatattaaaggggatgttgactctgattgcttggattatgaaattttgtgggaggacctgacaatgggagaaccaattgggcaaggttcttgtggaactgtatatcatgctcagtggtatggatcggatgttgctgtcaaggttttctcaaagcatgaatacacagatgatacaatactgtccttcaaacaagaggtgtctgtcatgaaaagacttcgtcatccaaacattattctctttatgggggctgtgacttcacctcaaca

SEQ ID NO: 16273 - DNA, 275 bp, Glycine max
  Clone ID: 701044415H1
cgttaccatcgccctctcactagcaacattcacactctgcggagtcccaaagcaagcactaatctaacaaacgcaatttaaaaaccgcaacaaacttttctctctttcgttcacacacttattctctggcttctttttcttcttccattttcgcttctcgtagcattttcggaacactcatggcttccattgccggatccagctgcgtcgctctccgaaccgccaatttcgcctcctccgataaccggaaaatcggtcagatccggcaatggtct

SEQ ID NO: 16274 - DNA, 278 bp, Glycine max
  unsure (1)..(278): unsure at all n locations; Clone ID: 701044416H1
aagaatttccattgcatgcaaagcaaatacgcattatattactagttttaatttgttttgtcgtttgcttctttctttgattaatgatgactagctttaaggttgcatgtgtggttgcgatgatgtgcatggttgtngccatgagtgttacacccatgggcacaggccgcaatcacgtgcgggcaggtcgccggcgacgtgtctccgtgcctcagttatcttcgaagcggcggaaaaccgtcggacgcctgctgcaacggatgaaagtcgctcagcgg

SEQ ID NO: 16275 - DNA, 272 bp, Glycine max
  unsure (1)..(272): unsure at all n locations; Clone ID: 701044417H1
atcaaagtcattcacctaaaccctatggccgacgaagccaaagccaaaggcaacgcagccttctcctccggcgactaccccgccgcaattcaccanttctccgacgccatcgccttggcccccaccaaccacgtcctctattccaatcgatccgccgnatacgcttctctccaaaactacaccgatgcttagccgatgctaagaagaccgttganctcangcccnanggtcaangggnnaaagcntttgggggtngngaattgggttttnna

SEQ ID NO: 16276 - DNA, 148 bp, Glycine max
  unsure (1)..(148): unsure at all n locations; Clone ID: 701044418H1
acatagtacgctatgcaaagatagccctacagctacagcagaaaacggttcgtgatgtagcactgagagtcaggtggatgaataagaaagaaaatagcnagagaaggaaggatgatcataatttaactcggaaaagtaaagataaaag

SEQ ID NO: 16277 - DNA, 269 bp, Glycine max
  Clone ID: 701044419H1
cctcactttctcgctcgccaaacgcccctctctctcctccaatggccgaccagctcaccgacgaccagatcgccgagttcaaggaggccttcagcctcttcgacaaggacggcgatggttgtattactactaaggaacttgggactgtgatgcggtcactagggcaaaacccaactgaggcagaactgcaggatatgattaatgaggttgatgctgatggcaatggaaccatcgacttcccagagttcctcaacctgatggctcgcaag

SEQ ID NO: 16278 - DNA, 269 bp, Glycine max
  unsure (1)..(269): unsure at all n locations; Clone ID: 701044420H1
ctttgaataactcaggaactcccaactctccctccgtcactcgcttcacctcaaacccccaaaccttcatccgtcgatgcccactggttggctctgccatccgagcctcaccgtcgtcgccgccacaaccacatctccaccttcctccaatccancgcctccaacttcgcctctctcttcaacnccccaaancctccctntctagcatncctcacccgcnctcctncttctncntccctctcttcttcgngccgncgntctctnccnca

SEQ ID NO: 16279 - DNA, 266 bp, Glycine max
  Clone ID: 701044421H1
gcatggtggtattggattctatacctgtctttcccaattactggactatttatcatctggcaaggtcccctacatattggataacaattttgcttataattattgtggcattgctcccacgctttacttgcaaagttgtttatcaaattttttggccttcggatattcagatagccagagaagctaagttaatgagaaaatggcaagataatttgcagccaaggcaacaagtttccagttaacttgtgttactgttccgcgtctta

SEQ ID NO: 16280 - DNA, 266 bp, Glycine max
  unsure (1)..(266): unsure at all n locations; Clone ID: 701044422H1
atggcgacggtggagctctggtggatgacgtgcnttctctaacaactgctcttagaaaagagagagagaatggcggtggagtacacatgctgctcaacggcgttcttcgttcacatagtggtaatcgtgctgctggtgctgttcgcgggcctcatgtcgggcctcaccttgggcctcatgtcgctcagcctcgttgatcttgaggttctcgctaagtccggcactcctcaggatcgtaaacacgctgagaagatattaccagttgt

SEQ ID NO: 16281 - DNA, 268 bp, Glycine max
  unsure (1)..(268): unsure at all n locations; Clone ID: 701044423H1
gtttcgctgtctctcccatcctttcgcattctcaatacccttnnnatttgtgaaaggaaagcaaacatggttgancangtccaanancctacaatcatggnccaangttnctggtnagcncccatctncgnnctgaanctttnatctggtattagaagtnatgatggagcctaccgccacccagctatgtaccaaagaccctcttttgggaattactcgaaatgctgcatgtagtttntgtgatgcccacatgnnaagctaccatgga

SEQ ID NO: 16282 - DNA, 265 bp, Glycine max
  Clone ID: 701044424H1
gccatctcatggaggcaatatgggccatgcacttcaggtataaagatttatataagtaatatagatggccgtttctataattatattgtaataactcatattcttaatgtgacaatttctataattattgaaactaaatgttatttcagggtcaccgggcctacgcaggacacaagaaatatataaccccaaacaaaagacagatgctcccctattttctggattcttcctccccgaagaagagttcaataggatatcaggattg

SEQ ID NO: 16283 - DNA, 266 bp, Glycine max
  unsure (1)..(266): unsure at all n locations; Clone ID: 701044425H1
taaaagataaagtgatggttggcatcttccatgggcaaatccagctccccagaagcgtggggttggttggcattcattgaatatctgcttcgtgtgaggcattttctcttatggagattgtacagaggtacttgaattagagggtggaggtaaacaggagccacacttttgggattagagtttcnnnnnnnnnnnnnnnnnnnnnnnnnnnnnntcctttngggtggggggtaacccccttgtttanggcnactgctnnaaaaang

SEQ ID NO: 16284 - DNA, 270 bp, Glycine max
  unsure (1)..(270): unsure at all n locations; Clone ID: 701044426H1
ggaaaaaaagacnaaagaaaatccactactactctcactaagtcactatagtgaaccgtggctatgctactactaaacctggtttgagtggtttcctcatcttctccctcttgaatcagcgtcactttctctctagcataattttgtgcctaccttcttctgaaatgaaaantaaatataattaatattattatattgatcgatgnaaacngactgacatatttaggcgtagntcggcatngtcgtgnagngtnnanccccgnaaaaggg

SEQ ID NO: 16285 - DNA, 146 bp, Glycine max
  unsure (1)..(146): unsure at all n locations; Clone ID: 701044427H1
attgtttgttgttgtaactcgttcttcttcttttgttgttctgtgtttgtgtttgttttttctctcacctgaaaatgtcttgctgcggtggtaactgtggttgcggaagctcctgcaagtgcggnaacggctgcggaggctgcaag

SEQ ID NO: 16286 - DNA, 274 bp, Glycine max
  unsure (1)..(274): unsure at all n locations; Clone ID: 701044428H1
agcttgggagatctgaacaaactcatgcatctggaaattatgggactcctcaaggtaatggtgggcaagttggttatggtgttggctatgggggtgctcagtctcgacaagcccaacagcagtaattttggtagatgaatctcttgctggatcttaaacttcaacttgaggatccctggcttttaaaagtcttaaatcatgaggtcacaatgaattcttccagcagccatgggagtggctccaaggntcaatgtcaattacccnatnggggctg

SEQ ID NO: 16287 - DNA, 274 bp, Glycine max
  unsure (1)..(274): unsure at all n locations; Clone ID: 701044429H1
aattacccttcccaattttcaccaaaacctaatactcccacaccaatcttcgatcatggaccccgattcacaacctcaacaactcgaagagagaacagaggagcaagaactgaagtacctggaattcgtgcaattcgcgaccatacaggctctgatgcgctgcgtcatcctctactcatacgccaaggagcgcgcgggtctctgaagcccggtgtcgacaccgtgggaggaggccgtgaagaccgtcgtgggctccggtctacgataggttncc

SEQ ID NO: 16288 - DNA, 271 bp, Glycine max
  Clone ID: 701044430H1
gtgctcctaacattagattagaccctctaccatgttcctctgcctctgaagtctgaacctccccaggaatggcaatggagaatacaacattgtttgtgttgctgctgaatgtgcttcttgtgttcagtgcctctcttgtgtccgcagagcaacaaagtcaagcctcagctgtaggggacccaggaatgcaaagagatggtttaagggtggcctttgaagcttggaacttctgcaatgaagttggtcaagaagctcctcacatgggtagtcc

SEQ ID NO: 16289 - DNA, 273 bp, Glycine max
  Clone ID: 701044431H1
gatttcctcatgaagacacaaatacaatcactgatgtccatcatactactgatgtaacatcagtcgttcatgtgttccgtagtggttttcgtgctgctctcagggatctgcagggattccatatattcctactcacactgcatcaaaaactagataatttgttaagatcatttatgaatgctataggcaaaatatcatcaggggagtctgaaaaagaggatgcagtggttcctggctcagcttcacccactgtttttggtagttgtccctctc

SEQ ID NO: 16290 - DNA, 279 bp, Glycine max
  unsure (1)..(279): unsure at all n locations; Clone ID: 701044432H1
attttcttcatccttctntgttctcctagaacttgattacttgaacattccctatgacagatgaggtggttcttctggatttctggccaagtccatttgggatgagggttcaggattgtacttgctgaaaagggtatcgaatatgagtacaaagaagaggacttgaggaacaagagtcctcttctcttacaaatgaacccggttcacaagaagattccggttctcatccacaatggccaaacccatttccgaatccctcattgctgttcagtacattga

SEQ ID NO: 16291 - DNA, 271 bp, Glycine max
  unsure (1)..(271): unsure at all n locations; Clone ID: 701044433H1
ggtatcaactgttttgttaacagacagttgatttacaattttccagaggagctctttgctgatgcaggaatattgggctattgagcatgctgattannatggtattgagcgtctggctttggtaactggtggtgaaattgcgtcaacctttgacaatcctgagtctgttaagcttgggcattgcgaccttattgaggagattatgattggcgaggataactgattcattttncgggtgttcnnanggggcaggcatgnaaaatantttngg

SEQ ID NO: 16292 - DNA, 145 bp, Glycine max
  unsure (1)..(145): unsure at all n locations; Clone ID: 701044434H1
ctctctcctcacatagctaggtggtattgaatattgggagggtcaaagtttgtgaaggaacttgaagaagtaaatgcatggatcgaggggaccaaatgacatttcctggctctgnatcttactatatgccagagnggaataccgg

SEQ ID NO: 16293 - DNA, 268 bp, Glycine max
  Clone ID: 701044435H1
gggctgtttcgcgctgccattgccccgcgagtctggtattccgctccgaccgactctagtgttcgtttgggtcagactttgacgctaaagagcttcgagaattcatggattggaactaaagttggggtttcgccatgcagtctcaatcttagacctgtcgtgtccgtttcccggcggcgcccgctcgctgctaccgtctccttcagcctccccaccgcaaagccagagcgtgcttctactggccaagaaattcccaagtgagtagtat

SEQ ID NO: 16294 - DNA, 264 bp, Glycine max
  Clone ID: 701044436H1
caatttctatctctcttatactctcactactctctttgctctttcttttctccactatggctgcacaagaaaacaacttccaagactacttgcctgtgatggccaacaagcttggtggggatggcctaattgatgaactgtgcaatgggttcgatcttttgaaggattctgataaaggggtcatcacttttgagagcctcaagaggaattcttacttgcttggtcttcagggtctcagtgatgaggatcttcgctccatggttt

SEQ ID NO: 16295 - DNA, 264 bp, Glycine max
  unsure (1)..(264): unsure at all n locations; Clone ID: 701044437H1
ctttgttttctaaataaagagaatcatgtagtaagactgaattgctgcatgtgctcctcaaaagaacaatgtatgaaatacctatgctatgctatatgctatgatacctttattacataagangagtggttaattgaagagtccgcaccacccgtgaatgtgatcctgtcaattaaccactcttcttatgtaaagggggatcatactaactttgaaattgagtcttcttttggagtggaagcttcagctctatatcctgatgtg

SEQ ID NO: 16296 - DNA, 264 bp, Glycine max
  Clone ID: 701044438H1
tccttctacactaactaaagccgagcagcgagagagagaaaccctagcaaaaatgccggctggtcacggtttgagatcccgcaccagagattccttctctcgtcccttcaggaagaagggtaccatcgccctcaccacatacctcagaacctaccacgtcggcgattatgtcgacgtcaaggttaacggcgccgtccacaagggaatgcctcacaagttctaccatggccgcaccggtcgcgtctggaatgtcaccaaacgtgc

SEQ ID NO: 16297 - DNA, 263 bp, Glycine max
  Clone ID: 701044439H1
gggcagagatgtttccctctatgattgctagagctatcaacctcgatgttatatctaatggcatgggtggaacaagaaatggtgctctacaagtgatgcatgctgaggttcaattgctttcgccactagttcctgtccgtcaagtaagattcatccgattctgtaagcagcatgcagaaggtgtttgggctgtggttgatgtttctattgagattggtcatgatgctgctaatgcacagccagtcatgagctgtaggaggctt

SEQ ID NO: 16298 - DNA, 264 bp, Glycine max
  Clone ID: 701044440H1
gtggagagcgacgccggcagcggcgacgatgacgactacagtgacgacggagatgggagctctggcaacacgtctcgctccagattcgcaaaacgatgtgagtcgttaaataccggggtttcattcctttggtggatagtgggcttttattgggttgtctctggtggcgatatacttctgcaagatgccccacgattgtactggttggctgttgtctttctggcatttgatgtcttttttgccatctttgtgttgtcttggcag

SEQ ID NO: 16299 - DNA, 267 bp, Glycine max
  unsure (1)..(267): unsure at all n locations; Clone ID: 701044441H1
ctttctgtctcagatggtgataattngntggntcatcatcagaaannatcaccatctgagacagaaagtgataattctgatgatgatccatccaattttttctcccttttcttgcttcgtgccgctgnatttctattaccttgctacatcatggcttgggcaatcagtattctgnacccgtcggcgacaaagacaagaggctgcagcactagnagcaacccaagttgctttcgttctacaatctgggcagcgtagaggtttacagtt

SEQ ID NO: 16300 - DNA, 156 bp, Glycine max
  Clone ID: 701044442H1
gcagagagcggcaaatgcaaaaaaggaagagaagaaaggaaaagcagcagaaagtgacaaaatcccagtaaagagtgacagtgccagctccctcaagccaaagtcttgtgcttttcacatccccattttcccatttccctttctgcttcctctttg

SEQ ID NO: 16301 - DNA, 144 bp, Glycine max
  Clone ID: 701044443H1
ggcttccttaagctccttagtgctgctccttgcagctctaattctatcccctcaagttcttgcaaactatgagaatcccccagtgtacaagcctcccactgagaaaccaccagtttataagcccccagttgagaagcctcctgt

SEQ ID NO: 16302 - DNA, 267 bp, Glycine max
  unsure (1)..(267): unsure at all n locations; Clone ID: 701044444H1
gtcttcaacgtctcaaactgagatcaacctgcctttcatcactgctgatgcatctggtgcaaagcatctgaacataacattgacaagatcgaagtttgaggctttggtgaatcacttgattgaaaggaccaaggcaccatgtaaaagctgcttgaaggatgctaacatctctatcnnggatgttgatgaggttcttcttgttggagggatgactcgagttcctaaagtccangaggtggtttcagagatcttnggaaagtcncctag

SEQ ID NO: 16303 - DNA, 267 bp, Glycine max
  Clone ID: 701044445H1
ctcactcgcaagcaaaaagaaagaatcccaggcgaggagaaagatggaggggaaggagcaggatgtgtcgttgggagcgaacaagttccccgagagacagccaattgggacggcggcgcagagccaagacgacggcaaggactaccaggagccggcgccggcgccgctggttgacccgacggagtttacgtcatggtcgttttacagagcagggatagcagagtttgtggcacttttctgtttctctacatcactgtcttaaccgtt

SEQ ID NO: 16304 - DNA, 268 bp, Glycine max
  Clone ID: 701044446H1
aagaaaatacacattacattactaagtctttgttcatttgagtagtagtgatggctagcctcaaggttgcatgtgtggttgctgtgatgtgcatggttgtggtggccatgagtgctgcacccatggcacaggccgcaatcacgtgcgggcaggtcgccggcgacatgtctccgtgcttcagttatcttcgaagcggcggaaaaccgtcgcaggcctgctgcaacggagtgaagtccctcagcagcgcggcgaagaccaccgcggaccg

SEQ ID NO: 16305 - DNA, 271 bp, Glycine max
  unsure (1)..(271): unsure at all n locations; Clone ID: 701044447H1
cttttcacactgccgctgcaacaatggcttcagagaagaaacttncgaacccaatgagggagataaaagtgcagaagctcgttctcaatatctctgttggcgagagtggagatcgtctcaccagagccgccaaggtgttggaacaacttagtggccaaaccccagtgttttccaaagcaaggtacactgttcgttcctttgggattagaagaaatgagaagattgcatgctatgtcactgtcagaggtgacaaggcaatgcaacttttggg

SEQ ID NO: 16306 - DNA, 274 bp, Glycine max
  Clone ID: 701044448H1
ctttgttttttgtttctgttttgtgttgtgtaatttccccctagccaccaccaatggccaacaaagagatggaagttgtgaagggtttggatttgcaaaggtacatggggcgttggtatgagatagcctctttcccttcaaggaatcagcccaaggatggtgagaacaccagagccacatacactcttaggaatgatggtactgtgccaagtgctcaacgagacttggagtaatggccagagagggtacatacaaggaactgcttataaggttg

SEQ ID NO: 16307 - DNA, 147 bp, Glycine max
  unsure (1)..(147): unsure at all n locations; Clone ID: 701044449H1
atttgcctccactgcactcgtccactccaacacaacacccctttcanaccaccccancaacaatctccctcttctttctccaccttcaacgttctccanaccctacaccatctccncnacatcctcctnnnangcnnccttnttctt

SEQ ID NO: 16308 - DNA, 146 bp, Glycine max
  unsure (1)..(146): unsure at all n locations; Clone ID: 701044450H1
ggacgagcacaagatccagttacatactatgtnccctgccttgtctactcgaataatatgtaactggntcttgtgctcgagtagacaaggcaggcacatagtatggctgganantttgagttgggttcatcaaagaagaaaccagg

SEQ ID NO: 16309 - DNA, 264 bp, Glycine max
  Clone ID: 701044451H1
cgattacccatttggttatttcgccctaatggctcttgctccatccaaagtttccaccttttctggtttttctcccaaacccagtgttgggggtgctcagaaaaacccaacttgctctgtttctctgagctttttgaatgagaaacttggaagcagaaaccttagggtttgtgcctcaacggtgcctctcactggggtgatttttgaaccgtttgaggaggttaagaagagcgagcttgctgttccaactgctccccaagtctc

SEQ ID NO: 16310 - DNA, 264 bp, Glycine max
  unsure (1)..(264): unsure at all n locations; Clone ID: 701044452H1
ggtgaagtgttcggattgcggcgacgtgagcggttcgctgcccgcncncgttgtgagaagtccactgaaccttatccatttagaggaagaaggggcaattttgtttatgtgcctaaggaggtgcctcctactcctactcctgctggatggtaagtgagtgcaaaggcgaagtgtcaaagaccttaggctgagactgcaacaaggggaccccaatgaaactgctgaggtggctgaagatatataaattttggtatcttggtaaaa

SEQ ID NO: 16311 - DNA, 261 bp, Glycine max
  Clone ID: 701044453H1
gagagagagagaggatatgggttcgaagaggtatgcgctattgatgtgcggtgaggattcggagtacttggtgaagatgcacggaggcacctatggggtattcatgaagttgctccaagagcaagaggaaaagtgggacctctacaagctcgtccaaggagagttcccggagcagcatgacttgcctctctacgatggctttgtcatcagtggaagctgctatgatgcacatgccaatgacccatggatccttgacctcat

SEQ ID NO: 16312 - DNA, 261 bp, Glycine max
  Clone ID: 701044454H1
gtttcatcaattcgattgcccggtttggaccaagacgccaaggccacgcatggatcggtgcttaggttgaacagaggaggctcttcagtgaagtttgatcccacacgggtcactcagctctcgtggagtcccagggcttttctctacaagggctttttatccgatgaagaatgtgatcatttgataactctggccaaggacaagctggagaagtctatggtggcagataacgagtctggtaaaagcataatgagtgaagtc

SEQ ID NO: 16313 - DNA, 247 bp, Glycine max
  Clone ID: 701044455H1
tgtgtttgtgaaactctcacacagacaagtcacaacaacaagtttctgttgttccaatggcatcagcaacaccccttttgaaagatgagctggacatcgtgatcccaacgatcaggaacctggatttcttggagatgtggaggccattctttgagccttaccatctcattattgtgcaagatggagacccttcaaagatcatcaaggtccctgaaggctttgactatgagctctacaaccgcaatga

SEQ ID NO: 16314 - DNA, 259 bp, Glycine max
  unsure (1)..(259): unsure at all n locations; Clone ID: 701044456H1
ctttcttttctctttcctctctctctctctacgctttctcgtttnanatccctcaagggatccactaactgaaggagcaatggggttgacatttaccaagctttttagccggcttttcgccaagaaggaaatgcgaattctaatggttggtcttgatgccgctggtaagaccaccatcctgtacaagctcaaacttggagagatcgttaccacaattcccaccattgggttcaacgtggagatgtggatacagacntta

SEQ ID NO: 16315 - DNA, 262 bp, Glycine max
  Clone ID: 701044457H1
tagaagcgtaacagcggctaccctaacctcgtcttcctctctactaatttcagctatggccgacgaagctgtggttgttccagatcccacccagatcgatgtcaagctctttaaccgctggagcttcgaggatattgaggttactgacatttcactggctgattacattggagttgcggcatccaagcacgccacatatgttcctcacaccgccggaaggtactccgtgaagcggttcaggaaggcgcagtgccccattgtt

SEQ ID NO: 16316 - DNA, 111 bp, Glycine max
  Clone ID: 701044458H1
caagtgaagaaaaaagggttgccttggacacttctcaccttgttttctgagttatgttaatttgaaagaagctacgtgggcattcaagaatgggttccaggtgattggttt

SEQ ID NO: 16317 - DNA, 262 bp, Glycine max
  unsure (1)..(262): unsure at all n locations; Clone ID: 701044459H1
gctgaagataactgattatatttatgtgtcattgtgtcagttcttacacaattatgtgcagcatgtagttttctttttttgcaaatatttattgttcttggtcctttgcatgacatgtagtgaatcctaatgtgtgatgtggtcatgcgcctgtattattatgtgtataaatttttatccagtnggaagacatgaatatggacgaggatncagagaaagtggcagtggantggcctncacagggnttttgggaaaaagnntt

SEQ ID NO: 16318 - DNA, 264 bp, Glycine max
  Clone ID: 701044460H1
cctttgttcactcttcttctcttgcggctagggttttagcgcacttcttctagatttaaggaagatgggtaaggaaaaggttcacatcagtattgtggtcattggccatgtcgactctgggaaatccactaccactggtcacctgatttacaagcttggaggcattgacaagcgtgttattgagaggtttgagaaggaagctgctgagatgaacaagaggtctttcaagtatgcctgggtgctggacaaacttaaggctgagcg

SEQ ID NO: 16319 - DNA, 266 bp, Glycine max
  Clone ID: 701044461H1
attttaaagcttcaaacatcttgttagactcggattataatgcaaaactttccgattttggcttggccaaagatggtcctgaaggagatgacacacacgtttcaactagagtcatgggcacacaaggctatgcggccccagaatacatcatgacaggacacttgacagcaatgagtgatgtgtacagttttggagtcgtgctcttggagcttctaacaggacgaaggtcagtggacaaagggcgcccacaaagagaacagaacctc

SEQ ID NO: 16320 - DNA, 268 bp, Glycine max
  Clone ID: 701044462H1
ctgagaaaaacagatagtgtgggagagagaagagcggaagagaaaatgacgaccaggttcaagaagaacaggaagaagagaggtcacgtcagcgccggacacggccgtatcggaaagcaccgcaagcatcccggaggtcgcggtaacgccggtggcatgcatcaccaccgtatcctcttcgacaagtaccatcctggtttcttcgggaaggtaggcatgcgctacttccacaaacttcgcaacaaattctacaatccgatcatcaaca

SEQ ID NO: 16321 - DNA, 268 bp, Glycine max
  Clone ID: 701044463H1
atgaaatgtaaaacggtgggattgagcctcgaatcttcaaaagttggagttgcagggattggtgtttgctcaagttaatgagagatggcatgaattcccgtatattgctggacgctgcaaaaagttgcatattggcttcttctcctgttttcagaaggcaacaattcttgataaggtgtgtgggaggctccactgatcaaagagacatgcaagccctaaggtctcttgaggttgactctcagagtattattcgagcaattactcctgc

SEQ ID NO: 16322 - DNA, 272 bp, Glycine max
  unsure (1)..(272): unsure at all n locations; Clone ID: 701044464H1
cttgtcgacacagcaaagcaaagtaacatattaagagaagaagatntgtttggtgtttgtgtgcggggaagatgagagggtggtgtcaaggcagccagcaccgggggcctgtccttactgcagagggatgatccaagctatggacgtagagagtcagtggaatttctgtttcctacctttgtattctaagaccaagcgcagtattactgcaccatgtgcaccagaaaaactcgtccttcagtaatactgcatgatgctgatgctcatcttac

SEQ ID NO: 16323 - DNA, 265 bp, Glycine max
  unsure (1)..(265): unsure at all n locations; Clone ID: 701044465H1
ataagcatcttcttccatcaccgcattattcatcttttctcttctcattcaccaattcacaattcattttatttcttaagatgccaactgacacgtcatcagtttccggcgaaatcgtgtgtgtgaccggtgccggcggtttcatagcctcttggcttgtcaaacttctcttagagaanggctacactgtgagaggaacngtgagaaatccagatgatccgaanaagggncnttgaaaagnttggaaggggcaggggggggtttc

SEQ ID NO: 16324 - DNA, 110 bp, Glycine max
  Clone ID: 701044466H1
caaaacttagggttgagcctttttttgaggttttcagcgcttctttctcacaatggttcttccagaatgatattgatttgctgaatcctccagcctgagttggagaagag

SEQ ID NO: 16325 - DNA, 263 bp, Glycine max
  Clone ID: 701044467H1
ctccaacggaagaaagaacatccaagaaatcataggaaaaaaaaatgccaccttttgccggatccgaacctgttggattccctaagccagattccaacatagtttccattgacgttggtggccaactgttccaaaccacgaaacagacactaacctcggcgggtccgaaaaccttcttctccagaattgcggcggaatcttctggactccacacgcccttcctagacagagacccagatctgttctcgctccttctctctctt

SEQ ID NO: 16326 - DNA, 262 bp, Glycine max
  Clone ID: 701044468H1
ccacgtcatcaccctcaacctcaacctctccgagcgagaaccagacacaagaaagaaaacgtgttgcgtcagtgttacccctttctccttctctttatctttcctgaatttggcgcgtttcgattcttcttcttccgaatcagagagagtctggatttcttgttgaagatgcgacgctcttctgcatccaaaaagacgggtcaatccaattccacccccatcgccgccgatctcttccgctccgcttcaagtaaggcaagct

SEQ ID NO: 16327 - DNA, 225 bp, Glycine max
  unsure (1)..(225): unsure at all n locations; Clone ID: 701044469H1
ttggtgcaaancatccttcgcttcanactctctctctctctttgcganttctgcaaaccgaacatttcatctccaaagggatcaacaggtcgaaggagaaatggggctgacattcacgaagcttttcagccggcttttcgcgaagaaggaaatgcgaattctgatggttggtcttgatgctgctggtaagaccactatcctctacaagctcaagctcggagagat

SEQ ID NO: 16328 - DNA, 261 bp, Glycine max
  Clone ID: 701044470H1
gcaaaaagaaaatcagtaggcgtagagaacagcaaagaaagaggaataatggagcaggaagagcacgaagtgtacggtgcagacattcccgacgaggagattgacatggacgcagacgccgagcaacaagatgagcaacttgcccccaatcacacaaacaaggaactggaggacatgaagaagaggctgaaggagatcgaggaggaagctagcgcccttcgcgaaatgcaggccaaggtcgagaaagagatgggcgctgtt

SEQ ID NO: 16329 - DNA, 261 bp, Glycine max
  unsure (1)..(261): unsure at all n locations; Clone ID: 701044471H1
catngttggttttattgtttgcctcgcnttcgacagggatttactatgcctgctcgtaacttcaatgcaaaggaaaaactccctggctggccacgcgaaagatttaggcgaggaaattgcgccgaatggggaactgggtttccctcagaagcaattcctggttattgatcaaacgggtgatcaaacaactcttgttcatagttcaaggtttgggggtcctcttgcttcctggaattcaaagctgcatggtttcaacaattt

SEQ ID NO: 16330 - DNA, 218 bp, Glycine max
  unsure (1)..(218): unsure at all n locations; Clone ID: 701044472H1
ctctggagaaaaaaacaatctgaacccaaattcgcaggtcgttgaaagttgaaatccaaggagaaacacnnnnnnnnnnnnnnnnnnnnnnagaaaccagcgtcacatcatcgtggttctgcaaaatatatttttctttttgggtgaataaataanggnttgtgcgtggtggtgttttgttgtgtttgtgagtatctgaatccgcgcagttaggtttg

SEQ ID NO: 16331 - DNA, 262 bp, Glycine max
  Clone ID: 701044473H1
ctcctttgtcacttctcagcaccactcaatctcttcaatttctttcttctactggcaataagcatcagcacactgccacatccagttcccttctgtgtgttcctttcttctactctctccagtccagccaaaacgaagctccttccatcattttcagttttttctgtcaagtgttgtttcttcttctcccaaactcgtccaaacattgctggtaacaagtcccccatgaacttgttgagcagaattgttgggttgggtagcc

SEQ ID NO: 16332 - DNA, 261 bp, Glycine max
  Clone ID: 701044474H1
aagaaaagttatttttatagatactaaaatttaaattttctttccaagtcccagctattttcttttccattcaaattttaaacttttctttcttttcttgtttttccatccatccaaccaaatatatcataaaactactaagggtatgtgagtgttggtgtgttgaattaaaaaaaaaggaagactaaaactaaaactaaaaccccactcagtcttccagtgaaaaaagaaggcagcgatgggaagaagacttcgacatcc

SEQ ID NO: 16333 - DNA, 139 bp, Glycine max
  Clone ID: 701044475H1
gggaaatctcttcttcaatggcggcagagtcatctcgcagtagcgctaaacgcccctttatggaagaagacgacaatgaattctccaaaaagccaccagaaaaaagggttaggtttccaaagggaaagaaagtgaagcc

SEQ ID NO: 16334 - DNA, 253 bp, Glycine max
  unsure (1)..(253): unsure at all n locations; Clone ID: 701044476H1
ctcagtctctgtgtttgcggctgaggattccgaacgagtgaccttcttcgtttctngcaaagtttaagtaatcatgggtaaggaaaaggttcacatcaacattgtcgtcattggacatgtcgactctgggaagtcaactaccactggtcacttgatctacaagcttggaggtattgacaagcgtgtgattganaggttcgaaaaaggagcncccnganttnannaggggggtttaaannaccccgggggcncc

SEQ ID NO: 16335 - DNA, 206 bp, Glycine max
  unsure (1)..(206): unsure at all n locations; Clone ID: 701044477H1
tctcccacttcaaaattcatgtctccctcttccctccacgcnctcctcatcattctcttcctaggttccgcacacgcgctcaaggtccccttccgagtcaacgatgttctccccgttctcccccacggaatctctggccgctcctcaacaacctccacagcgcgtcgacttgctccttccttcgtcgccgccgtcctcccgataag

SEQ ID NO: 16336 - DNA, 265 bp, Glycine max
  Clone ID: 701044478H1
caaaatctcggatttatcgcttctagctccctgtgttgcaatttcggtcgctttgctctgattctgattttatgtgttccaatgtctctctggcttgcatacgccattcttattttcagatcagcatagcctagccggttagatatgggcagtcactatggcactaatgaccaggcagcatctgctgacctacatctaccttctagtttacatttcactttcatcaggggttattctgtacaacaagtgggtcctctccacattg

SEQ ID NO: 16337 - DNA, 207 bp, Glycine max
  unsure (1)..(207): unsure at all n locations; Clone ID: 701044479H1
agcatggcatctcaagcaatcaccttcaagtccttcgccaccgttatcatcgtggcgcttttcttnnnnnnnnnnnnnnnnnnnnntcaggatttgtctccggcgccggcaccgggacccgatgccggagcagccggatccgtttcgagctcggtggccgtgattggagcttcggttgtgctgtcaatgctcgccatcttcaagcag

SEQ ID NO: 16338 - DNA, 268 bp, Glycine max
  Clone ID: 701044480H1
caagatgaaaccgtacctacgtccaatattcctattattccttatccttctcgaccaatccatttcggcgagtgctgctataaatattaatggtctgagaaacaaaattagagaagttctaaacaagcacccgagcatcaatcttccggcagataaactgaagaaggtgaagagaccactgaaaggcactggattatctgcttggcgatgtaaggacaggccgcctcaagaatttcaagaattttgcccgaaatttaagaacgattat

SEQ ID NO: 16339 - DNA, 264 bp, Glycine max
  unsure (1)..(264): unsure at all n locations; Clone ID: 701044481H1
gcgtttcccctttcattttccctcactttctcgctcgccaaacgcccctctctctcctccaatggccgaccagctcaccgacgaccagatcgccgagttcaaggaggccttcagcctcttcgacaaggacggcgatggttgtattactactaaggaactgggactgtnatgnggtnattagggnaaaacccaantgnggnanatctgcnggatatgnttaatggggttnanctgatgnnagtggnaccanggtntccnaagntt

SEQ ID NO: 16340 - DNA, 260 bp, Glycine max
  Clone ID: 701044482H1
aagagtttgtggaatctagtgagagagagcagaggaaaaggggaagaaaaatgttgagtgcgacggcgatcggcgcgttattgggtttgggaacccagatgtactccaatgctctccgcaaactcccctacatgcgccatccgtgggagcacgtggtcggaatggggttgggcgcggtgtttgtgaaccagcttctgaaatgggaggcccaagtggagcaagacctcgacaagatgctcgaaaaggccaaggccgccaac

SEQ ID NO: 16341 - DNA, 260 bp, Glycine max
  Clone ID: 701044483H1
attaattgcaagaatggcacttcgttgcttggtgatgtccctttctgttctcttcactcttggtcttgcgagagaaagccatgccagagacgaagatttttggcatgctgtttggccaaacactcccattccaagttcattgcgagatcttctaaagcctggccctgcaagtgttgaaatcgatgatcaccctatgcaaattgaagaaacacagtacccgaaaaccttcttctataaagaagaccttcatccaggcaaaa

SEQ ID NO: 16342 - DNA, 258 bp, Glycine max
  Clone ID: 701044485H1
cattattattttactccgaacgagttgacaccgattccactcactcaaccatgagccgattcaggcgttttgagctcatagaacaaccacctttcttccactcctgctactctttcccttccttcgtcctccaagactcactctctctcgacctcgacctcttgccacttcccagccacttcgacgctttcgcagatctggtgcacgcgccgtcgttcgcttaccggcgcgtggagaggcatctcgagaatgagttgc

SEQ ID NO: 16343 - DNA, 258 bp, Glycine max
  Clone ID: 701044487H1
tgatgatgtcaacttggaagaatttgttatgactaaagacgaattctccggagctgatataaaggcaatatgtactgaagctggtttacttgctctacgagaacgtcgaatgaaggtgactcatgccgactttaagaaggccaaggataaagtgatgtttaagaagaaagaaggggtgcctgaagggctgtatatgtgaaaaactatcctctattatctctggccctcttgtctttcttttaacgttctagttatgcg

SEQ ID NO: 16344 - DNA, 260 bp, Glycine max
  Clone ID: 701044488H1
gtttcatagtgagcatggtctcatgagcattgaacatccaacaaagaagatgaaagcaatgcctaggattgacagcgagggatttatgtgtggggctaacttcaatgttgactctcagacaaagatccaagtgatgcctcgtgttggaagtgaagctaattgggccacatggagctaacaaacttgactgatttaatcatagcccaacttttttttaaaacccttttctaagtggttaagagtacacaacttaatatgat

SEQ ID NO: 16345 - DNA, 258 bp, Glycine max
  unsure (1)..(258): unsure at all n locations; Clone ID: 701044489H1
aataaattcatctaaccccaaacaaaaccctagcacacttttatcgcttagtggcagcagcagtggcggcaagcaactccatccgcaatgggaatcgatttgaaggcaggaggtaagtccaagangaccaagcgaaccgcccccaaatccgatgatatctacctcangcttctcgtcaagctgtaccgttttcttgttcggaggactgggagtaacttcaatgctgttgtcctcaagcgcttttcatgagcaaggtca

SEQ ID NO: 16346 - DNA, 258 bp, Glycine max
  unsure (1)..(258): unsure at all n locations; Clone ID: 701044490H1
ctgaaatctgaagctaacttaagggaaatgagatggccaatggcaacactagtcatcgcttcaagctcttgcttttccttctaactctgcactcttcattcgctgagattttcttcgaagagagattcgaagatggatggaagagccgttgggtgctatccgattggaaaaggagtgaaggaaaagcgggtaccttcaagcacacagcnggaaatgggtcnggggncccggtnnaaaaggtntcnaanantataggnc

SEQ ID NO: 16347 - DNA, 259 bp, Glycine max
  unsure (1)..(259): unsure at all n locations; Clone ID: 701044491H1
caggtggcctgctgaagcagtgaaaccaaatgaacagcctacagaaagaaagaaaggttttggtgattggatgaatcttattaaacctgccaatgaagagaaggatcattgggtaccagatgaagccgtctcaaaatgtacagcatgtggtactgattttggggcttttgttcgcaggcatcactgtaggactgtggtgatatttcctgtgacaaatgtacatatggtagaattcccctgactgccggnnaaaatcccc

SEQ ID NO: 16348 - DNA, 262 bp, Glycine max
  unsure (1)..(262): unsure at all n locations; Clone ID: 701044492H1
gaaaanggatanngtatctggtatggngcaaatggccatttggtgggtgtgttgaacttgaattatgagtaagaatattaggacctaactaagtttttttatattcaatgttagtatattggtttagtcgtggctattagcaaatgtgcaaaatgataaactggtctttgcatcataaataattgaagcttaagagttttatgtccagttttcccagtggactnaatttggtgtaagaggatcctcaacaggntttatcctt

SEQ ID NO: 16349 - DNA, 255 bp, Glycine max
  Clone ID: 701044493H1
gcttcagattccactgctcgcggtccccaaagaccagttttttctcctggttcaaattcccagcaacatgatctggaagacaaatctcgtagacagacacctagagagcaaccaccttcaaggcaaacccagcagccaaagccaccatattatggtcaacaacaacacccttcagataccatgtctgcctctgttggtggtggacaacagggctttcatcaacaaatttttgacatgcagcatcccccacaagat

SEQ ID NO: 16350 - DNA, 264 bp, Glycine max
  Clone ID: 701044494H1
tttcagtgagtgatcggtgttcacttgatctcatcataatcgtcagcgtcaattgaagaagatgccgatcagaaacatcgccgtcggaaggcctgaagaggcgactcaccccgacacgttgaaggcggctttggctgagttcatctcaaccttcatcttcgtgttcgccggctcaggctccggcatcgcctacaacaagctcaccgacaacggcgctgccacccctgccggcctcatctccgcctccatcgcccatgcattcgc

SEQ ID NO: 16351 - DNA, 160 bp, Glycine max
  unsure (1)..(160): unsure at all n locations; Clone ID: 701044495H1
tctcttacacacacnagcactacnacattttctttggtctctcattttctctatagctagatgggttctggtgctttacaacttcttctgatcttgggtcttctggctagctcatgcttagcacaagccccaggtgctgcacccacacaaccacccacta

SEQ ID NO: 16352 - DNA, 269 bp, Glycine max
  unsure (1)..(269): unsure at all n locations; Clone ID: 701044496H1
atttttcgcgtcacataaacaaaaaaaataaactggggagaagcatgttgttgatgttgggactatgcttcctattgttctctgcatttccacttgcgttctctgagagatgccacccacaagacaagaaagcgttgctccaactccagaaggacctcggcaacccttatcacatcatatcctggaacgcaaaggaggattgctgcgagtggttctgctgcgntaagtgtgacgagaaaacaaaccgcgtcattagcgttgccttatca

SEQ ID NO: 16353 - DNA, 173 bp, Glycine max
  Clone ID: 701044501H1
caggacaataatgttattcaagttgttatactggtcccaacccgagaattggcattgcaaacttctcaagtgtgcaaagagcttggaaagcacttgaaaattcaagttatggttacaacaggtggtaccagcctgaaagatgatatactgcgcttatatcaaccggttcattt

SEQ ID NO: 16354 - DNA, 151 bp, Glycine max
  unsure (1)..(151): unsure at all n locations; Clone ID: 701044502H1
ccgtattcaccgctttcatccaggttgtttacatgggctttggttggatcatttccatttaactccnttccctatcaggagtactttcttgtgtaggaactgctgttctagctgnttgtctcaggatccaagtgantaaagagaatacggc

SEQ ID NO: 16355 - DNA, 167 bp, Glycine max
  unsure (1)..(167): unsure at all n locations; Clone ID: 701044503H1
ttttggtgcatgcgagtgaggggctttgtaaattaatttgntctagtaatagtacggtagctaatagtagtatttctgtgattggtgttgcagattgatcaagtgaatataatattggtaatgatggatctgaaggaatggtcatcatctctgaggaattgaatgtg

SEQ ID NO: 16356 - DNA, 171 bp, Glycine max
  unsure (1)..(171): unsure at all n locations; Clone ID: 701044505H1
gcagcaagcatctccttctcaaactagtagtattattcttccattccgntctacatataatcattcataaatgggtgtnttcacattcgaggatgaaatcaactcccctgtggctcctgctactctttacaaggccctagttacagatgccgacaacgtcatcccaaaggc

SEQ ID NO: 16357 - DNA, 173 bp, Glycine max
  unsure (1)..(173): unsure at all n locations; Clone ID: 701044506H1
agaaaagttagggttcacaacttttccttttccttttgcttgcgaatctgaatcanataatcaatcatcccattcattattcatcatgncgtcggcgaagaaaatcacgctgaagagttcggacggcgaggctttcgaggtggaggaggcggtggcgctggagtcgcagacga

SEQ ID NO: 16358 - DNA, 170 bp, Glycine max
  Clone ID: 701044507H1
gggaacttggtattggaattgtaccatatagtcctcttggtcgtgggcttttttggcggcaaaggagttgtggaaaatgtgcctgcaaatagctccctgaaagcacatccacgctttcaagccgagaacttagacaagaacaagaatatatatgaacgaattgaaggcct

SEQ ID NO: 16359 - DNA, 165 bp, Glycine max
  Clone ID: 701044508H1
tactgcgtttcggaagcagacacagatggctcgtacgaagcaaaccgctcgtaagttccacaggaggaaaggctcctaggaagcagcttgcaaccaaggctgcacgtaagtctgcaccaactactggtggtgtgaagaagccccaccgttatcgtcctggtaccg

SEQ ID NO: 16360 - DNA, 168 bp, Glycine max
  unsure (1)..(168): unsure at all n locations; Clone ID: 701044509H1
tctttctctttctctgcnaacctgcacactcttcactcgatcaaacagaaaatggcaaagaatgtggggatccttgccattgacatctacttccctcccgcttgcgttcagcaggaagcattggagactcatgatggtgccagtaaagggaagtataccattggtctt

SEQ ID NO: 16361 - DNA, 167 bp, Glycine max
  Clone ID: 701044510H1
gggagcgcattattatgggttcttcaatgcaaaagtgaggctttgttaagcatgggcatcagatgtggcagtaaagaagttgcaacaccctgtgctattgctttgaatttggtaatctcaaatttgagtgctacaagtgagaaggcagttatggaagcattgaaaga

SEQ ID NO: 16362 - DNA, 75 bp, Glycine max
  Clone ID: 701044511H1
ttctctggtgatgatggcggggaagaagctgattctgatgatgatcccgaggccaatggtggaggtgaaagcgat

SEQ ID NO: 16363 - DNA, 166 bp, Glycine max
  Clone ID: 701044513H1
gctcgagtgccattggtgagggaatgacacgaaaggatcattctgatgtgtccaaccagctctatgcaaattatgccattggaaaggatgtccaggcaatgaaagccgtggtcggagaagaagcactttcatctgaggacctgctgtatttggaatttttggagaa

SEQ ID NO: 16364 - DNA, 169 bp, Glycine max
  Clone ID: 701044514H1
aaacgaaaaatcgccatgaatcccaaaatcctcttcgtgtttgctctgctttcttgaatctcgtatccaattcgttccaaaaccctaaccctaaaacccccaaatcaacgtcatcgcaggctcacgtggagctcatcaaccacggcttacccgccggtcttctccccgc

SEQ ID NO: 16365 - DNA, 168 bp, Glycine max
  unsure (1)..(168): unsure at all n locations; Clone ID: 701044515H1
gtcatgcatgaagagtgggttatttgaatccgccaagcctcttctgggaaacatatgttaactctgctggcaaaagttgatttgatactttacacctccattttagctcatcttgttaggtgtcaggaagagaaaaatgagangcattggatgtctatccttagtggc

SEQ ID NO: 16366 - DNA, 166 bp, Glycine max
  Clone ID: 701044516H1
cggtttcccagatctgctccttcctcaccccacagaagtcagttgaagagcatgggtcgtggagttagcagtggtggtggtcaaagttccttgggttatctttttggcagtggagaggcccctgccgcaaaaccggcaacaaacaatgccccagcccaacctgaag

SEQ ID NO: 16367 - DNA, 116 bp, Glycine max
  Clone ID: 701044517H1
atcaaaagcagatgcctgttgatgagtttccagaaaggcctggtgaacctgaatgcagctacttcttaaaaactggggattgtaagttcaagtcctaattgtaatccttgccaacc

SEQ ID NO: 16368 - DNA, 169 bp, Glycine max
  unsure (1)..(169): unsure at all n locations; Clone ID: 701044519H1
gaaagatcttcaggaatnggctgggaacgacagatttataagagtgatgcctaatacccccagcagctgttggccaggcagcatctgtaatgagcttggggggatctgcaacggaagaagatggaaatattatagcccaattatttgggtcaattggcaaaatatggaa

SEQ ID NO: 16369 - DNA, 166 bp, Glycine max
  Clone ID: 701044520H1
ttctctctctttctctctttctagttcgtgttcttcgtcgcaaatccgaagtaggatctctcttgttttttctctaggtttttcgcgatggcgtcgaagcgaattttgaaggagcttaaggatttgcagaaggatcctccaacatcttgcagtgccggtcctgttc

SEQ ID NO: 16370 - DNA, 169 bp, Glycine max
  Clone ID: 701044521H1
atctgggacctggcgttaggaagggtttcgaaggtggccagatgccgctttatcgccgaatccccaaactcagaggaattgcaggaggtatgcatgcgggattgcccaaatatgtccatgtaaatctgagagacatagaagatgctaaatttaaggaaggggaagaagt

SEQ ID NO: 16371 - DNA, 167 bp, Glycine max
  Clone ID: 701044523H1
aagaaaaagagggttctcatttcgcaaccatcggccgcacttactcttgttctcaagggattcgattttctctgcactcacttctagggtttcctccgcgctatcagcaatcatggccgacgaaacaccaaatgagatgaaggaggaggttccagaaattgttcctt

SEQ ID NO: 16372 - DNA, 163 bp, Glycine max
  Clone ID: 701044524H1
atcttcaccctttccctgtctctcagaaagatgaaggtggtcgctgcgtatctgctcgccgtcctcggtggcaacaaacaccccctccgccgatgacatcaaggaaatcctcggctccgttggaatagaggcagatgaagataggattgaatcgttcttgtcc

SEQ ID NO: 16373 - DNA, 166 bp, Glycine max
  Clone ID: 701044525H1
taaggataaggctgccgcacatttgaagggtggtgcaaagaaggttattatttctgcccccagtaaggatgcccccatgtttgttgttggtgttaacgagcacgagtacaagccagagcttgacattatttccaatgctagctgcacaaccaactgccttgccccg

SEQ ID NO: 16374 - DNA, 166 bp, Glycine max
  unsure (1)..(166): unsure at all n locations; Clone ID: 701044526H1
tctactctttcttcttctcttcgctagggttttagcttcttccncttcactttcgttcttctgggcctctacaatgagcaacgacaaggacaccttcaacgtcgctgatctcacttccgctctcaacgaggacaatagagcagaccttgtcaatgctctcaagagc

SEQ ID NO: 16375 - DNA, 164 bp, Glycine max
  Clone ID: 701044527H1
ctctctcacatttcattacttctagcaagctattacatcttttccttcctctgtctacatttcatttcattcaaaacaatcatggcatctcttcattccacatgttcaacaaaaaccgtcctttatgcattggtattgttggcctcttccatggcaacttctac

SEQ ID NO: 16376 - DNA, 166 bp, Glycine max
  Clone ID: 701044528H1
atgaaatatttggtcccatcaatgaagcttacttctcaattaagatgatggaaggggattgttgctactttcttattcatctggcgacaagttttatattgatccaaggaaactgttgcctcttgcaagatttcttccacaacccaagggacaatcagctggtaga

SEQ ID NO: 16377 - DNA, 165 bp, Glycine max
  unsure (1)..(165): unsure at all n locations; Clone ID: 701044529H1
aacgaagataccttctttcancctcccttcaacacccttttgnncctttattcttcaaagtctcaaagcaaagctcgaagacctgagaagaacaaagggttgattaaattctgtgtggttgttgttggaggttgaaacacaagttgccaccccaagtgtgtgtta

SEQ ID NO: 16378 - DNA, 164 bp, Glycine max
  Clone ID: 701044530H1
gtgagtttggtcgacaatgattacatcaatggtgatcttttcaccgtctttgcagatttctgacatgagcttattatttattagttctttagttatgtcacttctgttcgttgtcatgttcctttcctttcttttgttttcttctcagtaggatggttcatatt

SEQ ID NO: 16379 - DNA, 165 bp, Glycine max
  unsure (1)..(165): unsure at all n locations; Clone ID: 701044531H1
tcttctcttctcttcacnttccttgcaattcatcttcctttcatttntcaataancnnnnnnnnnnnnnnnnnncgtagtccagttcaattcaattcaccactgtcattcccaaatccgatcgcaacttcaattcntcgtcatttttctctcttctctctctntg

SEQ ID NO: 16380 - DNA, 168 bp, Glycine max
  Clone ID: 701044532H1
gagaagccttacaagtacaagtctcctcctcccccagtccactctccaccttccaccacactactactacaaattcaccccctccaccttaccactactaggtagcactttctcttcacacccccacatggatgcatacagaaagtgtgaaaatgaaagtcatggagt

SEQ ID NO: 16381 - DNA, 167 bp, Glycine max
  unsure (1)..(167): unsure at all n locations; Clone ID: 701044533H1
aagccgttttaaaatctttgctttacgaagcatgcggtcgaatagtgaacccggttctcggctcgaccgggttgctctccaccgggaattggcatttgtgcgaancgcggtcaaagccgttcttaatggcgcgccgattgagcaggctcctttggacggcgccacaa

SEQ ID NO: 16382 - DNA, 165 bp, Glycine max
  Clone ID: 701044534H1
tgctcatgaccttctaagatccagggagttaagactggaggtccggagtggagcagcacaggttgaaggtggagttcatggggctggtttcttatgaaaagaaatacttttgaagtatgaaaccatccaaaatcataagcggtgctataatccctgctgcagttc

SEQ ID NO: 16383 - DNA, 167 bp, Glycine max
  unsure (1)..(167): unsure at all n locations; Clone ID: 701044535H1
attcaatggcttccctcatgagcaccatcctcatgcaaaggtcttcttctacttcacttngctgctgggaggttgttctccacaacaacagcaaccattattgattccccttcacttgctcagagaatcagagatttgcctaaggacctccctggaaccaacatcaa

SEQ ID NO: 16384 - DNA, 165 bp, Glycine max
  Clone ID: 701044536H1
gacaattccaaagtctccaactcaacccagctgcctacagccgctacaactaaaaaagccctttgctttctcttgcattgctcttttcaactcgtcacattggctcatttatcacccatcagatttagggtcccttctgccatactgcgcacattgaagatgaca

SEQ ID NO: 16385 - DNA, 129 bp, Glycine max
  Clone ID: 701044537H1
ttgaattcgaaaaatcgtagcgtaggtttggttgcgattgaaacggtacgatgggaagaggaaaattcaagagcaagcccaccggtcgccgccagttctccaccccggaagatatgcttgctggaacct

SEQ ID NO: 16386 - DNA, 167 bp, Glycine max
  unsure (1)..(167): unsure at all n locations; Clone ID: 701044538H1
aaaaccacaaataagaaccaacttcttttcaattcattctcttcatcatnnnnnnnnnnnnnnnnnnagacaatcatttgcttttggatggtaactcgnacccacttttccattccggaattgggcactggtagcttagctcgtgtaaatgtgtgtctggctttgga

SEQ ID NO: 16387 - DNA, 165 bp, Glycine max
  Clone ID: 701044539H1
caactttctgaggctgagatcaagcagctttgtcttgtctccaggggatatatttatgaggcagccccaacctcttggaactcgaggcaccaattaagatatgtggagatatccacggtcaatattccgaccttctgcgactttttgagtatggtggattgcctc

SEQ ID NO: 16388 - DNA, 164 bp, Glycine max
  Clone ID: 701044541H1
ttttcttcagaaaatttgccatcgttgagggaagcgcgagagcctttcgttgttcaagatgagagctaagtggaagaagaagcgcatgaggaggttgaagaggaagcgccgaaagatgagacaaagatctaagtaggtgcttgaacaaggagtggagatgatgt

SEQ ID NO: 16389 - DNA, 161 bp, Glycine max
  unsure (1)..(161): unsure at all n locations; Clone ID: 701044542H1
aaccttacttttccgtctcttgtntnnnctttccttccttctctcatcttcccagcngccgtttcatactgtcttcactccgttgcctgtgtttntctttcttcctttatttctattcaacggatcggaacggtgcactgtgaaagggtttttgttttgtg

SEQ ID NO: 16390 - DNA, 161 bp, Glycine max
  Clone ID: 701044543H1
cctaactttacaaaatcacaacacacacaaatcttctttttaacatttatcatcgtatctgaaactaccaactatcgatgggccccttcattcgacacaagtactcacacggtatgcgtgatggatgcttcgggtcacttgggcttcagccttgtccaaag

SEQ ID NO: 16391 - DNA, 162 bp, Glycine max
  unsure (1)..(162): unsure at all n locations; Clone ID: 701044544H1
ctttacacccccctctctattttgcgttcattctgttttccagtngaagtctttccctagccaatgggccactgatcgtttgacccgggttcacagtctccgtgagaggcttgatgaaaccctcactgccaacaggaacgaaattttggcccttctgtcaag

SEQ ID NO: 16392 - DNA, 162 bp, Glycine max
  Clone ID: 701044545H1
aatgaacaagggtttctctttctctttctctgtctgcttcttcactttctctcgtttcaatcgaaaaaaatcatggggcagaaaattcttcgtcggtggcaactggaaatgcaatgggaccactgaggaggtgaagaagattgttactactttaaatgaagc

SEQ ID NO: 16393 - DNA, 161 bp, Glycine max
  Clone ID: 701044546H1
caagattgacaggcgatctggtaaggagcttgagaaggagcccaaatttttgaagaatggtgatgcaggtatggttaagatgattccaaccaagcccatggtggttgaaactttctctgagtatcctccccttggtcgttttgctgtgagggacatgcgtc

SEQ ID NO: 16394 - DNA, 160 bp, Glycine max
  unsure (1)..(160): unsure at all n locations; Clone ID: 701044547H1
ctacctctttttcttctctctcaacaacttcaccttcttcctccntcgatcatgtctcacttcaaggggcaagtaccatgatgagttatcgccaatgctgcgtacattggcactcctggaaagggtatctgctgctgatgagtcaacagggacaattggg

SEQ ID NO: 16395 - DNA, 163 bp, Glycine max
  Clone ID: 701044548H1
agtaacattgatcaaacccgcatgtggaaggttggtgagcgtgtccgatctacaagagcagccggtgatcaagggcccattatatcctttcactgctggtgtctttgtggcattgatgatggcccagattgagatcctgaggaagaaagggcattcctactcg

SEQ ID NO: 16396 - DNA, 164 bp, Glycine max
  Clone ID: 701044551H1
cgcgtttcggagagagagacgtcgcaatggggaggaggcctgtaaggtgttaccgggcagataaaaaacaagccataccccaaatcacgtttctgccgtggtgttcctgatcctaagatcagaatttatgatgttggtatgaagaagaaaggtgttgatgagtt

SEQ ID NO: 16397 - DNA, 112 bp, Glycine max
  Clone ID: 701044552H1
ttggccctgggctcccattgctaaaacctcttgctgggaagaagctttgcaagcgaaccctaaaacttgttcgtagagctgccgaacacaaatgcttgaaaagaggagtgaa

SEQ ID NO: 16398 - DNA, 163 bp, Glycine max
  Clone ID: 701044554H1
acaaatcttagccgccattgatttttcctcttccatttctcttactttctcagcctttttcgattacccatttggttatttcgccctaatggctcttgctccatccaaagtttccaccttttctggtttttctcccaaacccagtgttgggggtgctcagaaa

SEQ ID NO: 16399 - DNA, 113 bp, Glycine max
  unsure (1)..(113): unsure at all n locations; Clone ID: 701044555H1
ggtttacaatttataaatgcgcttctaaatactgtggnctctctctctaggattcccccatacctactttcagctcctaagagcacgcatcactgttgcacttcttactcgtt

SEQ ID NO: 16400 - DNA, 51 bp, Glycine max
  unsure (1)..(51): unsure at all n locations; Clone ID: 701044557H1
tggaatttatgtttttntctttgctggaattagtgactttttgaagttgat

SEQ ID NO: 16401 - DNA, 159 bp, Glycine max
  Clone ID: 701044558H1
cagtcatacgtgacaacaacaacacctgatttcaactgtgtctctttactttcgagtcaatagtgcaaattcaagccaaagcaatatgctgatacttcaagagagttgcacagattctactggctcatatgtagtttatgctcctgtggatattgttgc

SEQ ID NO: 16402 - DNA, 159 bp, Glycine max
  Clone ID: 701044559H1
ttttcttgcttccgggagctctgaacttgaccgacgtcgttttcacatcaaaacccttcaaacaaaaaaatggcgttcttcttgaaccaaactagtatcgcttcccattttcgatctcactctcagaagactgaagatttggcttcttttcctcgccgt

SEQ ID NO: 16403 - DNA, 158 bp, Glycine max
  Clone ID: 701044560H1
gtgacttgacaattagctataagactattttgtagtagaacattttgaatatagctcgaagattttattagtttggaggtatacagcagcggatagaatgtcaaagagcttatattcttaagcattcttcctattgttaagtattatttgagtctcac

SEQ ID NO: 16404 - DNA, 158 bp, Glycine max
  Clone ID: 701044561H1
aattttcttcatccttctctgttctcctagaacttgattacttgaacattccctatgacagatgaggtggttctctggatttctggccaagtccatttgggatgagggtcaggattgcacttgctgaaaagggtatcgaatatgagtacaaagaagag

SEQ ID NO: 16405 - DNA, 158 bp, Glycine max
  unsure (1)..(158): unsure at all n locations; Clone ID: 701044562H1
tccttctcccgccgcaactcactgtcttccttctctagggtttntagctcncccaatttcgtcgctcaacatggttcttcaaaatgatattgatttgctaaatcctccggttgagcttgagaagaggaaacacaagctcaagcgtcttgttcagtcac

SEQ ID NO: 16406 - DNA, 158 bp, Glycine max
  Clone ID: 701044563H1
gtgtcatttacgcttctcttctctgcagcaactatgcctaaccctaaggtcttcttcgacatgacatcggcggtcaatctgctggccgcatcgtgatggagctctacgccgacgtcactccccgcaccgccgagaacttccgcgcgctttgcaccggc

SEQ ID NO: 16407 - DNA, 161 bp, Glycine max
  unsure (1)..(161): unsure at all n locations; Clone ID: 701044565H1
agtaggatcgcgtattcgtgattgtttccgaaaacccttgtctctgaaatcaacaccaaaatcgtgaagtgtactaagcgaancattgcaggcgtgagaatggggaagaaagcaaaanggtcaaggaagggtaagaaggcatggagggctaacatcagcac

SEQ ID NO: 16408 - DNA, 163 bp, Glycine max
  unsure (1)..(163): unsure at all n locations; Clone ID: 701044566H1
tcgagtgttcgantttnctcctccgaccacctcgccgggaattcccgcgggcggcngttccttgtctncggcagcntctctctntactgaagncctagagagagaaaatcataaaccctaattcccctgtcaagctcgtagcacagtcacagccatgtatggg

SEQ ID NO: 16409 - DNA, 161 bp, Glycine max
  Clone ID: 701044567H1
tcaccgatttggccaaaaaattcggtgacatcttcctcctccgcatgggggcagcgcaacctcgtcgtggtttcttcccctgagttcgccaaagaggttctccacacgcagggcgtggagttcggctcccgcacccgcaacgtcgtcttcgacatcttcac

SEQ ID NO: 16410 - DNA, 124 bp, Glycine max
  unsure (1)..(124): unsure at all n locations; Clone ID: 701044570H1
agcaagtacgtcgtatatgtggttgatcttttgctggttgtttgtnttagttccttnccaattgtcagatctgaatcaccggactcactcttcacactcactcacactgaatggcttctgaagg

SEQ ID NO: 16411 - DNA, 159 bp, Glycine max
  Clone ID: 701044571H1
cgcccaaaccctaactccctaccctattccgctttctctcatccatcatgaaagggaggaaagtccaagaccgaatctaagagagccgatgccaaacttgctgtgaataagaagggcgccgccaccaagactaggaaacccgccggaaaggggaaggca

SEQ ID NO: 16412 - DNA, 169 bp, Glycine max
  Clone ID: 701044572H1
gcagcagcggcaagcaactccatccgcaatgggaatcgatttgaaggcaggaggtaagttccaagaagaccaaacgtacagcccccaaatccaatgatatttacctcaagctcctcgtcaagctgtaccgttttcttgttcggaggactggtagtaacttcaatgccgt

SEQ ID NO: 16413 - DNA, 161 bp, Glycine max
  Clone ID: 701044574H1
cactcttctctgcagcttttgcctacaactccctttcaccatggctgaacaaaccgagaaagctttttctggaagcaaccaaaagtgtttctcagcacaaagaagactgggaagggaaagagacctggaaaaggtgggaaccgcttttggaagtccattgg

SEQ ID NO: 16414 - DNA, 158 bp, Glycine max
  Clone ID: 701044575H1
ctaaattgtgagaaacaacagagaaagtaagcaagaaaccgaagagaagaaaaaatgccgttgcctcaacctcaacaccaacgtgtccctcgacggcgtcgacacctcttccatcctcgccgaagccacctcctccgttgccaacatcatcggcaaac

SEQ ID NO: 16415 - DNA, 161 bp, Glycine max
  Clone ID: 701044576H1
ctccctttcattttctctgcatctgtactctccaaaatgccgtccttagaggaggagctctttcccttcaaccccagggcaagtttcaagatcgagcgggcccaccacatgaaccgccagctctaccgctgcttcgcctccaccagcaccatgttcctgtg

SEQ ID NO: 16416 - DNA, 111 bp, Glycine max
  Clone ID: 701044577H1
ggccattttctgaatgcgctctatctatctcttccgatctgggctactaaccctaacccgctttcgaaccgtgggcttcctcgggcctcgcagaacctctctcgaagaaaa

SEQ ID NO: 16417 - DNA, 157 bp, Glycine max
  Clone ID: 701044578H1
gacaaaaccgagtacttaccattagagagaatgcgagactacaaggatttcctgattgctataaactttgtgggcctgtcaaagagaggtatggttagctgggttcagaatccacaagttaatttgttctactttatcagggaaatcattcaatact

SEQ ID NO: 16418 - DNA, 158 bp, Glycine max
  Clone ID: 701044580H1
tttgaatcgtgaaaatgttcagaaaccagtacgacacgggacgtgacgacatggagcccggcggggaggctgtttccaggtggagtacgcgatggaggcggtgaagcagggctcggcggcgatagggctccgatccaagacccacgtggtcctcgcat

SEQ ID NO: 16419 - DNA, 172 bp, Glycine max
  unsure (1)..(172): unsure at all n locations; Clone ID: 701044587H1
agttgatctggtcaanactgtntttgcatctgcaactgagagagatatatacactggganataaggtctgaaatcgtcgtcctaagtgccagtggtatctcgtcgtgaatacatggncctaaggnaagattaangctntacngnaatttacngttggnganaccagacttgg

SEQ ID NO: 16420 - DNA, 158 bp, Glycine max
  Clone ID: 701044588H1
gcgaagttttgattgcagaagctgttgtataaaaacgaaaaagagaaaagcactagaagacgtatatgcatatatacaaaacaaaagataactggcatctgcatgggaagtgtagttcagctaggtcaaggggaacaaaagcggaagaggaaaaatct

SEQ ID NO: 16421 - DNA, 156 bp, Glycine max
  Clone ID: 701044589H1
aaaaccctgaagaaagacacagccattgtttgtttactttccattgattgagcgaaagctttgttttttctgcgatcattttccattgggtggaagaaagtctcaacctttagtcgaaagagcaaggatctgagtgagtgagcgatcatgtgtggt

SEQ ID NO: 16422 - DNA, 158 bp, Glycine max
  Clone ID: 701044590H1
gggaaaataatggaaatcctagttgcttcattgttgatgatgaggataccaagcaaatgggattgaataattataactgggctttaacttagtttttggtttgtgacttgacatctgtctgacctggcaagccagcattgcaatctgacacagaattt

SEQ ID NO: 16423 - DNA, 154 bp, Glycine max
  unsure (1)..(154): unsure at all n locations; Clone ID: 701044592H1
ttctctctagtcttccatggagttcgttgcaagctctgtgaacggntctttttctcttcgttgctctcacaatacccctttccctgccatctccattcctccggtgtcacagtggaagtgtttttcgttaagggtaatagaatctcggtttcca

SEQ ID NO: 16424 - DNA, 155 bp, Glycine max
  Clone ID: 701044593H1
cacatccacagcaaaagaagaagaaggaagaaaccagcgtcactcatctcatcgtggttctgcaaagtcttcttttcttttcggtgaattaataaagggtttttgcgtggtgattgtgttgtgttgtgctgtgctgtgtatctgaatccgcgcaa

SEQ ID NO: 16425 - DNA, 155 bp, Glycine max
  Clone ID: 701044596H1
tcgtttttcctctacggcgtttctcttctccagcttctgtgggtgaagcgagttttggcgatggagaaaggaggaaagggcgcttcgctgttcagcaaagggggactaggatccctaaaagggaaagatgacattgcaacaaaatcagcaaaggg

SEQ ID NO: 16426 - DNA, 292 bp, Glycine max
  unsure (1)..(292): unsure at all n locations; Clone ID: 701044601H1
tgaaatcttagtttctgcccgaaactgaaactgaatcgaaattcaatacaatgagttcctcaactacagtgaggnagttgcaggtggtgtcccctgttcctgcggacatagacattgcaaactccgttgaacccgttcatatctcccagattgccaaagacctcaaccttagtcccaatcactatgacctttacggtaaatacaaggctaaggttttgttgtcggttcttgatgagcttcaaggatcagaagatgggtattatgttgtggtcggaggcattactccgatcct

SEQ ID NO: 16427 - DNA, 291 bp, Glycine max
  Clone ID: 701044602H1
gaccaatattctgaatctgaaactgagactgaaaccttcgtgttcgtgttgcatatccaaaccctaatttggaaattgaatttttgcaagatggttctggcggagttaggtgggagcatttcgcgtgctctccagcagatgagcaacgcgaacggtgatcgacgagaaggtgctcaacgattgcctcaacgtcatcactcgcgctcttcttcaatccgatgttcagttcaagctcgtccgcgacctgcagaccaacatcaagaacattgtcaacctcgacgatctcgctgc

SEQ ID NO: 16428 - DNA, 288 bp, Glycine max
  Clone ID: 701044606H1
tcatgatattgtttcttacaattttgtattttttttttataatttatttaattattttctccctacaaaatcttgatctctctgctgttgtggagtggtgttgtgttaatctcattcacacattcacagttatactctctctctctttgtcgcttggatcactgatctcatctcaattttcagatatgtcgacatctgataagccagaagtggtggaaaggggtagcaaggatgaaaaacacaaggaagatgatcaagaggaggggaagggtggattcattgagaagg

SEQ ID NO: 16429 - DNA, 289 bp, Glycine max
  unsure (1)..(289): unsure at all n locations; Clone ID: 701044607H1
atagcccaagccctatacaaccaaaccctaacacacacccatttgattcagtttccatggctagcctcaaggttgcatttttngctgcagtgctctgcatggttgtggtgagtgcacccatggcacatgcagctatcacgtgcgggcaggtgacgagtagcctggccaattgcatcggttacctccagaagggaggaacgccgtcgtcgggatgctgcaacggagtgaagagcctcaatgccgccgccaagaccaccgccgaccgccagacggcgtgcaatgcctcaat

SEQ ID NO: 16430 - DNA, 212 bp, Glycine max
  unsure (1)..(212): unsure at all n locations; Clone ID: 701044608H1
cttcctctgcgcaggaattaggaatattcgacaggtagagtttcttcaatggctcctaaagttgataagaagaatgatccaaaggcccaggccttgaagactgctaaggcagttaagtcaggtgctacctttaagaagaaggtncagaagatccgaacttctgtcatttccacaggcgaagacttgannagggccnggacccccaggtnccc

SEQ ID NO: 16431 - DNA, 290 bp, Glycine max
  unsure (1)..(290): unsure at all n locations; Clone ID: 701044609H1
cctaactttacaaaatcacaacacacacaaatcttctttttaacatttatcatcgtatctgaaactaccaactatncgatggccccttcattcgacacaagtactcacacggtatgcgtgatggatgcttcgggtcacttgggcttcagccttgtccaaagactcctccaaaggggatacantgtncatgcctccgttcaaanatatggggaagaaancctattcacnggatttccatccgatccggataagcttaaggtttttcgatctgncccatttgattaccatag

SEQ ID NO: 16432 - DNA, 151 bp, Glycine max
  Clone ID: 701044610H1
ataggaactttgcattaatatttagtagtccgatggaccatcatatctagtcaaggcacgaaataccatgccaacattcttcttccagaacaatatacaaactaaatatgatggtccatcgactactaaataggaactttgcattaatatt

SEQ ID NO: 16433 - DNA, 282 bp, Glycine max
  unsure (1)..(282): unsure at all n locations; Clone ID: 701044611H1
gcagaactgtttgggagattaaacaaaggacattggtagatatggctgctgatacgaggatgctacatagatcagagccaaagcttaaatattcacatggatcaacccaactttggaaaactgacttccttgcatttttatgcatggtccaaggtagcaacacagtacttnngcttgcctgtgaagtgagataaatttatgtaatatgtgcaaatatacagtngggttnaattgtttnagtggccattnggttccttngcnggctaaaatntcttaacncnc

SEQ ID NO: 16434 - DNA, 211 bp, Glycine max
  Clone ID: 701044612H1
gaaagccgtcgctatcctagtctcttcttcccctctacccatttcagtttcaggatggaatctcaggtgaagcacgcccttgttgtcaaagttatgggtcgtactgggtctagggggcaggtgactcaggttagagtgaagtttttggatgatcaaaaccgacacatcatgaggaacgtgaagggacccgtgagagaaggagacttctcac

SEQ ID NO: 16435 - DNA, 289 bp, Glycine max
  unsure (1)..(289): unsure at all n locations; Clone ID: 701044613H1
ctgaaattttaattgacttttctcccctacataaaaaaaacctaccaatggctcccgcaaaggcagagaagaagcccgcggagaagaagccggcagagaaggccccagcggagaagaagccgaagggnaggaagaagatatcgaaggaaggaggaagcgnnnnnnnnnnnnnnnnnnnnnnnnnnagcgttgagacctacaagatctacatcttcaaggtgttgaagcaagtgcaccccgacatcgggatctccagcaaggctatggggatcatgaacatttcataaac

SEQ ID NO: 16436 - DNA, 286 bp, Glycine max
  unsure (1)..(286): unsure at all n locations; Clone ID: 701044614H1
caaattcgttaatttctagaaacctctcatcaaaagtgtctttgatccgtgagaacttaaactcagactcctaaaatagtttgatcactttcgcattgacctgtaaccttttctctccggttaccaaaaccgtaagnncgctgaacatggacccgcaatcncnggttcgggcggnnctngagcntccggttccgacgttctccccacggttcgcgctcacatccagttcgcagcggaaaatcgcgatcgcggtcgatctgagcgacgagagtgcctacgcggtagt

SEQ ID NO: 16437 - DNA, 283 bp, Glycine max
  Clone ID: 701044615H1
caacaaacaaagcgagaaaaacgagccaattcatcattttctctcttctctgcttcttcttgttcaaatcttaggagctgaggagaatcaatcgagagaaatatgtctggtatcgctcgtggacgccttgctgaggaacgaaagtcatggcgcaaaaaccatccacacggtttcgttgccaagcccgagactctacctgatggcaccgtaaatttgatggtctggcattgcatattcctggcaagaccgggatgattgggagggtggatatttcccatgacat

SEQ ID NO: 16438 - DNA, 287 bp, Glycine max
  Clone ID: 701044616H1
attcaatggcttccctcatgagcaccatcctcatgcaaaggtcttcttctacttcacttgctgctgggaggttgttctccacaacaacagcaaccattattgattccccttcacttgctcagagaatcagagatttgcctaaggacctccctggaaccaacatcaagaaacatgtttctcagctcattgggaggactccacttgtttatcttaacaaagtcactgaaggatgtggagttatgttgctgtcaagcaagagatgatgcaactactgccagcatcaaaga

SEQ ID NO: 16439 - DNA, 290 bp, Glycine max
  Clone ID: 701044617H1
gctgcagaggataaaatctatgttgatgttggattttggggaggcctaatccctgaaaatgcacttaatacaagtattcttgatggtctcttaagtgctggtgttcttggtgtgaagtcttttatgtgtccttcaggaatagatgacttccccatggctactattgaccatatcaaggcaggattgtctgtgttggcaaaatatagaaggcctatagttgtgcatgctgagattccaacaagattttgaaaatcatttggagcttaatgaggataaccttgatccacgtg

SEQ ID NO: 16440 - DNA, 286 bp, Glycine max
  Clone ID: 701044618H1
gctttctggtgcaacaccaccgcctgcacatgtgctcagccgaagcatcgggatgcagggcattggtatgctgcttgaaggcatatttggttccattgttggtaccactgtatctgttgaaaatgttggcctacttggtctgacacacatagggagccgaagagtagtgcaaatatcatgtggttttatgatcttcttctctatttttgggaaatttggagcctttttgcatcgattcccctaccgatatttgctgccatatactgtgttttatttggtatcgtgg

SEQ ID NO: 16441 - DNA, 287 bp, Glycine max
  unsure (1)..(287): unsure at all n locations; Clone ID: 701044619H1
gtagatagctactacttcactttcatcctttgctccagaaaattaactagctaggatggtgagtgttgaagagattcgtaaggcgcaacgtgcagaaggccctgccactgtcatggctattggcaccgccactcctcccaactgcgtggatcagagtacctatcctgactattatttccgcatcaccaacagcgagcacatgaccgagctcaaagaaaaattcaaacgcatgtgtgataagtcgatgattaagnagcgatacatgtattaaagaagagatctgaagg

SEQ ID NO: 16442 - DNA, 288 bp, Glycine max
  Clone ID: 701044620H1
cgcgtttcggagagagagacgtcgcaatggggaggaggcctgtaaggtgttaccggcagataaaaaacaagccataccccaaatccacgtttctgccgtggtgttcctgatcctaagatcagaatttatgatgttggtatgaagaagaaaggtgttgatgagtttcccttctgcgttcatctggttagctgggaaaaagaaaatgtttcaagtgaagcattggaagctgctagaattgcatgcaacaaatatatggcgaaatttgctggaaaggatgctttccattga

SEQ ID NO: 16443 - DNA, 288 bp, Glycine max
  Clone ID: 701044621H1
catttatcttacacttacccacagggaggcgaacagagaaactcagagacccgaaggcagatttcaagatgaagttcaacattgcgaatcccaccaccggttgtcagaagaagctggagatcgatgatgacctgaagctgcgagcattttgggacaagaggatctcacaagaggttgttggtgatgctctgggtgaggaattcaaaggttatgtcttcaaaattactggaggttgcgacaagcaaggatttccaatgaagcaaggagtgttgacccctggtcgtgttc

SEQ ID NO: 16444 - DNA, 287 bp, Glycine max
  unsure (1)..(287): unsure at all n locations; Clone ID: 701044622H1
gcaactaccatggctaccgctccttcgcttctacactcatctgggtcctcttttttctctcaatttcgtgcctttcaattctcttcttcttcgctgtttcctcatggaaacaggcatgggaatgccgtggtctctgtgaaggcctctgcttctggggttgtgttggtggagaagtctgaggcagagaaggccaataggctcaaaacagcttacactgagaaaattattcccttgctcatggaagngttctcttacaccaacaaacaccaggtgcctaaaattgagaa

SEQ ID NO: 16445 - DNA, 289 bp, Glycine max
  Clone ID: 701044623H1
tccattcaaacattgtcaggcagtccctgtctcaccaactcttgatgtaaccagaggccttacaaacacacccatatatatgcatacatgctagcaccaccttcaagcaaagtcgcaaattctcctcctacaccaacaaaaatggcaccttctccacaagaaatcatcttccgatccccactccccgatattcccatccccacacatctcccattgtactcttactgcttccaaaacttgtcaaagttccatgaccgtccatgctcatcgacggcgacaccggcgagac

SEQ ID NO: 16446 - DNA, 141 bp, Glycine max
  unsure (1)..(141): unsure at all n locations; Clone ID: 701044624H1
ctcttcttcccttcactcnctcttgagtcttgtctcattcctctctcaagtttctaactttttcccacattctcaatcaactctccaattcccaagtgggtcccaacccaattcggatttcgtttctggatttccccaatt

SEQ ID NO: 16447 - DNA, 212 bp, Glycine max
  unsure (1)..(212): unsure at all n locations; Clone ID: 701044625H1
gcgagatcttcattcgccgattttaaaagatgagtaagcttcagagtgatgctttgcgtgaagccatttcaggaatcatggccgattccaaggagaagaatcgcaaatttgtggagaccatcgaactccaaatcgggttgaaaaactacgatccacagaaggacaagcgtttcagtggctctgtcaagcngcccnanatcctcgcccnaaga

SEQ ID NO: 16448 - DNA, 285 bp, Glycine max
  unsure (1)..(285): unsure at all n locations; Clone ID: 701044626H1
gcttccacaaccctatcgcacatctttctcagttctacgatggagttttggggtgccgaggttaaggttggngagtctgttaaggtagacccanctgaatttnnngcatgcatacncctttntnangctgctcttggtgaggcaaaganagatttgcctganccggtggttctctacatganagttggtgaacagaaatttgtcttgggaaccctttccagggagaaaatccctcaaatatctctggaatggttttggaaaaggagtttgagtttcccacagttc

SEQ ID NO: 16449 - DNA, 209 bp, Glycine max
  unsure (1)..(209): unsure at all n locations; Clone ID: 701044627H1
caaaagcaaccacaacaagcacttctcttatttcctatcacaccctattacagattcacaagcgcagacacttcaaatggctctggaagctcttcaatcacccagaactgccactccatcgtttagtccctttgaagaaaccaacctcagttacttggagacacgtggaccannggaagggttttaggggancgctgggggcancaatt

SEQ ID NO: 16450 - DNA, 275 bp, Glycine max
  unsure (1)..(275): unsure at all n locations; Clone ID: 701044628H1
atactcgttcccacacccatcttctccacaacctaccctacttgatcattcaccacatttcatttacacaaatcatcaatggcctctcttgtatcctcaagtgttcttttacacctctttctcataatttccgcgctccatttgggcgcagagcaagaattctgagtgaaaaggaccaacaacaacaattgcagttccaataccacaaggcctcttctcagtggcaaattcggccattccaacgggacggaanttnangcttcccgggggcctnt

SEQ ID NO: 16451 - DNA, 266 bp, Glycine max
  unsure (1)..(266): unsure at all n locations; Clone ID: 701044629H1
caacagggcgcagacgcaaacgntaacgcaaacgcaaantgcaaacgcagagcgtgatccattgacgaagatggtgcagcgtctcacctaccgcaagcggcacagctatgccaccaagtccaaccaacacagggtcgtcaaaacccctggtgggaagctcgtttatcagactaccaagaagagggccagcggacccaagtgccccgtcatggcaagaggattcaggggattccacattgaggcctgcagagtacaagaggtcaagg

SEQ ID NO: 16452 - DNA, 168 bp, Glycine max
  Clone ID: 701044630H1
gtgacttgacaattagctataagactattttgtagtagaacattttgaatatagctcgaagattttattagtttggaggtatacagcagcggatagaatgtcaaagagcttatattcttaagcattcttccttattgttaagtattatttgagtctcacggcttcttg

SEQ ID NO: 16453 - DNA, 283 bp, Glycine max
  unsure (1)..(283): unsure at all n locations; Clone ID: 701044631H1
tattactatcataatgatgagaggnatggagattgggatcgcagtagggatcgagaccgagattatgatcatgatagtaatgatagggatggatataggaatcggagcagtgattggggtcgagaccgtgacaggtctcgagatcgtgatcaggacagggatagaaggtttgagcatatgcatgattatgatcaagccagagaagctatgctagaaaatgactggntccgagaggatgntagngttgaaaatgaacaagaacatagcngggactggtggagnt

SEQ ID NO: 16454 - DNA, 287 bp, Glycine max
  Clone ID: 701044633H1
tttctatctatcgtcaacgttagtgctttgtttaggtgaactaattcggagaccttgcaagacttcatcaatggctgtcaaagtttatattgtgtactactccatgtatgggcatgttgagaaactagcagaagaaataaagaaaggggcttcctctgtggaaggtgttgaggccaagttatggcaggtacctgagacactgctggatgaggtgcttggtaagatgagtgcaccacccaagagtgacgtaccagtcattacccccaatgaatatccgaggctgatgg

SEQ ID NO: 16455 - DNA, 287 bp, Glycine max
  Clone ID: 701044634H1
agcattgcatccctcttgatttgtagtttgttttgtgctttagataaaagttctgccaaatccaagaggggttttaagatcatagtgtgtgttttgcaacaatggctaagttctttgctgctatgatcttggcactctttgccatttccatacttcaaacagtggtaatggctgctaatgaacaaggaggccacttgtatgacaacaagagcaaatatggaagtggaagtgtcaagagttaccaatgcccatcacaatgctcgaggagatgtagccagacccaatac

SEQ ID NO: 16456 - DNA, 283 bp, Glycine max
  unsure (1)..(283): unsure at all n locations; Clone ID: 701044635H1
ctcaaattcgagttaggacagcttcgattcgctgttaacaaaacacagctcatggaggacagacagattgagctggaggctctagagaaagccatactagaaggattagaagcctatgataagatgcaaggtgaactcgtaaaagccagggcaagcctaaccaaaatcttgacatcaaaggatgccaaagcaactttgctggagatggttgaaaagaatganttaatagatctttattggcattctagatgaaaacatagcagtgcacaaaagggcaaccaga

SEQ ID NO: 16457 - DNA, 285 bp, Glycine max
  Clone ID: 701044636H1
gtcacataggctattaagggtgagatatatagaaaaacaaaggagaaaagatagaaatggagaagtttccagttgttgacatggggaaccttaataatgaagagagatcagcaaccatggagataatcaaagatgcctgtgagaactggggtttctttgagttggtgaaccatgggatatccatagagttgatggacaccgtggagaggatgacaaaagagcactacaaaaagtgtatggagcaaaggttcaaagaaatggtagcaagcaaaggtttggagtctg

SEQ ID NO: 16458 - DNA, 286 bp, Glycine max
  unsure (1)..(286): unsure at all n locations; Clone ID: 701044638H1
tccaacgttaacaaccttcattccatcctcgtatcggttattattaattttaattccacgtaatgggcaactacgtttcatgcaccttggcgcctcctttgatgaagaattccaaggccacgagggttatcatccccaccggtgaagtcaagcaattcaaagagatcgtgaaggctgcggaactncatgctcgaacaccccaactattttttggtcaattctcgttctttgcatataggaagaagattctctgctctcggtgctgatgaagagttggagtttggca

SEQ ID NO: 16459 - DNA, 210 bp, Glycine max
  unsure (1)..(210): unsure at all n locations; Clone ID: 701044640H1
gtccttaaccctccaacaaatatatacccttctttcccacaattctatgatcacaattttctctttctctttctctccttcaaaatcgttgtcaatttngcctctttctttctcaactcccttagattctntccatcgggtcttcaaaaatgcggatgagctgcaatggatgtcgagttctcagaaaaggttgcagtgaaattgcagccc

SEQ ID NO: 16460 - DNA, 77 bp, Glycine max
  unsure (1)..(77): unsure at all n locations; Clone ID: 701044641H1
gtactgtttcattaactttttgtatccattccggactacttcactgggttttaatagttacattttncaagaacggc

SEQ ID NO: 16461 - DNA, 281 bp, Glycine max
  Clone ID: 701044642H1
ttcgtttttcctctacggcgtttctcttctccagcttctgtgggtgaagcgagttttggcgatggagaaaggaggaaagggcgcttcgctgttcagcaaagggggactaggatccctaaaagggaaagatgacattgcaacaaaatcagcaaagggaaggagggttcagttttctactgatggtccattatttgaatctggagtaagtagtaactcagccattcactaaaatctggtggaaaaggaggattgggagacatgttgcaaaggtggaaagattc

SEQ ID NO: 16462 - DNA, 283 bp, Glycine max
  unsure (1)..(283): unsure at all n locations; Clone ID: 701044643H1
agaatttccattgcatgcaaagcaaatacgcattatattactagttttaatttgttttgtcgtttgcttctttctttgattaatgatgactagctttaaggttgcatgtgtggttgcgatgatgtgcatggttgtngccatgagtgttacacccatggcacaggccgcaatcacgtgcgggcaggtcgccggcgacgtgtcctccgtgcctcagttatcttcgaagcggcggaaaaccgtcggacgcctgctgcaacggagtgaagtcgctcagnggcgnggc

SEQ ID NO: 16463 - DNA, 209 bp, Glycine max
  unsure (1)..(209): unsure at all n locations; Clone ID: 701044644H1
cgcaaattgaaagcaatgccaagaagatggaacaactggaggctgagaatgagaaactggggaacgagctccaagaactgaagctccgaatgaaagaagagaaaacagagaatctgagaaaaatacaagctttggaggatgagatagcggagtccaagaaaacggcgtcggatcgcgtttgcaaggcgctggtaaccaacgagcntttt

SEQ ID NO: 16464 - DNA, 278 bp, Glycine max
  unsure (1)..(278): unsure at all n locations; Clone ID: 701044645H1
ttccggcaaagagcttgagaaggagcccaagtttttgaagaacggtgatgctggttttgttaagatgattccaaccaaacccatggttgttgaaactttctccgagtatcctccacttggtaggtttgctgttagggacatgcgtcaaactgttgctgtgggagtcatcaagaacgttgagaagaaggatcctaccggagccaaggtcaccaaggctgcccagaagaagaatgaatcgtgcgggctggttnaccaggggatgttggttacataatgtg

SEQ ID NO: 16465 - DNA, 282 bp, Glycine max
  Clone ID: 701044646H1
ctcagaacccccaccttccggccaccgcctccgccgcgcgcagcaaagtcgccgaaatcatcgcgcttcgccgtacgtgtccttcagacagagcaccacctgcgggagaaaaccctcctcgcttctctcctccctgccgttccctaatgttccctctctacggttcgtcaggttcgttcccttcgctttcgacggcgacaccgaggccccgcaagttcaggagccggaggttcaggttctggacccttcagatggtgctgttggtgtaaagacatgcaagtg

SEQ ID NO: 16466 - DNA, 291 bp, Glycine max
  unsure (1)..(291): unsure at all n locations; Clone ID: 701044648H1
tttcgtcaattccaacaacaccacaatgggaagaagaccggcgaggtgttaccggcagataaagaacaaaccgtacccgaaatcccgtttctgccgcggcgtgccggagccgaagatccgaatctacgacgtgggaatgaagaagaaaggcgtggnacgagttccccgttctgcgtgcacctggtctcgtgggagaagganaacgtctcccagcgaggctttggnggcggcgcgnctncgcatgcaaacangtacntggccangttcgccgaaaaagntgccttnccggng

SEQ ID NO: 16467 - DNA, 284 bp, Glycine max
  unsure (1)..(284): unsure at all n locations; Clone ID: 701044649H1
attcatgtaagattttntctgtngcttttgangaagttgtatgttacatnaacatatctaccatggtgcccccatcanaacnaaacttgnntnantcattgggttacatggttaaaggttatnganagncagactangagatgatggnatnncaatcactagagttatattatatgcatcatctatttcattntcttcanttgaagtttgcaccaaaaaacanagaaagnaagttttctttcanatcattgcgatcctggttgtgntagattctcctcttttgt

SEQ ID NO: 16468 - DNA, 186 bp, Glycine max
  unsure (1)..(186): unsure at all n locations; Clone ID: 701044650H1
gtcagatagtactagaaaatgggtcatcgctggaatcccttcacgagcgccattgaagccaatattcaccaccannnnnnnnnnnnnnnnnnnnnnnngtgacttggaagagtgttcaacgacaccaaaaggggaagaagcaaagattccaaccacgttgaatgtccaccagctcctaggaaaaga

SEQ ID NO: 16469 - DNA, 286 bp, Glycine max
  unsure (1)..(286): unsure at all n locations; Clone ID: 701044651H1
caccggcaagactataaccctagangtcgagagctccgacaccatcgacaacgtcaaggctaagatccagggacaaggagggtatccccccagaccagcagaggctgatcttcgccggcaagcagctcgaggacggacgtacccttgctgactacaacatccagaaggagtcaactctccacttggtgttgcgtcttcgtggtggtatgcagatcttcgtcaagacccttacgggtaagactattaccctcgaggtggagagctccgacaccattgacaatgtgaa

SEQ ID NO: 16470 - DNA, 280 bp, Glycine max
  unsure (1)..(280): unsure at all n locations; Clone ID: 701044652H1
gctataagctagtttatcgtgaggngaatatgaagttgtttgttttctttgttgctgcagtagttttggtagcatggccatgccatggcgcaggctaccaaaggttccctctccgaatgaaaactggctatggtgagcgttcttcggaggtaaaatgcgcaagttttaggcttgctgtggaagcacacaacatccgagcctttaaaaccatcctgaagagtgcgttgaaccaacaaaggactacattaatggcgaacatttagatcagactctaaaacag

SEQ ID NO: 16471 - DNA, 267 bp, Glycine max
  unsure (1)..(267): unsure at all n locations; Clone ID: 701044653H1
ttggcttctgcagaagtagagttccgatgctttgttggtgggcttgcttgggccaccgaccacgatgctctcgagaaagccttctctcaatttggcgaaatcgtcgaatcgaaggtcatcaacgatcgtgaaactggaagatccagagggtttggatttgtgaccttcgccacagagcaggcgatgagagacgcaattgaaggaatgaacggccagancctcgacggtcgtaatataaccgtgaacgaggctcaatcccgtggaaaa

SEQ ID NO: 16472 - DNA, 285 bp, Glycine max
  Clone ID: 701044654H1
ggtaagcaatggcgggaaaaggagggaaggggcttcttgcagcgaaaaccaccgcggcgaataaggacaaagacaaggacaagaagagacctatttctcgctcttcccgtgctggaatccagtttcctgtgggacgtatccataggcagctgaaacaaagggtccaagccaatggacgtgttggggcaacagctgcagtgtacttagcctacaattctagagtatctgactgctgaagttcttgaattgctgggaatgcaagcaaggatctgaaggtgaagagga

SEQ ID NO: 16473 - DNA, 183 bp, Glycine max
  unsure (1)..(183): unsure at all n locations; Clone ID: 701044656H1
gcatacgctacttctgcttcgttgcgatgttggaaatcaaaaccgccaagacccgcaagggcaagcgggagtagagaaacgcgctcccaagctcgtggaatcggggaagaagacgctgatcctgcacggaacgaagaccagcggcgtgctnancgcgtgctggcgcanntttatcanngaagg

SEQ ID NO: 16474 - DNA, 183 bp, Glycine max
  unsure (1)..(183): unsure at all n locations; Clone ID: 701044657H1
gaaaattgaatcaattcgaaatggtaaatcttgggatgaaattgactcgaattcaaatcaggattatgacctagtgaaatcttatgtgtcanagatccaagatctggaaggtgaattgcggggtttgaaaaatttgaatgcgaaatctagacatgttgactgggttgattcagatgatagtgg

SEQ ID NO: 16475 - DNA, 277 bp, Glycine max
  unsure (1)..(277): unsure at all n locations; Clone ID: 701044658H1
gctaataacaatggatggatgttacttgattgatagaagttttaattttcgaagggtccaaatgaggtttccttgcagaagtacaaatgatggtttgggcgagaagacccaccacttcacattacttgatggtgagatggttattgatacattgccagattcacagaagcaggagagaagataccttatatatgatctgatggcaatcaaccaagtatcagtatagagcgtcccttctatgaaggtggaagatgttgagaaagagtgntgancctag

SEQ ID NO: 16476 - DNA, 183 bp, Glycine max
  unsure (1)..(183): unsure at all n locations; Clone ID: 701044659H1
gccaagtgaaagtgaganaaaataaaaatcaaagagcataatgtcagggatcattcacaagattggggagacccttcatgtgggagggcacaagaaggaggaggagcataagggtgagcaccatgctggagaatacaaaggggagcaccatggtgaacacagtagtgagtacaagggaganct

SEQ ID NO: 16477 - DNA, 282 bp, Glycine max
  unsure (1)..(282): unsure at all n locations; Clone ID: 701044660H1
cctttgtggctcattgtattcgaacgaaccctaacaacgtctgtggctctgtgtgagactgcgagccacgaacccaatctccgacgacgacgacctcggtccagggacgacttatctccggagacccacaacttttccggcgaccaaccgtgcgcaggtgcaaggataagtgtgtgatctatctataaacgcaagatgtcagctgggctggacttgaatctcttgtagatccgaccattccggcnttaccaatggggggncnanattatngggggannccta

SEQ ID NO: 16478 - DNA, 280 bp, Glycine max
  Clone ID: 701044661H1
tacaactagtaacaaagatccaacaagcagatcaatctctctctctgtctcccaatcaaaacagacatgggtttgaaggaggattttgagcagtatgctgagaaagcaaagactttgccaccgactcaatcaaacgaagacttgcttatcctttatggattgtacaagcaggccaccgttggacctgtcaacaccagccgtccgggaatgttcaacatgagggacagagctaaatgggatgcatggaaggctgttgaagggaaatccaaggacgaagcat

SEQ ID NO: 16479 - DNA, 263 bp, Glycine max
  unsure (1)..(263): unsure at all n locations; Clone ID: 701044662H1
caaaccttgaatgtttaccgcanngccggataaggaganaggagaaggaggatctgcgtccgcaggcactgttcatcgccatgtctcgggttgataacagaaattcctcagccaccaagcgtgctaggactgatggtagtcgtagggaagatgattggacatgccccagctgtggcaatgtcaatttctctttcaggacaacttgtaacatgcgtaattgcactcaaccaaggccggctgatcataattcgaaatctgctgcc

SEQ ID NO: 16480 - DNA, 236 bp, Glycine max
  unsure (1)..(236): unsure at all n locations; Clone ID: 701044663H1
cttccaacaagttaacagccactcacttccaaaaaggaaagggttttttcagttattatttttattttccttacattcttcacactatcccctttcaccacaaaaccctaaacccgcattctccaatccaattcaacccctcccttcccatgttcttctccttctccttgcacccgaattcaacaatctcttccgatgtgacaccgcaaganctcagagcacggccattgttccgc

SEQ ID NO: 16481 - DNA, 160 bp, Glycine max
  unsure (1)..(160): unsure at all n locations; Clone ID: 701044664H1
gacacttgaaataatgccaagtatactaaatgtcttagtcttaagaggggggaaaaactggaattccaatgattcttaatttcttnccaatccaatctgcaaactgagtgagatatataacttgtttttgatttcttcctcatcattttggcatanacaa

SEQ ID NO: 16482 - DNA, 264 bp, Glycine max
  Clone ID: 701044665H1
cgaagtgatccactccaggtgggccatgctcggagccttgggctgcgtcttcccggagttgctgtcccgcaacggggtgaagttcggagaagccgtgtggttcaaggccgggtcccagatcttcagcgagggtgggctcgactacttgggcaacccaagcctgatccacgcccagagcatcctcgccatctgggccacacaagttatcctaatgggtgccgttgaaggttaccgtattgctggtggccccctcggtgaggtcat

SEQ ID NO: 16483 - DNA, 281 bp, Glycine max
  Clone ID: 701044668H1
caggaattctttaatgctggtgataaccagcttgaaatgctcaagactttgcaagagacagcaagatttgaagttgataaaatgatgcttacagatgcaccacttttatttcctcctggttggccttggctgctttacgcaactcaaatgcattccacagagtcattgactttgatagttatcttaggggtattttttcccgtgagaattccatgcatacaatgtccgagctttctgaatcactggatgcaattgattcttgggttagaaaatacaaaagt

SEQ ID NO: 16484 - DNA, 281 bp, Glycine max
  Clone ID: 701044669H1
gccttcacaaaaaaattatcgagatcccctttttctcctaagaaaagccatggctaagggtcccggtctctactctgacatcggcaagaaagccagggatctgctgttcaaggactaccacagtgaccagaagttcaccatcaccacctactcacccactggagttgctataacagcatcaggaaccaggaaaagtgaactgtttgtggctgatgtcaacacccagttgaagaacaaaaacatcatactgatatcaaagttgatacagattctatctcttc

SEQ ID NO: 16485 - DNA, 282 bp, Glycine max
  Clone ID: 701044670H1
ggattttagaaagaattgctgtgcattatgtttcacaaagaatggcatggaagcttcttaaagatatccctagatctgcaactcgcaaggctggaaggagcatgcctactttggtttacgtctactgtgtgagcagaacaacattcagaggacatatgcttggagttgcagcatcatggcttgtccaagtaggcattgatttatatcgattctttcctccgcgttccagggtcagcatgaggataatgatgttgatcaaaccaatcaagttggagttcttgg

SEQ ID NO: 16486 - DNA, 284 bp, Glycine max
  unsure (1)..(284): unsure at all n locations; Clone ID: 701044671H1
gaagaagctaaaaccctttccatggtgttgctgcatctacatcatcgtagctagctgagagccaaatcatggcgggtcccattcttcgttctctctggtcctccaccaggaaannnnnnnnnnnnnnnnnnnnnnnnnnnnnnnnnnnnnnngctccgttttcccactcgcgcttcttctcacgcaccttcgccgccgctacnnnnnnnnnnnnnnnnnnnnnnnaccgcctcctccctcgaccccagccacctccgaaatgtggcggtgatcgcccatgtcga

SEQ ID NO: 16487 - DNA, 278 bp, Glycine max
  unsure (1)..(278): unsure at all n locations; Clone ID: 701044672H1
ggangcacaccttcaggagcagtcatggttctcaaaaccgagctgtgccgattcagcggtgccaagatctacccagggaaaggcatcagatttgttcgtggtgattctcaggttttcctgtttgctaactcaaaatgtaagaggtatttccacaacaggttgaagccgtcaaagctcacgtggactgcatgtaccgaangcngcatangagggnattgctcaagaagctgtgaagaagagaagacgtgctaccaaaaaacttactctaggtctattgt

SEQ ID NO: 16488 - DNA, 281 bp, Glycine max
  unsure (1)..(281): unsure at all n locations; Clone ID: 701044673H1
cacaattaggagggcacatgctgttcatcccattactgctgtgcaactggagtggtccctttggactcgtgaaattgagcaagatattgttccactttgcagggaacttggaattggaatagtaccatacagcccccttggccgtggattttttggtggcaaggctgtcgtagaaagtatacctgcaaacagttttctggcatttcaaccaaggttacgaggggagaactttgacaagaacaanatcttatattctaggatagaaaaattggcagagaagt

SEQ ID NO: 16489 - DNA, 281 bp, Glycine max
  unsure (1)..(281): unsure at all n locations; Clone ID: 701044674H1
ctttcgttctcactctgaccgggaaaagaaaaatcagctttcangcaagcaccctagatttcctctctctctctctaaaatggcgttctcttcttttctcggccgagtcctcttcgcctctgttttcatcctctccgcttaccaagaatttaatgcttatggagttgatgggggacccacagcaaaagcactcagaccgaagtttgatgcctttgcacatcaagtacattctaaagctggctttcaattccagatattgatatgaaaattttagttgctgg

SEQ ID NO: 16490 - DNA, 180 bp, Glycine max
  Clone ID: 701044676H1
taacaagcttggttggtaagttatctacaatctgcatcatggaaggtgttattctgagaagggtcattccttcggataacagttgcctcttcaatgctgttggctatgttatggatcatgacaaaaagaaagctgctgagttgagacaggttatagcagcaacagtagcaagtgatccac

SEQ ID NO: 16491 - DNA, 277 bp, Glycine max
  Clone ID: 701044677H1
gtcactggacacaaaaatggtgatatccataagagcggttatgtagaacatctaataagctttgtatggacgaactggagggaagggactgccttaaatatagtagatcaaacactgcacaataattcaagagacgaaataatgagatgcatccatattggattactttgtgttgaagataacgtagccaatagaccaaccatggcaacagttgtatcatgtttaacagtaatctctcgttcttcctataccctcacaacctgcatattctaacgat

SEQ ID NO: 16492 - DNA, 279 bp, Glycine max
  Clone ID: 701044678H1
ccaaaccaaaactttatccatccatcccaaaaagtttgctttggttaatgcccctaacaaatttccatttttattttccctgtttgtgactagagagttgggttcccatgccggttgatttggacaacgcttccacagcttcaggggaagccgccagcgtctcttcctccggccaccaaacaaaacccgccgtcccaaagaaaaaacgaaacctcccgggcatgccagatcccgaggcagaggtgattgctctatcgccgacgggctcttggcaacaaa

SEQ ID NO: 16493 - DNA, 280 bp, Glycine max
  unsure (1)..(280): unsure at all n locations; Clone ID: 701044680H1
gaaatggacagcgacatttcccagtgggtgacggagttcctactccgcagctccgtccccgattccctaatccaaaaaaccctagccgccctccctctctctaccgcctccccccgcctcaagaaaaccctcctcctcngnaccctccaaaccctcctccgcacagccacactctccgaaacngcgctcgacatcctcgaattcctcgaacccagtgccctgtntccgangcgcacngngcggtactgcgcagtngccgtggagtgcacgtaaagtaccg

SEQ ID NO: 16494 - DNA, 279 bp, Glycine max
  Clone ID: 701044681H1
gccttctacggcgaggacgacgggtttgatggcaatgatgtcgttgatttgcttcctgattcgtttgatcttgatgctggcgaggatctttttgaagagtttataagatcttctgaatcccaagaagaaactggacccaaagtaactgcatgaggcttagagatgaacccatttaaagaatctacctaccaacctaagagactggacccaaggccttagctttaggtcagttagatgatatgtttgcatcatgttatccgtagcttcaatttctgtaac

SEQ ID NO: 16495 - DNA, 276 bp, Glycine max
  Clone ID: 701044683H1
aaccctaactaccactgagactgagttgagcggagaagagaaggaagagcgaatggggcagaagcagcgttcaagttccgaagccgacaacgaagtcaagaaacgacgccgtgttggtttctcaggcgttgattctggagttgaggccaaagactgcatcacaatctatctagtttcaagcaaggaggattcgatgctccagagagttttgtcatcatcctgtggatctgaatagctttttgatgatgatgggaaatttatggttatgagggtttg

SEQ ID NO: 16496 - DNA, 276 bp, Glycine max
  unsure (1)..(276): unsure at all n locations; Clone ID: 701044684H1
cgcgggtgaggtagaacccttccactgtggtgactctgcgatgggtgcctacaagtatgtttcagagctatggcgcaagaagcagtctgatgtcatgcgcttcttgcagcgggtgaggtgctgggagtataggcagcaaccttccattgttcgtttgacaaggtctacccgccctgacaaggctcgtcgcttgggcttcaaggctaagcagggtatgtgatttaccgtgttcgtgttaggaggggtggccgaaagagaccattcccaaaggtatng

SEQ ID NO: 16497 - DNA, 282 bp, Glycine max
  unsure (1)..(282): unsure at all n locations; Clone ID: 701044685H1
ctttaaacgccgaagaaagttcatccaatctccgaagcccttcncccgcattgcaaccatgtcgagaagaaaggttagagagccaaaggaagaaaacgtgactctgggcccagctgttagagatggcgaacatgtctttggcgtcgctcgcatctttgcctccttcaatgataccttcattcatgtcactgatctgtccgggagggaaacacttgttccgcatcacaggtggaatgaaggttaaggctgacagagatgaatcgtctccctatgctgctatgc

SEQ ID NO: 16498 - DNA, 279 bp, Glycine max
  unsure (1)..(279): unsure at all n locations; Clone ID: 701044686H1
anaggcctaaaaccgcgctgtgagtgctgagaacgttacttcattcaaaagcagcaacagcaggttattctttgtttcttttcgttcttccacagccggtagattcggctttgtccatggccaccgaaccaaaagcagccactgaggacgtcaagattgatctcttcgaagacgatgacgaatttgaagagtttgaaatcaacgaagagtgggatgacaaggaggaagggaaagaagtgactcaacagtgggaggatgttgggatgacgatgatgttat

SEQ ID NO: 16499 - DNA, 182 bp, Glycine max
  Clone ID: 701044687H1
gaagttgttggtgctcgtttgatttcccatgctggtagcctcacaaatttagctaagtgcccctcttcaactcttcaaattcttggtgcagagaaggctttgttcagggcattaaaaacaagaggaaacactcccaaatatggtttgatattccactcttcttttattggtcgggcatctgc

SEQ ID NO: 16500 - DNA, 171 bp, Glycine max
  unsure (1)..(171): unsure at all n locations; Clone ID: 701044688H1
taaatagttattgtgcttttgttttattagacagttgtaaggcactgtgttctacatgtgtttgcagttgtctgcatgcattgtaattttcaaagtccgctttatcaagctgagtcagtnaaataaattattccctctcattgctagngggaatagatttgtcccngnatc

SEQ ID NO: 16501 - DNA, 204 bp, Glycine max
  unsure (1)..(204): unsure at all n locations; Clone ID: 701044689H1
ctttcttggattccacagctcttactctcnctgcagagaacanaagctcctcactgtaaacttgttcttctgaagattgcaacattgtatcctcaggctctgtattattggttgcgcacatacttactggaacgacgtgatgttgccaataaatctgaacttggtagaatagcaatggctcaacaangaactcancaaggtntt

SEQ ID NO: 16502 - DNA, 276 bp, Glycine max
  unsure (1)..(276): unsure at all n locations; Clone ID: 701044690H1
caggaaggacaaggactccaagttcaggttgattcttgttgagagcagaatccaccgacttgctcgctattacaagaagactaagaagctcccaccagtctggaagtacgaatcaacaactgctagcactctggttgcttagagaatgtatcaactttcatgggttttgctaccgtgcagtcgccgttgagctagcaatttgccatatcattttgatgtttatttgaaggctggataggttagnggctaatttggtccgnacctanggtaanccgg

SEQ ID NO: 16503 - DNA, 176 bp, Glycine max
  unsure (1)..(176): unsure at all n locations; Clone ID: 701044691H1
atttctgcagtcggcaactcttccctttctcttgaagcttctattctgtgctgttgctgaatcagaatggatggtgctgtgttggcatgtacagatggagcagttcttcccgtcagtcaagtgtttnatgcaattagagagcttgggaatggagggcttgagnatgggatcccttg

SEQ ID NO: 16504 - DNA, 273 bp, Glycine max
  unsure (1)..(273): unsure at all n locations; Clone ID: 701044692H1
gcctcaggtaagccaaaaccatggttaagcataacaatgttatcccaaacggacacttccgtaagcactggcagaactatgtgaagacttggttcaatcagccagcacggaagacaaggagacgattggctcgtcagaagaaagctgtgaagatattccccagacctacggctggacctctacaggcccattgtacatggtcaaactttgaaatacaacatgaaagtgagaggtggaaggggntttctcttgaagaatcaggcaccgggttcc

SEQ ID NO: 16505 - DNA, 275 bp, Glycine max
  Clone ID: 701044693H1
ggaaaagttgtccttgaattggcagctagaagtaatcttaagcctgttactctggagcttggtgggaaatctccttttatagtatgcgaagatgctgatgtagatgaggctgttgagctagcacactttgcattattctttaatcagggacaatgctgctgtgctgggtctagaacatttgtacacgaacgtgtgtacgatgaatttattgagaaagcaaaggcacgtgctttgaagcgtgctgttggtgatccattcaaggggggaatagagca

SEQ ID NO: 16506 - DNA, 274 bp, Glycine max
  Clone ID: 701044694H1
aaaaaaatcatctacgttttggcgctataaaaagggaaagtcgttcagcatttttggttcttccactaacagagccattaaatcttctctcaaaatatttgtgattccatgcccaacgccctaccctgaaaatatggtagccgagagagaggttaacggtaacggcgtcggagagggaagaacaacgctaatattcacctacggaaccctgaagcgaggttctccaaccacccccttctccagacctcttcgctccggcgacgcttctttcgtg

SEQ ID NO: 16507 - DNA, 275 bp, Glycine max
  unsure (1)..(275): unsure at all n locations; Clone ID: 701044695H1
ctgtccccactggagaagatcagcctcagataaggaaacgaaacataggaatcgctttctttgctctttcccaacccaatggctacttccattaacagcagcagtgctctggggtggaaacattcctccttgttcgtacaatctaataatggctttaacgtggcttcgcctcctttcaaacataaaccgccacgctcctccaagttttctctcacttgctctgcggttctcttcttctgatccantattggttaggctgctaggggggatctgtt

SEQ ID NO: 16508 - DNA, 181 bp, Glycine max
  Clone ID: 701044696H1
ccctaaattgcagtttgacctagagaggccgagcgagagagcgagggagcatggaggagggaaaattgagagagctgaagcaattcatagagatatgcaagtccaatccctcacttctccacaatccatctctttcattcttcaagacttatcttctcagcctcggtgctcgcatcctccc

SEQ ID NO: 16509 - DNA, 214 bp, Glycine max
  unsure (1)..(214): unsure at all n locations; Clone ID: 701044701H1
cccttacccttctctatcgctcgctttcctttgacgcttctgacccttgcttntctgcgtcnnnnnnnnnnnnnnnnnnnnnnnnnnnnnngtcgtaatggctctcccagactctcttcccgtcgcaactccctgatcccctccttcatctactcctcttcctccaaaacgcncctctcnaccacatgctcaacacgcctccgctgccgcgcgc

SEQ ID NO: 16510 - DNA, 174 bp, Glycine max
  unsure (1)..(174): unsure at all n locations; Clone ID: 701044702H1
cttattcagtagttcttctctctcgaatttncactcactttctgtgcatcaatggcggcgataagtctccggaaggggaacacgcggcttccgccggaggtgaaccgcgtgctgnacgttcggaaccttcccttcaacatcaccagcgaggagatgtacgacatctttggcaaa

SEQ ID NO: 16511 - DNA, 253 bp, Glycine max
  unsure (1)..(253): unsure at all n locations; Clone ID: 701044703H1
cgcagttgcgaaaccgcaacacaacatgcgataggccnccccgcaccggggcgatagangacgcgacggccgctccttcaatcctccccgagcagaggtcattgtcgcggcaaggggccgctccgctccggcgcgatacttagatttgcattagcatcaaatgaatgcgtacaggagtgatttacatattgcatatttaacctacttttctgtgtattcaactaataatcatgtcacatttcattgcaggaat

SEQ ID NO: 16512 - DNA, 171 bp, Glycine max
  Clone ID: 701044704H1
agttggaggagcaaaatcgagctttgcaaatggaaaagatgaatacaatgatggcgagccaggcgagagcttcgtttcagaaggtcacgagtaatggaatgagaaggccaatgcactcaattttggggttgctttcgatgatgcaagatgataatttgaagagtgaacaga

SEQ ID NO: 16513 - DNA, 270 bp, Glycine max
  unsure (1)..(270): unsure at all n locations; Clone ID: 701044705H1
tggtgcaggagaatgcaagaacaaaagaatcgtggtcgcttctggaaatgagattcagtttcattgcaagttgaaaagaaatgttctttgttgaggcaagaaaatgagatttncagtttaattacaagttgatcgatcagttcaccaaagattttgaagtcactgcaagttgacaagtgattacatgaaatagagaaaatgtagattttgttttacgcaaaccttgcaactcatgtctgaaacatttttttctttttgcctattgtaatt

SEQ ID NO: 16514 - DNA, 272 bp, Glycine max
  Clone ID: 701044706H1
gtgtgcagaagagcgtcgcagttgtaaccctaatcagaagaagcgcagttcaagcgagtgacagccaccagccatgggtcgtatgcacagccgcggtaagggtatatcctcttctgctttgccctacaaaaggacacctcctagctggctcaagatctcttcgcaagatgtcgaagaaaatatatgcaagtttgcgaagaaaggtttgaccccgtctcagattggtgtcattctcagagattctcacggtattgctcaggtcaatagcgtca

SEQ ID NO: 16515 - DNA, 273 bp, Glycine max
  Clone ID: 701044707H1
gtggatgtgaagacaactgataactacacattgaggatgttttgcattggatttaccaagagaagagctaaccaagtgaagagaacctgctatgcacaatcaagccagattgacagattcgtaggaagatgagggagatcatgaccaaccaggcaacatcctgtgatttgaaggagttggtccgcaagtttattcctgagattattggaaaagagattgagaaggcgacatcctagtatttaccctctgcagaatgtgtttgttcgaaaagac

SEQ ID NO: 16516 - DNA, 271 bp, Glycine max
  Clone ID: 701044709H1
cccttttccaaacccgagaaatctgattcgttcattgccattgccagggttggaaagacctcgttgatgaatcaatacgtgcacaagaagtttagtcagcaatataaggctacattggggctgattttgtcaccaaagagcttcagattgatgacagacttgtcactctacaaatatgggacactgctgggcaagagagattccagagtctcggggttgcatttacagaggtgccgattgctgtgttctgtgtatgatgtgaatgtgatga

SEQ ID NO: 16517 - DNA, 272 bp, Glycine max
  unsure (1)..(272): unsure at all n locations; Clone ID: 701044710H1
gggaaagagggtgcaaagtgcatcttctttttgttgttctctcaaactttaacaatctcataaataaataatcagannnnnnnnnnnnnnnnnttgaattcgaaaaatcgtacgtaggtttggttgcgattgaaacggtacgatgggaagaggaaaattcaagagcaagcccaccggtcgccgccagttctccaccccggaagatatgcttgctggaacctctaaccgtcctcgaacttttagacagaaagaagctgagcatgaagaggagc

SEQ ID NO: 16518 - DNA, 249 bp, Glycine max
  unsure (1)..(249): unsure at all n locations; Clone ID: 701044711H1
acaacaacaaacctcatcacacanacagagtagtagantgagagagagaaaaaaananngngtccgttagttaatttcagnnnnnnnnnnnnnnnnnnnnaaaagangagnnaaagcnatggtgacagaggnaganatatctgangcggttcagtctctgctgcgggaatcaaaccctagtagattcacgacgctaaaccaggtggtgtaggagctcaggnaaantnggccaggccttcacncanaant

SEQ ID NO: 16519 - DNA, 171 bp, Glycine max
  Clone ID: 701044712H1
caaaacatgaaaaagttgtaagtcacaaacaacgaaaggtcacgttcaatcttcgttttgctgctgaggcaaactacgtaaaagagctttcataagcaaagacaacccaagagggtatctgatctgatacaacacttagtgccaaaaatccaccttcacccacaaaacaaa

SEQ ID NO: 16520 - DNA, 171 bp, Glycine max
  Clone ID: 701044713H1
ccagtgttagtgtgtatttcctctcttctcactccgggatcgatattttcaagaacagatcgaaaagccgttcatcgatttgttggatctgtgagtgagaagatggttactagacagaggagactcaattgaacaggctcgaaaaccaggtcgataacggcggcggcggcg

SEQ ID NO: 16521 - DNA, 276 bp, Glycine max
  Clone ID: 701044714H1
caaccttaacactcctcacttcgtttccgtcgcagctttttacacactccaccgctgcttccccttcacctccgatttcgttaatcagagatcaaaatgtctcgaagatatgacgccgtacaacaatcttctccccggaaggacgtctttaccaagtggaatatgcaatggaggctattgggaatgctggtaccgcaatagggatctatcaaaagatggggtagtgctggttggtgaaaagaaggtcacatccaagctgctccaaacctcaattcc

SEQ ID NO: 16522 - DNA, 276 bp, Glycine max
  Clone ID: 701044715H1
ctcctccttttcaatcctctgttcatccgtcgatcggctcggctggaccatccttgccgccgtttgccgcggcatctccggccactctctctcatcgccattcagtgtattttggttagttgcaaagttttagagttggattggaagattgtgaactaagaaagatggtgaagttgactatgattgcccgtgttactgatggtcttccgctagctgaaggactggatgatggtcgtgatctaaagatgcagattttacaaacaacaatcaaggctt

SEQ ID NO: 16523 - DNA, 284 bp, Glycine max
  Clone ID: 701044716H1
gtggatgtgaagacaactgataactacacattgaggatgttttgcattggatttaccaagagaagagctaaccaagtgaagagaacctgctatgcacaatcaagccagattagacagttcgtaggaagatgagggagatcatgaccaaccaggcaacatcctgtgatttgaaggagttggtccgcaagtttattcctgagattattggaaaagagattgagaaggcgacatctagtatttaccctctgcagaatgtgtttgttcgtaaagtcaagatcctgaag

SEQ ID NO: 16524 - DNA, 275 bp, Glycine max
  Clone ID: 701044717H1
cttgatttggctggtcgtgacctcacagatttcttgatgaagattttgactgaacgtggatattcttttaccacctcagcagagcgtgaaattgtgagggatatgaaggaaagctggcttacatagccctcgactatgagcaagagctagagacatccaagaccagctcttcagtggagaagagctatgagttgcctgatgggcaggttatcactattggcgctgagcgtttcaggtgtccggaggtcttgtaccaaccatccaggtaggatgga

SEQ ID NO: 16525 - DNA, 160 bp, Glycine max
  unsure (1)..(160): unsure at all n locations; Clone ID: 701044718H1
ctgagcttctgcaatttgttgaggcagtaaagaatagtcccatattttcacngtttataagggacttgtctgtggctaaggatgttagagtgaaagttatccggatatttgtggggaagccaagttttcggatgttacaaagaacttccttgttattgtt

SEQ ID NO: 16526 - DNA, 269 bp, Glycine max
  Clone ID: 701044720H1
gttcctcaagccaccgtaccgtgttgcctctctgcaatctacagccaaaatgcctttcaagaggtacgttgagatcgggagggttgcccaaatcaactacggcaaggatatggcaggctcgtcgtcattgtcgacgtcattgaccagaacagagctcttgttcgatgcccctgatatggtgaggtcccaagtcaatttcaaaaggcttccctaaccgatattaagattgacattaagagggtccctaagaagaaagatcttgtcaaagc

SEQ ID NO: 16527 - DNA, 268 bp, Glycine max
  Clone ID: 701044721H1
aaacacacctactacaattgttaaagtcctttcttgtcatagcaaaaatgaagcttgtctttgccaccctactgttatgttctcttcttctaagctcctctttcttgggccagtcatcgcctatgaagactcgtgtaagattttctcttactgctataaagaagtatatatataaaatcagtgaatatttttgtgtgtttgtggcagcttattgcagcaacaagtgttcggacagatgctcatcggcaggggttaaggataggtgtct

SEQ ID NO: 16528 - DNA, 269 bp, Glycine max
  Clone ID: 701044722H1
ggtgagcattcgccggatgctcgctttgatctctgattttcctccagaagaagaaccctctccttcaccgaaggtggctaaaacaacatcacttcatcaaagtgatcaaaattgtaaggatttaattaaattgtggctgcaattacaaattggagacaatttcagcttatcgggtggccatattaaggctcagaaacctccaaatgttgcggctgctgtggtggttacaaactgcaatttagactagacccatgccaagtagaatgtaa

SEQ ID NO: 16529 - DNA, 267 bp, Glycine max
  unsure (1)..(267): unsure at all n locations; Clone ID: 701044723H1
angcaaaaccctagcggcgcctgctttctttgttcgtgttttgcatcaggatggagtctcaggtgaagcacgcacttgttgtcaaagttatgggtcgtactggatccaaggacaagtgacccaggttagagtgaagtttttggatgatcagaaccgtcacatcatgaggaatgtgaaaggacctgtgagagaaggagacattctcaccctactcgagtctgaaagggangcaagaagttncgcnagatggtctcttttttnnggccc

SEQ ID NO: 16530 - DNA, 179 bp, Glycine max
  Clone ID: 701044724H1
ccgaaacaactatggatacaatcaagtccttcaagggctacggcaaagttgacgagttggagcagcaagcctatcagaagaagacacgtaagcgcctcataataatcacatctcttcaatcgttctaattgcggtgatcatcgccgctatcgcaggggttgtcatacacaagcgcaaca

SEQ ID NO: 16531 - DNA, 270 bp, Glycine max
  Clone ID: 701044725H1
caattaacacacacaaacagaggctacgtacgatcaaattaattaagatggcggaagtgaggaacaaacaagtggttctgagggactatgtgagtggttttcctaaggaaccgacatgaacatagttgaaggaaccacaatattgaagcttccacaaggttccaatgatgtgcttctaaaaaatctctacctttcctgtgaccctacatgagaatgctcatgaccaaggtggaaggcctcgacgtgtttggcacctatacacctggctct

SEQ ID NO: 16532 - DNA, 270 bp, Glycine max
  Clone ID: 701044726H1
attttcttcatccttctctgttctcctagaacttgattacttgaacattccctatgacagatgaggtggttcttctggatttctggccaagtccatttgggatgagggcaggattgcacttgctgaaaagggtatcgaatatgagtacaaagaagaggacttgaggaacaagagtcctcttctcttacaaatgaacccggttcacaagaagattccggttctcatccacaatggcaaacccatttccgaatccctcattgctgttcagta

SEQ ID NO: 16533 - DNA, 265 bp, Glycine max
  unsure (1)..(265): unsure at all n locations; Clone ID: 701044727H1
gttagtgggtggtggactgttcgcctacataagcaaagggagcatcgcttctctcgccggaggcccggctccggtttgcttctcatcgtcgccggctatctcagtctcatgctttcggcaaacgaaaaaatcttacctcgcttctctttctcgagaccgtttgtgcagacatactaacttgggtcatggggcagcgatatttggaaacatccaagatatgcctgctggtcttgtgctggaatcangcncnaagaatcgntttaac

SEQ ID NO: 16534 - DNA, 179 bp, Glycine max
  Clone ID: 701044728H1
attaaagattccattttggaggcccctgcgatgaattttttcccaaatgtgcgttctggtagctatgccgagattggaccgcgcgtttctatggatgatgaacacatttgattgatgatctgggagctcatcttggatttgtgttcaagtgtccgataccgagtgcattttatgcagtt

SEQ ID NO: 16535 - DNA, 271 bp, Glycine max
  Clone ID: 701044729H1
cagatcttgagctcttgcatctctttacttgttttttgtttgtgtttgcttctattttcaagtgaaaacctttttactatcagtcacttgctattttccttgtcctcttttcgtccaatcctaataccatcatggaggatgctgctacttctaatgctgcagaggatagagaaaacaagttcctaactatggcaattgaagaagcatataaggcggttgaaagtggccaggtcgcccatttggtgcagttattgttcgaaacgatgaaata

SEQ ID NO: 16536 - DNA, 274 bp, Glycine max
  unsure (1)..(274): unsure at all n locations; Clone ID: 701044730H1
gatctagcggctagggtaagagctttggcgagggaaaaaaaaagacgagaaattcacaagactacataccgaaaaaccctatttattgattcagagagggcagagcggacgcgatagagaggagctgccaacagagagcattgaggttccgcacaccacagcgaatgnttgacttcactgcttcaattttacaccctctctctgtttggtgatggattttgaatcaaattatgatattgctgcctctgccaattcatcnanactcacaattcat

SEQ ID NO: 16537 - DNA, 279 bp, Glycine max
  Clone ID: 701044731H1
gtagagggatgaaggcattaagctagttgttgaggcgatatgtgctggtatatttaatgacctaggaagtggaagtaatgttgatgtttgtgtgataaccaagggacataaggatatctcaggaaccaccttctaccaaatcctcgtacctatgtcaatccaaaaggctttgatttccccaaaaagacagaggtcctcttaacaaagattacaccgttgaaggagaaggtggaagtgattgaaggagatgctatggaagagtaacaatcattccaaaaa

SEQ ID NO: 16538 - DNA, 117 bp, Glycine max
  unsure (1)..(117): unsure at all n locations; Clone ID: 701044732H1
cttgctanattgatgaacccnattgatagcacatttgcagtaacttttggtganatcgggnaccntngggatttagtgttatggttgctccctgnaataatacanaaacttnggtgg

SEQ ID NO: 16539 - DNA, 277 bp, Glycine max
  Clone ID: 701044733H1
gaaaggagtagtatttgtgaagtgtaatagagactgagagagaaaggggggaaatgggtatgtgatgagagtgagattggcgtcgttcttcactggggctgccgcggcgtcgtttctggggctctacaccctccacaaggattacaaggtcgcgcaccaatcctttactcaacagatgaatgacctccacaaatcgctggaaggtcgaatttcttccttggaaaaactgaaacaaacggaaacgtctgaacaggttgaagcaactgaataagagttc

SEQ ID NO: 16540 - DNA, 273 bp, Glycine max
  unsure (1)..(273): unsure at all n locations; Clone ID: 701044734H1
caaaaactgaaaaacacgagaccaccgcagtcatcactcgcgacgtgagacggcgagacctccacctcctacaccgctgccttgctgcgccgccgcgacgcgagagtgaaaacggcgagacctccgcaccgctgcgccgccactagagctcctcgccctcaccctcgcgagaccccctcattcctcattcagtctcagactctcagcacctcaccggcgccgttagagacattctcgttggacctnacctctcatcntcanggacttggcggc

SEQ ID NO: 16541 - DNA, 268 bp, Glycine max
  Clone ID: 701044735H1
gccacatagagacacaatacagagtgagttgttgctccttcgccacaactctctgccaacatgggtatctccagagattctatgcacaagaggcgtgccactggtggaagaagaaggcctggaggaaaaagagaaagtatgagcttggtcgccagcctgctaacactaagctgtcaagcaacaagacagtcaggaggatccgtgttagaggtggaaatgtgaaatggagggcattgagattggatactggaattactcctggggaatg

SEQ ID NO: 16542 - DNA, 267 bp, Glycine max
  Clone ID: 701044736H1
gggtaagggaacggggagtttcggtaagaggaggaacaagacccacaccctctgtgtgaggtgtggccgccgcagcttccacctccagaagagtcgttgctctgcgtgcgcttaccccgctgcgcgcaccaggaaatataactggagcgtgaaggccattaggagaaagaccaccggaactggaaggatgaggtacttgcgtaacgtgcctcgcagattcaagagcggttcagagagggtaccgaagctgcacccaggaagagagga

SEQ ID NO: 16543 - DNA, 264 bp, Glycine max
  unsure (1)..(264): unsure at all n locations; Clone ID: 701044738H1
aaatcagagcctgagccatcgtttgagattctgactaatcctgcaagggtggttcctgcacaggagaagtntattaaatttttgcaggacagcagatatgttccagtaagttggcaccatcaggatttgtgcttctcaaagacttgcgtcctactgagccagaagtgcttgctctcactgacacaccttcatctaccacttcggctgctggtgggtcagcaacaggattgcagagttctcatcagccatggctgtggatgagga

SEQ ID NO: 16544 - DNA, 164 bp, Glycine max
  Clone ID: 701044739H1
gccacagccgatgctattatttcagttcaaaaagtagcatctcggttgggttgtgataacttagatgaaattacaagagaagacatggctttggaggctcttggggaattgagaagttgaccagagtaaagaagatgttggaagaggctgcaagaccattttaa

SEQ ID NO: 16545 - DNA, 166 bp, Glycine max
  unsure (1)..(166): unsure at all n locations; Clone ID: 701044740H1
cacaaacatccctcttgatttgaaggttgttttgtgcttatagataaaagttctgccaaatcaagaggggttttcagatcatannnnnnnnnnnnnnnntaaacaatggctaagttctttgctgctatgatcttggcactcatngccatttccatgcttcaaacag

SEQ ID NO: 16546 - DNA, 189 bp, Glycine max
  unsure (1)..(189): unsure at all n locations; Clone ID: 701044741H1
ttcatgaatatacagaatggaatatcatcttgaagancaaattgtattatactaactgctaattacttctaataaataacaaggctagcacaagtgtccctagttcctccacctaaaaagacgattacaaatgccagccttgttatttattagaagtaattagcagttagtataatacaatttgctctt

SEQ ID NO: 16547 - DNA, 168 bp, Glycine max
  Clone ID: 701044743H1
gccaaacgtccatccaaaattgcgttcctaaatcgccgctaccgaacacagccgtagacttttaattcattccgctgcgtttctttctctgcacttcaaagttcaaacctagcgaagattccactgttcgccgtcgcacactcgcacgccgcttcacaggtttatggg

SEQ ID NO: 16548 - DNA, 154 bp, Glycine max
  Clone ID: 701044744H1
gcaacaaaaccaccgtgtgctctatgacgtgcccaattcaaggcttggagttgctcgtgaactttgcaccaaataattaaaaatggttaattaacacctaagttgtctgactttggagacaatgatattgtcaaattaatttgactattattgc

SEQ ID NO: 16549 - DNA, 268 bp, Glycine max
  unsure (1)..(268): unsure at all n locations; Clone ID: 701044745H1
agttggaggagcaaaatcgagctttgcaaatggaaaagatgaatacaatgatggcgagccaggcgagancttcgtttcagaaggtcacgagtaatggaatgagaaggcaatgcactcaattttggggttgctttcgatgatgcaagatgataatttgaagagtgaacagaaacttattgtgaattcaatgctaaggaccagcactgtcttgtcaaacttgataatgatgccaggactactcaactagggatgatggaagattcccttt

SEQ ID NO: 16550 - DNA, 274 bp, Glycine max
  unsure (1)..(274): unsure at all n locations; Clone ID: 701044746H1
cttattcagtagttcttctctctcgaatttncactcactttctgncgcatcaatggcggngataagtctccggaaggggaacacgcggcttccgccggaggtgaaccgcgtgctgtacgttcggaaccttcccttcaacatcaccagcgangagatgtncganatctttggcaaatacggcgccattcgccagatccgcatcggcaccaacaaggacactcgnggaaccgctttcgtcgtntagaggacatttacgncgcnaaaaccgccgtcg

SEQ ID NO: 16551 - DNA, 272 bp, Glycine max
  Clone ID: 701044747H1
atcgtcttcgctcacttcagttcctctctcatcttcttcactcaacattccacattcttcctccaaagcttccgctagctttgtatcttctccaattggcgcattctctcgacccccaaaaccctgtttgccgaatcaaggttccactttcacccgaagagaaacgattatgggttttccatcagagcccagaccctagacttctcggattcatcttcgaagggggtttcggctctgaagacgaccctcttctcccggcggacccggttcag

SEQ ID NO: 16552 - DNA, 279 bp, Glycine max
  Clone ID: 701044748H1
caaacatcgtcgccgcccttccctccgattcatctccgtcggcctcgccgacacgaaaccgtagacgaataactccaacaattctcagttctttctttaatattttgagaggacaccaggaatcgtttggcactaaagagaaagtgagagagggagatgaaataagttcgtactgaagatggcgtcgaggcaaatggaagagattcggaagaaattggctgaccttaattacccgagagcgaatgcccctgcacagtccctcctatttgctggcaggag

SEQ ID NO: 16553 - DNA, 267 bp, Glycine max
  unsure (1)..(267): unsure at all n locations; Clone ID: 701044749H1
caatcctatttggggccgcaaaaacaaatctagtggtaaaaacttgagtgctacacctgcataagctgagcttttgcttgtttccatgcttatgtcatttttcgtgtaggaaacagttgagaaatatatgtctgtcccttgttgcagatgatagaattttgtactggatcatgtttagtattgttctcatttattagcttatttttcttcctactaggtactataaagaatgtctngttcaatcaccagcagatcncccttgttggg

SEQ ID NO: 16554 - DNA, 188 bp, Glycine max
  Clone ID: 701044750H1
cagaggcacagagagaaaatggtttcggggtcagggatctgtgccaagagggtaattgtggacgcacgacaccacatgctggggaggctggcatcgatcgtggcgaagaacttctgaatgggcagaaggtggtggtggtacgctgcgaggagatttgcatctccggtgggctcgtcaggcagaagatg

SEQ ID NO: 16555 - DNA, 187 bp, Glycine max
  Clone ID: 701044751H1
caaacctcttcgttccttcgattcattccatttcttccaaaatggccaaagacccagttcgcgttctcgtcactggagccgcagggcaaattggatatgctcttgtccctatgattgctaggggagtgatgctgggtcctgaccagcccgtgatcctccacatgcttgacattcctccagcagcaga

SEQ ID NO: 16556 - DNA, 266 bp, Glycine max
  Clone ID: 701044752H1
ccagttctcacctcaccgctgcatcttcacgtcgtctctaacgagggaaaatgagttcgaggaggtgcagcagcagcgaagggaaagaagaagggtgctacattcccattgactgtgcaaagccagtagaagacaagatcatggacattgcttctctcgagaagtttcttcaagagaggatcaaggttggtggcaaagctggtgctcttggtgactctgttaccgttacacgtgagaagactaagattattctcacctctgactgt

SEQ ID NO: 16557 - DNA, 246 bp, Glycine max
  unsure (1)..(246): unsure at all n locations; Clone ID: 701044753H1
aaaacaacaacaaacctcatcacannacagagtagtagagacgagagagagaaaaaaaaagangagtccgttagttaatttcagttatttattttatatttttaaaaagaagagaaaaagcaatggtgacagaggaagaaatatctgaagcggttcagtctctgctgcgggaatcaaaccctagtagattcacgacgctaaaccaggtggtggaggagctccaggccaagctcggccacgacctca

SEQ ID NO: 16558 - DNA, 265 bp, Glycine max
  unsure (1)..(265): unsure at all n locations; Clone ID: 701044754H1
tgttgctgctcatcctccgtaacctccgagctctgcaccgaagaacgaagccatggggaagacacatggaatgggatctgctcgcaagctcaagtcccaccgcagaggcaaaggtgggctgacaagtcatacaagaaatcacatcttggaaatgaatggaagaaaccttttgctggttcatcccatgccaagggaattgtccttgaaaagataggtattgaggctaagcagcccaactctgccattcgtaagtgtnnggggtact

SEQ ID NO: 16559 - DNA, 186 bp, Glycine max
  unsure (1)..(186): unsure at all n locations; Clone ID: 701044755H1
gcaactgcaactacaacaacattcattcattcacagctgtcacgccgtgaacggaaaatggcaacggcgagacgcagtttcccgcctatcaccgaatgcaacggacgacgccgtgcgagtctgtggccgccgacctcgacggtacgctcctcatctcccgtagctcgntcccgtacttcatgctcg

SEQ ID NO: 16560 - DNA, 175 bp, Glycine max
  unsure (1)..(175): unsure at all n locations; Clone ID: 701044756H1
ggtggggtgtgcagaagagcgtcgcagttgtaaccctaatcagaagaagcgcanttcaagcgagtgacagccaccagccatgggtcgtatgcacagccgcggtaaggtatatcctcttctgctttgccctacaaaaggacacctcctagctggctcaagatctcttcgcaagatg

SEQ ID NO: 16561 - DNA, 266 bp, Glycine max
  Clone ID: 701044757H1
cttattttatctattctctctctttcttttgtgttctaagcagctagaagcaatggagaggaaaagaagccatgcctctttcaccatgtttgcaatgcttgttgggtgatctctcagagccttgtcattcctgtagtatccaccactgttgaagatcagaagaactactacaccccagatccacatgctggaagtcccccctcaggctcacacagtagtactcctccatctcatggccatggaagctctccaccctcacatcatca

SEQ ID NO: 16562 - DNA, 227 bp, Glycine max
  Clone ID: 701044758H1
attgagagtgtgccagacttgaagtcctatttgggtgccaggttttctctgaaggccggggtgaaaccacatgagctagtcttctagaggaaagaggggtgttactcttgtttttgatatcgtgtttgtttattgatgctggttctatagttgccctcttataacattctgttagcagacaaatgaagaacctaaattttgttagtcaaattgtgacgcgtgctctt

SEQ ID NO: 16563 - DNA, 174 bp, Glycine max
  Clone ID: 701044759H1
cgagaaactctaacgaaagagcgagaaagcgaagacagccatggcgtcgtttcttcaatcgtttctggatccgaagaagaactggttcgccgctcagcacatgaatccctctccaaacgctccgcaaatatgggctccgatacgacgatttgtacgatccttactacgatctgg

SEQ ID NO: 16564 - DNA, 153 bp, Glycine max
  Clone ID: 701044760H1
gaggcagcagcgtcttacagaggaatttgtaccccgtgcagatttacttctttttgtcatttctgctgatcgccctttaactggaagtgagattgcttttcttcgtattctcagcagtggaaaaagaaagcggtcttgtcttgaataaagctg

SEQ ID NO: 16565 - DNA, 236 bp, Glycine max
  unsure (1)..(236): unsure at all n locations; Clone ID: 701044761H1
gtgttctgagctgctagaagcaatggagaggaaaagaagccatgcttctttcaccatgtttgcaatgcttgttgattgctctctcagagccttgtcattcctgtaatatccacnactgttgcagatcagaagaactactacaccccagatccacatgctggaagtccccccacaggctcacacaatagtagtcctccatctcatggccatgggagtctccaccctcacatcacaat

SEQ ID NO: 16566 - DNA, 274 bp, Glycine max
  Clone ID: 701044762H1
gttccctacctctcctttcaagatgcagatcttcgtcaagaccctcaccggaaagaccatcacccttgaggtggaaagctctgacaccatcgacaacgtcaagggccaagttccaggacaaggaaggaattcccccggatcagcaacgtctcatcttcgccggaaagcagctcgaggacggccgtaccctcgccgactacaacatccagaaggagtcaacccttcacttgtccttcgtctccgtggtggcatgcagatcttcgtcaagatctca

SEQ ID NO: 16567 - DNA, 275 bp, Glycine max
  Clone ID: 701044763H1
aagatgtgcatgtggaccacacagatgttagaatgctcatacttgcttggaaattgaaagctgaaaaacaaggttatttttccaaggatgagtggcgaaaagggctcaaagtttaggggctgacactcttccaaaattaagaaaggctattaatggactgaagaaagaggtgacggtaccagagtgctttgaggatttttattcctatgcatttcatactgtttaacagaagaaaagcaaaggagtatagatattgagaccatctgtgagctgtt

SEQ ID NO: 16568 - DNA, 272 bp, Glycine max
  unsure (1)..(272): unsure at all n locations; Clone ID: 701044764H1
tttctcttcaatactactctcaactcattcttctctctcaaaaaccattagaaacgaaaataaccaaataagaagaaagaaacaatgaacgacttgttctcaggttcctttctcgcttccgcagcgaccagtcatccccggaccgccaccacgacatcgagatgggcgccgccgccggtggcccccgcggcggcgaggtgaactcgacaattcttcgaggacgtggaaggcgtgaatgaggaactaaaggattagaggntagcgcagattta

SEQ ID NO: 16569 - DNA, 269 bp, Glycine max
  Clone ID: 701044765H1
tttgggagaaatttattcagctctcatcttcggcagctttctcttctgtgttttcttgtacatcaagggtcatttggcaccgtcttctacagattctggctcattggaaacttaatcattgatttttactgggggatggaactttatccacgcattggaaaacattttgacataaaagtcttcacaaactgcagatttggaatgatgtcatgggctgttcttgcactgacctactgcataaagcagtatgaagaaaatggaaaagtagc

SEQ ID NO: 16570 - DNA, 187 bp, Glycine max
  unsure (1)..(187): unsure at all n locations; Clone ID: 701044766H1
anaaaatcttcgttactctcaaacaaaacaaaacgcgatcatttctccgccgtagcagaagaacaaactccacgactccgttatggncaactccggaaatcctcagacgtggttgtgccacctgttgaaggtgttgctggaggcggtacagcttatgggtggaatgatggaggcacacatggcttga

SEQ ID NO: 16571 - DNA, 261 bp, Glycine max
  unsure (1)..(261): unsure at all n locations; Clone ID: 701044767H1
caccaatcctgaagtcagggtgaccaaacagaacagaactgcaggaattcttgagaattttgcagagggagagaaatattcacaacatagcctgaggaagtatttcgcggcaagcagcctcagattatgccatccgtcaacaacttcttctctgatccatcaaactaaagcaaatgccaaactttttgttcttgagatttgatttctgggataattttttgctttccagtatngggattgagaantaggacaagggntttt

SEQ ID NO: 16572 - DNA, 261 bp, Glycine max
  unsure (1)..(261): unsure at all n locations; Clone ID: 701044768H1
gtcgaattgttttcacaaacatggtcatcatgttaagtgctatacgtcaaacaaccctttcatgatcctctttgcctgcattcaaatcgtgcttagccaganccaaatttccataagctctggtggctctccattgttgcagcagttatgtcttttgcttattcttccattggcctcgggctctcagtagctaaagtggcaggtggtggagagcctgtacggacaaccttaacgggggtgcaagttggggtagacgttaca

SEQ ID NO: 16573 - DNA, 264 bp, Glycine max
  Clone ID: 701044769H1
gagagaagaagaaacttaatcgatcatcacttcacttcactaatacatcatggcagacgagacccagaacaagtatgagagctctgaggttgaggtccaggatcgtggtgtttttgactttctcggtaagaaaaaggatgaagaagacaagcctcatcctcaggaggaggtcatcgccaccgagtttcaaaaagtcactgtctcagaccaaggagagaacaagcacagcctcttagaaaagcttcaccgatctgacagcagctc

SEQ ID NO: 16574 - DNA, 261 bp, Glycine max
  Clone ID: 701044770H1
ctggcattaacattagtggcatcaatggagaggttatgcctggccagtgggaatttcaagttggtccttctgttggtatctctgctggagatgaggtgtgggtgctcgctacattttggagaggattacagagatagctggagcaattgtttcatttgatcccaagcctattccgggagattggaatggagctggagctcactcaaactacagcaccaagtccatgagagaagagggtggttatgaggtgatcaagaaggc

SEQ ID NO: 16575 - DNA, 161 bp, Glycine max
  Clone ID: 701044772H1
gtcgctgctccgtaccagtttcactgcataaatttgagagaaaactctgcaaacatgttggtttatcaggacctccttacaggtgatgagcttctctcggacccttccgttacaatgaaattgagaatggaatgctgtgggaagttgaggggaagtgggtt

SEQ ID NO: 16576 - DNA, 262 bp, Glycine max
  unsure (1)..(262): unsure at all n locations; Clone ID: 701044773H1
ggagcttccatttcatagccggcggtgaagatagatagttagcagacttggctgaccctgagcaggaggaataagaataagatgcctccttatgattgtatgttctgtttaagccccatataaggaaggaagctgtcatggatttagttgtgagggtgggaaagcatgtgtgcagaagaaatggggttgtcactgatatcaagagtctcggaaaagttcantgggctatggtgtgaaaaagctagatggcagatattatcag

SEQ ID NO: 16577 - DNA, 263 bp, Glycine max
  Clone ID: 701044774H1
gtagtattattcttccattccgttctacatataatcattcataatgggtgttttcacattcgaggatgaaatcaactcccctgtggctcctgctactctttaaaggccctagttacagatgccgacaacgtcatcccaaaggctcttgattccttcaagagtgttgaaaacgttgagggaaatggtggcccaggaaccatcaagaagatcactttccttgaggatggagaaaccaagtttgtgctgcacaaaatagaaagcat

SEQ ID NO: 16578 - DNA, 172 bp, Glycine max
  unsure (1)..(172): unsure at all n locations; Clone ID: 701044775H1
aaacatgaacaaacatgcagactcagctcttttggacctgctcaagatctctttcgccanatccaacacttctgtggcgtttccctatgtttctacatcagagatgtgcttttggaaaactcattgatttcaggatttgctgaagcctgtggagatatgggnattggcaatg

SEQ ID NO: 16579 - DNA, 109 bp, Glycine max
  Clone ID: 701044776H1
aactcgggtacaagcccaccaccgatttgcaaaccgggttgaagaagttcgtcaagtggtacctttcctattacggctacaatcacggcaaacctgtaaattattttat

SEQ ID NO: 16580 - DNA, 262 bp, Glycine max
  Clone ID: 701044777H1
ctggtttgcggcgtagaggcatgaccccaactgcaatcaatgcttttgtccgaggaattggaataactagaagtgatggcactttgatttctgtggaacgccttaatatcatgttagggaagaattgaacaaaacagcacctcgtgcaatggttgtctacatccactcaaggttgtcattactaatcttgaagccaactcagcaattgaggttgatgcaaagaaatggcctgatgctccagctgatgatgcttcggttctac

SEQ ID NO: 16581 - DNA, 235 bp, Glycine max
  Clone ID: 701044778H1
aaccataatagtcatgggtttgaaggaggattttgagcagtatgctgagaaagcaaaaactttgccaccgactcatcaaacgaagacttgcttatcctttatggattgtacaaacaggccaccgttggacctgtcaacaccagccgtcctggaatgttcaacatgagggacagagctaaatgggatgcatggaaggctgttgaagggaaatccaaggacgagccatgggtgttac

SEQ ID NO: 16582 - DNA, 271 bp, Glycine max
  Clone ID: 701044779H1
gcaagtttgatgagtattgggagaaatgtagcttagggttggctgttgctgcaatgttagaccctcgattcaagatgaagttggtagattattattatccgcaaattttggcagcatgtctgcaaatcgaattgaagaggtcttgatggtgtaaaggctctatacaatgaacattcaatatgctctcctttagcttctcatgatcaaggtctggcctggcaggttggcaatggttcacttctcttgcaaggttctgcgaaggattccaggg

SEQ ID NO: 16583 - DNA, 276 bp, Glycine max
  unsure (1)..(276): unsure at all n locations; Clone ID: 701044780H1
ctcttgtgggcctgaaccacctaaccccatctcagatctctcaganccaggcccaaatccagatcccagaatcacagcaacacgctgagcttcctggggccgaagcccatccctatgaagcacgtgggcatgcctccgaagcccacgaagctatacagaggggttcgacagaggcactgggggaagtgggtggctgagattagactcccgaagaaccggaccaggctatggctgggaacttcgacaccgcngaggaagccgctctggcgtacgata

SEQ ID NO: 16584 - DNA, 267 bp, Glycine max
  unsure (1)..(267): unsure at all n locations; Clone ID: 701044781H1
gtcagttgcaggaaaaatggtttcgctgaaactgcagaagcggctcgcagccagcgtcctcaagtgtggcagaggaaaggtttggcttgaccccaatgaagtcacgaaatctccatggctaattctcgccaaaacataaggaagctggttaaggatgggtttattatcaggaagcccaccaagattcatctcgctcacgtgcccgccgaatganggaanccaagnggaagggacgtcactcnggatanggtangcgtaggggtaagg

SEQ ID NO: 16585 - DNA, 263 bp, Glycine max
  unsure (1)..(263): unsure at all n locations; Clone ID: 701044782H1
ggacattgagggagagacatctatgaatgacaacacggaccctgctgatgtaaaacgagtaaggaggatgctatccaatagggagtcagcccgacgctctanaagaagaaagcaggctcatttaactgacctagaaacacaggtttctcaattaagaggtgaaaattctaccttgttaaagcgccttactgatgttagtcagaaatacagcgactctgctgtgacaacagattttaaaagctgccgtggaaccttaagnacna

SEQ ID NO: 16586 - DNA, 169 bp, Glycine max
  Clone ID: 701044783H1
ttttggatggggaagagtcctggggggttgaatgacggtgacatgacaaatgacaattcttctagaatagagtccaagcgtgctcatcagtggttcatgatgaccctgaagtggatatgtttcccaataagaaacaagccgtagaggctccaaacaatttgttatctgg

SEQ ID NO: 16587 - DNA, 259 bp, Glycine max
  Clone ID: 701044784H1
ggcgctcctagtggcaactacatccgaccctgcttccatcaacccggccaacgcgctgttgggcatgcccgggtggaaacccggtccccatttccaggatatatgaagagctatgtgaatgaaggggtgagggtgttggtacatgggaagagcatagttgcggaagatgagttggacaagagttgggaagaagttactggggaggttattgatgaagtgatcttcttcagcaagcacactgctgcctccaacaagcctg

SEQ ID NO: 16588 - DNA, 217 bp, Glycine max
  unsure (1)..(217): unsure at all n locations; Clone ID: 701044785H1
ctaaccctaatcctccatcatcgattcgattctcttgctctttgttatttccttctttgtgaacaaagcaaaacaattgcatcgangaatcgggcgtcacagctttcgtgataatgatcttggcgctgcgaatcgattgcatgggtttggagantgtcggagcttcgtagtggaccgcgacgacgtcgtgctccgatgctcgtnanagctctgaacc

SEQ ID NO: 16589 - DNA, 259 bp, Glycine max
  Clone ID: 701044786H1
ggacattgagggagagacatctatgaatgacaacacggaccctgctgatgtaaaacgagtaaggaggatgctatccaatagggagtcagcccgacgctctgaagaagaaagcaggctcatttaactgacctagaaacacaggtttctcaattaagaggtgaaaattctaccttgttaaagcgccttactgatgttagtcagaaatacagcgactctgctgttgacaacagagttttaaaagctgacgttgaaacttaag

SEQ ID NO: 16590 - DNA, 260 bp, Glycine max
  unsure (1)..(260): unsure at all n locations; Clone ID: 701044787H1
gcggcggacatcaggcgctggaccccaccgccgtccacggcgtcacgcagttctccgatctcaccgaggacgagtttgagaagctctacactggcgtcaaggcggcttcccgtcatcgaataatgccgccggcggtattgcgccgccgttggaggtggacgggctgccggagaattttgattggagagagaaaggagctgtcaccgaagttaagttacagggtagatgtggatcatgcnggntttncancaccacaggnt

SEQ ID NO: 16591 - DNA, 262 bp, Glycine max
  Clone ID: 701044788H1
ggttttttctaaaagtatattaaccaagtattaagttaggttttgacagaacaaatatttaatgggatcgaagtaaaataagctttaataaaaactaaggtaaaaagataattaagtagcaattaaatagaagagtactatataaagggcaagtagtactaaattcctcaaaattagaaattaggaggagaaatcattcacatgataagtagtcgttaagtattaattccttttttatatctgggaaactgaatacgggggc

SEQ ID NO: 16592 - DNA, 263 bp, Glycine max
  Clone ID: 701044789H1
tgttccttgaaggaaaaaaaacgcagttgaaagattgaagctcgagatgttcggggaaaggcgcaaagggtttgataactgctaagaacccttcttcctctaggacaaagacaagaaaaaacccatttctcgctcctcaagagccggtcttcagttccctgttggacgcattcatcgtcttctgaagtcaagggtgacagcacatggaagagttggggcaacagctgcagtttattctgctgccatcctggagtatttaactg

SEQ ID NO: 16593 - DNA, 170 bp, Glycine max
  unsure (1)..(170): unsure at all n locations; Clone ID: 701044790H1
ctattgcacacggatctctatagcctaaaccctcttncacatattattctctctctgtcttctttggctagatggaaatganaagtatgangcattantcattctcttccctcgtttcagttattnggaaattttngctgctgtagtcttngctgtnttgattcattncc

SEQ ID NO: 16594 - DNA, 170 bp, Glycine max
  unsure (1)..(170): unsure at all n locations; Clone ID: 701044791H1
agcgcttaattaatctttcaggtattgtagtaactactacggggaattagcagagatagagctatgcgattggtgccaaagcgaggggagaaattactcgggcatagctccaattcgaagaaattaccagtggccggaaatgacgccggaacgangacccgttctgagtt

SEQ ID NO: 16595 - DNA, 162 bp, Glycine max
  unsure (1)..(162): unsure at all n locations; Clone ID: 701044792H1
accttatctcacccttctttgactgttctcccacaccacacccatgancatcctcctgctccttattctcctctttcacgcggcggaagccaagggacagtggcagctcctccacaaaaacatcggcantgtcgccatgcacatgcagcttctccacaacga

SEQ ID NO: 16596 - DNA, 264 bp, Glycine max
  unsure (1)..(264): unsure at all n locations; Clone ID: 701044793H1
aagcatctgtctctgacctttctcgatttattccaaagatgcctctatccccttcggcacctcatgttatcagcattggaacaacttatggaatcggcattaaggtagctggtcaagtggcaggaacagctatctccacttcgccccttccgtacaacaccatggctagccagtgtgaatcactcggtacatgtgcaagganaaagcttcaaattggctggcctttgagaatcttacagccaagcacttgatgataaatcgttt

SEQ ID NO: 16597 - DNA, 268 bp, Glycine max
  unsure (1)..(268): unsure at all n locations; Clone ID: 701044794H1
atcaaatactaatagctaggcaccattctcgtagcagaagtcctctatcgagatggcttctaaagtggaagtgaggttccacttgggcatgaagcttctaattnatccaatatttacattgaaatagggcaattgcttagtgcacttcccgaattgcttcccataattcctgcgcctcccaccggaagcaataaggaaagtgcatgaagcaattccagaaatgaaaaacacccttgaattagataaaaggtcaacacaggctctgctg

SEQ ID NO: 16598 - DNA, 271 bp, Glycine max
  unsure (1)..(271): unsure at all n locations; Clone ID: 701044795H1
ggaagacaataggagaagagtgctccctgaaaaacgtggcaaagtcaaggcttccaggaagaccagtgtccccactaccatncgtccagatgatcaggacataaccaagaattttgagcataggattgacattgcaggagcnggaggaggagatgagaagtctgatttgttaggatatgtcgttttctctggaaaactcattttggataagagaaaacttgctacaaatgatatgctgatgcccaacaaacttcggagattaccaaccagg

SEQ ID NO: 16599 - DNA, 167 bp, Glycine max
  Clone ID: 701044796H1
aattagttatcttctatttttcaagtaacttaaggtttcaaacctaggaagttggaagtcatggcagcaacattgatggcagcaacaacaagttctggtactcttaagcaactcctttccttggccaaggcaagggtgccaatgccaatgctcttagggatgttgtc

SEQ ID NO: 16600 - DNA, 266 bp, Glycine max
  unsure (1)..(266): unsure at all n locations; Clone ID: 701044801H1
attcgagctccaattaaaaacccttgacactgttgcgtttggctaaaatgccggatgttcagacccttgttaacgattttctgaatcagcttaagaaacgtaaaattgaaggttctcaggccacagcgaantccacagcagagttgctccggtctgtgatttcacagcagcgagtgccacacacaaaccaagccacagctctgattaatgcagtgagggctgtgggggagcagcttattgctgctaatcctgttgagctagctgtc

SEQ ID NO: 16601 - DNA, 263 bp, Glycine max
  Clone ID: 701044802H1
cttgaatcttcgttatccttctttttttctccttgaactcgaatattcactatggcagatgaggtggttctgctagatttctggccaagtccatttgggatgagggtcaggattgcacttgctgaaaagggtatcaaatatgagtccaaagaagaggacttgcagaacaagagccctttgctcctcaaaatgaacccggttcacaagaaaatcccggttctcatccacaatggcaaacccatttgtgaatctctcgttgtgta

SEQ ID NO: 16602 - DNA, 118 bp, Glycine max
  unsure (1)..(118): unsure at all n locations; Clone ID: 701044803H1
tcaacanttcttcttcttccantggagctgcgatcntactgcttcganggcnacngtgcaactccaatccctaaccccngttcgctcntcagcncttcnttcngctagntnctcccct

SEQ ID NO: 16603 - DNA, 265 bp, Glycine max
  unsure (1)..(265): unsure at all n locations; Clone ID: 701044804H1
atttgcggcaaggtttggctccaacaagagaaacgagcaatcatatggtatttgatttttagggtggaagaaaaatcagagtgagagaaaaaatcgatggagatggaagtagacatcgagaagaagcaacaagacgtggtgaaagagaaagacttgttcaaagctgcagaagagggcgaggcatcaacgttcgaagctctctcttctgaaatcctctccaaagccctctctctcagaaacgaagacgctcgtncccttctccacg

SEQ ID NO: 16604 - DNA, 198 bp, Glycine max
  unsure (1)..(198): unsure at all n locations; Clone ID: 701044806H1
tgccaaaaagtgaggccaccccaaaaacaaagtgagattataggaaacaaaaatttctttgcttaatactagttcctcctttctcctagcctggtagtcttttgaaaattctttatcttgatcacataattttcattttgaacttgaagaaagttttagtgtatttttttttccttaangaaacagaacatancntgt

SEQ ID NO: 16605 - DNA, 261 bp, Glycine max
  unsure (1)..(261): unsure at all n locations; Clone ID: 701044808H1
ttgttgtaactaagcaagaatattattaggcaatgaagtcttctggaccttcaacaactcttgctctttttttaaccatccaatttgcttgtctttgtcatggcaagtggctgctacacttgcacacagcctaagccaaaccctagccctaacccattcccttaccctaaccccagccctaccgcaaagagctgccccagggacgcgcttaagtgggtgtgtgcgcaaagtgtttaatggaccattggtgcgattgngggg

SEQ ID NO: 16606 - DNA, 263 bp, Glycine max
  unsure (1)..(263): unsure at all n locations; Clone ID: 701044809H1
ctgcaattcgtgtgcgtggaaaggttcgagaatggtttcgctggaggaatctcgctctaattcgagccgtttccccttggcgaggagttaccagtaccactcctcggtttcgtccaaaacgcagcgtcacatcggaaggtccatgcgcacgatacgctccagtttcttccaggacgacaacagcagcagctgctgctccttcacngagaaatccacgtgtctctcggagaactcaccgactcggtgtcgacctccgtctgggg

SEQ ID NO: 16607 - DNA, 265 bp, Glycine max
  unsure (1)..(265): unsure at all n locations; Clone ID: 701044810H1
tagacgaaagangcaagcatgtgtggcgganaatcatcgcagatttcatacctacggcagcntccccgcaccctcacagcctccgaactctggcccaagcgcaggaaannnnnnnnnnnnnnnnnnnnnnnnnnagttaagaggcagaggaaaaacctctacagagggatcaggcagcggccctggggcaaatgggccgcggagattcgcgatccacgtaaaggagttcgtgtctggcttggcaccttcaacaccgccgaagaag

SEQ ID NO: 16608 - DNA, 259 bp, Glycine max
  unsure (1)..(259): unsure at all n locations; Clone ID: 701044811H1
cctggggaaagctcttgtgtttcagtaggaacatgtaaagattgcacaacgtgtttccgtcactcagatctccataatgntcgtccatctacaacacaatttagggagaaactgccatggtttcttagttctctgccatctgctgattgtgcaaaaggtggtcatggagcttacaccagcagtgttganctgannngctacgacaatggcttnttaaagcatcgtcatttcgtatnatcataccccactcaacagggng

SEQ ID NO: 16609 - DNA, 262 bp, Glycine max
  Clone ID: 701044812H1
gtttcgtcgcaatagcggcaacagcaaaatctagttgtacggcgttttggaatcggagggagaggagaatccattccaaacggcgccgtattccttaaaagggggaactctaacaccggaattttcctcacaaacacaataatcgattcgaacgttcttgaagttgaaagtcattaactatgggaatgatagtggaggttgaaaacgaaaacggagacctaaacgacgccgttcttgttccaccccctaacttctccatggt

SEQ ID NO: 16610 - DNA, 262 bp, Glycine max
  Clone ID: 701044813H1
tgcagattggtgtgaggtatgccgggaattagctcctgacgtctacaaagtagagcagcaattcaaggatcgagttaattttgtgatgttgaatgttgataacacaaagtgggagcaagagcttgacgagtttggcgtggagggtattccacactttgcattcctggataaagaaggaaatgaggagggcaatgtggtcggtaggctaccaagacagtacttgcttgaaaatgtggatgcccttgctcgtggagaagcatct

SEQ ID NO: 16611 - DNA, 263 bp, Glycine max
  Clone ID: 701044815H1
ctctgaacgagactttggatgctgaagtccggcgtttgaggcgtgctgttgcagaacttggcggtgaatccctcacaagttgcatggctcgacagcttgctattaaccaacaaatgttcgagttacagcatcagcagcccagccaacagagacattttctactgcaaaatcaccatactcaggaagagatagagtctcgatcacagcagattcaaggcaatgaattgccatccccaggcacagattcagtcacagcagattca

SEQ ID NO: 16612 - DNA, 258 bp, Glycine max
  Clone ID: 701044816H1
ttgctgggtttgctgggtttgccgtgtttgcgttctttgttccatcggagaagacccttttcccttttagcttcactcttttctctctctttatctgtcaacgatccaagtctacttctgaagcatctttttactgtcacttgacatggcatcaagacaccgtgttcacagagaaccctgaatgctcgaaggggttacccaccggaagggccatatgctcgggtggctccccatgcctcgaccattgcctctattctc

SEQ ID NO: 16613 - DNA, 262 bp, Glycine max
  unsure (1)..(262): unsure at all n locations; Clone ID: 701044818H1
gaaccaatcaaggctgcagagaaatctcatgtacctagctgcaatagctgattctcaaccccaaccatctccaatgcctggtcagtatccttctagtggacttatgcagcagggagcacactacatgcaggctcagcaggctcagcagatgtcacaacaacagctaatggcttcgcgctcctcactcttgtactcccaacagcctttctcagtgcttcaacagcagcagggcatgcacagccaattgggcagagcnccatgg

SEQ ID NO: 16614 - DNA, 260 bp, Glycine max
  unsure (1)..(260): unsure at all n locations; Clone ID: 701044819H1
cttaaagcttgaaactttcactaagcagagaagcatggtgtcaaaaaatccgaacccctctgaggctttttacttggacccctccggcatgtcgctccccggaatccttcccttcgccgccgcagccaccgccaccgcagattcctttgaggaccctgctaagaagactcgcaagccttacactattaccaagtctagggagagttggaccgaacctgagcacgacaagttcctcgaagctcttcagttatttgangtga

SEQ ID NO: 16615 - DNA, 218 bp, Glycine max
  unsure (1)..(218): unsure at all n locations; Clone ID: 701044820H1
cntgtttttgcttgctgcgtaatacgatatanatttaaaaaaaaaaacgtncgnnggttannggtttnaattttnttgntcncagatnaacctttctctttgngaatcctatncaaangcngattgngaatctgagtgtttttttacttnnatncgattcgatntgaagcgagagaggaaatccnacagggtttcgggggcnacnggaganaccctgt

SEQ ID NO: 16616 - DNA, 261 bp, Glycine max
  unsure (1)..(261): unsure at all n locations; Clone ID: 701044821H1
gtatttacattttattcaatcacttcgcatggtatgacaacatttgctaattaagcattgaccgttcatacagttatctggttcttcagatgatttgccagttgttttccccatttccttcagttttatcatgtacctattttcacttaatgaagtagcactttagatctagctaggaataggtattcatagtagaaacttttaatccttagaaagttctatttncattttcaacattatataattnctngccacnggttg

SEQ ID NO: 16617 - DNA, 258 bp, Glycine max
  unsure (1)..(258): unsure at all n locations; Clone ID: 701044822H1
aaagcaagctcatcctagagttttaaaaatggcagcagcctcctccatggctctctcttccccatccttggctggcaaggccgtgaagctgggcccatcagcccccgaagtcgggagggtcagcatgaggaagaccgtcaccaagcaggcctcctccggaagcccatggtacggcccagaccgcgtcaagtacttgggcccattctctggngagcccccgtcctactcntggcgnnttcccaggtgantanggnngga

SEQ ID NO: 16618 - DNA, 260 bp, Glycine max
  Clone ID: 701044823H1
ctccaatacctcaatctctgcgttgtaagaggaagccacgattctttgaaaccccaatttctggtagttgatttgaaaaggctccagcaatcatatttgggatggtttttaagtaaataaatataaattccggtccaatcctccttgttgtttccctaactgagcacgttgcaactcttggccaaaatggtatccgagttaatcaatgcaaaccctatcatatatgaaaagaaagaggtcgacctcgaactgctccatct

SEQ ID NO: 16619 - DNA, 260 bp, Glycine max
  Clone ID: 701044825H1
tcaagccgagcactgacgagaaggagaaatgataaaaatccaatattattggtcttggatgatgtttggcctggctcagaagcccttgttgataagtttacagtccaaataccttattataagatcttggtgacttcaagggttgcatatccaagatttggcaccaagattttgttgggtcaacttgatcacaatcaagcagtggccctttcgctcactatgctaaactaaatgacaatagcccatacatgcctgaagaa

SEQ ID NO: 16620 - DNA, 263 bp, Glycine max
  unsure (1)..(263): unsure at all n locations; Clone ID: 701044826H1
caatactcttcgctctcaagctcaccaacgggaacaaggacaaaggcatccaatacgacgacgttctcctctccttcagagtcttcgagagcgtcaacctcacgcgcccactcggcaacgccaccgtgcaaaggttctaccagggccaccagaagaaggccaccaagcacggaaattcagcggcggcggcggaaaacctcaccgcggcggtggctgggagaatgtggtaccgtgtngaactatgctatgggggtaaaatacaa

SEQ ID NO: 16621 - DNA, 259 bp, Glycine max
  Clone ID: 701044827H1
ctagaattgcatcagagaaattactgaggagagttggagcaggatctgaagatccactggctgcatgttccataattaagaagcaagtaaaaagaaatctaaatgcagtttcaaagctcagaaaggcagcacttgatcatttacggtatgtgaaaagaacaaccatgtatcctctagagcatagtcctggacatgggtcgctttgcactgtgccaatgattaaactgttgggaagcatccaaccccatctttacaaaat

SEQ ID NO: 16622 - DNA, 259 bp, Glycine max
  Clone ID: 701044828H1
ctagaattgcatcagagaaattactgaggagagttggagcaggatctgaagatccactggctgcatgttccataattaagaagcaagtaaaaagaaatctaaatgcagtttcaaagctcagaaaggcagcacttgatcatttacggtatgtgaaaagaacaaccatgtatcctctagagcatagtcctggacatgggtcgctttgcactgtgccaatgattaaactgttgggaagcatccaaccccatctttacaaatt

SEQ ID NO: 16623 - DNA, 259 bp, Glycine max
  Clone ID: 701044829H1
tttttttttctaaacttcattccagagccctacacgcacaagtgtttggcgggaatggaagggagtgagagtgaggccgtgtttggtgctctttatctgaacccgcaactcttctgtaacgaagttctcaacatcatcgacgatgtgctccaagaagctttcaatttcttcttccaggacgcatcgaggaagctcaacatcgaaagcacccaaaggtcccagcttctgaaaaagggtgttgattgcgttcggcagaaat

SEQ ID NO: 16624 - DNA, 262 bp, Glycine max
  Clone ID: 701044830H1
ataaaaaccaccgaagaaaacatcactgcgccgcgctgccacaccaaataaacacaaacatggacgcatcaaaactacaatcaattgaagcatttcatcgaacagtgcaagtccaacccttccctcctcgctgatccttcactctccttcttccgcgactatcttcaaagtctcggcgcgaaacttcctgagtctgcttattccgaatcgacgggcgtggagagggatgaggacatagaggatcttacggaggagcacgaga

SEQ ID NO: 16625 - DNA, 259 bp, Glycine max
  unsure (1)..(259): unsure at all n locations; Clone ID: 701044831H1
ttctctgtgactgcctctgttccgccaagcgcanattttcccaccgttcaggccaccggctgagttaggtttccggcgaggatgggtgctgctctgctgtcggagcttgcgacggagatagtcgtgccagtgtgcgccgtcatcgggatcgtgttctcgctggtgcagtggttcctcgtgtcgcgcgtcaagctcactcccgaccgcaacggaacgacgtcgtcgccgcgcaacaacaaaaacggctacggcgacttcc

SEQ ID NO: 16626 - DNA, 260 bp, Glycine max
  unsure (1)..(260): unsure at all n locations; Clone ID: 701044832H1
gttggaccaacatattgcaaagggagaggtcatccaacgacttttgaggggccaaatggngccatctgttgcagatggcaaggaagcagatgaccagaaagttgctaatggggaggagactggcaaggtcaagaaaaacaatcacgttgaaagcgacaatctgagcagcaaagaaaacgtgggtggttgttgccagggtgttaatggagtttcttgttgcagaagtgccagtcttgagccaaaccaggagttgaagaaac

SEQ ID NO: 16627 - DNA, 226 bp, Glycine max
  Clone ID: 701044833H1
gatggcaaatgaactacccgtacaaagcttttggttgggctgcttcagacacttctggcacccttgccccttttcatttctccagaagggaaaatggcgtcgatgacgtcactctcaagattctcttctgcggggtttgccactctgatctccacactctcaaaaacgactggggtttcaccacctaccctgtcgttcctgggcatgaattgttggtgttgtgaca

SEQ ID NO: 16628 - DNA, 206 bp, Glycine max
  Clone ID: 701044834H1
aaattcaccagtgaacaacgaaggatagaagaaaaaaaagcttcagtgaaagaaaatggcgttgtacctggacgaagaagagatttggaagtgcccgaagcatccatcgaagcgaagaagaagcggaatttgccatatttgccttcgcgaccgtctcgtaactctttgccctgactgtgctaacgtgcgcccctgttcctgctacg

SEQ ID NO: 16629 - DNA, 261 bp, Glycine max
  unsure (1)..(261): unsure at all n locations; Clone ID: 701044835H1
gagaaacaatggccaatgtttcaattccactcccacgaaacggtttctccaaacccaattactcgacaaaacgcccatgtttcaccccttcagcttcaacactcagaatttcttgctctggagtggctgagtttgatggatctcatcagaaaaaaggaggtttgtttaatttcaatggaatcaagggcgtggcttgtggtattcttgcagcttgtgctgttacttctgctgcatttcctgttactgctgctactcagnggc

SEQ ID NO: 16630 - DNA, 259 bp, Glycine max
  unsure (1)..(259): unsure at all n locations; Clone ID: 701044836H1
atcttccatttganttacttgtcccaatggatcctcttttagtcttgttctgacttgggtgacaacatcttggagtctattatagcattctcaataggtgctacctactctgactttctcccaagtacatttgttcctcttcttttcctgtttcaggaatcacgcactacaatctgatctctcctactgcttttttgctcttgttggaatcctgcccaacattcagtgcctctatctcttgcatgttctaaaatatcta

SEQ ID NO: 16631 - DNA, 258 bp, Glycine max
  unsure (1)..(258): unsure at all n locations; Clone ID: 701044837H1
gtgaagtgcgggttgaaggattagagacattggattatcttgacaacttgcagaaaagggaacgctttactgaacagggggatgctttaacatttgaatcagaagtaagattgtttaccttgttctactttgctttagaaaacacacgtgggtattacnnnaaatatgctgtgagtaatgaaatatgacaatttccaagaaatggagcttctgatgataaattaaataaattgctatgaataaaaatcagtttcattc

SEQ ID NO: 16632 - DNA, 259 bp, Glycine max
  Clone ID: 701044838H1
gttgctgcttcttcagccactccgcacctcgcagcctctgtgccctcaacaaccatggctgaaatcgaaactaccgttccagatcccacccaaatcgacgtcaaactcttcaatcgctggagcttcgaggatgttgaggttaatgatatgtctctggctgattacattggagtgtccccatcaaagcatgctacatatgttcctcacactgctggtaggtactcagtgaagaggttcaggaaagcgcatgccccattgt

SEQ ID NO: 16633 - DNA, 259 bp, Glycine max
  Clone ID: 701044839H1
tatcatccgcagctgcttttattcgcaccgcaaacagtgagccatggccgtcggaaagaacaagcgcatctccaaggggaagaagggtggcaagaagaaggcagctgatccctttgccaagaaggattggtatgacattaaggctccttctgtttttcaagtgaaaaatgttggcaaaaccctcgtctctcgtactcagggtaccaagattgcttctgaaggactcaagcatagagtgtttgaggtctcttggctgatc

SEQ ID NO: 16634 - DNA, 259 bp, Glycine max
  unsure (1)..(259): unsure at all n locations; Clone ID: 701044840H1
gctggcatgagggaggaagatgctcaatgaacttcatcacagaaagctgcaattttggtacttcttacaacaggcatgggaactaaaattgaatattccataaatcttctagcatcctcagtagacagcaacaacttcattgtgggtggtgtggatgtctgggagcattatcagaacaaaggagagactancaaacattgtagtattggagtgaataaattgcaagatccaatggataggatgcttgacagaaacaaca

SEQ ID NO: 16635 - DNA, 98 bp, Glycine max
  Clone ID: 701044841H1
gcaaagtgtgagagaaagacaatgccgaagtctcaatttcgaaccccatttctggtttcttttccccttttgttattcatcttcaacctcaccccttc

SEQ ID NO: 16636 - DNA, 258 bp, Glycine max
  unsure (1)..(258): unsure at all n locations; Clone ID: 701044842H1
acgaatttcattgcagagtgttattttgagtatcagcatcaatggctccaattgcagtgggaaacgtgattccagacggcattttggcttacttggatgaagaaaacaaaccccaaactgtctccattcactctctcgccaccggcaagaaagtcatcatctttggggttcccggtgccttcactcctacttgcagcttgaagcacgttcctggcttcattgagagagcagaagagctgaaagggaagggtgtggnca

SEQ ID NO: 16637 - DNA, 257 bp, Glycine max
  unsure (1)..(257): unsure at all n locations; Clone ID: 701044843H1
cctgcgtgtacctagtaattagcaacgttggagaatgtggacattgacattcgtcctgtttctgctccataggctgaataaaaaatgtggttaagcatgtgtgaatgcttctaggacgttgaaagcatcttgagattgaagacataaaaaatgttattcgagttgaacaatggttcccggttgcaaatagtggagctgaaggagaagctgtgcgggccaaagtgcatncctcggaatcaagacccctaccaanaaaa

SEQ ID NO: 16638 - DNA, 259 bp, Glycine max
  Clone ID: 701044844H1
tggagaacttccgcctgctctatgacactaaaggccgattccgtcttcattccatcagggatgatgaggcaaagttcaagctctgcaaggttaggtcagtacagtttggccagaaaggtatcccatacctgaacacctatgatggtcgcaccatccgttacccagaccctctcatcagggccaatgacactgttaagctggatctggaggaaaacaagattgtcgattttatcaatttgatgttgggaatgtagttatg

SEQ ID NO: 16639 - DNA, 258 bp, Glycine max
  Clone ID: 701044845H1
atccaactctctttctccctatcccaacaatctcactcatacctcttcaatctaacaaacttaatttcttttgttttgagtttcttagagaatggatgaaaaaggagcaagaagtagcaacacccttttaagttgtgaggacgagatggaccttcgaagaggccctggaccgtcgatgaagacctcactcttatcaattacattgccactcatggcgaaggtcgctggaacacgctcgccctctctgctgggctgaaa

SEQ ID NO: 16640 - DNA, 261 bp, Glycine max
  unsure (1)..(261): unsure at all n locations; Clone ID: 701044846H1
gttgtattctctcaattacnacatcgtattctgcaaattcaaaccnggtcttggttgtctgaaagatgggaggtggcaaggacaagcatcatgatgaatctgacanaggaattttttcacaccttgctcatggggtagctggtgcagcacatggtggacatgggtacccacctggggcttacccaccaccacctggggcataccctccaacaacaagnatatcctaccagctgggtatcntcnacnacnagggtatctcnc

SEQ ID NO: 16641 - DNA, 259 bp, Glycine max
  Clone ID: 701044847H1
tgctctgaaagctcttgatatatacaggagggttgggcaccaggctgagagactgtcagagttttatgaaatatgccgtaatcttgacattggacggggagagaagtttattaaagttgagcagcccccttcctcatttctgcaagccatggaagagtatgtcaaagatgctccccagggaccaatagttcacaaggatctggctattgagaacaaagaagttttgggctattgaatacaaaaagacaacagaagtgga

SEQ ID NO: 16642 - DNA, 255 bp, Glycine max
  unsure (1)..(255): unsure at all n locations; Clone ID: 701044848H1
taangatactacacataactacatcatctcaaaacctagtctgaaaccatagcacaaantcaaccatgtactccattgatngttgccttggctanaatcgcagcagcaatcctcatatatngtatnataaagttcataacacgcncatctctcncncncncancgggcnctaaacctggcccntagtgggaaatngccacacatgggccggtgcgcannagncctcgcggngttggcacgcatccnggcccgntg

SEQ ID NO: 16643 - DNA, 259 bp, Glycine max
  Clone ID: 701044849H1
gcaactgcaaaaggaaatggcattctcaacagccaccgtaaccactgctccttatggatcatggaagtcccccatcaccagcgacgatgtctccggcgccaccaaggacctcggaggcaccaccatcgatggtcgtggccgcctcatttggctcgaattccgtccaacagaatcagggcggggagttcttgttcttgagccggaaaacaatggaggtgaagctgtggatattactcctaaggagtttggagtgagaaca

SEQ ID NO: 16644 - DNA, 257 bp, Glycine max
  unsure (1)..(257): unsure at all n locations; Clone ID: 701044850H1
gtggatctgattcaaaccacacgattccacgaccttattttggagccgcggtggcggtagcggtggccggcgattgtagcggcgtaggagcaagaaatggttttatgttgtgaggaagattgttaagctgtgggaatatgtcattgagaagcatagtccgtgaactcaaggagatgagagatggaataggaagcacatcaaagcggggtgcagaaagcaagcatcggctcatcggacaaatcacatgtancnccagt

SEQ ID NO: 16645 - DNA, 258 bp, Glycine max
  Clone ID: 701044851H1
aaaattgataacatcacacagcattagtatgtatcagcaacaagggtcagatccaacaaagcaatcaccggcaaccggttttccggtgagctatagcaattcaacaacgtattcgaccaacgaggcttcctacgctccagtcccacctccccagcccaaacctcttgtcgattggtccaccggcctctgtgactgcttctccgaatgtggaaactgttgcatgacgtgttggtgtccatgtgttactttggccgagtt

SEQ ID NO: 16646 - DNA, 230 bp, Glycine max
  Clone ID: 701044852H1
cttttattccaaaaaggggaagttattgcagatatttttgtttacatattgttaaattttacatttctaaaatgataatagttttattatattacaagcatgcaatgaggatagctctacaatagctaagatactatttgtggactttttttccagatttgagaatataactaagaaacaagctaacaatgcaatggtatattactataactctgaatgagggattttcc

SEQ ID NO: 16647 - DNA, 256 bp, Glycine max
  unsure (1)..(256): unsure at all n locations; Clone ID: 701044853H1
cttcctcaaccgaatccctgagatttgaaatccaatccgggcncaccaaatgcatctccgaggatatcaagagcaattccatgaccgttggcaagtaccaaatcgttagccccaacgagggtcaacctctgccagatgcccacagattcaccgtcagggtgacttcgtcttatgggaacaactatcactacggggatcgcgttcagacggggcatttgcgtttgctncagtggaggctggagattacatgattgct

SEQ ID NO: 16648 - DNA, 255 bp, Glycine max
  unsure (1)..(255): unsure at all n locations; Clone ID: 701044854H1
tgaaggttgttttgtgcttatagataaaagttctgccaaatcaagaggggttttcagatcatannnnnnnnnnnnnnnntaaacaatggctaagttctttgctgctatgatcttggcactcattgccatttccatgcttcaaacagtggttatggctgctaatgagcaaggaggccacttgtatgacaacaagagcaatntggaagtgggagtgtcaagagataccaatgcccatcacaatgctcgaggagatgt

SEQ ID NO: 16649 - DNA, 257 bp, Glycine max
  unsure (1)..(257): unsure at all n locations; Clone ID: 701044855H1
ggcgcagagtagagcagcagagaagagagaaaacggcactgcagccgtagaaggaaaaccgaccatggtgcacgtctccttttacaggaactatggtaagacgtttaagangccccgccgtccgtacgagaaggagcgtctagacgcggactgaagctggtgggggagtacgggctgcggtgcaagagggagctgtggagggtgcagtacgcgctacagccgcatccgcaacaacgcgcggaatctcttaccctcga

SEQ ID NO: 16650 - DNA, 257 bp, Glycine max
  unsure (1)..(257): unsure at all n locations; Clone ID: 701044856H1
caaacatccctcttgatttgaaggttgttttgtgcttatagataaaagttctgccaaatcaagaggggttttcagatcatannnnnnnnnnnnnnnntaaacaatggctaagttctttgctgctatgatcttggcactcattgccatttccatgctnctcacagtggttatggctgctaatgagcaaggaggccacttgtatgacaacaagagcaaatatggaagtgggagtgtcaagagataccaatgcccatcac

SEQ ID NO: 16651 - DNA, 178 bp, Glycine max
  unsure (1)..(178): unsure at all n locations; Clone ID: 701044857H1
gcaaaaaaaaaaaancacantggcagcgagngctcccattccangcnaananttcgtgtacatggcnaantggcggaacaggccgagcgctacgagganntggtggatttcatgganaaggtntccgcttccgccgaaagcgagganntnnccntggaggagcgaaacntcttntcgg

SEQ ID NO: 16652 - DNA, 257 bp, Glycine max
  unsure (1)..(257): unsure at all n locations; Clone ID: 701044858H1
aacacaacccatggccaccacctccgcattcctcctccttcgcctcctcctgctgctccacctacgccatcgccgctcacggcatcggcatcaactacggcacgctcggcgacaaccttccaccgcccgcggcggtggcgaacttcctgaagacgaagacgaccatcgaccgcgtgaagatctacgacgtgaacccggacatcctgcgggcnttcgccggcagnggcatctccgtnacggtnaccgcccccaagnng

SEQ ID NO: 16653 - DNA, 256 bp, Glycine max
  unsure (1)..(256): unsure at all n locations; Clone ID: 701044859H1
ctttctctctgttttctggtaattcatcaattgattcaaaatgcagagtctcaaactgcaactagtgctattcctctcaatctcaacttctcacgctgttttctccttcacagatgggttgttgccaaatgggaacttcgagcagggcccaaagccatcacaattgaaagggtccgtagtgactggccacgatgccattccgaattggacgatttcggggttcgttgaatacataaaatcnggacaaaaacngggt

SEQ ID NO: 16654 - DNA, 215 bp, Glycine max
  unsure (1)..(215): unsure at all n locations; Clone ID: 701044860H1
agagcgtcgtcgtttagttagggcagaaaaccccttttcggatcggtggagcgaanctcgccggcgagacccccgaggctgttcaatcggcgatcgagcaacggcgaaaagcgacgaagatgaaggttttcgtgaagactctcaagggcacgcacttcgaaattgaagtgaacccttcggacacgctttctgaagtgaagaaaaatatagaaatg

SEQ ID NO: 16655 - DNA, 256 bp, Glycine max
  Clone ID: 701044861H1
gttcctggaaatactgttgctgtccaagcagacatgccatttagtggtcttacaacttttggcacagcatttttgtacaaaatttgtgtgttcacagatgcctcatcctctactggaacacatcacatttgttgacactccgggagttctatctggagaaaagcaacgcacacaacgagcatatgattttacgggtgtaacatcttggtttgctgctaagtgtgatttgattctcctctgtttgatcctcacaaat

SEQ ID NO: 16656 - DNA, 253 bp, Glycine max
  Clone ID: 701044862H1
tttctacttgaaaggtttgaaacttgttactgtggaccgtccttttgctgagaagcactatgctgatttgtctgccaagcctttctttagtggtttggtggattacattatctctggccctgttgttgccatgatctgggagggcaagaatgttgttacaactggccgaaagattatcggagccacaaacccagctcaatctgagcctggaactatccgtggtgactttgccatgacattggaaggaatgtta

SEQ ID NO: 16657 - DNA, 255 bp, Glycine max
  unsure (1)..(255): unsure at all n locations; Clone ID: 701044863H1
atcatacccaacaacatcctccgacaccatgttgcacatggaaaaccccctcctgcagtcaacaaactcaattaccttcacattctttgggctgttgttatttctctttgttctttcatccatattcagaaaccgcggtgctgcaacanganangcaccaccagangcaagaggcgcgtggcctttaattggtcacatccacctcttaggtggctcaaaaccaccccatgtcacgttgggccacatggcggacaa

SEQ ID NO: 16658 - DNA, 253 bp, Glycine max
  Clone ID: 701044864H1
cataaatctagctccaattcctaatcacctggttaatttcttcacatagagctatcaagatccaacgttaacatgaagaatgttttagtaaggtcagctgcgcgagtctgcttggcggcggtgggcggagtactaccgccagctctcaacggcggcgatcgtggaacagagacaccagcacggtggcggcgcgtttggaagcttccacttgcggaggatgtccatcttccagaggtaaaggatcagcatcaga

SEQ ID NO: 16659 - DNA, 260 bp, Glycine max
  Clone ID: 701044865H1
gagaaaccagtgactgacttttcgagaaagaaaaacaaaaatgagtttccgtcattccatacatgaacgctcttcccattctcctcttcttcctcttcgtttctgcattagtttctgcgaagaaaactggtgatgtgacggagctgcaaattggcgtgaagcataaaccagtatcatgtgaagttcaggcacacaaaggtgacagagtcaaagtacactataggggaaaactcactgatggaactgttttcgattctagc

SEQ ID NO: 16660 - DNA, 256 bp, Glycine max
  unsure (1)..(256): unsure at all n locations; Clone ID: 701044866H1
atccattccaacttcccaacccaaccaacaacaaccataacacaagacagtgtcagcgcgcacgcatacatggccatcacaggcaacctcaacctcaacctagtactccccgtggcacgccccatggcgtgccccccacgcgccccaacgtccctcctcgctcgtggccgtggcgcgtcgtcgtcacttcgctcctggtcacgcgcgccatcgagtgaacgagttcctggggganttcggggcgcgggacctttcc

SEQ ID NO: 16661 - DNA, 268 bp, Glycine max
  unsure (1)..(268): unsure at all n locations; Clone ID: 701044867H1
ccatggtacggtattgaacaagaatacaccttgttgcagaaagatatccaatggcctcttgggtggcctgttggtggtttccctggacctccagggtnccataactactgtggtgttggcgctgacaaggcttttggccgtgacattgttgaacgcacactaacaaagccctgtatttatgnctggcatccaacatccagtggaattaatggagaagtgatgccccggtncagtgggaattcccaagttggaccttcagttggaatcc

SEQ ID NO: 16662 - DNA, 256 bp, Glycine max
  Clone ID: 701044868H1
aaatagctttcctcggttataaccttcaaggtggaaagaaaaacccacccactatcccaattccaataaataccttcctctctatattttcgcacaataccctctcacccttcaacgatgagttactacaatcagcagcaaccacccgtcggtgttcctcctccccaaggttacccaccgccggattcttacggaaaggacgcgtaccctccgccagggtacccgccgcaaggaggataccctccgcaggcgtatc

SEQ ID NO: 16663 - DNA, 254 bp, Glycine max
  unsure (1)..(254): unsure at all n locations; Clone ID: 701044869H1
gtgcagcggcggggacctgatggctctccgtggggacacgtggcagatgatggcgaccctgccgggggagatacgcaacgtggcgtacgttggggcgtttgatgggacgctggtgttgattggatcgagcggctacggtgaagtccacgtgtcttttgcgttcgatgtgaagagttgctgttggaggaaactggagagcccagaagggttcaggggccatgtccaaaccggttgtnttttggagnttnaanaat

SEQ ID NO: 16664 - DNA, 257 bp, Glycine max
  unsure (1)..(257): unsure at all n locations; Clone ID: 701044870H1
gcaaaatcatctaaatccgtttctgatcctgaatcatcagtttttcccttgaaagatgggaggtggcaaggacaaacacaatgaagaagagaaaggagttttctcacatctggctcatggagtagctcaagctgctcatggttaccctccaggggcataccctccacctcctggggcataccctccttaccaagggtacccacctgctcatggctacctccaaaggggggtnacccngggggngggtaanccccccg

SEQ ID NO: 16665 - DNA, 254 bp, Glycine max
  unsure (1)..(254): unsure at all n locations; Clone ID: 701044871H1
acaattggcaaaagagactgcaagctcctcaactgaaccagagaacaatgacgaagtgggaacagattacaatagcgcgggctttactgaactaccgtttgaaggaaaagatgactatgtctaatccaaatgctccccttccatttcatgaaaggtttcagattcaaaatccanggccaatcagttctcaaccgcccccagccattcatcaaagatccttcccctaatttgccagaagacagcncctcgaagta

SEQ ID NO: 16666 - DNA, 256 bp, Glycine max
  unsure (1)..(256): unsure at all n locations; Clone ID: 701044872H1
aaaaaatcaaaagtggataatggcttcgttatcgctttgcatagccatgacagcacccactccctcagcttctctcattctcactgccccaaaaccatcttcgctctctttgaaccttacccgcacttgctccaccgctcgctctccgcttctccattcctccttcctctcttctccttcccttctctctcccccttcctccatttcaggcttgtcacttggattggatttgacatctaatttngggaccagaaga

SEQ ID NO: 16667 - DNA, 256 bp, Glycine max
  unsure (1)..(256): unsure at all n locations; Clone ID: 701044873H1
tttcatttacacaaatcatcaatggcctctcttgtatcctcaagtgttcttttacacctctttctcataatttcccgcgctccatttgggcgcagagcaagaattctgagtgaaaaggaccaanaacaacaattgcagttccaataccacaaaggccctcttctcagtggcaaaatctccgtcaatctcatctggtanggtaacttcaagccttcccagcgagccatcatctccgatttcatcacctccctttcat

SEQ ID NO: 16668 - DNA, 255 bp, Glycine max
  Clone ID: 701044874H1
gccgaagaaggttcatccaatccccgaagcccttcaccgcattgcaaccatgtcgaggagaaaggtcagagagccaaaggaagaaaacgtgactctgggcccagctgttagagatggtgaacatgtctttggcgtcgctcgcatctttgcctccttcaatgataccttcattcatgtcactgatttgtctgggagggaaacgcttgtccgcatcatggtggaatgaaggttaaggctgacagagatgaatcgtct

SEQ ID NO: 16669 - DNA, 256 bp, Glycine max
  Clone ID: 701044875H1
agcagttacagcactcaaaaacctagagcgaagagcgtgaaggcaccggccgccggccatgacattcaagcgcaggaacggaggtcgcaacaaacacggccgtggccatgtcaaattcatccgatgctccaactgcggcaaatgctgccccaaggacaaggccatcaagaggtttcttgtgaggaacattgttgaacaggctgcagtcagagatgtgcaggaagcctgtgtctatgaacaatacacgcttccgaaa

SEQ ID NO: 16670 - DNA, 253 bp, Glycine max
  unsure (1)..(253): unsure at all n locations; Clone ID: 701044877H1
gttcgnctnttnattnnngactatccttatgcttctgatgggctagagatatgggatgccatcaagtcctgggtgcaagantatgtctcattctactacaagtcagatgnggaactccaaaaagaccctgaactccangcttggtgganagaacttgtagaggtgggtcaggtgatttgaaacatatgccatggtggcnanagatgcnnactcgtgaagngttggttgacgcttccgctatcctcatatggat

SEQ ID NO: 16671 - DNA, 253 bp, Glycine max
  unsure (1)..(253): unsure at all n locations; Clone ID: 701044878H1
ggaagaagaagttaacggaggagcgacggagataacggcgacggagatgatcgttgctttttaatttattaatttagttaacttattagggggttcgagaatgtcacatgcgtgttatagttctaactggcgttacacgattataatattnnnnnnnnnnnnnnnnnnnnnnnnnnnatggtatccttgtttgatgtatctaactgtaagctacaaaaaggcctaccactagaagatgagagactgaactgaa

SEQ ID NO: 16672 - DNA, 253 bp, Glycine max
  unsure (1)..(253): unsure at all n locations; Clone ID: 701044879H1
aacaccctttatttgtgtttttgttttttttttncttttctttttnatttatttngttttgagtnatggaancttgttgctgcaaccttgaagtagatgtaaatggagaagagacttncatggnggacaagactgtnattactcagtattcaaacaaatttgctagactatttggaaagtctagtggtgccacaggaaagcttaaagnaatattccatgatttnccaggaggtgctgaaggcttnagcttatg

SEQ ID NO: 16673 - DNA, 235 bp, Glycine max
  unsure (1)..(235): unsure at all n locations; Clone ID: 701044880H1
gnggatggaccacagttgtacanngttganccttccgancgtttcctatagatatttcggtgctgcaattgggaagggcaggcaggctgctaaaacagagattgaaaagttaaagcttgctgatatgacatgtcgacaaggggttattgaagtggctaaaattatatatggagttcatgatgaggcaaaggacaaagattttgagctagaaatgagctgggtgtgtgatgagtcc

SEQ ID NO: 16674 - DNA, 255 bp, Glycine max
  Clone ID: 701044881H1
ggcaaattaacttgaggtcaagtgaaacaatggaatcagaaccttatcctgagcatccaggagaaccagattgttcatactacattaggactggcctttgtagatttggagcaacatgtcgatttaatcatcctcctaacaggaagctggctattgccgctgcaaggatgaaaggtgaattcccagaaaggataggacagccagaatgccagtactatttgaagacaggaattgcaaatttggagccacatgcag

SEQ ID NO: 16675 - DNA, 255 bp, Glycine max
  unsure (1)..(255): unsure at all n locations; Clone ID: 701044882H1
ggtttatcagccctctgaagaagaactaaggagctatattgatccatatgaatatgttatttgttcagagtgtcatcaaggtggagctgatggcctcatgctactctgtgatatctgtgattcccctgcacacacatattgtgttggtttggggcgggaagtacctganggtaactggtattgtgatggatgtngaccngttgcttngggatcttcangctcccaagttcaagaagtgtggctgctcccaaggnt

SEQ ID NO: 16676 - DNA, 254 bp, Glycine max
  Clone ID: 701044884H1
ttcattccttctttcatttcattagcaaaagtgatcaattaagtgttaattaaccatcgatcatgatgaggagcaagaagcagagccagaacaagtttgttcgaatcatggcatcaccaatcagagcactgggaaaagcacgtgacatgtacggcggagcataacgaactgcggccagcacgtgagctactacggcggcgaccccacagaaggcgcgggaaggttctcgaggagccacagcgtggccacgtcga

SEQ ID NO: 16677 - DNA, 254 bp, Glycine max
  unsure (1)..(254): unsure at all n locations; Clone ID: 701044885H1
ccagtgttagtgtgtatttcctctcttctcactccgggatcgatattttcaagaacagatcgaaaagccgttcatcgatttgttggatctgtgagtgagaagatggttactaagacagaggagactcaattgaacaggctcgaaaaccaggtcgataacggcggcggcggcgcgtgggagtacctctgcctcgtgcggaagtncaaagttcggcggtcggagaaagttctnaagcacggtctctccatcttgaa

SEQ ID NO: 16678 - DNA, 252 bp, Glycine max
  unsure (1)..(252): unsure at all n locations; Clone ID: 701044887H1
ccgaatcgaacaggagcaagcaaagtcaaagaaaaagagagaggagagagagaaacaacaatcatcatcggccagaagcgaacacgacagacacatctgagaaaccaaacctgatagagatgtcgagtggaggaaaccttagttgcgtgttggtagctgtggatggcagcgaggaaagcatgaacgcgctgcgttgggcactgaacaactacaagctccgatccccctgcaccgattccangatgctcttct

SEQ ID NO: 16679 - DNA, 254 bp, Glycine max
  unsure (1)..(254): unsure at all n locations; Clone ID: 701044888H1
ctggaacttccctctcctccacnctggttccagagaaacccaanacccaaaaccgatttatctttgaaccgcaccatncaatacaaanataganagaaaganagtttncaaaacgcaaaanatagccaaganaccaaaacaagannagaaaatgccantttttccttctagcacccaacaacaacagcancccttttgttnccttccaccaagaaccgttttgccacgacncattcctcaantgcttcnccncg

SEQ ID NO: 16680 - DNA, 250 bp, Glycine max
  unsure (1)..(250): unsure at all n locations; Clone ID: 701044889H1
gttgtttaacaagctacaagggaaaggatctgtttagaaatttccaatatctgattagtagtttagtagtgtctttctgatttgtagggtgtagggggggtatatggtatatctagtttttaggtcatctttattgtaatttcattaccttctgtttatataattcagtggggattagacatgatgtttatgtagagagtagtactcatccatctaaggnccccatgcngaaatttggctggggnccatc

SEQ ID NO: 16681 - DNA, 248 bp, Glycine max
  unsure (1)..(248): unsure at all n locations; Clone ID: 701044890H1
ctccggttattcaatcgaacagggctgatagaaaaaatttgtagaaaaaagtgttgtgtaggtgatacccttcatatggatgatttagaatgctagtgtaggtgatacccttcatatggatgatttagaaaaaaattatagtgtgagaatttgaagtttcgcatcaaatagtttcttaagaaatcaattgcaaaatgaatatataganagatagntgagntcattntgcatatattccagncantggg

SEQ ID NO: 16682 - DNA, 252 bp, Glycine max
  Clone ID: 701044891H1
tttcaaagttatttaatcttttgttgaaacaaaattcatgatcgacatgatagttggttttgagattgggtactgttggttgcattctgaatgatcagacatattttggattgtgatctctatttgactgaaggattaagaaaatgctatagttttttcgttggtgagaaaaaggggccggcccctggaaaatgctatagttcattccatgctttaaaggatggttcatgccatgaagctggagaaatatga

SEQ ID NO: 16683 - DNA, 252 bp, Glycine max
  Clone ID: 701044892H1
ggggaagtgggttgttaaaggagcagttgatgtagacattggtgcaaacccttctgctgagggtggaggagaagatgagggagttgatgatgcagctgttaaggttgttgacattgttgacacattcagacttcaggagcaacccgcattcgataagaagcagtttgttaccttcatgaagaggtttatcaagaatttgactcccaagctcgatgcagagcaacaggagttgtttaagaagcacatcgaggg

SEQ ID NO: 16684 - DNA, 253 bp, Glycine max
  unsure (1)..(253): unsure at all n locations; Clone ID: 701044893H1
cttgcatttcctgatggcctccttattaatggtcaggctcatncaaccttcactggtaacccggggaaaacctatatgttcagaatctcaaatgtaggcttttcaacctcaattaacttcagaattcagggtcacaccctaaaattagttgaggttgaaggatcacacactgttcagaacctttacgattcacttgatgtccatgttggccaatcggttgctgtgttagtaaccttaaaccagcctccaaagg

SEQ ID NO: 16685 - DNA, 254 bp, Glycine max
  unsure (1)..(254): unsure at all n locations; Clone ID: 701044894H1
ggaaaaaggaggaggaagaggcactctcaatcaagtttataagtgctatagcctgcagcaatgtacacatgaaatgaagtgtctttccaacagcatttgcaacattcagacataacataactttcctgcgaaggaagtgttatgccattacatcatcagaactcttttgtctctctggcttgcaactcaactctgctgctgtagcanagcctcggttctatggcttcctagttgcccattgagaaaaaaacccc

SEQ ID NO: 16686 - DNA, 251 bp, Glycine max
  unsure (1)..(251): unsure at all n locations; Clone ID: 701044895H1
cacaattcacaaccgaaacagtttccatctctctcacaaaatgacaacaatatcaaattgctcccttctcttcctcttcctcttcctctccaccctccacatagcttccaccctctcaacccccaccaacttcatcaagtcctcctgcagcaccacccagtacccagccctctgcatccagtcctcnccgtctacggtcgnccatccagcaaganccccacgagctcgtccagacagccctctcctctcct

SEQ ID NO: 16687 - DNA, 255 bp, Glycine max
  Clone ID: 701044896H1
ctttcctcaatcacaaaaaaagcctctcttatatctcattattctccgcttgcaatcaccaaaggcaaaaaaaataaaggggtacgttaacgatgaagcgcgctttctccgtcgacaccgcggaggataacaaaacaacaggaacacgaaaaagacaaagcttgattcggaagaggaagaggaacacgggacacgtggcggcagcgtgtacttagacgacaacgttttgttcgaggtgctgaagcacgtggacgc

SEQ ID NO: 16688 - DNA, 287 bp, Glycine max
  Clone ID: 701044901H1
cttcctttctctgctctttgtcttctctgacacatttggggccttgttgagtgtgtttttgcaagagggtatggcgaaggacgttgaggttgctgagcgtggctccttctctgggaaggactaccaggaccctccaccagcaccactcatgatgctgaggagctcacaaagtggtccttttacagggctcttattgctgagttcattgccactttgctcttcctctacattactgtgctcacagttatagggtacaagcaccagacggatcatgctgatgcgtgtgg

SEQ ID NO: 16689 - DNA, 281 bp, Glycine max
  Clone ID: 701044903H1
gcacgtttaagaagcaatggcacgcaagaagatcagagagtataacaactttcattgttgaaccttttatccctcacaatgaggagttttaccttaacattgtctcagagagactagggaacagtataagcttttctgaatgtggaggattgaaattgaggagaattgggataaggtcaagactgtatttatgccaacaggagtgtctcttacatcagagagtattgccccacttgttgcaacacttcccttagagatcaagggagaaattgaggaattct

SEQ ID NO: 16690 - DNA, 152 bp, Glycine max
  unsure (1)..(152): unsure at all n locations; Clone ID: 701044904H1
caggatctgagcctagtgccatccacagagctggtggttccccttggggtgttgcatttgttcttcttctgcttttccttctcattncttaccaaccttccctgcatgaccttatttcttagctagcatgtgctattagtttatcaggctat

SEQ ID NO: 16691 - DNA, 198 bp, Glycine max
  Clone ID: 701044905H1
cccttctccatgggacagtcaccgtccaccaccgccgcgcctccgccagacctcaaccgccaccaaattcctcagatacatccaaacaccgattccgatttcaccgattacaccctccgtctctccgacgattgcctggccgcaatcttcatttcctgagcaccgccgatcggaaacgttgctctctggtctggccgc

SEQ ID NO: 16692 - DNA, 197 bp, Glycine max
  unsure (1)..(197): unsure at all n locations; Clone ID: 701044906H1
tgcaagacagcgtcacggagagagaagggaaggaagagtgggtgttggtggttgtcctcctccctcctcatgggtatggcaaccctnctcctcctctcttcctcttttccatcgctaccctaaccctaaccctaatccttcgctctttgcccctccctttccctctccttctccttctctcgcactaaaccccgtcg

SEQ ID NO: 16693 - DNA, 282 bp, Glycine max
  Clone ID: 701044907H1
cgaaaataaccaaataagaagaaagaaacaatgaacgacttgttctcaggttccttctctcgcttccgcagcgaccagttcatccccggaccgccaccacgacatcgagatgggcgccgccgccggtggcccccgcggcggcgaggtgacctcgacaagttcttcgaggacgtggaaggcgtgaatgaggaactaaaggaattagaaggcttagcgcagagtttaagaagcagccacgagcagagcaagacgctgcacaacgcgaaggcggtgagggactgc

SEQ ID NO: 16694 - DNA, 282 bp, Glycine max
  Clone ID: 701044908H1
gcttccggcgccatatcgcgtatctttctctgttctattcctacgatggagttttggggtgccgaggttaaggttggtgagtctgttaaggtagatccagccgaattcgaggcatgcatacacctttctcaggctgctcttggtgagcaaagaaagacaaatcaaatgaaccagttgttctctacttgaaagttggtcaacagaaatttgtcttgggaaccctttccagggagaaaattcctcaaatacctctggaattggttttggaaaaggagtttgagc

SEQ ID NO: 16695 - DNA, 166 bp, Glycine max
  unsure (1)..(166): unsure at all n locations; Clone ID: 701044909H1
taaaatttggcncacatgtntagaaaaaggagtccaaactttanggggcacacttcaaggaaattcctgttgatgctccaaagttctcaaaagaaaacatttgacgacttctgatgaagactaagtgctggctacttgtgtttatttttggctgaagaaatatatg

SEQ ID NO: 16696 - DNA, 282 bp, Glycine max
  Clone ID: 701044910H1
agccgagcagcgagagagagaaaccctagcaaaaatgccggctggtcacggtttgagatcccgcaccagagattccttctctcgtcccttcaggaagaagggtaccatcgccctcaccacatacctcagaacctaccacgtcggcgatatgtcgacgtcaaggttaacggcgccgtccacaagggaatgcctcacaagttctaccatggccgcaccggtcgcgtctggaatgtcaccaaacgtgctgttggggtcgaatcaacaagcaggtcggcaacagaa

SEQ ID NO: 16697 - DNA, 281 bp, Glycine max
  Clone ID: 701044911H1
cactacagcacctctagatttttattttcttcactgttcacactattttctcctttcctttcacattatcccttcccttttttaaacaagccatcttgcttttgtttcttctcttctcatcaccaacacggtgtgtgtccttcatccggattagagccacaaacataacacattccgctttgactttggaggctaagggcctaaggcaggttcccaatcactgtgatatcatggaatccccacaatccgttgtgtcaccattcaagagctctgtcttgggt

SEQ ID NO: 16698 - DNA, 282 bp, Glycine max
  Clone ID: 701044912H1
gtcttggaaaaccagaccattcactgggtcaaagtaaaatacctccaaaggcagaattctataatgggcagaatgcaattgtggctgtcaatgtacatctgggatacaatcaagaggattccctggtgatgaaccgtgcttcactgcgcgtggtatgttcaggtctgagcacataaggagttacaaatctgaaattgacaataaggaatcttcagataagaagcgaaaacctgaagacattgtaaattttgcaaagctacaaagtaaaattggccgagttga

SEQ ID NO: 16699 - DNA, 275 bp, Glycine max
  Clone ID: 701044913H1
tcagaatcggagcgaaaatggggcggggttggtggtggaaagtggcggtgttggcggtggtagtggcggtggtgtggagagggtggcaggtgggtggattggagaaggagtcagcgttcaattttgtcagagaatggtcggagaattagggatttgggcgatccctctctacgtgtcgctccacaccgtctccatcgctctgtgtttaccctctgcgatctcttcgaaaccgccgctcctctcctcttcggtttctacctccgtcttctgcgtct

SEQ ID NO: 16700 - DNA, 283 bp, Glycine max
  Clone ID: 701044914H1
ttcagagtcatgagattcccaacaacagttctgactcatttgttcagagtcatgagattcccaacaacagttctgacacacttgttcagagttatggtgtgattctaaaacccaatgtttcaatggacacatgcaatgtgtttgaaggagttgggtgagggatgatagctaccctttgtatgatgcttctcactgccctttgctgaaaggggttttaattgccttgctaatgggagaaaagatagaggttacacaaaatggaggtggaaacctaagaactgtg

SEQ ID NO: 16701 - DNA, 189 bp, Glycine max
  unsure (1)..(189): unsure at all n locations; Clone ID: 701044915H1
ttcttaactcaacttctgctacccactctcttcttccaagtccaaccacgcttttctctacagtcatgggcaaggtcaagatcggaatcaacggatttggaagaattggccgtttggttgccagantcgctctgcaaagagacgatgtgggctcgttgccgttaacgaccctttcattaccaccgatta

SEQ ID NO: 16702 - DNA, 276 bp, Glycine max
  unsure (1)..(276): unsure at all n locations; Clone ID: 701044918H1
tgacgatgaagcaaatcatctcttaatgcacaggaacttgccagctgttagatgggttggtggtgtagagttggaattgatagctatagcaactggtggaagaattgttcctaggtttcaggagttatctccagaaaagttgggaaggctggtatggttcgagaaaagtccttggtacaacaaaagaccgaatgctgtacattgaacattgtgcaaactcaagggctgtaactatatcatcgtggaggtaacaaaatgatcatgaggagncaagcc

SEQ ID NO: 16703 - DNA, 279 bp, Glycine max
  unsure (1)..(279): unsure at all n locations; Clone ID: 701044919H1
ctgtctgcttccgaaacgttgagatggtgaagaagtaaaggaaggatgccttaaacgtgcgttttagagagagnnnnnnnnnnnnnnnnnnnnnnnnngtcagaatctcttctcttctctttctctatcgtaactctcttctcgctctcagatcttccaaaaccctcctttccttcattactaaaatcacttctcttcaaagattctttttctcttctttctcagcctccacttcttttttctttcccgcgccctccaaccgcttcttgctccgttttt

SEQ ID NO: 16704 - DNA, 159 bp, Glycine max
  Clone ID: 701044920H1
cagttgtgtattttaggagagcccttaaattgaacaaaaactttttatcggcttggacacttatggggcatgagtttgtagagatgaaaaacactcctgctgctgtggatgcctatcgtcgggcagtagatatagacccacgtgttatcgtgcttggta

SEQ ID NO: 16705 - DNA, 276 bp, Glycine max
  Clone ID: 701044921H1
accgtgatggatttttcatgggtgaaggggctggagttttgcttttagaggaactggagcatgctaaggaaagaggtgcaaccatatatgctgaattccttggtggaagtttcacctgtgatgcatatcatgtgactgagccggtcctgatggggctggtgttatactgtgcattgaaaaggcattagctcagtctggagtatcaaaagaggatgtgaattacataaatgcacatgccacatccacaccagctggagatctaaggagtaccaagcc

SEQ ID NO: 16706 - DNA, 171 bp, Glycine max
  Clone ID: 701044922H1
ctccgcaccagtttcaccgcacgaatatcttgttgtttggagcgatccgagaaaaactctgtaaacatgttggtttaccaggacctccttacaggtgatgagcttctctctgactccttccgttacaaggaaattgagaatggatgctgtgggaagttgaggggaagtggg

SEQ ID NO: 16707 - DNA, 281 bp, Glycine max
  Clone ID: 701044924H1
caacctcttaccgtggcgaatctctcaattcatcaaaactaacaacatcatcaccatcgtcgcaccgaaatcaatcgccacaacctcgggatctcagattcgacgcgccaaatcatgtcgaaggcgcgtgtctacaccgatgtcaatgccttcgccccaaggagtattcggattacgagtctctcacccttcaatggggtgatcaagatgattatgaggttgtgcgaaaagtgggcaggggtaatatagtgaatttttgaaggcataaatgtcaatagcaa

SEQ ID NO: 16708 - DNA, 280 bp, Glycine max
  unsure (1)..(280): unsure at all n locations; Clone ID: 701044925H1
acttgatcaccttttttgaganaagatatatatcaatggcaactccgagtgtgttagaagtccgccctcctgctttaacttccatctctgaaccacttccattttttgatggaaccacaaggttatacatttgctatctgtgccctttgcacaacgcgcatggataactaggaactgtaagggactgcaagacaagatcgaattggttcctattgatcttaaaaacaggcctgcttggtataaggaaaaagtttatcccacgaataaggtaccttcgttg

SEQ ID NO: 16709 - DNA, 277 bp, Glycine max
  Clone ID: 701044926H1
ttccctgtctctcagaaagatgaaggtggtcgctgcgtatctgctcgccgtcctcggtggcaacaacaccccctccgccgatgacatcaaggaaatcctcggctccgttggaatagaggcagatgaagataggattgaatcgttctgtctgaagttaagggtaaggatatagttgagctaattgctgccggtaaggaaaagctggcctcggtgccttctggtggcggtggtgccttgccgtcgccgctgctcctggtggaggtggcggtggtgctgc

SEQ ID NO: 16710 - DNA, 281 bp, Glycine max
  Clone ID: 701044927H1
ctcacgcagtcgcagtgagtgaaaaggaaaaccctaattgcggtattctcagtgccttcgagagaaagaaaaaatggcagataatcttgttctccgtggcaccatgcgcgcccacaccgacgttgtgacggcgattgccactcccacgacaactccgacatgatcgtcaccgcctcacgcgacaaatccatcatcctctggcatcttaccaaggaggacaagacttacggtgtcccccgccgccgcctcaccggccattctcattttgtccaggacgtcgt

SEQ ID NO: 16711 - DNA, 273 bp, Glycine max
  unsure (1)..(273): unsure at all n locations; Clone ID: 701044928H1
tgtggtgtncggactgcgttttcctctctctgttctcttgtttgcnacgctgagcactggccttttccgcaaaagggtcgcacccggtttccctgtggaacagtgaagatggtttcttttttatttttctaattgatatgttgtgggatttggtgactccttctagtgggtttctttctttgatcttcccaatggtggtggaggtgggtgcatttgttgttgttgtgtataataaagtaatggacttgncggtggagcctttgatttgatgcc

SEQ ID NO: 16712 - DNA, 282 bp, Glycine max
  Clone ID: 701044929H1
ctttcctagttagtaagtgacaactgcttgcatataaaacaacaaccaacacacaaaagcacactaacctcccagatgggtatactaaaagtaaaacaccacattcccacgctcctctttctcagtatttcatttcctctgtttctcttacacctacctcctcagacaacacaaacttgatctacaaaggttgcgccgaccagaaactccaagcccaatactcccagaacctcaaaccgctgttggactccctagtctcggcgtcggcacagaagggtttcg

SEQ ID NO: 16713 - DNA, 284 bp, Glycine max
  Clone ID: 701044930H1
gggacaatttcagagctactcaagaatccaagggtgatgaagaaactccaaagggaattggaaactgtggtgggtatgaagaggaaggtgggggaatcagacctggacaagttgaagtatttggagatggttgtaaaggaaggcttgagctccatccagtggcaccgttactattaccacaccactcgagggaagattgcatggttggagaatatttcatacctaaaaattcaagggtgatagtaaatgcatggacattatgagagacccaagtgcttgggatg

SEQ ID NO: 16714 - DNA, 278 bp, Glycine max
  Clone ID: 701044933H1
acaatgaaatttgaagactatctcatggagaaaagccaacaagagcctcacaatagacaaaaccttgagaaagaggttgtccaattgcaagcacacttgaaatgtgaagaggcgctcaatagggtctacgttgtgcacttcaggaccagttttctctcttccactcattcccccactatttccacctcaggttcgtgggcttctgaagaattggcaatggttgaggaagagatcatcaagcttgaaaaaaaagttaaggaactggaattagattgttc

SEQ ID NO: 16715 - DNA, 278 bp, Glycine max
  unsure (1)..(278): unsure at all n locations; Clone ID: 701044934H1
ctacggcgtcgtttgaagggcttcgaccttccgctgttcagttngcttccacgggcagaattagaattggcaatctctcccaaaggtccttccggggcctggttgtcaaagccgccaccgttgttgcccccaaatacactgcgtaaagcctctgggagatagagtgctaataaaaattaaggaagcagaggagaaaactgagggtgggattttgcttccatcaactgctcaaacgaagcctcaagggggtgaggtggttgctgttggggaggaaannc

SEQ ID NO: 16716 - DNA, 275 bp, Glycine max
  Clone ID: 701044935H1
atttaatattttctaccctgatcttgtagacaagacaaaagccccaacctacaccattgagaaggatggcagcaatggggagacttgcattataagattccacgcagggccaccatatgaagacatagctttccgcattgtaacaaagaatgggagtattctcataagaaaggttttaagtgtgcatttgaacgtggaattctgcatgtgtacttcaatttcaaacgccaccgctaccgaagataatttcacacaaggcaatggttcacttctgt

SEQ ID NO: 16717 - DNA, 276 bp, Glycine max
  Clone ID: 701044936H1
cgaccaaaacgcgcaacacgttgtaattaaaacgacaccgaaactaatgggcgtcttcagcgaaaacccgaatccggacccggttgtgatccgccaggtttgggcttcaaatctcgaatccgaattccaactcatccgcgactcatcgaccactatccttttatctcgatggacacagaattccccggtgttgttttccgaccacacctggaccccacaaaaccctacaaccaccgcaacaacaatcgcaaccgccactccgaccactaccgcctc

SEQ ID NO: 16718 - DNA, 277 bp, Glycine max
  unsure (1)..(277): unsure at all n locations; Clone ID: 701044938H1
aattttcgtttcgcaggaatggggaataatagacaaaggagattcagagctcatcgcgcacaatcaagtngacaccaccaacaacaactcttactagaggncgattcccaaagctctcttccagaaaatgttgagggcgaggagaggaggaggagctcacggaaccaaaaataaagcttgcaatgtgggattttgggcaatgcgatgccaaaaggtgcactggacgcaagctttcaagattgggcatgctaaaagagttacgtgtgagtnatggttt

SEQ ID NO: 16719 - DNA, 276 bp, Glycine max
  unsure (1)..(276): unsure at all n locations; Clone ID: 701044939H1
cgcttganctctgcgagatcttgagtcgccgatttgaaaagatgagtaagcttcagagtgatgctttgcgtgaagccatctcaggaatcatggccgattccaaggagaagaatcgcaaatttgtggagaccatcgaactccaatcggtttgaagaactacgatccacagaaggacaagcgtttcagtggctccgtcaagttgccccacatccctcgccccaagatgaaaatttgcagcttggtgatgctcagcatgttgaagaggcagagaagata

SEQ ID NO: 16720 - DNA, 277 bp, Glycine max
  Clone ID: 701044942H1
caacaacaccacaatgggaagaagaccggcgaggtgttaccggcagataaagaacaaaccgtacccgaaatcccgtttctgccgcggcgtgccggagccgaagatccgaatctacgacgtgggaatgaagaagaaaggcgtggcgagttcccgttctgcgtgcacctggtctcgtgggagaaggagaacgtctccagcgaggctttggaggcggcgcgcatcgcatgcaacaagtacatggccaagttcgccggaaaagatgccttccacctgcgcg

SEQ ID NO: 16721 - DNA, 275 bp, Glycine max
  Clone ID: 701044943H1
attttatttggggcaggcttaaagccatttgtcacgctgtttcattgggacctcccacaagctcttgaagatgaatatgggggatttctcaaacctgaaatagtggaggacttccgtaactatgctgacttttgcttcaagaatttggtgatcgggtgaagcactgggtaaccctaaatgaaccatatggctacagcgtgaatggctacagtggtggaaattttgcaccaggtagatgttctaactacgttggaaaatgccctgctggtgattct

SEQ ID NO: 16722 - DNA, 276 bp, Glycine max
  Clone ID: 701044944H1
gatctatccactcacctgcctcttcctcacccctttctccatctaacgagtaaggaaaaatggcgcgtaagaagatcagagagtatgactcaaagaggttgttgaaggagcactttaagagactttctggcaaggagttgccatcaagtctgcacaaattactgcatcaactgatttcactgagctacaagagaaggaaccctggctttcatcttctaaattggttgtgaaacctgacatgttatttggaaagcgtggcaaaagtggtttggttgc

SEQ ID NO: 16723 - DNA, 277 bp, Glycine max
  unsure (1)..(277): unsure at all n locations; Clone ID: 701044945H1
cttcctccctctccctcctcccccaatnacgcccttctctcttccantttctcttctctgccccaactcaattcgattagtttagctnncgcggacagttcagggatcatggctagggttttagttcagtctactggtatgcctgcctactgagtgggcaaaggcacgggaagcataagggatcaggaaaatcgaaaagatctgtcaaaatgatgagcaccttacgaatgcctgctttaagaatgtcgagtttctccggatacgtactcttaatcct

SEQ ID NO: 16724 - DNA, 280 bp, Glycine max
  unsure (1)..(280): unsure at all n locations; Clone ID: 701044946H1
cctaaacccttccttgcttgttcctcttccgatttgatctcatcgtcaatggcttccgcgtgcagcagaatcgcgcaacgaacgtcaatttcttctataaaatcagccatcaaatccaacattcgcgcttcttcattctccaaacagcttcctcctcttctcctcttcgccaatccttattgaccaggatttcgccggagctgagangcgcgnagtngatgttgccgctgcacagcgcggtggcggcggcgagaatgacgtcgtgtctgagcgtgacttc

SEQ ID NO: 16725 - DNA, 280 bp, Glycine max
  unsure (1)..(280): unsure at all n locations; Clone ID: 701044947H1
cnaaatcacagtttctggcaaaacccttttcgaaggtgaccaatcggtggatcaaacatggacaagagcatgttagcggatttggattcgcttcctgaggctgataagcaaagaatgactgtcatgatcgatcagctccaaattctgacagtctgagaatgtataattcactggttgagagatgcttcagtgattgtgttgacacatttaagcataaatccctgcaaaagcaagaggaaacctgtgttcgaagatgtgcagagaatttctgaagcttcta

SEQ ID NO: 16726 - DNA, 286 bp, Glycine max
  Clone ID: 701044948H1
aaggaacattgtaatcgtaagctccgaagcttcatgatattccaacaaccttcaaagacagagaagaaagaagaaaacaacctcaacaaacaaacatcaatggcaaacacgtattcgtggctcttcctcgcgatttgtgccaccctctgcttcttctgtcttcgtcgccgacagcggacgcgggagcgctgggcatggaaatgacatggataccctccatgcccatggaagaggagttccagctggacagcgagatcagccggcgcatcttagccacgaccaagta

SEQ ID NO: 16727 - DNA, 278 bp, Glycine max
  Clone ID: 701044949H1
ttacaatcactccttcctctcatcctctataaagaaagtgcttaatttgtgttgttacttggttcagtttccatggattgggggctgctatatcttctcatcctaaaccttattcagtcacaactggtggaaatctctggcgagtaaacacaccaccaagaatatttactttgcaagttcttggatatcaaaagcttcacgacacaaaagggaaactcaaatagaacataatgttttgaggttccaacaaccaagtttggatcatcatacaaatgcat

SEQ ID NO: 16728 - DNA, 271 bp, Glycine max
  Clone ID: 701044950H1
gttttttttcatgttatgcctaatgatttggtatccaaatatgttatagacccaagttattaagattgtggtagttgttcagttggagctcctgctcgtgttggtttggttgctccaattgatgtcgttgttcctcctgcaacacagggctcgatccctctcagacctctttcttccaggtgcttaacattcctaccaagattaacaagggtactgtggaaatcattacacctgtggaatcataggaagggagacaaggttggatcttctg

SEQ ID NO: 16729 - DNA, 273 bp, Glycine max
  Clone ID: 701044951H1
ttttgcaacaaaattcaattttgagcactaaccagcaccacttccaatggcttcaaatcatgaagaagtgatacttttgggcaagtgggccagcccatttagcaacagagtagaccttgctctcaagctcaagggagttcctacaaatactccgaggaagatcttgctaacaagagtgctgatcttctcaggtacaaccccgtgcacaagaaggttccggttttggtccacaatgggaacccattacccgagtcacttatcatgttgaataca

SEQ ID NO: 16730 - DNA, 273 bp, Glycine max
  Clone ID: 701044953H1
attaacctcactcaaactcgggatcacagaaaccaacaacagttcttgcactgaggtttcacgatgttgctggaacttgcacttggtttgtttgtgttagctttgtttctgcacttgcgtcccacaccaagtgcaaaacaaaagcacttcgccacctcccaaaccctccaagcccaaagcctcgtcttcccttcattggccaccttcacctcttaaaagataaacttctccactatgcactcatcgatctctccaaaaagcatggccccttat

SEQ ID NO: 16731 - DNA, 269 bp, Glycine max
  Clone ID: 701044954H1
agagagccttgactgttcttattcagttggaatgaggttcaggatgcgttttgaaactgaagatgcggcagatcgaagattcactggattaattgctggaattagtgatgttgatcctgttagatggcccggatcaaatggagatgcctactggtaaggtgggatgacatagaagctgctaggcacaatagggtttccccatgggaaattgagccatctggttctgcttcaaattccagtaactgatggcagctggtttgaagaggaac

SEQ ID NO: 16732 - DNA, 273 bp, Glycine max
  Clone ID: 701044955H1
ggaggaatcagagggcaagttgaagggaattcttggttacactgaagatgatgtggtctccactgactttatcggcgatagcagatcaagtatttttgatgcaaaggctggaattgcattgaataagaactttgtgaagctgtttcttggtacgacaacgagtggggatacagctcacgtgtcattgatcttcttgtattcgttgccaagaagtctctttaaggtgttacttcaaagtagctgtcttcacattattaccgtatgtttatgttc

SEQ ID NO: 16733 - DNA, 267 bp, Glycine max
  Clone ID: 701044956H1
ctttagccgaggtcaggaggagcactagctaagttcacaatttcaaaatggctaggggactaaagaagcatttgaaaaggctcaatgctcctaagcattggatgcttgacaaactgggtggtgcatttgcgccaaaccctcatctggaccacacaaatcgagggagtgcctccccctcattcttattctgcgaaaccggctgaagtatgctctgacataccgtgaagtcatgctattctgatgcagcgccatgttcttgttgatggc

SEQ ID NO: 16734 - DNA, 273 bp, Glycine max
  Clone ID: 701044957H1
gttttcggttacccccattttgaaagccatgtatataaacccttgctatgcttgttacgcactcccacgttctaaaactgcaattggagctcgccacagcaactagaattggaacaaaccctatttctcttgtcaaggttggccttttttctgctccaaaaccgtagaacaagcataggagagtgagaaggagcagcccctgaatttgtttttgcatgatataggcagaacaatgtctcagatctcagtgattataaaatcatcaaggaagga

SEQ ID NO: 16735 - DNA, 272 bp, Glycine max
  Clone ID: 701044958H1
gttagcaccaaaaatgtcgaagttaatcttcgtgttccttgcactaattcctcttctctgcacctccttctcgccagagaaaccctcagatcggcgcgtcctcgttttgctcgatgacttcgccatcaaatcctctcacttctcttcttcaactccctcaaatctcgcggcttcgatctccaattccacctcgccgacgaccccaaaattgcgctccagagatacggccagtacctctacgacgccctaatctcttttcccccaccattgaa

SEQ ID NO: 16736 - DNA, 270 bp, Glycine max
  unsure (1)..(270): unsure at all n locations; Clone ID: 701044960H1
aganaagaacgcagaaactgaaataaaaaatggcagaacccaaggttaaatacgatcgtcaactcagaatatggggtgaacaaggacaggcagcccttgagaagtctagtatttgcttacttaactgtggtcctactggtctgaaacacttaagaatcttgttcttggtggggttggaagcatcactgtagttgatggatctaaagttgaagcgggagacctcggaaacaattttttggtggatgaagcaagtctgggaatcaaaggcaa

SEQ ID NO: 16737 - DNA, 276 bp, Glycine max
  unsure (1)..(276): unsure at all n locations; Clone ID: 701044961H1
tnangacatgtctcatgtctattgtccagtttatatgttatctgcctactatgaaaaacatccacttatgtggcatttccccccggttcaagaggccatttttcttgcttaacaatttgtatgttttcacaggcgtcaactgaagcagagttgaaattaatagaagaagagactgcaaagagagttgaagaagcaatacgtaagagagttgaagaaagcttgaaatctgaggaggttcaggtggagattgaaaggcggttggaagagggacggaag

SEQ ID NO: 16738 - DNA, 275 bp, Glycine max
  unsure (1)..(275): unsure at all n locations; Clone ID: 701044962H1
ggaagcgcanagcagctgataccacgttggttgacgaaactgataaaaagcgctgtcattgtgtcttgtttgatcatcttcacaatcacatctccagaacacaaagaagagtgacccttcttcttgttattccacttgcgtaggtattggtgtgattgtttgtaccatccggtggtggagcttgttggaaattggagatgagtcagaggggtttaatatatagcttgttgccaaaggaactgttgttttagcagagcacacgcaatataccggga

SEQ ID NO: 16739 - DNA, 279 bp, Glycine max
  Clone ID: 701044963H1
cttaagagaccgtggcctccaggactgccttcattccatggcttgaaggatgatgattttggtacaaattcttcactaatgtggcttcgagacacagacagaggtcttccatctcttaattttcaggggattggtgttagtcctggttgcagccaaggcttgatccatcaatggtgaattatcaatcagatatgtaccaagctatggctgccgctgcacttcaggatatgtggacttcagatccttccaaacagcatcctacgtccgcaattcaatttc

SEQ ID NO: 16740 - DNA, 263 bp, Glycine max
  Clone ID: 701044964H1
atggcagcacttggtggcaatcgtgatgtggcaggaagccagaacagccttgagatcgatggtttagctcgctttgctgttgaagaacacaacaaaaaacagaatgcccttttggagtttgaaaaggagtaagtgcaaaacagcaagtggtttctggtacctgtacaccatcactttggaggcaaaagatggtgggcaaaagaaggtttatgaagccaaagtttgggagaaggctggttgaacttccaggaggtgcaagattc

SEQ ID NO: 16741 - DNA, 285 bp, Glycine max
  unsure (1)..(285): unsure at all n locations; Clone ID: 701044965H1
gncaagtgaaagtgaganaaaataaaaatcaaagagcataatgtcagggatcattacacaagattggggagaccctttcatgtgggagggcacaagaaggaggaggagcataagggtgagcaccatgctggagaatacaaaggggagcacatggtgaacacagtagtgagtacaaaggagagcatcatggtgaacacaaagctggagagtaccatggtgagcacaagccagagcacaaagaggggttcctagacnaatcaaggacaagatcctggtganggcggc

SEQ ID NO: 16742 - DNA, 275 bp, Glycine max
  unsure (1)..(275): unsure at all n locations; Clone ID: 701044966H1
gcaagcgataaatcacaacataaaagggttctctctcacgttctctttcacacactaagcgtgaactaatatcgaaattcaattataccctgaccctgtgttagtttcgtgtgttgagaagcagagagaggcagagatnaaggaagcgcagtgacggtgaagccttggatttcgagcctgaggacgatgacttgatggacgaggacggcgcccccgacgccgacgcttctccgcctcaacctaagctcaaatccgccattcaccgccgccgccgc

SEQ ID NO: 16743 - DNA, 176 bp, Glycine max
  Clone ID: 701044967H1
caggcactggaatcagttgtgaatgtcaaactgaatggttgggaaggtcgatactacatagcgagcagaagctgtagctgatagtttacatgcaatgcagactataaacatatgtagataatgtgctagggaaaactaaccttatctttgatttagctggaaaaaatggtattttt

SEQ ID NO: 16744 - DNA, 103 bp, Glycine max
  Clone ID: 701044968H1
gattcccctacgcggtttagctattgtacgtaaaggggatgaagtctcggaaatgaattttgtgattctgaattttgtatcaaatctgaatatcctttctaac

SEQ ID NO: 16745 - DNA, 175 bp, Glycine max
  Clone ID: 701044969H1
aacagcttatcatcaatatgggtgcatggtgctggtttgcatcctttcagttgttgacgacaccaaactgataacaaaggttatcattcgtgagcttcagtcaattttaaaggagcttgttctagataagaatggaggcgtcccttactccaattactacatcctaatagttcac

SEQ ID NO: 16746 - DNA, 154 bp, Glycine max
  unsure (1)..(154): unsure at all n locations; Clone ID: 701044970H1
attgctcccaaattcttcaccacggttcctcttcggaccatttcacccttcgcatgtngcttcttcagtccgttccatcgctgactcttctcctttcaacaaaatccgcattcaaagggatgatactgttagtcataacacaacccattcanag

SEQ ID NO: 16747 - DNA, 271 bp, Glycine max
  unsure (1)..(271): unsure at all n locations; Clone ID: 701044971H1
gncaaacgacagcgttctgagtcttttcttcttcgttaccctcttcacatgccttctctctgctacttcccacgatgaccatattttcctaccgagtcaactccatgacgatgactcagtgagttgcactgcaaccgnccaagccttaactacaagccggtgatcggaatcctgacccaccccggcgacggtgcctctggccggctcagcaacgccaccggggtttcttacatcgccgcctcctacgttaaattcgtggagtccggtggtg

SEQ ID NO: 16748 - DNA, 274 bp, Glycine max
  unsure (1)..(274): unsure at all n locations; Clone ID: 701044972H1
ctctcatgcttttttccacttgcaaantcnaanttcactctgacagtttttgcagcttnattaagaagaacttaacagacatataaacatagtgatcgttatgtctacgcaaccaaagcttggtcggattcccagtatcaagaccgagttgaagacactctctctgctcaccgtaacgaactcatttctctcctctccaggtatgtggctcaggggagagggattttgcaaccccanaatttgattgatgaacttgacaacatccctggcgatg

SEQ ID NO: 16749 - DNA, 274 bp, Glycine max
  Clone ID: 701044973H1
aatctctccgcgccctccatgttggagcggacactctcctcccgccgcgtcaactcctacgctgacgacgacgccgacgccgatgtagacgccgacgaatccaagactaagaagaaccaacacattctcttccgcatcacaccagagcctccaattacctctcccgaatcgccggttccggctccttctacctcccctgcgtcaccatcgtcctcttcgtcttcttcgctttctccttcctcttcacatctcgcggcttcgtctgcatctcctc

SEQ ID NO: 16750 - DNA, 270 bp, Glycine max
  unsure (1)..(270): unsure at all n locations; Clone ID: 701044974H1
caaaactcaagcattgcatccctcttgatttgtagtttgttttgtgctttagataaaagttctgccaaatcaagaggggttttaagatcatagtgtgtgttttgcaacaatggctaagttctttgctgctatgatctggcactctttgccatttccatactncaaacagtggtaatggctgctaatgaacaaggaggccacttgtatgacaacaagagcaaatatggaagtggaagtgtcaagagttaccaatgcccatcacaatgctcg

SEQ ID NO: 16751 - DNA, 269 bp, Glycine max
  Clone ID: 701044975H1
ttcttagtcccaattttctagggttttattcattttccgatggcttctgcagatgttgagtaccgttgctttgtcggtgggctcgcttgggccactgacgaccatgccctcgagagagccttctctcagtacggcgaatcgttgaaacgaaggtctgtttgttgcaggcatcacatctgatctcacacgattcggattcggaattttctcgatcccgttctgatctgtgatctctgatctgtttgcgttactgatctatgatacttgtg

SEQ ID NO: 16752 - DNA, 270 bp, Glycine max
  Clone ID: 701044976H1
cacctactaagcgacgtcgttgggaggcgtaataatgtcgatgacgatggttatggaggaagatgaagaagacgtagaaatagagcacgtgtttattgctcatgaaattgacctcgattacgagttcgacgctgcaagttcttcgatttcactcgcccggagactccctcggaagctcacgaagcccaactctggtttcaaaatgccgctggttaccctccttcgccttttgtgagaaggctgctagtggcgagagaggattgttcttgg

SEQ ID NO: 16753 - DNA, 268 bp, Glycine max
  Clone ID: 701044977H1
gcgcattgccaaatcggtcatcttcagggattgaaattgaaaacatgttgagataactttgttccatcaaattttattctagcaggtggaaaaggcctgtgaagagcttgctgttgctgtggctgtagcttgatggtgtgtatagtttgaagaggcaggaacagcccacatcctatatacataccgggaactctcaaattgagagactgggattacacaaattgagggaattcaaagcaaagaataggtaaaacacctgcgtgattga

SEQ ID NO: 16754 - DNA, 276 bp, Glycine max
  Clone ID: 701044978H1
gcctctactctcgaagaagatcgtgaagaagagggtgaagaagttcaagaggcctcagagtgacaggaaaatttctgtcaagacaaactggcgcagaccaaagggtatcgattcccgtgttaggagaaagttcaagggatcactttgatgccaaacattggttatggttcagacaagaagacccgccactatctccctaatggttttaagaaatttgttgttcacaatgtgaaggactggaactgctcatgatgcacaacaggacttactgtgctg

SEQ ID NO: 16755 - DNA, 272 bp, Glycine max
  unsure (1)..(272): unsure at all n locations; Clone ID: 701044981H1
gtgagcgtcantagcaacgcaacgcaatggtttacataacttcgtgggatgaattcgtggagcgatcggttcagttgttccgtgccgatcctgattctacgcggtatttgatgaagtaccggcattgtgagggcaattggtactcaaggtcaccgataatcgacagtgtctgaagtataagacagaccaagcacaagaagccaagaagatggaaaaacttaataatatattcttactttgatggtncggggaccagaagtggatctatcaga

SEQ ID NO: 16756 - DNA, 267 bp, Glycine max
  Clone ID: 701044982H1
gtagaatgtgaagctgttgatccagttgatgtggaaaagttagcaactactgtaaagagagcccttggaacctatggtaccccagccatgacacaaatgatccagaactgcatggcccaagacttttcatggaaggaccagccaaacaatgggaaaaggtgctgttgagcctagaggttgcaggcagtgagcctggaattgatggtgatgagattgctcctcttgcaaaggaaaacgtcgccaatcctgagcataaccatgataacc

SEQ ID NO: 16757 - DNA, 177 bp, Glycine max
  unsure (1)..(177): unsure at all n locations; Clone ID: 701044983H1
aaaccctagaaggaggaagaagaanntgaaggatgagaccantagacgagaaggagacgancgcggtgttcgagaagctgttcaaattcgtcggaaacaacctgaagaacatcgggagaacccctcacacgaaggtcctgattcgaaccctggccgctactgcttccgcctccacaa

SEQ ID NO: 16758 - DNA, 264 bp, Glycine max
  unsure (1)..(264): unsure at all n locations; Clone ID: 701044984H1
cctttctcctctccttattgtgaaccaaaaacatgaatagaaatgcatacaacaaggaggaaaaaggatgttgctatttccacccaaaacaagtggttgttggagtgtgccccttgtgcttgaatgagaggctctcatactggctgcaaatcaagaccatcatcaccatcacaggcttcaaagttccactcagaggaaggcttcagttccattcacaagatnttngctcttggttcnctttcactcgccaccattaaaatctca

SEQ ID NO: 16759 - DNA, 268 bp, Glycine max
  unsure (1)..(268): unsure at all n locations; Clone ID: 701044985H1
gataactagaaacagtgtgatgaaaatgaaggtccttgttttcttcgttgctacaattttggtagcatggcaatgccatgcgtacgatatgttccctctccgaatgaacactggctatggtgcccgtactccggggtgaaatgcgcaagttggaggcttgctgtggaagcacacaacatctttggctttgagaccattccngaagagtgcgttgaagcaacaaaggaatacatccatggcgaacaatatagatcagactccaaaacag

SEQ ID NO: 16760 - DNA, 266 bp, Glycine max
  unsure (1)..(266): unsure at all n locations; Clone ID: 701044986H1
tttgaaaatacaattctcaacttaaatattgtgaataagtcatctgattccactaaaagtgttacaaatcatctcatccatggatctgataatagatctttgcagttatctgatgtgaggnttccattggtcttatggttttattcaatgttgctttttttggaacgggaaattttgcaagtattgctagttttgagatttcatctgtctatcggttcataccatctttagtcccttcctgatggcagcgctactcacttccaaat

SEQ ID NO: 16761 - DNA, 269 bp, Glycine max
  Clone ID: 701044987H1
gccccaagcccgttcctatgaagcacgttggtgggccggcgaacccacgaagctgtaccggggcgtgaggcagaggcattgggggaagtgggtggcggagataaggctaccgaagaaccgaaccaggctttggctggaaccttcgacacagccgaggaagccgctttggcttacgacaaagccgcgtacaggctccgaggcgacttggcgaggctgaacttcccgaacctgaaaggctcgtgccccggcgaggagtacaagcctatgca

SEQ ID NO: 16762 - DNA, 270 bp, Glycine max
  Clone ID: 701044988H1
acagtgtgttactcagatctggtgctgtgtggaacgaaaagctaagggcacatcacaatgaaggcattgattctggttggggggtttggaacaaggctgaggccactgacactcagttttcctaagcctcttgttgttttgctaacaaacctatgattctgcatcagatagaggcccttaaggccattggagttactgaggtggtgctagccatcaactaccaaccagaggttatgttgaattcttgaaggattttgaaacaaagctcgg

SEQ ID NO: 16763 - DNA, 268 bp, Glycine max
  unsure (1)..(268): unsure at all n locations; Clone ID: 701044989H1
anagaacaatgctccacatcacctgcattcttttaatgtgccttctaagttccttctcacccccaatcaacgctcttctcaacctcactttaccccaccaacaccctcaccccgaatccgtcgtccacgatctccanggaaggtgaatgcctcactatggagaagggaaatgctgtcaaaggaggaccaacaagaaggcatgtcgtcgtcgtcgtgtctgaccggaaaccccatcgacgatgctggcggtgcgatccgaatgggcggc

SEQ ID NO: 16764 - DNA, 269 bp, Glycine max
  Clone ID: 701044990H1
atcctcttctgctttgccctacaaaaggacaccccctagctggctcaagatctcttcgcaagatgtggaagaaaatatctgcaagtttgcgaagaagggtttgaccccgtctcagattggtgtcattcttcgagatctcacggtattgctcaggtcaacagcgtcactggcagcaaaatccttcgcatcctcaaagctcacgggcttgcgcctgaaattccagaggatctttaccatttgattaagaaggcagtttcaattaggaagca

SEQ ID NO: 16765 - DNA, 267 bp, Glycine max
  unsure (1)..(267): unsure at all n locations; Clone ID: 701044991H1
gattagctaagcaactgtctcctaaggtggtgactctggttgagcaggaatttagcaccaacaatgcgccgttcttgcagcgcttcgttgagacaatgaactactacttggctgtttttgaatcaatcgatactntcttccaagggagcacaaagagaggattaatgtggagcagcattgtttggctcgcgaagttgtcaacttaatagcatgtgaaggagaagaaagagttgaacgtcacgagcttctgaataagtggagangcgt

SEQ ID NO: 16766 - DNA, 270 bp, Glycine max
  Clone ID: 701044992H1
ggagatgaagaaaaacttacaatagtgatgttcccatggctagccttcggtcacatgatcccaaaccttgagttggccaaactcattgctcgaaagggccaccaagtgagtttcgtatccaccccaagaaacataagcgtctcccaaaaccgtcaccaaatacactcatcaatttcgtgaagcttccactccccaaaatccaaaaccttccagaaaacgcagaagccaccactgacatcccctacgacgtcgttgaacacctcaaagtag

SEQ ID NO: 16767 - DNA, 272 bp, Glycine max
  unsure (1)..(272): unsure at all n locations; Clone ID: 701044993H1
tctctatcgtcttcttcctctgttccattagggtttccttttctccctcggagcttccaattgaaatccaattcctcaatacctccacactttctcgttcggaaagctcgcgaattcgaaagacatcgacggctccngtgatacgttttcttcctctctggttatcaatgttggctactagtgcagttgcatctttgcccgtattaccaccagtgagaagaggtggccaccacattgaacagaatgttgtttccacattgagctttccaaga

SEQ ID NO: 16768 - DNA, 110 bp, Glycine max
  Clone ID: 701044994H1
cttaaatactggttttatgattttataacgcccgcttgcacatttaggttgaatgaatgttttgtcttgcactactatcttcttcgataggctaacaaatagtagttgat

SEQ ID NO: 16769 - DNA, 273 bp, Glycine max
  Clone ID: 701044995H1
caagattggaggtattggaactgtgccagtgggacgtgttgagaccggtgtcttgaagcctggaatggtggtgacttttgcaccaactggactgacaactgaagtcaagtctgtggagatgcaccatgaatctcttaagaggcacatcctggtgacaatgtgggattcaatgttaagaatgttgctgttaaggatttgaagcgtggttatgttgcctcaaactcaaaggatgaccctgcaaaggaggctgctaacttcacagcccaagtcatc

SEQ ID NO: 16770 - DNA, 277 bp, Glycine max
  unsure (1)..(277): unsure at all n locations; Clone ID: 701044996H1
cgccaattcagatcgcagacagacacagagagtgaganagggagatggggagcgacagcgcgngcagagaagtcggtgcnnnnnnnnnnnnnnnnnnnnnnnnnnttggccctggctcccattgctaaacctcttgctgggagaagctttgcaagcgaaccctaaaactgttcgtagagctgccgaacacaaatgcttgaaaagaggagtgaaggaggtcgttaaaagtataaggagaggtcataaaggatgtgtgtgatgctggggacntatcacc

SEQ ID NO: 16771 - DNA, 105 bp, Glycine max
  unsure (1)..(105): unsure at all n locations; Clone ID: 701045003H1
ttgttcgttgtggcagtagcaaaacaacacctttttgaaacccgaggttcagagagaaaagaaacnttttncaanttnntggggcgttggatgaaaccagaggtt

SEQ ID NO: 16772 - DNA, 164 bp, Glycine max
  unsure (1)..(164): unsure at all n locations; Clone ID: 701045004H1
tctctctctctatattttggggtttcattgttgggtgctgaagcaaatttgcngtgtagcacaggcaatggaggttcaaagtctcagctttgagaataacattttgtgggttggctcttttgtggaggctttggtgcttgacactttccttgccactgccaaat

SEQ ID NO: 16773 - DNA, 291 bp, Glycine max
  Clone ID: 701045005H1
gttttattggctaatccgttggatgaagcaactttttaatcgggaaattgaactgagactaaagcatgggccttcaatttggtttcttgaggataagtacttcaaaccctaatttgtcagtggacattctagattgtcaagttgtatgagagatgtgtcattgcatgtgccaattatcctgagtattggatacgctatgttttgtgtatggaagccagtggaagcatggatcttggcaaataatgttcttgctcgggcaacccaagtctttgttaagagacaaccagagat

SEQ ID NO: 16774 - DNA, 291 bp, Glycine max
  unsure (1)..(291): unsure at all n locations; Clone ID: 701045006H1
anaaaaattgataacatcacacagcattagtatgtatcagcaacaagggtcagatccaacaaagcaatcaccggcaaccggttttccggtgagctatagcaattcaacaacgtattcgaccaacgaggcttcctacgctccagtcccacctccccagcccaaacctcttgtcgattggtccaccggcctctgtgactgcttctccgaatgtggaaactgttgcatgacgtgttggtgtccatgtgttacctttggccgagttgcagaaattgttgacaagggatccacatc

SEQ ID NO: 16775 - DNA, 291 bp, Glycine max
  unsure (1)..(291): unsure at all n locations; Clone ID: 701045008H1
ttccaagttgatcgagcgacttcagggattgccttggcatacttttggtgtttgaagagctaatctgtctaccaaaatgaagggacgtgtaaggtgggatgaggctaatattggagaaattgaggcaaacaaacctgtgaggcagaaaattactgagcctaagactccatatcatcctatgattgatgatgacagttctctatctcctgtacgaggaagttttgatgcatgtattgataacgaaaatcgtgctgagnnatatnggggtnccctnantgatgtanccnccag

SEQ ID NO: 16776 - DNA, 163 bp, Glycine max
  unsure (1)..(163): unsure at all n locations; Clone ID: 701045010H1
gtgtccttggaagcttcagaagcngctcgccgctagcgtcctaaagtgtgggcagangcaaggtctgggctcgatccaaatgaagtcaatgaaatctccatggccanttctcgacaaaacataagaaagttggttaaggatgggtttattatcaggaagccaa

SEQ ID NO: 16777 - DNA, 156 bp, Glycine max
  Clone ID: 701045011H1
acgaatatcttgttgtttggagcgatccgagaaaaactctgtaaacatgttggtttaccaggacctccttacaggtgatgagcttctctctgactccttccgttacaaggaaattgagaatggaatgctgtgggaagttgaggggaagtgggttgt

SEQ ID NO: 16778 - DNA, 164 bp, Glycine max
  unsure (1)..(164): unsure at all n locations; Clone ID: 701045014H1
cncagcgcggcggccaagccatctcaagccggagctgctcttcacccttcctcctactcggtacaacacaacaacatttgttgtggagtgaatgggtgcgacggaggccaacacgacacttcaagctcgtcccgaaacgacgtcggagaatatcgaagcattgc

SEQ ID NO: 16779 - DNA, 94 bp, Glycine max
  unsure (1)..(94): unsure at all n locations; Clone ID: 701045015H1
gcagtggcgaggaagaggatgacgattagagaatggactgataattgcatttatgtnggttctgatgattttgatcactgttgnnggtggtctg

SEQ ID NO: 16780 - DNA, 170 bp, Glycine max
  unsure (1)..(170): unsure at all n locations; Clone ID: 701045016H1
tttcttcgtcactccgccatcttcctaagcatttcaantctctgcgcttcaaactccaaacaatgggcgttgttccgcttntctctgnttttcacactccttctttcttccattctcttatcgantcactcagtaaaatggcggcgaccgtgacgaggaagatgatcttt

SEQ ID NO: 16781 - DNA, 139 bp, Glycine max
  unsure (1)..(139): unsure at all n locations; Clone ID: 701045018H1
tgttccatgtggatgtggagttgtccttgtgggccattgctggtgcccttttagtcntaagatctatcctcaagaatgtaaattggtggctctatgaatccaaattgggtgtgaagcagtactctttgccaccaggtga

SEQ ID NO: 16782 - DNA, 161 bp, Glycine max
  Clone ID: 701045020H1
ggtgtatccaaatttgttccgaatgaatacttctactggggcacctccagattattttgataaaaatggccagaattggggtttccctacatataattgggaagaaatgtcaaaggacaactatggttggtggagagctcgattgacacagatggcaaaat

SEQ ID NO: 16783 - DNA, 161 bp, Glycine max
  unsure (1)..(161): unsure at all n locations; Clone ID: 701045021H1
gaganttatcatacccttcaagatgaaaccgtacctacgtccantattcctattattccttatccttctcgaccaatccatttcggcgagtgctgntataaatattaatggtctgagaaacaaaattagagaagttctaaacaagcacccgagcatcaatc

SEQ ID NO: 16784 - DNA, 289 bp, Glycine max
  unsure (1)..(289): unsure at all n locations; Clone ID: 701045022H1
gtgaggtagaacccttccacggtggtgactgcgcgatgggtgcctacaagtatgtttcagagctatggcgcaagaagcagtctgntgtncatggcgcttcttgcagcgggtgangtgctgggagtatangcagcaaccttccattgttcgcttgacaaggtcgacccgccctgacaaggctcgtcgnttgggcttcaaggctaagcagggctatgtgatataccgtgttcgtgttaggaggggtggccgaaagangccagttcccaaaggtattgtttatgggaagccc

SEQ ID NO: 16785 - DNA, 162 bp, Glycine max
  unsure (1)..(162): unsure at all n locations; Clone ID: 701045023H1
gcatcggntaaacaagctgtttanttgggcttcctctgggcagctttanttgagnaaaaanttntttgcatgcacggtggtattggtcgttcantaaatcatgtagaacagnttgaaaacattcagcgtccanttccantggaagcaggatcaattgtgctt

SEQ ID NO: 16786 - DNA, 53 bp, Glycine max
  unsure (1)..(53): unsure at all n locations; Clone ID: 701045024H1
gncttctctttntcngnatcgtttttactttcaaccacttccanttttctttt

SEQ ID NO: 16787 - DNA, 160 bp, Glycine max
  unsure (1)..(160): unsure at all n locations; Clone ID: 701045025H1
atttggacaaggcaatcgntcacaagggctttgtttgntacattttcggcttttgggaatattctatcttgcaagattggcnacggatgcttctggccagtctaaaggccatggttttgtgcagtttgagagtgaagaatctgcacaaaatgcaattgac

SEQ ID NO: 16788 - DNA, 157 bp, Glycine max
  unsure (1)..(157): unsure at all n locations; Clone ID: 701045026H1
cgagtttgcaaacttccctggaaagtnttgttaccctagctaganaaaaggcagcanaattagnagacttttntccttctgcaacatccttaaatcntactacacaggaggtaggttctaaacgtaaganagcatttgaacccgntgacatgtctca

SEQ ID NO: 16789 - DNA, 157 bp, Glycine max
  unsure (1)..(157): unsure at all n locations; Clone ID: 701045027H1
tttccttcattttctctcttcctctcaccgagtcacgcactcggnttgactcgtacgaantccgatccccccccgagtcacactcaaccagcaccaccgcccgatccgacgatgtntcgcgcntcntccgcngcagattccgccgcntccggtgaga

SEQ ID NO: 16790 - DNA, 156 bp, Glycine max
  unsure (1)..(156): unsure at all n locations; Clone ID: 701045028H1
acgaatatcttgttgtttggagcnatccgagaaaaactctgtaaacatgttggtttaccaggacctccttacaggtgatgagcntctctctgactccttccgttacaaggaaattgagaatggaatgctgtgggaagttgaggggaagtgggttgt

SEQ ID NO: 16791 - DNA, 160 bp, Glycine max
  Clone ID: 701045029H1
acacacacacacactgtgtttgtgaaactctcacacagacaagtcacaacaacaagtttctgttgttccaatgggcatcagcaacaccccttttgaaagatgagctggacatcgtgatcccaacgatcaggaacctggatttcttggagatgtggaggcc

SEQ ID NO: 16792 - DNA, 113 bp, Glycine max
  unsure (1)..(113): unsure at all n locations; Clone ID: 701045030H1
gaccctggcaaaggaggctgctaanttcacagcccaagttcatcntgcatgnaccaccctggttcagattggaaaatggctatgcccctgtncctgcgantggccacacttct

SEQ ID NO: 16793 - DNA, 164 bp, Glycine max
  unsure (1)..(164): unsure at all n locations; Clone ID: 701045031H1
aagacggagagtatctcgagtgtgantggcgtgaaagggttcgtgcgtttttncttcnnnccgaagcctttcatggagttcantgcactctctaacgctacccaacttgggagcttcaaccctcttagaaccaaccttcaaagttcancacaanactttcttnt

SEQ ID NO: 16794 - DNA, 152 bp, Glycine max
  unsure (1)..(152): unsure at all n locations; Clone ID: 701045033H1
cgatatcttcgantgtgggaagcttctttttctgntcttttacgtgtcaatatnaattcccttcaaagaaatnagctttccantctttttcaatcantcacnantggctccttctttnanttncgtcaaaatcttctcntgnngggggnggg

SEQ ID NO: 16795 - DNA, 161 bp, Glycine max
  unsure (1)..(161): unsure at all n locations; Clone ID: 701045034H1
agtacagagcttaaccgagcttcacaaagatgaatcgggaaaagttgatgaagatggccggttcggttagaactgggggaaagggtaccatgagaagaaagaagaaggctgtccacaagacaacaaccacagatgacaaaaggcttcagagccnccctgng

SEQ ID NO: 16796 - DNA, 161 bp, Glycine max
  unsure (1)..(161): unsure at all n locations; Clone ID: 701045035H1
gtttttcgaaaccagtgcaaagacaaacatgaatgtggaggaggttttcttttcantagcaagagatatcaagcaaaggcttgctgacacagattctaaggctgaacctcagactatcaagattaaccaacccgaccagacagctacagggggtcttgcgg

SEQ ID NO: 16797 - DNA, 158 bp, Glycine max
  unsure (1)..(158): unsure at all n locations; Clone ID: 701045036H1
cgnttcgcttacttttcttctcctccttcctccatttttcgtttcccgaaatacccttcgaaacacgttaanttctctttgctgccantctcattcgcaacgatggaagctcntccagaaggttatcgcaggaacgttggtatctgtntcatgagcaa

SEQ ID NO: 16798 - DNA, 286 bp, Glycine max
  unsure (1)..(286): unsure at all n locations; Clone ID: 701045037H1
attctgttttccgctgcttgtttgtgcctgcgtagttacaaagtaaaaagagggaggactaggacaaaagttgttggcagtcatcatgtncgagcgcttcgttgaaggagatgaggaacggtggtgaggattatagcaannnnnnnnnnnnnnnnnnnntgagggacttgtatggagaggattgtgccactgaggaccagcttatcactccatggactttctctgtggccagtggatgcagtttactgagagatccacgctacaacaaagggctggcctttaccga

SEQ ID NO: 16799 - DNA, 288 bp, Glycine max
  unsure (1)..(288): unsure at all n locations; Clone ID: 701045038H1
tgcatttgtggtcatntcaaatggttataccgacacaacccagngatgaanttaagcagtttatctccaaacaggtggtgttttacaaaagaataaaccgagtattcttcattgntgcaattcccaagtcaccgtcaggcaaaatcttgcgcaaggntctaagagcaaagctaacagcaactgttccaacntgaanttaaagcagacccacccttcacccatcatntcntcatatagntgttntacgatgcccgntcaagnttcagcagaaaaggaagaggcgctgtt

SEQ ID NO: 16800 - DNA, 285 bp, Glycine max
  Clone ID: 701045039H1
gcacaacatgtaccggaaagaccactctttcgaccgatcacaataggtatctaatcggagatgatgaacactgttggggtgacaatggtgtctccaacattgaaggtggttgctatgccaaatgcattgacctctcacgggagaaagagccagatatttggaatgcaatcaggtttggcacagattgccagtgttggaaaacgtggtgttttgatgagcacgaccgagaagttgattactctggacaaatcagttacagaaaatactcgtgctgcttatcctata

SEQ ID NO: 16801 - DNA, 159 bp, Glycine max
  unsure (1)..(159): unsure at all n locations; Clone ID: 701045040H1
gcagntgttgctgccaaaaaagntccctgtcntntcantgntaagagtactgntttgttgnttggctcatgcaccaantgntgntaaggagactntntntantgntgaaggagaaaatcaaggcatcacgaaagcctccatcaacaantctttaccaga

SEQ ID NO: 16802 - DNA, 145 bp, Glycine max
  unsure (1)..(145): unsure at all n locations; Clone ID: 701045041H1
ttctccaattcnctccaactacaccacaggggctggttagtgcctttantgtgacntcctctttcaagtgntgagagggggtctcagaattttccatttcaggttgggatcagacacccttttgagcaattaagaaaacccagng

SEQ ID NO: 16803 - DNA, 155 bp, Glycine max
  unsure (1)..(155): unsure at all n locations; Clone ID: 701045043H1
tgaaggaagaacaagcccgtaaagaaaganaagagctggacaagntgcttgaagagantaggaggagagtggaagaatctcagagaagagaagctctagagcagcaaagaaaggaggaggaacgacaaagggaattggagntgnttcagagacaa

SEQ ID NO: 16804 - DNA, 158 bp, Glycine max
  unsure (1)..(158): unsure at all n locations; Clone ID: 701045045H1
taactaacccagtcccttgnacttgggctttctggttcgattcgatggcgattctcggagatgaagaagggcttgatgcatagctatggcgttgctgtgattgtgttggctttgagtttgtgtttgggttcatcatcggagcaattaagttcacgaga

SEQ ID NO: 16805 - DNA, 140 bp, Glycine max
  unsure (1)..(140): unsure at all n locations; Clone ID: 701045046H1
ctctttcncgtggcacagcttgaacacatcgcgtttcggagagatacgtcgcaatggggaggattctgcaaggtgttatcggcagataaaaaacaagccataccccaantcacgcttttgccgtggtgttcctgatccta

SEQ ID NO: 16806 - DNA, 109 bp, Glycine max
  unsure (1)..(109): unsure at all n locations; Clone ID: 701045049H1
tgcntttcactgttgtncggaaaaagaagaagagaaaaaagatgagcgacgggaggaaaaacgacaaggtgggaagancgttgccgccgccgccaagaggccctccgcc

SEQ ID NO: 16807 - DNA, 289 bp, Glycine max
  unsure (1)..(289): unsure at all n locations; Clone ID: 701045050H1
gcaactgcgattttgngatcggaacctcttctggcggcgtacaatggggacactccaacgtttggaattctcacccaaaaaactacggtcctggttctcgcacttgccgagtgtgtgggaatccacatggattgatcaggaagtatggccttatgtgctgcaggcagtgcttccgtagcaatgccaaggaaattggcttcatcaagtatcgctaaaagagctgttgtcacctacggaccaatattatgttctggcactaggatgttttgaagatgtnatgtttgaagaa

SEQ ID NO: 16808 - DNA, 157 bp, Glycine max
  unsure (1)..(157): unsure at all n locations; Clone ID: 701045053H1
gtaactatctatcgttctgagaatgnagaatcaacgcattctgngtctccgcctctgnttctntntattcnccttttcctantccacatggngcgctacngcaagattggaagcttcggaagcataggtttagcttgaagctcacggcntttcctta

SEQ ID NO: 16809 - DNA, 284 bp, Glycine max
  unsure (1)..(284): unsure at all n locations; Clone ID: 701045054H1
ctttacgtanttatcaacttgggcnttcaacatntccctgcttantgcagtaaaaacttcgtctggcagttgtggnttctcttctggtaatgttgtcagtgccaatttctgtttatattctttcccttccattaccatatcttcccgagggaacaagcctgagcccattttttttgtttggcggtgcaattcttctctgtggtctttttctgtacaacacaacgcggcctgtaaggaacagttctgaagatgactgaaacagttgcagttcatgaaaccaatgc

SEQ ID NO: 16810 - DNA, 281 bp, Glycine max
  unsure (1)..(281): unsure at all n locations; Clone ID: 701045055H1
ttgcgactaagagttgctgcttcttccgccactcagcacttcgctccctctgtgcttcaccaaccatggccgaaatcgaagctaccgttccagatccctctcaaatcgacgtcaaacttttcaaccgcnngagcttcgacgacgttgaggttactgatatgtctctggntgattacattggagtgtccccgtcaaagcatgctacatatgttcctgcacactggctggtaggtactcagtgaagaggttcaggaaggcgcatgccccatgttgaangcnca

SEQ ID NO: 16811 - DNA, 155 bp, Glycine max
  unsure (1)..(155): unsure at all n locations; Clone ID: 701045056H1
gcggcacnctcggtggcnttcatcttctnggggtgagnngtcaagatgnacacatcgaggaagaaaattcacaaggataaggntgcnganccaanngaatttgaggaatcagttggacaggcattgtttgatctagaaantaccaacaatgagct

SEQ ID NO: 16812 - DNA, 279 bp, Glycine max
  unsure (1)..(279): unsure at all n locations; Clone ID: 701045057H1
gatgctgatgatcaaagaggagagaaagaggcatcaacttctcaagggctcaatcaacttcaccagttctagtgaaactgtgaaagtgccagtgttgttttttttttaagaagctgacatcatcatggacttcgacttcagggctagttttcattctgtcaagcacctctctgctgtgcaagctgctagacttcactctgatgtagataatgatggccggtttgatttccgatgtcctttttgtgattttgaattgaggtnccgggccnctncgnnaat

SEQ ID NO: 16813 - DNA, 153 bp, Glycine max
  unsure (1)..(153): unsure at all n locations; Clone ID: 701045059H1
aagtaccaagagttggaaaaatggatcagtgaagaagggtttgaggaaaggaccaaagggagaggccttntaattcgaggntgggctccacaggtactaatnttntcgcaccctggccattggaggattcttaacacattgtggttggaannc

SEQ ID NO: 16814 - DNA, 152 bp, Glycine max
  unsure (1)..(152): unsure at all n locations; Clone ID: 701045060H1
gtttcgggtttgacgttgttcacaatcactttctgcgcttcactcactcccttcgtgcggttttctttctttgtcgaactcgtgcgaaaatgcgtgagnttcttcacatacagggagggcaatgcggaaaccagatcggagcgaattctggg

SEQ ID NO: 16815 - DNA, 285 bp, Glycine max
  unsure (1)..(285): unsure at all n locations; Clone ID: 701045061H1
cnaatacctcantccacagttgaacaacaacaccaacaccaantttctggantgancnttttcanntccccantggaccatgatttgaantgtggtggaatattccacgactcagcagaagcatcttattcgtctgaaacaaggagcaccccctcagacgaagaagtgnttctagcgtcacgcggccaaagaagcgagcgggaagaagagtcttcaaggagacaaggcaccccgtctaccgaggagtgcgtcgcagnaanaaaanaagtngttctgcnagatncc

SEQ ID NO: 16816 - DNA, 291 bp, Glycine max
  unsure (1)..(291): unsure at all n locations; Clone ID: 701045064H1
tccantcttctcttctcacacaatctctgttcaacaacgctagagaatnntntctcaagtntcatgtgatgagatgaaccaagcacaacaacttcaagaagcttgaagtttgaactgtctcaaacatgttctcaaagcttcagccacaacaccagcaacagcatcaaccntttcanttcncncgtgantgtcaaacgtccgaggacgatgacagccgaacancngtngccctaacaccggctcggtttcgaaaatcatttnnggcggcggaggatgcacgnggggccacaa

SEQ ID NO: 16817 - DNA, 155 bp, Glycine max
  unsure (1)..(155): unsure at all n locations; Clone ID: 701045066H1
agctctagagnattatcntacccttcaagatgaaaccgtacctacgtccantattcctattnttccttntccttctcgaccantccatttcggcgagtgctgctataaatattaatggtctgagaaacaaaattagagaagttctaaacaagcac

SEQ ID NO: 16818 - DNA, 287 bp, Glycine max
  unsure (1)..(287): unsure at all n locations; Clone ID: 701045067H1
gcatttcgcagtgtgtgtnanangaagagaaaaatggagaaaatgatgcgactnanaccactgtncccgntcantgatntgcagatcttatcatggccttcccattcatgcaaccatgttgttcttcgacnttctcttatctctcgntctcccaatcctcttccttctccttcacactcagaatgcatgtctcctttctcgatgggtttagggagcatgcgattctatagtgaagattgacccatgtgcccaatattaaggaccctggcactttacaatgctttcaa

SEQ ID NO: 16819 - DNA, 133 bp, Glycine max
  unsure (1)..(133): unsure at all n locations; Clone ID: 701045068H1
atcantggcttccgaagaatcccannacaagccccccagcgntcagtccantaccgaantcatncacgagcgcgaantggtggcggaggcggcgcagtcggctctgaagagcgacagcancaaagtggacaag

SEQ ID NO: 16820 - DNA, 152 bp, Glycine max
  unsure (1)..(152): unsure at all n locations; Clone ID: 701045069H1
ctcttcttcctcattctcntcctctgtgantagggtttctgctttctttaacantttcagaaggctttcgaatcgnttcgattgggtntctcaaagntttgntttcacagtttgcgaagatgcctcgtcccaaaagaaaagcggccccacca

SEQ ID NO: 16821 - DNA, 282 bp, Glycine max
  unsure (1)..(282): unsure at all n locations; Clone ID: 701045070H1
ttttttctccttggaantcgantattcactatgggcagatgaggtggttctgntagntttctggccaagtccatttgggatgagggtcaggattgcacttgntgaaaagggtatcaaatatgagtccaaagaagaggacttgcagaacaagagccctttgntcctcaaaatgaacccggttcacaagaaaatcccggttctcatccacaatggcaaacccatttgtgantctctcgttgntgttcagtacatgaggaggtctggaatgacagaaatcccttg

SEQ ID NO: 16822 - DNA, 275 bp, Glycine max
  unsure (1)..(275): unsure at all n locations; Clone ID: 701045071H1
cttcatcggaaccgaaacccttcgccgcaaaaaatgcctcccaaatctgccaaatccaaggaagctccagctgancgacccatcctcggtcgnttctcttctcacctcaaaattggcnttgttggcttgccaaatgttggaaaatctantctctttaatactctcaccaagttggcaatacctgctgagaanttccccttttgcaccattgancctaatgangcgcgggtcaatgtacccgatgaacggtttgaaggcttncngttattcangcc

SEQ ID NO: 16823 - DNA, 154 bp, Glycine max
  unsure (1)..(154): unsure at all n locations; Clone ID: 701045072H1
ttttcgggggaanagatccancagcaatggtgtacgtcaaggctcagaantcaaaagcctacttcaagagntntncaagtcaagttcaagagaagaagagagggaaaaaccgnttaccgtgccaggattcggttgnttantcaggacaagaaca

SEQ ID NO: 16824 - DNA, 149 bp, Glycine max
  unsure (1)..(149): unsure at all n locations; Clone ID: 701045074H1
taggatccaagtatcaaggagttggctgaacagatagcaaaanatccatcattcaaccagntggctgagcagcttcaganaacttttcaaggagctccacaggatgctatgcctagctttgntaatcaacantatttttcaaccatgng

SEQ ID NO: 16825 - DNA, 150 bp, Glycine max
  unsure (1)..(150): unsure at all n locations; Clone ID: 701045075H1
tttggaaggcaaggncttgtnttgtcacaatccaagatanaagtaatgggcgaacatagacatcgaagggatcttgaagcagcagcagccttatgatgggcgcgttccgaagacgaagatagtgtgnantttgggccctncttctcgntc

SEQ ID NO: 16826 - DNA, 151 bp, Glycine max
  unsure (1)..(151): unsure at all n locations; Clone ID: 701045076H1
caccagcgtgagangctgcccagcacgcaaacacgtggagcgtgctgtggacgattccaacatgctcgttgtcacctacgaaggagaacatantcantcgcaaatcgcttctgaggtggcaantgttanccttgnntcntcttagtcaacc

SEQ ID NO: 16827 - DNA, 151 bp, Glycine max
  unsure (1)..(151): unsure at all n locations; Clone ID: 701045077H1
caatggagaacaccnaggggnccagancngcgacgaacggggngcngcctcnggcgcgcaaggtggcntggntaccggnnttaccggccaanacggttcgtacctgacggaattccttctagacaagggttaccangtgcacggncnggnc

SEQ ID NO: 16828 - DNA, 155 bp, Glycine max
  unsure (1)..(155): unsure at all n locations; Clone ID: 701045078H1
cttccagacagcagcagcaacaacaaacaaactctttctgggnttcagtttttgatgtgaaaatggcagtgantcttacatcnacactctttctggctttgctatttgctgcttcagcttttgctgctcttcagcctagagtacctgaagcttac

SEQ ID NO: 16829 - DNA, 157 bp, Glycine max
  unsure (1)..(157): unsure at all n locations; Clone ID: 701045079H1
cagatatataaatacaantcgccacgccgctacgtcttcttcagccatttagctccatagctgcagcattagggtttttcatctgcttcaatggggaagggaacagggagttttggtaagagaaggaacaagactcacactctctgtgtgaggtgtg

SEQ ID NO: 16830 - DNA, 160 bp, Glycine max
  unsure (1)..(160): unsure at all n locations; Clone ID: 701045080H1
gcaaaagtgnntcanttaagtgttanttaaccatcgatcatgatgaggagcaagaagcagagccagaacaagtttgttcgaatcatggcatcaccantcagagcactgggaaaagcacgtgacatgtacgtgcggagcataacgaactgcngccagcacg

SEQ ID NO: 16831 - DNA, 275 bp, Glycine max
  unsure (1)..(275): unsure at all n locations; Clone ID: 701045082H1
tganttctagaggagttcatgcgcgcagttaagcagaattatggggagaaagttctcgtacagtttgaggattcgccaatcataatgcatttgatctgctggaaaaatacagctcatctcatcttgttttcaacgatgatatacagggtacagcatctgtggtattagcaggattgcttgcatccctgaaattagttggggggaccttagctgaccataccttcttattcctgggtgctggagngnntggactnntanancngnntgtanctctt

SEQ ID NO: 16832 - DNA, 277 bp, Glycine max
  unsure (1)..(277): unsure at all n locations; Clone ID: 701045084H1
acactctctgctcctagggtttctccttcgagtgagggaaatggctcccaaaccgcctagtacgggtctgtttgttggactgaacaagggtcacgtcgtcaccaagaaggaattgcccccacgcccctcagatcgtaaggggaaaacaagcaaganggtgcantttgtgaggnacctcataagataggttgctggttttgcaccctatgaaaagcgtataactgagttgctgaaggttgggaaggataagagggcactgaaggttgcaaanacaaac

SEQ ID NO: 16833 - DNA, 261 bp, Glycine max
  unsure (1)..(261): unsure at all n locations; Clone ID: 701045086H1
ggatctatttatatgcacgctgantnacttttgnggctctgcatatntccngaaccttttggggcnctgcataaatggaantgtatganaaacttttacaaggttgcaacgatgtgatccctgcatgnttgccantgttaccaccattcataatgattttgtatttgtacactgntgcagtagttttgggtaggcaaagcattaggcacactttggcagcataaaagtatgagttttcctatcaatcaccttgnagaccca

SEQ ID NO: 16834 - DNA, 276 bp, Glycine max
  unsure (1)..(276): unsure at all n locations; Clone ID: 701045087H1
ataaacanaaaaaataaactggggagaagcatgttgttgntgttgggactatgnttccncattgtnctntggcatttccanttggngttctctgagagatgccacccacaagacaagaaagcgttgctccaactccagaaggacctcggcaacccttatcacatcntatcctggaacgcaaaggagggntgctgcgagtggttctgctgcgttaagtgtgacgagaaaacaaaccgcgncntagcgntgctancncnccttttcnnggnccnaatc

SEQ ID NO: 16835 - DNA, 150 bp, Glycine max
  unsure (1)..(150): unsure at all n locations; Clone ID: 701045088H1
ctttgttgttantaaagtttgccanttcatggaaantcccttagacattcattggggggcagtcaagagagtcctaaggtatcttaaggncaccctctcccatggccttctcangaaacctgttgntgtngggaaacctttatcanttac

SEQ ID NO: 16836 - DNA, 148 bp, Glycine max
  unsure (1)..(148): unsure at all n locations; Clone ID: 701045089H1
gangattacgattnttngttcaaggtggtanttgattggggacncnggtgtgggaaaatcgaaccttttgtcgaggtttcaccaagaacgaattcagccttgagtcaaagtccaccattggggttgagtttgccaccagaagcattag

SEQ ID NO: 16837 - DNA, 75 bp, Glycine max
  unsure (1)..(75): unsure at all n locations; Clone ID: 701045090H1
gcaaantgagttctacntcaagtctctanttntcgaagacnttccaaaccacggaaccattnanttcgtntgcaa

SEQ ID NO: 16838 - DNA, 206 bp, Glycine max
  unsure (1)..(206): unsure at all n locations; Clone ID: 701045101H1
cattcttctccgtcagaagcagagagtaagaatgctctcaggggatntacctccaaatgcagaccatttacatanaaantntcantgananggtcaagaaagatganttgaagagatctctgtattgcttattctctcaatntggaagaattttggatgttattgctctgaagacacccaagcttcggggacaggcgtgggtttgt

SEQ ID NO: 16839 - DNA, 200 bp, Glycine max
  unsure (1)..(200): unsure at all n locations; Clone ID: 701045103H1
tnacgctcgccacgcgcgtcttaaacgcgccatcgatctttccatgaagcacgagtacctccctgacaatctgcagtgcantgcaaacaccattcaggggctaccttcaggatatgctgactcttgtgaagagagaganagcagaacgtgaagcattgggaggtttgcccctatatcaacgatccattccttgagtggca

SEQ ID NO: 16840 - DNA, 198 bp, Glycine max
  unsure (1)..(198): unsure at all n locations; Clone ID: 701045104H1
caacaacactctctcttctcgctcttggcttttcgctcttcactcactctcattcattgcatttccaccgttcatggatccagtaagcgtgtggggtaacacgcccttggcgacggtggatcccgagatccatgacctcatcgagaaggagaagcgccgtcaatgccgcggaatcgagctcatcgcctccgagaanta

SEQ ID NO: 16841 - DNA, 198 bp, Glycine max
  Clone ID: 701045105H1
ccgcatatcgcagtttcttccttgcatttcatactctctggcaaaaccctcgtcgacggtgaccaatgcggtggatcaaacatggacaagagcatgctagcggatttggattcgctccctgaggctgataagcaaagaatgactgtcatgatcgatcagctccaaatccgtgacagtctgagaatgtataattcactg

SEQ ID NO: 16842 - DNA, 195 bp, Glycine max
  unsure (1)..(195): unsure at all n locations; Clone ID: 701045106H1
gtgggttgcacacccttttgtatctcgttatcagaatttagtgaaccataggtgcatctatnttgcctttgatctttttatctttttggttttctttatgtatggttttccttaataaaaacgggagcttttatttggcggattagagtttagtgctggaaaagttgtagctggtatccgagttaaattaatgga

SEQ ID NO: 16843 - DNA, 196 bp, Glycine max
  unsure (1)..(196): unsure at all n locations; Clone ID: 701045107H1
attccttttcttcttggcactctgccctttgggaggagtttgtaacatggctgctctacctactgcggagnttcagtgatgcaaatgcaacacatgtagcaagtggtgatgtgagggtgctgcatccagtgttcaaggtttatggccaggccacggcattctccggccccattgtcaccgtgaaggtgtttgaaga

SEQ ID NO: 16844 - DNA, 211 bp, Glycine max
  unsure (1)..(211): unsure at all n locations; Clone ID: 701045108H1
ttctctgtctctgctctgctgctctctgcgatgcantgcatgngctttggcccaatgcagcaaaccgtcgattaccctagtttgcaaactgcgtgcatgcgtcggtgcacggtggtacaggaaagacaacgttgcgtgaaaaggcatgcttaccggtggantttgagaagaaatacgaaccgaccattggagtggaggttcacccattgga

SEQ ID NO: 16845 - DNA, 196 bp, Glycine max
  unsure (1)..(196): unsure at all n locations; Clone ID: 701045109H1
gcattttcagangaacaatggcgggtagggtttcgacgtgcttcttcttcgtgtttggctctttctctccttgcttccttttgcagatctccgctgaggaatcatcggagaaagagttcgtactcacattggatcactctaactttcacgacactgtcagcaagcacgatttcatcgtgcgtcgagttctacgctc

SEQ ID NO: 16846 - DNA, 192 bp, Glycine max
  Clone ID: 701045110H1
caagttccaatcggaatcggaatcggaatctgaaatgagtagtagggtttggtttctactattccttctgctgatctcgaaatgccatcaagtgtggggctcctacgcgggttccgctagctccatcgtcaacccttccaaggtcaaacagatttcctggaagccaagagctttgcgtttatgaaggtttcc

SEQ ID NO: 16847 - DNA, 192 bp, Glycine max
  Clone ID: 701045112H1
ttccagaaacatcttcaatcagtctcctctcctataacaatctctaaatcaagtttgaagccgagaaaataatcatggccggtggtgcaaatttcgtgcaaagggttctctcttacgtggtgaatgaagtggttatcaatggtcttgccaacagccctgcatttcagaggtttgcagtgaggacatcaaaaa

SEQ ID NO: 16848 - DNA, 197 bp, Glycine max
  Clone ID: 701045115H1
ggcgctagtcaaccttcaagaaatgggcacagatgttcttttggatctattatctattggatcagtttctgcatctattgaatgcacctgtacaaagaaactcatctacaatagacattgtcccccaaaccaagtaaaccggcaccactttcaccattagatgatctatgcatcactttcactttcttcaagatcaa

SEQ ID NO: 16849 - DNA, 198 bp, Glycine max
  unsure (1)..(198): unsure at all n locations; Clone ID: 701045116H1
ctggnagcttgcggtttcctcaagtaggctatagttaggngaaagagtgatggcagctgcaacatctagtgctgtgttaaatgggtttggatctcacttcttgtgtggaggaaagangagccatgcccttcttggctgctggcattggaggcaaagttggtgctgttgttagtcctgaagagttnatgtggcagttgc

SEQ ID NO: 16850 - DNA, 204 bp, Glycine max
  unsure (1)..(204): unsure at all n locations; Clone ID: 701045117H1
antcaccctcattaccaacacgaaagcatagccaaaaccttttttcgaagtctctgnttttcctaatggctgccggcaaaggcagagaagaagccggcggagaagaagccagcggcgnagaaggcaccggcggagaagaagccgaagngnaggaagaagatctcgaaggaaggagggagcgagangaagaagaagcgcacgaag

SEQ ID NO: 16851 - DNA, 200 bp, Glycine max
  unsure (1)..(200): unsure at all n locations; Clone ID: 701045118H1
cnagttaatagcattccncaaaatggctgccaccaccttagtctctgaagtcactctcccctcctgcctgccggccagcggaagatgccgctgatgggcctcggcaccgcgccggaagcaaccagcgcggttaccacaaaagatgctgttcttgaggccatcaagcagggctacaggcactttgatgctgcttntgctta

SEQ ID NO: 16852 - DNA, 112 bp, Glycine max
  unsure (1)..(112): unsure at all n locations; Clone ID: 701045119H1
canttctcatattgctgtttgtgatcttttttcattttcattttttccaccttttcttctttttattacagtttatgctgtatttgtacccctatcaaggcacatgtatctt

SEQ ID NO: 16853 - DNA, 68 bp, Glycine max
  Clone ID: 701045120H1
tccctagctggataggtcaaacatcatcatgtgcggacgaagagcaccatttgcgagtgccaaggcag

SEQ ID NO: 16854 - DNA, 193 bp, Glycine max
  unsure (1)..(193): unsure at all n locations; Clone ID: 701045121H1
gtttggttagcctcacctntgactctttctaccagttcatattttattcatcgaaactcaacctacttgtcatggagatttctgccttagccgtgtcctatcatctgtatagtgcaattcgtcatttattcttatgatttgaatcagcaactgacgcctgaactttaggtttgaacctgaggtggaactttgc

SEQ ID NO: 16855 - DNA, 193 bp, Glycine max
  unsure (1)..(193): unsure at all n locations; Clone ID: 701045122H1
gtttcagctaactctgcttcacttggtaattgagtggttctagtaatccggtgctgctagaggatgggaactagtgaatggcatatcgagcgaagatctagcttcggcactgaatcccccttagcaagatatgcaggaantgtgcctgaaactgggtcactctctattgttgtgcttggcgcttctggggatc

SEQ ID NO: 16856 - DNA, 193 bp, Glycine max
  Clone ID: 701045123H1
attctcaggaaatgttggaaagaagacggcaaatgccttatgcatatgcacatcaatcttgagctcctggagacagtacatcttgtatctgctatgctgctggaagttcctaatatggcagccaatgttcatgatgcaaaacgcaaactcatatctaagactttccgtcgcttgcttgaggtgagtgacagac

SEQ ID NO: 16857 - DNA, 65 bp, Glycine max
  unsure (1)..(65): unsure at all n locations; Clone ID: 701045124H1
ctcgaattggcgngngcntgctnggcaatcccccaaaggntttttgaagcagaagaanggactnc

SEQ ID NO: 16858 - DNA, 178 bp, Glycine max
  unsure (1)..(178): unsure at all n locations; Clone ID: 701045127H1
tatatatntatatntttaantaaaaaaaaccttgtnatttgaattcaaggttattgtgtttgaaatgtggtactagttagcgttccatcttgtatccttgntatcttacnttcccggatatgtcatantcgcntatgaagattatttaagcaanttagcattttagtgntgcaccatg

SEQ ID NO: 16859 - DNA, 192 bp, Glycine max
  unsure (1)..(192): unsure at all n locations; Clone ID: 701045128H1
anaaaatcatggncagaaaattcttcgtcggtggcaactggaaatgcaatgggaccactgaggaggtgaagaagattgttactactttaaatgaagctaaagtccctggagaagatgttgtagaagttgttgtgagccctccttttgtgttccttgccttttgtaaaaagtttgctggcgccctgatttcca

SEQ ID NO: 16860 - DNA, 194 bp, Glycine max
  Clone ID: 701045129H1
acaaaatataccactcttcaattcacaaaaaaacacacaaacctcttcagttgcacaaaccacacaacctcttgctaatattcgttttctgatctacgcaaggttaaggttaatttgcttctatctacatggacattaacgagatcgatgttccttcattctttctctgccccatttcgttagaaatcatgaag

SEQ ID NO: 16861 - DNA, 136 bp, Glycine max
  unsure (1)..(136): unsure at all n locations; Clone ID: 701045133H1
cnttaacatgctctgctttcattcacccttggtgtgaaacagcatgatttgctgctgtaacaaaatgggatgctactacacccaagtattccaagggccaggtatgatgaaattgtgaaggaagtctcttcntact

SEQ ID NO: 16862 - DNA, 197 bp, Glycine max
  unsure (1)..(197): unsure at all n locations; Clone ID: 701045134H1
gtcattatttcaacagcaagtgtacagagctattgaganaatatatgacaggtacagaactacagatcagagcccgtgtttttgtaaagagtgattgcatcctgtctatctagatttggggcacaattcantgagtatttgcacaattgcttttggctanttttgcccggagcagagattggctggctgagcagctt

SEQ ID NO: 16863 - DNA, 195 bp, Glycine max
  unsure (1)..(195): unsure at all n locations; Clone ID: 701045135H1
caggagtttcaaccattgaactttgntatntnttatgacccaagaagcgagctactggatggcaanttattctcccctgtacttgcacatattcaaccagaatttcattatcaagcaaacatcgaatcagatggtcgatatgggcttcaatatggtacaantgagacaaacatgtcagactttttganttcagtt

SEQ ID NO: 16864 - DNA, 168 bp, Glycine max
  unsure (1)..(168): unsure at all n locations; Clone ID: 701045136H1
ttcttctcttgcggctagggttttagcgcanttcantttagatttaaggaagatgggtaaggaaaaggttcacatcagtattgtggtcattggccatgtcgactctgggaaatccactaccactggtcacctgatttacaagcttggaggcattgacaagcgtgttat

SEQ ID NO: 16865 - DNA, 194 bp, Glycine max
  unsure (1)..(194): unsure at all n locations; Clone ID: 701045137H1
ctgcaaatacttttcaaanttnagcaaaccgatgttccgctttcatattatactggtattcttggtatgccgggaatgactgcatatgcaggtttctttgaagtaggctctcccaagaaaggagagaatgtttttgtttcagctgcctctggtgctgttggtcaacttgttggccaatttgctaaattgactga

SEQ ID NO: 16866 - DNA, 173 bp, Glycine max
  unsure (1)..(173): unsure at all n locations; Clone ID: 701045138H1
taatagacgcgaggnctatttaaaacccggancgtcgaatcggaccaccattcattccaccggcgccgtcgacctcaaaggctcgaaccaccttccttctactcaactgcactcgcantcgtcggcgcaagtgcccaccgtcgcacgcctcagccgcttccagttaacaaggg

SEQ ID NO: 16867 - DNA, 195 bp, Glycine max
  unsure (1)..(195): unsure at all n locations; Clone ID: 701045140H1
cnantctgcgacaccgacgaatctcactgcaccggaatttcgcattcagaaaatgggctttaggtggaacanctcccccaagaggaagtgcagcnggctactgcaagcatgaggagaaggagaacaaccggtggtgcngcctctggaggagcagctggaantatgctccanttttacacagntgatgcccctgga

SEQ ID NO: 16868 - DNA, 192 bp, Glycine max
  unsure (1)..(192): unsure at all n locations; Clone ID: 701045141H1
ctttgctctgctgtgaggcttcaatttctaattagggttncgcttagagtaaccaataaccatgggagtcttcacntttgtcgtccgcaaatccggcagcgaatggagcgccaagcaacattccggcgacatcgaggcctccgccgattccaccttcgatctccaacggaagctcgtgcaagccgctctgcg

SEQ ID NO: 16869 - DNA, 191 bp, Glycine max
  unsure (1)..(191): unsure at all n locations; Clone ID: 701045142H1
ggaaaagaggattagantgtcgccacgtttagcaataaccaaaccctgctctactcttttttcttctcnttgctcttcgctagggttttagnttcttcctcttcacttcgttctttttcgcctctacaatgagcaacgacaaggacacattcaacgtcgccgntctcacttctgntctcaacnaggacaat

SEQ ID NO: 16870 - DNA, 192 bp, Glycine max
  Clone ID: 701045143H1
gtaattgctagtatattatcggattcattaaaaagggagagggttttatcactgctgtgatgcttgcagatgttcttgcgagaagcattttctcaaacagaagcacacatgaataactattatgagggatgtacagcaacagtgcttctggtgtggactgatggtgatgaaaatttctttgcacaatgtgct

SEQ ID NO: 16871 - DNA, 190 bp, Glycine max
  unsure (1)..(190): unsure at all n locations; Clone ID: 701045144H1
cacagacaaggatatancagcaagagttattgccaaagagattantcttgaagagacaccagtttccaaagtcatgactaggaatccggtatttgttctttctgaaactcttgctgcagaagccctccaaaagatggtgcaagggaanttcagacntttacctgtggtggagaatggagaagttttggct

SEQ ID NO: 16872 - DNA, 190 bp, Glycine max
  unsure (1)..(190): unsure at all n locations; Clone ID: 701045146H1
cttgttctttccattgntttcttgcttctntntattacttgcttnttttcttgatcatgtcccttgctggtaaaatcagctctgaaattggtgttcaggcaaccgctgcaaagtggttcaacctcttcacaacacaacttcatcacgttcaaaatcttactgataganttcatggaaccgagctgcatca

SEQ ID NO: 16873 - DNA, 190 bp, Glycine max
  unsure (1)..(190): unsure at all n locations; Clone ID: 701045148H1
atggtaagcatgtaaatggcgcttaggacgttngaacctgtaaaccagcnccaagatacgatganttaatccagcaaagtaangcngttgaccttgaantttcctttgctcttgttcctcgattaactattcagnctggagtngagngcttacaattaggttggacnngtaatggtctcanttttncctc

SEQ ID NO: 16874 - DNA, 200 bp, Glycine max
  unsure (1)..(200): unsure at all n locations; Clone ID: 701045149H1
gtatcctccagtnccatttccatggagctagaggtgcaggtggtgggangcatagactcctggcttgcgtctccctccntctctntctcatccaaactctccagtccacgcgctcatcaccgatccctcaantcctcgntctcgaacttcgntntccgactcacccccctcacacctggttcgtcgcttggtccggcgcc

SEQ ID NO: 16875 - DNA, 196 bp, Glycine max
  Clone ID: 701045150H1
ttcgagttgtaacctctctcttcaaccctaacttagggtttatgttctaaaacccttttcagtgtctcttttagaaaaggttgattggaggagataaaaatgctcgtgttgtttgaaacccctgcgggttttgccctgtttaaagtgctggatgaaggcaagctttctaaagttgaggacttgtggaagaactttt

SEQ ID NO: 16876 - DNA, 192 bp, Glycine max
  unsure (1)..(192): unsure at all n locations; Clone ID: 701045151H1
cttcgccaatcgcctgcntctctctctgaattgactagcntnaatngctggtcctaggattgcccatgctaccttgaaaggtccgagtgtggttaaggagatcataattggantaacacttggcttagctgctggtggtgtgtggaagatgcaccactggaatgaacagaggaaaaccaggacctctacgat

SEQ ID NO: 16877 - DNA, 195 bp, Glycine max
  unsure (1)..(195): unsure at all n locations; Clone ID: 701045152H1
ttccanatgttcccttccggtcgcaccctcctcccttcctccgtctccgatttccgaccggcattcgacgtcctgcgatgccgaccgcnacggcaaaatcagccgcgacgncctccgcgccttctacgccggagtcggcggcggaggagatgacgtgatcggggcaatgatgacagtggctgacaccantaagga

SEQ ID NO: 16878 - DNA, 190 bp, Glycine max
  unsure (1)..(190): unsure at all n locations; Clone ID: 701045153H1
gcaaaatcaaaatgngggcaagcgccgcagaaggnggngctccggaggngacncnggaaacttccatgggnncnncaccttngagcngtactacaagcatgcgccgaggactngtaggaanttcattgaacngnctcgncgaggttactacgacaacgntaanttccataggatcattaaggacttcata

SEQ ID NO: 16879 - DNA, 191 bp, Glycine max
  unsure (1)..(191): unsure at all n locations; Clone ID: 701045154H1
tggnttgtctacagtctngtnancgaaattctcttatagcggaangacagcttganagagcantggcntggncgtgtggaggtcccaattccagtagttctggaaatacttcaactataanttcagganttcctcntgagttccntgancatattaagactcggaggcagattttatgggantctagagaa

SEQ ID NO: 16880 - DNA, 189 bp, Glycine max
  unsure (1)..(189): unsure at all n locations; Clone ID: 701045156H1
cnaaaactttgtccaccccatcatttgtcttctcanttctcatcactaacacacaagtgtgcgtngnagatttctcagtttgcaacatatggcttccatcatcatgtcatttgctccagcaactggtagagtctttgcagccacagcagcaaagggtgcnggtggaagcaaagagaagggtctcttgat

SEQ ID NO: 16881 - DNA, 193 bp, Glycine max
  unsure (1)..(193): unsure at all n locations; Clone ID: 701045158H1
ctctttctccttcagactncttgggtttatgtgatgatggntntcaatatctcttgctcctagctgaagtcaagtgccatttttttgcgctgattacttcaagtgctaantgcatcactgcaaagttcacaggtggttttgcttttaagagaaaagagcgtggagctgcatctggagggcnannntgttgctc

SEQ ID NO: 16882 - DNA, 190 bp, Glycine max
  unsure (1)..(190): unsure at all n locations; Clone ID: 701045160H1
ttgtagtcccaaganatntagaagggatagtaacagagtaacctcagatggaggagatcggagaaacccaccacatgcattctaggcgtgaacccttcgatgntgntcccaagaantcannttcaantgntcatgcatgagaatccgccccaacntttgtctcaaccaccaagntntcgntcttntcatc

SEQ ID NO: 16883 - DNA, 183 bp, Glycine max
  unsure (1)..(183): unsure at all n locations; Clone ID: 701045165H1
ccantctnaaaccctantaccttgcaaagaacgaatagtggatcagtgatggcacctaaggcagagaagaagccagcggagaagaagcccgcggaggagaagaagtcgacggtgggagacaaggctccggcggagaagaagccgaagccggaaagaagcttccgaaggagggaggagccggcg

SEQ ID NO: 16884 - DNA, 197 bp, Glycine max
  unsure (1)..(197): unsure at all n locations; Clone ID: 701045166H1
ctgaacgganaatcaccgncgcaccttccctgnangcttctcttgtctgtcgcgagtnaccatggtgagggttagtgtgctgaacgatgctctgaagancatgtacaatnctgagaaaangngaaagcgccaagtcatgnttcggccatcctccaaagttcattatcaaattccttttggtgatgcagaagcacgga

SEQ ID NO: 16885 - DNA, 192 bp, Glycine max
  unsure (1)..(192): unsure at all n locations; Clone ID: 701045168H1
gaataacccagttgcaacactanttttctctttccctttttttggacttatccttctttctgcaactccaaaatgggttccaaaggggcaaaaaatctagcactctcttcagccttgttgctccttttggtcggttttgcaacctcagacatcaatcaagacaaagcagaatgtacggataaacttcttggt

SEQ ID NO: 16886 - DNA, 209 bp, Glycine max
  unsure (1)..(209): unsure at all n locations; Clone ID: 701045170H1
cncaaatccattgcccagcgtttcanaggcatccacnacananccgcggaaccagtggngtaataacaacngttggcnaaangcaggtgccaaagtnctgggcccgtggctngcnactgccttcaagtgcccgttgccgttcatgacggtnnccggcgggaatggacaccctgcaagtngcctncagggacctgttgnaccaacgntgt

SEQ ID NO: 16887 - DNA, 188 bp, Glycine max
  unsure (1)..(188): unsure at all n locations; Clone ID: 701045171H1
attntctctctctaaaccagatccgaacaagccctaaccctaattcccantcccactcattcctcngatacgatgcgtntcgaagatgggcgatttcaacctcgcnctggtgancgtggcggnggtggtgtgcgngatcgngttccnggtgaacgtgtacctcctcgtgaactaccagcaccccgatg

SEQ ID NO: 16888 - DNA, 188 bp, Glycine max
  unsure (1)..(188): unsure at all n locations; Clone ID: 701045175H1
cttcgccacaantccctggccaacatgggtatctccagagattctatgcacaagangcgtgccactggtggcaagaagaaggcatggaggaagaagagaaagtatgagcttggtcgccagccngctaacactaagcngtcaagcaacaagacagtcaggaggatccgggttagaggtggaantgtgaa

SEQ ID NO: 16889 - DNA, 188 bp, Glycine max
  unsure (1)..(188): unsure at all n locations; Clone ID: 701045176H1
tccacttctgcagagtctgaacaagttggttatagtgaaacaaacaacatgactagtggtgttgatgctgacttaagtganttgacgccagtatcctcttctttagagtctgaactagtagctantgatgaagaaacagctcacctgcattgtggatgacttcatcantgcaagtaaantgggaaagt

SEQ ID NO: 16890 - DNA, 193 bp, Glycine max
  unsure (1)..(193): unsure at all n locations; Clone ID: 701045177H1
ctggtactttcantagccgcagcagcctgcaggaggagantaaggatgtctcacaggaagttcgagcacccaaggcacgggtcactgggatttctccccaggaagcgtgctgctcgtcacaggggaaaagtgaaggcattccccaaggatgacccattgcaaggcacccaagctgcactggcnttcttgggtt

SEQ ID NO: 16891 - DNA, 189 bp, Glycine max
  unsure (1)..(189): unsure at all n locations; Clone ID: 701045178H1
angaaacacgaacggaacaacatggacgangagganccgcgtgacgaaggacaacaaggaggttctgtcgagcaaagcccagagcaactggtggcccgtgccatagcccccgtcaagaaggatttcctccgtcctcctcccgttcgntcttcctctccanacgacggcgtttccattcccaatgataac

SEQ ID NO: 16892 - DNA, 192 bp, Glycine max
  unsure (1)..(192): unsure at all n locations; Clone ID: 701045179H1
ttgacacgtatcttcatcantantcgcagaagcagtttccggtgcatctcatcgtcttccaaaatgaacgacgcagatgtctgcgaagcaantccagcagatggtgcgtttcatccgccaggaagctgaggagaaagccaacgagatctctgtatctgccgaagagganttcantatcgagaagctgcagtt

SEQ ID NO: 16893 - DNA, 163 bp, Glycine max
  unsure (1)..(163): unsure at all n locations; Clone ID: 701045180H1
gnaagagcactttctttttcattcctttcaagggttttaactacacaacttnttattactttgaaactatgatagggtttggagggaacagttgcagtgagctttctgagntggacatgatgaacatggaaactantaataggaagtttctttctcngcctct

SEQ ID NO: 16894 - DNA, 194 bp, Glycine max
  unsure (1)..(194): unsure at all n locations; Clone ID: 701045181H1
tngctagccacaatgcagatattcgtgaagnncctaacggggaagacgataaccctagaggtagagtcttcggacacgatcgacaatgtgaaggcgaagatccaggacaaggagggcatcccgccggatcagcagcgcctgatcttcgccggaaagcagctggaggacgggcgcacccttgccgantacaactc

SEQ ID NO: 16895 - DNA, 102 bp, Glycine max
  unsure (1)..(102): unsure at all n locations; Clone ID: 701045182H1
ancgtcttntntctttctcttcttctccgtggagaatgcatntctgtngcctggtttnttgttaaccaggtcntgcaccagnttttaantanttnantttca

SEQ ID NO: 16896 - DNA, 190 bp, Glycine max
  unsure (1)..(190): unsure at all n locations; Clone ID: 701045183H1
cnntttaccagctatacttgtnccttttgaaggttagaagtgctacaatacaaacaatggcagctactcaggaagatgtgaagcntttgggtatngtgggaagcccatttgtgtgcagggtccagattgcccttaagttgaagggagttgaatacanntttttggaagaaatttgggcaacaagagtgna

SEQ ID NO: 16897 - DNA, 194 bp, Glycine max
  unsure (1)..(194): unsure at all n locations; Clone ID: 701045184H1
ctcgaagaangtctcaatcccttcaagtctgntaaattcgntgccgagtcctatgtccagtgccanttgctccctgcaacgataaggaanttaagcaattgtgcacatatttggtggacttgaagaaagcgtctgntgagganatgcgtcgaagtgtctatgctaactatgcagctttcatacgaacatctaag

SEQ ID NO: 16898 - DNA, 191 bp, Glycine max
  unsure (1)..(191): unsure at all n locations; Clone ID: 701045185H1
catcgtttcgttcaactttcaacgccagttcacactctctgcttcgcgtgtaccaacaagtggcaagtncgaatcaatggccagcgctcagctcacagcaatagcgtcatcgatctctacggcgtcgttngaagggcttcgaccttccgntgttcagtttgcttccacgggcagaattagaattggcantc

SEQ ID NO: 16899 - DNA, 59 bp, Glycine max
  Clone ID: 701045186H1
atgggcacactgtgctgctttctctccttgtatcgaacaagtacagcgaacatgtctta

SEQ ID NO: 16900 - DNA, 165 bp, Glycine max
  unsure (1)..(165): unsure at all n locations; Clone ID: 701045190H1
actgtatctgcgtgtgtantcganttgtgcaatgttcaagatctgantcacnagantagataataatggctacaccggaccacctgttcaacctccgcaacaacttgtatctcggggcgtaccaagccgccatcaacagcggcgacgtcaccaacncctcccaag

SEQ ID NO: 16901 - DNA, 186 bp, Glycine max
  unsure (1)..(186): unsure at all n locations; Clone ID: 701045192H1
tggaaaaanaattgggcagaacgttcgctgcctatatctgangagtaccatggggaaatcgtaccgtgtctttgagtagtggttctaaanttcagtgaatttctgnttgcacttaatatattgtgcatgataggttggacagaatttttcatcgttctacagttttgttggatgagtattttttgg

SEQ ID NO: 16902 - DNA, 192 bp, Glycine max
  unsure (1)..(192): unsure at all n locations; Clone ID: 701045194H1
tataagtattattattcttccatttccattaaaaagaaantatcataaatgggtattttcacattcgaggacgaaatcaccttcccctgtggctcctgctantctttacaaagctctagttacagatgccgacaacatcatcccaaaggctcttgattccttcaagagtgttgaaaacgttgagggaaatgg

SEQ ID NO: 16903 - DNA, 190 bp, Glycine max
  unsure (1)..(190): unsure at all n locations; Clone ID: 701045195H1
tactcaagaatcgtggagaagcttctggaagtngaccccaccggggcaatggtggccatagggaacatgatggagaataagatcacgatggccggcgcaccttatgtacgatggggatgaccccaggctattcgagcactactccgctgtggcgcacgcatgaggcgtgtacaccgccaacgactacgca

SEQ ID NO: 16904 - DNA, 138 bp, Glycine max
  unsure (1)..(138): unsure at all n locations; Clone ID: 701045196H1
tncatggtcatattgtacacctagttagggcaaacacaccaaacacnaaacaccaaactagttggctcanttctctttgantggctttggaggctttganttcaccaacagcagccaccactccgttccgtggctacc

SEQ ID NO: 16905 - DNA, 100 bp, Glycine max
  Clone ID: 701045201H1
gcacagtgccaatggcggatccaatcgcgaaggctctgatcgcgtttgcgctcttagcttcccttttgctgtgcttgcaagcttcctccgatgtcccctt

SEQ ID NO: 16906 - DNA, 198 bp, Glycine max
  Clone ID: 701045202H1
gggtagtgattttcagtttcaatcttggaaagccaacctttgcaattttcaacccgaaatcgtcgatttcttctaaaatatatactgtgcattggtctccttttcgaattgtggttgagggattaaagtaccgttattggtagagatggcttgtagggggtgctgggagtgccttttgaagctgtttaacttcatact

SEQ ID NO: 16907 - DNA, 197 bp, Glycine max
  Clone ID: 701045203H1
tcagcatatttgttgcaaacagaagcaagcttcttagacttttgggtgacttaaaaaccgataaagaggatgaacagttcgaagctgataaagctcaagttataaaagaaattgcggctcttgaacctagggacctcgcttgagcttcagtttgtgtcgagtaacaagttgcattgtggcattttaccttatttaat

SEQ ID NO: 16908 - DNA, 195 bp, Glycine max
  Clone ID: 701045205H1
actcaacattttacactcttttcttcttctcgttgttgcttcgctgttgaatcatggatcagaaggtcgatttcagcgctccccattccatgggaaccactatcatcggcgttacttacaacggcggtgtcgttctcggagccgactctcgaaccagcaccggagtgtatgttgccaaccgagcatcggacaaaa

SEQ ID NO: 16909 - DNA, 197 bp, Glycine max
  Clone ID: 701045206H1
ctgagaagtgcgacgctgctgcaaagtgcaagcggatttggtcttcttctttactcccaatgcatttctctgtaatctcctatctcattgtcgtatcgaatttcaagtgcaaggataagtgtgttatctatctaaaaacacaagatgtcagctgggcctggacttgaatctctagtagatcagacaatttcagtcat

SEQ ID NO: 16910 - DNA, 195 bp, Glycine max
  Clone ID: 701045207H1
gtttattggaggtgtttcatattctactgacgagcaaagcttgagggaagctttttcaaaatatggtgaagttgttgatgctcggataattatggatcgtgaaactggtagatccagaggatttggctttattacatacacttcggttgaggaggcatcaagtgccattcaggccttggatggtcaggatcttca

SEQ ID NO: 16911 - DNA, 198 bp, Glycine max
  Clone ID: 701045208H1
caaatcttaaaaatattcagtgaagatcaacctcaatggcatctcttggcgtgcgaccagttcttccccctaccattaacttccatctccgacccacctcctcttttcgatggcaccaccaggttgtacatcagttattcttgcccctatgcacaacgtgtgtggatcgctaggaactacaaggggctacaagataag

SEQ ID NO: 16912 - DNA, 195 bp, Glycine max
  unsure (1)..(195): unsure at all n locations; Clone ID: 701045209H1
cagttcagttcagacccaacttggctacatcgttagatattttgaagtctttgtgattgagaatgtcgtacactctgtgctttgctcccatttgttccttgaaatccccaaacagacctgggacaattgccggtaattcagttacccaaaaggcttttgggatgaacgaagtgngtcagaattctaaagttccaa

SEQ ID NO: 16913 - DNA, 194 bp, Glycine max
  unsure (1)..(194): unsure at all n locations; Clone ID: 701045210H1
gnnaggcaaantcatactaantcaccacccttcactttccatcactatcctcatcctcactccaaccaccacctcttccaccaccagcgtctcctgcaactctaatgctcgatacatcgccaccgtcaccgccacgnnccccgccatcacattccaccacgcccccttcgccacactccccccctccactccnt

SEQ ID NO: 16914 - DNA, 194 bp, Glycine max
  Clone ID: 701045211H1
cacttttttcagcttctctaaattctctgtctacttcaccaagcacttttggttgcagctttggttaatttccaatatggtgtttcctctcctatctatctttgctttactcaatcttgcagtggtggcaacccatgcagaaaccttgccccctgaagtttactggaagtcgaagcttcccaccactccaatgc

SEQ ID NO: 16915 - DNA, 194 bp, Glycine max
  Clone ID: 701045212H1
ccaatcgcgggatcgtagggaagagaactcaacaagtgcttgtaatcctgaagatatagccaatggaaaggcaattgtaccttgtggtcttatagcctggagtttattcaatgacacatacagcttctcccgtgacaataagaatttgactgtgaacaagaatggcatctcctggaaaagtgatagagagcaca

SEQ ID NO: 16916 - DNA, 199 bp, Glycine max
  unsure (1)..(199): unsure at all n locations; Clone ID: 701045214H1
tttccctttctctctctcattctcttctccatcgcgcgtaaganacacattttagttgctactaatgggaactgttgaagctgcaaacaaggatgcaaatggaagtctcctagagaaaaatccttcagttgtttttgtgttaggtggcccaggaagtggaaagggtacccaatgtgcaaatattgtccaaaattttggg

SEQ ID NO: 16917 - DNA, 200 bp, Glycine max
  unsure (1)..(200): unsure at all n locations; Clone ID: 701045215H1
gnactgnncagtngacnanatgggaacccttgggagagcgatctacagcgttggtaactggattcnaganactggacaggccattgatcgtctcggttcccgtcttcagggcggttactacttccaagagcagctctctaggcatcgaactctgatgaacatatttgataaggctcctgtngntgataaggatgtatttg

SEQ ID NO: 16918 - DNA, 202 bp, Glycine max
  Clone ID: 701045216H1
cagctgtctgctgttagatctgtacccgcctagccattgatttggaaaagtccaacttcaaggatgagtaagcttcagagtgatgctctaagagaagctatctcaggaatcatggctgattccaaggaaaagaacaggaatttgtggagaccattgaactccaaattgggttgaaaaattatgatccccagaaggacaagcg

SEQ ID NO: 16919 - DNA, 199 bp, Glycine max
  Clone ID: 701045217H1
caacactctctcttctcgctcttggcttttcgctcttcactcactctcattcattcatttccaccgttcatggatccagtaagcgtgtggggtaacacgcccttggcgacggtggatcccgagatccatgacctcatcgagaaggagaagcgccgtcaatgccgcggaatcgagctcatcgcctccgagaacttcacct

SEQ ID NO: 16920 - DNA, 195 bp, Glycine max
  unsure (1)..(195): unsure at all n locations; Clone ID: 701045218H1
atttgacaaggcggcttcaaagtttcaggaggtggctgctttggctttcttcaactggggtaatgttcacatgtgcgcantaggaagcggattcccctggatgagtccgctgggcaagtggtagtggcagagcagcttcaagtggcttatgaatgggtcaaggaaaagtattctttagcaagagagaagtatgtg

SEQ ID NO: 16921 - DNA, 194 bp, Glycine max
  Clone ID: 701045219H1
gtgcactgtgttgccaactttgagaagcgctggactgatatgcctgttgtggactcaccagctgccagcccaaatggtggaaacccctttaaggatttctcttatgtgaggcctgcagcctcttttcttcaaaggaataaccctgcttactagccagcttgaaatggcgttggcttaagatgccaacatgaaac

SEQ ID NO: 16922 - DNA, 154 bp, Glycine max
  Clone ID: 701045221H1
tgaaggacgccggaaagagccacaaggcgaatgcaaagctgtcgccggagacgcggaaggatcggaaatcggcgacggggctgagtggatcgccaagaagggaggccacggcgggaagttcacgtggatcggcaacggctacgagaacgtcgag

SEQ ID NO: 16923 - DNA, 195 bp, Glycine max
  Clone ID: 701045222H1
ttttacttgaattttcttcatccttctctgttctcctagaacttgattacttgaacattccctatgacagatgaggtggttcttctggatttctggccaagtccatttgggatgagggtcaggattgcacttgctgaaaagggtatcgaatatgagtacaaagaagaggacttgaggaacaagagtcctcttctc

SEQ ID NO: 16924 - DNA, 194 bp, Glycine max
  Clone ID: 701045223H1
ttaaaatcgcgtcttctcctctgtattgagacatggccgaagaagaggaagaatcagagctcagcgataagcagaaagtggagatcgcgaaatggttcctcctcaactctcctcccggagaaatccaatacgttgccaaagatgtgaaatcgattctcaacaacgacgatttgtacaaggaagccgcttccgag

SEQ ID NO: 16925 - DNA, 196 bp, Glycine max
  Clone ID: 701045224H1
tatctccatttccatttcctctctctcagtttccaagaatcttaagctatgggaaagtcttacccaaccgtgagcgctgattaccagaaggccgttgagaaggcgaagaagaagctcagaggcttcatcgctgagaagagatgcgctcctctaatgctccgtttggcatggcactctgctggaacttacgacgtga

SEQ ID NO: 16926 - DNA, 193 bp, Glycine max
  Clone ID: 701045225H1
ctcccttccaatgatcatctgaaattacataggatttatagggtcatcaagaactcttcagcatcacaaaaggtgatttataatcaaaaagcaagggacagacacacagaagttgttatcttgaatcagaaaacatgatgctaagaagctcttcaacaccagttctggatccctcctctcttccttcacagat

SEQ ID NO: 16927 - DNA, 83 bp, Glycine max
  unsure (1)..(83): unsure at all n locations; Clone ID: 701045226H1
tgaaatgcttagtgagcatacaatacaggatgaaaacttgacataaacatgtttaatttgattatgataagcgaatncctttt

SEQ ID NO: 16928 - DNA, 191 bp, Glycine max
  unsure (1)..(191): unsure at all n locations; Clone ID: 701045227H1
ttcacattnacattcaaaatctagaacagcatcagaatcaatcagcatattctgnnnnnnnnnnnnnnngaaaacaaaaatgcctcgcggtggtggcggtagtccggtggcggaagatctgctcattcagctcgaagtcatgcttcacggccagttaaccatgctccacctccagctcctgctcagagtga

SEQ ID NO: 16929 - DNA, 197 bp, Glycine max
  unsure (1)..(197): unsure at all n locations; Clone ID: 701045228H1
tttcccctagattcagccacagtttcggaggagaagaaaatagtcgttcgagatggcccgtacgaagcaaactgctcgtaagtccacaggaggaaaggctcctaggaagcagcttgcaaccaaggctgcacgtaagtnctgcaccaactactggtggtgtgaagaagccacattcgttaccgtcctggtaccgttgc

SEQ ID NO: 16930 - DNA, 195 bp, Glycine max
  Clone ID: 701045229H1
gggtgaggtagaacccttccactgtggtgactctgcgatgggtgcctacaagtatgtttcagagctatggcgcaagaagcagtctgatgtcatgcgcttcttgcagcgggtgaggtgctgggagtataggcagcaaccttccattgttcgtttgacaaggtctacccgccctgacaaggctcgtcgcttgggctt

SEQ ID NO: 16931 - DNA, 199 bp, Glycine max
  unsure (1)..(199): unsure at all n locations; Clone ID: 701045230H1
caaagctgaagtgtctgcttcttccgattccggcacgcccccatcaccatggtgaacgttccgaaaacaaagaagacatactgcaagagtaaggngtgcaggaagcacaccctgcacaaggttacccaatacaagangggtaaagatagcattgctgcccaaggaaaacgccgttacgatcgcaaacaatctggttatg

SEQ ID NO: 16932 - DNA, 198 bp, Glycine max
  unsure (1)..(198): unsure at all n locations; Clone ID: 701045231H1
tagggtttgccgattgagagagaaagagaaatgggagaacgaaaaggaatcccaatggctttggggctctggcgatgatcctcttcttcattgctncctcttcctctcacctcgttcgcgcttccgatgacgccgacgacgcgatcttctacgagtcgttcgacgaggattttgatggacggtggattgtatccgaca

SEQ ID NO: 16933 - DNA, 203 bp, Glycine max
  Clone ID: 701045232H1
cacacactctcatagctgtagcggcgacactaagatcggagaaagaatggcgaaaacgacgtcgttgctgctctttacactgctcctcttcggaaccctagctctcatccaggcgaagaaatcgaaggaggatttgaaggaggtgacccacaaggtttactttgatgttgagattaatggaaaagaagcaggtcgtattgtaa

SEQ ID NO: 16934 - DNA, 197 bp, Glycine max
  unsure (1)..(197): unsure at all n locations; Clone ID: 701045233H1
ggggacgcagtgctatcgagtttttttttcttaatgccatggctgctctgcaatacttggaatcgctgcgcaacgcnatcctgagctctccgattggtacaattcgctggcggatctataccagaacaagctctggcaccagcttaccctcaagcttgagcagttcgtggctctcgccgtcttccaggccggtgatg

SEQ ID NO: 16935 - DNA, 174 bp, Glycine max
  unsure (1)..(174): unsure at all n locations; Clone ID: 701045234H1
attccttgtagtttatactgannagatgggtttgaagatggcgttactgatcctaggcctttccctcatgctccttttggtctcctctgaggtggcatccacgaatacaaaagaggaggcaaatggagtggatgatgccaaatatcccggtggaagctatggagggggttaccc

SEQ ID NO: 16936 - DNA, 193 bp, Glycine max
  Clone ID: 701045235H1
aaggtgcctaatgagtgggctcctcctgaaactaagccatatgctccaggggaaaatcttcaacactggctcactgatgcaaaggccagggaccagtttgtgattcgtgctggttcggatactgaggttttgtggaacgatgccaggcatttaaagcctgatcctgtttataagcgtgcattttggacagaga

SEQ ID NO: 16937 - DNA, 192 bp, Glycine max
  unsure (1)..(192): unsure at all n locations; Clone ID: 701045236H1
tttcttcgtctggngttgtagccgttcacagcctagcctctgctctagaagatggctcctcccagaggtggtgggttcaggggtggtaggggtgacagaggtagaggaaggggcggtggtggaggaagaggaggagacaggggcacgccgttcaaagctagaggcggtggccgtggaggaggcagaggcggc

SEQ ID NO: 16938 - DNA, 193 bp, Glycine max
  unsure (1)..(193): unsure at all n locations; Clone ID: 701045237H1
gncacagccgatgctattatttcagttcaaaaagtagcatctcggttgggttgtgataacttagatgaaattacaagagaagacatggctttggaggctcttggggaaattgagaagttgaccagagtaaagaagatgttggaagaggctgcaagaccattttaaccagcttggacatgctcccttctcaaat

SEQ ID NO: 16939 - DNA, 196 bp, Glycine max
  Clone ID: 701045238H1
atttcctctcaaaccctaaccctaaccctaaccctccccgtcacaaaagaaaaccctctttgtccgatcatccgtcgtcaagatgttggaactccgtctcgtgcaaggctccctcctgaagaaggttttggaatccgtcaaggagctcgtgaacgacgcgaacttcgactgctcctccaccgggttctccctccag

SEQ ID NO: 16940 - DNA, 192 bp, Glycine max
  unsure (1)..(192): unsure at all n locations; Clone ID: 701045239H1
ctcttccattttctctctntagataggtaaaaatggctactccgccggtggtaaggtttccgatcttcacggcggtgagggcggtcggcgttgccgttactgttcttctgctgacgtgggccgtccatttcagaggaggcctcgctctcgtctctgataacaaagatctcatctttaatgtccatccagtgt

SEQ ID NO: 16941 - DNA, 67 bp, Glycine max
  Clone ID: 701045240H1
cgtcaacgaaggcggcttctctcgtctcgtctctggcttttctcctttcgctttacacttttcgtgt

SEQ ID NO: 16942 - DNA, 190 bp, Glycine max
  Clone ID: 701045243H1
aggactcaaacatcgggtttttgaggtctcattggctgatctccaaggggatgaagaccactccttcaagaagattcgtttgagagctgaggacgttcaagggaagaatgttctgacaaacttctggggaatggatttcacaactgacaagttgaggtcttggtgcgaaaatggcaaactttaattgaag

SEQ ID NO: 16943 - DNA, 194 bp, Glycine max
  Clone ID: 701045244H1
ggcacaataactggccctgttgtttttggagatgatccggtgagaagaaagggcaaccacttggagcaaagggagaagttaggattgacttctgccccaaaagggcagtcgaagtcacggccaacactttctgagccatcaaatgcgctcgaaaaagttgaggttgaaaaagggaagcaagatgatgcactgtc

SEQ ID NO: 16944 - DNA, 196 bp, Glycine max
  Clone ID: 701045245H1
gtaaaattgtccagattttttccaacaaagcaaaggcggtgagacatgtatgtggaagaaagtagcaccttcttctgcatagctaaacccccgaacgcagctgcgccactcgtttcatgcctcagcctctcgcctcggcgtgattgctaccaccttgttcgattcattcgtgtgatgttgtatgggttgaacaagg

SEQ ID NO: 16945 - DNA, 197 bp, Glycine max
  Clone ID: 701045246H1
gcattttcagaggaacaatggcgggtagggtttcgacgtgcttcttcttcgtgtttgctctttctctccttcttccttttcagatctccgctgaggaatcatcggagaaagagttcgtactcacattggatcactctaactttcacgacactgtcagcaagcacgatttcatcgtcgtcgagttctacgctccatgg

SEQ ID NO: 16946 - DNA, 196 bp, Glycine max
  Clone ID: 701045247H1
gttgagaccaagacacactcgttcatatatctctctgctcttctcttctcttctacctctcaagtttttgaagtataaagatggcagagacattcctattcacctcggagtcagtgaacgagggacaccctgatagctctgcgaccaaatctccgatgctgtcctcgacgcttgcctcgaacaggacccagacagc

SEQ ID NO: 16947 - DNA, 200 bp, Glycine max
  Clone ID: 701045248H1
gtttggggaaacttgcatttgacattgattttcatccctcagataatcttgttgccgccggtctaattaccggccaccttcacctataccgttatagccctcatactgtccctgtgaggctgttggaagttcatgctcacactgagtcttgcagggctgctcgattcatcaacggtggacgtgcactcttaacgggttct

SEQ ID NO: 16948 - DNA, 185 bp, Glycine max
  Clone ID: 701045249H1
cgaaatctaagaagtctgctctgaatttatctgagagctgaagagagggaacgagtttgtgaagtaaagttgactcagtggaaactcggttgaactcgaaatggcgaaacttgaagcgaactaggaatgatcgtggactcggtggggcagttcttctccggcaaagaccatcttccttattgtga

SEQ ID NO: 16949 - DNA, 175 bp, Glycine max
  Clone ID: 701045250H1
attgtccactcttttgttgtttagtatttggagcgacgggaatgtgaatatgacagaaagactcttgtaaacttcttcaaggaaggagattcactgcatcctactttaactgatgtaatagtattcacatctactccagacaaagtgaacaacaaatactacctgggacttgctc

SEQ ID NO: 16950 - DNA, 190 bp, Glycine max
  unsure (1)..(190): unsure at all n locations; Clone ID: 701045251H1
gcctgcagttgttgttctcagtctaanntcaccgtcgaggtcttcnccattcaatcaaagcanaaaaatggaggtnnctgttttcactcctgcactggaaggaattaagcttgtaaaatcagagcanggagaaattttgacccagccttcttggatgcttgcaagcatatacttcctgttatagataagt

SEQ ID NO: 16951 - DNA, 193 bp, Glycine max
  unsure (1)..(193): unsure at all n locations; Clone ID: 701045252H1
ggttaacactcttcttcatcgtcgtcgcaatgggacgtgtgatccgtgcgcangtatagggagcaggctcggtcttcaagtcccacacgcaccaccgcaagggccctgcacgcttccggagcctggacttcggggagcgcaacggctacctcaagggcgtggtcaccgacgtcatccatgaccctggccgcgg

SEQ ID NO: 16952 - DNA, 190 bp, Glycine max
  unsure (1)..(190): unsure at all n locations; Clone ID: 701045254H1
tgctgttagaaagggtgttgacacgggcattgcagtcatttttagagaccatgaaggtgaaactttggcagctgcaacaaagtttcatcagagtggcagaagctctggccttaagatgttgtattgaagatctttgtctttgtngtctgaatctagcttggatataagctagataacctccgctaagaga

SEQ ID NO: 16953 - DNA, 194 bp, Glycine max
  unsure (1)..(194): unsure at all n locations; Clone ID: 701045255H1
gagagttctgagaagaaaagagaagatcggtgagtgaggaagcaaatagcaatagcaccgccaccgtncaccactgccactgccactagcaacagcagaatgggaaccttgggcagagttttctacgccgtcggattttggatccgcgagaccggccaagccatcgatcgcctcggctctcgtctccaaggcaa

SEQ ID NO: 16954 - DNA, 194 bp, Glycine max
  unsure (1)..(194): unsure at all n locations; Clone ID: 701045256H1
cttccatttccattaaaaagaaaatatcataaatgggtattatcacattcgaggacgaaatncacctcccctgtggctcctgctactctttacaaagctctagttacagatgccgacaacatcatcccaaaggctcttgattccttcaagagtgttgaaaacgttgagggaaatggtggccctggaacaatcaa

SEQ ID NO: 16955 - DNA, 190 bp, Glycine max
  Clone ID: 701045257H1
gtggtggttgtcgtttttgaaatggcagcgtcgtcgtcagagaagcaagtggtggtgataggcatagacgacagcgagcagagcacgtacgcgttgaattgggctctggataactttttcccgagcccaattttcaagctcgttctcatccactccaggcccaccgccacctccgctgtgggcttcgccg

SEQ ID NO: 16956 - DNA, 111 bp, Glycine max
  unsure (1)..(111): unsure at all n locations; Clone ID: 701045258H1
tactagctctgtgcattcttcttctcgcttctnctgccttnccatcacacttcggcatttcctttcccaagatagtagaagatgggcagancactgaggatattacaaccc

SEQ ID NO: 16957 - DNA, 190 bp, Glycine max
  Clone ID: 701045259H1
tgcaaaggcgccactgccggacgctttccttcagttcctggagaccaacgggctcgacccttccatttacactgctattgattccaccccacgatacattcggttgaaacccggtttcgaatcatgtattgaagaggttgaagcagaggtgaaatgcaaactcgaaaaattagagtggttaccgggattt

SEQ ID NO: 16958 - DNA, 193 bp, Glycine max
  unsure (1)..(193): unsure at all n locations; Clone ID: 701045260H1
cnacctctctatacgctaattaaggtttattacaatacaatagcatccattgtncggattctttttcctttcccaaaactaactcaaacttctatggaagcactctccttcatccccaaagactcttgctcacttctccttcgccctccttcttcttcctctgtcagaacagcgccgccacttgctttcttca

SEQ ID NO: 16959 - DNA, 198 bp, Glycine max
  Clone ID: 701045263H1
gctcgttcgtcatttttcgtgcctcaaatctttacaatcgataaccacacccatcgcctttattcagaatgtcggaatcaccattcagaccacgagaaaagcttgctgagaagcaaaaatattttcagagtatccacaggcatacctacttgaagggacccatggataagattacatccgtggccataccactggctt

SEQ ID NO: 16960 - DNA, 199 bp, Glycine max
  Clone ID: 701045264H1
cgtggagccgcatctctaacccgcattggtctctcctcttccaagacgccccttcaactcatccaccgccgtggcctcgccgatcaccatggccctcccaaagttgcctgctggaaagacccaatgagcccgtctaaatggaaggaagagcattttgtgattgtctctttaactggctgggggctactcatctatgggg

SEQ ID NO: 16961 - DNA, 196 bp, Glycine max
  Clone ID: 701045265H1
tgcaggcagtgtcatctctcctttgacgacaagatgagcatcccaattccccatcggcagttattcatagacggagactggaaagtccccgtcctcaagaatcggattcccatcatcaacccttccacccaacacatcatcggggatatcccagcagctactaaggaagacgttgatctcgctgtcgctgccgcca

SEQ ID NO: 16962 - DNA, 193 bp, Glycine max
  Clone ID: 701045266H1
gtttcgttccgtttcaatggggagcgaagagcagaacggcgaattctacctgcgttactacgtcggtcacaagggcaagtttggtcacgagttcctggagttcgagttccgcccagacggcaagctccgctacgccaacaactccaactacaaaaacgacaccatcatccgcaaggaggtttacctaaccccc

SEQ ID NO: 16963 - DNA, 190 bp, Glycine max
  Clone ID: 701045267H1
gcgtcgttgtgaggtttaacgagacgatgagggcgctgtttctgttcttcgttctcttctctttcagctatgccaccgaacaaatctttcctgctcatatcggtagcattttcggtggtggcggtggtggccgctctcgcgaacccaaatacaagatcgaatttcatcccgaagattccccttttcaccc

SEQ ID NO: 16964 - DNA, 190 bp, Glycine max
  unsure (1)..(190): unsure at all n locations; Clone ID: 701045268H1
aggtaggttaacactcttcttcatcgtcgtcgcaatgggacgtgtgatccgtgcgcangtaagggagcaggctcggtcttcaagtcccacacgcaccaccgcaagggccctgcacgcttccggagcctggacttcggggagcgcaacggctacctcaagggcgtggtcaccgacgtcatccatgaccctg

SEQ ID NO: 16965 - DNA, 189 bp, Glycine max
  Clone ID: 701045269H1
ctggggggggtatcactatgcaatcgacgccgggaagctcaggatacttggatttgtatccagagcggaagatgtcctttttcaaaaatccttacattctcggactggctgctgtcgccggcatcggtggtctcctcttcggctacgacactggtgtgatatcaggggctcttttatacattaaggatg

SEQ ID NO: 16966 - DNA, 191 bp, Glycine max
  Clone ID: 701045270H1
tagggtttgccgattgagagagaaagagaaatgggagaacgaaaaggaatcccaatggctttggggctcttggcgatgatcctcttcttcattgcttcctcttcctctcacctcgttcgcgcttccgatgacgccgacgacgcgatcttctacgagtcgttcgacgaggattttgatggacggtggattgt

SEQ ID NO: 16967 - DNA, 191 bp, Glycine max
  unsure (1)..(191): unsure at all n locations; Clone ID: 701045271H1
tnagaaagtgatcgaacagcatgttcaagcttttggttagtagagcagctagggtttcaactccacacaaccacaatgcctttgcttctttcgctttctctagaagcagaagagatatcaggctctagggctgctgaagttttgaacctggtgcaaggtaaatgggtaggatcttcaaattggaatacagt

SEQ ID NO: 16968 - DNA, 189 bp, Glycine max
  Clone ID: 701045273H1
ctctctttcacagcacactcctcccagggtttctccaccaagagggaaatggctcccaaaccgcctagtacgggtctgtttgttggactgaacaagggacatgtcgtcaccaagaaggaattgcccccacgcccctcggatcgtaaggggaaaacaagcaagagggtgcactttgtgaggaacctcata

SEQ ID NO: 16969 - DNA, 189 bp, Glycine max
  Clone ID: 701045274H1
gtttgtcattagcacttcttcttttcacactgccgctgcaacaatggcttcagagaagaaactttcgaacccaatgagggagataaaagtgcagaagctcgttctcaatatctctgttggcgagagtggagatcgtctcaccagagccgccaaggtgttggaacaacttagtggccaaaccccagtgtt

SEQ ID NO: 16970 - DNA, 189 bp, Glycine max
  Clone ID: 701045275H1
gtgggattcaatgttaagaatgttgctgttaaggatttgaagcgtggttatgttgcctcaaactacaaaggatgaccctgcaaaggaggctgctaacttcacagcccaagtcatcatcatgaaccaccctggtcagattggaaatggctatgcccctgtcctcgactgccacacttctcacattgctgt

SEQ ID NO: 16971 - DNA, 189 bp, Glycine max
  unsure (1)..(189): unsure at all n locations; Clone ID: 701045276H1
gtcaacgaaggcggcttctctcgtctcgtctctgcttttctcctttcgctttcgcttttcgtgtcgccgccggtaaggcaattcgatacctctgaaccctaaccagacgcagccaccgttttgggtttccatccccctctcanactttgcctgattgctttcatgtntcgtttctctctntncatntca

SEQ ID NO: 16972 - DNA, 154 bp, Glycine max
  unsure (1)..(154): unsure at all n locations; Clone ID: 701045277H1
cggnctncgaggttattacatgcannaggttgatagattanntattggttatgctgtaangttgattccatttcatgtttgtagttcaattgatgtcctcactgatgtcctcaactccatctagacctacaggatgaatttcctctcctgtggc

SEQ ID NO: 16973 - DNA, 193 bp, Glycine max
  unsure (1)..(193): unsure at all n locations; Clone ID: 701045278H1
ctttctctctcccttagtcaaagggactcattgttcttctccaaggttatttagaaaagcaanatggtgaagatttgctgcattggtgctggatatgtggggggtccnactatggcagtcattgcacttaagngcccatccattgaagttgctgttgttgatatcnctaaatcccgcattgcagcctggaaca

SEQ ID NO: 16974 - DNA, 197 bp, Glycine max
  Clone ID: 701045280H1
ccatctgccacaagacgttttcgacaggacaggccttgggaggacacaaacgttgtcactacgaaggcggtaacagcgccgtaaccgcctctgagggagtggggtccactcacacaggaagccaccgcgatttcgatctcaacctcccggcttttccggacttctcagcaaggttcttcgtcgatgacgaggttacc

SEQ ID NO: 16975 - DNA, 192 bp, Glycine max
  Clone ID: 701045281H1
cgccacttctgaatctattgaatcaacaatcatgtcggacgaagagcaccatttcgagtccaaggccgacgccggagcctccaaaacctaccctcagcaagccggtaccatccgcaagaacggctacatcgtcatcaaaggccgcccctgcaagttgtggaagtttcgacttccaaaactggaaagcacggt

SEQ ID NO: 16976 - DNA, 114 bp, Glycine max
  unsure (1)..(114): unsure at all n locations; Clone ID: 701045282H1
ctttcttcttccactgctctaatctaagatgggcaagttcaagacnagaaatncagncttctcaaggtgcgaacggctgntnccagctgtggttctcggccattccaagtnctg

SEQ ID NO: 16977 - DNA, 187 bp, Glycine max
  Clone ID: 701045283H1
cgcagagcagcggcagttcatctgtttttctgcatcggcgtgaacaatggcgacgtacgctgcgatgaagcccaataagcctggcttggaggagtcccaagaacagatccacaagataaggatcacctttcctccaagcacgtcaaaaatctcgagaaggtttgtggggacttggttcgtggtgcaa

SEQ ID NO: 16978 - DNA, 190 bp, Glycine max
  Clone ID: 701045284H1
gggaagatattcccaacactttgtggaccttctaacaatggatgaaacagctgtgcagtatcttctgcgtctccatccagatcaggagggacttagcaagcaggaggctgtccgtgcaaaacttggtaagtttgggctaccaagtcataaccatcttactcctattgccaaactatcaggagggcagaaa

SEQ ID NO: 16979 - DNA, 124 bp, Glycine max
  Clone ID: 701045285H1
gatggcactcctccataaccagatctctgaatcaagatctgccactgtttctcccaccattgcccaaactaccccgcttcaccttcacatcaacaacattattgaggaacaacacataatcgca

SEQ ID NO: 16980 - DNA, 188 bp, Glycine max
  Clone ID: 701045286H1
cacacatagtagctattatactctctagagtaattgcggaatctgctagaattttctaataatggcgaaagacgttgagcaggtcacagagcaaggtgaatactccgcgaaggactaccatgaccctctccggcaccgttgatcgacccagatgagctcacaaagtggtccttgtacagagccgccat

SEQ ID NO: 16981 - DNA, 191 bp, Glycine max
  unsure (1)..(191): unsure at all n locations; Clone ID: 701045287H1
cgagctcgtcttcgaggacttcaacttccgggccctgtacgtggccanntccccctccctcgtccacctnccacgaggccagccgcaacaacgccaacgggctcctctccaaggcccagtgcagcctcgtcctcgacgccgggttctccttcacccacgcctcccccgtcttccacaacttcgccctcaac

SEQ ID NO: 16982 - DNA, 187 bp, Glycine max
  Clone ID: 701045289H1
cttcatttcggacattcatatcttcttcgtcctctgaatcaagtttcgactttatttgagtagttttgctctttccttccaaaatgagccggccaatggaggaagatactgcaggtaagaatgaggaagaggagttcaacaccggaccactatctgtactcatgatgagtgttaaaaataatactca

SEQ ID NO: 16983 - DNA, 90 bp, Glycine max
  unsure (1)..(90): unsure at all n locations; Clone ID: 701045290H1
taactcttgcnattagctgacagatgcnagagtgttgcattangcagtttaggcnttactgattngtngcaaataggtcttttattcatt

SEQ ID NO: 16984 - DNA, 83 bp, Glycine max
  unsure (1)..(83): unsure at all n locations; Clone ID: 701045291H1
cctctctctatctctcacacacactttctactctctactctctactacacccagatanntgtaagcatggcgagcgctcccac

SEQ ID NO: 16985 - DNA, 190 bp, Glycine max
  Clone ID: 701045292H1
cgacccagacaagtcaaaccgtgcccacagacacgggaagttgtctccttctcttaagccctaaaaccctgtaagcaattacttcaactcgccacttggaagaaacctcaccaaacattgcctccaagatgaattttaacaatgtgaatgtcccaaaggttcctggtggcggagtcgctgctttgcttaa

SEQ ID NO: 16986 - DNA, 188 bp, Glycine max
  Clone ID: 701045293H1
aagggattatggacaagattaaggagaagcttcctggaggacacagtgacaagtagatgcatcgtgcatcatgcatgcatgcatatatataatattgttgtcttgaataaatttgctgcatatgtacttacgtacgtacagtgtcttgtcatgtatgtggaggatatagtatatggttatagtttatg

SEQ ID NO: 16987 - DNA, 193 bp, Glycine max
  unsure (1)..(193): unsure at all n locations; Clone ID: 701045294H1
cttcactctcattttcccaatttcgcgataccaaaacctcagnnatcaacaatgtcgtttttctcaaggggccgtcgcgacgacgacacggtggacgactacgacgagtacgaccccaccccttacggcggcggctacgacatcgccctcacctacggccgccccatcccaccctccgatgagacctgctacc

SEQ ID NO: 16988 - DNA, 195 bp, Glycine max
  Clone ID: 701045295H1
ggctgaggattccgaacgagtgaccttcttcgtttctcgcaaagtttaagtaatcatgggtaaggaaaaggttcacatcaacattgtcgtcattggacatgccgactctgggaagtcaactaccactggtcacttgatctacaagcttggaggtattgacaagcgtgtgattgagaggttcgagaaggaggctgc

SEQ ID NO: 16989 - DNA, 126 bp, Glycine max
  unsure (1)..(126): unsure at all n locations; Clone ID: 701045296H1
gttcttttcaaggtttatatagttggtgatgctataaaggtcgttaggcggttttcattacctgatgtaagcnagtgggaactctcgaaagatgctgggatatatcgttttccaagggtttcttgt

SEQ ID NO: 16990 - DNA, 114 bp, Glycine max
  Clone ID: 701045301H1
gccagacgcagtgactaaaccaaacctctcactcgccgtcgtagggtttctcctttcgtttagcaacaacaacaatggttgcagccaagaaaaccaagaagacccatgagagct

SEQ ID NO: 16991 - DNA, 133 bp, Glycine max
  unsure (1)..(133): unsure at all n locations; Clone ID: 701045302H1
aactttctctccgacgttgacttggagcttccttcttgcccttcgtatctatgcgcgctgcntgaggtattgcagatgagcttttaagaaatcaatctttganaagatatcttatgaaggttgattcagtgtc

SEQ ID NO: 16992 - DNA, 284 bp, Glycine max
  Clone ID: 701045304H1
catggctgcccaacctaaacctcagaaccgacccatttctaacatcgtcatcgtcgttgctatgcagacggaggcacttcccattgttaacagattccagctcactgaggaccctgacaccccgtttccgcaaggggttccttgggtccgttatcaggggacatacaaagatcttaatataagcttgatttggccgggaaaagatccaactttgggggttgatagtgtaggcacgatatcatctgctcttgtaacgtatgctgctattcaagcattacaaccag

SEQ ID NO: 16993 - DNA, 285 bp, Glycine max
  unsure (1)..(285): unsure at all n locations; Clone ID: 701045305H1
gagaattatcatacccttcaagatgaaaccgtacctacgtccaatattcctattattccttatccttctcgaccaatccatttcggcgagtgctgctataaatattaatggtctgagaaacaaaattagagaagttctaaacaagcacccgagcatcaatcttccggcagataaactgaagaaggtgaagagaccactgaaggcactggattatctgcttggcgaatgtaaggacaggccgcctcaagaatttcaanaattttgcccgaaatttaagaacgatta

SEQ ID NO: 16994 - DNA, 285 bp, Glycine max
  Clone ID: 701045306H1
ggcaaagatagtggcagagctccaagctgtgaagcacaacagtggcaagtcctacaatcagttagcggaggagactggactcaccaacgtctatgttgctcagcttctcaggagacaggctcagctcaatccccaaactgcccctctacttcgggcagcgctgcccgacctgccccaagaccttgtttctgagatgatgagaccccctttgaggtcttatgaccctaatctcatccaagaccccactgtctataggttgaatgaagctgttatgcattttgggga

SEQ ID NO: 16995 - DNA, 286 bp, Glycine max
  Clone ID: 701045307H1
attatcctaagtctttgggaatagtgctgcaatggcttcaagtcaggaggaggtgacccttttgggagctactggaagcccatttgtgtgcagggttcatattgccctcaagttgaagggagttcaatacaaatatgtcgaagaaaatttgaggaacaagagtgaactgcttctcaaatccaacccagttcacaagaaggttccagtgtttattcacaatgagaagcccatagcagagtctcttgtgattgttgaatacattgatgagacatggaagaacaacccc

SEQ ID NO: 16996 - DNA, 287 bp, Glycine max
  Clone ID: 701045308H1
gaagaattgagaagcaatttaattagaaatatagtgcgcaattatcaacagacgggatttttgtgggaacagtacgaacagacgaagggtaagggaaaaggggctcatccatttactggttggacatcgcttgtagtattaatcatggcagaagcatatggaaatatttaggataaacacagcttggtggaggctattgtaacaaacattccttgcttccttctcattttccgtccatgaataccaaggcagtaagtgtgcatgtaacgttgttgtttaaatatgca

SEQ ID NO: 16997 - DNA, 290 bp, Glycine max
  unsure (1)..(290): unsure at all n locations; Clone ID: 701045309H1
gcaagtagtagctcttgacccttctttccaccttttctggtccctccctccagaaatgggcttctaattccattcttcttctttgtatctttcttgtggttgccactaaggttttttcctatgatgaagatctcaagacagtggttcctgcacctgctccaccagtgaaggcaccaactcttgcccctccagtgaaatcaccatcttaccctccagggccagtgaccacaccaacagttccaacacccactgttaaggtaccccctcnncnttcagtntccagtagttaa

SEQ ID NO: 16998 - DNA, 286 bp, Glycine max
  Clone ID: 701045310H1
ccgctgttggttttgattataagctgttttcaacgcaataagctgatctaaacacgcgcttagtgtctcttcttatgaatagtcttagaactgattttcggatcacttttggtcaaacgcctctgcgtcatgttgtgaatgagagggatttgcgattcgaagtgatgttggagaaaaaaagttattgttattattcgtttttcacattctgcaggaacctgagcccattgattgggattactatagaaagggaattggcactcgtttggtggatatgtacaaggag

SEQ ID NO: 16999 - DNA, 287 bp, Glycine max
  Clone ID: 701045312H1
cacccctcctctctctcttttgctcatttcctttgactcctcattatcaaagaaaatgggctctcattgggttgctcttgatgggttttctcacaatgttctcctctgctcatgcctatggtggagggtggactaatgctcatgccaccttctatggagggagtgatgcatctgggacaatgggtggggcatgtgggtatgggaatctctacagccaagggtatggaacaaacactgctgctctaagcactgcactgttcaacaatggcttgagctgtggctcttgc

SEQ ID NO: 17000 - DNA, 286 bp, Glycine max
  Clone ID: 701045313H1
attcataatgggtgttttcacatttgaggatgaaaccacctccccggtggctcctgctaccctttacaaagctctagttacagatgccgacaacgtcatcccaaaggctgttgatgccttcaggagtgttgaaaaccttgaggggaacggtggccctggaaccatcaagaagatcactttcgttgaggatggagaaagcaagtttgtgttgcacaaaatagaatcagttgatgaggcaaacttgggatacagctatagcgtagttggtggagttgggttgccagac

SEQ ID NO: 17001 - DNA, 286 bp, Glycine max
  Clone ID: 701045314H1
ttccattctctctgtgtatttccctacctctcccttcaagatgcagatcttcgtcaagaccctcaccggcaagaccatcacccttgaggtggaaagctctgacaccatcgacaacgtcaaggccaagatccaggacaaggaaggaatccccccggaccagcaacgtctcattttcgccggaaagcaacttgaggacggccgtacccttgctgactacaacattcagaaggagagtactcttcacctcgtcctccgtctccgtggtggcatgcagatcttcgttaag

SEQ ID NO: 17002 - DNA, 76 bp, Glycine max
  Clone ID: 701045315H1
gagcagcttactttgttactttcaacaggggtagaagcaaggtgggaaatactgaaatatagttggcttttaagtt

SEQ ID NO: 17003 - DNA, 167 bp, Glycine max
  Clone ID: 701045318H1
gcaacagctacctcctccattcttcatttccattaccaaaaagaaaacaccaaactctctataaccataaccatgtcaatggcaacaacatcccctcacaccggcctcttccaaaaccgcaccaaaccttcttttcctttctcttcttcctccttcaagttcaaacc

SEQ ID NO: 17004 - DNA, 281 bp, Glycine max
  Clone ID: 701045319H1
agcgaactaatgttatacccattattgaagatgctagacatccagctaagtacaggatgttggttggaatggttgatgtcatattttctgatgttgctcagcctgatcaggcaaggattttggggctgaatgcttcatattatctaaaagcagggggtcattttgttatttcaatcaaggctaactgcatagactccacagtcccggctgaggcagtgtttgaaagcgaagtgaacaagttaaaggctgatcaattcaaaccattcgagcaagtcaccctt

SEQ ID NO: 17005 - DNA, 282 bp, Glycine max
  Clone ID: 701045320H1
gttaacaagggcgacgcaccggcattgccagagactcttaaaaattacaacaagctgttgtctcttggcttcaagattgtattcttgtcaggaagatatcttgacaaaatggccgtaacagaagcaaacctaaagaaggctggcttccacacatgggagcagttaattctcaaggatccacatcttatcactccaaatgcactttcatacaaatcagcaatgagagagaatctgttgaggcagggatacagaattgttggaatcattggagaccaatggagc

SEQ ID NO: 17006 - DNA, 283 bp, Glycine max
  Clone ID: 701045321H1
gagagaaacgcgaacacacagattcagtcacctaccgtcctacccttttctctctcgccgcctcttcttctccctcgcgcatactcaacagaagcccaaaaaaggggtctttagaaggttctgattgatgggcaggagaggggtcaagctattcgatgaagaaaagaacggtcttttttcaatttccaattttgggtctcaatggggtggtggtggtgttcacgaccctgtgaatttggctgtgatggcaagcattagtcgaatgggaatggggtttggtgtt

SEQ ID NO: 17007 - DNA, 263 bp, Glycine max
  unsure (1)..(263): unsure at all n locations; Clone ID: 701045322H1
gaacgatccaagtgatagacactcantcgcgatggaacgtgnagctgaatccgagcgaacactgtacccatacgtgactggatcctctgtagtcgctatcaaatacaaagatgggattctaatggccgctgacatgggaggttcgtatggatctaccctgcggtacaagagtgttgagcgtatcaagcctattggaaagcattctcttcttggtgctagcggggagataagtgactttcaggagattctgcgttaccttgatg

SEQ ID NO: 17008 - DNA, 264 bp, Glycine max
  unsure (1)..(264): unsure at all n locations; Clone ID: 701045323H1
gaacgatccaagtgatagacactcnctcgcgatggaacgtgnagctgaatccgagcgaactctgtacccatacgtgactggatcctctgtagtcgctatcaaatacaaagatgggattctaatggccgctgacatgggaggttcgtatggatctaccctgcggtacaagagtgttgagcgtatcaagcctattggaaagcattctcttcttggtgctagcggggagataagtgactttcaggagattctgcgttaccttgatga

SEQ ID NO: 17009 - DNA, 286 bp, Glycine max
  Clone ID: 701045324H1
gccgttgatgtgctttctaagatctttgacgttgctcgcttagaagacgaagtcgatttcctcactgctcaatccgagcaagagcgccaaagaaggtcaaatatcaaattctgggatgtttttagatccaaagaaatcagactggcattcctcgtcggtgccgtacttctggcttttcagcagttcacgggtattaacacagtcatgtactacagcccgacaattgtccaaatggcagggttccatgctaatgaattggctcttcttctatcccttatagttgccg

SEQ ID NO: 17010 - DNA, 285 bp, Glycine max
  Clone ID: 701045325H1
acaaatcacaaatgtgagactgatacataattattttatttgaatcccgagctgaacagtcttctacttcatcctcattcacgcctccaaactttccttttcatacctatgatacgacgtgtccagttgcggtgattttcagggagtatgcgtttcatgttccgttgccgtgctttctccactgaaattcctcactgccaaacaatcttttgaggccattctctcgccaactgtgagcaagaaaccctctgttcataaacaatgtggaacattgctcggacacta

SEQ ID NO: 17011 - DNA, 286 bp, Glycine max
  unsure (1)..(286): unsure at all n locations; Clone ID: 701045326H1
gccaccacgctttattcaacgccttgtcgttcactggctacttcatcctcntnttcctngtcgttgcaaccctgccctctgtncgtctaacctcgcttaccctcaacgcgtcaccttctcacagcgctttctcgcctccaaggtctctctcaaatctcaaccccaaccgtatcagattcccgttcacacccagcagccggaaggtacagtgacagctgctgtgacccctgttgaaaatggcacttctcacaagcagttgaaggctgacttattgtctcttaagtcc

SEQ ID NO: 17012 - DNA, 283 bp, Glycine max
  Clone ID: 701045327H1
gcaagaggaggaggaagagttgaatctgtggaacgcgatggtggaagaggcttcgagaatggagggtttggatcgcgatgttatgaaacggttcgtttcgccggtgatggcgagaattgaatccgatgactatgcagagtatctgagaacagagcttgtgtaccaaactgggttgtctcaagaccccagcaacactctcctccttgtcaactatgcccagttcctctacctcgttgttcacgattttgacagagcggaagagttgttcaagagagcgatagag

SEQ ID NO: 17013 - DNA, 285 bp, Glycine max
  Clone ID: 701045329H1
cccgattcaagaagaaccgcaagaagcgcggccacgtgagcgccggtcatggccgtatcggaaagcaccgtaagcaccccggcggccggggaaacgccggtggcatgcatcaccacaggatcctgttcgacaagtaccatccgggcttcttcggtaaggtgggaatgaggtacttccataagcttcgcaataaattctactcccccatcgtcaacgtcgaaaagctatggtctctcataccccaagacgcgaaggaaaaagccctaaaatcgaaggacactgccc

SEQ ID NO: 17014 - DNA, 139 bp, Glycine max
  Clone ID: 701045330H1
atatatgagcatatgctctttgttcatttgcaaatgcaaaataaacactggagcggctttaggtaatttgactttgagtaagttttgtctaattttatacttggtggggaatagaagtatttattggtgtatgttgttc

SEQ ID NO: 17015 - DNA, 285 bp, Glycine max
  Clone ID: 701045331H1
ctttgttgcttccaactgatgttgtcatagcagacaagtttgctgctgatgctaacagcaagactgtgccggcatcaagcatcccagatgggtggatggggttggatattggtcctgattccatcaagacatttggtgaagcattggatacgactcagaccattatttggaatggaccaatgggtgtttttgagtttgataagtttgccacaggaacagaggctatagccaagaaactggcagagctgagtgggaagggagtgacaaccatcattggaggaggtg

SEQ ID NO: 17016 - DNA, 145 bp, Glycine max
  unsure (1)..(145): unsure at all n locations; Clone ID: 701045333H1
ggcttcaactctgcttcccctggcaaccttcttcttagttctctccgcttcttatctccagattgctggggcgaaagcacaaccgttgactagtctnangcttaactcctcngatccttgaggngtntattgcaaaaaggnataa

SEQ ID NO: 17017 - DNA, 141 bp, Glycine max
  Clone ID: 701045334H1
gtacacttattctagagcataggcctgtgcctgtggttgccaaggctgtaaatgtactagtcacctcatactcccattcaattaaaaccggtagctatcttaagggactgaaaccagagaacacatcaacttctgttgtac

SEQ ID NO: 17018 - DNA, 280 bp, Glycine max
  Clone ID: 701045335H1
attaaatcttctctcaaaatatttgtgattccatgcccaacgccctaccctgaaaatatggtagccgagagagaggttaacggtaacggcgtcggagagggaagaacaacgctaatattcacctacggaaccctgaagcgaggcttctccaaccacccccttctccaagacctcattcgctccggcgacgcctccttcgtcggaacctaccgcaccgccgccaaatatcctctggtctgtgggccctacaaggtccccttcctcctcaacattcccgggt

SEQ ID NO: 17019 - DNA, 279 bp, Glycine max
  Clone ID: 701045337H1
cttatactcaccggcgagtccatctcgcgccaggtcgtagccgatccggccaccgcctttggttccctcactttctcgtccttcttcttctcagaaatatgccttctcaaaaagttgaaacgggtcatcaagacacggtccatgatgttgcaatggattactatggtaagaggctggccacggcttcatcagatcacacaattaagataattggggtgagtaatacggcctctcagcatctcgcaacattgactggtcaccaaggacctgtttggcaag

SEQ ID NO: 17020 - DNA, 281 bp, Glycine max
  unsure (1)..(281): unsure at all n locations; Clone ID: 701045338H1
atctacacggctctgcggattcatccttttcttctgcagagcaaagaaccaaccaacacttgtttcttccgcnatggccgatcaacctgaatcatcggacgctaagggcaccaagagagatttcagcaccgcgattttggagcgtaagaaggctctgaatcggcttgtggttgatgaggccgtcaacgatgacaactctgtcgtcgctcttcatcctgataccatggagaaacttcaactctttcgtggtgacaccatcttgatcaagggaaagaaaaggg

SEQ ID NO: 17021 - DNA, 278 bp, Glycine max
  Clone ID: 701045339H1
tccaagcagcctccaattcgtgccactctcttcaaaatggccgttaccttctcaaatctccacacagaatcaggtctcaagtccctcgacgacttcctctctgggaaggtctacgtttctggggatcagttcacaaaggacgacatcaaagtgtatggtgctgttttggagaagccaggtgactcttttcccaatgctgccaagtggtacgaggttgtctcatctcagcttgctgcaagttccccggcaatgctcaaggggtgagattcagtggcaaa

SEQ ID NO: 17022 - DNA, 264 bp, Glycine max
  unsure (1)..(264): unsure at all n locations; Clone ID: 701045341H1
cagagaataaaattattagagtaanccatatgatgtaaggtancctggctaggcccgcttccacagtgtttgatgcctctgctggggtgtactcttcaagtctgagaaagtagattctatactattcctgtctcactttcgccatgggaatatcatttgcttttttcttatgtccaaggatgaataataatgaatttcactttacatcttcctttctctatgattcttctcagttnaataagttttcctagctacctggcctta

SEQ ID NO: 17023 - DNA, 285 bp, Glycine max
  unsure (1)..(285): unsure at all n locations; Clone ID: 701045342H1
aagaagggttggttggtcccattccataggaagagatcaaagagaagagaaaagatgtttgaggccgcagcagctatacactcgagcgaagaccgaggaattcgacctcgaatcaggggaaaccctctacccagggctgagcgtcggcgagaaccagctccgatggggnttcatccgcaaggtctacggcatcctctccgcccagatcgtcctcaccaccctcgtctctgtcaccaccgttttctatactccaatcaatgacctcctcaagggcaattccaccct

SEQ ID NO: 17024 - DNA, 282 bp, Glycine max
  Clone ID: 701045343H1
aaagttttggccgggaaactgaagccgaacttgggtcgattcactaatccccctgattggcaggaaattttgacctattttcgaggatctgaactgcagaattattttactcggattctagaggatgatttgaaggctatcatcaagcctcagtatgttgaccatattccaaaagctgtgcaagggaatgtggggcaggtgctagaccagaaagatgagagagagaagaaggaggagctttgtgctgatcttgagcttaatcaagttatagatcgtaatgtt

SEQ ID NO: 17025 - DNA, 281 bp, Glycine max
  unsure (1)..(281): unsure at all n locations; Clone ID: 701045344H1
gtagtctctcaagtcccaacctgcttcttattgaagtacccaaagcatgtctacaaccgaaaaggggctttcaagtgctttgaatgccagaatcgaagggtgcggcactgaaactatagtgtttgctcatggctatggaacggaccagtcgatatgggacaaaatacatcctttggttcttgctttaaattaccgtcttgttacgtttgattgggcttttgctggaactntgaaggatcagagcctctatgaccctcacaagtattcctctgtggaagctt

SEQ ID NO: 17026 - DNA, 260 bp, Glycine max
  unsure (1)..(260): unsure at all n locations; Clone ID: 701045345H1
cgcattgctctcagcttcacaaanaccatggaccacgttaacggaaacctctgcttgggtaactagccgctcctcccacgttctcgttgactctgcaggaattgagaaagtggtgagcaccattgattccattcccaaggttgagtgggatttcgaagggattcactactttgataatggaccactcaccgttcagtacctgtttgtgttggacgctttaaatttttgcttctggcctgataaggatttgaatatgatga

SEQ ID NO: 17027 - DNA, 284 bp, Glycine max
  Clone ID: 701045346H1
ccctgctgcataggaagaaaccctagccttctcaccctccctgcgacacgatgcagatcttcgtgaaaaccctaacgggtaagacgatcacccttgaggtggagtcttctgacaccatcgacaacgtgaaggccaagatccaggacaaggaaggcatccctccggaccagcagcgcctcatcttcgccggaaagcagctggaggacggccgcaccctcgccgactacaacatccagaaggagtccaccctccacctcgtcctccgtctccgcggtggcgccaag

SEQ ID NO: 17028 - DNA, 283 bp, Glycine max
  unsure (1)..(283): unsure at all n locations; Clone ID: 701045347H1
caagcattgcatncctcttgatttgtagtttgttttgtgctttagataaaagttctgccaaatcaagaggggttttaagatcatagtgtgtgttttgcaacaatggctaagttctttgctgctatgatcttggcactctttgccatttccatacttcaaacagtggtaatggctgctaatgaacaaggaggccacttgtatgacaacaagagcaaatatggaagtggaagtgtcaagagttaccaatgcccatcacaatgctcgaggagatgnagtnngaccc

SEQ ID NO: 17029 - DNA, 239 bp, Glycine max
  unsure (1)..(239): unsure at all n locations; Clone ID: 701045350H1
gcgcgaaaatgagcggacgnaggggaagaagaagggagcgagctttgtgatcgattgcgcgaaccggtggaggataaaattatggacattgcttctctggagaagttccttcaggagaggattaaggttggcggcaaggccggtgcactcggcgattccattactgtcactagggacaagagcaagatcaccgtcacctccgacagcaacttctctaaacggtatctgaaatatttgac

SEQ ID NO: 17030 - DNA, 277 bp, Glycine max
  unsure (1)..(277): unsure at all n locations; Clone ID: 701045351H1
aaagtttctcattaacttctgcgttagattcacgcacaaacttgtcatttcccttttcttaaccttttttttttccttttccgtcaaaactttgtttgttacattcgacttcgaattcagattcagatttctctgtttagtgctcctcaaaccgatgacgccgcggcttgttagcttctggctccgctacggnatggcancttccatattgcacccattttgtnctntttntttnctntcttccnttnccctaaatttnccangtnaanattangta

SEQ ID NO: 17031 - DNA, 277 bp, Glycine max
  Clone ID: 701045352H1
gagagcaacagtcagaaggtccatcctcaaccaatagaagaggccatgaatcagaatccagaagcaatggaaaccctaatatctaaagtttttatgaatatctcttccttgaagtcagcttatattgagcttcaagctgctcatactccctacgaccctgataaaattcacactgctgataaacttgttattagtgagctgaaaaatctgtctgaactcaagcatttctacagggagaacaacccaaaaccagtgtgtgtttctccccaagactcac

SEQ ID NO: 17032 - DNA, 278 bp, Glycine max
  Clone ID: 701045353H1
gcccaacggccgaaacttcaacatcattcagaatcagctggaccacgtcgtctcctacgacctcgacatggaccaacggcacctccttcgtctacaccctcgacccttccgacccgacatgcaaagttgtggactttggagtgggtattctccgacccaattggctcgacggtgcaacctatttgggtcagcaacacgttgataacttcctctgcaacgtttgggcgaaggttgatttcattgtctactacgaggaggtcctcactcgtaggcctgtt

SEQ ID NO: 17033 - DNA, 277 bp, Glycine max
  Clone ID: 701045354H1
cctagctctgtcgttccgtcgttgacgatggcgtttcgggtgcgaaccctgacctccgctctctctttcttctctctctcttgtccatcgcttccgccaatgtcttcttcgaagagcgtttcgatgacgggtgggaaaatcgatgggttaaatcagattggaaaaaagatgagaacgtggctggggagtggaaccacacctctggtcaatggaatggagacgctaatgacaaaggtattcaaaccagtgaggattacagattctatgctatttcagc

SEQ ID NO: 17034 - DNA, 259 bp, Glycine max
  unsure (1)..(259): unsure at all n locations; Clone ID: 701045355H1
aaaggtcttgtgagtgaaggagantagtgttgttgagaaattaaacgtctgcggaaagcaacaatgtcaggacctgagtgttgctcaaacccaccagttctgaaccccaatgcaggagctggccatgttgaaaaactcgctggtctcaattcctatctctccggttcccctaattccattgccattcttctcatctccgacatttatggctatgaagcaccaaatttgaggaatattgcagacaaggttgcagctgctg

SEQ ID NO: 17035 - DNA, 284 bp, Glycine max
  unsure (1)..(284): unsure at all n locations; Clone ID: 701045356H1
ttctgggttgcaaaaatgaattcggacacgacttcctattggtgctacagctgcacgcgctttcgttcacatacaagaacagaacgacgtncgtttgcccgcgctgccacggcggcttcgtcgaaaaggtcaccgccccccaatcgtcaaggcaaggcttccgccgccgacgccgcaacgccgggaaccactcggcgttcaacccggtgatcgtgctccgcggaccgggagaggacgaggagagcagctttgagttatactacgacggcttcgacggcgagggg

SEQ ID NO: 17036 - DNA, 280 bp, Glycine max
  Clone ID: 701045357H1
tcctcattaagccgccactttctctctctttccttttcgtcttctttttcttcttcgttgggtttgttgccacttagtaagaaagagggtgtgaagagagtggggagaagatttggtgttgtggccatggcggagtctaagagtactgtgcttgttacgggagcgggtggtcgcacaggacaaatagtttacaaaaaattaagagagaggccaaaccaatatgtggctagaggtctggttagaacagatgaaagcaaacagaacattggtgctgcagatg

SEQ ID NO: 17037 - DNA, 283 bp, Glycine max
  unsure (1)..(283): unsure at all n locations; Clone ID: 701045358H1
gttacatggacatgggatgatttatcccaacctcctcctttggttccaaattcttacacctgggcctgctgcttccccaattactccaccaccccttatggctgaaaaccccaatttcgtgcttccaaatcagactttaggattgaatctcaatttacaagatttcaacaacttagatgctacccttcacctcaataacnnnnnnnnnnnnnnnnnnnnnnnnnntgcaacctcatcttctcctccacaggaacttccttccgttggaatatcacagggagag

SEQ ID NO: 17038 - DNA, 280 bp, Glycine max
  Clone ID: 701045359H1
ctttaactaatttgcagctgtttagattggttcctactacacacttttctccattttttttcttcattttccattgaattcaataaaactctttctatttcttggtttcccctatatttacttttgtatttttagctttaatgttcagggttggcactcgatgctgcttcttggaataagtgctgccataagtattcgtgtctcctatatacttggcaagtcgcatccaagagcagccatatactctttctgcgtgacaatgtttcagtctctcctcctc

SEQ ID NO: 17039 - DNA, 280 bp, Glycine max
  Clone ID: 701045360H1
tttgtatcgtaaatcttgtatagacagtacaaacgcagaaaccgcgaaattgtgcctaaaatcgatgacttcgctaaatggtgacgagagccaccacccaccaccgcaaccgcaagctgaaaagattactgaagtgggatggtacgttcttggcgaggatcagcaacagattggcccttacgccttctcagagttgcgcgagcatttcttgaatggatacctctccgaaaatacatttgtgtggtctgaaggaaggagtgagtggcagcccttgtcctca

SEQ ID NO: 17040 - DNA, 229 bp, Glycine max
  Clone ID: 701045361H1
gaaggttgctgagcaaagaggagaaagttgggaagagaagctttcacaacttaagaagaacaaacaatggcatgttgaagtctattgagattctctagtgcaggatttgcagagtagtagtccccttctgtctctgaaaggaaacaaaacaaaaaagaacattttgcgtttggtgcatttagtcaataaaattcattaagcagctgagtaactgtagctgttctgcatt

SEQ ID NO: 17041 - DNA, 282 bp, Glycine max
  unsure (1)..(282): unsure at all n locations; Clone ID: 701045362H1
cagaatggggcgcaaagagaagcagaacacgaaggcaatagaggaggaacgcgaccaagacaattttaatggcgcttcaacgccgccactcgttttcagcagcgacgacgacgaagccaaccaagatctcagcctcaagatcatcaaaaaggccatgcgaatgcncaccgccaagcacgccccaaacgacgacgtttcgtctccgttttcgcagaaacctgatctcgcattgcccccaagcggcggtgtttcggatgggcccagcgcaatcgctgattcaga

SEQ ID NO: 17042 - DNA, 280 bp, Glycine max
  unsure (1)..(280): unsure at all n locations; Clone ID: 701045363H1
atttttctctggaaaaatctctgaatttcggaactctggactatctgctagattgtgcctgagtttgtacttgtggccanngttgcagatcgaagctctgaaatgtcgttattagttggattttagaaatagatttgcatttttcgaagcttcagaactgaaaccagcgagcttttgtgagccttgggttttgacggaatcggattagtttaggtgagaagttatgaatttacttgcctaaaatcggaactaaggttatgaatttcaccgtaatgttaat

SEQ ID NO: 17043 - DNA, 280 bp, Glycine max
  unsure (1)..(280): unsure at all n locations; Clone ID: 701045364H1
ggccagccgacaattacgggaggttatgtgggtccctccacttttatatacacaacaacaacacacatactagtcatnnnnnnnnnnnnnnnnnnnnnnnnngttctctcctttcattaacgttgtgttgggtttgctagtgtacttggttttcattatggcgtcttcttcagcctctcgtgagggacactacagaggagttaggaagcgaccatggggacgctacgctgcagaaataagagatccgtggaagaagacacgtgtctggctgggcacattc

SEQ ID NO: 17044 - DNA, 146 bp, Glycine max
  unsure (1)..(146): unsure at all n locations; Clone ID: 701045365H1
tgcncgacnnnggcnttctcattactgaagccactggcgtctctgacacggctcaaggctatccgcaaacccctggcatatggactaaagaccatgttcaagcttggaaacccattgtcgatgccgtcnacgccaaaggngtgttt

SEQ ID NO: 17045 - DNA, 136 bp, Glycine max
  Clone ID: 701045366H1
aaacggagaaggtcaatggcagagtctgtgggtgtggctgggttcggtgtttcaggctcattctctcttactaggcccacaatcttttctcgatcttccaataatatctctctctttcgctctcaatctcatttcc

SEQ ID NO: 17046 - DNA, 274 bp, Glycine max
  Clone ID: 701045367H1
ttgggagttaggttctgcacgctctgcttccagcgagtgttctttcttcgtttcaacaccttaatttgcacacgctgcttcttcagcttgagaaatggcacaagaaacctttctattcacatctgaatctgtaaacgagggtcaccccgacaagctgtgcgaccagatctctgatgcagtgctcgatgcgtgccttgaacaggaccctgacagcaaggttgcctgtgagacatgcaccaagaccaacatggtcatggtctttggagagatcaca

SEQ ID NO: 17047 - DNA, 276 bp, Glycine max
  Clone ID: 701045368H1
gtaatctgagagagaaacaaaaacaatgaaggtttccattgccaagttccactcccttcccctatgttttttccttctcttggccttcaacacaaaacccctcctagcagcagaaccagagccagtggttgataagcaagggaaccctttggagccaggagtagggtactacgtgtggccactttgggctgatgaaggaggcctcacactaggccaaacaaggaacaagacatgccctctttatgttatccgtgacccttcattcattggcacccc

SEQ ID NO: 17048 - DNA, 276 bp, Glycine max
  Clone ID: 701045369H1
caccacacaatctcaaccaaagccttgaccatgaaagcaacccctttagtgctcttcctcctcttcaccatagccaaagggcttcacaaccccaaatgtgatgctacccatcaacatgaccatgatggctcaaccctccaagtgttccatgtgttcagcccatgttccccatttaggccctcaaagccaatgtcatgggaagagagtgtcctaaagctacaagccaaggaccaagccaggatgcagtacctttctagcttggtggctaggaggtcc

SEQ ID NO: 17049 - DNA, 276 bp, Glycine max
  Clone ID: 701045370H1
ctcgcactctctctacgcacgcctcaacatcccttctctgctccattcattatgtctccgtcgttggatcttccccccaagggtggcttcagttttgatctatgccgaagaaacgcaatgcttcaaaacaagggcctcaaagccccaacctttctcaaaactggcaccactattgtcggtttagttttccaggatggtgtcattcttggggctgatactagggcaactgaaggacctatagtggctgataaaaactgtgagaaaattcattatatg

SEQ ID NO: 17050 - DNA, 277 bp, Glycine max
  unsure (1)..(277): unsure at all n locations; Clone ID: 701045371H1
cgttgtcttctcncttcgtcaaaaccaaccaaacccctccccaattctcaagccaaccatgtcttccttcaanagcnagtaccaagatgaactcattgccaatgctgcttacattggcaccccagggaagggtatccttgctgctgatgagtcaactggtacaattggcaagcgattggccagcattaatgtcgagaatgttgaagcaaataggcgtgctcttcgtgaactcctattcaccacacctggtgcttttgantgcctcagtggtgtgatc

SEQ ID NO: 17051 - DNA, 280 bp, Glycine max
  unsure (1)..(280): unsure at all n locations; Clone ID: 701045372H1
gctgaagtgtctgcttcttccgattccggcacgcccccatcaccatggtgaacgttccgaaaacaaagaagacatactgcaagagtaaggngtgcaggaagcacaccctgcacaaggttacccaatacaagaagggtaaagatagcattgctgcccaaggaaaacgccgttacgatcgcaaacaatctggttatggcggacaaactaagcccgtcttccacaagaaggctaagaccaccaagaagattgttctgaggttgcaatgccagggttgcaagca

SEQ ID NO: 17052 - DNA, 278 bp, Glycine max
  Clone ID: 701045374H1
agcgccaccacaaagtacatagtaactctttttctcgaatccacagagtgagactcatcgtgtgaacaacgataacggcatgtttgagcgtacttgaaaaatttgagcggccatggacgaaaccgccgtaacgacgaagcctgattggctcaacaaccgcgcgaaggtcgccggagagagaaccgaagaatttttctgtggcggcgacgacgaagaggaatgcgacgacgaggcttgggacatgttgactcggagcttctggcaggcgcagactgtgc

SEQ ID NO: 17053 - DNA, 278 bp, Glycine max
  Clone ID: 701045375H1
caacattttactgggtatataagtggagagtgtaactgaaattatgtggaggtgcatcaatggaagaattgccagaagatttttatccacttcttctgccagtgcccgtggttggtgggaccatgtaaggccagcaccgaaggaccccattgttcgtgtgaacgaggcatttctagctgacccttttccccataagatcaatcttggaataggtacttataagggtgatgatggcaaagctttcattcctcaaagcgttcgtgaggcagaaacaaaga

SEQ ID NO: 17054 - DNA, 277 bp, Glycine max
  Clone ID: 701045376H1
gaagagtgatgtatacagcttcggggttgttctgctggaaattatgtctggcaaacgagcacttgacagcaacaggccaagtggggagcacaatttaattgaatgggccaaaccttacctcagcagcaagcgcaggatcttccaagtcatggatgctcgcatagaaggccaatacatgttgcgcgaacaatgaaagtagccactcttgccattcaatgcctatctgtggaaccaagatttagaccaaagatggatgaagtggtgagagcattggagg

SEQ ID NO: 17055 - DNA, 276 bp, Glycine max
  unsure (1)..(276): unsure at all n locations; Clone ID: 701045377H1
attctctcactctcttactctttcactctacttctctctcctattgcggctagggtttaggtttttctttcaccgtctccgttccttcaatcttcttattctctttcatctctgatggagacgttgcgggtttagttctaaggggtggttctggccttgggtttttggaacgtacggtgtcgttttggggttgggaaaacaaattctgagagatggcaaccacgaacccttttgatttgttgggtgacgacgctgagganccttctcagctcatcg

SEQ ID NO: 17056 - DNA, 257 bp, Glycine max
  unsure (1)..(257): unsure at all n locations; Clone ID: 701045378H1
attactatgaccttcataagggaaccntgatgatgatcaagangatgatgatcatgatcatnctcatgtggatggtggtggatcacaaaacagtgccagcaacatcactgaaattgtgaccaccccagaaggggaaaacttaggagaatggctgagtctaggcctcaaaggagacatcaacatgccagcagaagaacaaaactcatcatcaaggcctctccacagcaacaacaacaaggtattctcatgcaacttct

SEQ ID NO: 17057 - DNA, 278 bp, Glycine max
  unsure (1)..(278): unsure at all n locations; Clone ID: 701045379H1
cgaagaacgaacgagagtgcagcgccagggcaatgggaaggagcactttggctttggttctcgcgattctgatctctttgcagggaaccccccacgttagatccgatgcctccgatcatcgttacaaggacggagactccgttcctctttacgccaacaaagtcggtccctttcacaaccccagtgaaacgtatcggtactttgacctgccattctgtgtaacaggtcatgagaaagataagactgangccctcggtgaggtgttaaatggcgatcgc

SEQ ID NO: 17058 - DNA, 285 bp, Glycine max
  unsure (1)..(285): unsure at all n locations; Clone ID: 701045380H1
caaacatncatcatcattattattttactccgaacgagttgacaccgattccactgcactcaaccatgagccgattcaggcgttttgagctcatagaacaaccacctttcttccactcctgctactctttcccttccttcgtcctccaagactcactctctctcgacctcgacctcttgccacttcccagccacttcgacgctttcgcagatctggtgcacgcgccgtcgttcgcttaccggcgcgtggagaggatctcgagaatgagttgcgtttgcagagcct

SEQ ID NO: 17059 - DNA, 158 bp, Glycine max
  Clone ID: 701045381H1
caactttctctccgacgttgacttggagcttccttcttgcccttcgtatctatgcgcgctgcttgaggtatttgcagatgagcttttaagaaatcaatctttgagaagatatcttatgaaggttgattcagtgtcttccaccattgaaaaactttttg

SEQ ID NO: 17060 - DNA, 273 bp, Glycine max
  unsure (1)..(273): unsure at all n locations; Clone ID: 701045382H1
cttctttcactttccatttccatttccattttttctggttcactttctcgatggcctccgagaaccccaccgccgacgacgccgtcaacggcttcaatcggccggaaatgttctcggaaaacctcgccggcaccgtcgacgcctacgaccgccacgtgttcctctgctacaagagtcacctgtcctggcccccgcgcatcgaggcctccgacgccgatcccttccccaagcgcgtcgccgncaccttcaaagcccgcaagaacgacttgcccc

SEQ ID NO: 17061 - DNA, 272 bp, Glycine max
  Clone ID: 701045383H1
ctctaattacatttctaatctcattctccttctgttcaaacactctcatggcatcagataagaagattaggatcggcatcaacggatttggaaggattggccgtttggtggccagggttgcccttcaaaggaatgatgttgaacttgttgctgtcaacgatcctttcatcaccactgattacatgacatacatgttcaagtacgacaccgttcatggccagtggaagcatttgatgtgaaggtgaaggattctaagacccttctctttggtg

SEQ ID NO: 17062 - DNA, 273 bp, Glycine max
  Clone ID: 701045384H1
gttgcgactaagagttgctgcttcttccgccactcagcacttcgctccctctgtgcttcaccaaccatggccgaaatcgaagctaccgttccagatccctctcaaatcgacgtcaaacttttcaaccgctggagcttcgacgacgttgaggttactgatatgtctctggctgattacattggagtgtccccgtcaaagcatgctacatatgttcctcacactgctggtaggtactcagtgaagaggttcaggaaggcgcagtgccccattgtt

SEQ ID NO: 17063 - DNA, 274 bp, Glycine max
  Clone ID: 701045385H1
gcagaatccacggagctaagaatgaaattgtagaagaagaagcactttcacagaaaacatgaaagggttaggtcctcatgcccctttggtttcaaggggaaagcttcctccttcgttggcagtagtggatgccttgccaacatgctcttcttatttctctagaaccaccgtcctatacccattaagatgcagacaaaaatcaaggttgagcttggcccgtggcacaattcgagcccaagcatccaatattagtggtgttgaacctggagattat

SEQ ID NO: 17064 - DNA, 256 bp, Glycine max
  Clone ID: 701045386H1
gtatcacagtgaaacgaagaagccctaactacgcacgcactcattcttgagaaagctcaatattcattcgtccatggcactctcttctcgtctcttttccaaatccaaattgatctatggctgtcaaatacttctgcaaaaggagcatgctattccagttcgtcactttgctaaagagtctgcccctcctgcccttaagggagatcagatgctgaagaacatttttgtggaggtgaagaacaaatttgagactgcc

SEQ ID NO: 17065 - DNA, 274 bp, Glycine max
  Clone ID: 701045387H1
atttaccaggatgtgttgtgtttacattggcttacaccttgcttaccaaacttaccaagaaattcaatttgtgatgcaggcaagacaatcacttattgtgagaggtctctttcctatgcttgcagatcctcgacatcctgtaagtttttctttttggaattctattcagttatttttcattcttgagttgatggacattgttctgttgagattgttctttggggttagaattagatgctgaaaacagatcagggtgagctggactttggggcta

SEQ ID NO: 17066 - DNA, 277 bp, Glycine max
  Clone ID: 701045388H1
ctcactcaccacaacaactcctttttttacctcttcacattctccatttcacagggttctgatcatgttggggaagaggccccggccaatgatcggaaagttgtcggagttgttggtctcgagaggccgcacggtggcatatttggacaccaccggaagccctagaggcccattagacatgaagatgatgcaatcatcaccaagaggcttaaaaaactatgatcttggtggtgttggtcttggaattgtagtggctcttgataaatccaacgaggtt

SEQ ID NO: 17067 - DNA, 274 bp, Glycine max
  Clone ID: 701045389H1
gagttaaaggtttgatctttgaggtgaaggtccagtggtttgagtagccaaaccttagttatggatgttgaggcagagattgatcgcttgccaattgacctgttggctcatatttttgttctgttcacttccttcactgatttggcacagtaagcactaagcatatatgagtgtttcatttcattgttttaatatataattcattcaccaatcgtttcgtgtggatgtggtgtttgcaacaagggcaagtggtgtttgcaagaaatggaaacaa

SEQ ID NO: 17068 - DNA, 273 bp, Glycine max
  unsure (1)..(273): unsure at all n locations; Clone ID: 701045392H1
aacttcctccggatgttctcataatttatacagctgantagaagcctagaactgccaantgtnatgctgttttgcaatgactgtgttatgccctaagggcaagtttaangtggtggctagcgaagatttggnacatgttggccactgttgttatgtataatatttttggcttaaanttttattaaaattcattttntctcccccctaatgttacccctttagcttgtgccttgtcatttggcaancaagtgtaagaaaaatttgcatcttcat

SEQ ID NO: 17069 - DNA, 275 bp, Glycine max
  Clone ID: 701045393H1
caaaacacaatggtaatgtgggtatttgggtatggttctttgatctcgaaagctgggtttcactatgacgaacgtattgttggtttcatcaaaggctatcgacgagtcttctaccaaggctctactgaccacagaggaacccctgagttccctggaagaacagtgaccctggagcctgctgaaggagaaatatgttggggagctgcttacaagatcgcaaagaaagaagatgcagaaacggcattagtgtacttggaagtaagggagaagcaata

SEQ ID NO: 17070 - DNA, 277 bp, Glycine max
  Clone ID: 701045395H1
agaaaattgcaatccctgggtttggaaatggcagcggcaggttgtcagaagcttctggaattgagcacgaagatcgtcgctgttggcagaaactacgctgctcatgccaaagaactaggcaacgccgttcccaaggagccggtgttgtttctgaaaccgacgtcgtcttacttgagtaacggcggaaccattcaaatcccacacaacgagggctctctgcatcacgaggttgagctcgctgtggtcatctccaagaaagcccgtgacgtctccgaat

SEQ ID NO: 17071 - DNA, 277 bp, Glycine max
  unsure (1)..(277): unsure at all n locations; Clone ID: 701045396H1
cggttttgaaaagagttaacaatctcttctcttcgctcctgcacttgttgtttctttgcncttcatggcatctcaggctagccttctccttcaaaagcagctcaaagatctttgcaaaaaccccgtcgacggcttctctgccggtttggtcgatgaaaccaacatttttgaatggagtgtcaccataattgggccgcccgatactctctacgaggggggatttttcaatgctattatgagtttcccatccaattacccaaatagtccaccttcagtg

SEQ ID NO: 17072 - DNA, 290 bp, Glycine max
  unsure (1)..(290): unsure at all n locations; Clone ID: 701045401H1
gggaggaggaatacacgaagcataggcaatgaaatgaggcgttttgactgaccttcttggatctgatcgaatccaaacccaaaccctaatctaatcccaaaaagcttattagtctctctcgatcaatcgaaccagcgagcaagattgtctctctcctaggccatgcgaccaccctgttcctccgccatcgccctctccagagaggtttcctttttcgttttcgccgatttctccatcgattccgccagccatgactgccgacacccacgccgctcctaatatcatcncaa

SEQ ID NO: 17073 - DNA, 287 bp, Glycine max
  Clone ID: 701045402H1
gaaccgggaaaactattactctggaggtggagagttctgatacgatcgataacgtgaaggcgaagattcaggataaggaagggattccaccggatcagcagcgtcttatcttcgctgggaagcagctcgaagacggacgcactctcgccgattacaatattcagaaggaatccacgcttcaccttgttcttaggctccgtggtggcgatttctagtttcagttgaatcttgctattgagattttctcttccttgaatgtgtatgatataacaaaatttctatgtcta

SEQ ID NO: 17074 - DNA, 283 bp, Glycine max
  Clone ID: 701045403H1
cttatgacaggtaacgaggaaggaagagttgaaggctaaggaagaagccttggcactaattgaagaggagcgccgttctaaggaagcagctgaggctaatcataaaagaaatcttaaagctttacgcctgaagatagagatagatttccagcgtcgtaaggatgatctccttaggctggagcaggagatttcacgccttaaagcacctgcacggtctactactttgcctacaagtgagtctgaggatgcagagccccagagagagacattgctaagcttctgt

SEQ ID NO: 17075 - DNA, 280 bp, Glycine max
  Clone ID: 701045404H1
caaattaacaaccattgttcgttgtggcagtagcaaaacaacacctttttgaaacccgaggttcagagagaaaagaaacattttccaaattaatggggcgttggatgaaaccagaggtttaccctctattggctgcaatgacctttgttaccggcatgtgtgtgttccaactaacaagaaatgtgctcgggaaccctgatgttaggattaacaaaactcggagaagcatggcatgttggagaacagagaagagggagagaaatatgctgagcatggcctg

SEQ ID NO: 17076 - DNA, 279 bp, Glycine max
  Clone ID: 701045405H1
gtctctacaatcactccttcctctcatcctctataaagaaagtgcttaatttgtgttgttacttggttcagtttccatggattgggggcttgctatatcttctcatcctaaaccttattcagtcacaactggtggaaatctctggcggagtaaacacaccaccaagaatatttactttgcaagttcttggatatcaaaagcttcacgacacaaaagggaaactcaaatagaacataatgttttgaggttccaacaaccagtttggatcatcattacaat

SEQ ID NO: 17077 - DNA, 282 bp, Glycine max
  Clone ID: 701045406H1
cgaaaccctaatttcctcaatcctggttttggaattcgacaatggagcagaagaggagcagcaagatgtacaacctgttcgtgaagcacttggacgggaaaaccctaaccctcctattcccctctccgatcctctacgcgagttccatcaaggatcgcctcttccaactcactggaatccccgcccaccaccagcgcctcgtcaccggctgtcgccacctcaacgatgacaaatccgctatccatgctccccgggggacggcaacatgtttccctccgtgcg

SEQ ID NO: 17078 - DNA, 282 bp, Glycine max
  Clone ID: 701045407H1
caagaagggttggttggtcccattccataggaagagatcaaagagaagagaaaagatgtttgagccgcagcagctatacactcgagcgaagaccgaggaattcgacctcgaatcaggggaaaccctctacccagggctgagcgtcggcgagaaccagctccgatggggcttcatccgcaagtctacggcatcctctccgcccagatcgtcctcaccaccctcgtctctgtcaccaccgttttctatatccaatcaatgacctcctcaaggcattccacctcc

SEQ ID NO: 17079 - DNA, 284 bp, Glycine max
  unsure (1)..(284): unsure at all n locations; Clone ID: 701045408H1
ctttctttagctgccaaacgaaacttcccttgttcctgttcctgtgttctccttgcagctccaaaattctatgtggtggtggagatggtgatgattactgcttggatcactgaccttttcgcttgtatgggtggttgttttggatgctgtgtgaaacccacaccaattattgccgtggatgagccagcaaagggactaagaattcaggggcagacagtaaganaaccacacatatcagatggtttctggagttcaagcattgtgatctggataacagcaacatt

SEQ ID NO: 17080 - DNA, 284 bp, Glycine max
  Clone ID: 701045409H1
gaataatgttaaaatggtgcagagctactatggtgtgtatggaggagcaacagcacagtacccggtttatggaagtggagctgctgctgcagcgttctacccatatctgcagtacggagaagggagtggcggtggcggaactagcggcggctacagttccggacagggttatggtgtgaactaccctcctcaggctcacctctttcagtattctcccattgcttccactgcagccgccacagtggctatgcccagcatatggaacaccagctatgtctcttgct

SEQ ID NO: 17081 - DNA, 223 bp, Glycine max
  unsure (1)..(223): unsure at all n locations; Clone ID: 701045411H1
ggagcgtcgtcgtttcgttagggcacaaaaccccttttcggatcggtggagcaaggcctcgccggcgagattcccgaggctgttcaatcagcgatcgagcaccggcgaaaagcggcgaagatgaaggttttcgtgaagactctcaagggcacgcattcganattgaagtgaacccttcggacacgctttctgaagtgaagaaanatatagaaactgttcaggt

SEQ ID NO: 17082 - DNA, 148 bp, Glycine max
  unsure (1)..(148): unsure at all n locations; Clone ID: 701045414H1
cttctanagatcnagcancacaagattcancatngatgcaattcaattgtgggtttcaaagcccaagctagccacagttgggggtctgtgggcctctggaattggggcatcncttgtggcttattcacgtacnaggtctccnatgaag

SEQ ID NO: 17083 - DNA, 251 bp, Glycine max
  unsure (1)..(251): unsure at all n locations; Clone ID: 701045417H1
tggcttgcaggcaattgtgggcttcaagagctgnctcttacctgaggatctctgtgtntcacagaggcttntctnntgttgttaaagatttgaagtatgctgantcncatgagtgggtgaaagttgatgaaaattctgcaaccgtcggcataactgatcatgcccaagatcatttnggtgatgttgtatatgttgaattgccagangtgggagcagctgtnacacaaggaggtagttttggtgcagttgaa

SEQ ID NO: 17084 - DNA, 283 bp, Glycine max
  Clone ID: 701045418H1
gcagagagtgcggtaggctcatccgagaccggaagcagcaatggggatcgatctcaaggccggaggtaaaagcaaaaaaaccaaaagaacagcacccaagtccaatgatatctatcttaagctcttggtcaagctttatcgcttccttgttcggagaatggcagcaaattcaatgccgttatactcaagagattgttcatgagcaaggttaacaagcccccattgtctttgtcaaggttgattaagtataccaaggggaaggaagataagattgctgtggtgg

SEQ ID NO: 17085 - DNA, 281 bp, Glycine max
  Clone ID: 701045419H1
caagtcgcatcttttgcttcactctacgcagatcgcagcaaaccagagattgaactccgacgatgcctcccgtacgctcctacgatccggcgatgccatattcgccaacgtcgaacgcgtcaatgcggagtgtttacttgacgtatggcgcaattgtgcgtcaattgctcacggatctggaagaggttgaggaggttaacgagcagcttgatcaaatgggttacaatattggaatccgattgattgatgagtttttagctaagtctaatgtctcagatgca

SEQ ID NO: 17086 - DNA, 279 bp, Glycine max
  Clone ID: 701045420H1
gtttgcaaagaagttggcttctcttgctgatctctacgtgaatgatgctttcggcactgcccacagagctcatgcttctacagaaggagtggccaaatacttgaagccctctgttgcaggattccttatgcagaaggaacttgactatctagttggagctgtgtcaaaccccaagagaccatttgctgctatcgttggtgggtcaaaggtgtcttccaagattggagttattgagtccttgttggagaaagttaacgttctcttgcttggtggaggatg

SEQ ID NO: 17087 - DNA, 265 bp, Glycine max
  unsure (1)..(265): unsure at all n locations; Clone ID: 701045421H1
tctgcaagccacggtgggcgtttggntgtgcttttagttaccactttctctcttggatttgcttacgtattgctccttttgtattagtggctcctgtcccaccttgcttttggacttgagctttttatatttctgattgttcaatgtctgttgtgtgtgctctccaacctgtggtgactttccggtttattcctgtggctgtttcttgtaggcctttcgacctccagtattaataaaagatcactngtagcttttnaatttnaaa

SEQ ID NO: 17088 - DNA, 282 bp, Glycine max
  Clone ID: 701045422H1
cacagcgtgtcccctcctcgctggtgttcaagctggccattctctaggcctacatgtcggaggtacaggcccagcaggtggagcccaaggcccgtgaaagcccaacccgcaaaatcccaaccctcaaaaccttccaaatctatcgctggaaccccaaaaacccttcaaagcacaaggtcaaggactaccagatcaacctaaaggagggtgggccgatggtcctcgatgcgctcaacaacatccagaataagattgacccgagcctcacgttccgccgtcatg

SEQ ID NO: 17089 - DNA, 283 bp, Glycine max
  unsure (1)..(283): unsure at all n locations; Clone ID: 701045423H1
tttccttctctctttcaccaatcaacacaaactaagttcttccttctgttgaaagcgatagcaatggccacgaatccaatcgaagcggggaacggcgacgctgctcccaaccctaacgcgactaccaaatcctccgtgtacctgcaagactcggaggagctgaagcgagtcttcagccgcttcgacgccaacgggacggcaagatctccgtctcggagttggacaacgtctcggntccctcggatccggntcccgcggaagnagctccagcgtgtcatggaat

SEQ ID NO: 17090 - DNA, 282 bp, Glycine max
  unsure (1)..(282): unsure at all n locations; Clone ID: 701045424H1
gtaggctgccaggcaccgcacaccgccaccgcactttctccgatcctcacaattttgcctccggcatgtctccggccgccggagtcagcgtccccctcctgggggattccaaaggaacgccgccgccggcttccgtccccggcgcggtgttcaacgtggccaccagcatagtcggngccggaatcatgtcgattccggcgatcatgaaggttctcggcgtattcccgctttcgcgatgattctcgtggtggccgtgtggcggaatgtccgtggattcctgat

SEQ ID NO: 17091 - DNA, 261 bp, Glycine max
  unsure (1)..(261): unsure at all n locations; Clone ID: 701045425H1
gagagaacccctgcnccttaacgacgccgtttcgcaagcatcaatggagaagggaaagggagtgatgggatcgggaggaagaagatggggcgttgacttctccgacaattccacttctcgcgacattcccnatcctcccggnttctctcgcgcttctctcgatcaggacgattcaacgctaagtcgccagaagaaggacgctgaatccaactggaaagcccagaaagcttgggaggtagcacaagcacctatgaagaattt

SEQ ID NO: 17092 - DNA, 284 bp, Glycine max
  unsure (1)..(284): unsure at all n locations; Clone ID: 701045426H1
catggcgtctacactacctgctggggacgaagaaacgccacttgtgcccgatgataattcggccatcgangctacgcaagacccaccactccacggatattcacatcctgagcttggcctttctcttggtctttctcgccttcggtgccgctcagaatttgcagagcactctcaacactgaggatgacttgggtaccaccacactcgggatcttgtatttgtctttcacatcttctccgtggttgcttctttggtggtgcgagttctcggctccaagaagcttt

SEQ ID NO: 17093 - DNA, 120 bp, Glycine max
  unsure (1)..(120): unsure at all n locations; Clone ID: 701045427H1
cacagattcccctctttcgaatttcgatactttgatcagatccacaacacttcttcatccatgangcttggttcttcaggatccagtgtcgtggttncnaggnncttnagattgcnggag

SEQ ID NO: 17094 - DNA, 284 bp, Glycine max
  unsure (1)..(284): unsure at all n locations; Clone ID: 701045430H1
ctttttcgagcaatattctctctctgtcacttcacctcacacgatctcgttccgantgcacncntnttaatgatcttcgtcttccacggcctctgatttggcttgatctcncttgtcgcacctctctgccaganccatcatctccgtgcanggnnnnnnnnnnnnnnnnnnnnnnnngattgggttttcaatnagggttttnttgaatcgtntctttgggtttngnttcnggaatttgaanattncagggaaaatgctggnnngaagcgctgaagatgagggtg

SEQ ID NO: 17095 - DNA, 145 bp, Glycine max
  unsure (1)..(145): unsure at all n locations; Clone ID: 701045433H1
cagaatccttacacaccatgtgacacatcttttttgcattttganactggagaaaaccctagaaaccaaatcctctctcgcattgccatctgcctccataatgataacactatgcttgctgacnatcatggcagacatcatggta

SEQ ID NO: 17096 - DNA, 283 bp, Glycine max
  Clone ID: 701045434H1
ttcttgaagggcacagaagagggtttcttttcgtttcgtttcaatggggagcgaagaggagaacggcgaattctacctgcgatactacgtcgggcacaagggcaagttcggtcacgagttcttggagttcgagttccgccccgacgggaagctccgctacgccaacaactccaactacaaaaacgacaccatcatccgcaaggaggtttacctcacccccgccgttctccgcgagtgccgtcgcatcatctccgagagcgagattatgaaggaagatgataac

SEQ ID NO: 17097 - DNA, 277 bp, Glycine max
  unsure (1)..(277): unsure at all n locations; Clone ID: 701045435H1
cttntttcagcttctctaaattctctgnctacttcaccaagcacttttggttgcagctttggttaatttccaatatggtgtttcctctcntatctatctttgcttnactcaatcttgcagtggtggcnacccatgcagaaaccttgccccctgaagtttactggaagtcgaagcttcccaccantccaatgccgaaagccatacagatatccttcacccagatttggcagaagacnaaagcactctgtggccgtaggnaaggggggcgtaaacgtta

SEQ ID NO: 17098 - DNA, 276 bp, Glycine max
  unsure (1)..(276): unsure at all n locations; Clone ID: 701045436H1
cttcgcctcactctcttttatntcgttcctctattcgctacgtcgtcgttagggtcgtcttcggatcggtggaacttgactgcgccggcgtgaattccgacgctgcgagtggcaccgaattgcgatacggtgacgaatatgaaggttttcgttaagactctcaaaggcactcacttcgaaatcgaagtgacgccgcaagacacggtttctgaagtgaagaaaaatatagaaactgttcagggtgcagatgtctatcctgctgcacagcaaatgtaa

SEQ ID NO: 17099 - DNA, 277 bp, Glycine max
  unsure (1)..(277): unsure at all n locations; Clone ID: 701045437H1
tccgcagctgctgttattcgcaccgcaaacaaacagtgagccatggccgtcggaaagaacaagcgcatctccaaagggaaaaagggtggcaagaagaaggcagctgatccctttgccaagaaggattggtatgacattaaggccccttctctttttcaagtgaaaaatgttggcaaaaccctcgtctctcgtacgcagggtaccaagattgcttctgaaggacttaaacatagagtgtttgaggtctccttngctgatcttcaaggggatgaggatc

SEQ ID NO: 17100 - DNA, 276 bp, Glycine max
  unsure (1)..(276): unsure at all n locations; Clone ID: 701045439H1
tcccattctctcgcatctcaatacccttttgatttgtgaaaggnaagcaaacatgcttgatcaggtccaacaccctacaatcatggacaaggttgctggccagctccatctccgttctggtgtttctggtattaggagttatgaaggagcctactgccaccccacaatgtaccaaagaccctcttttgggaattactcgaatgctgcttgcagtatctgtgatgcctcatgcnaagtactatggatttgtctgctgtgnaanaatgcctcccccgt

SEQ ID NO: 17101 - DNA, 164 bp, Glycine max
  unsure (1)..(164): unsure at all n locations; Clone ID: 701045441H1
gtgaaattccatgccgtgtctcattttaactttggagtgaganataggaaaggatatctatctatggcgatttgcagattgaaatctttgctttctctttcgaaatgcaactctgcattagtctcttcttcaatacgcactttctcttcgtcagaagttccccc

SEQ ID NO: 17102 - DNA, 231 bp, Glycine max
  Clone ID: 701045443H1
atagataagatagggcaaaaacaaaacaaaacaaaataaaaccctagccaaagaaagaccttgttgagcagcagcagcagagagagagaggcttatggaaggagtaccgcacccaatacccagaactgtcgaagaggttttcaccgattttaagggcagacgcgctggtttgattaaggcctcatatgacgttgaaaagttttaccagcgtgcgatcccgagaaggagatt

SEQ ID NO: 17103 - DNA, 279 bp, Glycine max
  unsure (1)..(279): unsure at all n locations; Clone ID: 701045445H1
cttccatgcttcaatttgaaagttttcccatttcaattctctcacacaccgctttagaaactttcctaaaccctgctctccattttcccttgtctcttcctttctctctctacaaagagtgtgtgtgagagagagaaggatttggattttggataactagagcgaaaggtngacaccaccaaaaaccgaactgttcccagannnnnnnnnnnnnnnnnnnnntccaacatccaantccaaatccaaaaccctaccaacaccacatcntcgatgtggggg

SEQ ID NO: 17104 - DNA, 131 bp, Glycine max
  unsure (1)..(131): unsure at all n locations; Clone ID: 701045446H1
gtgagtcattatatctactgatctacatatttctttacttcttttcttctcttaatcatcttatcatccatgtgctgggcagcagggtaggattcgtaaaggaagtacatngtttaatacaacataagagc

SEQ ID NO: 17105 - DNA, 142 bp, Glycine max
  Clone ID: 701045447H1
gatagcacagaatctgagccaagggaaattggcaacagggttttcaatgtgtccagcatacttgtgaccgaagtgatcttttgcagcctgaaaggatccataatgggattgtgtttaatgttgtcaagaaagaagacttgtc

SEQ ID NO: 17106 - DNA, 145 bp, Glycine max
  unsure (1)..(145): unsure at all n locations; Clone ID: 701045448H1
ganaagaaaatcctcaattttctgagcagccaaacactctctctctgtctctcgaaaattctcagtttgcagagaaaatctgaatcatgtcgtggcaagcgtatgtcgacgatcaccttctgtgtgacatcgaaggtaaccacct

SEQ ID NO: 17107 - DNA, 278 bp, Glycine max
  Clone ID: 701045449H1
cgaccaaaacgcgcaacacgttgtaattaaaacgacaccgaaactaatgggcgtcttcagcgaaaacccgaatccggacccggttgtgatccgccaggtttgggcttcaaatctcgaatccgaattccaactcatccgcgaactcatcgaccactatccttttatctcgatggacacagaattccccggtgttgttttccgaccacacctggaccccacaaaaccctacaaccacgcaacaacatcgcaaccgccactccgaccactacgcttcctca

SEQ ID NO: 17108 - DNA, 277 bp, Glycine max
  unsure (1)..(277): unsure at all n locations; Clone ID: 701045450H1
cttccacaaccctatcgcacatctttctcagttctacgatggagttttggggtgccgaggttaaggttggngagtctgtnaaggtaganccancngaatttnangcatgcatacncctttntnangctgctcttggtgaggcaaaganagatntgcctganccggtggttctctacatganagttggtgaacagaaatttgtcttgggaaccctttccagggagaaaatccctcaaatatctctggaatggttttggaaaaggagtttgagctttcc

SEQ ID NO: 17109 - DNA, 275 bp, Glycine max
  unsure (1)..(275): unsure at all n locations; Clone ID: 701045451H1
ccaaccttcaacgtctcttcactctcttccttttttccctaattgcaccctctttggctcaacaatccttcagacccagagccctcgttgtcccagttaaaaaagacgcttccaccctccaatatattactcaaatcaaacaaagaacaccactcgtcccagaaaacctagtacttgacatcggtggccaattcctgtgggtcgattgcgacaacnactagtctcctccattaccgccccgcaggtgtggctccgcncagtgtccctcgccagat

SEQ ID NO: 17110 - DNA, 183 bp, Glycine max
  Clone ID: 701045452H1
tcaactttcaacgccagttcacactctctgcttcgcgtgtaccaacaagtgcaagttcgaatcaatggccagcgctcagctcacagcaatagcgtcatcgatctctacggcgtcgtttgaagggcttcgaccttccgctgttcagtttgcttccacgggcagaattagaattggcaatctctc

SEQ ID NO: 17111 - DNA, 276 bp, Glycine max
  unsure (1)..(276): unsure at all n locations; Clone ID: 701045453H1
ggnggtgaaagtganagaggaggcatattcncccntcanaattacgnacatcccaagcggagaccagcacgnagaacaaaactagctcggttggaccanttcgaagcgnacttagacggagagagtgacagagaatgatgttggacggaaccgaagacgangagangtttctcgccgccggaatcgccggcttcagcagaattcctnctacatgcaccgtgcattggactcgaacatctcagggatgctttgaagtattcggctcagatgctctcc

SEQ ID NO: 17112 - DNA, 257 bp, Glycine max
  unsure (1)..(257): unsure at all n locations; Clone ID: 701045454H1
gatgaagctctcaagagttttaanggagagcgcaatgggacntgagtatcttattaatcacattgactcccctgggcacgttgacttctcttctgaggttactgctgcacttcgtattaccgatggagctcttgttgtggtcgattgtgtggaaggngtttgtgtccaaaccgaaactgttctacgacaagcccttggagaaaggattaggcctgttctgactgtcaataagatggacaggtgcttccttgaactcc

SEQ ID NO: 17113 - DNA, 138 bp, Glycine max
  unsure (1)..(138): unsure at all n locations; Clone ID: 701045455H1
ctcggtaaaattgaattagggtttcattntcttcttcttcaccccactgtcactgcgcaaatncagtnctccccttacccnctccctcggtcctgatcntttcccgccatntcccgcgtttctttacccagattttga

SEQ ID NO: 17114 - DNA, 274 bp, Glycine max
  unsure (1)..(274): unsure at all n locations; Clone ID: 701045456H1
gggaagcctgtnattgtgaaactgaagtggggaatggagtacaagggctatctcgtttccgttgattcctatatgaacttgcagctggccaacaccgaggngtncattgagggacaatntactggaaatttgggagagttttaatcngatgtaacnatgttctctacctcgaggagtaccggaggatgaggnctcgaagatgctgctgaagactacagagtnatagnactgctaatggctatgacatnancagaatcgaattctactgttttgt

SEQ ID NO: 17115 - DNA, 278 bp, Glycine max
  unsure (1)..(278): unsure at all n locations; Clone ID: 701045459H1
cggttgacgccaattgctccctccctccatgagatgagagagaagaaagcctccaaaacttcatcttcaacctctccatgtgctcaacttcgcgacgcataccacaattgcttcaacaggtggtacgccgagaaattcatgaagggtcatgggacaaacaagaatgcgtttccgagtggcaaaaatacagagcctgtctttctgaacatttggaagataagcatctgattcgtttcttacaagctgacggcgttgttcnagacagtggtgttgctctc

SEQ ID NO: 17116 - DNA, 162 bp, Glycine max
  unsure (1)..(162): unsure at all n locations; Clone ID: 701045460H1
attaaatgattatgatagccttnttnaaaacattgnaagangggaggcaagactatcccggaaagatgagatcatgaaagctattgggaagaagttggaccgctacaagaatccttggcttgaattgaagatacaatatggncacaacaaagggaagttata

SEQ ID NO: 17117 - DNA, 276 bp, Glycine max
  Clone ID: 701045466H1
gccatttgggagttaggttctgcacgctctgcttccagcgagtgttctttcttcgtttcaacaccttaatttgcacacgctgcttcttcagcttgagaaatggcacaagaaacctttctattcacatctgaatctgtaaacgagggtcaccccgacaagctgtgcgaccagatctctgatgcagtgctcgatgcgtgccttgaacaggaccctgacagcaaggttgcctgtgagacatgcaccaagaccaacatggtcaggtctttggagagatca

SEQ ID NO: 17118 - DNA, 273 bp, Glycine max
  Clone ID: 701045468H1
cgccgtcgtcgctgtttgtgtgtgtatcaggtgcagctaccaacgatggtgaagggtcgtcaaggagagcgcgtcagactctacgtgaggggtacaatccttggatacaaaaggtccaagtccaaccagtacccaaacacatccctgatccaaattgagggagtgaacaccaaagaagaagtaggatggtatgctggcaagaaaatggcctatatctacaaggctaaggtgaaaaaggatggaagccattaccgctgcatatggggcaggtta

SEQ ID NO: 17119 - DNA, 269 bp, Glycine max
  unsure (1)..(269): unsure at all n locations; Clone ID: 701045469H1
ggcagttgccaaaacggtcttgtcagctacaagaaagaactccttcaacccacccaccaatgcatgaattccaaatggataatttgaatgttgcattcggctgcactacattgggatatcttagcattatgacccaatattggaagttatcatatatgtaaatgtatttataataatatagtagaaggctttgggtttcaaagtgagngaccacatatatataccaatctatcgttaatacatgatgcagttatcacctttctttctac

SEQ ID NO: 17120 - DNA, 144 bp, Glycine max
  unsure (1)..(144): unsure at all n locations; Clone ID: 701045470H1
aganagttggcntgaagattataatcgggatgataacaggtatnatgcaagcagaggtgcacacttaaacctcncacgtgcagagaaagctcggntcttggtcnacaaanttcnanctttggtcgtacattggttgctaanact

SEQ ID NO: 17121 - DNA, 109 bp, Glycine max
  unsure (1)..(109): unsure at all n locations; Clone ID: 701045471H1
aaatcccngcttcgtggaaatcccgaaccagaaaccatgcttctcngaaccgctgcngcttctgcttcgtccctctccctcttcagcccgaangccgaacctccccgtt

SEQ ID NO: 17122 - DNA, 136 bp, Glycine max
  unsure (1)..(136): unsure at all n locations; Clone ID: 701045473H1
cntttaccagctatacttgttccttttgaaggttagaagtgctacaatacaaacaatggcagctactcaggaagatgtgaagctttgggtattgtgggaagcccatttgtgtgcagggtccagattgcccttaagt

SEQ ID NO: 17123 - DNA, 176 bp, Glycine max
  Clone ID: 701045474H1
cagccaaagaagagaacgttcaagaagttcagcttcaggggggtggatctggacgcgcttctggacatgtccactgacgaactcgtgaagatgttcagtgctcgcgcacgcagaaggttccagagaggtctcaccagaaagcccatggccttgattaaaaagctccgcaaagcgaa

SEQ ID NO: 17124 - DNA, 271 bp, Glycine max
  unsure (1)..(271): unsure at all n locations; Clone ID: 701045475H1
ctggcacaaacgctggcaatgcccgtggcaccttcgctanctatcatctccaattctcgcctctccaacacactctccgtncccgtnctgaacaaaccacaggttcaagggtcaagcatcaagtgcgttcgtgttngtggtgtggagattccgaacaacaagcgaatcgagtactcgctgcagtacattcatggngttggnaggaccagagcgaaacagattctctgtgatatncaaatggtaatacaatcagaggnactcatgaggagag

SEQ ID NO: 17125 - DNA, 136 bp, Glycine max
  unsure (1)..(136): unsure at all n locations; Clone ID: 701045477H1
attgtttgcctaaatacaattaggtaagcgtaagggtacaagggaggcaaggcttcccaccaaaatcctttggatgaggaggatgcgtgtcctcaggcgcttgcttcgcaagtacagggaatcaaagaagattgnc

SEQ ID NO: 17126 - DNA, 140 bp, Glycine max
  unsure (1)..(140): unsure at all n locations; Clone ID: 701045480H1
acgaaaccctcntcatcttgttctatctgtgacgagcatcatggcctcaagancagtgttattgttggctatgtgtgtgcttccggcgatggttntggncattcgcccancaaagaaccctttttgcgtgaagggtcgtg

SEQ ID NO: 17127 - DNA, 215 bp, Glycine max
  unsure (1)..(215): unsure at all n locations; Clone ID: 701045482H1
ggacatatttggcgtgngatctatcaagaacaaccaccgtgagctcatagcagttgtttatcttcaagtattgtaagtcaggctttcattgctacanagtcaaggagctggacttacattgaaatggatagccatgatcatagctgtgtatgtgaattggggctttgcaaggattgaatggagtcaggttgctttcacctcaaagaaggattatg

SEQ ID NO: 17128 - DNA, 270 bp, Glycine max
  unsure (1)..(270): unsure at all n locations; Clone ID: 701045483H1
cttcctctgcgcaggaattaggaatattcgacaggtagagtttcttcaatggctcctaaagttgataagaagaatgatccaaaggcccangccttgaagactgctaaggcagttaagtcaggtgctacctttaagaagaaggtaaagaagatccgaacttctgtcactttccacaggccgaagaccttgaagaaggacaggaaccccaagtaccctcgcntagcgccccgccgaggaacnagcttgatcatatcagatcctgaatacccc

SEQ ID NO: 17129 - DNA, 273 bp, Glycine max
  Clone ID: 701045485H1
gggagtcagagaaaccctaggtaagaagaaaagatgccggctggtcatggtttgagatcccgcaccagagattccttctctcgtcctttcaggaagaagggaaccatcgccctcaccacatacctgagaacctaccacgtcggcgactatgttgacgtcaaggttaacggtgccgttcacaagggaatgccccacaaattctaccatggccgcaccggacgcgtctggaatgtcaccaaacgtgctgttggcgtcgaagtcaacaagcaggtt

SEQ ID NO: 17130 - DNA, 272 bp, Glycine max
  unsure (1)..(272): unsure at all n locations; Clone ID: 701045486H1
gattgagttccctttgcctgatagacgtcaaaagaggctcgtatttcaggtttgcacagccaagatgaacttgagtgatgaggtagacctggaggattatgtttctcgtcccgacaaaatcagtgctgctgngatatcagctatttgtcaagaagctggaatgcatgctgttcgcaagaatagatatgtcatactgcccaaggacttcgagaagggttacaggacaaacgtgaagaagcctgatactgacttcgattttacagtgatgatgt

SEQ ID NO: 17131 - DNA, 275 bp, Glycine max
  Clone ID: 701045487H1
aaatatagaacacactaccctcaacatagtaaagcagctggtgcaagtgaagcaatggctcaaaccatgttgctcatgtctagtgtctctagcagttattccgtggatttgaagaaagaccttttcctccaattgcagagtcaaagtttaaggcctaagttctctcaactctcattcaacccacttccaccatcaacttcttccttttcttcaccccgtacattcacaaccctggctctcttcaaatctaagacaaaagccgctctgctaagata

SEQ ID NO: 17132 - DNA, 149 bp, Glycine max
  unsure (1)..(149): unsure at all n locations; Clone ID: 701045488H1
gaanacgacgacgcattgaatggngantcanaaggcatcggcgtattacganaacagagcggttcagttcggggtagtgagcaccgaatggctcnctcangcccagtccgccaccgtccattctcctcctcacaacaacgatgacgacg

SEQ ID NO: 17133 - DNA, 273 bp, Glycine max
  unsure (1)..(273): unsure at all n locations; Clone ID: 701045489H1
gttttttacttgaattttcttcatccttctctgttctcctagaacttgattacttgaacattccctatgacagatgaggtggttcttctggatttctggccaagtccatttgggatgagggtcaggattgcacttgctgaaaagggtatcgaatatgagtacaaagangaggacttgaggaacaagagtcctcnnctcttacaaatgaacccggttcacnagaagattccggntctcatccacaatggcaaacccatttccgatccctcatgc

SEQ ID NO: 17134 - DNA, 147 bp, Glycine max
  unsure (1)..(147): unsure at all n locations; Clone ID: 701045491H1
ctagaacaactcttcacacaacacaactttttctagcattgtagcatcatgactggcaangacatcctccatataatgncggtgncagcagggtttgcaccaccngacacaggggnaggacaaggcgaaatatcngaacncatcaca

SEQ ID NO: 17135 - DNA, 276 bp, Glycine max
  unsure (1)..(276): unsure at all n locations; Clone ID: 701045492H1
gtttttcttcttcagaaagatagtgaatatctaagtngccatgaggtgttcctcaggcgtgttgcctctgccttcaacaactttgcagaatctactgaaaaatcatgccgtgaaaaatgtatggaggacttggtaagcaccacaagatatgtttcatggtctctccacaataagagtcgggctgggttacgtcagttcttagattcatttggtggaacagaacattccaatgcttgtaataatcctacagcaatgttctatcacaaacgagtgcac

SEQ ID NO: 17136 - DNA, 218 bp, Glycine max
  unsure (1)..(218): unsure at all n locations; Clone ID: 701045494H1
gcctgcaggtggtcaaagtaacatcttatttggtgaagcatccgttgagaagacagcaaagaagatacataaccagaagttcgcggagtgacaggcaataatattttccaaggagatgttcctccaggctcagctgagaagcctctgagcagggctaagctcagagaaatgactggcagtgactatttgctgatggaaagacaganatcaaagcccct

SEQ ID NO: 17137 - DNA, 137 bp, Glycine max
  unsure (1)..(137): unsure at all n locations; Clone ID: 701045496H1
ttntctnnttctctnctcactgcancgcttcaggttcttctgaaaagatgtctcgcgtgtatgttggtaacttggattcacgagtcaccgagagagatctcgaagacgaattccgcgttttcggagttattcggagt

SEQ ID NO: 17138 - DNA, 239 bp, Glycine max
  Clone ID: 701045501H1
aaaagattgatgacaagaaatatagatgtggagcgccctttgctaaacggactgcttcaaaatcagatacctgactaacactgcatgtagcatactcaaagtccttcccgcttccaattttccttgaagatcattctttattatttcttgtatccatgttcaaataggttagataaaccaatcttagggaatggggttgtagacagaacgccctagaattttgtatattagccactagg

SEQ ID NO: 17139 - DNA, 236 bp, Glycine max
  Clone ID: 701045503H1
agattatcctaagtctttgggaatagtgctgcaatggcttcaagtcaggaggaggtgacccttttgggagctactggaagcccatttgtgtgcagggttcatattgccctcaagttgaagggagttcaatacaaatatgtcgaagaaaatttgaggaacaagagtgaactgcttctcaaatccaacccagttcacaagaaggttccagtgtttattcacaatgagaagcccatagc

SEQ ID NO: 17140 - DNA, 232 bp, Glycine max
  Clone ID: 701045505H1
gtaattgagttcgatcaaatagctcccagtactttaattgatttctgaatatcatcacttaatttgaaggaaagatggtgagcgtagtgagatccgccaggcacaaagggcagaaggcccagcaaccatccttgccattggaactgcaaacccaccaaactgtgttgatcagagcacctatcctgactactacttcagaatcaccaacagtgagcacatgaccgagctcaaa

SEQ ID NO: 17141 - DNA, 232 bp, Glycine max
  unsure (1)..(232): unsure at all n locations; Clone ID: 701045506H1
ctgttttccgctgcttgtttgtgcctgcgtagttacaaagtaaaaagagggaggactaggacaaaagtngttggcagtcatcatgtcgagcgcttcgttgaaggagatgaggaacggtggtgaggattatagcaannnnnnnnnnnnnnnnnnnntgagggacttgtatggagaggattgtgccactgaggaccagcttatcactccatggactttctctgtggccagtgga

SEQ ID NO: 17142 - DNA, 232 bp, Glycine max
  unsure (1)..(232): unsure at all n locations; Clone ID: 701045507H1
gccgagcttaggagaatagaagaggagcaggaggcatcaccattgncacaatggttaaaggtcgccaaggagaacgtgtaagactctacgtcaggggttcaattcttggatacaagaggtccaagtcaaatcaatacccaagcacctccctaatccagattgagaatgtaaactctaaggaagaagttgcgtggtactgtgggaagcgcatggcttacatctacaaagcgaa

SEQ ID NO: 17143 - DNA, 231 bp, Glycine max
  Clone ID: 701045508H1
gccaccctctctggccacagttgtcatcatgagctcgaaactgcaaggatcaatggattgctgggtaatattgatgcaaacactggtgatcctcaagttggttgggacactgatcagtttcttgtagatattcaagaggcgacactgattatgctcagtgtgatcagaaatggaggacttgcacccggtggattcaacttcgatgcgaaattgcggagagagagcacagat

SEQ ID NO: 17144 - DNA, 229 bp, Glycine max
  Clone ID: 701045509H1
gcactcatcattcttcgtttgtctaagatccgccttctctgaattgtaaaaatgtcgctcggagaaactgcttgttcatacgcagctctcatccttcatgaagatggaatcagtgtaactgccgacaagatcagcaccttgttggaaactgcaaaggttcaagtagatacctattggccaaccttatttgctaaacttgctgagaagaaaaatctggcgatttgatagc

SEQ ID NO: 17145 - DNA, 230 bp, Glycine max
  Clone ID: 701045510H1
gccctttcgccgccttattctgattccagaaacatcttcaatcaatctcccctcgtctcctctcaatcaagtttgaagctgagaaataatcatggccggtggtgcgaatttcgtgcagagggttctctcttacgtggtgaatgaagtggttgtcaatgggcttgccaacaggtacccctggcatttcagaggtttgcagtgaggacatcaaaaagaattgaagatatttc

SEQ ID NO: 17146 - DNA, 144 bp, Glycine max
  Clone ID: 701045511H1
ctactcccacctaggattccgaccgccaccaacgttacccgctgctctgctttgccttctctgcctcctcgcggcaccaacactaaaaccactttgctcttatcttccctcaaccacttctcagtgtcccgaaaatcttctctg

SEQ ID NO: 17147 - DNA, 227 bp, Glycine max
  Clone ID: 701045512H1
ccctcgagaaggattatgaagaagtgggtgctgagtctggtgagggccaggatgaggacgaagactactagaatctacttcagattcttgttcttgtggtctttttctgttgttgtgtttgatgttcagatgtaccagtaccgttgtgggttttaatttggatgcattgtttttatgcttcgctgcttctgttacagacccaaacggaatggcaatatatattttga

SEQ ID NO: 17148 - DNA, 231 bp, Glycine max
  Clone ID: 701045513H1
cgccgaagcagcaatcaaaagctgatcttgcgaagaagcagaagatcgtagaggacaaaaccttgcggtctcaaaaacaagaacaagagcaaaaatgtccagaaatacgtccaaaacctcaagcaatccgtgcaaccaaatcccgactcttcaaaactcgctgccaagaaaaagaaggaggaagagaaggccaaggataaggagttaaatgatttgttcaaaattgctgtt

SEQ ID NO: 17149 - DNA, 228 bp, Glycine max
  unsure (1)..(228): unsure at all n locations; Clone ID: 701045514H1
attttttctaccccgaacatctgctgttgggttttatccctccattgctttgcactgccgccgataacaattttctgtatcgtgtatttttttttnctttgttcacagctctgngagatcttcattcgccgattttaaaagatgagtaagcttcagagtgatgctttgcgtgaagccatttcaggaatcanggccgattccaaggagaagaatcgcaaatttgtggng

SEQ ID NO: 17150 - DNA, 228 bp, Glycine max
  Clone ID: 701045515H1
gaagaagtgaacgagcttgtttatgatgacccgccagtgatttacacccgctcacattctttggttggcccttctacttgtgttagtcaatcacttaagcttggcaagctcactattcatgagaccgaggattcattggaactagtggatcatgtcaatggagagaccattaaagacatcaaagattcttcatttgtcgacaaatcattgaaagatgaagatgggaat

SEQ ID NO: 17151 - DNA, 230 bp, Glycine max
  unsure (1)..(230): unsure at all n locations; Clone ID: 701045516H1
gggagtcagagaaaccctaggtaagaagaaaagatgccggctggtcatggtttnagatcccgcaccagagattccttctctcgtcctttcaggaagaagggaaccatcgccctcaccacatacctgagaacctaccacgtcggcgactatgttgacgtcaaggttaacggtgccgttcacaagggaatgccccacaaattctaccatggccgcaccggacgcgtctggaa

SEQ ID NO: 17152 - DNA, 235 bp, Glycine max
  unsure (1)..(235): unsure at all n locations; Clone ID: 701045517H1
cgttttcaaaacttttgcgaaatttctatcttcttcaccttgctctcaccttctgggtaatgtttgaaacttggtgttagctgagctgtttgacaaaaatgaatattgcacaagttacagcatggcagcctgggatttgtgtgaaaaatntgtctcagttgcaccggcttcaatctaaancatgtgttataccaaagagttttggtcctctcacttgtgttcgactgagcttaag

SEQ ID NO: 17153 - DNA, 234 bp, Glycine max
  Clone ID: 701045518H1
ttttgttaccattgcagaaagaaagagaagaatacgaagtaatagttgaaaatggaaagctagtttacaaaaaggatggtaggcttgtggacactgatgagaaatccaaatggatatttgttcttagcaccacaagggccttgtatgtggggagaaaacaaaagggtacgtttcaacactcaagctttctttctggcggtgcaaccacagcagctggcagattagtggcccatc

SEQ ID NO: 17154 - DNA, 234 bp, Glycine max
  Clone ID: 701045519H1
gaaaaatgaagtctttccatctcacagtgacagctttgtgctgtgtagtggttgtgcttggagtgcttccactctccctagatgcacaactagatccctccttttacagagacacttgtcccagggttcactccattgttcgtgaagtcgtcaggaacgtttcaaagaaagatccccgtatgcttgctagtctcattagacttcactttcatgactgctttgttcaaggatgtg

SEQ ID NO: 17155 - DNA, 233 bp, Glycine max
  Clone ID: 701045520H1
ggaaaacccacaggcacgctgagcatggaacacagaaccctagaactcaacctggcttcagcaaaggatctcaaagacttgaatatattctcaaagatggatgtatatgctgtgctttcactctccggcgatcaaaagaccaagactcccgtccacagaaacggcggcaccaacccaacatggaattttccggtcaagttcacttttgatgaatcggtggcgcggcagaaccg

SEQ ID NO: 17156 - DNA, 231 bp, Glycine max
  Clone ID: 701045521H1
gtgggcgggttgttgatatgttgcaaggggaaatctctgttatttgtcaggatattaagcttctaaaagagaaatttgatgctaatcttccgttgagtaaatccttcacctcaagccagactagttgcaagttagcttcatcaggttcttcccacaaaacattggcatctgatgcgggttctgaccatagtgagtcatctggaatacgtaagacaagctggacaacctcaa

SEQ ID NO: 17157 - DNA, 231 bp, Glycine max
  unsure (1)..(231): unsure at all n locations; Clone ID: 701045522H1
atttttgtgtcaaaatagggaactgtagttcttgttttccaaccagcagaggaaggaggtggaggggctaagaaaattttagatgctggagccttagaaaatgtcgcagctatttttgggttgcatgtgacacctaactttccaataggtgaagtggcctctaggtctggtccattgttggcaggaagtggtttctttgaagcaataataagtggaaaaggaggtcatgnc

SEQ ID NO: 17158 - DNA, 231 bp, Glycine max
  unsure (1)..(231): unsure at all n locations; Clone ID: 701045524H1
cggcaacagactaagttgtttctctctctagccctagggtttcgttctctactaccgttctttcatcagatcgctgccgtttctggcgtcattccgataattcggcggcatgaagctaacagtgaagactttgaaagggagccatttcgaaatcagggttcaaccctccgatactgttatggctgtcaagaagaatattgaagatgtacaaggcncaagataattacccat

SEQ ID NO: 17159 - DNA, 110 bp, Glycine max
  unsure (1)..(110): unsure at all n locations; Clone ID: 701045527H1
gaattcagacactgactgaaatctcgtgntccctcttacttgtcttatggattgtccatgtatgctngcaatagcctgttnnnggtgtatnaganaaaggtnggnttttg

SEQ ID NO: 17160 - DNA, 226 bp, Glycine max
  Clone ID: 701045528H1
cttggtggtagtagcaaatattcaaatgagaactttgaaggccgaagaggggaaaggttccatgtgaacggcacttgcacatgggttagtcgatcctaagggacgggggaagcccgtctgatagcgctctgtgcgcgtactccgaaagggaatcgggttaaaattcctgaaccgggacgtggcggctgacggcaacgttagggagtccggagacgtcggcgggggc

SEQ ID NO: 17161 - DNA, 228 bp, Glycine max
  Clone ID: 701045529H1
ttaatctgggctgcgatttgcactcccgcggattacaacactcgccctctcgacaccatttacagcaatttcatcgacgcgctccccgtggtgaaatactgttccgagaacaacaagcgccttatccatttctccacttgcgaagtgtacgggaaaacgattggagcctttctccctaaagatagtcctcttcgcaaggatccggcatactatgttcttaaagaagac

SEQ ID NO: 17162 - DNA, 227 bp, Glycine max
  Clone ID: 701045530H1
ccagatctgtagacaatatgggaagcactggtttgctacatttgatatgccttgtcattgctttagtaagtgtgtcgcttgtgcaagcagaagatgcgtataagtatttcacatggacggtgacttatgggactctttatcccttggctagtccccagcaggttattcttatcaatggtcagtttcctgggcctagacttgacttggtaactaatgaaaatgtaatt

SEQ ID NO: 17163 - DNA, 226 bp, Glycine max
  Clone ID: 701045532H1
gtgttcgcagtgcactgcatatccgtaaggtgtagttgatgcaagtgacagtaattttccaacatatagttaacatataggtggagaattcggctgcaaattcaactatgtgatgactggatagttagctcgagccgaatcggctcgagcggctcgagctcgagccgcgcaaacaaaagatatggagtatgaagcaggatactatcttcatgacttaagggagcat

SEQ ID NO: 17164 - DNA, 236 bp, Glycine max
  Clone ID: 701045533H1
cctaacttgaagaatccaaacaggtgtgttgtggaagatgagtggtgccgttagggctgcattgaaatccaccactagtgtttgtgcacttgtgcagagaagccatggcctcctcccaatgaggtgcttctccactgaggcagaacagccacctctgaattcaacgccccgccctcctccgttctttgagactgaccattcaggtttgacatatggtaatctgctcggcgttcgta

SEQ ID NO: 17165 - DNA, 234 bp, Glycine max
  unsure (1)..(234): unsure at all n locations; Clone ID: 701045534H1
cttaatttctcatctcatcatttctaattctacctcttttntcttgcactaacaatccaagatgaataccaacaacgacaccgaaaaaaaccaatcatttccagaagcacaaggnnnnnnnnnnnnnnnnnnnnnnnnnnncaatgttgggactgagaattggggaactcacataatgggcacccctgctgttccaagcagccacccagataacaaaaaagcagctttacaaag

SEQ ID NO: 17166 - DNA, 229 bp, Glycine max
  Clone ID: 701045535H1
cgtgtggcttgcttggacgagagtgagttgcagtgcatagtgattgagagcagaagaagctgcttaagcttaacttaaatgggttttagaattagcggttcctcctcttcatcatgcttttgtttgcaacgtacgcttcttcctccgttaacagcaatagccacttccactcgtggcttcaagaggaggagtaattgcataccgagttgttcagtatcttatcgcaagt

SEQ ID NO: 17167 - DNA, 230 bp, Glycine max
  unsure (1)..(230): unsure at all n locations; Clone ID: 701045536H1
ggcgaagaggatggcaagggtttcagagaggagcttgcgactttggcgaaggaagtggctaggttggagacggttcgtgtttatgcagagacagcactgaaacttgatacnttggttggtgatattgaggatgctgtatcatttaccatgagcaagaacataaggaaacattctagtcaaaattcacaagaaatgcatatgcttgctattaaaacactgaaaacaacaga

SEQ ID NO: 17168 - DNA, 230 bp, Glycine max
  Clone ID: 701045537H1
gaaatgcagaaagaagatcttttgtcaaaaccagagcagataagatcaaagattgttgaagggcggataagaaaaagacttgaggagctggcattgctcgagcagtcctacattaaggatgataaggtagcagtaaaggacttcatcaagcaaactattgcaactattggagaaaatattaaagttaagaggtttgtgcggttcaaccttggagagggtttagagaagaa

SEQ ID NO: 17169 - DNA, 229 bp, Glycine max
  Clone ID: 701045538H1
tgaaatcttagtttctgcccgaaactgaaactgaatcgaaattcaatacaatgagttcctcaactacagtgaggaagttgcaggtggtgtcccctgttcctgcggacatagacattgcaaactccgttgaacccgttcatatctcccagattgccaaagacctcaaccttagtcccaatcactatgacctttacggtaaatacaaggctaaggttttgttgtcggttct

SEQ ID NO: 17170 - DNA, 231 bp, Glycine max
  unsure (1)..(231): unsure at all n locations; Clone ID: 701045539H1
aatatcctaaagtgtttttnttcttcttcatcaccatgtctttactttcagacctcatcaacctcaatgctctgcagaatccacagaaaagatcattgctgagtacatatgggttggtggatctggtatggacctcagaagcaaagccaggactcttcctgggccagtgagtgaccctgcaaaacttccgaagtggaactatgatgggtctagcacagatcaagctccagg

SEQ ID NO: 17171 - DNA, 228 bp, Glycine max
  Clone ID: 701045540H1
ctcctcagcagtcgtcagaaagactccataacccaaaaatgcctttcaagaggtacgttgagattggaagggttgctcagatcaactatggcaaagagtacgggcggctcgtgatcattgtcgatgtcattgaccagaatagggctcttgttgatgctcccgacatggtgaggtcccaagtgaacttcaagaggctctcgctcactgacatcaagattgatattaaga

SEQ ID NO: 17172 - DNA, 227 bp, Glycine max
  Clone ID: 701045541H1
agattttgctgctgttgctgttggtactaatcagtgtaaaaatggttatccttgtccaccatttaagattattgttctagacgaggcagattcaatgactgaagatgctcagaatgccctgaggcgtacaatggaaacttactctaaagttacaaggttcttttttatatgcaactatgttagcaggattatagaaccacttgcttcaaggtgtgcaaaattcaggt

SEQ ID NO: 17173 - DNA, 225 bp, Glycine max
  Clone ID: 701045542H1
agcaatttatcaagcctgtcattcctgagaagtacctggatgagaagaccatcttccaccttaacccttctggccgttttgtcattggtggccctcatggtgatgctggtctcactggaagaaagatcatcattgatacctatggtgggtggggtgctcatggtggaggtgccttttcagggaaggaccctaccaaggttgacagaagtggtgcctatatcgtga

SEQ ID NO: 17174 - DNA, 225 bp, Glycine max
  Clone ID: 701045543H1
gaggcaggctctgtatgcttccaagatttgtagttatgctcaggggatgaatttgttgagggctaagagtaatgagaaaggatggaacttgaatttgggggagttagctaggatttggaagggagggtgcatcataagggccgtgttcttggaccggatcaagaaggcttatcagaggaaccctaatttggcgagtttgattgtggacccggagtttgcaaggga

SEQ ID NO: 17175 - DNA, 226 bp, Glycine max
  unsure (1)..(226): unsure at all n locations; Clone ID: 701045544H1
taaaaagcctgctgctgcccaaaagaaaccacatgaagcacttggttcctcacctcctcctgcaaataaanaacaaaaaacttctgggggatctgtagaacaaagcattgaacaacttaatgatgtcactgctgttagtggagttgacctcagggaagaggaagagcagttattttcagggcccaaagaggatagtcgagtgtcagaagcttctcgaaaggctgtg

SEQ ID NO: 17176 - DNA, 224 bp, Glycine max
  unsure (1)..(224): unsure at all n locations; Clone ID: 701045545H1
gtgagtttgttgatcgagataactagaaacagtgtgatgaaaatgaaggtccttgttttcttcgttgctacaattttngtagcatggcaatgccatgcgtacgatatgttccctctccgaatgaacactggctatggtgcccgtactccggaggtgaaatgcgcaagttggaggcttgctgtggaagcacacaacatctttggctttgagaccattcctgaaga

SEQ ID NO: 17177 - DNA, 226 bp, Glycine max
  Clone ID: 701045546H1
ttgttttcatccaaactctcacactgcctcttcctctcagattcaggttccaactcttctctcctctcgccgtctagcaattttctattttctcctctcatggcttcagattccaaaaaggatttccctgctgatgacaaagctggaacagaagagagtaaaacatccaaagatgagacttcatctaaagattctccagcagaacaaagagcgacagtacttttgg

SEQ ID NO: 17178 - DNA, 227 bp, Glycine max
  Clone ID: 701045547H1
ataacctctgtcaacacctgtctgtggcgcgcgagagagaaatcggagatgtcatcaaaccctaacgatcctcgttcagccctcggcggcgagaccctacgtggcgccgcagatttcgccgcaggaccttccgatcgactacgccggcttcatcgccgtcatatttggcgtcgccggcgtcatgttcaggtacaaactgagctcttggctggcgctcatattctgcg

SEQ ID NO: 17179 - DNA, 226 bp, Glycine max
  unsure (1)..(226): unsure at all n locations; Clone ID: 701045548H1
cgagcttgctggaactaatggagaaaccaccactcagggtctagatngccttggtcagcgttgtgccaagtactacgaagctggtgcacgttttgccaaatggcgtgcagtgctgaagattggtcccaacgagccatctgagctgtctatccatgagaacgcctatggcttggctagatacgctgtgcatatgccaggagaatggcctggttcccattgttgagcc

SEQ ID NO: 17180 - DNA, 232 bp, Glycine max
  Clone ID: 701045549H1
gcggcatcgttgtattgttcttacacatctttctctctctcactttcggtttctaaaccaaaaccctaatcgagatcacaatcggatcgtaaacaaacagagaccagccatggacggtgattcctcttggagtgctcgactctcttccgcttccaggcgctaccaatccgctcttcaatctcgatcagacatgttcatgggttttgatgaaaatgatggggacgatgatata

SEQ ID NO: 17181 - DNA, 230 bp, Glycine max
  Clone ID: 701045550H1
gaagaccaagcgcaccatggacagcaaaaacgtcgtcgtttgcgacaacggaaccgggtatgtgaagtgtggttttgctggggagaatttccccacatcggtttttccctgtgtggtgggaaggccaatgctccgttacgaagaatcactcaccgagcaggcgcttaaggatattgttgttggagaagggtgtgcagacttgcggcatcagcttgatatatcttatcctg

SEQ ID NO: 17182 - DNA, 176 bp, Glycine max
  unsure (1)..(176): unsure at all n locations; Clone ID: 701045551H1
gaagcgaagatgaagaggcgacgaagcagttgcgtttctttgagtcggcgatgggtattgagctttcttcgctggagttggaatccctcaaagataataagtgcattttggaggtatcagaagccgctgattcagacgtgacagtattgggcaaaactattagggcancgtttggc

SEQ ID NO: 17183 - DNA, 227 bp, Glycine max
  Clone ID: 701045552H1
gagaaacttgacaaatgaacagcagcagcaattactgaagtatctcccagtggttgatactgctaaatttcctgatagccttagaaacatgttcaatagcttccaattcaaggagaacttaatctattttcagcaacttctcggggaaggagtctttaacatctctttgttgggggcaaaacctgaagaatggaagacattagaaaggcttgcattatctaatctgt

SEQ ID NO: 17184 - DNA, 230 bp, Glycine max
  unsure (1)..(230): unsure at all n locations; Clone ID: 701045553H1
caagaaagctaaaactgctactcctgaaaagactaatggtaagaaaaangtacatgtagcaacnaccccatccttcgaagaaaggtggaaagacacccaacagtacaaaaggccagtctcccagttctgctggacaactatcttgcgcaagttgtaaaaagtctttcaccaacgaagtcggtctgcaacaacataagaaggctaagcatggtggtcagtgaatattgata

SEQ ID NO: 17185 - DNA, 227 bp, Glycine max
  Clone ID: 701045554H1
tattgccgccaacccaacaacactctttgatgatggcatctcattcaccgcggattttatcactcacccgaagggccttttcttcttgttcctttcaaggagaaggggtttctatggttcaaggagcttccagaggaattggcctcgaatttgtaaaacagcttttagagaacgatgataaagagcatgttattgctacatgccgtaatcctagtgcatcaactggg

SEQ ID NO: 17186 - DNA, 225 bp, Glycine max
  Clone ID: 701045555H1
gcaaaaattggagctgcttttgactgctggcattggttctgatcacgttgatctcaaagctgcagctgctgctggtttaactgtggcagaggtcacgggaagcaatgtcgtgtcggttgcggaggatgaactcatgagaatcctcattctaatgaggaatttcttgcctgggtaccatcaggctgttaagggtgaatggaatgttgctggcattgcacatagagc

SEQ ID NO: 17187 - DNA, 228 bp, Glycine max
  unsure (1)..(228): unsure at all n locations; Clone ID: 701045556H1
cgccaacgccggcaacagcaaacgcaagctcgaggacgacttcnacgccttcacggcgtcgaaggccgcggatctccgcgaagccgttgagagaatcgcaaattccgttcaagatccatattgtgaaggatcacgacatgaaggagaggntgtgcttggaggtggagaggcttgggttgagcgcggtgattatggggagtagagggtttggcgctgtgaggcgtggca

SEQ ID NO: 17188 - DNA, 226 bp, Glycine max
  Clone ID: 701045557H1
aacgaacaccgtgattcctctcgccgtagatctgttccatttcgccgttcatccatggccgacgacttcgaattcgccgacaaagtccctccttccttcgatcgcgcgggttcaaaagggttcaacccagctttaattgttctcctgcttgttggtgggttgctgttgacattcctcattggaaactatgtactctacacatatggcacagaagaccctccctcct

SEQ ID NO: 17189 - DNA, 223 bp, Glycine max
  Clone ID: 701045558H1
attctttcaatttgttcatcaatagcttcgttctactacttgataccttcctgttatattgctaattaggctttctctgatcaaaattaattaagaatgagcttgaaagctctttttgttgggtgcataatatggttgggtttggtagaattgtcaatcggaggaatagtgagacactacaagtttgatgtggagtacatgatcagaaaaccagattgcttgg

SEQ ID NO: 17190 - DNA, 223 bp, Glycine max
  unsure (1)..(223): unsure at all n locations; Clone ID: 701045559H1
ggtgatattcatgggcaattccatgatcttgcagagctttttcgcattggagggaagtgtccagatacaaattacttgtttatgggagattatgtngatcgtngctattattctgttganactgttacgcttttggntgcccttaaagtgcgttatcgtcagcgtatcactattctgaggggaaatcatgaaagtcgccagattactcaagtttatgggtttt

SEQ ID NO: 17191 - DNA, 224 bp, Glycine max
  Clone ID: 701045560H1
tgaaaaccaaatatggatcccaaccttggttccaagaaaacttgcacagtggatgcatctctacaaaggacgccttaaaattttctcttatctatcctcttcaaaatcttctggaatgtaaatcaaatatgggccctttccgcattcgtttaacatatactcacacaaaagggaatgataaatcttccgattgtgctgctgagacttgcaagagaagaaaaata

SEQ ID NO: 17192 - DNA, 223 bp, Glycine max
  unsure (1)..(223): unsure at all n locations; Clone ID: 701045561H1
gtctttctgtaatcactgctgatgttagttagcatttgtatggggttctatgctgcagttgatgtatttggatatttttnccttatttgggatcaagcaaggttttaaattacgattgccgtcacagtttcatcgtgttacttggtattgccgaaaattgtagataagtgcagctggaattgtggtcacgatgcagtcgtcaagagccacggttttgccgcaa

SEQ ID NO: 17193 - DNA, 223 bp, Glycine max
  Clone ID: 701045562H1
gtttgttgttgtaactcgttcttcttcttttgttgttctgtgtttgtgtttgttttttctctcacctgaaaatgtcttgctgcggtggtaactgtggttgcggaagctcctgcaagtgcggcaacggctgcggaggctgcaagatgtacccagacttgagctacactgagtcaaccaccaccgagaccttggtcatgggagtggcacctgttaaggctcaatt

SEQ ID NO: 17194 - DNA, 225 bp, Glycine max
  Clone ID: 701045563H1
cgttattctctctccgagcttcactctcttttcgcctctgctaaagggagaaaaatggggttctcctcctttctgggtcgtgttctctttgcctccctcttcatcctctccgcatggcagatgtttaatgaatttgatgccaatggtggacccatctcgaaagagttgattcccaaactcagtgtggtgaagaataatttatcctctaaattgggggtagcgcta

SEQ ID NO: 17195 - DNA, 225 bp, Glycine max
  unsure (1)..(225): unsure at all n locations; Clone ID: 701045564H1
cggaaggcancagcaatggcaagagcgactctccttcacttgctgcggtcacagagcctccgccacgtgtccaaaaacgctccttcagcatatcgttgttttgggtcctctacctgtcaacgacccattagccccaatccatcattcaaaacttcctcccatcttgctattttccaaagaagatgggcatcacaaatcccaactacagaggaagacgacaagatt

SEQ ID NO: 17196 - DNA, 229 bp, Glycine max
  unsure (1)..(229): unsure at all n locations; Clone ID: 701045565H1
caactctttctcacccgctangttntccttccatcgcatcttgatttcgcaacctcgtctagcaattctccatggagggtgctgggatggaagagaataatattattaatgatgataataagtctgangngcatttnacttctgccgctgcttttgtggagggtggaattcaggatgcttgtnatgatgcttgcagcatatgccttgaagctttctgtgatagtgatcc

SEQ ID NO: 17197 - DNA, 226 bp, Glycine max
  unsure (1)..(226): unsure at all n locations; Clone ID: 701045566H1
gtctttgcacttggagaatgggctagtntgtgtaagattgattcagagggaaaggctaggaaggtaactggttgctcatgtgtggttgtcaaggatttcggggaggaacatgaagcctataatgttgttctacagcatgtgaaagccaactgagttgctgcaggcatgcctagatttgtgggttttatttagcttgaagttattgtatgaggaatatttttgcctc

SEQ ID NO: 17198 - DNA, 228 bp, Glycine max
  Clone ID: 701045567H1
gtcattagcacttcttcttttcacactgccgctgcaacaatggcttcagagaagaaactttcgaacccaatgagggagataaaagtgcagaagctcgttctcaatatctctgttggcgagagtggagatcgtctcaccagagccgccaaggtgttggaacaacttagtggccaaaccccagtgttttccaaagcaaggtacactgttcgttcctttgggattagaaga

SEQ ID NO: 17199 - DNA, 226 bp, Glycine max
  Clone ID: 701045568H1
cacagtcggttcttccttctcaaatattcttgagatccccattttctccgaagcaaagccatggctaagggtcctggtctctactctgacatcggcaagaaagctagggatctgctgttcaaggactaccacagtgaccagaagttcaccatcaccacctactcaccgactggagtggctattacagcatcaggaaccaggaaaagtgaactgtttctggctgatg

SEQ ID NO: 17200 - DNA, 225 bp, Glycine max
  Clone ID: 701045569H1
cgcactgcggagagagaaattgagtttccgagataaccagttttctctttgattcatcaatggcaactgcgaggaccgtgaaggatgtttcgcctcacgatttcgtgaaggcttatgcttcccacctcaagcgttccggcaagatggagcttcctgagtggaccgatattgtaaaaacagcaaaatttaaggagttggctccatatgatcctgactggtactaca

SEQ ID NO: 17201 - DNA, 224 bp, Glycine max
  Clone ID: 701045570H1
aatgaatggtctagttggaagaaattaggtgatagcgtgcttcacattgagcttcgcaaatgggctgatatcatggtcatcgctccattatcagcaaacacccttggcaagattgctggagggttgtgtgacaatctactgacatgcatcgttcgagcctgggactacagcaagccattctttgttgcaccagccatgaacacttttatgtggaacaatccttt

SEQ ID NO: 17202 - DNA, 223 bp, Glycine max
  Clone ID: 701045571H1
tccagccacacgcttcagaagacatggcctcattgggtgggttacaaaatgtgagcggcatcaattttcttatcaaagagacaggcgtttaagtgcacttagagtgatgccatggaaatcaaactgtttgcttcctgatgcctaagcacaaggaacctgatgcttaagtgccagatgtttttcctctttgccaacttcttgcttgtgacgctcaagcgccaac

SEQ ID NO: 17203 - DNA, 224 bp, Glycine max
  unsure (1)..(224): unsure at all n locations; Clone ID: 701045572H1
ccctactcattctccatacctcaacgaagaggttaaagagacggcaacactttgctgtccgccttgaccgagcagagcttcgtcttggccctcgattttgccctaaagtactctcagtacacaacagacacnnnnnnnnnnnnnnnnnnnnnnaatggcaccgaagcagaccaaggctgagaagaagatcgcttacgatgcgaantgtgcgacctaatggagga

SEQ ID NO: 17204 - DNA, 222 bp, Glycine max
  unsure (1)..(222): unsure at all n locations; Clone ID: 701045573H1
ctttagggatgatgctgaaatccctaacctaaaattcccctcnctgatggctttaccagaggttgggttgagactgctcctttcacccgttacttccaaccttcttctccgcacagcatgctgttcaatagggcttgcgcttcccgtgtattccacgtttaaagctattgagaacaatgacccatatgagcaacaaaggtgcctattgtattgggcagctta

SEQ ID NO: 17205 - DNA, 231 bp, Glycine max
  unsure (1)..(231): unsure at all n locations; Clone ID: 701045574H1
ccacaccgcatcgctcgtggttccatcctttgtgtctgtntctctcttcggacacaaagcaacactttccatgtccatgtctctgtctcttcttcgtatcttgctcttcgccccacctttnccacctctctcttcttttccaactnccaactctttcttnccctctggcccttctttccttngccaaattaccaaatgccccctctcccctgcattgttttatggccacag

SEQ ID NO: 17206 - DNA, 221 bp, Glycine max
  Clone ID: 701045575H1
gaacaatccaactcttataatcttcttccttgttattttctccgtcttcttcgcggcgtcggcggacggcggcgacgatgagccgctgatcatgcaggtggtggagggcagcggcgtccggttgggagcagagcaccactttttggacttcaagcgcaggttcgggaaggcgtacgcttcccaggaggagcacaattacaggttcgaggtgttcaaggcta

SEQ ID NO: 17207 - DNA, 220 bp, Glycine max
  Clone ID: 701045576H1
gttaccatttgctcccagcactgagcttaaccgagcttcacaaagatgaatcgggaaaaattgatgaagatggccggttcggttagaactgggggaaagggcaccgtgagaagaaagaagaaggctgtccacaagacaacaaccacagatgacaaaaggcttcagagcaccctgaagagaataggggtgaatgccatcccggctattgaggaggtcaata

SEQ ID NO: 17208 - DNA, 192 bp, Glycine max
  unsure (1)..(192): unsure at all n locations; Clone ID: 701045577H1
attaagacaagaacgacagttccaagccanggaattggaaatgaaggcngataaaataggactgcagaggagtgagcaactgaaggaactgtacaagtttcttcttgcaggtgaagctgatccacaaactaaaaggccttctggctgcattagctccagaggacctctcagatttggagtggtattacttgg

SEQ ID NO: 17209 - DNA, 221 bp, Glycine max
  Clone ID: 701045578H1
attgtcccccctcaagaaggggaaaaaagcctccttagaaagctggtcttggcccagccattcacaaacatatgaaagactagttcctgagcttcctccaagacctttactagagaaactggctaaggaacttcgatggcgattgggtcttcgtctattcaacctggatattatccgtgagtatggaacaagaaatcacttttacgtcattgacataaact

SEQ ID NO: 17210 - DNA, 223 bp, Glycine max
  Clone ID: 701045579H1
gcgaaaatagaggacttgagctctcagttgcagacacaggctgctcaacagttcaggatgccagatatgggatctgtaacggcaaaacaagaagatgctgcagctgcagcagtgcaacctgaagaagaggaggaggttgatgaaactggtgtggagccccatgacattgatttggtgatgacgcaggcaggagtgtcaagaagcaaggccgtcaaggctcttc

SEQ ID NO: 17211 - DNA, 222 bp, Glycine max
  Clone ID: 701045580H1
taagatgaacaggactattattgttaggaggaattatctccattttatcaagaagtaccagaggtacgagaaaaggcactccaacattcctgctcatatatcacctgctttccgtgtgaaggaaggagatcacgttattattggtcaatgcaggccactttctaagactgtgaggttcaatgtgttgaaagtgatcccagctggatcttctagcggtgcaaa

SEQ ID NO: 17212 - DNA, 228 bp, Glycine max
  unsure (1)..(228): unsure at all n locations; Clone ID: 701045581H1
cttcncaaactagtaatattattcttcgaatccattttattattcataatgggtattttcacatttgaggatgaaaccacctcccctgtggctcctgctaccctttacaaagctctagttacagatgccgacaacgtcatcccaaaggctgtcgaagccttcaggagtgttgaaaaccttgaggggaacggtggccctggaaccatcaagaagattcactttcgttga

SEQ ID NO: 17213 - DNA, 226 bp, Glycine max
  Clone ID: 701045582H1
gaaaaattctggggtttagaggagaaaaggggagaaagggtgggtattgcttcacacaaacacaacagtgtctgctgcaccttgcaatggtttcgctatcaacatggtttcgctacattgcccacaagctcgaatactccttctccctcagctggaagaactacaaaggaggtcaaattacagacagagaggtacgtgatgttgtttggaaaaacttctttcaagg

SEQ ID NO: 17214 - DNA, 166 bp, Glycine max
  Clone ID: 701045583H1
agcatcacctccttttacactctcgaattcgcattctcttcactcattttccaatccatggccaagggagagaaaaaacctgcagagaagaagcccgcggcggagaaggctccggcggagaaaacaaaagccgagaagaagatcccgaaggacgcagcctccggcg

SEQ ID NO: 17215 - DNA, 223 bp, Glycine max
  Clone ID: 701045584H1
ggacttactagaaacagtccttatctgacacaccctatctttaacacgtaccacactgagcatgaggttctcaggtacattcataggcttcaatcaaaagatctttcattgtgccacagtatgatcccgctgggatcttgtacaatgaagctgaatgctacaactgaaatgatgcctgtgacatggcctagctttgctaacattcacccttttgcaccaattg

SEQ ID NO: 17216 - DNA, 222 bp, Glycine max
  Clone ID: 701045586H1
agaagagggagggtcctcaaaacggcgtaaaagaaactgtctgaaacgctcctcttctctctcaaaaggcaaaagggttgtgttcacgagtgaacggtgttgatttgtatttgctgatgcaattggtggttaggttggtttaagaagctaagaactgttgctactacttcacaatgggcgctgcttgttgtgttgctgccagagacaaaaccatacaaagtg

SEQ ID NO: 17217 - DNA, 222 bp, Glycine max
  Clone ID: 701045587H1
aaagctgggaaagaggttctcggatatgcctccaaggtggtgctcaccaaggatacaaccacaattgttggtgatggaagtacccaggaagcagtgaacaagagagttgcacaaattaggaacctaattgaggctgctgagcaagagtatgagaaagaaaagctgaatgagagaattgctaaattgtctggtggtgtggctgtgatacaggttggcgcacaa

SEQ ID NO: 17218 - DNA, 214 bp, Glycine max
  Clone ID: 701045588H1
cttctttccaaatcccaactactactcacactcactgcagatctcaatccatggctaccatcgttagcatcaaggcccgccagatctttgagcagtcgtggcaatccaaccgtcgaggtggatttgacatgctccgatggtacttttgctagagctgctgttccaagtggtgcatccactgggatttatgaggcccttgaattgagagatggag

SEQ ID NO: 17219 - DNA, 219 bp, Glycine max
  Clone ID: 701045589H1
caaagcaagagaagtagggtttttgtgcttggcaaaagaaagagaagagaagatggtgtcaggttcggggatctgcgcgaacgtgcgtggtggacgcccggcaccacatgctgggtcggctcgcctcgattgtggcaaaggagctgctgaacggacaaaaagtggtggtcgtgcgatgcgaagagatttgcatctccggtggtctggtgaggcagaaat

SEQ ID NO: 17220 - DNA, 219 bp, Glycine max
  Clone ID: 701045590H1
tgaatgtgagcattgcggggttggattcccagatggctgcagagagagctgtggatgtgattggtcaagggtatgacctttgcagcgatataaggttctcggcttgtaaaaacaggttgatcgagattgagaaaacacaaagtagagaccttgtttttcccggtggggttgttgtcaagaatgttcccaactccatcaagtgtgacaagggtgaacgaa

SEQ ID NO: 17221 - DNA, 221 bp, Glycine max
  Clone ID: 701045591H1
ctggatgttatcattgacagtgctggaaacaagtcatctggcaaatccttgatacctactaacccatcatcagctccacaaatttctgctgcggaagccgatgcgaatgcagatttctaacaatttaccttgctgcggatgatgcatctaaagttgatggttcctccaaaccgacagtctctggcattaatgttgaatgtgagttacatggagtgttgagt

SEQ ID NO: 17222 - DNA, 216 bp, Glycine max
  Clone ID: 701045592H1
tgactcctttgaacctaacgtaacctgatccgtggctctggttctggctctggctctgccctttttggttttctctcgttaccgaaaccagaagaaccatttgtggtggacatggatctggaccagtggatctccaaggtcaaagatggccagcatcttcttgaagacgagcttcaacttctctgcgaatttgtaaaagagatcctattgaggagt

SEQ ID NO: 17223 - DNA, 219 bp, Glycine max
  Clone ID: 701045593H1
gggcggtgcagtgcttcaaacccctttttctcttctcatttcctttcatcactctcttgcttcttttcttcttctcgcaattttccattttcacacttttagcgtaagaacatcttttaatggcgtcccaaatccgtgagtggtctggaatcaatacattcgcacctgctacccagactaagttgcttgaactcttgggaaatcttaaacaagagaatg

SEQ ID NO: 17224 - DNA, 162 bp, Glycine max
  unsure (1)..(162): unsure at all n locations; Clone ID: 701045594H1
atctcttaccaagatgttgtccaactatgggaaaatctcaagttcaatcttgtctcagtgactctatgttctagccttatagtgttccttgtncaccttttacttcatgagccgtccaaggggtgtttacttggtggattttgcgtgctacaagccagagcc

SEQ ID NO: 17225 - DNA, 163 bp, Glycine max
  unsure (1)..(163): unsure at all n locations; Clone ID: 701045595H1
cagcgagngagcgagcgagtcgantgtagggttctcgttgttcccncgtctttgaattcagttcgcgacgatggggnncatccccgatccaggcganttgancgantngantcagncgngcttcgncgagttccagcgcnaancttccctcatgaccaacngc

SEQ ID NO: 17226 - DNA, 220 bp, Glycine max
  Clone ID: 701045596H1
gcaagatgagggtctggttgctggtattagagggatagagtgggatgctgttgagttaccttctcagttcatggaaaactggtgttaccatagagaaactttaatgggtattgcaaagcattttgaaactggggagagtcttcctgaagaagtatatttgaagcttgttgctgctaggacatttcgagctggctctctaagtcttcgacagttaaaattc

SEQ ID NO: 17227 - DNA, 203 bp, Glycine max
  unsure (1)..(203): unsure at all n locations; Clone ID: 701045604H1
atacaaatcttcgtctgaatcctcttctctttctcgttcancgcatcccaaactcctcagatccgtcgtcgattcggttttcccgctttctaatttttcgttttccattttctcccgggatgcgtgagaagttcttgctctgtctgatctcggcgtgattctcacgtgacatgggttttggaacctgacgagtgcatgtatgc

SEQ ID NO: 17228 - DNA, 264 bp, Glycine max
  Clone ID: 701045605H1
caggacactaatgactatcatttattcagtgaatatgacatgaactctgtcgaggaacaattggagggagagaattcagtggatcctggtgaactctcatgggaaaatcactcttattcatatctcactaaagaaagcaccacccttttgagcaattcttcatctttggaagagatcaacactggctttgatatgacaagtctcaaacaagatgcttctccacagaaaccgaagtcttgcattctgtcttttgaggattccact

SEQ ID NO: 17229 - DNA, 262 bp, Glycine max
  Clone ID: 701045606H1
ctcagttacttctctctctcccggtgactgggttattccctctccaccatctttacgggacgtggcagacttatattgtgaatgatgagaaagtttggcacaagatagagaagggtgtgcctatggaatatgctgctacaattacagttaatcccttgactgcacttctcatgcttgaacactgcgttactttgaactcaggagatgctattgtgcaaaatggggctaccagcatggttggccagtgtgtcattcagattgc

SEQ ID NO: 17230 - DNA, 261 bp, Glycine max
  unsure (1)..(261): unsure at all n locations; Clone ID: 701045607H1
gnaacccataaatttattctagtaatacatttctgggttttgtttgccttgtgtgtatctttctattgacgagaataatggaatgttcccaatnctctgtttttttgcttttgtccatttttgtgggaatttgtttagcttctactgaggaacaggaaagggacaggattgccaagctgccaggacaaccagaaaatgtgctatttgcacactactcaggctatgtgactgtgaatgaagaagctgggagagcattgttct

SEQ ID NO: 17231 - DNA, 264 bp, Glycine max
  unsure (1)..(264): unsure at all n locations; Clone ID: 701045608H1
acacccctcncatggcatcttcttctggtagtnnaganacctctgnangtgcaaactcctncaccaacttcaccttctgccacanaccctttcatgacnacttcnttcnctgaccttcttgcttctcccanagacaanaacanaccaccacannnnnnnnnnnnnnnnttgtctgagagaactggctctggtgtccccaaattcaagtccanaccacnaccttctctgcctctctctccccctccnatttctccntnttcctat

SEQ ID NO: 17232 - DNA, 262 bp, Glycine max
  Clone ID: 701045609H1
cactctacttctctctcctattgcggctagggtttaggtttttctttcaccgtctccgttccttcaatcttacttattctctttcatctctgatggagacgttgcgggtttagttctaaggggtggttctggccttgggtttttggaacgtacggtgtcgttttggggttgggaaaacaaattctgagagatggcaaccacgaacccttttgatttgttgggtgacgacgctgaggaccctctcagctcatcgccgccgagc

SEQ ID NO: 17233 - DNA, 264 bp, Glycine max
  unsure (1)..(264): unsure at all n locations; Clone ID: 701045610H1
cgaanaatacgcaagtcgtctgttctgtcccgcgggagcagacgacctgtcttcatcgccaaacaacctacaaaaacattcatcaacgttcactattaatccatccatcnttaagtaagaaaataaggttcgatttttttatctttgttttgcttctgatccatcatggaggtgccgagttcctgggatgcccttcgcaaacaggcaagaaaacttgaagctcagttggatgagcagatgaattcttatcgtaaattggtttct

SEQ ID NO: 17234 - DNA, 254 bp, Glycine max
  Clone ID: 701045611H1
caaagatgagaattttaatttgtctcacactggaccgggagttgtcagcatggcaaatgcaggtcccaacacaaatgggagtcagttttttatatgcactgtcaagacaccttggctggatcagaggcatgtggtatttggccaagttttggaaggcatggccattgttaggttgatcgaatcacaggagacagataggggtgaccgtcctagaaagaaggtgaccattagtgactgtggtgagcttccaattg

SEQ ID NO: 17235 - DNA, 265 bp, Glycine max
  Clone ID: 701045612H1
gttagtagtgtgaaggagacaaaacagagttgttgaataaacattaatctaggccacagagttttgatgcctagcaacaaggatttggatagtgagatggggaccaaggtaaagaaagctatgaagaatttgaaaagggcaactactaataagccatccgaggatgctgactttttggtggtcctgtttgcaaacaacccgaacagaagctgctgaagaatactgcaactgttttgtatgtgggtaggattccacatggattcta

SEQ ID NO: 17236 - DNA, 268 bp, Glycine max
  unsure (1)..(268): unsure at all n locations; Clone ID: 701045613H1
gcgtggcctcacttctgctgggaaaagcaataggggtttacgtggcagaggacatctctaccacaaaaatcgtccatacacgcagggcaacctggaagagaaacaataccctctcccttcgtcgctaccgttgattttgttgcagttatcgtatgttgcttcattttctgagtatttggaggaaaatcgtcagttttggatccctgaaatcatgccttttttccccgaaaatgtctttagtnctaaaanagccgagttaangatgttt

SEQ ID NO: 17237 - DNA, 269 bp, Glycine max
  unsure (1)..(269): unsure at all n locations; Clone ID: 701045614H1
gccaganaagcccaaagaagaagcagaagaggaggctcccaagcctaaagccaagaatccccttgatcttctccctaccaagtccgatgatactggatgagtggaaaagactctactcaaacactaaaaccaacttcagggaggttgctatcaaaggattttgggacatgtatgatcccgagggatactctctctggttttgtgattacaaatacaatcaggagaatactgtttcttttgtgacattgaacaaggttggtggatttctc

SEQ ID NO: 17238 - DNA, 273 bp, Glycine max
  unsure (1)..(273): unsure at all n locations; Clone ID: 701045615H1
tccaattcaaccatggcttcgagactcacggtaacagccttggtgctgatagctttggcaacagtttctactaccaaacctacagcttcatcagtgggtaaattcatcgacgaaaccatcacttcccacaagatcgtcattttttccaagacctattgcccgtactgtagaagggcaaaagctgttttcaaagagttgaaccaagttccacatgttgttgagctcgacgagagagaggatggtncaangntcaggntntcagattatnntggg

SEQ ID NO: 17239 - DNA, 275 bp, Glycine max
  unsure (1)..(275): unsure at all n locations; Clone ID: 701045616H1
ggcanaataaaancaaaccaacgcagcagctgagttgaatccatcttctccatcacactcatcatccaatcaancggagctgncaagtcccaacgcgtggcacgttgacatcggagtcatcgaacggtgcaagattgttcctggtcggagacgaaaccattgtccatagatcattattantaatatntcacatttgttnggttgctccgaaaagagaggaccanacagcccttatcaaaactctgtctaacacatnacataggncaggcncaccc

SEQ ID NO: 17240 - DNA, 274 bp, Glycine max
  unsure (1)..(274): unsure at all n locations; Clone ID: 701045617H1
gtctcaattttctagggttttattcattttccgatggcttctgcagatgttgagtaccgttgctttgtcggtgggctacgcttgggccactgacgaccatgccctcgagagagccttctctcagtacggcgaantcgttganacgaagattntcaacgatcgtgagactggcagatccangggttttggntttgtgacctncgcctcggagcagtccatgaaagatgcgntncggngcgatgaatggacagaacttggacggccgtaacntcat

SEQ ID NO: 17241 - DNA, 268 bp, Glycine max
  unsure (1)..(268): unsure at all n locations; Clone ID: 701045618H1
gcgcagaacctaaccctcacgaaaacccctttcgattccgataactctcgttgtgccgaaaccctaaccttaaccgggttttctcgttggttgggattgaattggcatcggagggaggcgatcgattggaaaattggtagtagtagtttagcgttgaagaacgatgtctgctgctgtgtgcggaagcaagagatctttcttcgaagagcttcctccttctccgccactctccaagaggctccgttgtncctcttcgccgattcgattc

SEQ ID NO: 17242 - DNA, 265 bp, Glycine max
  unsure (1)..(265): unsure at all n locations; Clone ID: 701045619H1
cgtttttggntcggaacctcttctgcggcgtagaangggacactccaacgtttggaactactcacccaaaaaactacggtcctggttctcgcacttgccgtgtgtgtgggaatccacatggactgatcaggaagtatggccttntgtgctgcaggcagtgcttccgtagcaatgccaaggaaantggcttcatcaagtatcgctaaaagagcagttgtcaactacggaccaatattgtgttctggcataggatgttttgaggatg

SEQ ID NO: 17243 - DNA, 264 bp, Glycine max
  Clone ID: 701045620H1
gaaaacctcaggcagccgttgaccgtactttagacagtaaagctttcagaggatggacagaaatagacaatccatggacaaatgatgatgagactgacaatgatgagatgacatacgtgaatcttcaactgaatccggaaagatatactggttacactggtccatctgcaagaaggatatgggatgctgtctactctgagaactgccccaaatatccgtctcaggagttatgccaagaggaaaagattttgtataaattgatat

SEQ ID NO: 17244 - DNA, 253 bp, Glycine max
  unsure (1)..(253): unsure at all n locations; Clone ID: 701045621H1
agaagggttttttcttacctgagcagattcagagtgcaaagtgtgagagaaagacaatgccgaagtactcaatttcgaaccccatttctggtttcttttccccttttgttattcatcttcaacctcaccccttcgcacgcactctatggagcatcctcacccgtncttcaactcactccctctaacttcaagtccaaggttctganttcanatggngttgtncttgtnganttctttgctccatggtgtggac

SEQ ID NO: 17245 - DNA, 123 bp, Glycine max
  unsure (1)..(123): unsure at all n locations; Clone ID: 701045622H1
ggcagcagcganatctcctgagtaagcgagtttctctgttgtctactactctcttgtcaatgttacacatagtanagngagaaacaannaangctattggacgattatggagcangaagacac

SEQ ID NO: 17246 - DNA, 260 bp, Glycine max
  Clone ID: 701045623H1
gggcaacgttcagtcacctcccaacaatgatcctcgatatgtttcagcaaccagagcttttactcaaaaggaacttgaagacttgaggtctctgttcatcaatctggcaaatcaatcccagagcaacgggaaatacatctctccctccgtttttcagtcatattttggacttcatggccctcttggggagaggatgtttgatttagttactcaggagcgcaaggatcagaggctaacctttgaagacctcgtggatgcta

SEQ ID NO: 17247 - DNA, 112 bp, Glycine max
  unsure (1)..(112): unsure at all n locations; Clone ID: 701045624H1
gncaagctaaggcaaaccctcgttggcaagtttgtgatggcggcctcttcttcctctctactctgcctccgacgactcttcttctcgccgtcgcaggcgccaccaccgccat

SEQ ID NO: 17248 - DNA, 260 bp, Glycine max
  unsure (1)..(260): unsure at all n locations; Clone ID: 701045625H1
gccgcgtgantcgtactcggcgcattttccgtgtctcatcgagcgtttgttcggtcaaaaggcgaagtacgcggttacttatttcgccgatcgaaaaccgatctggtttcagggatcgttaattgcaggttctgttgaatctatttcgtcggaggtttcggcggcgccgtgatgatcgtgcgtggttttcctgcggtggatgttgatggtctcgtgtcgaaagacgcgaaacagagtaattaaacgcgcgattcgttgtg

SEQ ID NO: 17249 - DNA, 262 bp, Glycine max
  Clone ID: 701045626H1
caactattttccgctctccttgctccaaaaccccttattcagggtcaccgctgttagggttagggttagggttttgccgcacattctttctctagcaatcttcttctaccactttcccctcattctctctcttagtctcttcaattgtaagttttttgcgctagggtttcctctgctatctcttgtactcgaagctcgttcctttttccggatctcgatctatggatatccgcaagaggggaagacccgaacccggcttcag

SEQ ID NO: 17250 - DNA, 262 bp, Glycine max
  unsure (1)..(262): unsure at all n locations; Clone ID: 701045627H1
cttgattcagtaacaccaagagcgagattcttttgtcatncttgacattttaagagctagtttaagatacaacatacgtactggagcgaanaagatattgtaccaaatacgttgttttcatatatatcttgattactttaatggaaagtgaaggtgggaaagtgaaggtggcacaatgaaagattgaaccttgatattctacctaagtgctacaaattgaggcaagctagtgtggctcatcggccgttgttgatatcaactg

SEQ ID NO: 17251 - DNA, 266 bp, Glycine max
  unsure (1)..(266): unsure at all n locations; Clone ID: 701045628H1
ttgtgatctctccgtagggacaataccatgcctcttggtcctttctctaatccaaatatnctctccgttaatgctctcaccacaaacttcaatagactagccaaaagctaacaccaactataggccaaatcaccaataaatattatttcccgttcttttggcgtgttggccacccactgaacacatttgcactcacacatagaagnagagagaggccattggttggtttcagagatgggaagcatgcacatagaaaccccagaaat

SEQ ID NO: 17252 - DNA, 267 bp, Glycine max
  unsure (1)..(267): unsure at all n locations; Clone ID: 701045629H1
attcgcagaactttgtttcccaatttccattgcctccgcttccacctcgcaaccatgatcatcccggagaagaaccgcaaggagatctgcaaatacctcttccaagagggagtttgcttcgcgaagaaggacttcaatttggccaagcaccctgagatcgacgtgccgaatctgcaggtgattaagctgntgcagagtttcaagtctcgcgagtacgtgagagaaacttttgcttggatgcactattactggttcctcaccaacgat

SEQ ID NO: 17253 - DNA, 193 bp, Glycine max
  unsure (1)..(193): unsure at all n locations; Clone ID: 701045630H1
gcctgacacaaaatataaatattttggnaagcaagttggaagatttacagggtgtgcttgctactgagggactccaggattgctgaacttgaaacatcctcgagtagtgttaagatttctanggaagagtctgctagaaccgtagattcgtcggatgaaaaatgtaaagtggttgagtcggagcttgaggacc

SEQ ID NO: 17254 - DNA, 122 bp, Glycine max
  Clone ID: 701045631H1
cagaaatcgtttggcaaaactggctacagatttgagagcaccaagtactgagggtaaattgacatactactggatacagtacatatactagaatgaaaactgggcagaaggatatcttttac

SEQ ID NO: 17255 - DNA, 272 bp, Glycine max
  Clone ID: 701045633H1
gctgcttcatttaacatcattcctagcagcactggagctgccaaggctgttggaaaagtccttcctgctttgaacggaaaattgactggtatggcattccgtgttcccaccgtggatgtctctgttgttgacctcacagtgaggctggagaaggaagcctcctacgatgaaattaaaaatgctatcaaggaggaatcagagggcaagttgaagggaattcttggttacactgaagatgatgtggtctccaccgactttgtgggcgatagcag

SEQ ID NO: 17256 - DNA, 246 bp, Glycine max
  unsure (1)..(246): unsure at all n locations; Clone ID: 701045634H1
caagtcnaaattggattanntcatggatctgtanncatctcaatctaacatggatgctgatgacaaaatcaccccacaagtttttaagggacacaggaattgtgagacagtgaagggtgttaacttttttggacctaaatgtgagtatgtggtgagtgggtctgattgtggtcggattttcatatggnaaaagaaaggtggtcagcttattcgtgtcatggaagcagataagcatgttgtgaactc

SEQ ID NO: 17257 - DNA, 265 bp, Glycine max
  unsure (1)..(265): unsure at all n locations; Clone ID: 701045636H1
canatttattccaggagttcccactaagtagcaagctagatactcaagcctatggtgatcatacctgtataatagcaaaagaacatttggagcctaacttaggtgggctcactgttgagcaggctatccaaaacaagaagttgttcatcttagatcaccatgactatctcattccttatttgaggaaaataaatgcaaataccacaaagacttatgctacaagaaccatattttncttgaaagatgatggaactttgacaccatt

SEQ ID NO: 17258 - DNA, 260 bp, Glycine max
  Clone ID: 701045637H1
cctgcattgaggccaattaacactgaaggtgctcaaaaggtcgggcagaagaggggtagattgaatattgaggaagaggatgattcacagcccaaaaagaaggttcgtttgggggttcctgctacacaatggatttcagtttacaatgcaagactgccaatgaagcaaaggtaccattacaatgtagcggacgcaagattagcacaacatgtggagagagggattgctgatggccttctgattagttgtgtggctcttgt

SEQ ID NO: 17259 - DNA, 263 bp, Glycine max
  Clone ID: 701045638H1
caaccctgacactccttcttctccgcttcctcttcgatcatcgcttcagaatgccgccgaagttcgacccctacccagatacgtacgacgtcttcgtacgcgtcaccggcggtgaggtcggcgcggcgagttccctcgccccgaagatcggtcccctcggtctctcccccaagaagatcggagaagatatcgccaaggaaaccgccaaggactggaagggcctccgcgtcaccgtcaagctcaccgtgcagaaccgtcaggcc

SEQ ID NO: 17260 - DNA, 260 bp, Glycine max
  Clone ID: 701045639H1
ggcagaagcgagatctcctagaaagcgagtttctcttttctctctctctttcaattttcacatagtcagcgaaaacaaacaaactattggagatttggagcacgaaacacaacacaagcagcagccacctcgtttcattgttttgaattcaactgagaaaaacgacaacgaggatgtttcaggagagcagcgtgacgcggtggccgactcagtggactcgctaccacgacaagctattcgagcgggcccttctggtcgtg

SEQ ID NO: 17261 - DNA, 265 bp, Glycine max
  Clone ID: 701045640H1
cgcaaatccccaaacaaaaccctcaccaccctccgtcgtttcgcaacaaccctagccgcgaaacccttaccccgacgaccccaccgccgcctactacgaccagcttgccttcgccgccgggaactacgggcgacttccacgcgctccgccatcgtcctcaacaagcgcatacaagacggcttcctcaacaccaagattaccttcaacttcctcaaagacaccaacttctccccctccgtaatcgacaacctcgtccaaaccctct

SEQ ID NO: 17262 - DNA, 259 bp, Glycine max
  Clone ID: 701045641H1
ggaagaactgtatgaaattgatattcctctgagattcatagcctctgtgggcaccagagtgcatgggttggcatgttggtttgatgtgctattcaatggaagtactgtgcaaaggtggcttaccactgctcctgggtcaccgacaacccattggtaccagttgcgctgtgttctctctcagccaatttatgtcatggcaggacaagaaattactggcaggcttcacttgattgcccacaatgcacaaagctatacaata

SEQ ID NO: 17263 - DNA, 261 bp, Glycine max
  Clone ID: 701045642H1
gcacgttgttcccaccaccaccataccttcttcactcactctcgggagcgtcgaaaagaaaaatgttcacattagctacctcttcccaagtactgttaagacttcagccaccgcactcgatggagccaatggcccactcactcaccctaactccgtttcccgccaccgcttcctccttccgccaccgtcacctctacgccgttaaagccctaactcttcgctccgtcactcgccgtttaaaacccgcactcgttagagcct

SEQ ID NO: 17264 - DNA, 261 bp, Glycine max
  Clone ID: 701045643H1
catatctccatttccatttcctctctctcagtttccaagaatcttaagctatgggaaagtcttacccaaccgtgagcgctgattaccagaaggccgttgagaaggcgaagaagaagctcagaggcttcatcgctgagaagagatgcgctcctctaatgctccgtttggcatggcactctgctggaacttacgacgtgagctcgaagaccggtggtcccttcggaaccataaagcacccctccgaactcgctcacggcgcta

SEQ ID NO: 17265 - DNA, 223 bp, Glycine max
  unsure (1)..(223): unsure at all n locations; Clone ID: 701045644H1
ggcaaatcaaattanagtcacaacacccccaattcccgaaaccctaaccctacctcctacgcagccatggctaagaaacgaaagcttcgatcctctgaccccgaacccaccaaacccatcgagccacagcaacaggaccaagagccagttgaactcgaccaacagcnataanaacccaaccccgaacaaaccctagaagatcctaacacgatggccgtcgacg

SEQ ID NO: 17266 - DNA, 265 bp, Glycine max
  Clone ID: 701045645H1
gaagaagcagagggagtagcggcattaaaaatgcagatcttcgtgaaaactctgacagggaagactataaccctacgaggtcgagagcagcgacaccatcgacaatgtcaaggccaagattcaagacaaggaaggcattcctccggatcagcagcgtttgattttcgccggaaagcagcttgaagatggaaggaccctggccgattacaacatccagaaggaatcaacccttcatctcgtcctcaggcttcgtggtggcatcttg

SEQ ID NO: 17267 - DNA, 266 bp, Glycine max
  Clone ID: 701045646H1
cgactcagttgctgtcagcgagtgagtgagtcgtttctctgcagcaacaaggtttagccactaccaaacagacgggaaatgggtcgtggggtcagtgctggtggtggtcagagttccttaggttatctctttggcagtggggtgcctgccagcagtgcaaacagtcagcctgcaaatggtgctcgcactcaaaatgctagtgctccttcaccaccagtcgataagcaaagtccagcaccagcaccagcaccagcacctgcatcatc

SEQ ID NO: 17268 - DNA, 121 bp, Glycine max
  unsure (1)..(121): unsure at all n locations; Clone ID: 701045647H1
gnnnacgtgggcgcggctgttcccaactacnctccntncatatncagtcatttctacccacccanattnatacgnnctacccaatttggggatttttgcgagaancctacaaaagatgaag

SEQ ID NO: 17269 - DNA, 273 bp, Glycine max
  Clone ID: 701045648H1
aaaaaattatactaagttttactcttaacttgagtttataataaaacacccaaacatcactttaaaatcaatttacaaccaaaattaattttattaatgcccatccaaacatgcactaaatggtatcacaaaacaagctttgcttgctagtactagaaagatgtttgccatctaaaaaactatagggatgaagctaacacatttcttcaatttgattggcagctcatatctttgtctgagaagaaatggtggcagtagatccatctattactg

SEQ ID NO: 17270 - DNA, 231 bp, Glycine max
  unsure (1)..(231): unsure at all n locations; Clone ID: 701045649H1
tgggtaacagcttaaggtgttgtttggcttgcattcttccgtgtggagccctagacttgatccgcatagtgcacttgaacgggtacgtggaagaaatcacgcgtccaatcacggctggggaggttctgaaggcaaatccaaaccatgtcttgagcaaacctagctcccaaggcgtggttcgccggattctgatcctcgcaccggagaccgagctcaagagaggaggcatnt

SEQ ID NO: 17271 - DNA, 264 bp, Glycine max
  Clone ID: 701045650H1
gagagttgcagtttgcactttgtaggatcatctcctagcattgatcgattgagatggcagacgaagctaacagaactgctttccttgaaattcaaagtcgcatgatcgatactactggaaaaataaaacaggtgcaaacccagatgcgttccaaagaagcagaaaaaaagcgtgcttttctgaccatggaggagctgaagcaagttcctgatgatacgaatgtttacaaatccattggaagaatgtttgtattggagaccaagg

SEQ ID NO: 17272 - DNA, 261 bp, Glycine max
  Clone ID: 701045652H1
gttgattccaagtttcttcggcaccgggcgaagaaccaacgtcttcgaccccttactccctacgacgtgtgggacccattccatggcttccccggcaccaccgccctctccgctccgcgctccgagacggcggccttcgccaacacgcgtatcgactggaaggagacggcggaggcgcacgtgttcaaggcagacctgccggggctgaagaaggaagaggtgaaggtggagatcgaggaggagggaagggtgctgcagata

SEQ ID NO: 17273 - DNA, 258 bp, Glycine max
  Clone ID: 701045653H1
gcatggccatggtaggcggaaccatgatggctgcgtatttgcgtgtatccatgcccacttccccacagtcccccaccactacgaggaggagatgcagaaatctgaaaacttcttgctccgttaacagacccaaaattccaatgccccctctcaaccctaaagacccctttctctccaagctcgcttccgtcgctgcttcttcccctgaaacgctcctcaacactcccaaaaactccgacacccttccttatctcgaca

SEQ ID NO: 17274 - DNA, 164 bp, Glycine max
  Clone ID: 701045654H1
cgcgcatccaaacgcggccatgctgagaacccgaactataataccttctcctccaccatcactacgccctgagtaagaggctgccgtcaccgtcaccgtcaccatcaccgttaccgttactgtcaccgtccgttatcctctccgaacccgtgaaaccctcgttt

SEQ ID NO: 17275 - DNA, 258 bp, Glycine max
  Clone ID: 701045655H1
gggaagggaacagggagttttggtaagagaaggaacaagactcacactctctgtgtgaggtgtggccgccgcagcttaccatctccagaagagtcgttgcgccgcttgtgctttccccgccgcacgcactaggaaatataactggagcgtcaaggcaatccgcagaaagaccaccggaactggcaggatgaggtacttgcgtaacgtgcctcgccgattcaagagtggcttcagagaaggtaccgaagctgcacctag

SEQ ID NO: 17276 - DNA, 255 bp, Glycine max
  Clone ID: 701045657H1
gcaagatatcatcacattgcaaagaaaatacacattacattactaagtctttgttcatttgagtagtagtgatggctagcctcaaggttgcatgtgtggttgctgtgatgtgcatggttgtggtggccatgagtgctgcacccatggcacaggccgcaatcacgtgcgggcaggtcgccggcgacatgtctccgtgcttcagttatcttcgaagcggcggaaaaccgtcgcaggcctgctgcaacggagtgaagt

SEQ ID NO: 17277 - DNA, 258 bp, Glycine max
  unsure (1)..(258): unsure at all n locations; Clone ID: 701045658H1
cttcattgcattattgcagataagatcaaccctactccctnccagattcgggccaagatggcatcacttcatgctaatgtgacatcagttgtttgcangagtggcaaccatgcttctcaatcgaaattcacaagctcttcattcttgcctgggtttgatgttgttggtcgtgcttcaaatgcntggaagaaagaacttgtcccatcttccatttcctggtgcctagagccacactaacatttgatcccccaactacca

SEQ ID NO: 17278 - DNA, 259 bp, Glycine max
  Clone ID: 701045659H1
cacagaagcagaaggaggagaagcagaaagaggagacgaagcaatggcgccgaagaagccccgaaccacgtcgaggaaccctgatttggtcaggggaattggcaaatattcgaggtcgcagatgtaccacaagaggggcatctgggccatcaaggccaaaaacggcggtgttttgcccctccacgatcccaagcccaaacccgaggccccggcccagaagccgcccaagttctacccggccgatgacgtgaagaagccc

SEQ ID NO: 17279 - DNA, 262 bp, Glycine max
  Clone ID: 701045661H1
aacatgtgccaagcttgtctgtcatccacttgatgttgtcaaaaaaagatttcagattgaagggcttcaaaggcatccaagatatggagctcgagtcgagcatcgtgcatacaggaatatgcttgatgccatgcaacggatactgcaattagagggttgggctggtctgtacaaggggataattccgtccactgtcaaagctgcacctgctggtgctgtgacatttgttgcttatgaattgacatcagattggttagagtcc

SEQ ID NO: 17280 - DNA, 265 bp, Glycine max
  unsure (1)..(265): unsure at all n locations; Clone ID: 701045662H1
accctnactcattctccatacctcaacgaagaggttaaagagacggcaacactttgctgtccgccttgaccgagcagagcttacgtcttggccctcgattttgccctaaagtactctcagtcacaacagacacnnnnnnnnnnnnnnnnnnnnnnaatggcaccgaagcagaccaaggctgagaagaagatcgcttacgatgcgaagtgtgcgacctatggaggagtncggcnanatctncgttgtgaactccganaangngggc

SEQ ID NO: 17281 - DNA, 267 bp, Glycine max
  unsure (1)..(267): unsure at all n locations; Clone ID: 701045663H1
ctcgagcggatgcagtgcaggagtagcattcacaacaagttagacagcatcaagcttgaatgtgcaaattaagtttctctgtttgtaacttgcttgatctgttgaattcttaagacaagaatccctcctaattgtggagtggagatgaattttgatagcctgaggtagctctgtagggattcaattagtcattttgtttaggcctgtaggagtcatgactaatgaggnccttaaacttattatgggataattgtctnaagtatgtcc

SEQ ID NO: 17282 - DNA, 112 bp, Glycine max
  Clone ID: 701045664H1
cggaacactggtttcgaacccttgttgtggttaggtcttcacatttcgaatttgggaattcatgggtcagggaactccgggcggcatgaaccggcagggcgaccggaagccg

SEQ ID NO: 17283 - DNA, 268 bp, Glycine max
  unsure (1)..(268): unsure at all n locations; Clone ID: 701045665H1
gaactgaagcggaacccttcttctgcgccagttccagtgtcccactgtgtgcagagtgcagtgatagaaatctagctacctagttagggtnnggggttctgcgtttctgcgaagatgactaagttcaggaaattgggtcgacccaccggtcaccgaatgtccatgctccgaaccatggtctcgcagttggtgaagcacgagcgcatcgaaaactactgttgccaaggcgaaagagatcagaagactcgcggataatatggtgcagctt

SEQ ID NO: 17284 - DNA, 264 bp, Glycine max
  unsure (1)..(264): unsure at all n locations; Clone ID: 701045666H1
cgtttcttcacactctgccgtgctctttcggcgcaggtcaagagattcgcaataganagtgagaaaaaaaaatgagtcgaggaagtgcaactgctgcgaagggcaagaagaagggtgcgacattcaccattgattgcgcgaaccggtggaggacaagatcatggacattgcgtctctcgagaagttccttcaagagaggattaaggttggtggcaaggccggtgctctcggcgactccatccangtcgtaacgtnanaagaccc

SEQ ID NO: 17285 - DNA, 260 bp, Glycine max
  unsure (1)..(260): unsure at all n locations; Clone ID: 701045667H1
acgaaaccctcttcatcttgttctatctgtgacgagcatcatggcctcaagagcagtgttattgttggctatgtgtgtgcttccggcgatggttgtggccattcgcccagcaaagaaccctttttgcgtgaagggtcgtgtctactgtgacccttgccgtgctggttttgagancccagctaccacctacattgctggtgctgagattatgttgcaatgcaagagcagggttagcaacgaggttgtgtacacgaagaagg

SEQ ID NO: 17286 - DNA, 259 bp, Glycine max
  Clone ID: 701045668H1
caagttcagtgttgggatcattcgggtttttgttactcggttcattcgaatggcgacatccttgtcaaacgtgtttttgaagggaatcgcagctcgttctctcagcagacccgcgttatgtgtgccagcttcatccttgggtttttgagttaccccaaattgattttggagaagttaaatgggttgttttattgcacaagatactcgaatactgtgtcaaatgattctgacacgcatgatgacttcaagccaggtaatc

SEQ ID NO: 17287 - DNA, 254 bp, Glycine max
  unsure (1)..(254): unsure at all n locations; Clone ID: 701045670H1
cttcaaagcattgataaattgaagattagtagctttctgcntgtntttcttagtgaaaaccagcagcagatggaacacttgggtggatttttcagtgatacacgattaagggaagggctgcaatggctggcaggtgaatcacccttgcaacccaaccttggctgtgtgaaaatacgagaacttgttcacgcccatcttaattctttctcagagatgctggacattgccattaactccaacgtgggtcctaatga

SEQ ID NO: 17288 - DNA, 252 bp, Glycine max
  unsure (1)..(252): unsure at all n locations; Clone ID: 701045671H1
cagaaacgaaaaagggttcggtgttctgttcgcgatgagagccaagtggaagangaagcgtatgaggaggttgaagaggaagcgccgaaagatgagacagagatccaagtagtgcgttaaacctagtttgtttctgttgcttttacaattgcttatgttgtcgaatgggacacccagttgttagtggcactggtttctccttttgatgtttgatacattttgttggattcaagtagtttatgttcgtctatg

SEQ ID NO: 17289 - DNA, 256 bp, Glycine max
  Clone ID: 701045672H1
caagagtcaccgacaactaggatcaattggtgctggaaccacgcctggtacgtgtttacaaggggaagaagatgcctggtaggatgggaggaaccaagaggaagatcagaaagcttaagattgtcaaaattgataaagatcttaatgtcctcatgatcaaaggtgctctccctggtaagccaggcaatcttctaaggataactcctgccaagattgtcggcaagaacttccaaagaattagcacatcttttctgtt

SEQ ID NO: 17290 - DNA, 255 bp, Glycine max
  unsure (1)..(255): unsure at all n locations; Clone ID: 701045673H1
tctccctcttacacttcaccaacccaacaaccccatcattttcttttcacctttntccttctccaaacaaattaaattaaaattaaaataatcaaagccttcacctatatatacagccatcanacactttaaccattcgtccacccgttcgttagatctaacaaccacttatcccctttctccttctaacgagtgaggaaaaatggcgcgtaagaagatcagagagtatgactcaaagaggttgttgaaggagcc

SEQ ID NO: 17291 - DNA, 257 bp, Glycine max
  unsure (1)..(257): unsure at all n locations; Clone ID: 701045674H1
gtgattttttccgaaaaccctcgtcttcgaaatcagcaacaaaaacgcgaagtgtactaagcgaancattngnagcgtgagaatggggaagaaggcaaaagggtcaaggaagggtaagaaggcatggagagctaacatcagcaccgaagagatcgaagatttcttcgagaaatcaacgaaggacgctctttctggtggctctctacaagccgtttcttccgattctctcttctatgaagacaagtccaaagatcttg

SEQ ID NO: 17292 - DNA, 257 bp, Glycine max
  unsure (1)..(257): unsure at all n locations; Clone ID: 701045675H1
ctttgcgtgagaacgaaaaaagcnaaaaaaaaccctaangcactncnagaccctgagatttttcatcttcgtttctcattctctttttgatcatggacgtcgaggtgcggcagatcttcaacaagttcgacaagaacggcgacggaaaaatctcggtaacggagctgaaggacatgctcgcggccctcggatccaaaacgacggacgaggagttgaaacgcatgatggaggagctcgaccagaacggcgacggtttc

SEQ ID NO: 17293 - DNA, 256 bp, Glycine max
  unsure (1)..(256): unsure at all n locations; Clone ID: 701045676H1
aggcgtcttcataaacgcctttcttctccgtttccgtttcctcgttcgaattcgctttttgatctgcgaaaatgagagngtgcatctcgatccacattggtcaggctggtatccaggtcggaaatgcttgctgggagctctactgcctcgagcacggcatcgggcccgatgggcaaatgccaagtgacaagacagttggcggtggtgatgatgctttcaatactttcttcagcgagactggtgctggaaagcacgt

SEQ ID NO: 17294 - DNA, 218 bp, Glycine max
  unsure (1)..(218): unsure at all n locations; Clone ID: 701045677H1
ttgttgtttgtgtgtttgttttttctctcacctgaaaatgtcttgctgcggtggtaactgtggttgcggaagcgcctgcaagtgcggcaacggctgcggaggctgcaagatgtacccagacttgagctacaccgagtcaaccaccaccgagaccttggtcatgggagtggcaccagttaaggctcaattcgagagtgctgaaatgggtgttccngctg

SEQ ID NO: 17295 - DNA, 267 bp, Glycine max
  unsure (1)..(267): unsure at all n locations; Clone ID: 701045678H1
gtnaaagcaccgtctccgtctccactactcgggcttcttcttcgttgcgctttttcccaaaaccaattgcatacactactacgtccgttaccgccgctgccctagaccaccgcaagcgacgtcgcacaccgccttcatccgttagggcaaaaatgagtcgaggaagtggaggtggatacgatcgtcacatcactattttctcccctgaaggacgtctctttcaagtggagtatgctttcaaggctgtgaaggctgcaggaatcacct

SEQ ID NO: 17296 - DNA, 120 bp, Glycine max
  Clone ID: 701045679H1
ggcttatggaaggagtaccgcacccaatacccagaactgtcgaagaggttttcaccgattttaagggcagacgcgctggtttgattaaggccctcactactgacgttgaaaagttttacc

SEQ ID NO: 17297 - DNA, 267 bp, Glycine max
  unsure (1)..(267): unsure at all n locations; Clone ID: 701045680H1
gtcatcttgtcattcaccgagaaagtcgtactgattcctcttcatctttcgttaaagcgagtacttttcgttcttgatctgttggttacgatgtcgtattcaaggagatctaggtattctccttctccttctccttctccatacaagcgatacggtaggtctgtgtccaggtctctctcaatatcaagatccagaagccgttcaagtttcattnctgaaaattggtgaaagcaagtaaataaggagtttntcaagagatgcagaaat

SEQ ID NO: 17298 - DNA, 263 bp, Glycine max
  unsure (1)..(263): unsure at all n locations; Clone ID: 701045681H1
cgcttgtgctgccttcgtttgcgtttttatcacagaggaattaacatatatatagcaagcatggcagtcacactctacgaccttagctcttcctctgggttgaanaaacttgatgagtaccttctcccacgcagttacatcaccgggtaccaagctacaaaggatgatcttactgtttatgcagctttgccaactgctccatcagatgaatatggaaatgtttccaggtggtacaagcacattgatgctttgttgagaatctc

SEQ ID NO: 17299 - DNA, 260 bp, Glycine max
  Clone ID: 701045682H1
cgcggcggttgcagaagaagattgcaagatgaagttcaacatcgcgagtcccaccactggatgccagaagaagctcgagatcgacgacgatcagaaactacgagcattttgggacaagaggatctcacaggaggtcagcggagatgcacttggtgaggaatttaagggctatgtcttcaaaattactggaggttgtgacaaacaaggattcccgatgaaacagggagtgcttactcctggtcgtgttcgacttttgcttc

SEQ ID NO: 17300 - DNA, 260 bp, Glycine max
  unsure (1)..(260): unsure at all n locations; Clone ID: 701045683H1
cgaattggcactggtctctttgccgaacttcagcgttttggtttgggagggaaaattctaaaacctaaaaaatttcaatctcaatcaactcaacgtctgtgatcccaatcgatcacatttaataccacccttcaggattaggtagtaattccgttcccttgaataaataacatgagcaccacagtgcaaagaactccaagatccagcaggcattctttatttttccaggatttggcttcacctgtttctgcccgtaanag

SEQ ID NO: 17301 - DNA, 256 bp, Glycine max
  Clone ID: 701045684H1
caacctccctccaccgccacccctccctaaatcctccgtctccgccgtccctccgccccctcccccgccgcgcgccgacatctcctcctccgggttcggctccgcccccaacacgctcactgagcccgtctgggacaccgtgaagcgcgatctctcgagaatcgtgagcaatctgaagctcgttgtgttccccaaccctttccgcgaggaccccggtaaggccctcagggattgggatctgtggggccctttcttc

SEQ ID NO: 17302 - DNA, 253 bp, Glycine max
  unsure (1)..(253): unsure at all n locations; Clone ID: 701045685H1
gtctgttcttatcttcatcctacgccaatagcccaaaaccttgttctctttttgtggttcatttctctcttccagatgccacttgccgttcttcaccctcacgattttctcaggaaaaacccatctaaccagtaccagaccataatccctcactctcccaacatgaatcctaataagtctcatcggacttcccgaaaccgtaagangcggcccgatccaagcccacaaggcgttgtcagcccagcccggctca

SEQ ID NO: 17303 - DNA, 148 bp, Glycine max
  Clone ID: 701045686H1
tttttctcccatcatagaaaaccgaccctctcctttccctcttcaccaaccaatggctcccccaaaggccgagaagaagcccgcggagaaaaagcccgcagagaaggctccggcggagaagaagcccaaggccgagaagaagatatcg

SEQ ID NO: 17304 - DNA, 255 bp, Glycine max
  unsure (1)..(255): unsure at all n locations; Clone ID: 701045687H1
ctcgcaactanacacgcactctgcattcattgaattatctcnnttctagaacttcaccatncacctttgtcccaatccccaatcctcctatttaatttggtgtccctaaatcaccatgccaacttcactttccaaattccatgcttcaattcaaaattnacaaaaattagaanacacccatcatcacttttcaacactgattcttcaaattcttggatctgantctgctctccacagttaccaaagctacgttct

SEQ ID NO: 17305 - DNA, 113 bp, Glycine max
  Clone ID: 701045688H1
gctcgtgcctctagggttatcatatctccatttccatttacctactactactacagtttaccaagaatacttaagactatgggaaagtcttacccaaaccgtgagacgctgat

SEQ ID NO: 17306 - DNA, 245 bp, Glycine max
  unsure (1)..(245): unsure at all n locations; Clone ID: 701045689H1
aacccacttgggtggtgatgactttgataagaganttgttgattggctggcttctaacttcaagagggatgaaggcatngaccttttgaaagataaacaagctcttcagcgtctcactgagacagccgagaaagcaaagatggagctctcaacattgactcaaactaacatcagtttgccattcataactgccacggcagatggacccaaacatnttgagaccaccatcacaagggctaaatttg

SEQ ID NO: 17307 - DNA, 254 bp, Glycine max
  Clone ID: 701045690H1
ggtgaactaattcggagaccttgcaagacttcatcaatggctgtcaaagtttatattgtgtactactccatgtatgggcatgttgagaaactagcagaagaaataaagaaaggggcttcctctgtggaaggtgttgaggccaagttatggcaggtacctgagacactgctggatgaggtgcttggtaagatgagtgcaccacccaagagtgacgtaccagtcattacccccaatgaactatccgaggctgatgg

SEQ ID NO: 17308 - DNA, 253 bp, Glycine max
  unsure (1)..(253): unsure at all n locations; Clone ID: 701045691H1
caatacaggtgctcaacccaatcgatggcccacatggttttctaaaggctggcaaagccttatatgtgtttatgcaagtatttgatggttgcctctggtagagcatctattttcatnctctgagcaaacgagaagactattatagaggtatcctatcaatttttaagtttataattggatggataatttacgtagtgatactttttttatttggtctgtgtaggtatgggaccatgctgttggcattatatgc

SEQ ID NO: 17309 - DNA, 90 bp, Glycine max
  unsure (1)..(90): unsure at all n locations; Clone ID: 701045692H1
aaacactacttctctgcagctanttgcctacaactacccttacaccatggactgaacaaaccgagaaagcttttactgaagcaaccaaaa

SEQ ID NO: 17310 - DNA, 243 bp, Glycine max
  unsure (1)..(243): unsure at all n locations; Clone ID: 701045693H1
gacttcctactcctccctttcacccacttttctgctcccccttgagaaagaatttgantcatcaaaattaaaaactcgcaccaacaatggccccaagagacagccgagccaccgcgttcgccggaccaggcccaggcccatcaccggcccacaaagagatccgctaccgaggcgtccggaaacgcccctggggccgctangccgccgagatccgcgaccccgggcaaganaaacgcgcgtctg

SEQ ID NO: 17311 - DNA, 247 bp, Glycine max
  unsure (1)..(247): unsure at all n locations; Clone ID: 701045695H1
ggccaacatgggagagacgcgatgctgcttttcggaagagagatttatattngttgtgcatttactgtgcccatganattccattgntgttttagcttcctttgctgacacattttagtttttgtctgttctatgagtgaaacttggatgatttnccttatactgtaattgctagtagtctgccataggaatttgtttgtgcctgagaggnttgcatgnatgctggtaatttttggcttntgcagaa

SEQ ID NO: 17312 - DNA, 267 bp, Glycine max
  unsure (1)..(267): unsure at all n locations; Clone ID: 701045696H1
ctgaagaagagaagaagtggcgacagtgggtggataatcacntggtgcatgtcttgtcaccgaatatatatcggaatgttcctgaagctcttgaatcatttgattacatcaccacccaaggaaatttcagtttttctgagagattagtggcaaagtatggtggggctgcagctatgtattttgtgtccaagancttgaagaagaaacacaccttcactgatgagcgtgcagcactgtatggagctgccgaacatgggttnctgcttt

SEQ ID NO: 17313 - DNA, 267 bp, Glycine max
  Clone ID: 701045701H1
gggaaaaactggaattccaatgattcttaatttcttacaatccaatctgcaaactgagtgagatatataacttgtttttgatttcttcctcatcattttgcatatacaaagattaaaatggaagggttttttggaaattgcttcaatatgattttgctgatgttgtgcttcaccaacttgagcatagctttgctcaaagtcatatgaatggatttggagagcagccactggccaagattgccattcacaagaccgttttggcgctac

SEQ ID NO: 17314 - DNA, 264 bp, Glycine max
  Clone ID: 701045702H1
gttccttcttctcgttcgtcgctttgtgatctctctctgcaaccatgtccgtcgagaaagagagagagacccaggtttacttggccaagcttgccgagcaggccgagagatacgaagaaatggttgagtgtatgaagaaagtagcaaaacttgatcttgatctgactgtggaagaaaggaaccttctctcagtgggatacaaaaatgtgattggtgcacgaagggcctcttggcgcataatgtcctcaattgagcagaaggaag

SEQ ID NO: 17315 - DNA, 265 bp, Glycine max
  unsure (1)..(265): unsure at all n locations; Clone ID: 701045704H1
tctcgctcttgcaattattcctcttctcgcaatccgcactaaaattctagggttccgaaatggacgctgacggaaagatcaagaaggncgccggcngaaganaggncggcggcccaaagangaagccggtttcaaggtccgtcaaagccggtctccaattccccgtcggaagaattgnccgttatttgaagaaaggaaggtacgctcagcgtgttcggtaccggtgctcccgtatacttggctgttgttctcgaatacctagctg

SEQ ID NO: 17316 - DNA, 259 bp, Glycine max
  unsure (1)..(259): unsure at all n locations; Clone ID: 701045706H1
gtcaggcggggctacccgctgagtttaagcatatcaataagcggaggaaaagaacctcattcttgaagtcacctctctcggtgtcgtcgccttnnnnnnnnnnnnnnnnnnnnnnnattagggaaaccacaattcaagaagatgaatgtgaagagaggctgaatgtttcatcatcacctatggctgcagggtgccctggttgcttatcatatgtaatgatcatgaagaacaaccctaagtgtcctaggtgtaatctctt

SEQ ID NO: 17317 - DNA, 261 bp, Glycine max
  Clone ID: 701045707H1
aagacaaagagactgacatgaaccataagaataaaaaagataattttggtagtgatgcaccacattttcagagtggagttctccgtactaactgcattgactgcttggaccgtacaaatgttgcccagtatgcatatggtcttcaagctttaggacgccagctccatgcaatgggtttgactgatgttccaaaagtggatcctgatagtagtattgctgcagctctaatggatatgtatcaaagtatgggagatgctcttg

SEQ ID NO: 17318 - DNA, 262 bp, Glycine max
  unsure (1)..(262): unsure at all n locations; Clone ID: 701045708H1
gtgagtgacaaccctttttgctccacaacaaggttttctccacagggcaagaggctggtttggtgtttgtntcatttcactttacatgaatacatatacatagaagtttgaagggttttagggattngcatgatgctangttcattacctatattgcccctccctgctcctccttctgatggaaatctaggtcctcngcctgagnctcaagtgattnatganaatgaggaggagcagaacaaatcaaattcngctnctgttc

SEQ ID NO: 17319 - DNA, 260 bp, Glycine max
  Clone ID: 701045709H1
gacgaagatgccttcttcgctgattacgctgaggctcaccaaaagctttctgagcttgggtttgctgaagcctaagcaacgttttggggattgttggagaggcacggtgcccataatatttctctcataaattctatggtcatggtttctaatgcgccactgtgggttcctcaaatttttagatagcttttgaatgtattttgctggacgtggtgatgatgattggagttgggttgtttttatttgtggtcgatcctttt

SEQ ID NO: 17320 - DNA, 259 bp, Glycine max
  unsure (1)..(259): unsure at all n locations; Clone ID: 701045710H1
agatatcatcacattgcaaagaaaatacacattacattactaagtctttgttcatttgagtagtagtgatggctagcctcaaggttgcatgtgtggttgcngtgatgtgcatggttgtggtggccatgagtgctgcacccatggcacaggccgcaatcacgtgcgggcaggtcgccggcgacatgtctccgtgcttcagttatcttcgaagcggcggaaaaccgtcgcaggcctgctgcaacggagtgaagtccctcag

SEQ ID NO: 17321 - DNA, 258 bp, Glycine max
  Clone ID: 701045711H1
gtttgttgttgtaactcgttcttcttcttttgttgttctgtgtttgtgtttgttttttctctcacctgaaaatgtcttgctgcggtggtaactgtggttgcggaagctcctgcaagtgcggcaacggctgcggaggctgcaagatgtacccagacttgagctacactgagtcaaccaccaccgagaccttggtcatgggagtggcacctgttaaggctcaatttgagggtgctgaaatgggtgtgcccgctgagaacg

SEQ ID NO: 17322 - DNA, 260 bp, Glycine max
  Clone ID: 701045712H1
gggaagtgaacttagcaaggagacctatcgtcgcactttcattaccatacacactcactctctcgtctctgacccttcgctcaaacactcaaacctaacctaacctctcaacaagacaacttacctcattcagcccttgtgttgttgtgaccgaactgttatgctctcttttggacctttggtgttgtcattgaaagaattttgtagctgagaggtatagacatttaacagttacaaataagagttgttgaagggctatt

SEQ ID NO: 17323 - DNA, 259 bp, Glycine max
  Clone ID: 701045713H1
ggactcgaccctaatgtttcagatgaagatctcaggcagccattctcccagtatggtgagatagtctctgttaagatacctgttggaaagggctgtggttttgtccaattcgcaaacagaaataatgctgaagaggccttgcagaagctaaacgggacatcgattggcaagcaaacagtccgtctttcttggggccgtaatccagcaaataagcagtttagaatggatttcggcaacccctggactggggcatattatg

SEQ ID NO: 17324 - DNA, 259 bp, Glycine max
  Clone ID: 701045714H1
cagaaaagattttttgtcatcacagaatggcataggaaagaaggcgcctgatgatatacaaatacttcacacagacacactaatcaaggaggtggagaaggtattcagtgcaaatcaccctgatccccttgaagttgagaaagcaaagaaagtattgaaggatcatgagcaagctcttattgatgcaattgcaagacttaatgatctttctgatggtgaaagtgatggggctggggctgcccaccatttctcacatgct

SEQ ID NO: 17325 - DNA, 259 bp, Glycine max
  Clone ID: 701045715H1
gtttcagttcacagtcctctggcatcacaatgatgacaccagaatcagcagaggacttagaaaaacatgcaatctcaggtcatcatgtgagggggaatagtgaatatgttagacttgccatatctgatgaactgagggttgtcgaaaccgaaatgctacagcctctagcagagtcaagaatgaaatctttcaggtggtggataaaagcccttttatggtgctttgtcattgttgtacttggtcttgttatattgaaatg

SEQ ID NO: 17326 - DNA, 262 bp, Glycine max
  unsure (1)..(262): unsure at all n locations; Clone ID: 701045719H1
caccagtgccactcctcctcctctctgcgctcccaacgctgcaataacacgctcactctctttcttcattcttctcttccctttcgcnccaactctgatcggtgttccttccctccttctgcctcctcctcccgcctcagatgcagactctccctcccttctcttgcatcagaggctccccatggattttcctcccgccctcaatctccttaccgaattcggttgcggcttcgtccttctccgctccctctcccgcatctta

SEQ ID NO: 17327 - DNA, 262 bp, Glycine max
  unsure (1)..(262): unsure at all n locations; Clone ID: 701045720H1
aacacagttaaagacgcacaagaaaacatctcgctcaacaccaccaacacttcggatctacgtttccactctccgaacatcaaaaaaggaaagaaaaaccgatttacagcgacaacaacgaacgaacgatttctcgaagcgctctcaaaatggcgcgtgcaccctttacttcattccccttcgtcctcattacccttctctcaattctccacctttcgcactgcaagaccctcaagcntgacgttaaggctttnancganat

SEQ ID NO: 17328 - DNA, 257 bp, Glycine max
  unsure (1)..(257): unsure at all n locations; Clone ID: 701045721H1
tgccatgtgtcacccattccaactgtcctttacttgagaatataatttcgntgcactttgnttgtattttcaattgactgcagtttnncaaatctatactcacatcacaggtgatgtngtcacctacacntccttattagatggtttatgcaaaaaccaaaaccttgacaaggcaactgcactattcatgaaaatggaggaacggggaattcagccagatatgtacacatacacggcacttattgatggattatgta

SEQ ID NO: 17329 - DNA, 259 bp, Glycine max
  unsure (1)..(259): unsure at all n locations; Clone ID: 701045722H1
tgcatatttggcatcaacaatcaacaatcaacaatcacaaatagaaactcactctttcgaaaaaaccagaatttgaatatgacgttagggtttgagggttatagttataccacaacacttggaaggaagagggtcgtgttattacacaatgaagcttcttctctcaactctaattcggcggtgaatccattgaagagaatgtgcagcggaaaattcnnttttgactctgaaaggtctcgccttgaggcccttcctcttg

SEQ ID NO: 17330 - DNA, 231 bp, Glycine max
  unsure (1)..(231): unsure at all n locations; Clone ID: 701045724H1
agcaatattttcngctgtattattntctctctttgtgcaaagatgggaaaattgcacagctatgtttcagtacttgctgtggcatttgtattggtgataggagtagctgaatgcagaaaaataaaaganantgagttagttgacggttttggaggaggtggattgggtggtggtgccggtggaggttttggtggaggagctggtgcaggaattggaggtggaggtggtgca

SEQ ID NO: 17331 - DNA, 257 bp, Glycine max
  unsure (1)..(257): unsure at all n locations; Clone ID: 701045725H1
ctcttcttctcttgcggctagggttttagcgcantttcttctagatttaaggaagatgggtaaggaaaaggttcacatcagtattgtggttattggccatgttgactctgggaagtccactaccactggccacctgatctacaagcttggaggcattgacaagcgtgttattgagagatttgagaaggaagctgctgagatgaacaagaggnctttcaagtatgcctgggtgcttgataagcttaaggctgagcgtg

SEQ ID NO: 17332 - DNA, 257 bp, Glycine max
  Clone ID: 701045726H1
gaattatcatacccttcaagatgaaaccgtacctacgtccaatattcctattattccttatccttctcgaccaatccatttcggcgagtgctgctataaatattaatggtctgagaaacaaaattagagaagttctaaacaagcacccgagcatcaatcttccggcagataaactgaagaaggtgaagagaccactgaaggcactggattatctgcttggcgaatgtaaggacaggccgcctcaagaatttcaagaa

SEQ ID NO: 17333 - DNA, 257 bp, Glycine max
  unsure (1)..(257): unsure at all n locations; Clone ID: 701045727H1
gccacttcagagaaaatggcggtacctctgctctcgaagaagatcgtgaagaagagggtgaagaagttcaagaggcctcagagtgacaggaaaatttccgtcaagacaaactggcgtagaccaaagggtatagattcccgtgttaggagaaagttcaagggatgcactttgatgccaaacatcggttatggttctgacaagaagacccgccactatctccctaatggttttaaganatttgttgttcacaatgtgaa

SEQ ID NO: 17334 - DNA, 214 bp, Glycine max
  unsure (1)..(214): unsure at all n locations; Clone ID: 701045728H1
acacaatataagtccaccctaaacaatcaccatggcagttgaagctagttacatgaatctcntgccttctcagttactcactaacagagaactcatcanatccaatcaacagctacagcatcaattaaactctgattanatgtacaacactactacccagatggattctncttcagctttgcctcaaccagcaacaatgcctgaatcatcttgt

SEQ ID NO: 17335 - DNA, 256 bp, Glycine max
  unsure (1)..(256): unsure at all n locations; Clone ID: 701045729H1
atctcaccaagactcgtatgacgtcatgattgatccactaatggacaaggagctattgctgtctctgtcaaatagtttcaaattgctaacttcatgtaatcntctgtctgtaattctggaagctgcccttcagtatatgcaaacagatacactacctaaatcagcagaaagaaaagggtgcattgtggataaatttgttaacattttgatttgggaattaagtaatatgattgagcggatgcttttacatagtcca

SEQ ID NO: 17336 - DNA, 262 bp, Glycine max
  Clone ID: 701045733H1
gctgtttgcaacttcaaatgattcagagactttggtcccagcatttaaagaagcagcaaagtctttcaagggaaagttgatctttgtatatgtggaaatggataacgaagatgttggaaagcctgtttcagaatactttggtatcagtgggaatgctccaaaagtacttggatacactgggaatgatgatggaaaaaaatttgtgcttgatggagaggtgactactgacaaaattaaggcatttggggaagatttcgttgaa

SEQ ID NO: 17337 - DNA, 260 bp, Glycine max
  unsure (1)..(260): unsure at all n locations; Clone ID: 701045735H1
gttttcttcagaaatttgccatcgttgagagaagcgtgagagccttagtcgttcaagatgagagctaagtggaagaagaagngcatgaggaggttgaagaggaagcgccgaaagatgagacaaagatctaagtaggtgcttgagcaggagttgagatgagctttccatctgctaccagcctcatgacattttaggctgttatggctcttatgatcttgaggtctagtcgctaggggagcttcactcttgacttagtttgc

SEQ ID NO: 17338 - DNA, 259 bp, Glycine max
  Clone ID: 701045737H1
caaagtccatgaagtctgctccatttcgccgccacaagaaaccccaccaacaactcttcccttcaccctcttcgacgtcctatggcttcggttccccccagtggagcgtctcttcttctattccttcccaaacccaacaacaacatcatttttcgacaccaccgttctcccaaatctcaaacactccctctccctcactctccaccacttccctcctctcgccggcaccatcacatggcccaatcactcacccctccct

SEQ ID NO: 17339 - DNA, 256 bp, Glycine max
  Clone ID: 701045738H1
atgaatctgatgcaggcggttcgctacgacgcctacgggggaggtcctgccggcctcaagcacgttgaagttgccgttcccagtccaaaggcaaatgaggttttaatcaaactggaagcagttagcattaaccctattgattggaagattcagaagggtcttctccgtcctttatttctccccagaacctttccccacataccttgcactgatgtggctggagaaatagttgagatcggaactcaagtcaaagatt

SEQ ID NO: 17340 - DNA, 256 bp, Glycine max
  unsure (1)..(256): unsure at all n locations; Clone ID: 701045739H1
gttacactgggctctctgaatcctnnnaaataataacatctttttcacctcccctcttacangtcatggtattgtggttatgtntggcattcactcggtcaatttttcatttaaatagttcatagttgagccataaccttcatattgttacttgttttcttgtgcttactaagttctttgcctttgactgtncacttttgacttactatgattttgggtttatgcgatgcttgatgccanatcaatggcaagatac

SEQ ID NO: 17341 - DNA, 259 bp, Glycine max
  unsure (1)..(259): unsure at all n locations; Clone ID: 701045740H1
caaagagaaaaaagagagaagaaaancgaatcccctgtgatctctcacacaattccaattcctctggatctcgtctcgatcgatagatctcgaacatgagcactggggagcttctcaacatcgaacctctcgaactcaagttcccctttgagctgaagaagcagatctcatgttctcttcaattgtccaataagaccgatagctatgtagccttcaaggtgaaaacaaccaatccgaagaagtattgtgttcgtccgaa

SEQ ID NO: 17342 - DNA, 182 bp, Glycine max
  Clone ID: 701045741H1
tttgctggggtttaactttctcattttttcttcaaacttccagacacatatggttcccatttttcaaaactaggatttcaaaagcaagattggaaggttgtgcagagtttgttttatatcatgagttctgaggccatgactatcattatttttaatttatttttagtcaacttgtctaccgc

SEQ ID NO: 17343 - DNA, 256 bp, Glycine max
  unsure (1)..(256): unsure at all n locations; Clone ID: 701045742H1
caaacctaacgcagcatcgctattctcttcattccatggctttgcccaaccagcaaaccgtggattaccctagtttcaaactcgttatcgtcggcgatggtggcacagganagacaacctttgtgaaaaggcatctcaccggagaattcgagnagnaatatgagccaaccatcggtgtggaggttcacccattggattttttcacaaactgtggaaagattcgattttactgctgggatactgctggacaggagat

SEQ ID NO: 17344 - DNA, 254 bp, Glycine max
  Clone ID: 701045743H1
tcaacatctacagtccatgaagttccgttattattgcctccaagtattccaccagatgagtcaaggagatgcatgtttcttatactatactttgaattagtctcgtcaaggtaatatctgatatgattgtgatgaactttgtcacatccttgaaatacttgcaagtattagctctgtgctattgttttggtgatatatccatgtcaagcttcaaattccctatgcaaaatctaagaaagttgaggcttgaaaga

SEQ ID NO: 17345 - DNA, 254 bp, Glycine max
  unsure (1)..(254): unsure at all n locations; Clone ID: 701045744H1
ccctaacgcgtgcagagcagagagagacgcagccatggggcgaagacccgcgaggtgttataggcaaattangaacaaaccataccccaagtcacggttttgccgtggtgttcctgatcccaagatcaggatttacgatgttggtatgaagaagaagggtgttgatgaatttcctttctgtgtccatctggttagttgggagaaggaaaacgtttctagtgaggccctggaagctgctcgtatgcttgcaacaa

SEQ ID NO: 17346 - DNA, 255 bp, Glycine max
  Clone ID: 701045745H1
ttcccaattacccttcccaattttcaccaaaacctaatactcccacaccaatcttcgatcatggacgccgattcacaacctcaacaactcgaagagagaacagaggagcaagaactgaagtacctggaattcgtgcaattcgcgaccatacaggctctgatgcgctgcgccatcctctactcatacgccaaggagcgcgcgggtcctctgaagcccggtgtcgacaccgtggaggaggccgtgaagaccgtcgtg

SEQ ID NO: 17347 - DNA, 254 bp, Glycine max
  Clone ID: 701045746H1
agcgaagaaagattcgaaacgaagaaagaaagcgttgtgaagaatggcggaagagggacaagtgatcggtgtccacagcgtagaggagtggaaggaacatctcaagaagggagaagagtccaagaaattgattgtggtggattttactgcttcttggtgcggtccatgccgtttcattgccccaattcttgcagagtttgctaaaaagttgccgaatgtcaccttcctcaaggtggatgtggatgaattggaga

SEQ ID NO: 17348 - DNA, 254 bp, Glycine max
  Clone ID: 701045747H1
gaagcagagggagtagcggcattaaaaatgcagatcttcgtgaaaactctgacagggaagactataaccctcgaggtcgagagcagcgacaccatcgacaatgtcaaggccaagattcaagacaaggaaggcattcctccggatcagcagcgtttgattttcgccggaaagcagcttgaagatggaaggaccctggccgattacaactccagaaggaatcaacccttcatctcgtcctcaggcttcgtggtggc

SEQ ID NO: 17349 - DNA, 256 bp, Glycine max
  Clone ID: 701045751H1
acagccaaacaccatttcattaattcttgcagaatattgcttagttttgttttatctgaatttggaaacagcttttgaatggctttttcaagagttgcactgctaatatgcacggtcgggtattttgtgattgcctctgccggcaatttccaccaagattttgatatcacatggggagatggtcgggctaagatactcaacaatggagagcttctcactctgtcacttgacaaagcctctggctcgggtttccaat

SEQ ID NO: 17350 - DNA, 253 bp, Glycine max
  Clone ID: 701045753H1
attggctttccaagatcattgggttttcttgttgcattcatgaccttctactccttgggtttggcattgtccaaggatatacctgacgttgaaggagataaagagcacggcattgattcttttgcagtacgtctaggtcagaaacgggcattttggatttgcgtttccttttttgaaatggctttcggagttggtatcctggccggagcatcatgctcacacttttggactaaaattttcacgggtatgggaa

SEQ ID NO: 17351 - DNA, 254 bp, Glycine max
  Clone ID: 701045754H1
tctaaccaaacccttcactactccaaattccaaaacttcttcacactccttcttttccctcttctgttgcccgatcttctgcctccaagattttggtatttgggattgatcacctggagttggaaatggttaaaagttatggagtgttctgatttgcaaaagatatcatgttgcggtgcttagagggacttaagcctttatttgcttccatattacgatgttgtgacctggatatatataaccagccaagaggc

SEQ ID NO: 17352 - DNA, 257 bp, Glycine max
  unsure (1)..(257): unsure at all n locations; Clone ID: 701045755H1
ctcatagtccatcacccagcaagaaaaaagaaaatcgaagaggaagagcaaggacacaacacaaagaagcaaaagnagacatggcgttgcagtggctgattctcacttacgtggtcgcagctgaggctgccgtggccattctgctaacccttcccacgcccaaactcctaagggaccgtttcgcctctctcgtttccctcattcttcaacccgcgcttttcattgtcccctttgcggggttccaactccttgatata

SEQ ID NO: 17353 - DNA, 257 bp, Glycine max
  unsure (1)..(257): unsure at all n locations; Clone ID: 701045756H1
gtttcgaatagnttatcctaagtctttgggaatagtgctgcaatggcttcaantcangangaggtgacccttttgggagctactggaagcccatttgtgtgcagggttcatattgccctcaagttgaagggagttcgatacaaatatgtcgaagaaaatttgaggaacaagagtgaactgcttctcaaatccaacccagttcacaagaaggttccagtgnttattcncaatgagaagcccatagcagagtctcttgt

SEQ ID NO: 17354 - DNA, 253 bp, Glycine max
  Clone ID: 701045757H1
gcacattatgggattagtattttgtgatgctgatatgtattgtatccttcttattaaatatggtatgaaagctaacaattttgcttgatctgatgcttctgtcctctccacatgagtctttttggctacttttagatactgggatacaaggcagtcaaatccagtgcacacacagcaactcccagagcgctgctatgctatgacagtgagacatcctctgatggttgttggcactgctgatagaaatcttatt

SEQ ID NO: 17355 - DNA, 253 bp, Glycine max
  Clone ID: 701045758H1
agaattttcaaccagattagccaaaaatttggagcagctgattctgaaagagggaccagagacaattgctgcatttattgctgaacctgtaatgggggcaggaggtgtaatagttccaccatcaacttattttgagaaggtccaagccgttgtcaagaagtatgacattctttttattgcagatgaggtacttccctaattcttaacatactgttatataaggtattctgtggtcgagttttccattctaatt

SEQ ID NO: 17356 - DNA, 252 bp, Glycine max
  Clone ID: 701045759H1
ccagtatgctatctgccatgggggatcagaaagtttcgatttttcattgattgtgtataactgcacaaagaaggtagtgaagcaatgcgtagagcgatcgcgtttctcgttcacccacgattcctccttctcttccttgttctctcaattttcctcattttcacattttctggttctaccaccaccaatggttttactaatcccaaacaggttgttgagatcattgaggagaaaccagaagaggagccagaa

SEQ ID NO: 17357 - DNA, 255 bp, Glycine max
  Clone ID: 701045760H1
gggcatcatcgtttcctccatggtttgcttaaatccagtccaatcttaataatattattttcctagttattgaattgaatcgcattcgcaggagaacgggactcgccccgaattccaattggcctccgacggtgttcatcaagcacaactcgctgcacaatcattccaaaaggaactagaggctaataatatcccgcttgctaatgtacgcatttgctactcccccttttcaagaacaacccataccgctaacgt

SEQ ID NO: 17358 - DNA, 252 bp, Glycine max
  Clone ID: 701045761H1
ctagttctagatcgcgatctagaactagtccaacctcaaaaactcaatattctcaacaacacactactttccttcttccaataatgacttcttcattctctgttcgttttcttgctcctccatcatcatgcttccccagctctcggcccaagacatggctctgcgccgccaccaccccaacggtggctccggcaactgcctcctcggaggtggaggcttcaaggttggagcctagagtggaggagagagatg

SEQ ID NO: 17359 - DNA, 252 bp, Glycine max
  Clone ID: 701045762H1
caaggctgcacagtctttgacggaggctacaattccaaccactcagaagaaaactgccttgaatcggctggttaaggataatgttgcactaatagtggttctagaagcaaaagttaacaatcagccatttgataatgctgggaaaagacagcttctttgtgtggcaaatacacatgtaaatgtctcccaagatctaaaggatgtgaaactctggcaggttcatactctcttaaaaggtttggaaaaaatagc

SEQ ID NO: 17360 - DNA, 249 bp, Glycine max
  Clone ID: 701045763H1
tttatgtgtctgatttgaggttggagcgtagttagcttctcttttctgccgaaagctgcagaattgtgttgttttctctcctttgggggtcaaacaagcggttctcttcatgatgccaagtgttaaccctgacaaagattccgagccatttgttgagaccgatccaaccggtcgctatggtagatacagtgagttgctcggatgtggtgctgtgaagaaagtgtaccgtgcattgatcaagaagaagga

SEQ ID NO: 17361 - DNA, 256 bp, Glycine max
  unsure (1)..(256): unsure at all n locations; Clone ID: 701045765H1
gcagaaagangggaggattgttggtgatcgatcatcgatcatcgatcatcgatcatcgatggcgtctgctagccttggaagtggtggggtgggcagttccaggtctgttaatggtggcttcaggggttcttccagttccgtcgattggcttggcagagagatgcttgagatgtcttgagagaccacgaggacgatagagatagtgagcctgacatcattgatggtttgggtgctgagactggtcacgtgataagaa

SEQ ID NO: 17362 - DNA, 256 bp, Glycine max
  Clone ID: 701045766H1
atgtttataagtttttgacaatcacatatcatgtataattccaaaacttataaacatcaaagtaccagccaatatatgtatggatcacatgactatactaaaaattgctaaaatgcgcatcatattcagtagtgaagctgatgcagaatgagctgatgatagaaaaacagcattgtacaacccaaaaaggtttacaaattccaatcaactttcatgagtgcacttccacgtgattaaaacaccttgacatccatcc

SEQ ID NO: 17363 - DNA, 255 bp, Glycine max
  Clone ID: 701045767H1
gtcttgatgctgacaactgcaaggtcctcgtcaacattgagcaacagagtcctgatattgctcaaggtgtgcacggccacctcacaaagaggcctgaggagattggtgctggtgaccaaggtcatatgttcggctatgccactgacgagactcccgagctcatgcccttgagccatgtccttgccacgaagctcggtgccaagctcaccgaggttcggaagaacgggacatgcccttggctgagacctgatggca

SEQ ID NO: 17364 - DNA, 254 bp, Glycine max
  Clone ID: 701045768H1
gctgtgtgctgttactgtagctgcaaaccatatagctccgattgaatcactctgagttcaatcttcctgtttcatgtggtttagcttagcgcatgaccttaggtgggagataagtctgctagattcatctttcgtattaaggaattttctttgaaggctgtgatcttatggagcctgacaggttaaattccccaaccacatttgagatgccattggaggttatgggccatgagttacagttttctcaggatccc

SEQ ID NO: 17365 - DNA, 252 bp, Glycine max
  unsure (1)..(252): unsure at all n locations; Clone ID: 701045769H1
ggtgtctttgatccgagccatcatgtacatggtggctcagtgcttaggtgctatctgtggagttggantggttaaggctttccaaaagtcttacttcaacaagtatggaggtggggctaattccctcgctgctgggtacagcacaggtactggattgggtgctgagattattggaacctttgttttggtctacactgtcttctctgccactgaccccaagaggaatgccagagattcccatgtgccggtttt

SEQ ID NO: 17366 - DNA, 252 bp, Glycine max
  Clone ID: 701045770H1
catttggtgagaacatggtgatgtctgagctagtggagtgctgcaaggagttggatgaagtgcatcatgctttggccgggcataagaaggaggcagcatggcggttaagcagggtggagctgcagttggagtctgagaaggccgggcgaaggagggagaagatggaggaaatcgaagcgaaaatcaaagctctgagggaggagcaaacggctgcattggatagaattgaagcagaatatagggagcagttgg

SEQ ID NO: 17367 - DNA, 253 bp, Glycine max
  Clone ID: 701045772H1
aaagaaatgctttaatggtgagttatgtttttgctatggcttttttggtgtctgtgtcatgtcgtgcgaactatgttgtcatggataagaggtgggataggattggagggtatattcggagagcttgatgtatcatatattgtgtggcatccctctggatgtggcgggcacagaattgttgagaagcatttttcatcttggaattcatctgtcttcgtaagtaggtttgtctgtagcaaaggagtggtgatgc

SEQ ID NO: 17368 - DNA, 251 bp, Glycine max
  Clone ID: 701045773H1
tcaatccccatcactttgtggctgtcactggctcctgttgttattggtgtgtccatggcatctttgactgagctctcgttcaactgggtcggcttcataagtgctatgatttcaaacatctccttcacataccgaagcatctattcaaagaaagccatgactgatatggacagtaccaatatctatgcctacatttccatcattgctctaattgtctgtataccacctgccgtaattttggaagggcctac

SEQ ID NO: 17369 - DNA, 252 bp, Glycine max
  Clone ID: 701045774H1
attggaggagctagtgtggcttagtcgctaaatttgttacgataaagaaattaattcagcaacaaatacaatgggttctcttatggcaggatgggactctctgatcttggatcctgaatcagctacaatagagaggaatcgatcactcaccaaagaagaaattaatgcttactggagagtaaagaaggagacagagttagaacacctcagagctatgtccaaactatctgagactattcaggcccgaaaatt

SEQ ID NO: 17370 - DNA, 249 bp, Glycine max
  Clone ID: 701045775H1
ctgccaaagaaggtcttaatgttgaagaagcattccaatgcatagcaaagaatgccctgaaaagtggagaagaagaagaattgtaagttcttaaatctgggcatctctttcatatatgtgaactgaccaactgaactcactaagacataaatacaataagctacatctctcagatttatgagattgcgttcattggttgagggagtgtagtttggttttgtcagagttctaattcataattttcagtta

SEQ ID NO: 17371 - DNA, 251 bp, Glycine max
  unsure (1)..(251): unsure at all n locations; Clone ID: 701045776H1
gtttcactcacactgtgtttggagcagnatcagatcgtgtgttccgtacgttcgttcgttcatttccagtgtcaaacatggcgtctcagatgagcaagaagagaaagtttgttgcggacggagtgttcttcgccgaactgaacgaggttctgacacgtgaattggcggaggacggttactccggcgtggaagttagggttacgccgatgcgcaccgagatcatcatcagagccaccagaacccaggctgtt

SEQ ID NO: 17372 - DNA, 250 bp, Glycine max
  Clone ID: 701045777H1
ctctctgagactctcgctatcgtcacagccatggaggacgccaatcttcagaggctccattgctccgtcaagaactacgattggggtctgccaggtcacgtctccgaggttgccagactccacgcgctcaattccgcgtctcaattacacgcggaggaccctttcgccgagctttggatgggtacccacgattcaggcccttcctttttggcctcctccaacaggaatgggaatggggtctcccttaagg

SEQ ID NO: 17373 - DNA, 250 bp, Glycine max
  Clone ID: 701045778H1
cttttctctactcttcccccattttttcttctttaatccctcgcctatatcttcagaaaattagatctgcttcagatctagggtttcccttttccaaatcacgagtccgttgagtttgattttgtggatgaaagcatagggatagggcttttgcaaacctctccaatgtttctcgaaattatatgaccatgcgtcgaattcgtatgctgcactccttctccgtcgtgttcctctactggttctacgtttt

SEQ ID NO: 17374 - DNA, 250 bp, Glycine max
  Clone ID: 701045779H1
ctcacacactttgtactctccgtccttccttcttcgatccagatctctctccttctccctcaaatggcttcccttctgcaatgttccatgcccctcgtctctctttccaatcgagctctggtacccggtaccaggatctccaacccaagttcagtttccctttcaattaagggaagaagtttcccatccgttacattgcagcccagaggggtcggtttcagcttagatgtgcggcaaaaccagagacagt

SEQ ID NO: 17375 - DNA, 247 bp, Glycine max
  Clone ID: 701045780H1
atggatcgcatcctaaggcctgaaggagcaatcatcatccgggatgaagttgatgttcttaaccaggttaagaaaattgttgggggcatgagatgggatgccaaactggtggatcatgaggatggccctcttgtgcctgagaagatattggttgctctcaaagtgtattgggttggcaccagcaaaaacaaaacatccaatgaggaataaaaccactattgttcgggtgtgaatcttgtacttcagc

SEQ ID NO: 17376 - DNA, 255 bp, Glycine max
  Clone ID: 701045781H1
ctcaagagaattatcataccctttaagatgaaaccgtacctacgtccaatattcctattattccttatccttctcgaccaatccacttcggcgagtgcttctaagagtaggtttatagaattcttttcaaaattaaagaattcttttaatcctaagtctgaagaactcaaatcaaaagatataaagaagctcccgagcgtcgaatttttgaagaagaaacatgacggagttaaggacttctctcaagaagctaac

SEQ ID NO: 17377 - DNA, 107 bp, Glycine max
  Clone ID: 701045782H1
tactctcgtggtggtgacggtggtgatggaggctggagaaactagggcttgatgtcgttgattagggtttatgattatgctcataattttagttgtgtttgagtttg

SEQ ID NO: 17378 - DNA, 250 bp, Glycine max
  Clone ID: 701045783H1
tggaggaaggggataaggagagggaagggatgaggaggttggcgaaggcgatagagaggtttggggaagtttatgagagagtggaggcgcagaagctgaggcagatggtggatttggagaaacagaggatgcagtttgctaaagatcttgaagtgcagaggatggagatgtttatggacacacaggttcagctcgagagaattaagcgcggtaaaagatctggctctatgatatgtatagctagccaatg

SEQ ID NO: 17379 - DNA, 252 bp, Glycine max
  Clone ID: 701045784H1
caaacctaacgcagcatcgctattctcttcattccatggctttgcccaaccagcaaaccgtggattaccctagtttcaaactcgttatcgtcggcgatggtggcacaggaaagacaacctttgtgaaaaggcatctcaccggagaattcgagaagaaatatgagccaaccatcggtgtggaggttcacccattggattttttcacaaactgtggaaagattcgattttactgctgggatactgctggacagg

SEQ ID NO: 17380 - DNA, 250 bp, Glycine max
  Clone ID: 701045786H1
gcgccatccttcactgcaaaaggtccttcaactccagagaaggatcaatgtattcggtgaggaaatcatttgatggtgaacatggggaaaaagtgtaatcttgaggattttgttgtgaaagaagaagctcaagctgatacaacagaagagaagagaaaaaaatgttatttttttgtattatctatctagtgcattgtaaagaaaagggaaagaggggagagggatagttgtgatgattagtgagtgtgtg

SEQ ID NO: 17381 - DNA, 251 bp, Glycine max
  Clone ID: 701045787H1
ccctactctacaagatgttggattcttccttcttccggagcttgggcaagacaaagcttacataagtgaaacactgtttgccatgatttttatatcgtttgtctcgtggacatttcatccattcatattgaagaacagaaagatctacacagttctaatatggtgcagggttttagcattcttagtgggttctcaagttcttcgcataatcacattttattctacacaacttcctggtccaaattaccatt

SEQ ID NO: 17382 - DNA, 252 bp, Glycine max
  Clone ID: 701045788H1
aagacccttaagtaacatttagaaatatatgttgttggctttcagttatgtaggagagagcttgtgtgtacagtcaattgaaccttggtaggtatagagttttcagaggatacagagaagagcttggtcacggtctttttaatgggaccagctcatttaagtttataatggtttgagtggggaactctgaagcttgccttgtgtttcaggcaatgacaactcttggttttgcaaagatcttagtctacagag

SEQ ID NO: 17383 - DNA, 231 bp, Glycine max
  Clone ID: 701045790H1
gcgccttcaaactacaaagaatggcggcgttgttccacttctctcttcttttcacagttctcctttcttccattctcttatcgaatcactcagtaaaatgcgacgaccatgatgaggaagatgatctttatcagggaatcaacaagtatagggaatcattaaacttgacatctctaacaaagaatgaaaatgcgaattgctttgctgatgaaattgctggccagttcaaga

SEQ ID NO: 17384 - DNA, 133 bp, Glycine max
  Clone ID: 701045791H1
gcttttgactattatatcttgttaaatctatgggtggaaaaaaatattatgagacactacttggtgggtgagaggagtgttaagcatgggctgtaattttggttactaaataatataaagatggtgtattatt

SEQ ID NO: 17385 - DNA, 250 bp, Glycine max
  Clone ID: 701045792H1
cgaatagattatcctaagtctttgggaatagtgctgcaatggcttcaagtcaggaggaggtgacccttttgggagctactggaagcccatttgtgtgcagggttcatattgccctcaagttgaagggagttcaatacaaatatgtcgaagaaaatttgaggaacaagagtgaactgcttctcaaatccaacccagttcacaagaaggttccagtgtttattcacaatgagaagcccatagcagagtctct

SEQ ID NO: 17386 - DNA, 247 bp, Glycine max
  Clone ID: 701045793H1
ctgttggataatcatcaagaacaaggtatatgatgttacctcatatgtggaagaacatccaggtggtgattccattcttgcacatgcaggagatgattcaactgaagggttttttggaccacagcatgcaactcgagtctttgacatgattgaagacttctacattggagatttggagcaatagcttagtcagttactccaggaatgtattgttcaagagatgtatgatttgagaatttcaacattc

SEQ ID NO: 17387 - DNA, 247 bp, Glycine max
  Clone ID: 701045794H1
aactaagggaaaccatcaatagttcaacatcaagctcatccatcatatggctttggcacgtttggctttgaaaaacttgcaacaaagggtgtgtgcttcctctttcttgagtggcaatgttcacaagcagaggtggaacaatgagttgctgagaaggtttggtactgcagctggggacaagggaaaatctgaaggcactgaagttgctgtcactgaagggaaaaagtctaataggatgttcccaagg

SEQ ID NO: 17388 - DNA, 242 bp, Glycine max
  unsure (1)..(242): unsure at all n locations; Clone ID: 701045795H1
ttgtttagctcatttaaaacttaattattttttaactttatcaatttagtatttaataaattattttaataataattctgtcaaaaaatatatattttaataatatcaatttagaatctatgtaattttaattntctcnctaaatatacgagctattcaagagctgctaatgtcaaacttggatttgcttcatttaaataattgagcccaatctcaagcttgagtttgtttatttaattaaa

SEQ ID NO: 17389 - DNA, 245 bp, Glycine max
  unsure (1)..(245): unsure at all n locations; Clone ID: 701045796H1
cgccgttcgttcacagcgtanctctgctctcgaagatggctcctcccagangtggtngtgggttcaggggtggtaggggtgacagaggtagaggaaggggtggcggtggaggaagaggaggagacaggggtacgccgttcaaagctagaggcggtggccgtggtggccgcggaggaggcaggggtggttgccgtggcggcggcagaggtggaatgaagggaggtagcaaggttgtggttcagccc

SEQ ID NO: 17390 - DNA, 277 bp, Glycine max
  unsure (1)..(277): unsure at all n locations; Clone ID: 701045801H1
ctcctcggtcgccaccgcttcgcnggcgtggacatgcgcatccgcgtgaagggcggcggtcacacctcccagatatacgccatcaggcagagcatagccaaggctctcgtcgcttactaccagaagtacgtcgacgagcagtccaagaaggagatcaaggacatcctcgtcaggtacgaccgcaccctcctcgtcgccgatccccgccgctgcgagcccaagaagttcggtggtcgcggtgctcgcgccaggtttcagaagtcctacgttgatttcc

SEQ ID NO: 17391 - DNA, 255 bp, Glycine max
  unsure (1)..(255): unsure at all n locations; Clone ID: 701045802H1
ctctcttgtcttgattccatancaatttaaacctcagggcgtggcaagtttcaaccnttttcgagcacccattaacattaacatggccattccctacccccatttcatcgccaccgagaaagccgccatggacgccggcctcctccacccctcctccccctcctccgtcatcctcacccaagacgacctcaagaaaatcgccgcctacaaggccgtcgagtacgtcgagtccggcatggtcctcgcctcggcacc

SEQ ID NO: 17392 - DNA, 274 bp, Glycine max
  unsure (1)..(274): unsure at all n locations; Clone ID: 701045803H1
ctttcccttcagtttgtgttgagaggaaaagtgtgagaacgaaaatggagcattgtaactgctacatgttcacgctgagcnnnnnnnnnnnnnnnnnnnnnnnnncgccttctctctccgacgatctcggattcgattttccggcgaagaagctgataagagaccttaacctttttccttctgaagatgtcaacatcgttcctcgccactccaattctcacgccaacaaaatcgtcgagaaaccgcttaggttcccaaacttagtgccttcaga

SEQ ID NO: 17393 - DNA, 273 bp, Glycine max
  unsure (1)..(273): unsure at all n locations; Clone ID: 701045804H1
gaatcaagaaaattattatacccattaagatgaaaccgtacctacgtgcaatattcctattattccttatccttccttcggcgagatggggcgaggctaaaattgataggaagacgataacaatgttttggggcaaggttaaagatgcgacgataaaaaatttcccgagtcgtgatgagcggaagaaactgagggagtattacgagaaattcagggaattcatggatcgtgtagaacaaaagacganccctcccccaccgccaatgtaccgtt

SEQ ID NO: 17394 - DNA, 271 bp, Glycine max
  Clone ID: 701045805H1
ctagtgcaccgtaagggttgtgaagcaggcagagaagagccatggtgcacgtttctttctaccgaaactatgggaaaacgttcaagaagcctcgtcgtccctacgagaaggagcgtttggacgccgagttgaagctggtcggtgagtacgggcttcgctgcaagagggagttatggagggtccagtacgccctgagccgcatccgtaacaacgccagaaacctattgacccttgatgagaagaaccctcgccgtatcttcgagggtgaagc

SEQ ID NO: 17395 - DNA, 269 bp, Glycine max
  unsure (1)..(269): unsure at all n locations; Clone ID: 701045806H1
cagccgaaagcgaagaaagagctttcgatccctgtaaccgcgttcgacgatttagggtttttttcggagacaatggcggatgaatnggagcacacggcggcgcngcgagcggtgaatcgctgcttgacaagattgccgagaagattcacggccaccacgactcttcctcttcctccgattccgattcggagaaaaaggaaacttcgtcaattaaggaaaaggttttccgcctctttggaagggagaagccagttcactccgtcctcggc

SEQ ID NO: 17396 - DNA, 194 bp, Glycine max
  Clone ID: 701045807H1
tcacagtgccaatggcggatccaatcgcgaaggttctgatcgcgtttgcgctcttagcttccctcttgctgtgttcgcacgcttcctccgacgttcccttcatcgttgctcacaagaaggcctccctcaacagactcaagtccggcgccgaaagggtctccgtcaccatcgacatcttcaaccaggaacctcga

SEQ ID NO: 17397 - DNA, 269 bp, Glycine max
  Clone ID: 701045808H1
gtttctgcatctctaatacttcaactcactgtattatcttgagtaattttgcagagaagtaaaatatgagcaggccaggagactggaattgcaggtcgtgccagcacctgaactttcagaggagagactcatgccagcgatgtggggactcaaaatatggagatagagttgttgattttggtggttttggaggaagaggagggtcctcatttggtttaactggctcagatgttcgccccggcgactggtactgtgctgtgctaactgtg

SEQ ID NO: 17398 - DNA, 270 bp, Glycine max
  Clone ID: 701045809H1
cccatttcccgccacactcctcactatacaaaaacattttcactctcactctctcgttatctctcattctctctgttttctccaaagcaaaaccttccctacacactttcaatggccgccaaaacggtaacccctgacgccgtttcgatgctcctggcaaacacttgccccgattcctcatcggatctccccgaaatcgttgttcaagttctcgatctcaaggcgacaggcaataaatacatgtttactgctaatgatggaaaaacgaaa

SEQ ID NO: 17399 - DNA, 268 bp, Glycine max
  Clone ID: 701045810H1
gcaccccctatttctccgttctctttgtttttacactctttctatgcaatttcctcccccctaaatttcaggcttttattcttgtccctatctttctagtccattcttttgttagaacactctgattacccatttcaggacttcttcacttttcctcatcattcctctctgtattttacatttcatcttaaaggatctgtaatttccctgattgttttttctttttttccattttctttcccacttttgttttcttgggtctcatctt

SEQ ID NO: 17400 - DNA, 268 bp, Glycine max
  Clone ID: 701045811H1
ggcgaaagagaagatggccaccgttccagggcagctcgtgtgggagatcgtgaagaaaaacaactcctttttggtcaagcagttcggaagggggacccagagcgtcgaattcagcagagagagcaacaatctctacaacctcaattcgttcaagtactctggtttggcaaacaagaaaactgttacggtacagcctgagggtaaagatcaggctgtgttgttggctacaacaaagacaaagaagcaaaacaagcctgtgcattgcttg

SEQ ID NO: 17401 - DNA, 268 bp, Glycine max
  unsure (1)..(268): unsure at all n locations; Clone ID: 701045812H1
gttgttgttggaagccaaaaccctagcagccggcgagaatggcagacgttgaggttgatnnnnnnnnnnnnnnnnnnnnnnnnnnnnnnnnncagncaaagaagagaacgttcaagaagttcagcttcaggggggtggatctggacgcgcttctggacatgtccactgacgaactcgtgaagatgttcagtgctcgcgcacgcagaaggttccagagaggtctcaccagaaagcccatggccttgattaaaaagctccgcaaagcgaa

SEQ ID NO: 17402 - DNA, 265 bp, Glycine max
  Clone ID: 701045813H1
gcatatctcatttgaatacattccttgtagtttatactgaaagatgggtttgaagatggcgttactgatcctaggcctttccctcatgctccttttggtctcctctgaggtggcatccacgaatacaaaagaggaggcaaatggagtggatgatgccaaatatcccggtggaagctatggagggggttacccaggtcatggcggtggcggttatcctggccatggcggtggcggttatcctggccatggcggtggggtggctatc

SEQ ID NO: 17403 - DNA, 271 bp, Glycine max
  Clone ID: 701045815H1
aacgcgtgcagagcagagagagacgcagccatggggcgaagacccgcgaggtgttataggcaaattaagaacaaaccataccccaagtcacggttttgccgtggtgttcctgatcccaagatcaggatttacgatgttggtatgaagaagaagggtgttgatgaatttcctttctgtgtccatctggttagttgggagaaggaaaacgtttctagtgaggccctggaagctgctcgtattgcttgcaacaagtacatggccaaatttgctg

SEQ ID NO: 17404 - DNA, 272 bp, Glycine max
  Clone ID: 701045816H1
gaccaatccatttcggcgagtgctgctataaatattaatggtctgagaaacaaaattagagaagttctaaacaagcacccgagcatcaatcttccggcagataaactgaagaaggtgaagagaccactgaaggcactggattatctgcttggcgaatgtaaggacaggccgcctcaagaatttcaagaattttgcccgaaatttaagaacgattatcaacaaaattgcccgaatgccgcgtatgaagcagtttgcccgttacgaagcaagcg

SEQ ID NO: 17405 - DNA, 259 bp, Glycine max
  unsure (1)..(259): unsure at all n locations; Clone ID: 701045817H1
ccgtgcgtctttcatttcatttcacactgatcccttccctttnttcattctactatcgtctctgccaaaacgatgccgtttgctatggagaataacggaggaggagttacgatcggacggtcctccttcgcccactgtgtcgcgatctgtgatcgggattttccggcggatgattccgactccagctccgantcctccatcggaaggaacagcacctcgtcggaagattcctccgaccgggaagacgcggcgaagttgg

SEQ ID NO: 17406 - DNA, 273 bp, Glycine max
  Clone ID: 701045818H1
aaaaaacccttctttctttcaggttcattacttgatcagtgtcaaaagggtagttgcaaattgcaatggctaagcatgatgttgagggtggttccttctcagcaaaggactaccatgatcctcctccagcacctttgattgatgctgaggaactcacacagtggtccttctacagggctttgattgctgaattcattgccacattacttttcctttacatcacagtgctcactgtgattggttacaagagccagagtgatgtcaaggccgggg

SEQ ID NO: 17407 - DNA, 273 bp, Glycine max
  unsure (1)..(273): unsure at all n locations; Clone ID: 701045819H1
ccccatacctactttcagctnctaagagcacgcatcactgttgcacttcttactcgttnnnnnnnnnnnnnnnnnnnnnnnnnnnnnnngctaaaccccccctttatttttcctatctcactaacatcgatgggagacgagaataagaccaagtcccctgcttccggcgtgtggtccaccatcaagcctttcgtcaatggcggagctaccggcatgctcgccacctgcgtcattcaacccatcgatatgatcaaggtgaggattcaacttggg

SEQ ID NO: 17408 - DNA, 268 bp, Glycine max
  Clone ID: 701045820H1
gcaataatgtacatggtggctcagtgcttgggagccatatgtggagttgggttggttaaggccttccaaaaggcttactacaacaggtatggtggtggggccaatgagctcagtgaagggtacagcacgggtgttggattgggtgctgagatcattggaacctttgttttggtttacactgtgttctctgcaactgatcccaagaggaatgctagagattctcatgtgccggttttggctccacttccaattggcttgctgtgttcat

SEQ ID NO: 17409 - DNA, 271 bp, Glycine max
  Clone ID: 701045821H1
tcgcttttcgtcttccgaggcggcggcgtcggaatcggcatcgccatccgtccagtttgggcgaattgcccgagagctgcgtcgcccagatcatgacctacatggatccgccccagatttgcaagctcgcaaccctcaatcgcgcttttcgcggcgcttcctccgccgatttcgtctgggagtcgaagctgccgcccaattacgacatccttctccgccgcatcttcgccgatttcccctcccatttgggaaagagggggatttacgccag

SEQ ID NO: 17410 - DNA, 269 bp, Glycine max
  unsure (1)..(269): unsure at all n locations; Clone ID: 701045822H1
gtttcgttcaactttcaacgccagttcacactnctctgcttcgcgtgtaccaacaagtgcaagttcgaatcaatggccagcgctcagctcacagcaatagcgtcatcgatctctacggcgtcgtttgaagggcttcgaccttccgctgttcagtttgcttccacgggcagaattagaattggcaatctctcccaaaggtccttccggggcttggttgtcaaagccgccaccgttgttgcccccaaatacactgcgataaagcctctggg

SEQ ID NO: 17411 - DNA, 267 bp, Glycine max
  Clone ID: 701045825H1
caagcatttgaagatttctgctccaacttgaatgtgtcaccccgtcacaggcaaataataaaggaatatggtcaagcaattcatgacttggcatcaaatttatcacaaaaaatggctgagtctttgggtataatggataatgatttcaaggactggccattcattttgaggactattaaatatagttttaccccagatgttataggctccacgggagcacaattgcactcagatacaggatttatcactctacttcaagatgatgaa

SEQ ID NO: 17412 - DNA, 266 bp, Glycine max
  Clone ID: 701045826H1
caggggttgactgtggtcaatgtatcgggcaacaacatttcctcaaacattggattggctgcatggttaccttcttcagtgcatcgagcaaggtattgaagaaaatgttacaccagtagctccagcatagtccatgtaatgaatgcttccaattttgacagattcgacttcactttgtaaatggatgatgctggagaataacttatcaaatcaaaaagggaagtacgatcatgttcaaagctatctactcaactgtcgccagcccc

SEQ ID NO: 17413 - DNA, 264 bp, Glycine max
  Clone ID: 701045827H1
ctcgtcttcaatcctttcgttattctcttattcatccttctcttctgaataatccagatctctttctgcccttttctccgtcacgcttttcgtgaccggatctgtatggatttgatccagatctacacgccgatggtggttttggccgggtctttcatagatctggtgcgtagaggctcagatctacggtaccgaggtacaacagagaatcgatgacaagaacgcagatccgacggtagatccagccgattccgcttgttcgat

SEQ ID NO: 17414 - DNA, 266 bp, Glycine max
  Clone ID: 701045828H1
tgaggaggcacaccttcaggagcagtcatggttctcaaaaccgagctgtgccgattcagcggtgccaagatctacccagggaaaggcatcagatttgttcgtggtgattctcaggttttcctgtttgctaactcaaaatgtaagaggtatttccacaacaggttgaagccgtcaaagctcacgtggactgcaatgtaccgaaagcagcataagaaggatattgctcaagaagctgtgaagaagagaagacgtgctaccaaaaaacc

SEQ ID NO: 17415 - DNA, 265 bp, Glycine max
  unsure (1)..(265): unsure at all n locations; Clone ID: 701045829H1
taaaaaatcaaaaagcttnnnccgccatcaaagtttctccctctgtgcacggtgcgtgagaatgcnnnnnnnnnnnnnnnnnnnnnnnnnnnnnnaagtgaaaagggtgtttattggagcgggatgcaacagaatagtcaacaacgtttcatggggtgcttctggtttgctctcttttggagctcacaacgccgttgctatttnctgccccaagagtgctcaaattttgactactctcccgggtcacaaggcagtgtgaattgca

SEQ ID NO: 17416 - DNA, 266 bp, Glycine max
  Clone ID: 701045830H1
aagagaacaacttcatatcatcaccatgaatcactctagcaacaatcagcaagaaacccctttatcatatctaccagaaggccaggccaattcttcagctccatatgtcactgccccaccacctatgggttatccttctaagaatggttctatagaacaaagggttccagaggaaaccacaagcaggggtgatggcttctggaagggatgttgtgctgctttatgttgctgctgtgtcctggattgtgtctctaatgaatcaagat

SEQ ID NO: 17417 - DNA, 271 bp, Glycine max
  unsure (1)..(271): unsure at all n locations; Clone ID: 701045831H1
taagagttgctgcttcttcagccactccgcanctcgcagcctctgtgccctcaacaaccatgggntgaaatcgaaactaccgttccagatcccacccaaatcgacgtcaaactcttcaatcgctggagcttcgaggatgttgaggttaatgatatgtctctggctgattacattggagtgtccccatcaaagcatgctacatatgttcctcacactgctggtaggtactcagtgaagaggttcaggaaagcgcagtgccccattgttgaga

SEQ ID NO: 17418 - DNA, 272 bp, Glycine max
  Clone ID: 701045832H1
agagagagagggagtcagagaaaccctaggtaagaagaaaagatgccggctggtcatggtttgagatcccgcaccagagattccttctctcgtcctttcaggaagaagggaaccatcgccctcaccacatacctgagaacctaccacgtcggcgactatgttgacgtcaaggttaacggtgccgttcacaagggaatgccccacaaattctaccatggccgcaccggacgcgtctggaatgtcaccaaacgtgctgttggctcgaagtcaac

SEQ ID NO: 17419 - DNA, 274 bp, Glycine max
  unsure (1)..(274): unsure at all n locations; Clone ID: 701045833H1
aaacatccctcttgatttgaaggttgttttgtgcttatagataaaagttctgccaaatcaagaggggttttcagatcatannnnnnnnnnnnnnnntaaacaatggctaagttctttgctgctatgatcttggcactcattgccatttccatgcttcaaacagtggttatggctgctaatgagcaaggaggccacttgtatgacaacaagagcaaatatggaagtgggagtgtcaagagataccaatgcccatcacaatgctcgaggagatgta

SEQ ID NO: 17420 - DNA, 225 bp, Glycine max
  Clone ID: 701045834H1
gatggcaaatgaactacccgtcaaagcttttggttgggctgcttcagacacttctggcacccttgccccttttcatttctccagaagggaaaatggcgtcgatgacgtcactctcaagattctcttctgcggggtttgccactctgatctccacactctcaaaaacgactggggtttcaccacctaccctgtcgttcctgggcatgaaattgttgtgttgtgaca

SEQ ID NO: 17421 - DNA, 270 bp, Glycine max
  unsure (1)..(270): unsure at all n locations; Clone ID: 701045835H1
atccgatcagatcctcttcagattcggatcaccgccgagtccatgagcacgccagcgctttcagggggcacgggcctcttctctggantcacgcgtttatgcaagggccttgcggtggtgcttgtttgcggtcacattgcggttcagtttatcccttcagctgttaactatcttgctcttattcccgccaggacaatcccatttgcctggaatctcattacagctggatatgttgaacaatctatatatggggtagtggtcagcacatta

SEQ ID NO: 17422 - DNA, 268 bp, Glycine max
  Clone ID: 701045836H1
attgtttgttgttgtaactcgttcttcttcttttgttgttctgtgtttgtgtttgttttttctctcacctgaaaatgtcttgctgcggtggtaactgtggttgcggaagctcctgcaagtgcggcaacggctgcggaggctgcaagatgtacccagacttgagctacactgagtcaaccaccaccgagaccttggtcatgggagtggcacctgttaaggctcaatttgagggtgctgaaatgggtgtgcccgctgagaacgatggctg

SEQ ID NO: 17423 - DNA, 267 bp, Glycine max
  Clone ID: 701045837H1
cttattcatccttctcttctgaataatccagatctctttctgacccttttctccgtcacgcttttcgtgaccggatctgtatggatttgatccagatctacacgccgatggtggttttggccgggtctttcatagatctggtgcgtagaggctcagatctacggtaccgaggtgtgtgattcatgttcgtcttgcttttggaatctgtttcgtagaaagtcgtttggtcttgcatatggcatggctcttgaggtattttttgcaggt

SEQ ID NO: 17424 - DNA, 267 bp, Glycine max
  Clone ID: 701045838H1
ctcttgcagtcgcagaggaaaaccctagctagtagtctcagttcgtttgagagagaaaaaatggcagagggtctcgttctccgcggaaccatgcgcgcccacaccgacgtcgtgacggcgattgccactcccatcgacaactccgacatgatcgtgacggcgtcgcgcgacaaatccatcattctctggcacctcaccaaggaggacaagacctacggtgtcccccgccgccgcctcaccggacattctcacttcgtccaggacgtc

SEQ ID NO: 17425 - DNA, 245 bp, Glycine max
  Clone ID: 701045839H1
gatggtgggaccagtgagacctcagtttgtgctctttggttcttccattgttcagctcagttactctctccaaggttggggcgctattcttgctcatttgtatgctcgcaaggcggatataattctgcgaggatactctggttggaattcaaggcgtgctgtgcaagttctggatgaaattttccctaagaacgccactgagcaaccagatttggtaattgtgtactttggtggaatgattctct

SEQ ID NO: 17426 - DNA, 264 bp, Glycine max
  unsure (1)..(264): unsure at all n locations; Clone ID: 701045841H1
tttntgttttcgtcagggctgattgatctggccatcaagaggaacagtttgattggaggagatgactttaagagtggtcagaccaaaatgaaatctgtgttggtggatttccttgtgggggccggcatcaaggtacaacttttgttgttgntgttgnnnngttcgtttttcacnanatcagnngngcnacnanantttnttnggcnanaattnagnccggntttctntnanganagttttntgtaggctaaaccganaatanaa

SEQ ID NO: 17427 - DNA, 264 bp, Glycine max
  Clone ID: 701045842H1
gaggggacacgccattttgtagcgaagagtgtaggcaagagcagattgagatagacgaagccaaagagaagaataggaacctttcttcatcgatgaaggctttgaggaacaaggagcagagaaataataatagatccacgtcgccaaacaaggcgcaacaagattactcgttccgtacgggggcagttgcggcggcgtaggcggtacaagtacaacataggatttctcgagatctctcgaggaaccaacaattaacgaacggag

SEQ ID NO: 17428 - DNA, 193 bp, Glycine max
  Clone ID: 701045843H1
agcaccaatggcagacgcatcttctctgccgacggatcaactcgccgccatcaccctcgacgaggttcccaaagctaatttctccgaccgcgtccccatccgatccatcatctcccgcaccgacggcggctcgggcctcgccggcaggaaggcgcgcgttggcggctgggtgaagacgggaccaaagccgaca

SEQ ID NO: 17429 - DNA, 254 bp, Glycine max
  Clone ID: 701045844H1
cgcttctcatctgaagaagaacagcaagagctacaagttcgcctacatctgggtgggaaactccgaaacccaatgcccggggcaatgcgcgtggccattccaccaacccatttatgggccccagagcccacccttggttgctcccaacaacgatgtgggacttgacggaatggtcataaacctcgccagcctccttgccggaaccgccaccaaccccttcggaaacggctacttccagggtccgcggaggctcc

SEQ ID NO: 17430 - DNA, 264 bp, Glycine max
  Clone ID: 701045845H1
gtttagtttcgaaccctttccttttccttccttctccgcctcaccaccctaacccaaccctctctctttctctcctccaaaatctctctccctcccaccgttatttagggtttggcagatctcgatccgtcacaatggacgttcgcaagcgcggaaggcccgacgtcaaccttaacggcgccgttaagaagaccaagcaagtactgctggctgcccatttggtgagggctgccacttcttacattatgttccagtggttacaat

SEQ ID NO: 17431 - DNA, 266 bp, Glycine max
  unsure (1)..(266): unsure at all n locations; Clone ID: 701045846H1
ggtttgcctaatggagttgttccagagaatggtctagatcgccgtgcaggaaaaaaacataaacggaaaaattcttccagacaagttgatggaaagtttgaacctgtttcatcaggacaagagaatattgaagatacacatactgattatcacctgagagagcaattcaaacttaatagcaatcaagatgttaataatgtgtggcaaaacaatggatcaaaggtgatgggagagttgcaagtagaagatgcagaggaggancnatt

SEQ ID NO: 17432 - DNA, 268 bp, Glycine max
  Clone ID: 701045847H1
tattattcttccatttccattaaaaagaaaatatcataaatgggtattttcacattcgaggacgaaatcacctcccctgtggctcctgctactctttacaaagctctagttacagatgccgacaacatcatcccaaaggctcttgattccttcaagagtgttgaaaacgttgagggaaatggtggccctggaacaatcaagaagataactttcgttgaggatggagaaaccaagtttgtactgcacaagatagaagcagttgatgagg

SEQ ID NO: 17433 - DNA, 270 bp, Glycine max
  Clone ID: 701045848H1
cttcaagagttgattgaaaattctggccaatcttcttctgaaactttccagactatgtttgtcaaagacaaatcagggagagtacgttgccacgggagaactacgacacctactctcttgaaaagaaataaagaaatttcagaaattgaaaaaagacatgctgaagaggtgaaagaattaaatgataaaatccaagagatagaagaaaaatgcaatagagaaatggcagcagcagaggaaaaatgctgtcaagaaatggcagcaatggag

SEQ ID NO: 17434 - DNA, 271 bp, Glycine max
  unsure (1)..(271): unsure at all n locations; Clone ID: 701045849H1
tgagtattctgatcgctccctgagagagctcgtcgcggcggttgcagaagaagattgcaagatgaagttcaacatncgcgaatcccaccactggatgccagaagaagctcgagatcgacgacgatctgaaactgcgagcattttgggacaagaggatctcacaggaggtcatcggagatgcactcggtgaggaatttaagggctatgtcttcaaaattaccggaggttgtgacaaacaaggatttccaatgaagcagggatgctgactcct

SEQ ID NO: 17435 - DNA, 224 bp, Glycine max
  unsure (1)..(224): unsure at all n locations; Clone ID: 701045850H1
gtgacaagaacctgtactgttgttgctagagagtttccattaaaganaggnagcctccgacaaggatagtttgggcattacggtaaatataaaaccggtcggttagaaggtcccttcaccacccttcaacgtcccttcaccaaacctccanagtcactcacataganatcnaaattacaccgaagnatacctcanacctcaacacattcataaataaagcaaac

SEQ ID NO: 17436 - DNA, 267 bp, Glycine max
  Clone ID: 701045851H1
gcgagaaagtgagaggagagagaaagtagctgatcctccatggcctccaccaaggaacgcgaaaactttgtctacaccgccaagctcgccgaacaagccgaacgctatgaagaaatggtggaagcaatgaagaatgtggcgaactgaacgtggaattgacggtcgaggagcggaaccttctgtcggtagggtacaagaacgtggtgggtgctcgtagggcttcgtggaggattctatcgtcgattgaacagaaagagaagctaaagg

SEQ ID NO: 17437 - DNA, 266 bp, Glycine max
  unsure (1)..(266): unsure at all n locations; Clone ID: 701045852H1
gtttcaagcagtggcaacaacacatgccccctctttgtggtgcaagagaagcttgaagtctcaaagggcaccccagttaccttcacaccctacaatgccgaaagtggtgtcattctaacctcaaccgatctcaccatcaagtcctatgtgaaaancaccacttgtgataaacctccagtgtggaagctcctcaaggtgctaactggggtgtggtttttgagcactggtggtgttgaaggcaatccaggggttaacatgttgtcnat

SEQ ID NO: 17438 - DNA, 265 bp, Glycine max
  Clone ID: 701045853H1
aaccctagttcgcttgcagtcacacaagaggccaatcctattcatagctcgagatgggtgaagaagtgaaggtagttgttccagaatcagtgttgaagaagcgcaagagggaggaggaatgggcgttggccaagaagcaagaactcgatgctgccaagaagaagagagccgagagccgcaaactcatctacaacagagctaagcagtacgctaaggagtacgatcaccaggagaaggaattgattcggttgaaagcgaggccaag

SEQ ID NO: 17439 - DNA, 265 bp, Glycine max
  Clone ID: 701045854H1
caaaactgtggaacgaatccatggcagtaagttgttgtggtttcgttaatttctccgaaagagtttcgattcggaagaaagagaaaaaaaaacctaaggaattgaagaaaatacatgtcaagtagcagtcacttacacctaataaaagaattcaaaaatactatatttgatgaaacaagatataaaacatacccaagtaatggcatcggcttgagctttaaaagctcttagaactgaactgtatgcttcttgctcaagctgatga

SEQ ID NO: 17440 - DNA, 266 bp, Glycine max
  unsure (1)..(266): unsure at all n locations; Clone ID: 701045856H1
cacactctttgtgaaaaaggggagtttcttattctttctagacgcttccattgatcggcgatttcttagacatggcgganattcacgaacacgaggaagtgaagggtgagtccttgttggagaagatttctgggaagatccacgaccacgattcgtcatcttcgtcggattccgacaacgagaaaaccagcgcttctgactccttgaagtcaaaggttttcaggcttttcgggcagagaaaagcccattcaccatgttcttggcgg

SEQ ID NO: 17441 - DNA, 264 bp, Glycine max
  Clone ID: 701045857H1
aaataaatacacagcttagattattagagactgaaataacaaaaggcaatggatctcagagagggtcaaactcaaccaatcttggatcctaaccaaccatctcatgtgtatcatctggctttggatattggaggatctctcgccaagttagtatacttcacaaaagatgatgatcatttggttgatggcgaggaagggatatctcatagaaaggctttggagaaatccgacagcagtaagcaatatcctgttcttaatgggaag

SEQ ID NO: 17442 - DNA, 259 bp, Glycine max
  Clone ID: 701045859H1
attttcttctttctctctcccttagtcaaagggactcattgttcttctcccaggttatttagaaaagcaaaatggtgaagatttgctgcattggtgctggatatgtggggggtcctactatggcagtcattgcacttaagtgcccatccattgaagttgctgttgttgatatctctaaatcccgcattgcagcctggaacagtgaccagcttcctatctatgaacctggccttgatggtgttgtgaagcatgccgtggc

SEQ ID NO: 17443 - DNA, 262 bp, Glycine max
  Clone ID: 701045860H1
tggattcttctctaccatttccaaagcacaaagatgaaaatgcctccttttcttcattcttttcctcctcgttcattcttcttctgttgcttccttctccttccactcttgctcttgctcttgctcttggtggcaccttcttcttcaggtgctccaaatgaaaaggtaaccgtgtcactctattatgaaagtttatgtccctattgtgctgatttcatagtgaaccatcttgtgaggctcttccaaacgggctcatctccat

SEQ ID NO: 17444 - DNA, 211 bp, Glycine max
  Clone ID: 701045861H1
gacgcttttgtctgttgctcttcatcatttccggttacctctggttgattttttcgatctgctcccgtaatcgagttgtggtattggttttggtttgtggattgttatgcttcttccgatcttaatcgagtttgtgtagggtttttgccgattgatatgcttttaccggaatgaagatcttgaagaaattgatagtctaggacttctttta

SEQ ID NO: 17445 - DNA, 262 bp, Glycine max
  Clone ID: 701045862H1
cttcattcacgaccaaaatcaactgttggaactccagcttatatagcaccagaggttctttccaggagggagtatgatggcaagttggctgatgtatggtcatgtggagtgactctttatgtcatgctggttggagcttatccctttgaggatcaggatgaccctaggaattttaggaaaacaattcagcgtataatggctgttcaatacaaaatccctgattatgttcacatatctcaagactgcagacactcctttctcg

SEQ ID NO: 17446 - DNA, 266 bp, Glycine max
  Clone ID: 701045863H1
gctgaagcaaagcaatggctacttcaaagttgaaaacccagaatgtggttgtatctctctccctaaccttaaccttggtactggtgctactgaccagcaaggcaaactcagcggaaactgtttctttcagctggaacaagttcgtgccgaagcaaccaaacatgatcctccaaggagacgctattgtgacctcctcgggaaagttacaactcaataaggttgacgaaaacggcaccccaaaaccctcgtctcttgtcgcgccctct

SEQ ID NO: 17447 - DNA, 257 bp, Glycine max
  unsure (1)..(257): unsure at all n locations; Clone ID: 701045864H1
ttaaagtcaaactgaggcataattcaacttgttcctctcaccccaggttcctcttcatcctctctcnactctttttcagagacaaatttcccttattttctcccataataaaaattaaccaaccccactttcacttaccacacaatcccgctatctcaaatcaaccttctttcagacatagcaaacaaacaaaacaccgttcatcatgtacaactcgccaacaccatgtatttaaccattctccttcactattcttg

SEQ ID NO: 17448 - DNA, 269 bp, Glycine max
  Clone ID: 701045865H1
aagagatggcttctctcttcttactccttacaagatgggcaaattcaatctgtcccatagagttgttttggcaccgctgaccagacagaggtcttacgacaacgtcccacaaccccatgccatcctctactactcccagagaacttccaacggaggccttctcattactgaagccactggcgtctctgacacggctcaaggctatccgcaaacccctggcatatgggactaaagaccatgttcaagcttggaaacccatgtcgatgccg

SEQ ID NO: 17449 - DNA, 77 bp, Glycine max
  unsure (1)..(77): unsure at all n locations; Clone ID: 701045866H1
taattcttaatttgtgaatctaacttgattgaggctgtgaagttgtaccataaaaaatcttgagaaggatttgtgnc

SEQ ID NO: 17450 - DNA, 259 bp, Glycine max
  unsure (1)..(259): unsure at all n locations; Clone ID: 701045867H1
ttaaagtcaaactgaggcataattcaacttgttcctctcaccccaggttcctcttcatcctctctccactctttttcagagacaaatttcccttattttctcccataataaaaattaaccaaccccantttcacttannacacaatcccgctatctcaaatcaaccttctttcagacatagcanacaaacaaaacaccgttcatcatgtacaactcgccaacaccatgtatttaaccattctccttcactattcttgac

SEQ ID NO: 17451 - DNA, 263 bp, Glycine max
  Clone ID: 701045868H1
gttgaaaagcgacttttctctctgcaactctcccttttcttccttcgtagattcgaaagggaatcttcttccatggcctccaagcggattctgaaggagcttaaggacctccagaaagaccctccaacctcttgcagcgccggtcctgtagcggaagatatgtttcattggcaagcgactataatgggtccccctgatagcccttatgctgggggtgtttttctagttactattcattttcctccggattatcattcaagcca

SEQ ID NO: 17452 - DNA, 266 bp, Glycine max
  unsure (1)..(266): unsure at all n locations; Clone ID: 701045869H1
ttaaagtcaaactgagggcataattcaacttgttcctctcaccccaggttcctcttcatcctctctccactctttttcagagacaaatttcccttantttctcccatnatnaaaatnaancaaccccactttcacttaccacacaatcccgctatctcaaatcaacgttgtntcagacataggananaaacnaaacancgttcancatgnacaactcgcnaacaccatgtatttaaccattcnccttcactattctgacaaaaana

SEQ ID NO: 17453 - DNA, 262 bp, Glycine max
  Clone ID: 701045870H1
gatcgtgagaggggcagtagccgagattccgtgagttgcaaaaatgaagacgattctttccaccgagaccatgaacatcccggacggcgtgagcatcaaagttcatgccaaggtcatcgaagtcgagggcccccgcggaaaattggtgcgagacttcaagcatttgaatctcgattttcagctcattactgacgaaaacggtaaaagaaagctgaaaatcgacgcgtggtttggttctcggaaaacatccgcgccattcgca

SEQ ID NO: 17454 - DNA, 261 bp, Glycine max
  unsure (1)..(261): unsure at all n locations; Clone ID: 701045871H1
gattcctcttcctcctgtngntgagaagatattgttttcgtgctcggttccttgttaagaatcttgtacttggccggggttttggttgcgctcacatcgtgttctctgcggcgcgagctagctagggtttagaacctcgcagttacagaaaacatggcgactgtggtgccaacctccgaagaagacgctgcactctccgtcgttcgattcgcctctgaacttgcctgggccgatgccggtcccgaggttgtgagccccaat

SEQ ID NO: 17455 - DNA, 259 bp, Glycine max
  Clone ID: 701045873H1
ttgtttctcaacaaggagagattgccatcaggattgatgaaaacatggatgatacattggcaaatgtagagggggcgcaaggggctttgttgaagtatctgaacaacatatcttctaataggtggctgatgatcaagattttctttatattaatattttttcttatggttttctattttttgtggcatagtcattctaatgacagaaaaatgaaaacgaggacacacatgacgcccttattgctggtgataagcgtttt

SEQ ID NO: 17456 - DNA, 259 bp, Glycine max
  Clone ID: 701045875H1
gtggaggaaggggataaggagagggaagggatgaggaggttggcgaaggcgatagagaggtttggggaagtttatgagagagtggaggcgcagaagctgaggcagatggtggatttggagaaacagaggatgcagtttgctaaagatcttgaagtgcagaggatggagatgtttatggacacacaggttcagctcgagagaattaagcgcggtaaaagatctggctctaatgatatgtatagctagccagtggtcgatg

SEQ ID NO: 17457 - DNA, 260 bp, Glycine max
  unsure (1)..(260): unsure at all n locations; Clone ID: 701045876H1
agggttttagcgcantttcttctagatttaaggaagatgggtaaggaaaangttcacatcagtattgtggtcattggccatgtcgactctgggaaatccactaccactggtcacctgatttacaagcttggaggcattgacaagcgtgttattgagaggtttgagaaggaagctgctgagatgaacaagaggtctttcaagtatgcctgggtgctggacaaacttaaggctgagcgtgaaagaggaatcaccattgatat

SEQ ID NO: 17458 - DNA, 261 bp, Glycine max
  Clone ID: 701045877H1
ataaaccctcgcttcgttgtgtgctctctctttcttctgcatcactttccattctcttcaacctaacgcagcatcgctatactcttcattccatggctttgcccaatcagcaaaccgtggattaccctagtttcaaactcgttatcgtcggtgatggtggcacaggaaagacaacctttgtgaaaaggcatctcaccggagaattcgagaagaaatatgagccaaccatcggtgtggaggttcacccattggattttttca

SEQ ID NO: 17459 - DNA, 252 bp, Glycine max
  Clone ID: 701045878H1
gttagaatgtactgtcatcattgatgacaaatgtgggagaagtggagtgcaaagcctaatccactgatgcatagtgtgtttggattaccatatgaatcaccaaaaacgtttatttgcacatttcaagagagaaaacggagaagcaacaccagtgtttcgttgaatataatgtatgtttgcgttggaacgaaccattttccaaacatacactatcactctatcagctaccttctttattaagttgtttctagt

SEQ ID NO: 17460 - DNA, 262 bp, Glycine max
  unsure (1)..(262): unsure at all n locations; Clone ID: 701045879H1
tcgacggcctatgatgtaagcttatcagacgatagctggccaagtgatgcttttgatgtaatcagcggtagcacttcaaagtcatgggaaaggcttgatgctggtggcatccnttctcacacatttgagctggaggcaaaatcaaagggagtatttgccggtgaaccagctgtcataaagttccgtgttcccacaaagtctgctttgcaggaggcatattcaactcccatattgcctttggacgttctttcgatagacctcc

SEQ ID NO: 17461 - DNA, 265 bp, Glycine max
  Clone ID: 701045882H1
tagcacaccacacaaaaaagcaaaacagagagaacaactgttactcacacacgccatgggtatgtaaatgaatggtttttgagcaacagcagttaaaagagaaaagggattcagcgaagatgacatcggttggtgtggcaccaacttcgggtttgagagaagccagtgggcatggagcagcagctgcggatagattgccagaggagatgaacgatatgaaaattagggatgatagagaaatggaagccacagttttgatggcaac

SEQ ID NO: 17462 - DNA, 263 bp, Glycine max
  unsure (1)..(263): unsure at all n locations; Clone ID: 701045883H1
cactttctatctcattttcgttcggttcaaacactctcatggcatcagacaagaagattaggatcggcatcaacggatttggaaggattggccgtttggtggccagggttgctcttcagaggaatgacgttgaacttgttgctgtcaacgatcctttcatcaccactgattacatgacatacatgntcaagtacgacaccgttcatgggcantggaagcattttgatgtgaagctgaaggactctaagacccttctcttcggt

SEQ ID NO: 17463 - DNA, 262 bp, Glycine max
  unsure (1)..(262): unsure at all n locations; Clone ID: 701045884H1
accagtttcactgcataaatttganagaaaactctgcaaacatgttggtttatcaggacctccttacaggtgatgagcttctctcggactccttccgttacaatgaaattgagaatggaatgctgtgggaagttgaggggaagtgggttgttaagggagcagttgatgttgacattggtgcaaacccttctgctgagggtggagaagatgagggagtcgatgacgcagctgttaaggttgttgacattgttgatacattcag

SEQ ID NO: 17464 - DNA, 262 bp, Glycine max
  Clone ID: 701045885H1
ggaaacctctacaaacattgcctccaaggtgcgcgctacgtatactattgtttcctgcaactttgtttcctccgatgaattttaacaacgtgaatgctccaaaggttcctggtggcggagtcgctgctttgcttaaagttggcattattggtgggcttgttgtatatggggctgcaaacagcttgtacaatgttgagggaggtcatcgagccattgtcttcaatcgtgttgtcggtgtcaaagataaggtctatcctgaagg

SEQ ID NO: 17465 - DNA, 261 bp, Glycine max
  Clone ID: 701045886H1
cattcattcgcatctttctctcttctctctccacccaaaccctaactcccgaccctgttcccctctcgtatccgtcatgaaaggaggaaagtccaagaccgaatctaagagagccgatcccaaacttgctgtgaataagaagggagccgccaccaaggctaggaaacccgccggcaaggggaaggcagcgaaagaccctaacaagccaaagaggcctccaagtgctttcttcgttttcatggaggagttcaggaaggtatt

SEQ ID NO: 17466 - DNA, 256 bp, Glycine max
  unsure (1)..(256): unsure at all n locations; Clone ID: 701045887H1
atccagcacaaggtcatgtcaatccccngatgactctctcacagaagttggttgagcatggatgcaaagtcttttttgtgaacacagactttgaccacaagcgagtggtgagttccatggtggagcaactagatagccttgacgaatcactactgaagttggtctcaatccctgatggtttaggacctgatgatgatagaaacgatttnagcaagttatgtgatcttgctgaacaacatgcctgctatgctgagga

SEQ ID NO: 17467 - DNA, 263 bp, Glycine max
  unsure (1)..(263): unsure at all n locations; Clone ID: 701045888H1
ctttcatatcaaggtgaaagcaacaaatggtgacactttcttgngaggagaggattttgacaatgccttgttggattttctggtgaatgaattcaaaagaactgagagtattgaccttgcaaaggacaggcttgcactgcagaggcttcgtgaagctgctgagaaagctaagatcgagctgtcttcaacgtctcaaactgagatcaacctgcctttcatcactgctgatgcatctgggtgcaaagcatctgaacatgncattg

SEQ ID NO: 17468 - DNA, 128 bp, Glycine max
  unsure (1)..(128): unsure at all n locations; Clone ID: 701045889H1
atcgtgccagaattttccatcagactgtttagatgtagaaatttttaggcagaaaaattgtactttttattctttcagttntaactcaagttttcgcattattgtagtttgcngtaactttacaagtg

SEQ ID NO: 17469 - DNA, 260 bp, Glycine max
  unsure (1)..(260): unsure at all n locations; Clone ID: 701045890H1
gtttatgtggttgcgcctctgcctgtaagagtgaaaaaaccttctcttttccttctctcaagtctcaagagatttcatcatggctccaaagaaggacaaggctccaccaccttcctccaagcccgccaaatctggcggtggcnnnnnnnnnnnnnnnnnnnnnnnnnnnggaaagcaaaaggagaaggtgaataacatggtgctgtttgatccagggcacctatgataagctcctttctgaagctcccaattcaagctca

SEQ ID NO: 17470 - DNA, 257 bp, Glycine max
  Clone ID: 701045891H1
ccctttcctctccgaaccctcgatcactctcacgcgctcctatattcgctcctccaccgtcgctctctcgaacaaccacaacaccatcttcatcacatggcaaacgcagcatctggtatggcagtccatgatgactgcaagttgaggtttttggagctgaaggcaaaaaggacacaccgtttcatagtttttaagattgaggagcagcagaagcaggtcattgtggagaagctggtgagcctgcccaggctatgaag

SEQ ID NO: 17471 - DNA, 257 bp, Glycine max
  unsure (1)..(257): unsure at all n locations; Clone ID: 701045892H1
aagacaaatcaactccgatggacattcaccggtgcttttgaggctaggcaatctcttattgtgaggggtctnttcctatgctggcagatccacgacacccggctgagtctaaaagtggaacaaatgaatcaattttgaaggttgctttagatcatggcaaggcttntggcatcataaagccacatgaccgagttgtngtctgccagaaagtagctgactcgtcagttgtgaagattcttgagctcgaagattgattg

SEQ ID NO: 17472 - DNA, 256 bp, Glycine max
  Clone ID: 701045894H1
gcaagttcaagattgagaggcttgaaggggatcatgcttatgagatctacagcttcaagttctgccccagtgtgcctggtgcgctgtgtgctcctgtggggacttttgaagatgctgatggaaccaaagtcatggctgtgggggatgatattgagccttactatgtgaggtttcaaaaagtctccatctttggtcaagacaagaaacaacctttagcatttgtaggttggtttgtgcctgtaatagtagatgcggg

SEQ ID NO: 17473 - DNA, 276 bp, Glycine max
  Clone ID: 701045901H1
cccgtaaccatgtctcagactgttgtcctcaaagttggtatgtcatgtgaaggatgtgttggagcagtgaagagagttctaggaaaattggatggtgtggaatcatatgacattgatttgaaggaacaaaaggtggtagtgaaaggaaatgtccagccagacacagttctgcagaccgtttccaaaactgggaagaagactaccttctgggaaggtgaagcagcaacatctgaaactagcacagcaactgcctaaaacatttgcctctattctgtg

SEQ ID NO: 17474 - DNA, 274 bp, Glycine max
  Clone ID: 701045902H1
cgacgcacgaaaatggcgaccatttggaagacaaacgcagcgagaaacgcagtgcgtagtttgacgcagtccttgccattcactgcccgcacaccttcgatcccctctcatttctcctccgtccgttacctccgcaccggtcgcgatcccagctcaagaacatatgagattattccgccggtgaattgggggattcggattgtgccggagaagaaggcgtttgtgattgagcgattcgggaagtacgtcaagactcttccctccggaatccatt

SEQ ID NO: 17475 - DNA, 271 bp, Glycine max
  Clone ID: 701045903H1
gttgagagttgaaacacacctactacaattgttaaagtcctttcttgtcatagcaaaaatgaagcttgtctttgccaccctactgttatgttctcttcttctaagctcctctttcttggagccagtcatcgcctatgaagactcgtcttattgcagcaacaagtgttcggacagatgctcatcggcaggggttaaggataggtgtctgaggtactgtggaatatgctgtgctgagtgcaaatgtgttccttctgggacctatgggaacaag

SEQ ID NO: 17476 - DNA, 268 bp, Glycine max
  Clone ID: 701045904H1
gagcgatatcttcgactgtgggaagcttctttttctgatcttttacgtgtcaatataaattcccttcaaagaaataagctttccactctttttcaatcaatcaccaatggctccttctttcacttacgtcaaaatcttctcttctctcgtcgcagaggattctccaacgctctcaccagacgcgggtacgctgttgcatcacaaagtgcaacaaagggaggagtggcctcaatgagcggcaagatggcaccaaagtcaggggaagata

SEQ ID NO: 17477 - DNA, 269 bp, Glycine max
  Clone ID: 701045905H1
tcacattgcaaagaaaatacacattacattactaagtctttgttcatttgagtagtagtgatggctagcctcaaggttgcatgtgtggttgctgtgatgtgcatggttgtggtggccatgagtgctgcacccatggcacaggccgcaatcacgtgcgggcaggtcgccggcgacatgtctccgtgcttcagttatcttcgaagcggcggaaaaccgtcgcaggcctgctgcaacggagtgaagtccctcagcagcgcggtcgaagacca

SEQ ID NO: 17478 - DNA, 247 bp, Glycine max
  unsure (1)..(247): unsure at all n locations; Clone ID: 701045906H1
tgttgttgctgctcatcctcantaacctccgagcnctgcaccgaagaacgaanccatggggaagacacatggaatgggatctgctcgcaagctcaagtcccaccgcaggaggcaaaggtgggctgacaagtcatacaagaaatcacatcttggaaatgaatggaagaaaccttttgctggttcatcccatgccaagggaattgtccttgaaaagataggtattgaggctaagcagcccaactctgcc

SEQ ID NO: 17479 - DNA, 267 bp, Glycine max
  Clone ID: 701045907H1
atcaatcttctgagagtgtttggttgaaagtagcaaagatgtttcctttcgggcaaaagggtcaaaagataaaggggactatggtggttatgcagaagaatgtgttggatatcaacagcatcaccagtgttggagggatcgttgaccaaggcttaggcttcataggcagtgcagtcgatgcacttacttttgcagccaccaaaatctccatccagttgattagtgctaccaaggctgatggtgggaaaggaaaaattggaaagagta

SEQ ID NO: 17480 - DNA, 268 bp, Glycine max
  Clone ID: 701045908H1
tagaagaaagaaaattaagcaaataacaagaaagaaacaatgaacgacttgttctccggttccttctcccgcttccgcagcgaccagtcctccccggaccgccaccacgacatcgagatgggcgccaccgcctccggcgcggtcgcggcggcgaggtgaaccttgacaagttcttcgaggacgtggaaggcgtgaaggaggaactaaaggagttggaaggtttggctcagagtctaaggagcagccacgagcagagcaagacgctgca

SEQ ID NO: 17481 - DNA, 271 bp, Glycine max
  Clone ID: 701045909H1
gtcgagctgagaataccagttgctccagtagccggcactaaacaacatggcggacaaggcagtcaccatccgaaccaggaagtttatgacaaacaggcttctctccagaaagcagttcgtcgttgatgtccttcatccagggagggctaatgtttccaaggctgaactgaaggagaagctgggaagaatgtatgacgtgaaagacaccaacactgtatttgtcttcaagttccgaactcattttggtggtggcaagtccactgggtttggt

SEQ ID NO: 17482 - DNA, 269 bp, Glycine max
  Clone ID: 701045910H1
cttcaagaaactatgtagtttcctgatctgctaggcccccatttgtgatttccaagttggggtggtgttttgttgttaaggggactttttaactggaagtcttttgtgtgatgctatctgatattgggacatggagagggttgcagagccgacggtacttcctcgaaccttgcctatcctggttgaggtatcgaactcgtgcacagttgctgctagagattccagtcagagactaaatcgccaggaggtttcgggtgttggtgggattc

SEQ ID NO: 17483 - DNA, 272 bp, Glycine max
  Clone ID: 701045911H1
gttcctccgctgtcggcgacggaggctgcaacactctcaactacactacacgacgccggtttgcattttccaaaccagtcaagctatactattactatagtttcatttcatggagacgcaatcgcatgaagatttacagcaaccgccgccggttacttcaaatgaagctcacagtgatgatgcgtccgaccacagagacgctgagcaaaagcaagatattttgagtactgaagaagttgtgcagattctacaagttgttgcatctacgggga

SEQ ID NO: 17484 - DNA, 273 bp, Glycine max
  Clone ID: 701045913H1
accggatcttcacgattaggagatggctaagtcgaagaaccacaccgctcacaaccagtcctacaaggcccacaagaatggcatcaaaaagccaaagaggcaccgccacacttccaccaaagggatggatccaaagtttctgaggaaccaaaggtacgcgaggaagcataacaagaagagcggtgaaacagccacggaagaagagtaaagtgtcactctcaaatggggctattaggatttgatttgctattcaagtcccatatgttttgtgtc

SEQ ID NO: 17485 - DNA, 274 bp, Glycine max
  Clone ID: 701045914H1
gcaaacgataagaaatgttatcagaaacattggccatccctgcagtactccttgcaatactcattttgattctatcctctgtcttgttccatcttcaagatgaaagaacaaatccaccaggtcctaaacccctcccaattattggtaaccttcacatgctggggaaactcccccatcgctcccttcaagcccttgccaaaaattatggacccataatgttcatcaagttgggacaagtcccaaccgttgtagtttcctcccctgaaactgcaga

SEQ ID NO: 17486 - DNA, 277 bp, Glycine max
  unsure (1)..(277): unsure at all n locations; Clone ID: 701045915H1
ggcanttgtaactgcttctctgaatttgtctgagtctgagctgttaattctcccaacacaattataaaaagaagaaaaacttagagtgatagttgtaggaaagtaaaaacagtaagtgttctcttaattcagtgaggtnctgaattgtncaacttgagatgatggcatcatttgcagggactactcagaagtgcaaagcatgtgagaagactgtgtatttggtggatcagctcactgctgacaacaagatctatcacaaatcatgtttcagatgcta

SEQ ID NO: 17487 - DNA, 277 bp, Glycine max
  Clone ID: 701045916H1
cactgaattcgatcaatcaatccatcttcaattgctttgtttcgatcggaggaaaatggccgatcagttatcgaagggagaggaattcgagaaaaaggctgagaagaagctcagcggttggggcttgtttggctccaagtatgaagatgccgccgatctcttcgataaagccgccaattgcttcaagctcgccaaatcatgggacaaggctggagcgacatacctgaagttggcaagttgtcatttgaagttggaaagcaagcatgaagctgcacag

SEQ ID NO: 17488 - DNA, 272 bp, Glycine max
  unsure (1)..(272): unsure at all n locations; Clone ID: 701045917H1
cacctttcttcttcgttcacctcntccccgtcgcaacacaaagctacgctgcagcaatccacnactgcagngttttccaagtccaatctcagttcacttctcgccagggtttaatctgaatttcttttgtgttgccactgaggttattattatttttcttccaaaatggcgacggtgatgcaaaaaatcaaagacatcgaagatgagatggcaaggacccaaaaaaacaaggctactgctcatcatttgggcttgctgaaggctaaactagc

SEQ ID NO: 17489 - DNA, 272 bp, Glycine max
  unsure (1)..(272): unsure at all n locations; Clone ID: 701045918H1
cccatacctacttncagctcctangancacgcatcactgttgcacttcttactcganctccctctngatttncgacttctggctggttacgctaaaccccccctttattcttcctatcncactancatcgatgggagacgagaataagaaccaagtcccctgcttccggcgtgtggtccaccatcaagnntnncgncaatggcggagctncnggcatgntcnccaccngcgncattcaacccatngntatnntcaangtgnngattcaattc

SEQ ID NO: 17490 - DNA, 267 bp, Glycine max
  Clone ID: 701045922H1
tggacacaagaaaggagcgagatagcgaggaaatttggttcttacttcttacccgcagacagaggaaggaagggaaatagatggaagctgtgtgtggaagtggaagcagtgtttgggtcacatcctcccttacatgctcacccaagatcacactccctctattccgcgccagttaccagcacctaacagcatttccttcacaatcccttcttttctcctatcacccttctcgctatgctaatgctagaaccctccgcgccagaacct

SEQ ID NO: 17491 - DNA, 266 bp, Glycine max
  Clone ID: 701045923H1
atttgaagggatttcttattatcctagagaaatattgaccaaagatagggaaacaagtctaaagagagtcattgaaaagaaatccctacttccacggatgatctatctttcgattaaaagtgcttcagcatcaatcaaggagcatgttgaggtcaatggttctgttaccccagacatcacttcagagctgaaattgttgctggagtgctatgcacagtttttgggcttttctctcactgaagcaatagaagtggtcatgggttttt

SEQ ID NO: 17492 - DNA, 269 bp, Glycine max
  unsure (1)..(269): unsure at all n locations; Clone ID: 701045924H1
tggagcccatcataaggtaaaatgatatganaaangtngatgtcgccaaacaagccttaacttgccctggctattaaatcttgtttggcgacatcaacttttttcatatcattttacattgtttccaaaacccatgttgggttgttttgagcccatcataaggtnaaccanaganactagtactatttgtgaaatcttcttatgcggcaccggtaaggaggacccagttttggaatacctacataattgctatagggtttngtagctgg

SEQ ID NO: 17493 - DNA, 270 bp, Glycine max
  unsure (1)..(270): unsure at all n locations; Clone ID: 701045925H1
gttcacagagaaagatggctgcggaaaacgttgtagagttcacagacttacccgtcaagagacctagnnnnnnnnnnnnnnnnnnnnnnaccaatggagtctccaacgacgccgtttcaacgctacccaatgaccctcaataccctggtatctctgctgttattcccggttggttctcagaaatcagcccaatgtggcctggggaggcgcactccttgaaggtggaaaagattttgtttcaagggaagtctgactanngaaatgtcatgg

SEQ ID NO: 17494 - DNA, 269 bp, Glycine max
  Clone ID: 701045926H1
ctggtcctgtggtggaacacatggaagcacggctaaaagaagatatactagctgagattaggcagtctggtgggcgaatgctattacaccgtgaagagtataacccctcaacaaatcagtcaggtgtggttggatactgggaaaacattcaagcagatgatgtgaagacacctgcagaagtttattccgctcttaaagatgatggatatgatattgtctaccagagaatacctttaacaagagagagaaatgctttggcctctgacatt

SEQ ID NO: 17495 - DNA, 252 bp, Glycine max
  Clone ID: 701045927H1
gaacttaactcacacgtctcctccatcatttcgacacctttaagatttctatgcttttttcctttctcacgcatcactcttctgctgacccaaactcaaaaagcctctttttttggcctcacttctcattttcctcatctgggtcttctccctttgatcaaatcacacttgcattaattgcactttgaatttcagttttttttcccgttaatttcgatcttcttccctttccgagacacaatcaagctttgg

SEQ ID NO: 17496 - DNA, 271 bp, Glycine max
  unsure (1)..(271): unsure at all n locations; Clone ID: 701045928H1
ggtttacaccgagcagccacacctcccgcagcagccatggttctcaaaactgaactatgccgattcagtggtgccaagatctacccaggaaagggcatcanatttgttcgtngtgattctnaggttttcctgtttgcnaactcaaaatgtaagaggtatttccacaatcgcctgaagccttcaaagctcacctggactgcaatgtacagaaagcaacacaaaaaggacattgctcaagaagctgtgaggaagaggagacgtgctgccaaaa

SEQ ID NO: 17497 - DNA, 270 bp, Glycine max
  unsure (1)..(270): unsure at all n locations; Clone ID: 701045929H1
aantacacnagacccagcatcagtangtgttggtcaanacacacacagtttgagtnagngttggatggnnatggnatggtgcctataannatcagagatngagaaangntccacaacattaggttgangangaaaaagttggagggcattccggaggnaaccgaggttcctattgatactaatccagcagagcttgangangcgagcctncanttggaaacagatttgganatactganccgagccatggatatgggantttnggcantc

SEQ ID NO: 17498 - DNA, 272 bp, Glycine max
  unsure (1)..(272): unsure at all n locations; Clone ID: 701045930H1
cactttccacttgtctccgaattagttatcttgagaaacattattcccattgctatatattatggctagcatgaaggttacatgggtggttgtgatcatgtgcatggccgtggtgggtgcaccgatgatggcgcaagccatgnacatgcaatgatgtgacggtgaacatggcacagtgcctatcctacctgatgcagggaggaacaccttcaacactttgctgcagcggagtcaagaacattcttggctctgctgtcaccaccgttgacaaa

SEQ ID NO: 17499 - DNA, 274 bp, Glycine max
  unsure (1)..(274): unsure at all n locations; Clone ID: 701045931H1
gatatgngccagagntgaagcgagaaggaagggtccgcgcnccatggctggcatcaccanctcccccttcaaactctctgcactttccgactctcttctcnncttctgattccanactcttcggccttccnctctccaatncntattccctnaaattcgnncctncttctctntccactacntctctctcctacgtcaaagcncgntactacggaggcggnggcggccctccccgctctcccaacgatcagnttncgcaagtcctccgattgng

SEQ ID NO: 17500 - DNA, 276 bp, Glycine max
  Clone ID: 701045932H1
aagaaattttatttttttttagacgggtctttgtgaacctatgatcttgtgaaaacccagaaagcgatctttgatgcactcataggattggccgattcagtcgcgtgttcggtggccgttgatttcgtgacaaatgaacggtggcgatgaggtagtggcagctccggcggctccaccgcaccctctggagtggaaattctcgcaggtcttcggagaacgcacggcaggggaagaggttcaggaagtggacataatttctgctattgaatttgacaa

SEQ ID NO: 17501 - DNA, 272 bp, Glycine max
  Clone ID: 701045933H1
gaaaaatccaagtttaaagcttcttcaacaaagaagaaagacaagactccagccaagccatctgcttcattgtcaccaggtggtgaagcatccaaattgaactacataaaggaaaaacttcagggtctgacatcaatgctagaagcatcggatgctaaattacctgatatcaagacaaaattagagagtgagatgaaacagcttttggaggatgtgaacagaatggttgaatcttcttcctaaataacgcatggaatacatactagcattat

SEQ ID NO: 17502 - DNA, 270 bp, Glycine max
  Clone ID: 701045934H1
cgagagaacaagaacataagggaaccacagcggcggtaacagaagaacaagcagagaatgggtcgagtgagaacgaagacggtgaagaaatcctctcggcaggtgatagagcgtcactactcgcgcatgaccctggacttccacacgaacaagaagcttctggaggaagtggcgataatcccgtcgaagaggctaaggaacaagatcgcggggttctcgacgcacctgatgaagcgcatccagaagggccctgtgcgcggcatctccctc

SEQ ID NO: 17503 - DNA, 267 bp, Glycine max
  unsure (1)..(267): unsure at all n locations; Clone ID: 701045935H1
aagagacgaatccgtcgtcggcgacggcggcgcntgtccgacggcgagtcagcgggaccagtggatggtagagtcgcaggtgtttcagatttaccaactcttcgccaccattcctcgcaacgcccaaaacctcatgttggagcttcaacgcgataatcacgtctccaaagatctccgccatctcaatttcgcattttccgtcttggacgctaagcactagtgaatccagttcagctgattttaaaaataaataactagcatacccca

SEQ ID NO: 17504 - DNA, 264 bp, Glycine max
  Clone ID: 701045936H1
agagactgtgcctcttcgaactgtcaatcggcagtgttcatctggacttcaggcggtttctgacgtagctgcctatataaaagccgggttctatgacattggtattggggctggactggagtctatgacagtagatcgtgtgaataggcttcccaacattaacccaaaggtagagacctttgcagaagcccgggattgtcttcttccaatgggaatcacttctgagaatgtagcacaacgttatggtgtgacaaggctagagca

SEQ ID NO: 17505 - DNA, 265 bp, Glycine max
  Clone ID: 701045937H1
cgcaacacaacaaaaaaagacaacccagagagcgcgtcttaataaacgctcttctctgaaaacccccatttcttttcttctttcttcttctctttcgcttcttcgatcttcgatcttcgtcgctgaaaatgagagagtgcatttcaatccacatcggccaggccgggattcaggttggaaacgcctgctgggagctttactgcctcgaacacggcattcagcctgatgggcagatgccaagtgacaagaccgttggtggaggtga

SEQ ID NO: 17506 - DNA, 264 bp, Glycine max
  Clone ID: 701045938H1
agaaggagaagaaggactttgaagcagaagaaacatagaatttacagagagaaagaaaatgttcaaacattaccggtggccccggttagtggttcataaacctttctctaagcttccgactctctctctcttacggggtctttgcagtccgtggaagagcttgttgggttatctcagctttcacctttccaggctctgattcaaagaaaaatctcaacttccttcaacaattcatctctacaatttctggatagtgtctttttt

SEQ ID NO: 17507 - DNA, 262 bp, Glycine max
  Clone ID: 701045939H1
gtttgcagtcactgctttgtttagatcagaaccagatcgtgttctcttcttccattggcaaacatggcaactcaaatgagcaagaagagaaagtttgtggcggatggagtgttcttcgccgaactgaacgaggttctgacacgtgagttggcggaggacggttactccggcgtggaggttagggttacgccgatgcgcaccgagattatcatcagagccaccagaacccaagccgttctcggtgagaagggaaggagaatta

SEQ ID NO: 17508 - DNA, 267 bp, Glycine max
  unsure (1)..(267): unsure at all n locations; Clone ID: 701045940H1
attactaaattatatcagataacatgangtnntctccaatgtganntaagcaaaaccctaacaccaaaaccagaagcgaaatacgcaatcgcaatccagcgaatatgaaggtcgtcgctgcatacttgctcgcagtgttgggagggaatccttccccttctgccgatgacatcaaacacatcctcggcgcagttggagctgaggctgagaatgagttgattgagtngctcttgactgaagncaangganaagacttcaatgagctaa

SEQ ID NO: 17509 - DNA, 233 bp, Glycine max
  Clone ID: 701045941H1
cttgaaaggcttaagttggagtacatagttcgtggtgagaagaggaacatattcgagcttattagcaaaatagcttcttctcaagggttgagagggttttggaaggggaacctcgtaaatattctgcggacagctccattcaaagcggttaatttttgtgcttacgatacttatagaaagcagctgcttagattctctgggaatgaggaaactaccaattttgagaggtttat

SEQ ID NO: 17510 - DNA, 268 bp, Glycine max
  Clone ID: 701045942H1
ctctttcttcctcttcctcagtagtgcgattttcgattctcttctctgcaactatgcctaaccctaaggtcttcttacgacatgaccatcggcggtcaacctgccggccgcatcgtgatggagctctatgccgacgtgactcccagcaccgccgagaacttccgcgcgctctgcaccggcgagaagggcgccgggcggagggcaagcccctccactacaaaggctcgtccttccaccgcgtgatcccgaacttcatgtgccagggcgg

SEQ ID NO: 17511 - DNA, 267 bp, Glycine max
  unsure (1)..(267): unsure at all n locations; Clone ID: 701045943H1
aacggntntcagntgacagcttccntggaaattctntgctatgtggagattggttaggatcaatatgttgcccttatgtacnaaaatcaagagagatnatttcgagagttgntgttgtatgnctcacgcttggnnttatgatattntnggccatggnantngnagcgtnctnnngntccagcnaatcgnancgattgaganaaggatccagcaganctgggcaangtcctccanaactggttatnctncacatggacanggctatcc

SEQ ID NO: 17512 - DNA, 155 bp, Glycine max
  Clone ID: 701045944H1
gcctatataccaaggacttttcttaaggaaggacaatggaagattgcctagctctattgccatcaaatcaatagtattgctctaggagtattcatatccttcatctttacatgaccacacaataaagtgtgtttattagcacattatttagtttt

SEQ ID NO: 17513 - DNA, 270 bp, Glycine max
  Clone ID: 701045946H1
gcgatgggagaagaagagccagaggtgcttgaatcggaatccaatgtagtcaacgccaacggtaacagcagcaacagcaacgaagaatattccttccccgttcttcgtttcgatgtctctcctcacagaacctaccatttccaccgccagttcatcactccttccaaccctaacaatttcttcaaggccgttaaatggtcacccgatggttcctgtttcctcacctcttccgacgacaacactctccgcctcttcgcgccaccgggaacg

SEQ ID NO: 17514 - DNA, 273 bp, Glycine max
  Clone ID: 701045948H1
gttttagaagctaaagctaagcaagctgctgagaaggaaaagagaaaaactgaaaaggatctggaggatgagaatggtggggcgggtgtatactcaatgaacttgaggaagaattacattttagccgatgatgaatggaaagaggatgtgctgccagaaattttggatggacacaatgtgtatgatttcattgatcctgatattctgcatagggttgaagagttggaaagagaagaagggatgagacaggaagaagctgaggatgatgatttt

SEQ ID NO: 17515 - DNA, 268 bp, Glycine max
  Clone ID: 701045949H1
ctcaaacccaaaacccgaacctccgcttcggatcctaatccagtaatccctgatgggaacggaaggctacacttacatggggcgcagtttgagcgaactccgcatcaacgacgattcctcttcctccgccttcagcgactgcaacagtgacagatctggcgaattcgccaccgcttcttcgcaaacgcggcggtttctcatcgcctgcgccaccgaaaatccgacgacttgatccgccaactcgtcgccgatctccactcctcctcca

SEQ ID NO: 17516 - DNA, 246 bp, Glycine max
  unsure (1)..(246): unsure at all n locations; Clone ID: 701045950H1
cccaattttctagggttttatancattttccgatggcatnctgcagatgttgagtaacgttgctttgtcggtgggctcgcttgggccactgacgaccatgccctcgagagagccttctctcagtacggcgaaatcgttgaaacgaagattatcaacgatcgtgagactggcagatccaggggttttggatttgtgaccttcgcctcggagcagtccatgaaagatgcgatcggagcgatgaatgga

SEQ ID NO: 17517 - DNA, 268 bp, Glycine max
  Clone ID: 701045951H1
gggcaccaacaccgctaacactctgttcattcattcttctccgtcagaagcagagagtaagaatgctctcaggggatatacctccaaatcagaccatttacataaaaaatatcaatgagaaggtcaagaaagatgaattgaagagatctctgtattgcttattctctcaatatggaagaattttggatgttattgctctgaagacacccaagcttcggggacaggcgtgggtttgtttcagtgaagtcactgctgcaagcaatgcagt

SEQ ID NO: 17518 - DNA, 262 bp, Glycine max
  Clone ID: 701045952H1
cgaacacgaacaacaactcctcctcgatgttgacgaccacgatgacaagaataagaagcccaagaaaccccacgttcaggcccaagcccaatcccaggcccaggcccaggcccataggtcatccgcatattccgccatggcggtcttcttcctcggcgctgctcgttttgttctacttcttctacctggaggtgtccttctcggagaatttcctactggcgctgattttcgtggccgtggcgctcctacttcgtctccaaaa

SEQ ID NO: 17519 - DNA, 94 bp, Glycine max
  Clone ID: 701045953H1
attactcttggaagtataactctaaaaataatatatttgtaagcattttgttgggcttcagttgaaggtcttatcaggggttttgatgcaccaa

SEQ ID NO: 17520 - DNA, 262 bp, Glycine max
  Clone ID: 701045955H1
attcactcatcctcctcgcaatttccgatctttctgtagttgtctggtctccgtcaaccatcaatcaccaacgtagatcgcacacaaataacaatgggtttaggttttgttgtcggattcctcgggcttctgattctatttcacgccgcatattctaccatccaatacaagggtttgttgaagattacggaggaagagttttcagggcctcctttgaatgtggtgattgaggtgactctagggttagttttttgcatgtggg

SEQ ID NO: 17521 - DNA, 263 bp, Glycine max
  unsure (1)..(263): unsure at all n locations; Clone ID: 701045956H1
caattttttattttntttgtcttcgtgattattattatttggatcatgctcttcgcttcaattttccttttcaaatccccctgaattttatttctttctgaatcacatcagattcaattgaattataccccctcaatgcaatggtggtctgcaaatgtcgcaaggctactaagttatattgcttcgtgcacaaagttcctgtctgtggggaatgtatctgcttcccggagcaccaaatctgcgtggtccggattattccgaat

SEQ ID NO: 17522 - DNA, 56 bp, Glycine max
  Clone ID: 701045957H1
cgcagattgactactgttaattgaagtttagttacaatttgaaaatgatatggttc

SEQ ID NO: 17523 - DNA, 265 bp, Glycine max
  Clone ID: 701045958H1
atctgcagcaaggatagttaaacgtgtttttgctaatgacttaaatccttatgcagttgagtatctggaaagaaattgtgttctaaacaaacttgacaggaagattaaggtctttaacatggatggaagaaggttcattaaatctatgtatgacagtgatatatctcagtccatcacacaggtggttatgaacttgccaagtgaagctgcagaatttctagatgcatttcggggaatatacaaaaatagacccaaggatggggaa

SEQ ID NO: 17524 - DNA, 264 bp, Glycine max
  Clone ID: 701045959H1
gatcgagataactagaaacagtgtgatgaaaatgaaggtccttgttttcttcgttgctacaattttggtagcatggcaatgccatgcgtacgatatgttccctctccgaatgaacactggctatggtgcccgtactccggaggtgaaatgcgcaagttggaggcttgctgtggaagcacacaacatctttggctttgagaccattcctgaagagtgcgttgaagcaacaaaggaatacatccatggcgaacaatatagatcaga

SEQ ID NO: 17525 - DNA, 269 bp, Glycine max
  Clone ID: 701045961H1
gaagaaacgaagatagaatgtgcacagccctaaagacgaattaccagcttagcgaggagatcggtcgcggtcgtttcggcaccatcttccgctgcttccacccactctccaacgaaccctacgcctgcaaactcatcgacaaatccctcctccatgactccaccgaccgcgactgcctccagaacgaacccaaattcatgaccctcctttcacctcacccaaacatccttcaaatcttccatgttttcgaggacgaccaatatctctcc

SEQ ID NO: 17526 - DNA, 96 bp, Glycine max
  unsure (1)..(96): unsure at all n locations; Clone ID: 701045963H1
gactttctcctcaattcagccaccccnccattttcgttgcacaaganttttctcaaacactaccanaagggctcaacttccctttcctgcaaaggt

SEQ ID NO: 17527 - DNA, 271 bp, Glycine max
  Clone ID: 701045964H1
atctcaaggaaattcaatgttatgtctgcaagagactggccatctatgctgtgtcaatactgatgatgcaacagcaggagaaatttcttgttacaaatgtggtcagctgggtcatatgggtttggcatgtttaaggttgcaggatgagattgcaagtggagccacacctagttcatgcttcaaatgtggtgaagaaggacattttgcccgggagtgcacaagttctataaattttcctccacagtcagggaaggggaattgggaatcatca

SEQ ID NO: 17528 - DNA, 264 bp, Glycine max
  Clone ID: 701045966H1
atctgcagcaaggatagttaaacgtgtttttgctaatgacttaaatccttatgcagttgagtatctggaaagaaattgtgttctaaacaaacttgacaggaagattaaggtctttaacatggatggaagaaggttcattaaatctatgtatgacagtgatatatctcagtccatcacacaggtggttatgaacttgccaagtgaagctgcagaatttctagatgcatttcggggaatatacaaaaatagacccaaggatgggga

SEQ ID NO: 17529 - DNA, 138 bp, Glycine max
  Clone ID: 701045967H1
ctctgtgctcaacttaagttgccttacaatgtatccagtctttcctttcttctttccttttcccatataatcgtgagacttatgatatatctgtgtctcacttcatcaataataaattataataaagaagagcaaaaa

SEQ ID NO: 17530 - DNA, 266 bp, Glycine max
  unsure (1)..(266): unsure at all n locations; Clone ID: 701045968H1
ggcaaatcgcangttcgtgncgtgaatctaaatcaaagtttctcattaaactttctggcgttagattcacgcacaaacttgtcatttcccttttcttaaccttttttttttccttttccgtcaaaactttgtttgttacattcgacttcgaattcagattcagatttctctgtttagtgctcctcaaaccgatgacgccgcggcttgttagcttctggctccgctacggaatatccttcggtcaacaacactgctagaaatggcta

SEQ ID NO: 17531 - DNA, 260 bp, Glycine max
  Clone ID: 701045969H1
cagatctgggagaggattttctctcgaagagttgaaggctgcgggaattcccaagaaacttggtccaactattgggatttctgttgatcaccggagaaagaatcgttctttggagagtctgcaggccaatgtgcagaggctcaaaacctacaaggctaagttggttgtgttcccaagaagggcacacaaggtcaaggctggtgattctacccctgaagagctggctaatgccactcaagttcagggttcattcttgccca

SEQ ID NO: 17532 - DNA, 259 bp, Glycine max
  Clone ID: 701045970H1
ctcaagaataacttcacacgtcgccaccaatcatgaaatagcgttcattttgtaatatagaagcgagaaagatagagagactgacaacacctctctctctctcccctcgttgatcccaaatctattaggggtttttattcgatgctattcggcctgaagctttcgtttcgcggatttttttaattatttttttttcctgcctatcaggaaagttgaaaaaaagatggaccatgacaagactggatgcgaagtcccccag

SEQ ID NO: 17533 - DNA, 261 bp, Glycine max
  Clone ID: 701045971H1
ctaaaacaaaacaaaaagaagaggggggcgaagagaagaagatggaggttagtttatcctcaacatcatgtatacccttaagctcgaagttgaagcataagcatggccttttccactctcaaattcccattcccacagcttcaaccaaaaccagaagaacaaaacctttgtccatagttaacgcctccagacaaaccttgtcctccaactggctcgtttctccacacgatttttctgcatccaccgcttccccatggcttc

SEQ ID NO: 17534 - DNA, 261 bp, Glycine max
  Clone ID: 701045972H1
gtgctgtgcaggtcaaggcccttttacttgttcgtccggttgttcccatcttctctctcgtaccaatcaaatcacacttttgtgttgtgttgggaaaccctaaaccccgttttcggtgagatcgagatcgatcgaacatggatgaggagtacgatgtgatcgtgttgggcacgggtctcaaggagtgcattctcagcggtcttctctccgtcgatggcctcaaggttctgcatatggataggaacgactattacggaggag

SEQ ID NO: 17535 - DNA, 263 bp, Glycine max
  Clone ID: 701045973H1
aaattacatagcctcagtaatctgagagagaaacaaaaacaatgaaggtttccattgccaagttccactcccttcccctatgttttttccttctcttggccttcaacacaaaacccctcctagcagcagaaccagagccagtggttgataagcaagggaaccctttggagccaggagtagggtactacgtgtggccactttgggctgatgaaggaggcctcacactaggccaaacaaggaacaagacatgccctctttatgtt

SEQ ID NO: 17536 - DNA, 264 bp, Glycine max
  Clone ID: 701045974H1
aaccattgcaggcatcgacgtcaatgataacgcaacaatcaaagcatcaaagtatctcccaagaggtggctatgctcaatttctaaagaaagatggactgagaggaaagagattaggtgttgtaagaacattctacggttttggaaatgacacttttatgcatgatactttcgaactgcacctgaaaacaataaggcaaaaaggagcagttttggttgacaatttggagataaacaacattcaggaaatctttaatgaccaaag

SEQ ID NO: 17537 - DNA, 265 bp, Glycine max
  Clone ID: 701045975H1
caaaccccccagcaacgtgcacgtaaataaaacccataagtcataagccccctaatcttcacctcattctcgatttgggaagcgaaaaatcataaaaccaactaagaacagagcaagttttgcttctgcgtcgtcccctgattccggcaattgtatcccgtgaggtgtgacttgtaagctgctacagtaagaaaaggaacagaagaaacccgaattgttatatttttttgccgaaggattacctggaagcaatcatggatgttga

SEQ ID NO: 17538 - DNA, 261 bp, Glycine max
  unsure (1)..(261): unsure at all n locations; Clone ID: 701045976H1
gtctgaaggcgaggttaagcatagaagaaagaagagaatggctagagacagcgtcctaacacgcgtggcgaccggngccgccgttggcgtgctatcggcggcgcagtcggtganataattttcacttcttattcacggtttggttggatccttttcattaataggcaaacacggcacagctttcgctctgttcttaggttagtgtgaatttggaactggtgtgttgcatgcaggtgctgtttatgggacttacgatgcaat

SEQ ID NO: 17539 - DNA, 265 bp, Glycine max
  unsure (1)..(265): unsure at all n locations; Clone ID: 701045977H1
ggcgnacgaagagttgggtagttggactgatctgctacattcttccaccaagcttctcgaacaagcngctccttctgctcagttccctcgacttcagaggaacttagatcaactggaagcantatccaagaagcttanatccaagacagtaaggactgaagcaccttctcaatctattgctgcaacaaggctccttgctcgtgaggggataaatgcagagcagcttgcaagggatctgaagtcatttganctgaagacaactttt

SEQ ID NO: 17540 - DNA, 258 bp, Glycine max
  unsure (1)..(258): unsure at all n locations; Clone ID: 701045978H1
cgctcaagaagttggcgtttgatcatgttgttcatagtataaggcgtatgaaccaaaagcataagaacgaagctaagaacagagcgcttcagaatgtcttgtttgacttgcttcagaaagaggctgaagagccagccaagagggnactcgtgactctatgtgagcttcacaggagaaaagtgtggtttgatgagagaacagcaaatgcaatctgcactgcttccttccatccaacatctaggattatgatagcaactt

SEQ ID NO: 17541 - DNA, 268 bp, Glycine max
  unsure (1)..(268): unsure at all n locations; Clone ID: 701045979H1
ggcgcgaaaatgagcggacgnagggggaagaagaagggagcgagctttgtgatcgattgcgcgaancggtggaggataaaattatggacattgcttctctggagaagttccttcaggagaggattaaggttggcggcaaggccggtgcactcggcgattccattactgtcactagggacaagagcaagatcaccgtcacctccgacagcaacttctctaaacggtatctgaaatatttgaccaagaagtacttgaaaaagcacaatgt

SEQ ID NO: 17542 - DNA, 268 bp, Glycine max
  Clone ID: 701045980H1
gtgagggtaagaatgtttctggggttaattcagcctgtcagggtcctcatggcttgttacattcagaatcttctactgtagataatgtaagttatttgatatttgagttttgcatctcatggttccccaggtttttaatgctaataactattttttaactgtggtttttgaccttatatttccaaaatcttgttttaatttttctcttgatatggtaaaaactggctggttgatctattctgaaagaacaaaagcagttggcatcatt

SEQ ID NO: 17543 - DNA, 263 bp, Glycine max
  Clone ID: 701045982H1
attacatctctagcaaacacaaacaacagagacaaaaagaaatcttcaatggaactgagctgcccaatctctcaacaaatatatgtactggttgattcaaattgcaaagggagtaaaaggagggtggggagagggaaagtgaaggttcatttcagtatggtaactactacagagaggttgaagatctgcgagctgtagttcaacacttccgtgagcagaaatacgtaattacagcaattgttggtcacagtaaagggggtaat

SEQ ID NO: 17544 - DNA, 262 bp, Glycine max
  Clone ID: 701045983H1
gcagcctatgatggcagcctactaccccaacaacgtcactactgatcacattcagcagtatctggatgagaacaagtccttaattctgaagattgttgaaagccagaattcaggcaagcttagcgagtgtgccgagaaccaagcaaggcttcagagaaatctcatgtacttagctgcaatagctgattctcaaccccaaccacccaccatgcctggtcagtaccctccgagtgggatgatgcagcagggagcacactacatg

SEQ ID NO: 17545 - DNA, 231 bp, Glycine max
  unsure (1)..(231): unsure at all n locations; Clone ID: 701045984H1
tgacggtagcagcaggaatcggttacgctctggtagcactaggaccctctctctccctcttcgtttccgtcatttccaaaaaacccttcctcattctcacagttctctccagtacgttgttgtggcttattagtttgattgtgctgtctggaatatggaggggggttttgcctctcagcacaacagcttcgtggccttttggaatactcattttcncatctgttgcttttc

SEQ ID NO: 17546 - DNA, 258 bp, Glycine max
  Clone ID: 701045985H1
ggttatcaatgacaggtttggcattgttgagggtttgatgaccactgttcattccatcaccgctacccagaagactgttgatggaccatcagccaaggactggagaggtggaagagctgcttcatttaacatcattcctagcagcactggagctgccaaggctgttgggaaagtcctccctgctttgaatggaaaattgactggtatggcattccgtgttcccaccgtggatgtctctgttgttgacctcacagtgag

SEQ ID NO: 17547 - DNA, 261 bp, Glycine max
  Clone ID: 701045986H1
gcgagtttcacgccaacatagatagatccttgcgccgttacaccacgctttcttttccctcttctcactcccacactaccaccaacacgatggaacccaacaagcaccaccaacaacaccagaacaagaccaagaaaaaatggttcctcccactcatcctctctctcctcatctccaccttcctcatcctcctctccgtcttcgtttcctctaactcaccctcccagcggcaccgccgcgccccagttccaaaagaagtgc

SEQ ID NO: 17548 - DNA, 260 bp, Glycine max
  unsure (1)..(260): unsure at all n locations; Clone ID: 701045987H1
tccactttcactggaatcacaatcctgaaacaaaaacatcttagcatttaacatactactagacaacatgaccaccacattggaaagaggtttctcggaagagcaagaagctctggtggtgaagtcatggaatgtcatgaagangaattctngagagttgggtctcaaggttttctnganaatatttgagattgctccatcagntcagaaattgntctcnttcttgagggntncaacgggtcctttggagcnanatcccc

SEQ ID NO: 17549 - DNA, 261 bp, Glycine max
  Clone ID: 701045988H1
atatcgtatacgctgcagtttgattgcattttacttcaaccatgtcgggtgatttagcatacaagagcattctccagagttcagcacttatgaagtacatctttgaaacgagtgcctatccaaaagagcatgaacaattaaagctactcagagagaccacggtacagaagtgccaggaaaattcggaatatatcatgaatgtgccagtggatgaagcgcagttcgtatctattctgcttaaaatcatgaatgcgaagaaaa

SEQ ID NO: 17550 - DNA, 207 bp, Glycine max
  Clone ID: 701045989H1
ctgatatcgttaccattgctgctcgtgactctgttgcaattcttggagggccaaattggaaggttaaacttggtagaagggattccacgactggctttttcaaccttgcaaacagtggtgtgcttccaggaccgaattcttccctcagcagccttatccaaagatttgttgatgaggttcttgaagtattcctagttctagatcgcg

SEQ ID NO: 17551 - DNA, 262 bp, Glycine max
  unsure (1)..(262): unsure at all n locations; Clone ID: 701045990H1
ctctaactttcacacgcagcgggcttcttcttccgttttcctgaatcggtgtgaacaatggngacgtacgctgcgatganacccaccaagcccgggttngaggagtcccaggaacagatccataagatanggatcaccctttcttccaagcacgtcaaaaacctcgagaaggtttgtgcggacttggntcgtggtgcaaaggacaagcgcctcagggttaanggacctgttangatgcccactaaggttcttcacatcacta

SEQ ID NO: 17552 - DNA, 208 bp, Glycine max
  Clone ID: 701045991H1
gttaggtttggtgacacttagttagaaagagcgtgcgaagagggtggggagaagatttagtgttgtggccatggcggagtctgagaagagtactgtgcttgttacgggagccggtggtcgcacaggacaaatagtttacaaaaaattaaaagagaggccaaaccaatatgtggctagaggtctggttagaacagatgaaagcaaacag

SEQ ID NO: 17553 - DNA, 262 bp, Glycine max
  Clone ID: 701045992H1
gtggggtctcagtacccatttgaacctttaaagtatctgcggaagacactacggcttacatatgaagaagggattcagatgctcaaggatgttggagtagaaattgaaccttatggtgacttgaatactgaagcggaaaggaaattgggtcagctagtcttggagaaatatggcacggagttctatatccttcatcggtaccctttggctataaggccattttatacaatgccttgctatgacaatccagcatacagcaact

SEQ ID NO: 17554 - DNA, 264 bp, Glycine max
  Clone ID: 701045993H1
agcaccttcaacgccgccgtagtttgttattggtttggtttgatggagatggagggtgagaaacagcacaagtttgatgtggacctcggcaacctcatggctttcgattcctatcacaccttcccttctcaaccatctctttccagggaggacctcatcaaacagtgtttactgaaaggcactcacttggttcaagctatcgcagatgccctctttatcttaccatcgaccgaagatttggatggaccccttgtcaccttgcct

SEQ ID NO: 17555 - DNA, 268 bp, Glycine max
  Clone ID: 701045994H1
gggacaacccttctcctacctccatggctaatttcataactttcttcattcccctagccctaaccctccttttctcctccctcgtcactgccagttaccatcaaagcatctctccaagccttctacgttctcgtgagaagctcacgcaccttcgcttctatttccatgaaatttttactagcgacaaaccctctaatctcgtgatcgacccccccaaggtggtagccgactctccccttccatttgggtcccaagtggtgatcgagga

SEQ ID NO: 17556 - DNA, 274 bp, Glycine max
  unsure (1)..(274): unsure at all n locations; Clone ID: 701045995H1
caagttaacaacacttttgtcttcgttccattatctagttctcaatnctcttcaccctttggcctctgaaagaaatgggtagtctgaagcggaaagaacaacagtaggattggcagcaagagaccccntcagggattctctccccatacacctacaatctaagaaacacagggccctgatgatgtttacattaaagttcactactgtggagtttgccatctgatctccaccagattaaaaatgatcttggcatgtccaatatcccatggtccca

SEQ ID NO: 17557 - DNA, 267 bp, Glycine max
  Clone ID: 701045996H1
aattctctctactactgctagctgtgacttgttttgagttcaatcaaatcgcattggtatctgaaatcaggaaagatggttagcgtagtgagatcaggcaggcacaaagggcagaaggcccagcaaccatccttgccattggaatgcaaacccaccaaaccgtgttgatcagagcacctatcctgattactacttcagaatcaccaacagtgaccacatgaccgagctcaaagagaatttcagcgcatgtgtgacaagtctatgatc

SEQ ID NO: 17558 - DNA, 281 bp, Glycine max
  Clone ID: 701046002H1
gtaatgaagtgccagaagctttgaggcttgaaaacggtgttggttagaacctcaacaagaagaaagagactcttcagtgaatatgatccttggcggtgctgtttgccaacgctgagggcaatatactcatcgaacgttttcatggagttcctgcagaggagcgcctgcactggcgttcattcttagtcaaactaggagctgataatcttaagggtgtcaaaaacgaagagctcctagttgcttgccacaagtcagtttatattgtatacacggtgctggcg

SEQ ID NO: 17559 - DNA, 277 bp, Glycine max
  Clone ID: 701046003H1
gctgaagcaaagcaatggctacttcaaagttgaaaacccagaatgtggttgtatctctctccctaaccttaaccttggtactggtgctactgaccagcaaggcaaactcagcggaaactgtttctttcagctggaacaagttcgtgccgaagcaaccaaacatgatcctccaaggagacgctattgtgacctcctcgggaaagttacaactcaataaggttgacgaaaacggcaccccaaaaccctcgtctcttggtcgcgccctctactccacccc

SEQ ID NO: 17560 - DNA, 272 bp, Glycine max
  Clone ID: 701046004H1
caaattggattgttcctccgaacagtgaaccctcacctaacaatcagaacccaggatttggtgaaacgatgaacagtgataggaaaattggggttgccttggacttttccaaaggaagcaaaatcgctctgaaatgggctattgacaatcttatcagcaacggtgacactctctacatcgtccacaccaagccttccggaggaagtgaatcaggaaatcttctctggtccaccactggttcacctctgattccattgtcggagtttcgtgaa

SEQ ID NO: 17561 - DNA, 269 bp, Glycine max
  unsure (1)..(269): unsure at all n locations; Clone ID: 701046005H1
ctaacctaaaccctactcattctccatacctcaacgaagaggttaaagagacggcaacactttgctgtccgccttgaccgagcagagcttcgtcttggccctcgattttgccctaaagtactctcagtcacaacagacacnnnnnnnnnnnnnnnnnnnnnnaatggcaccgaagcagaccaaggctgagaagaagatcgcttacgatgcgaantgtgcgacctaatggaggagtacggccagatcctcgttgtgaactccgataacgt

SEQ ID NO: 17562 - DNA, 267 bp, Glycine max
  unsure (1)..(267): unsure at all n locations; Clone ID: 701046006H1
gtaagaagagcaagaatagtagagtataaagttacaccgtgtaaggcaaaaagtgccacaaagatggacaaaggatagcgtaggatttacatgttggcttcttgccaagccataaacgtgttggtgtatctatccatctgggtgcatttatcaagttgcccaccagctagtgctgtatgtgttgtttggtgaagagttaaagatttgggaagctcaatttcgttatcatttgtacgatcagacttacacntcaaacaacgatgtaaa

SEQ ID NO: 17563 - DNA, 264 bp, Glycine max
  Clone ID: 701046007H1
gcacaacaaatgtaccagatctgcaaggttatgctgatgcagaaaattcatggcctctgtacacatctgcccttcccgttgtttctggtgttggtgcttcccggtctgaggagttaattgttagaatgttgtgtccctctgacaagattgggcgggtcattgggaaaggtggtagtacaattaaaagtatgaggcaggcaagtggtgctcgtattgaggttgatgattccaaggctaattatgatgagtgtttaatcattataa

SEQ ID NO: 17564 - DNA, 266 bp, Glycine max
  Clone ID: 701046008H1
gaaaaatacaaaatttgaggaacatttgtctctcatcaatggctgccacgagaccggtgcagtgtttgttacgaagggtttgcagaggaagtaggactattggggttgccacagaagttaatgcttcttcttcttctcagaaaatcatcgacaaggaatatgaacacagtgctcacaattaccatcctcttccgattgtatttgctcaagcaaagggaacctctgtttgggatccagagggaaacaaatatcttgattttctatca

SEQ ID NO: 17565 - DNA, 268 bp, Glycine max
  unsure (1)..(268): unsure at all n locations; Clone ID: 701046009H1
gggcacccggncaacaccaaaaccaccaccgcctctcctacctcccggagccatggccgccaccgactcctccgctgcttcgtcacgccagctttcgcagagggagacggacatccagatgatgctcgcngccgacgttcacctcggcaccananactgcnanttttagatggaacgctacgtcttcaagcgccgcaccgatggtatttacataattaaccttggaaagacatgggagangcttcagcttgctgctaggattatagtc

SEQ ID NO: 17566 - DNA, 266 bp, Glycine max
  unsure (1)..(266): unsure at all n locations; Clone ID: 701046010H1
cttttcttctcatttttaatctttactttttttcttcttttntttttctcgccgttgtaacagaatatcacgattttcgtttcgccaattcgtgaaatcgaaagattcccacagaattgtacgaattattgtncatttttttgtctctactgtcgtgctccaacttggtaaactagaagttcattnattgttttcatttcttcaatgggggatgctgagaatgcccttccacctacaaagaaaagggctgctggaagggagctcac

SEQ ID NO: 17567 - DNA, 266 bp, Glycine max
  unsure (1)..(266): unsure at all n locations; Clone ID: 701046011H1
gcccaacggccgaaacttcaacatcattcagaatcagctggaccacgtcgtctcctacgacntcgaatggaccaacggcacctccttcgtctacaccctcgacccttccgacccgacatgcaaagttgtggactttggagtgggtattctccgacccaattggctcgacggtgcaacctatttgggtcagcaacacgttgataacttcctctgcaacgtttgggcgaaggttgatttcattgtctactacgaggaggtcctcactc

SEQ ID NO: 17568 - DNA, 271 bp, Glycine max
  unsure (1)..(271): unsure at all n locations; Clone ID: 701046013H1
cttccacttcaattcaagagcacttcttcaacattaaaatcaagagtgttcatacgatgttgtcctgagtacccctgaattccaatctccatccttccaagttatcaacaaaacnntccaacaatgttgttttccacttccaccccancacacaagtgtcttgctctttctttccacttcaaatctgganntacccagcaccaactacacccacatcatgagtgtggtaacagcacaaccacnaacatcaccaaccgctgaggtgaggcta

SEQ ID NO: 17569 - DNA, 272 bp, Glycine max
  Clone ID: 701046014H1
gaactccccaatccaaggcaacgctgcataactttggccaccaacacccccgtctctcatacattctacgaagtgaacgtcaatggcaagttgtgttggcacttcacctctatatttaccagttggtattggaaattttcctcatgctcatgttaagcttactagaccaaacattgttgggatgaaacccttaccatataacatcagaaaaggagaacttaagattgctacattgcaaaatccatcatcccatgtcagacatgctgctgctt

SEQ ID NO: 17570 - DNA, 275 bp, Glycine max
  unsure (1)..(275): unsure at all n locations; Clone ID: 701046015H1
gttctgagtattctgatcgctccctgagagagctcgtcgcggcggttgcagaagaagattgcaagatgaagttcaacatcgcgaatcccaccactggatgccagaagaagctcgagatcgacgacgatctgaaactgcgagcattttgggacaagaggatctcacaggaggtcatcggagatgcactcggtgaggaatttaagggctatgtcttcaaaattaccggagttgtgacaaacaaggatttccaatgaagcagggagtgctgnctcctg

SEQ ID NO: 17571 - DNA, 277 bp, Glycine max
  unsure (1)..(277): unsure at all n locations; Clone ID: 701046016H1
gagagatcagagagaatcaaaataccactttcttagtttcaaactcaactttttgagggtcttttctgtattaaaaacacaagagttagtcttagctaacagtgttcatatgatgaatgcttcaaagttcattaaatgtgttactgttggagatggagctgttgggaaaacctgcatgctcatttgctacaccagcaacaagttccccantgattacataccaacagtatttgataattttagtgccaatgttgctgtggatggaagcattgtcaat

SEQ ID NO: 17572 - DNA, 282 bp, Glycine max
  unsure (1)..(282): unsure at all n locations; Clone ID: 701046017H1
aaaaccnntaaccctnaaaagccagagatnacaaaacccccaaaatatctntcgctctgaaaccggcatggatttgcagcagagcgagttcgatcgcctcttgttcttcgagcacgctcgcaaggccgcagaagctgaatacgagaagaaccctctcgatgccgataacttaacaagatggggtggagcnctattagagttgtctcagtttcagagttttcctgnatcgaagaaaatgacccaagaggctgtttcgaagctagaggaggcgcttgcagtgaa

SEQ ID NO: 17573 - DNA, 276 bp, Glycine max
  unsure (1)..(276): unsure at all n locations; Clone ID: 701046018H1
aaganaagaaagggtgtttacacttgacttgagtgagacggagagagagtgcgagtgcttgatgttctcaattaattaaatctcacagagaaagtctctctctctctgtttttgttgtgttctctttactacctcttgaaaccaaaagggtcactctgtgctgtggcctctgttttcaaaggaaacccttgttcttntccttgcctttctttcctagcactgtcttctaacttccaactcatataattcattttccctagtcttctttgttttcac

SEQ ID NO: 17574 - DNA, 273 bp, Glycine max
  unsure (1)..(273): unsure at all n locations; Clone ID: 701046019H1
ccggatagcggtgataaatatgcacgccccgttcttggtggttcagccttaccttaccctcgcagaggaagaaccggaagaggaaaaactagaaaagatcccaacagtgagaagccgagcgattttgtttaccttccaagagatgaagcatttggtcacttgaagtcatcagattttctcgcttatggnatcaaatctgtatcccaagatgtcttgcctgtcttgactgatgcattcgatggaantattttgagccttgagtttgataatttt

SEQ ID NO: 17575 - DNA, 268 bp, Glycine max
  unsure (1)..(268): unsure at all n locations; Clone ID: 701046020H1
caacaatgtcgaagcgaggtcgcggaggatcggcagggaacaagttccgcatgtcactgggtctnccggtggcggcgacggtgaactgcgccgacaacaccggcgcgaagaatctctacatcatatcagtgaaggggatcaagggaaggctgaaccggttgccgtcagcttgcgtgggtgacatggttatggccaccgtcaagaagggaaagcctgatctccgtaaaaaggtgctccccgctgtcatcgtccgtcagcgcaagccgtg

SEQ ID NO: 17576 - DNA, 266 bp, Glycine max
  Clone ID: 701046021H1
cacgactccttcggagatctctctctcgcccataatccaaccatggcaaatacgggaaatttagacgcggcgatagagcaattgctgaacgtggagaagcagatgaggctcgccggtgacgtggcaggtaccagaaaggcggctaccgatattttgcagctctgcttcgatgcacgagcctggaaaaccctcaatgaccagattgtcgttttgtcaaaacgacgtggccagctcaaacaggccgtaacagctatggtgcaacaagc

SEQ ID NO: 17577 - DNA, 264 bp, Glycine max
  Clone ID: 701046022H1
gcatatttggcatcaacaatcaacaatcaacaatcacaaatagaaactcactctttcgaaaaaaccagaatttgaatatgacgttagggtttgagggttatagttataccacaacacttggaaggaagagggtcgtgttattacacaatgaagcttcttctctcaactctaattcggcggtgaatccattgaagagaatgtgcagcggaaaattcacttttgactctgaaaggtctcgccttgaggcccttcctcttgatgttc

SEQ ID NO: 17578 - DNA, 264 bp, Glycine max
  unsure (1)..(264): unsure at all n locations; Clone ID: 701046023H1
ctcctatagccggcgctcancaacatggcggacaaggcagtnaccatccgaaccagaaagttcatnanaaacaggcttctctccagaaagcaattcatcgtngatgtccttcatccagggagggctaatgtttccaaggctgaactgagggagaaattgggcagaatgtatgacgtgaaagacactaacactgtatttgtcttcaagtttcgnantcattttggtggtggcaagtccactgggtntggnttgatctatgattca

SEQ ID NO: 17579 - DNA, 266 bp, Glycine max
  unsure (1)..(266): unsure at all n locations; Clone ID: 701046024H1
ggttcactttgtatttgtaataccatttcctcgcgcggcactgcttccngcngccgccgccgtcagcgtcagaaccaatggcagacgcatcttctctgccgacggatcaactcgccgccatcaccctcgacgaggttcccaaagctaatttctccgaccgcgtccccatccgatccatcatctcccgcaccgacggcggctcgggcctcgccggcaggaaggcgcgcgttggcggctgggtgaagacgggacgcaaagccgacaag

SEQ ID NO: 17580 - DNA, 268 bp, Glycine max
  unsure (1)..(268): unsure at all n locations; Clone ID: 701046025H1
attgagaagaaaagtaaaaaaagggaacgtgaagaaaattagaataagaaaaaggaaacgagtaaaaagttaatccacaatcagaaaatggaaaagaaataggtaggaaaaatgtctaaaaggaaaatctccaaaaatgtgagcaatgacaaaaaaaaatgtgagtacaataatgaaagacaagagatgagaagaagaaaaganaaaaaganaaaagattagtgaaggagaaccaacaatataaaagaaaaacggtaaggggcaaaga

SEQ ID NO: 17581 - DNA, 265 bp, Glycine max
  Clone ID: 701046026H1
gaagagagtagtggggcatgccgaggaaaaggacggtggcatccgaacgaaagcggtagcaaaatccgtttaagttaattcttttgacgcatacaaaggaaaacattttcttattcaaatactcaccaataccaaatccaacacccacacccacaccaataacaagcttggttggtacttatctacaatctgcatcatggaaggtgttattctgagaagggtcattccttcggataacagttgcctcttcaatgcagttggatat

SEQ ID NO: 17582 - DNA, 264 bp, Glycine max
  Clone ID: 701046027H1
aagccgaaaataaaccagatgttcaattttggtgacaatcttgagggctactacagccctatagatcaggtggaacagaaaccactggttaaccagtatgttaaccgtgccccgtttgctggaaatggagttcaagtctcacctgttactccatctgctgatgttactgcttacttcagctctgagcattcgagcagctcgtttgattattctgacctcggatggggtgaacaagtccccaagacacccgagatctcatccatg

SEQ ID NO: 17583 - DNA, 213 bp, Glycine max
  Clone ID: 701046028H1
agaagatgaagaagcaggtgaaggtgccgaaggataggaacgtgacgtgggatgctgaggaagaggaggaaaacaagaagaggttgctgaagggtgttgccaagaacgtgaaatggacggctgagatcacgggaaaaggggagaagagtgggagctcgagaaagtacacgtttcaggtgcagagtggggatgctgagaagaaaaaggagaagg

SEQ ID NO: 17584 - DNA, 272 bp, Glycine max
  Clone ID: 701046029H1
ccagttcccggcgatgacgaacaagagaaaaagatcccagaaacataccccaccacctcctcctgccctgcaacacccccaactccacaaacccaagcccgccactccctcaacaccgcaaaagcccgggcctgggcccctctcagcctcacccgccacgaactctccttacccctcaccttccccacgggccaaaccttcctctggaaaaacaccgccccttcacaatacaccggagtcgtcgggccccacctcatttccctcaagcacct

SEQ ID NO: 17585 - DNA, 273 bp, Glycine max
  unsure (1)..(273): unsure at all n locations; Clone ID: 701046030H1
ttttgaatgagtttcagaagggccatagtcacatggctgttgttgtcagacggtgtgacaagactaaccaacaatcttcccaaaataatgcaaatgactcggtgagagatgttaaggtggatattgatggtgaaaagcctcccaaagagaaagctttgaaacccaagatgccactccacaagtggaaaagctttccaaatacanacaagtcatcaaataggggttctcggagcagaaaatggtcaaaaaatatgtactcggatattttagaga

SEQ ID NO: 17586 - DNA, 275 bp, Glycine max
  Clone ID: 701046031H1
agcacagaaggataaacatttgaccaagcctgaagtgggtcattttagggctcaaggagttccaatgaagaggaagcttaaggagtttccagtgacggaagatgcactacttcctgtgggaacatcacttaatgttcgccattttgttccaggccagtatgttgatatcacaggaataacaaaaggaaaaggttttcagggtgtgatgaagcggcatggatttagtggagggccagcatcccatggtaattcattggcccatcgaacacttggtt

SEQ ID NO: 17587 - DNA, 277 bp, Glycine max
  Clone ID: 701046032H1
ctttgtagacatggaattatctcttttgtcaaattaccaggttcccaagcaaaagaaaataaattacacgtgtccctcagcctgtgtaccccatgcatgctacatccatgtgacctagatcgaccgactgtttctcatacccctgagattcgaagaaaccgtgtagcttctgttccatcggagatgctttgccctgtcacttgcactccatttccatctgtagcaattcctctgtgtacatgcaacaatggtccttgtccatcatttgaaccccggg

SEQ ID NO: 17588 - DNA, 279 bp, Glycine max
  unsure (1)..(279): unsure at all n locations; Clone ID: 701046033H1
aaggtatggcttctagtagtcttcgttgcattgcttttgcacatgtagaagtagctgaggaggagcttgtagatgaagaagggaatgcaatggcgaaagtgaaagaaaatggtttaacattgttggggcttgtgggtattaaggatccatgtcgtcaaggggtgaagaatgccgtggaagcatgccaaaatgctggtgtgaatatcaaaatgatcacaggtgacaatgttttcactgcaaaggccatagcnaccgnatgcggcatacttcggcctatca

SEQ ID NO: 17589 - DNA, 277 bp, Glycine max
  unsure (1)..(277): unsure at all n locations; Clone ID: 701046034H1
cgattttggaatcttccgcgtcactccgtcgccgccgccgaaagccaccgcaatgtcaaagaaaaggggcctctgcattggaagagaagcgcgagaagatgcttcaaatcttttacgagtcgcaagacttctacctgcttaaggagctcgagaagatgggtcccaggaagggtgtcatttctcagtctgtgaaagatgtggtccaaagtttagtggatgatgaccttgtttccaaagataaaataggaacttctgtgtncttttggagtctacctag

SEQ ID NO: 17590 - DNA, 273 bp, Glycine max
  Clone ID: 701046035H1
gagtagtagaagagcggtctggtccaagtgctgcaatatgcaaggcaaagaaatggaagggttgtcgtcttcgtcggcgatcgcgcagaaaacatgggaactcgagaacaacatcatcccgatggacactccgggcggcgccgccatctcctccacaaccaccacgacaagcgccgacgactcgatcttctactacgacgaggcgggccagaacgagttccagcgcgacaagccctgggccaacgacccccactacttcaagcgcgtgaagat

SEQ ID NO: 17591 - DNA, 267 bp, Glycine max
  unsure (1)..(267): unsure at all n locations; Clone ID: 701046036H1
tgcaggcaacagacattattctgctgggcctgggcttgctcttcgtcngctggtggtggcggcgctggtccaccaccggcggcggcccgaagaacctccctccaggccctcccgggtggcccatcgttggtaacctcttccaagtgatgctgcagcgccgtcacttcatttacgtgaaccgcgatttacgtanaaaatacggcccaatcttcagcatgcagatgggccagcgcacgctgatcatcgtgagcagcgggagtnaatcca

SEQ ID NO: 17592 - DNA, 265 bp, Glycine max
  Clone ID: 701046037H1
caagtacacaagacccagcatcagtatgtgttggtcaacacacacacagtttgagttagagttggatggacatggaatggtgcctataagaatcagagaaagagaaaggatccacaacattaggttgaagaggaaaaagttggaggacattccggaggaaaccgagcttcctattgatactaatccagcagagcttgaagaagcgagccttcacttggaaacagatttggaaatactgagccgagccatggatatgggactttgg

SEQ ID NO: 17593 - DNA, 264 bp, Glycine max
  Clone ID: 701046038H1
ttgggtgcgattccttcactcacaacaacaacacatcactatggctcttctgagtcgagccttcttcacgcttccctcagctggtttcccctcaaagggtagtttcactccacacaacgctcccatctctgaacgcatccccatccacagccacgcctacaccatatgccccgccaccgcctccgtccgcttcctctcccgccggcgtttcgaaggcggcggagttcgtgatctcgaaggtggacgatctgatgaactgggccc

SEQ ID NO: 17594 - DNA, 260 bp, Glycine max
  unsure (1)..(260): unsure at all n locations; Clone ID: 701046039H1
cagttaggagatgtaagtagaagttaatgacttttacctacacattatacatagtaggtaaaacctatagtgacagacaattagccgtcattatacgcccctcaaagttgacggaagaaatgtccgtaggcaaagtctatcatacntttagctacaaattttttntttatagtgacaatttttgtctgtaggtataggttatttttctgtagtatnaactttatccctatgtcacataattgacccaaattccanattta

SEQ ID NO: 17595 - DNA, 261 bp, Glycine max
  unsure (1)..(261): unsure at all n locations; Clone ID: 701046040H1
gagaaagtgaagtggaagagaaaaaggtgaagaacaacggtggctctggaattatgagcaccgagtcatttgaatctctgggattgtctgaacctacttataaagccattatggatatgggattccaccacatgactcagtggtaattgcatgcaacgcatcagaattgatgctaaatcaagantgcagattcaagcgagggcaattccgccacttttgattggaaaagatgttcttggtgctgcaaggactggttctggg

SEQ ID NO: 17596 - DNA, 263 bp, Glycine max
  unsure (1)..(263): unsure at all n locations; Clone ID: 701046041H1
caagtacacaagacccagcatcagtatgtgttggtcaacacacacacagtttgagttagagttggatggacatggaatggtgcctataagaatcagagaaagagaaaggatccacaacattagnttgaagaggaaaaagttggaggacattccggaggaaaccgagcttcctattgatactaatccagcagagcttgaagaagcgagccttcacttggaaacagatttggaaatactgagccgagccatggatatgggacttt

SEQ ID NO: 17597 - DNA, 261 bp, Glycine max
  Clone ID: 701046042H1
gccgaggtcaggaggagcactagctaagttcacaatttcaaaatggctaggggactaaagaagcatttgaaaaggctcaatgctcctaagcattggatgcttgacaaactgggtggtgcatttgcgcctaaaccctcatctggaccacacaaatcgagggagtgcctccccctcattcttattctgcgaaaccggctgaagtatgctctgacataccgtgaagtcattgctattctgatgcagcgccatgttcttgttgat

SEQ ID NO: 17598 - DNA, 261 bp, Glycine max
  Clone ID: 701046043H1
caacatctacagtccatgaagttccgttattattgcctccaagtattccaccagatgagtcaaggagatgcatgtttcttatactatactttgaattagtctcgtcaaggtaatatctgatatgattgtgatgaactttgtcacatccttgaaatacttgcaagtattagctctgtgctattgttttggtgatatatccatgtcaagcttcaaattccctatgcaaaatctaagaaagttgaggcttgaaagaataacccc

SEQ ID NO: 17599 - DNA, 254 bp, Glycine max
  unsure (1)..(254): unsure at all n locations; Clone ID: 701046044H1
cacatcttaaccttgttcttaccagatggctgcctcagttanactcttatttntgtcctttctctcgttgttcatctctttctccatagctcaaacctctttcagaccaaaggcacttgttcttcctgtaaccaaagatgtttctgcctcagttcctcagtatgtcacacaaatcaaacaaagaaccccacttgtggcagtgaaactaactgttgatcttggtggtggctacttgtgggtgaattgtgaaaagg

SEQ ID NO: 17600 - DNA, 265 bp, Glycine max
  unsure (1)..(265): unsure at all n locations; Clone ID: 701046045H1
aacacaacaaaaaaagacaacccagagagcgcgtcttaataaacgctcttctctgaaaacccccatttcttttcttctttcttcttctctttcgcttcttcgatcttcgatcttcgtcgctgaaaatgagagagtgcatttcaatccacatcggccaggccgggattcaggttggaaacgcctgctgggagctttactgcctcgaacacggcattcagcctgatgggcagatgccaagtganaagaccgttggtggangtgatga

SEQ ID NO: 17601 - DNA, 249 bp, Glycine max
  unsure (1)..(249): unsure at all n locations; Clone ID: 701046046H1
cggncgtaaccctccaacaacaacncttcctcgtcagaacaatgtctctggtggcgaaanaggatttccagcacattctgcgtgtgctgaacaccaacgtggatgggaagcagaagataatgttcgcaatgacctccatcaagggtattggaaggagattcgccaacatcgcttgcaagaaggctgatgttgacatgaacaaaagggctggtgagttgactgctgctgagttggacagtgtgatgactg

SEQ ID NO: 17602 - DNA, 271 bp, Glycine max
  unsure (1)..(271): unsure at all n locations; Clone ID: 701046047H1
aaaaggccttctttcctcatttcggacgcacgctccccatccatgtctacttgtgtaaaatcccgagatgtttgtattgttggtgttgcacggacgccaataggtggtttacttggcaccctatcatctctttctgccacagagttaggctcaattgctattaagactgctctcaagagagcaaatgttgatccatcactcgtgcaagaggtgttttntgggaatgttcttagtgccaatttagggcaggctcctgccagacaggctgcat

SEQ ID NO: 17603 - DNA, 273 bp, Glycine max
  Clone ID: 701046048H1
gccaccgtaaccgtaatcgcactgttagtaatatcaattctatagtttgttactgacgctgcacccaccgctaaactaaacttccccaatcaccatgggagattctaaacatatttccgttcaccgtcttctcggcgaaggcttaattgctgatgtggtgctgtggaagaattggcgcggagcgttgcggtgcttgtatctgccaccgcattgtggtacctcttcgagcgagccggttacaatttcttgtccttcgtcgccaatgtagtgttg

SEQ ID NO: 17604 - DNA, 277 bp, Glycine max
  Clone ID: 701046049H1
actcatcaagggttgtgaaagcagagaagtgagatacactaagttatcctcataaatacactctaattaggtggcaagataagtgtctaaccttagtaacattgccacatattgtgttcattttggaattgtgccactaaaattctattcaattcatctatggctgcctcttcttatgctatgcaatcaatcctggcaaaccctttgatccgcatttccagcgggtctagggtgaaccaatttggcgttcctgctttgcacatgagaaggaatgttg

SEQ ID NO: 17605 - DNA, 275 bp, Glycine max
  unsure (1)..(275): unsure at all n locations; Clone ID: 701046050H1
gaacaccaattgaacaccaatctggcagcattgaacaccaattcaacgccaatgggtcaggaagaggaaaaatcccaagaaaacaaagtggnnnnnnnnnnnnnnnnnnnnnnnnnnnnnnnnnnnnaagagaaaaaatcagatgagaagaaattcaaggagaaatctgcgccgccagaaatcgtgcttaaagtgttcatgcattgtgaaggttgtgctcgcaaggttcgtcgctccctcaaaggattcccaggggtcgaagatatactcacaga

SEQ ID NO: 17606 - DNA, 267 bp, Glycine max
  Clone ID: 701046051H1
atttgccgtttccccgccacacgcgctgacacttctttgccggagagtctcaccagaatccggtgccggaaacctctctccgtccgatgctccggcgattccacttccggctctgtgggttcggagttcgatccgaaggtgtttcggaagaaccttactcggagtaagaattataaccgcaaaggatttgggtacaaggaagagaccctccaactcatgaatcgcgagtacaccagtgatatcattaagactttgaaggaaaatggg

SEQ ID NO: 17607 - DNA, 264 bp, Glycine max
  Clone ID: 701046052H1
gtttcctgagtctgaacggaatcccacttaaaagtcgttctccttcctcttcgcagctgttatatagtactattttcatttcatatgtttatgcacctctatatatacatagacacatgtaaatggttgcaaaggaagataagataggtaccagctatcacatagtttatttaatccgttatatgccacctgatatataggcatattagctagttaggtaggtatagtagtttaagttaattcaaccatggaagacagggatca

SEQ ID NO: 17608 - DNA, 261 bp, Glycine max
  unsure (1)..(261): unsure at all n locations; Clone ID: 701046053H1
gtttagttatctactcttttctgcatgtttgttctctcaacgactcctccgcgaaagaatattattcaatattttggttgggttgaatcccggggttgaagcgttgcagacatcacggctattctaagagtgtctcgctccctcattcatgtccgatctgtacgacggaggacgggtagttgcgtaactgccgttaacccttcgccgcacggtgggcgtggtgctttgccttctgaaggtggtagcncttcagacttgctc

SEQ ID NO: 17609 - DNA, 260 bp, Glycine max
  unsure (1)..(260): unsure at all n locations; Clone ID: 701046054H1
aagtttttgatgttaaaccatttgtcagtcgtctactaggcatgggagactggtctgggttcatggataaaattcatgaagttgttcctatggatcaacaacctgaactgcttcaaaagctgtcagaaggaaacttcaccttgaggattatgtatgagcagtttcagaacttacttaaaatgggtcccancagccaggtcttttctatgctaccaggatttagtgctgaattaatgccaaaaggccgtgagaaggaaagc

SEQ ID NO: 17610 - DNA, 260 bp, Glycine max
  Clone ID: 701046055H1
gcattttcttctttctttgttttcacaactgccctctgctttcaaacatagatacactcattctgcttcttcctctctccatcaaacatcaaacatcaaacatcaaacattttgggatcaacattagactctcatggcttcagggtctggaaaggacggtcctggcgtcccaaggaagcctaaatttaaaccaagagccccacctcgtcgagtgataaagcaagaagttaaagctgaagtggttgatgatgctgatgcag

SEQ ID NO: 17611 - DNA, 260 bp, Glycine max
  Clone ID: 701046056H1
gtgttctcagattggaatcccattgactctaccatggccacgccctctgatccttccaaccaagaagctgttgtaagaaggagaaacaacggaccccctattaagttcctccttcctctcatatatgcccctgttctccctctaattcgtctatcgctgcggcataaacccgtcttgagagatcgcttgtttactgctgtgttggctggggcctttgctcatggcttctatttggtaacagatctgtatgatattgagag

SEQ ID NO: 17612 - DNA, 259 bp, Glycine max
  unsure (1)..(259): unsure at all n locations; Clone ID: 701046057H1
taagtttcactttctttgcatagggcaacctcctttctctgtnactctgagtatcgtatcgttttattattatttctaattctctcttatcangtccattgaatatgtctccgtcgttggatctncctcncaagggnggnttcagttttgatctatgccgaagaaacgcaatgcttcaanacaagggcctcaaagccccaacctttctcaaaactggcaccactattgtcggtttagttttccaggatggtnnnattct

SEQ ID NO: 17613 - DNA, 262 bp, Glycine max
  Clone ID: 701046058H1
aagtgaactttgcaactttgagcagaaaatctcacagtcgaaggaagaaataatcaccaatggcaattgaacacgaagacgatctcaaagacgagaagaaccctcgacccctcgacgaggatgacatcgccctcctcaaaacctacggtttgggaccttattccacaagcataaaaaaggcggagaaggaaatcaaagatatggccaagaaagtgaatgacttatgtggtatcaaggagtctgatactggattagcagcacc

SEQ ID NO: 17614 - DNA, 261 bp, Glycine max
  unsure (1)..(261): unsure at all n locations; Clone ID: 701046059H1
ttctgtcttatccaaaatgttgccacttgtgtacatactcatagctcttcctgcagtagtgtngctattgatcctcttcanagccaanaaanacaanccgccangtccaccaggtccaagangncttcccataatcggcaaccttcancaactcgangcttcgnagctcaatctccaantagggcagctctcaaagacctacggtccccttttctccctccgantcggcttcaagccagccntcgtcgtttcctctncaaa

SEQ ID NO: 17615 - DNA, 218 bp, Glycine max
  Clone ID: 701046060H1
ttgttgtttgtgtgtttgttttttctctcacctgaaaatgtcttgctgcggtggtaactgtggttgcggaagcgcctgcaagtgcggcaacggctgcggaggctgcaagatgtacccagacttgagctacaccgagtcaaccaccaccgagaccttggtcatgggagtggcaccagttaaggctcaattcgagagtgctgaaatgggtgttcccgctg

SEQ ID NO: 17616 - DNA, 266 bp, Glycine max
  unsure (1)..(266): unsure at all n locations; Clone ID: 701046061H1
gaaaagcctgaaaaaactggactcaaatttaaaatcatgagcttgaaggtgaaaggattaattgattacgtccctgaactgtttgatgagcagaaggaccaagtagcagtggagcagattttgcgagttgtttttctagatccagagcgtccctgtcctgctttggaaaaactgaaccgacagntggntgatgctgatgctgcccttgaggcacgcaagaaacctgcagaagatgcaggtcctaaaattatcggggaaggacttgt

SEQ ID NO: 17617 - DNA, 271 bp, Glycine max
  unsure (1)..(271): unsure at all n locations; Clone ID: 701046062H1
tctagagttctaagcaatggcgattatctccgatttcaacgaagaggagccgaaacccgctcactcttcaccaccgcaaccccaannnnnnnnnnnnnnnnnnnnnntcagtgctacttttgaccggtcaaatcccatcgctttcctggagagagtcttcgaattcgtctccgaacagagcgactttctgggcgacgcagagcgccgagaaggagatagtgtcgctggtgcacgccgccgggaagaagaagagagagcttctcaaggcgga

SEQ ID NO: 17618 - DNA, 270 bp, Glycine max
  unsure (1)..(270): unsure at all n locations; Clone ID: 701046063H1
gtttctctttcgangaatggggtggtggagaaggtggcaaatgacaattcaagtgaataatggnnnnnnnnnnnnnnnnnnnnnnnnnnnnngtccctaatcctcaagattcactgtggatgatgaatttgaggactggggaaacaatggattctggatcttatccggagcgtccaggggagccggattgttcatattacatgagaacaggcctttgtagattggtgcaacgtgtcgatttaatcatcctcctaacaggaagctggctat

SEQ ID NO: 17619 - DNA, 273 bp, Glycine max
  unsure (1)..(273): unsure at all n locations; Clone ID: 701046064H1
gggtgaatcatctcctctcctctcttctacgatggccatggacagtgtttatgcttcgtctttaactagcaatttatatttatagatatattcctgccctcttcatcttcantttcaaccacccgcgccatttctacctcgcagtcgataggctccagttcaaaatgtgattgaactggtggatctggtggctcgacgtccatgcttcctcatcgtggtctgctgcagcacgcgcaacgacctcgntctctctgctctccccttcctttcgtc

SEQ ID NO: 17620 - DNA, 163 bp, Glycine max
  unsure (1)..(163): unsure at all n locations; Clone ID: 701046065H1
gtgttgttgctgctcatcctccgnaacctccgagctctgcaccgaagaacgaagccatggggaagacacatggaatgggatctgctcgcaagctncaagtcccaccgcangaggcaaaggtgggctgacaagtcatacaagaaatcacatcttgganatgaat

SEQ ID NO: 17621 - DNA, 271 bp, Glycine max
  Clone ID: 701046066H1
gggaaaaatggtgtcgctgaaactgcagaagcgcctctccgcaagcgtgctcaagtgcggcagaggaaaggtttggcttgaccccaatgaagtcaacgaaatctccatggccaattctcggcaaaacatcaggaagttggttaaggatgggtttatcatcaggaagccaaccaagattcactcccgctcacgtgctcgtaggatgaaggaggcaaagaggaagggccgccatccggttatggtaaacgtaaggtacaagggaggcaaggct

SEQ ID NO: 17622 - DNA, 268 bp, Glycine max
  unsure (1)..(268): unsure at all n locations; Clone ID: 701046067H1
gaattatcatacccttcaagatgaaaccgtacctacgtccaatattcctattattccttatccttctcgaccaatccatttcggcgagtgctgctataaatattaatggtctgagaaacaaaattagagaagttctaaacaagcacccgagcatcaatcttccggcagataaactgaagaaggtgaagagaccactgaaggcactggattatctgcttggcgaatgtaaggacaggccgcctcaagaatttcaagaattttgcccgna

SEQ ID NO: 17623 - DNA, 261 bp, Glycine max
  Clone ID: 701046068H1
cagtcgcaaccctaatcagaagaagcgcagttcaaagcgagtgacagccaccagccatgggtcgtatgcacagccgcggtaagggtatatcctcttctgctttgccctacaaaaggacacctcctagctggctcaagatctcttcgcaagatgtcgaagaaaatatctgcaagtttgcgaagaaaggtttgaccccgtctcagattggtgtcattctcagagatctcacggtattgctcaggtcaatagcgtcactggcag

SEQ ID NO: 17624 - DNA, 260 bp, Glycine max
  unsure (1)..(260): unsure at all n locations; Clone ID: 701046069H1
ctctcacacacaaactagagcgagaaatattatagctcagggttttggggtatcattattcaaccatcaaccattttctctcttcttcttctctagtgagaaatttctctttcattgtgtgtggtcagtgagatgtatgtagcttccatgcgcaagtctttcaaggactcnttgaaagtccttgaagctgatatccaacacgccaataccctgggcctcagattttccaagggagtatgatggtgcatgccttcagatga

SEQ ID NO: 17625 - DNA, 260 bp, Glycine max
  unsure (1)..(260): unsure at all n locations; Clone ID: 701046070H1
ccagagccaaggtaggttaaacactcttcttcatcgtcgtcgcaatgggacgtgtgatccgtgcgcangtaagggagcaggctcggtcttcaagtcccacacgcaccaccgcaagggccctgcccgcttccggagcctggatttcggagagcgcaacggctacctgaagggtgtcgtcactgacgtcatccacgatcctgggccgtggcgcgcctctcgctaaggtcgccttccgccacccgttccgctacaagaagcag

SEQ ID NO: 17626 - DNA, 258 bp, Glycine max
  Clone ID: 701046071H1
aactttgaaaacaattgaacaacataggataaagagacaacactgtagtatttgtatatatgtggtaagtttcaaaatagataacagtggaagtaacgaacaaccaaacatgtctccttcatcattgtgctctcttcaaacgttcccgccaatatctcacgcattgcttaaccgccaccacaaaccggcgcacgatagcaccgccggcgtacggagaagaacgccttacgtagtttgcgctgaaaaaggcagcagagc

SEQ ID NO: 17627 - DNA, 258 bp, Glycine max
  Clone ID: 701046072H1
actagatctagggtttattttccttttcattttgaatttgaacaagttttgcgtcttcaaagaaataggatgggagaattgaaagacactgaggcttacgaggaagagctcatcgactacgaagaggaagaagaaaaagctcccgattctgctaaacccgttgctgaatctggcaagaagggttatgttggcatccatagttcgggatttcgagacttcctgttgaaaccagagcttcttcgagccattgtggattca

SEQ ID NO: 17628 - DNA, 259 bp, Glycine max
  Clone ID: 701046074H1
agaagagtgaagtaaactcagggtttttctactcaagtgcggaacagagagaagctatggttgcagctgaaagacggcaggttgatgaaaaagtcaaaagaatcattgaactgaagaataaggtttgttctggtaatgatagcaattttgttgtcatcaaccaaaaaggaattgatcccccatctctggacctgcttgcaagggaaggaataattgcccttcggagagcaaagaggagaaacatggaaagattggtttt

SEQ ID NO: 17629 - DNA, 261 bp, Glycine max
  unsure (1)..(261): unsure at all n locations; Clone ID: 701046076H1
gaatgggttcgaaggggaagaagaaaggttcaccggaagacattctggaaaccctaggagacttcacgagcaaagagaactnggacaagttcttcanccttcgcggtgattccttcgagtggtacgccgaatggcccaacctcagggacccactcctctccctcctcaaaaccgttcctctcccgcttcagctcctcgtccccggctgcggcaactcccgcctctccgagcacctctacgacgccggccacaccgccatca

SEQ ID NO: 17630 - DNA, 263 bp, Glycine max
  Clone ID: 701046077H1
tgagtctctgtccgaagccacttgagagaaaatggcggtgcctctgctctcaaagaagatcgtgaagaagagggtaaagaagttcaagaggcctcagagtgacaggaaaatttccgtcaagactaactggcgcagaccaaagggtatcgattctcgtgttaggagaaagttcaagggatgcactttgatgccaaacattggttatggttcagacaagaagacccgccactatctccctaatggtttcaagaaatttgttgttc

SEQ ID NO: 17631 - DNA, 268 bp, Glycine max
  unsure (1)..(268): unsure at all n locations; Clone ID: 701046078H1
ccactccgcacctcgcagcctctgtgccctcaacaaccatggctgaaatcgaaactaccgttccagatcccacccanatcgacgtcaaactcttcaatcgctggagcttcgaggatgttgaggttaatgatatgtctctggctgattacattggagtgtccccatcaaagcatgctacatatgttcctcacactggctggtaggtactcagtgaagaggttccaggaaagcgcntgccccattggttgagaggctcaccaactctctg

SEQ ID NO: 17632 - DNA, 250 bp, Glycine max
  unsure (1)..(250): unsure at all n locations; Clone ID: 701046080H1
gaaagagtgactaggtggtctatntgagcttgtgaagttngtgtttgtgtgaaaggtgtgaggcttattattcatagaagagtttgtgtttgttcacataattgatcgtggtgtggtgtgtgtcggtggcaatggaggcaagtttggtggagaggggtagagagagagctggacatgttaacaaggttggttatgttagaagggtcattgcaaagaagaagaaacagctttatcgaagggttaggagacc

SEQ ID NO: 17633 - DNA, 274 bp, Glycine max
  Clone ID: 701046081H1
tgagagaagctgcgcaccttttcacactagtgctgattgctgaaactggcatcgctcgccatttgcgcaaagatcccaacaacaacaccattcgaaagttgaaactgaaaaacaccaatccctcctcgtacgaggtttccttgttccgtcatcaattctcgtgtttaaggtcttgtgagtgtaagcagcatggaggatattcaattggatattagttgggacgatgtcgcctgtcccatatgcttggattttcctcataacagtgttctccttc

SEQ ID NO: 17634 - DNA, 268 bp, Glycine max
  unsure (1)..(268): unsure at all n locations; Clone ID: 701046082H1
atctctcttcccagttctcacctcaccgctgcatcttcacgtcgtctctaacgagggaaaatgagtcgaggaggtgcagcagcagcgaagggaaagaagaagggtgctacattcaccattgactgtgcaaagccagtagaagacaagatcatggacattgcttctctcgagaagtttcttcaaganaggatcaaggttggtggcaaagctggtgctcttggtgactctgttaccgttacacgtgagaagactaagattattctcacct

SEQ ID NO: 17635 - DNA, 261 bp, Glycine max
  unsure (1)..(261): unsure at all n locations; Clone ID: 701046083H1
gggatcttatcaacatactggaggatgcnattagaagtggacaccctatattgattattgctgaggatattgaacaagaggctttagcaactcttgtggtgaacaaacttagaggatcactgaagattgcagnactgaaggnccctgggtttngagagcgcaagagccagtacctgatgatattgccatcttgactggaggtactgtaatcagagaagaggttggccttactttggacaaagctgggaaagaggntctcgg

SEQ ID NO: 17636 - DNA, 262 bp, Glycine max
  unsure (1)..(262): unsure at all n locations; Clone ID: 701046084H1
atccactttcactggaatcacaatcctgaaacaaaaacatcttagcatttaacatactactagacaacatgaccaccacattggaaagaggtttctcggaagagcaagaagctctggtggtgaagtcatggaatgtcatgaagaaganttctggagagttgggtctcaagtttttcttgaaaatatttgagattgctccatcagctcagaaattgttctcattcttgagagattcaacggttcctttggagcaaaatcccat

SEQ ID NO: 17637 - DNA, 258 bp, Glycine max
  Clone ID: 701046085H1
ctctaacctacctctttttcttctctctcaacaacttcaccttcttcctcctcgatcatgtctcacttcaagggcaagtaccatgatgagcttatcgccaatgctgcgtacattggcactcctggaaagggtattcttgctgctgatgagtcaacagggacaattggcaagcgtttggccagcatcagtgtagagaacattgaatccaacaggcgagctcttagggagctgcttttcactgctcctggtgttcttcaa

SEQ ID NO: 17638 - DNA, 256 bp, Glycine max
  unsure (1)..(256): unsure at all n locations; Clone ID: 701046086H1
tttttatttctctcttctctctgcatcgcttcaggttcttctgaaaagatgtctcgcgtgtatgttggtaacttggattcacgagtcaccgagagagatctcgaagacgaattccgtgttttcggagttattcggagtgtttgggttgcacgtagaccacctggtnaatgcttttattgactttgatgaccgcagagatgcacaggatgctatccgtgaattggatggcaagaatggttggagggttgagctttct

SEQ ID NO: 17639 - DNA, 255 bp, Glycine max
  Clone ID: 701046087H1
agaaattgagtttccgagataaccagttttctctttgattcatcaatggcaactgcgaggaccgtgaaggatgtttcgcctcacgatttcgtgaaggcttatgcttcccacctcaagcgttccggcaagatggagcttcctgagtggaccgatattgtaaaaacagcaaaatttaaggagttggctccatatgatcctgactggtactacattagggctgcctcaatggcaagaaagatctatttgagaggtggt

SEQ ID NO: 17640 - DNA, 258 bp, Glycine max
  unsure (1)..(258): unsure at all n locations; Clone ID: 701046088H1
gtggaactatgatggttccagcacaggccaagctcctggagaagacagtgaagtgattatatacccacaagccattttcagggatccattcagaaggggcaacaatatcttggttatctgtgatacttacactccagctggagaacccattcccactaacaagaggcacgatgctgccaaggttttcagccatcctgatgttgttggctgaagagacatggtatggtattgagcangaatacaccttgttgcaganag

SEQ ID NO: 17641 - DNA, 256 bp, Glycine max
  unsure (1)..(256): unsure at all n locations; Clone ID: 701046089H1
atcacattggcanagaaaatacncattacattactaagtctttgttcatttgagtagtagtganggctagcctcaaggttgcatgtgtggttgctgtgatgtgcatggttgtngtggccatgagtgctgcacccatggcacaggccgcaatcacgtgcgggcaggtcgccggcgacatgtctccgtgcttcagttatcttcgaagcggcggaaaaccgtcgcaggcctgctgcaacggantgaagtccctcagcag

SEQ ID NO: 17642 - DNA, 81 bp, Glycine max
  unsure (1)..(81): unsure at all n locations; Clone ID: 701046090H1
cttgtgttacctccgatagtaataaccagcgttcatccacaaaatgtctcgaaacgacgacgtagtggnacagaacgcggc

SEQ ID NO: 17643 - DNA, 258 bp, Glycine max
  Clone ID: 701046091H1
aacaactaaatgtgccacaactagagggagctacttctcaacaattcacaaatttgacgacttaattgttatcccctttcaactctctacactcttcccatttctagccaatacccatctcatccttcttgtgacaaccaaaagatcatcaaatccaacttttcttttcataacttaggagatttcatcctttcaaacatggatgaaattgaaatccctgctcatttcctctgccccatttccctccaactcatgagg

SEQ ID NO: 17644 - DNA, 260 bp, Glycine max
  unsure (1)..(260): unsure at all n locations; Clone ID: 701046092H1
atcatacccaacaacatcctccgacaccatgttgcacatggaaaaccccctcctgcagtcaacaaactcaattaccttcacattctttgggctgttgttatttctctttgttctttcatccatattcagaaaccncngtgctgcaacanganaagcaccaccagangcaagaggcgcgtggcctttaattggtcacatccacctcttaggtggctcaaaaccaccccatgtcacgttgggccacatggcggacaaatatg

SEQ ID NO: 17645 - DNA, 262 bp, Glycine max
  Clone ID: 701046093H1
gctaaacacagagaaaggcacagcacgatgacgatgaagataatggtagcgattaagcgagtggtggactacgccgtgaaaatcagggtgaagggcgacaagacaggggtggtgacccataacgtgaaaatgtcgatgaaccccttctgcgagatcgcgctggaagaggccctccgcatcagggagtctggcttggcctccgaggttgtcgccgtcaccatgggaccctctcaatctgtagacactctccgaaccggtcttg

SEQ ID NO: 17646 - DNA, 265 bp, Glycine max
  unsure (1)..(265): unsure at all n locations; Clone ID: 701046095H1
actttctatctcattttcgttcggttcaaacactctcatgggcatcagacaagaagattaggatcggcatcaacggatttggaaggattggccgtttggtggncagggttgctcttcagaggaatgacgttgaacttgttgctgtcaacgatccttcatcaccactgattacatgacatacatgttcaagtacgacaccgttcatgggcagtggaagcatttgatgtgaagctgaaggactctaagacccttctcttcggtgaga

SEQ ID NO: 17647 - DNA, 286 bp, Glycine max
  Clone ID: 701046101H1
gaaaaacagatagtgtgggagagagaagagcggaagagaaaatgacgaccaggttcaagaagaacaggaagaagagaggtcacgtcagcgccggacacggccgtatcggaaagcaccgcaagcatcccggaggtcgcggtaacgccggtggcatgcatcaccaccgtatcctcttcgacaagtaccatcctggtttcttcgggaaggtaggcatgcgctacttccacaaacttcgcaacaaattctacaatccgatcatcaacatcgacaagctgtggtccctcct

SEQ ID NO: 17648 - DNA, 281 bp, Glycine max
  Clone ID: 701046102H1
ctttgcagtgcgcctagtgattctagtgacgcaactcgacaacagagtgaataaaaaaagcgtttcaacgtcgtcgttttacttctcctttgtttgattagggttttttcgcttcttctattcactctgttacggtgcaacctagcagcctccaaatccaatggcttcagagaagaaactttcgaacccaatgagggagataaaagtgcagaagctcgtcctcaatatctctgttggcgagagtggagatcgtctcaccagagccgccaagtgttggaaca

SEQ ID NO: 17649 - DNA, 278 bp, Glycine max
  Clone ID: 701046104H1
tgaaaagcgactttttctctctgcaactctcccttttcttccttcgtagatcgaaagggaatcttcttccatggcctccaagcggattctgaaggagcttaaggacctccagaaagaccctccaacctcttgcagcgccggtcctgtagcggaagatatgtttcattggcaagcgactataatgggtccccctgatagcccttatgctgggggtgtttttctagttactattcattttcctccggattatccattcaagccacccaaggttgcattta

SEQ ID NO: 17650 - DNA, 275 bp, Glycine max
  Clone ID: 701046105H1
ggtctacttctccaatcttcaggttaagaagggcttgcttcagagtgatcaagagctgttctcgacacctggtgccgataccatccccattgtcaacaggttcagcagtgaccagaaagttttctttgacgcctttgaggcttcaatgattaagatgggtaacattggtgtgctcactgggaagaaaggagaaatcagaaaacattgtaactttgttaacaagaaatctgttgaagttgatattgctagtgtggcctcagaagatcatcaacaga

SEQ ID NO: 17651 - DNA, 274 bp, Glycine max
  Clone ID: 701046106H1
atccctaacgcgtgcatagcagagtcagagacagagacgcagccatggggcggagacctgcgaggtgttataggcaaattaagaacaagccataccccaagtcacgtttctgccgtggtgttcctgatcccaagatcaggatttatgatgttggtatgaagaagaagggtgttgatgagtttcctttctgtgtccatctggttagttgggagaaggaaaatgtttcaagtgaggccctggaagctgctcgcattgcttgcaacaagtacatggc

SEQ ID NO: 17652 - DNA, 273 bp, Glycine max
  unsure (1)..(273): unsure at all n locations; Clone ID: 701046107H1
cgaantgtntgagtgattttcattgatccagatcgtgtctgttctacgtacgatgtacagcggctccagcgacggcgaaagccatgacgcccctcagagtcagaggaaaattccgccggcatcctccatgctttgggtccgcaatcttcgccgtttcatcggatccggcgccggcctcggatccgaagccttgatggagcttgaaactaagagaattttgctcgacatttttaaggaaaagcagaagaaaaccgccgaagctgctacaattcc

SEQ ID NO: 17653 - DNA, 272 bp, Glycine max
  Clone ID: 701046108H1
gcaaatctgcatagcgatggcgcctccgaagctcttcgtatttgcgctttcagtaaccctgatttttgccatcgttggggccgaagccgatgtttccgtcgaaggagccactccagagcctgatacctccgccatcaagatccaattagatcaactcaattccaagatccaaattctcgagtctcaaatcagtgaaaagttggaagaagtgaagaagaaggacaaaattatagcagaaaaagaaaattccattgaagataaatcaattacca

SEQ ID NO: 17654 - DNA, 182 bp, Glycine max
  Clone ID: 701046109H1
ctcattcgtactcaatagcttccttttcagcactttcactatagtatactttctgaacctctgagaatgacttcttcctcttccgcactcgttcttctgctcgcggcgattttcgtcttctccggcgtcgcacaatctccggcgtcgtctcctgagtcccctgctactccaccgaaagccgt

SEQ ID NO: 17655 - DNA, 273 bp, Glycine max
  Clone ID: 701046110H1
ttttcttaatgccatggctgctctgcaatacttggaatcgctgcgcaacgcgcatccctgagctctccgattggtacaattcgctggcggatctataccagaacaagctctggcaccagcttaccctcaagcttgagcagttcgtggctctcgccgtcttccaggccggtgatgcattaatacaattatatcacaatttcatcacagactttgagaccaaaatcaaccttctcaagcttgcgcatttcgctgttatagtttctcggcagtatg

SEQ ID NO: 17656 - DNA, 271 bp, Glycine max
  Clone ID: 701046111H1
ccctacctttcgatctgcgtttggcgttcaggtttgaagtccgaaggagaaggaagagatttctgacagcgtaatcatgtttggtgtcgtaaggcgaagggttgcttctggcagcccgtctccttggttgcttggtcagtcagttcagaacattcggtctggcccatcagtttctgctagagcttcttccattgcgggaaaagagattgcatttccttcaggcggatgtggatttgtccgaaacttcagtcatataacccttggaagctgg

SEQ ID NO: 17657 - DNA, 271 bp, Glycine max
  Clone ID: 701046112H1
gtctggggaaatttgcgttgtttttcgcggtacagctcacacacactgaacggtaagtatggcggacaaggctgttacaatccgaacccgaaagttcatgaccaacaggcttctttccaggaagcagtttgtcgttgatgttcttcatccagggagggcaaatgtttccaaggctgaacttaaggagaagctagctaggatgtatgatgtgaaagaccctaatactgtatttgtcttcaaattccgaacacattttggaggtggcaaatcc

SEQ ID NO: 17658 - DNA, 136 bp, Glycine max
  Clone ID: 701046113H1
cagttttttacttgaattttcttcatccttctctgttctcctagaacttgattacttgaacattccctatgacagatgaggtggttcttctggatttctggccaagtccatttgggatgagggtcaggattgcact

SEQ ID NO: 17659 - DNA, 271 bp, Glycine max
  Clone ID: 701046114H1
aaacacggggcactggtttcgaaccctcgttgtggttaggtcttcttcacctttcgaattttggaatccatgggtcagggaactccgggcggcatgaaccggcagggcgaccggaagccggacggcggcgacaagaaggagaagaagttcgagccgtcggctccgccggcgcgcgtggggcggaaacagcggaagcagaaaggtccggaggcggcggcgcggttgccgacagtgactccggtgacgaatgcaaatgcggcttctgaagctg

SEQ ID NO: 17660 - DNA, 273 bp, Glycine max
  Clone ID: 701046115H1
cagctgtctgctgttagatctgtacccgcctagccattgatttggaaaagtccaacttcaaggatgagtaagcttcagagtgatgctctaagagaagctatctcaggaatcatggctgattccaaggaaaagaacaggaaatttgtggagaccattgaactccaaattgggttgaaaaattatgatccccagaaggacaagcgtttcagtggctctgttaagttgcctcatattcctcgccccaagatgaagatttgtatgcttggagatgcc

SEQ ID NO: 17661 - DNA, 275 bp, Glycine max
  unsure (1)..(275): unsure at all n locations; Clone ID: 701046116H1
tgctccttncaggcagtggtaccttcagcactatggtgttgaaattggtagaaaaaagaaagtggcagccaagaangattctactgaggaaggtgaggcngctgctgangannctnagaaaagtaaccatgtgcagagaaaacttgagaaacgccagaaagatcgtaatcttgactcccacattgaagagcaatttggtggtgggcgattgttggcctgtatttcttctcgtcccggacaatgtggcagggctgatgggtacattcttgaagtaa

SEQ ID NO: 17662 - DNA, 281 bp, Glycine max
  Clone ID: 701046117H1
gggctgacaactgaggttaagtctgttgagatgcaccatgaggctctcacagaggctcttccaggtgacaatgttggatttaatgtgaagaatgttgcagtcaaggatctcaagcgtggttttgttgcatccaactccaaggacgaccctgccaaggaagctgccaacttcacatcccaagtcattatcatgaaccatcctggccagattggtaatggatacgcaccagtccttgactgccacacttctcacattgctgtgaagttttctgaaatcttgac

SEQ ID NO: 17663 - DNA, 277 bp, Glycine max
  Clone ID: 701046118H1
acaggaccagcagacctgtttttcgatagaaagcctacttctgtgaagggccttcaacttatctttgatagtgggagctcctacacatacttcaattccaaagctcataaagctcttgttaatctggtaactaatgatttaaggggaaagccattgagtagagcaactgaggattcatcactaccaatttgttggaggggtccaaagcctttcaaatctctgcatgatgtcactagcaatttaagccactattactgagcttcacaaaatcaagaac

SEQ ID NO: 17664 - DNA, 277 bp, Glycine max
  unsure (1)..(277): unsure at all n locations; Clone ID: 701046119H1
cttgtttctcctgcaatcaacgacaccccccccaaaaatgagnggagagacagtgaacccaaaagcttaccctttggccgatgcgcaactcgcaataacaatactggatcttgtgcaacaagctgccaactacaagcaactcaaaaagggtgctaatgaagcgaccaagacactgaacagaggcatctctgagttcgttgtgatggccgcggacactgagcctcttgagattcttctccatcttcctctcctagctgaggataagatgttccctatg

SEQ ID NO: 17665 - DNA, 99 bp, Glycine max
  unsure (1)..(99): unsure at all n locations; Clone ID: 701046120H1
tttctctcgtttccccttcgcaattnncccctctcgaaagagacacgcatcgaaganaattcacatcatcgggcaatggagganaanccnccgcngcng

SEQ ID NO: 17666 - DNA, 274 bp, Glycine max
  Clone ID: 701046121H1
ctccaattaacctcctctctcactattccatcttcttaattactcatcactcttcttagaaactagtctaacaattaggttttgaagggcacacaaatatattccaaggttgtgtgaaaatgcgaatgagttgtaacggatgtcgtgttttgcgcaaagggtgtagcgaagattgtagcataagaccgtgtttgcaatggatcaagaacccggagtcgcaagctaatgccactgtgtttcttgctaagttctatggccgtgctggcctcatgaa

SEQ ID NO: 17667 - DNA, 272 bp, Glycine max
  Clone ID: 701046122H1
ttcattgctatgcccacataacaacaccaaaaaaaatggcacttgtgagccacgtttgtgtgagatgtgtagccacacccacttccccagagtccccaaattcggcacccttgccagacccaaggcaaaccaaggttctccttccgaagaagaagcctcagaaatggtccaccggggtggctcccggggagtacggtggccctcccaccaccaccaaactccgcaaatactggggcggcgatgacgaagaccctttggcctctgatgatata

SEQ ID NO: 17668 - DNA, 146 bp, Glycine max
  Clone ID: 701046123H1
ctctaatcactctagctgttgcaaatttctactatttttcaatggcttctgcagatgttgagttccgttgctttgttggtgggcttgcttgggtcaccggcaacgatgccctcgagaaagccttttcaatctacggcgacatcgtt

SEQ ID NO: 17669 - DNA, 271 bp, Glycine max
  Clone ID: 701046124H1
gggaatcaagatgttcaactgcttgagtgactatataggaatcaaaacacttcgtggaacttagaactacactagctcgggaccggaatgttactaatatgccctaaattagagtgtttagttaattatatacctgtatcattttcctaagtttctctccgttgttaaatgtttagaacatcataagctacgaattggttagtagggataatctcgaccataaattatagttatttttttaaaacagttgattttggccttaaaaccaaga

SEQ ID NO: 17670 - DNA, 270 bp, Glycine max
  unsure (1)..(270): unsure at all n locations; Clone ID: 701046125H1
cttttctcagctgctgttcctgcgcgtgaacaagcctcagganagccaaagccatggttaagcataacaatgttatccccaatggacacttccgtaagcactggcagaactatgtgaagacctggttcaatcagccagcacggaagacaagaagacggttggctcgtcagaagaaagctgtgaagattttccccagacctacagctggacctcttagacccattgtacatggtcaaactttgaaatacaacatgaaagtgagagctggaa

SEQ ID NO: 17671 - DNA, 267 bp, Glycine max
  Clone ID: 701046126H1
gttttgttgtctcgacaattggtttttgcatcaaatgcaaagtacgtgttcaactcgttggattggattggatttatattgtatgtgctagagtttgaggatgtgggtggagcaagttgtttaacttagatattagagagattgtatatggttgacttgttggcaatattttgatgatattgtaacttgtttggggttatgcttttttgcattatgctcttgatacagatacttttttcttcgatatagcattcctttgtctgcctc

SEQ ID NO: 17672 - DNA, 268 bp, Glycine max
  Clone ID: 701046127H1
cactcttcactctcacctctgtccctattcttctttttttctctctcttcccatttctttcacctatgtgacttgctccatctttatgcaaaccgttaaagttaaacttgttctctgactacttctcttctctctccctctctttctcttgagtgggtttgcttctgtctcacagaaaaattatcagacccagatctccgttttacccacccactattgctgcttctgtaaagtctttaattttgcctttcaggtgttcttggctaga

SEQ ID NO: 17673 - DNA, 269 bp, Glycine max
  unsure (1)..(269): unsure at all n locations; Clone ID: 701046128H1
ctttgcagtgcgcctagtgattctagtgacgcaactcgacaacagagtgaatnntnnnggngtttcaacgtcgtcgttttacttctcctttgtttgattagggttttttcgcttcttctattcactctgttacggtgcaacctagcngcctccaaatccaatggcttcagagaagaaactttcgaacccaatgagggagataaaagtgcagaagctcgtcctcaatatctctgttggcgagagtggagatcgtctcacnaganggcaag

SEQ ID NO: 17674 - DNA, 180 bp, Glycine max
  unsure (1)..(180): unsure at all n locations; Clone ID: 701046129H1
ctttccgcttcaggttcagcttcaacttcaaattctcagtganaccaattcagctgagtccaaatcccaaatccgaatcaaaatccgaagtgagatttgcgatggagaggcttcagcgaatgtttgcaggtgcaggtggagcgctagggcaccctcccccagattccccaactctcgatt

SEQ ID NO: 17675 - DNA, 269 bp, Glycine max
  unsure (1)..(269): unsure at all n locations; Clone ID: 701046130H1
ttaactctttcttctcataactctgccgccgcaacagccccaaatccaatggcttcagagaagaaactttcgaacccaatgagggagataaaggtgcagaagctcgtcctcaatatctccgttggcgagagtggagatcgtcttaccagagccgctaaggtgttggaacagcttagtggccaagcccctgtgttttccaaagcaaggtacacggttcgttcctttgggattagaagaaatgagaggattgcagtatgtcactgtnnggg

SEQ ID NO: 17676 - DNA, 136 bp, Glycine max
  unsure (1)..(136): unsure at all n locations; Clone ID: 701046131H1
ctgaaaccaaaactgaaaannaaaacanacaataccataacanggcntcttccaccatcacntcctccttcctaacntcanccccttcatctctcttcaacaaatcatnntccccttccttccatgcgaccccnac

SEQ ID NO: 17677 - DNA, 183 bp, Glycine max
  Clone ID: 701046132H1
gaattttcttcatccttctctgttctcctagaacttgattacttgaacattccctatgacagatgaggtggttcttctggatttctggccaagtccatttgggatgagggtcaggattgcacttgctgaaaagggtatcgaacatgagtacaaagaagaggacttgaggaacaagagtcctct

SEQ ID NO: 17678 - DNA, 278 bp, Glycine max
  unsure (1)..(278): unsure at all n locations; Clone ID: 701046133H1
gtcccatcatttcctctggatgggacttttttgaagctatttactatggtggtactgtcacagaagggttccttagaggcacangtactttgtttggtacttatgctggagggttccttggggagcaaaggcttggtagaattggctatcttcttggaagtcacctgggcagttgggttggtggtagaataggattaatggtttatgatgtggtcaatggagtgcatttgttgttgcaattgttcagacaggagaaattgaagttcatgaaaaatcca

SEQ ID NO: 17679 - DNA, 174 bp, Glycine max
  Clone ID: 701046134H1
aaaaaaaaaccctagtaatgccgccgatggggaggaagcgaaaggtagcacccaaatctttctctatccaccgagccacctctcaagcagcaacaaccaaaacccgaaaatccccctcaagaatacgaagaagtcgaagaggaagttgaggaagaagaggtagaggaagaggtc

SEQ ID NO: 17680 - DNA, 275 bp, Glycine max
  unsure (1)..(275): unsure at all n locations; Clone ID: 701046135H1
ctcttctcttctcttctcnaggagtgtaattttgttgttgtggttagtgcttccgtgacactcacttgtttgtaacaagtggaggggagtgttataggaacataatttggagggagacatttcagtttcagaaacgttacaaaatatctgttgtgtgtgtgactgtgaaagttaatataacnaacaaaatggatacacgaagtgaaatgaggcattcaaagttcaagaggntttnngtgtctgtgggagtagccccggcaagaagagtacctacc

SEQ ID NO: 17681 - DNA, 274 bp, Glycine max
  Clone ID: 701046136H1
aagagttatcatgggatcagcttgttgtgttgctgcaaaggatcatactattcccagcactagcagaactggaggtgaaagtttaaatagaaatgctgtatgttcgccatcatggagttttcgttgggatagttggggccgtgttgctggtgaaattgaatcaccagagattgcagaatcttcaataccaaatcgttcagtaccttcagttttctcaatccctacgacagatccaatgactaatcataattatcacaatcttcctaactcaaca

SEQ ID NO: 17682 - DNA, 272 bp, Glycine max
  Clone ID: 701046137H1
gaacaacactaataatatggttggtcgtggtgctttgagtgggtcagcccaagctgctttagcactgaacaactaccaaaatcttctcatgaggcaaaattcaatgaactctagccctggctcacttcagcgcgaagggtcctctttcaataattcaaacccgagtccctcttctgctttgcaaggaactggtcctgctttaattccaggctcaatgcagaactcgcctgtaggtggtttcccaagtccccatctaaccccacagcagcagc

SEQ ID NO: 17683 - DNA, 270 bp, Glycine max
  unsure (1)..(270): unsure at all n locations; Clone ID: 701046139H1
agcagagcagaacaccgataaatcgctatgactgctcagacccaagaggagcttcttgcggccgaccttgagcaacaaaagatccatgatgatgagcctgtannnnnnnnnnnnnnnnnnnnnnnnnnnnnngacgacgatgaggatgacgacaatgttgaaggtgatgcatctggtaggtccaagcagaccagaagcgaaaagaagagtcgcaaggcaatgctcaaacttggaatgaaacctgtcacaggtgtcagtcgtgtgactgtt

SEQ ID NO: 17684 - DNA, 268 bp, Glycine max
  Clone ID: 701046140H1
ctaagagctgtgggaaatcttacgcaccattccccaaaggatttttcttttcaacatccggaggtttgagcagttttgagcatccactgaatgaggtgaagcctgtaccaagggttgacagttccggacaggtgtgtggtgcaactttcaaggtggatgctgaggctaagaaggaagcaactggcatgccaagggttgggagtgctgctaactggtcaaataatatctgattgcgactctattctgtttgaattatgggcttttattt

SEQ ID NO: 17685 - DNA, 180 bp, Glycine max
  unsure (1)..(180): unsure at all n locations; Clone ID: 701046141H1
ttcantcactcattctgcngncacaccattgtcggcaacgcccannaacgcaacngaantgcttcaaaccgcggcggcgcgcaactcatttctcttccgagcacaatgcagctccaccgtgtctccgccgcatcgaaactgagcctcacgtgcctcagcctcgccttgaaactcgtgctg

SEQ ID NO: 17686 - DNA, 268 bp, Glycine max
  Clone ID: 701046142H1
gtagttcttcatcatagtcttaaacattaaaccttagcaaaactcaacaatgctagacatcaaaggctacctcgtactcttcttcctatggttcatatcaaccattctgatacgttccatcttcaagaaaccacagcgtctaagactcccaccgggtcctccaatttcaatacccttgctgggacacgcgccatatctccgttcactgctccaccaagcattgtacaagctatcactgcgctatggacccttgatccacgtcatgatc

SEQ ID NO: 17687 - DNA, 265 bp, Glycine max
  unsure (1)..(265): unsure at all n locations; Clone ID: 701046143H1
gtgagtggttcactgtgttttttgctttttgggttccccatttgttcctgctacataaattgttttttgggtttgatcccacttttttttttggctaattactcaaaaaatatcctactttctattttggngctggtctatctatcccttccttgaaatttgnctcctttgtggtaaatttcgtngcttnctgnatctccacgcactcactcaatgtgtttcacattgggttttgaacattgtcttttggatnccaacttcaact

SEQ ID NO: 17688 - DNA, 267 bp, Glycine max
  Clone ID: 701046144H1
gctgttgcaaatttctactatttttcaatggcttctgcagatgttgagttccgttgctttgttggtgggcttgcttgggtcaccggcaacgatgccctcgagaaagccttttcaatctacggcgacatcgttgaatcgaaggttatcaacgaccgtgagactggaaggtccagaggattcggatttgtgaccttcgcctcagagcagtcaatgaaagatgcgatcgcaggaatgaacggccaggaccttgacggccgtaacatcact

SEQ ID NO: 17689 - DNA, 144 bp, Glycine max
  Clone ID: 701046145H1
ctcaaatctcttcgttccttcgattcgttccatttcttccaaaatggccaaagacccagttcgcgttctcgtcactggagctgcagggcaaattgggtatgctcttgtccctatgattgctaggggagtgatgttgggtcctga

SEQ ID NO: 17690 - DNA, 268 bp, Glycine max
  Clone ID: 701046147H1
gcgtcaaactgttgctgtgggagtcatcaagaacgttgagaagaaggatcctaccggagccaaggtcaccaaggctgcccagaagaagaagtgaatcgtgcgggctggttcatcaggggatgttggttacaataaatgttggtttcttttctgtactcttgtgtcttcttttctaggtagcttgtttttcggacaaagtttgaagtctccaccatcatctcgcaactgttgttcccagaactgggttcttgatcgacggtggcaaaat

SEQ ID NO: 17691 - DNA, 270 bp, Glycine max
  unsure (1)..(270): unsure at all n locations; Clone ID: 701046148H1
caagatatcatcacattgcaaagaaaatacacattacattactaagtctttgttcatttgagtagtagtgatggctagcctcaaggttgcatgtgtggttgctgtgatgtgcatggttgtggtggccatgagtgctgcacccatggcacaggccgcaatcacntgcgggcaggtcgccggcgacatgtctccgtgcttcagttntcttcgaagcggcggaaaaccgtcgcaaaantgctgcaacggagtgaagtccctcagcagcgcggc

SEQ ID NO: 17692 - DNA, 280 bp, Glycine max
  Clone ID: 701046149H1
ctcagatcgaaatcgaaaccatgtggcggagactcttctcttcttcaaacctcaaatccctacacacagcactctctccttctcgtccccgactcgccgcccctctcctcacccgccacgtgaccgctcattcaggtgcttcttccgtcaaaaggagggttgaagatgtcgtgccaattgctaccggccacgagcgtgaggagattcaggctgatcttgagggaagggatattcttgaaataaaccatcccgtcggcccttttggcacaaaggaagcacc

SEQ ID NO: 17693 - DNA, 275 bp, Glycine max
  unsure (1)..(275): unsure at all n locations; Clone ID: 701046150H1
ctatctctcaccaacttccgctacttcctactccaaccacttncttttttcccgcagtcatgggcaaggtcaagatcggaatcaacggatttggaagaattggccgtttggtggccanggtggctctgcagagagacgatgttgaactcgttgccgttaacgatcctttcattaccaccgattacatgacatacatgtttaantacgacagtgttcagggcactggaagcatcacgatgtcaccgttaaggatgagaagacccttctcttcggtg

SEQ ID NO: 17694 - DNA, 274 bp, Glycine max
  unsure (1)..(274): unsure at all n locations; Clone ID: 701046151H1
gtcttctcacttcgtcaaaaccaaccaaacccctccccaattctcaagccaaccatgtcttccttcaagagcaagtaccaagatgaactcattgccaatgctgcttacattggcaccccagggaagggtatccttgctgctgatgagtcaactggtacaattggcaagcgattggccagcattaatgtcgagaatgttgaagcaaataggcgtgctcttcgtgaactcctattcaccacacctggtgctttngagtgcctcagtggtgtgatct

SEQ ID NO: 17695 - DNA, 272 bp, Glycine max
  Clone ID: 701046152H1
gcgtctgtgtaattgtaggtgccaaacatatggttgccgagatgaatgtccgtgaattttccatctctaagaatgaccgtacttcaaattccaattccaaatttcttaccttgcccaccattttgactcttggccgtgtcgccgctgtacctcttcttgttgccaccttctacatggatggttggcgaggaacagttgttactacaagtatcttcactgctgcagcagttacagattggcttgatggttatattgctcgtaagatgaaaatg

SEQ ID NO: 17696 - DNA, 270 bp, Glycine max
  Clone ID: 701046153H1
gttttttgttctctcttcgcttaaaccctatcgttcttctcgttttcgccgattctcgccatgccgaaagctaaatccgacgccaaagccgccgatagcaggttgaagcggaagggcgctggtgctgggaggaagcaatcgaggaaagctgctaaggaccctaacaagccgaagagacctccaagcgctttcttcgttttcatgtccgagttcagagagcagttcaagaaggagcatcctaacaacaaatccgtcgctgttgtcggcaaa

SEQ ID NO: 17697 - DNA, 269 bp, Glycine max
  unsure (1)..(269): unsure at all n locations; Clone ID: 701046154H1
aacccctaacctcaaaacccccacttcgcgttacagggagggacaggctaaaacaatcatggcggcgcagtggtggcgctccgccgccggccaccttcgaacggtggcggcgggccgtggttccttgtcgggattccagcgcanacttatcacacgatccaagccatcccaagggagtgcagcggcagcaaagtctacgcgagagaccgaacgcaaggtcgaataccttgcgtcgntttcctccagaaccttctggaaaaaaaccccga

SEQ ID NO: 17698 - DNA, 268 bp, Glycine max
  unsure (1)..(268): unsure at all n locations; Clone ID: 701046155H1
aatttatccattcaccacagagtttcttcaatggcccagcctcaaccagagtcccacgccaccaatggctcacacgagccattgctcaaaatcccaaagctccaccaaaacggcgacgtttccgcaaccgctccctttctccgcgtcaagaagctctccgacaaggccgttttgccctctagggcttccactctcnccgccggttacgatctctctagcgcggtggagacgaaggtcccggcgagagggaaggctctggtggccactt

SEQ ID NO: 17699 - DNA, 266 bp, Glycine max
  Clone ID: 701046156H1
gttgttgtaactcgttcttcttcttttgttgttctgtgtttgtgtttgttttttctctcacctgaaaatgtcttgctgcggtggtaactgtggttgcggaagctcctgcaagtgcggcaacggctgcggaggctgcaagatgtacccagacttgagctacactgagtcaaccaccaccgagaccttggtcatgggagtggcacctgttaaggctcaatttgagggtgctgaaatgggtgtgcccgctgagaacgatggctgcaaat

SEQ ID NO: 17700 - DNA, 264 bp, Glycine max
  Clone ID: 701046157H1
attaaaagcaatatagtttgtttaattgttgcttcatttctattgtgtgaatggcatttgggaagttcattatgaatataggggtagtggcaatggttctgggtttatggattcgggttggatttgcacaacaagtaccttgctactttatttttggagactctttggtggataatgggaacaacaaccagcttaactcactggctaaggctaattatctcccttatgggattgacttcgctggtggcccaactggaaggtttt

SEQ ID NO: 17701 - DNA, 265 bp, Glycine max
  unsure (1)..(265): unsure at all n locations; Clone ID: 701046158H1
ccagaatctggattctggtcaaagatatatcacagaccactacttgctcttcacatattcnnnnnnnnnnnnnnnnnnnnnnnnnnnnnnnngttttgcttcttagtactagtactttttagtattttttatgttgtcttcccctaggtttaatgatgtatgaaaatttgatgatttagagatattatcggtgacagagtggttggaagtggttgctattattattgtttgatagagaagtatttatggggaaaaagaagcgcca

SEQ ID NO: 17702 - DNA, 265 bp, Glycine max
  Clone ID: 701046159H1
gtggaattattagtttttcatgggatatatgtggaaagtcacatccttcattgagtggtacaagcctgatgtaattaaaggagacatggattcaatcaggacagaagtacttgacttctatgcaaagctgggaactaagataattgatgagtctcatgatcaggacaccacagatttacacaaatgtgtggcatacatacgtgacctcaccccaaatgttgatggatcagaactatgcattcttgttgctggagcacttggtggg

SEQ ID NO: 17703 - DNA, 268 bp, Glycine max
  Clone ID: 701046160H1
aaagcacagaacagttgaagtgaatggcataaaaatgcatgttgcagagaaaggagagggtccagtggtgttgttcctccacggcttccctgagctctggtactcatggcgccatcagattctctctctcagctccctcggctaccgcgccgtcgctcccgatctccgtggctacggtgacaccgaagcaccaccttcaatcagcagctacaactgcttccacatagtgggtgatctcgttgcgcttattgactctctgggtgtccaa

SEQ ID NO: 17704 - DNA, 268 bp, Glycine max
  Clone ID: 701046162H1
ttggccgggtggtccgaagcaattgggccatcagggttatccgatgacactaggaaaactcagttcaacatcatgtcaggtacatctatgtcttgtccacacataagtggattggctgccttgttgaaagctgcacatccgcaatggagtcctagtgcgataaaatcagcactaatgacaacggcagatgtacacgcacaacaccaagtcccaactccgtgatgcggcagggggtgcattttccaacccatgggctcatggtgcgggc

SEQ ID NO: 17705 - DNA, 135 bp, Glycine max
  Clone ID: 701046163H1
gcagcactcaaaaccctagagaggacgagagagcgtgcaacctttcggcaaccacagaccatgacattcaagcgcaggaatggaggtcgcaacaaacacgggccgcggccatgtcaaattcatccgatgctccaa

SEQ ID NO: 17706 - DNA, 271 bp, Glycine max
  unsure (1)..(271): unsure at all n locations; Clone ID: 701046164H1
ggcttggcgtggaagcaaacaacgtagtcaagtggcaaactgttcctgcagcttgcggagagtacatagctgactacgttctaggagaccaatatagatcagattccaaaacagttaaccaacaagcttatttctatgctaaatccctcaaactcaccaacaaagatgtctttgtcttggacgttgacgacactactctctctaatctccagtattttgctaaccatggatttggtgtggaaccacacantncaacggcgtttaagaactg

SEQ ID NO: 17707 - DNA, 277 bp, Glycine max
  unsure (1)..(277): unsure at all n locations; Clone ID: 701046165H1
aaacaaagaaagagagaaagaaactcaacctcgttcgtttcgttcctccatgaaataatggcttccgtttctactttnnnnnnnnnnnnnnnnnnnnnnnnnnnnacacaatgctggtncttaacttcagcaaagaaaacctacatagttcacatgaaacaccacgaaaagccttcggtttaccccacacacactgactggtacagcgccagtcttcaacaatctctcactctcaccactgccgattcagattccgattccaatccgttactctatt

SEQ ID NO: 17708 - DNA, 272 bp, Glycine max
  Clone ID: 701046166H1
cgacgatccaagtgatagacactcgttgcgatggaacttgtagctgaatccgagcgaactctgtacccatacgtgactggatcctctgtagtcgctatcaaatacaaagatgggattctaatggccgctgacatgggaggttcgtatggatctaccctgcggtataagagtgttgagcgtatcaagcctattggaaagcatctcttcttggtgctagcggggagataagtgactttcaggaaattttgcgctaccttgacgagcttatcctt

SEQ ID NO: 17709 - DNA, 270 bp, Glycine max
  Clone ID: 701046167H1
gcagattcttcgctcctttccattgattcaaaacatggctaccaccaccactcctgctagatcttttctccaagtcgccgctacagaggaggccgcgccgcctctcagagtcgttcagattgaaggactggttattctgaagataattaagcattgtaaggaccactcgccttctttagtcactggacaacttcttgggttggatgttggcagtgttcttgaagttaccaatgcttcccctttccaatgagggaagaggatgaggaattg

SEQ ID NO: 17710 - DNA, 268 bp, Glycine max
  unsure (1)..(268): unsure at all n locations; Clone ID: 701046168H1
gtgagaaggacttggtgttgttgttggaggagaagggtgtggangtggtgagtgatttngatgaagaagggtgccatggggtggagtttggtgatgaatccaaagcaaaccaactcattcaggtagtcaaacgttttgtttcatgaatccaaggatagtacaagctcatgatttttctcttttctttttgagatcatcctagtatgaaccttatgttagttctgtctgtgcttacctttcctcttcatatatggttgatagagttatt

SEQ ID NO: 17711 - DNA, 267 bp, Glycine max
  Clone ID: 701046169H1
gaaacagtgaattatctgaacaggaaagatgtgcagtcagctttgcatgctcatcttgttggagtccaaagatggtctgcatgcagcaatgtcctggattatgagctgcgtgacttggagataccaacaatcacggttgtggggaagctagtcaaggagggaataccagtattggtttacagtggtgatcaggactcagttatcccactgactggaatagaacattagtacataaattggcaaaagaactaggattgaacaccactg

SEQ ID NO: 17712 - DNA, 264 bp, Glycine max
  Clone ID: 701046170H1
cagcattcacataggtcaggccgggatccaggttggcaactcctgctgggaactctactgcctggaacatggcatccagcccgatggcatgatgccaagtgactcctccttcggtgtagcccacgacgccttcaacaccttcttcagcgaaaccggatccggcaagcacgtccctcgcgccgtcttcgtcgatctcgagcccaccgtcatcgacgaatccgttgtggcattaccgtcaactcttccaccccgaacaactcatct

SEQ ID NO: 17713 - DNA, 266 bp, Glycine max
  Clone ID: 701046171H1
cttctttgagaagtgcaagcttgacccaactcactgggacaagctctcaaaggctggtctccagcgtattgaagagaagtacacatggcaaatttactctcagaggcttctcactctcaccggtgtctatggcttctggaagcatgtgtctaaccttgaccgccgtgagagccgccgctatctcgagatgttctatgctctcaagtaccgcaaattggctgagtctgtgccccttgctgctgagtaaactgaggataaagagttgg

SEQ ID NO: 17714 - DNA, 263 bp, Glycine max
  unsure (1)..(263): unsure at all n locations; Clone ID: 701046173H1
aatttccattgcatgcaaagcaaatacgcattatattactagttttaatttgttttgtcgtttgcttctttctttgattaatgatgactagctttaaggttgcatgtgtggttgcgatgatgtgcatggttgtngccatgagtgttacacccatggcacaggccgcaatcacgtgcgggcaggtcgccggcgacgtgtctccgtgcctcagttatcttcgaagcggcggaaaaccgtcggacgcctgctgcaacggagtgaag

SEQ ID NO: 17715 - DNA, 263 bp, Glycine max
  Clone ID: 701046174H1
catcaagccagctactcctactgtcaataatgagcatactgtgaatgaggagaatccagaggtgagttcttgggaaagcttctgtcagtcaaaactttctcctcttagtgctcaagctgtacttcgtgtaaccaccagtatcgctcgggagggtcttgtttcatgacacgcacattaaacctcactttgcggctttcatcatttccttgtttgcttatcattttcttctgtaaatacagtgcgacaattgagatgattgagtt

SEQ ID NO: 17716 - DNA, 263 bp, Glycine max
  Clone ID: 701046175H1
tttccctctctcactgtttttataagtttgattgccaaatcaatatccatggcttcggaggacagaaacgaagaagagcttcacgttctattggtggcattctctgcccaaggtcacatcaaccctttgcttaggcttggcaaaaaactactaagcagaggcctccacgtcaccctcgccaccaccgaattagtttaccaccgcgtcttcaagtcctccgccgccacccccaccgccaccgtccccacttcaatcaccaccaa

SEQ ID NO: 17717 - DNA, 263 bp, Glycine max
  Clone ID: 701046176H1
gtttcatttggcccattgtttctcacaagccacactctttgtttgaagcttaaactccctctaagccccatccttaatttactcaatctcatcaatgtttcatcatctggagttcttcttttgagggctttagcagattccattccttgagtctcatgctggatatgccaatccttttatcctcatttctgatatccttgtttgcatgatcacatcttttccaaggattttaaaaccatgggtagaggtagaggaaagggtaa

SEQ ID NO: 17718 - DNA, 174 bp, Glycine max
  Clone ID: 701046177H1
gattatcctaagtctttgggaatagtgctgcaatggcttcaagtcaggaggaggtgacccttttgggagctactggaagcccatttgtgtgcagggttcatattgccctcaagttgaagggagttcaatacaaatatgtcgaagaaaatttgaggaacaagagtgaactgcttc

SEQ ID NO: 17719 - DNA, 88 bp, Glycine max
  unsure (1)..(88): unsure at all n locations; Clone ID: 701046178H1
ggaccccgtgctatatgcatcctatctgctagtggngtaattttcaaatgtnacactttcgtccagcctgattgcttctgggggaaac

SEQ ID NO: 17720 - DNA, 266 bp, Glycine max
  unsure (1)..(266): unsure at all n locations; Clone ID: 701046179H1
gtgcttccaaaaccctaactaaactcgcgtggtagctccaatggggggaaagaggaggaagagcnnnnnnnnnnnnnnnnnnnnnnnngaggcttcagcttcaggttggaagaagaaaacgagaacgacggagaaggaggagaaggagaagaaggagccattgcgtccttcgatgataaagaacaaggagaagcgatcggngctgcacgccaagctgaagcagcagaagaagctcgacaagcgcgccaaggccaaggctcgagacg

SEQ ID NO: 17721 - DNA, 266 bp, Glycine max
  unsure (1)..(266): unsure at all n locations; Clone ID: 701046180H1
gacaaaggctcgtgaagttctgcaaagggaagntgacctgantgaaattgttcagcttgtgggcaaggatgctttagctgaaggagataagatcnccttagaaactgcaaagcttttgagagaggattatcttgctcaaaatgccttacaccatatgacaaattctgccccttctacaagtctgtttggatgatgcgcaacattntccattctacaatttggcaaatcaggcagtagagaggggagctggttcagatggtcagaag

SEQ ID NO: 17722 - DNA, 275 bp, Glycine max
  Clone ID: 701046181H1
ctcaggtgcggaatcagtcatcatggcggtgatcaacaaagaaataatcgatgagccctacgaacaagaggagtgcatcgactacgagcagctgaagaaacgcatgtggaaggaccgtgtgcttttgcagaagctgaaggagaagcgcgagaagcaagaaccccgacgtggaagcgaaacaagaggcgtcaaggaggaagaagatgtcacgcgcacaagactcggtgctcaagtacatggtgaagatcatggaggactgtaacgcgcagggcttc

SEQ ID NO: 17723 - DNA, 144 bp, Glycine max
  Clone ID: 701046182H1
gtaaactctcaccctctcttctttttcacccttttctctattccatatcaatcacaaaccctaattcactttctacagattcattcggaaacaccttttccaatttccaacacacaccaaccatgggttacgaagacaatccgt

SEQ ID NO: 17724 - DNA, 269 bp, Glycine max
  Clone ID: 701046183H1
tttctcagttctctcacacactcattcggtgctccgaatctcagattctagggttagggttcccaatttctccaccgatcagaaaatgagttcaactggtggttctaccaagggcggaaggggcaagcccaaagcctccaaatccgtttcaagatcgcagaaagctggtctccaattccccgttggaagaatcgctcgattccttaaggctgggaaatacgccgagcgtgttggtgctggtgctcctgtgtactctctgcagtgctcga

SEQ ID NO: 17725 - DNA, 224 bp, Glycine max
  unsure (1)..(224): unsure at all n locations; Clone ID: 701046184H1
tcaatctccactcaacgcttccatgccaaacagatttccattaacggactcaaattcannnnnnnnnnnnnnnnnnnnnnnnnnnccataacaacacagagagggtctgttcctctgtgattacatgttcatcttcgaatgacagagacccgaattcggtggatgatgaagatgtaaaacaagtggaggcattctcgaagacaaacggacgagctgcattgtct

SEQ ID NO: 17726 - DNA, 265 bp, Glycine max
  Clone ID: 701046185H1
gagtgttttgttaagagagaaaaaatgaagagtatggaaaatgatgacaatgctgaccttaataatcaaaacaattggttgggtttctcactctctcctcaaatgcataatataggagtttcttcacactcacaaccttcctctgctgctgaagtggttcctacaagcttttaccaccacactgctccacttagtagctatggtttctactatggacttgaagctgaaaatgttggattgtattcagctttgccatcatgcccct

SEQ ID NO: 17727 - DNA, 262 bp, Glycine max
  Clone ID: 701046186H1
gattgttggagaggcacggtgcccataatatttctctcataaattctatggtcatggtttctaatgcgccactgtgggttcctcaaatttttagatagcttttgaatgtattttgctggacgtggtgatgatgattggagttgggttgtttttatttgtggtcgatccttttgttaaataacattgttcagcgattgcgatattattaccctttgtagtatgtgaccatttaccgtaataactagtaatttgtctattatta

SEQ ID NO: 17728 - DNA, 262 bp, Glycine max
  Clone ID: 701046187H1
ctagcttggacgagtgaattagattcatcatcaagatgtcgtctctgatagcagaagatgtgaagagcagatcagaggtgtaccacggggacgaaatgtgccaagtgaagtccaaggagcttctcaaggaaatcgccctccccaacggccttcttcccctcaaggacatggaggagtgcggctacgacagacaaaccggcttcgtctggctcaaacaaaagaagagttacacccacaattcgacaagatcggaaagcttgtc

SEQ ID NO: 17729 - DNA, 262 bp, Glycine max
  unsure (1)..(262): unsure at all n locations; Clone ID: 701046188H1
ctagggtttacagagaagcgaagaggcgcacgtaagcagtaaancgtggaattgctagcaatggcgaggatcaaggtttacgagctgaggcagaagacgaaggctgatctgttgaatcagctgaaggacctcaaggccgagcttgccttgcttcgtgttgctaaggtcaccggcggtgcacctaacaagctctctaagatcaaggtggtgaggttgaacattgcccaggttttgacggtgatttctcagaagcagaaggccg

SEQ ID NO: 17730 - DNA, 161 bp, Glycine max
  Clone ID: 701046190H1
agaagaagaaagaacaaaagtcaaaagttcaatttagggtaacaaaatggaaaatcaagcctcatcatcgatgcagttcctcatcctcgaacaagttcagttcttgaaggtgaacgacgattccctcttgcagtgggaactcgtcgacgtcgttgacgccg

SEQ ID NO: 17731 - DNA, 260 bp, Glycine max
  Clone ID: 701046191H1
cgcatcgcaccttcaacttaacctattccacttgtaatcgtaaacgctttgctagaagaagagacaaagtgtgtctgtgtgtgtgagagagagagcaatggctggctcgtgggcacgccgttctctgattgttctagccatcatttccttcggatgtctatttgcgatttccattgctaaggaggaagccaccaagttagggacggtcatcggcattgatcttggaacaacctattcatgtgtcggtgttacaagaatgg

SEQ ID NO: 17732 - DNA, 126 bp, Glycine max
  unsure (1)..(126): unsure at all n locations; Clone ID: 701046192H1
gattaagcgtgtctctcctaataccaaaacgctaccgttttgctcttntatttctctatggattgcaagaagcgagttcgggatgactcggacgagtcagttctggaatcgcccgaggcgaaggac

SEQ ID NO: 17733 - DNA, 263 bp, Glycine max
  unsure (1)..(263): unsure at all n locations; Clone ID: 701046193H1
gaccgtggcacccccatgattctagacaacaattactacagaaatatattggacaacaagggcttgttgatagtggatcaccaactagccaatgacaagaggaccaagccttatgtgaagaaaatggccaagagccaggactatttcttcaaggagttttctagagccattactttgctctctgagaacaaccctctcactggcacaaagggtgagatcagaaagcagtgcaatgctgccaacaagcaccatgnggagcctnt

SEQ ID NO: 17734 - DNA, 83 bp, Glycine max
  unsure (1)..(83): unsure at all n locations; Clone ID: 701046194H1
gaaaggcaaggcagctagnagctccanttcttctgattcatctgangatgactacttctgancgaggatgaagtggctacnaa

SEQ ID NO: 17735 - DNA, 139 bp, Glycine max
  unsure (1)..(139): unsure at all n locations; Clone ID: 701046195H1
gggtttgtaaganaaagaaaaaagaggcgcaagatgagtggtagggtttctgggaaggtgaagtggttcaacgatcagaaggggtttggattcataacccctgacgatggcagcgaggaactcttcgttcaccaatctc

SEQ ID NO: 17736 - DNA, 218 bp, Glycine max
  Clone ID: 701046201H1
gagatgtcgagattgcgaagactgatccaagcttcagttgatgctactaagaaagttatatccggtaatcttgatgatttgatgccaccaccggagagacccatcttcagcttcaattccaagcaagagttaagcaagtggcatttgtattctgattctgaatttggaggtttgtcctctgcgtctctgcagataactgagtcggaaaatggagcaac

SEQ ID NO: 17737 - DNA, 213 bp, Glycine max
  unsure (1)..(213): unsure at all n locations; Clone ID: 701046202H1
aattaagacaatgattatcaatcttcatttaangcngctttnnnagangattganatgagctcattggctgtccacgtcactagggagagccaatgagctcatctcaatcttctcaaaaagcagctttaaattaagacaatgattatcaatcttcattttgttgaatctttcagtgtcctttctttttcacataagtgagattgacntcatcc

SEQ ID NO: 17738 - DNA, 211 bp, Glycine max
  unsure (1)..(211): unsure at all n locations; Clone ID: 701046203H1
cttaacagcttttggaccaacctttgattcctccaacattctgttagatagtgaatacaaggaatactttcaacttaaagcagcccaatgaggatcatcttcaaatgctgtagtccataccagtgactgctgtgccaaatgcaactgcaaaaagggtagaaaaactttagaggaagcaaaaatgaagttgattantcccccaaaggtccca

SEQ ID NO: 17739 - DNA, 212 bp, Glycine max
  Clone ID: 701046204H1
gcgtcacataaacaaaaaaaataaactggggagaagcatgttgttgatgttgggactatgcttcctattgttctctgcatttccacttgcgttctctgagagatgccacccacaagacaaaagcgttgctccaactccagaaggacctcggcaacccttatcacatcatatcctggaacgcaaaggaggattgctgcgagtggttctgctgc

SEQ ID NO: 17740 - DNA, 211 bp, Glycine max
  Clone ID: 701046205H1
ggagtggaggatcgagcttctgcgattcaccgaagaagcttctgagcaacataagcagcaaaacgctgccgtttaggaagaagaagaggggggaggaggattggggaaagggtggggtgtggcagaaggcgatcctgatgggagacaagtgcgagccgttggatttctcgggagtgatttattacgatagtaacgggaagcaggtgaacga

SEQ ID NO: 17741 - DNA, 209 bp, Glycine max
  Clone ID: 701046206H1
gtgcttttagttaccactttctctcttggatttgcttacgtattgctccttttgtattagtggctcctgtcccaccttgcttttggacttgagctttttatatttctgattgttcaatgtctgttgtgtgtgctctccaacctgtggtgactttccggtttattcctgtggctgtttcttgtaggcctttcgacctccagtattaaata

SEQ ID NO: 17742 - DNA, 210 bp, Glycine max
  Clone ID: 701046207H1
cgttcactctgcatctgactcctatagtttcctctgctaattccatatccccgttttccttcactcttgaaccccgattcatttccaccagcacaagaagcatggctgcaatatcaataccttctcacatgaaagcttggacatactctgagtatggaaaatccaaggaagttctcaagtttaatcagagtgtggctttgcctgaggtga

SEQ ID NO: 17743 - DNA, 210 bp, Glycine max
  unsure (1)..(210): unsure at all n locations; Clone ID: 701046208H1
atcgaagttaattgctctcanccactctcagcttctgcttctaaatctgaactcaacggttctgtgaaatcaaaatccgcggcagttcagcattctagggtgatattttcatggatggngatggtagcagtgnaagcccaatcganactaagnaagccaagtcaaaaacccctcganaacctaaaganaccattctgaagcaaaaatccc

SEQ ID NO: 17744 - DNA, 210 bp, Glycine max
  Clone ID: 701046209H1
aaattgataacatcacacagcattagtatgtatcagcaacaagggtcagatccaacaaagcaatcaccggcaaccggttttccggtgagctatagcaattcaacaacgtattcgaccaacgaggcttcctacgctccagtcccacctccccagcccaaacctcttgtcgattggtccaccggcctctgtgactgcttctccgaatgtgga

SEQ ID NO: 17745 - DNA, 207 bp, Glycine max
  Clone ID: 701046210H1
gtgcctgcaggcttcagaaatttggagcatgatatcacaaggagcttacatttatgtgtgtggtgatgccaagggcatggccagggatgtacaccgcgccctgcacacaattttgcaagagcaggtatatgtttttaaataataaaatcttgaattgccttaaattgatggcatgggtgattgcgaatttggtgccttatattagtg

SEQ ID NO: 17746 - DNA, 207 bp, Glycine max
  unsure (1)..(207): unsure at all n locations; Clone ID: 701046211H1
gcattctcgtggtacataaactacgagtccttgttggaggacttgctcgtgcaggtgaagatcttcctacgccctcgtgccgctgctgnngttgctcctcgttcactgcctctcgagcggaggtcgttccccataccattgccggaggagagggagtcgctgcacagagctggaggctctccatggggtgtggcactcttgcttctc

SEQ ID NO: 17747 - DNA, 206 bp, Glycine max
  unsure (1)..(206): unsure at all n locations; Clone ID: 701046212H1
ctacaaactccacttcttcaacacaaaaatccgaaatttgtnctccaacacaaaaaaatgaaacctacaatcaccattctcttgttgtctctactacttctcataacttcaccctccttggcaacccgacccgcatccaaccctgatcaagtcaagcacaacaaaaacaacaaccaaggtggtggtgctggtgctggtgctggcgg

SEQ ID NO: 17748 - DNA, 205 bp, Glycine max
  unsure (1)..(205): unsure at all n locations; Clone ID: 701046213H1
gacgctattgggagtggttgttgggggctgtggaaatggaatccgttaccgcagtctcgacggcgtcgtattcgctccaattcgggttcggcggatgcngccggcggaggcggttaccggtttccggtgaagcaggcggtgaccgccgcctccctcgccctcaccggcgacacaatcgctcagctcagccaccgttggaggaaag

SEQ ID NO: 17749 - DNA, 205 bp, Glycine max
  Clone ID: 701046214H1
tttgtaattgaggtgctgcaatggcttcaagtcaggaagaggtgactcttttgggagtaattggaagcccatttgcttgcagggtgaagattgcccttaagttgaagggagttgaatacaaatatgtggaagaaaatttggccaacaagagtgatttgcttctcaaatccaacccagttcacaagaaagttccagtttttattca

SEQ ID NO: 17750 - DNA, 206 bp, Glycine max
  Clone ID: 701046215H1
gaaaggcagagttttactgatgaaatagagaagcttaaacacgataaagagcaactcctcgtggaattacagaaatatcagcatgagtggcaggcatatgagatacaaatgcattcctcaaaagatcggttggaaaagttggaacagaatcaacaaaagatggtttcttctgtttctcatgtattgcagaaacctgtgatttctgt

SEQ ID NO: 17751 - DNA, 216 bp, Glycine max
  Clone ID: 701046217H1
accggatccccattccccgccccgatcgaatgccaccgagtccgctgccggaggaggcggcggcgacggttggaacttcggcggcctcatcaaaacccttacatcgaaatcggaatccataattgagacctaccgtcgcgatctgcaggaattcggcaccggtttgaagaaagagatcgaggtcgcgcagggttctctcgggaccgtgggccacgt

SEQ ID NO: 17752 - DNA, 212 bp, Glycine max
  Clone ID: 701046218H1
ctaattactgctattacgagacgacgcagatttagttcggattgttcgattgcgatggctaggaagatgcttatcgatggtgaagctgaattggctcaaggtggtggagaagaagtgtcgaattttgacttcgacttgtttattattggggctggaagtggtggcgttcgtgccgctagattttcatccaattttggagctaaggtggggat

SEQ ID NO: 17753 - DNA, 212 bp, Glycine max
  Clone ID: 701046219H1
gcagcatggccatggtaggcggaaccatgatggctgcgtatttgcgtgtatccatgcccacttccccacagtcccccaccactacgaggaggagatgcagaaatctgaaaacttcttgctccgttaacagacccaaaattccaatgccccctctcaaccctaaagacccctttctctccaagctcgcttccgtcgctgcttcttcccctgaa

SEQ ID NO: 17754 - DNA, 211 bp, Glycine max
  Clone ID: 701046220H1
cgcattcgcaccaatcacttggtgtttacattcacaaatcacaatcccacacttccttcctcattgtcctcttctctcctcacatttcaacgcgccgccactctgcgatccgcgatgaattctcgtgaacagcctcagccacaacagccaccgcaaccacaaccgccaaacatgacggtgggacccaccatgtacccttcgatgttgtccc

SEQ ID NO: 17755 - DNA, 209 bp, Glycine max
  Clone ID: 701046221H1
atgtgggtgaaacaacaaatgctacatcaacaacacaacaagggtggtagtgaatggtggacttcaaagtgcaacttctcaagtgttttcttaggtggggacagtgctggtgctaacatagcctacaacgttgccacgaggctatgtgcatgtgatggcgctgctttaagacccttgaatttgaagggtcttattttgatacaaccctt

SEQ ID NO: 17756 - DNA, 200 bp, Glycine max
  Clone ID: 701046222H1
agccggttacctaaaaaaaatcaagcaaatatttatcagctattacggagacgaagaattatcaaatatactgatgtcagcatgcttctcttgggacgttccatctctggaggtgcttccaggttgatttcttaggcaaatggatgtaccgtgcctacaattttatgcctagttggctcagttgcatgtttagattggta

SEQ ID NO: 17757 - DNA, 103 bp, Glycine max
  Clone ID: 701046223H1
aggaatttctaagtggtctttttgagcctccatgtgccatgtctatggttgagaataatttcgtcattaataacaagaatttcccataacactgttccgtggc

SEQ ID NO: 17758 - DNA, 81 bp, Glycine max
  unsure (1)..(81): unsure at all n locations; Clone ID: 701046224H1
gttgcagggtgggcactttgcgttcattganaacccaactgccttcnattcagctgtttntnatgcttgtcgaaggtgtct

SEQ ID NO: 17759 - DNA, 207 bp, Glycine max
  unsure (1)..(207): unsure at all n locations; Clone ID: 701046225H1
tggagtttggagcgactgaactaatcattaatttgcactcgctgtttcagcttcatcacccttcttttgcatcatttatatctcttgagaaatggcacaagaaacctttctattcacatctgaatctgtaaacgagggtcaccccgacatgctgtncgancagatctctgatgcagtacttgatgcgtgccttgaacaggaccctga

SEQ ID NO: 17760 - DNA, 205 bp, Glycine max
  unsure (1)..(205): unsure at all n locations; Clone ID: 701046226H1
ctcgagcgccacactcctctctctctctccgcttccttctcttctcacacctccatngcccacacttcccttccctccgccgatgccggcatggacgctgtccagcgccgtctcatgttcgaagacgaatgcattttggtggatgagaatgaccgtgtggttggtcatgattcaaaatacaattgtcacttgatggaaaagattg

SEQ ID NO: 17761 - DNA, 205 bp, Glycine max
  Clone ID: 701046227H1
gttttacaagttctagcaagtgttgcaatggaagcagagtcggataccaagcagcagcagacgatggaaggaagttattcccaaactatgcaaattgatccgaaaagggctcgatttccatgctccgttgtgtggtcaccacttcctgtgatctcgtggttcattccttgcatcggtcacattggcatctgcagagaggatggag

SEQ ID NO: 17762 - DNA, 205 bp, Glycine max
  unsure (1)..(205): unsure at all n locations; Clone ID: 701046228H1
ctttctttaaatcccaatattttctgcgcgaattttgctaganaccgttagtgggtatcctcaaaatactagattttcgattccgtttggtgaacggatttttaggtgtgattattacgttttttttttgttcaacaagctatggaggtttcggtgattggaagctcacaagcgaactggngcgcgtctgaattggcttctaggg

SEQ ID NO: 17763 - DNA, 204 bp, Glycine max
  Clone ID: 701046230H1
gcgggtgaggtagaacccttccactgtggtgactctgcgatgggtgcctacaagtatgtttcagagctatggcgcaagaagcagtctgatgtcatgcgcttcttgcagcgggtgaggtgctgggagtataggcagcaaccttccattgttcgtttgacaaggtctacccgccctgacaaggctcgtcgcttgggcttcaaggct

SEQ ID NO: 17764 - DNA, 203 bp, Glycine max
  Clone ID: 701046231H1
cagagggtttccctcgtctaattatcgaccaagatacttccctttctcatttcaacaattagcctccatcattttggtcaaattgcggattatgggcgaacgaaaattccggtttgaaccaatgggttcattctttgtcaataattctgggttgtctggatcacaaaaaagcggaagcatgtagcatcacccttgttccggag

SEQ ID NO: 17765 - DNA, 206 bp, Glycine max
  Clone ID: 701046232H1
gaggtcaggaggagcactagctaagttcacaatttcaaaatggctaggggactaaagaagcatttgaaaaggctcaatgctcctaagcattggatgcttgacaaactgggtggtgcatttgcgcctaaaccctcatctggaccacacaaatcgagggagtgcctccccctcattcttattctgcgaaaccggctgaagtatgctct

SEQ ID NO: 17766 - DNA, 215 bp, Glycine max
  Clone ID: 701046233H1
gatccatcgatcaattaatttccaatggccgatcagctcaccgacgaacagatctctgagttcaaggaagcctttagcctcttcgacaaggacggcgatggttgtattaccaccaaggaacttgggactgtgatgcggtcgcttgggcagaacccaactgaggctgagctgcaggacatgataaatgaggttgatgctgatgggaatggtaccat

SEQ ID NO: 17767 - DNA, 213 bp, Glycine max
  Clone ID: 701046234H1
ggcattgaaataaaatattgcttaggatgtttatttgtacctatttactgttttcttatctatatatcaatggcattttgaaaatatattttggcatctcttgcatgccctttttgctttttgtgttgttgcttggcattttggtgaatactttagttcttctattattcttattattcttattattctcaaattccattaggaaaatgcggc

SEQ ID NO: 17768 - DNA, 210 bp, Glycine max
  Clone ID: 701046235H1
ctttcaacctaacccatcgttcgcacggagccgtggtggttctggctctgtccttttttcctttctctcgttaccagaaccagaagaaccatttgtggccaacatggatttggaccagtggatctccaaggtcaaagagggccagcatcttcttgaagacgagcttcaacttctctgcgaatatgtaaaagagatccttatcgaggagtc

SEQ ID NO: 17769 - DNA, 209 bp, Glycine max
  unsure (1)..(209): unsure at all n locations; Clone ID: 701046236H1
tctagatcgcgcatagtgtggtagcagcagcagagcttgtatacgtcgccgcttcagcgtagcaacatgatcattcccgagaagaaccgtaaagagatctgcaaatacctcttccaagagggagtttgctttgcgaagaaggacttcaatctggcgaanacccggagattgatgtgccgaatctgcaggtgataaagctgatgcagagc

SEQ ID NO: 17770 - DNA, 208 bp, Glycine max
  unsure (1)..(208): unsure at all n locations; Clone ID: 701046237H1
ctttgactgtaccaaagtcacgcttgctccctctctcaacggcttccctctnnnnnnnnnnnnnnnnnnnnnnnnnggacacacacatccttggtgttgaacgggtttttgggtgaaggagtagtgttggtggcttcatcttttagtgaataaggatacagcagcatgcggtggtggcttactctctctgttgatgtataccgcaaag

SEQ ID NO: 17771 - DNA, 208 bp, Glycine max
  Clone ID: 701046238H1
ctttattggctagaaaagaacgcaggaattgaaggaagaggaaccctcaatgattccaaacctggtgggaggctgcatatatctctggattatgtggaaagggaattcaaccatgtaaaaaatgatggagaattggtaggctgggtcacagatgggcttattgcaaggccattgccaaataggatttgcataggcgacactgcaccct

SEQ ID NO: 17772 - DNA, 208 bp, Glycine max
  Clone ID: 701046240H1
cactctctctctaaaaaaactcaaaaataaaacgaagctctcgaaactgagtccactcgtacgcgacgttgcctttttgaatcgtttcgaatttcactttttcgtttcccttcgttgtttgtatatatatcaccaatcaccggtcaccgttcatcgatcatcgatcatcgatcgtcgattattattgttattgttattattttggtgg

SEQ ID NO: 17773 - DNA, 207 bp, Glycine max
  Clone ID: 701046241H1
caagaacaagcacaaaggctgactgtgagctctcgagccttctacaatgatcgctttccagtctttgctgagtatgtgacaaacatgtttggttatgatatggtacttcctatgaatactggtgctgaaggtgtggaaacagcactgaaattagcacgaaagtggggttatgaaaagaaaagaattcccaaagacgaggctattatt

SEQ ID NO: 17774 - DNA, 206 bp, Glycine max
  unsure (1)..(206): unsure at all n locations; Clone ID: 701046242H1
ctatctctcaccaacttccgctacttcctactccaaccacttncttttttcccgcagtcatgggcaaggtcaagatcggaatcaacggatttggaagaattggccgtttggtggccagggtggctctgcagagagacgatgttgaactcgttgccgttaacgatcctttcattaccaccgattacatgacatacatgtttaaatac

SEQ ID NO: 17775 - DNA, 202 bp, Glycine max
  Clone ID: 701046244H1
atctcttgctagttgccacactacaccgatatttccaccaaacccgtttgcgttgttgtttgcgaataaatggcgactaagaggagcgtgggaacgttgaaggagggtgatttgaaggggaagagggtattcgtgagggtcgatctgaacgtgcctttggatgacaaccttaacatcaccgatgacactagagtccgtgctg

SEQ ID NO: 17776 - DNA, 205 bp, Glycine max
  Clone ID: 701046245H1
gagagagtgagttatgttatcaatgttatggtgaaagtgaaaccacaagcaaagctgaaagagaagctattcagtgattttgattcagatcgtgtctgtgtctacaaccatgtacagcggctccagcgacggcgaaagccatgacgctcctcaaaatcagaggaaaattccgcctgcatcctccatgctatgggtccgcaatctt

SEQ ID NO: 17777 - DNA, 204 bp, Glycine max
  Clone ID: 701046246H1
caaaaatgagagaaatcatcagcattcacataggtcaggccgggatccaggttggcaactcctgctgggaactctactgcctggaacatggcatccagcccgatggcatgatgccaagtgactcctccttcggtgtagcccacgacgccttcaacaccttcttcagcgaaaccggatccggcaagcacgtccctcgcgccgtct

SEQ ID NO: 17778 - DNA, 203 bp, Glycine max
  Clone ID: 701046247H1
gaacactttattgggtggtagtattggcatggaatccagtgaggtgggttctgaaaggagaaggggacggcccaagggaaaaaagcatcctaattataaagagttggaagatgaaaatggagagtattctgaagcaaattctgaagacagaaatgaagattctgcacaagaaggggaaaatggagagtttgaagatgatgggt

SEQ ID NO: 17779 - DNA, 204 bp, Glycine max
  Clone ID: 701046248H1
gtaacacttcttgagtactcaatgaatgcagtcacggaaggcatcgatgcaattgccactacccgggttgtgattcgtggggagagtgaaacaagtactagtactactcatgctttaactggagaagctgttcttcgaacatttagtgggactggagcgggaatggatgtcgttgtttccagtgtcaaggcctatattgctgca

SEQ ID NO: 17780 - DNA, 213 bp, Glycine max
  Clone ID: 701046249H1
atccatatctcctgattagcaagaagagatatgctggtttgttttggacaaaaccagacaactttgacaaaatggacactaaaggtattgaaacagttcgaagagacaattgtttattggtcaaaaacctggtgaacgattgccttcacaaaatattgattgacagggacattcctggggcagtccagtatgtcaagaatgcaatttcagatc

SEQ ID NO: 17781 - DNA, 211 bp, Glycine max
  Clone ID: 701046250H1
aacaaacaccacaccccgacgcagttcctccgctgtcggcgacggaggctgcaacactctcaactacactacacgacgccggtttgcattttccaaaccagtcaagctatactattactatagtttcatttcatggagacgcaatcgcatgaagatttacagcaaccgccgccggttacttcaaatgaagctcacagtgatgatgcgtccg

SEQ ID NO: 17782 - DNA, 210 bp, Glycine max
  Clone ID: 701046251H1
tgcatgaccaatgttgcatttacaaggttcctcctcatctcctgaaattgaatgcagaagcctatacaccacagttcatctcaataggccctcttcacagtgacaaaccagaactaaagcaggagaagcagaaacaaaggtattttcatgctttttggaaacgtctatctcacaagcaaggtttagctttgtcacaatataaatccttcc

SEQ ID NO: 17783 - DNA, 177 bp, Glycine max
  Clone ID: 701046252H1
gtaaacgaggacacagtagtaccatttattcctctgcttatttattagctatcagcaacgcttcgcatggctgcaggttcttcttcaaattgggtcatggaaagtggtgatgttcctcatgttttggccgttgatgacaaccttattgatcgcaaactcgttgagaaactcctcagg

SEQ ID NO: 17784 - DNA, 207 bp, Glycine max
  Clone ID: 701046253H1
agaagctgatccgagaagatggtgcagcgtctcacctaccgcaaacgccacagctatgctaccaaatccaaccagcacagagtcgtcaagactcccggtggcaagcttgtttatcagaccacgaagaagagggccagcggacccaagtgccctgtcactggaaagaggattcaagggattccacatttaaggccagcagagtataat

SEQ ID NO: 17785 - DNA, 207 bp, Glycine max
  Clone ID: 701046254H1
ccacgatgagtttcttaggccgtccatggaaggtgtattcgaggactgtgctatctgcagtcatacattggaaatgtaattcaacctgctgggtggctagagtggaatggaacagttggattagacactctcttttatggtgaattcaacaactatggacctggttctaacactagcaatagagtaacatggcctggttactctctg

SEQ ID NO: 17786 - DNA, 208 bp, Glycine max
  Clone ID: 701046255H1
aatttctccaacgctatcgagccaaacccaaacgttaactcagacgaagcaccaacagaagaagaagaaacaaaaccgaacctctctaaactctccaacgtcgccacccgattcatcgcatttcgcaggctgcaatggcgacgttcgaactgtaccgcaggttcgacgattggaatgtgcctgacggagacgctggacgagatggttc

SEQ ID NO: 17787 - DNA, 207 bp, Glycine max
  Clone ID: 701046256H1
gattcctccacccacctaccaccgaagaacggatattacaagagagatagatgttttgcttcctctaatctggcgaatcattcgttctagcaaattttgccgaaaactccaaaacccccccttttagaaaactcgattaacaacaatctcaatcttctacagcttatcctctctctctctcttcttcgcttcccccaacagcaattt

SEQ ID NO: 17788 - DNA, 204 bp, Glycine max
  Clone ID: 701046257H1
tttcatttcattttcgttttctctctcttctttctttctctttaaacgccgaccaacgacgcgacacgacaccgtttcgatggtggtgaagatgatgcggtggaggccgtggccccctctcgtctcgaagaagtacgaggttaagctcgtcgtgaaaaccctcactctccagggctgcgatctggtgcgtgcgtccgcagagaa

SEQ ID NO: 17789 - DNA, 204 bp, Glycine max
  Clone ID: 701046258H1
tttttctctctcttcattacacaacaacaaagtagttgttaatagcctctgttttcttcttgccaccaaaatctcacaccttccattgcatcatcattcataaatggctcatcccacctcatcaggtcaatcccatgatctcaaaaaagaagattgcaaggaaacaagatcactggttgtttgctttggggaaatgttaataga

SEQ ID NO: 17790 - DNA, 206 bp, Glycine max
  unsure (1)..(206): unsure at all n locations; Clone ID: 701046259H1
aaaaaaacctaccaatggctcccgcaaaggcagagaagaagcccgcggagaagaagccggcagagaaggccccagcggagaagaagccgaagggnaggaagaagatatcgaaggaaggaggaagcgnnnnnnnnnnnnnnnnnnnnnnnnnnagcgttgagacctacaagatctacatcttcaaggtgttgaagcaagtgcacccc

SEQ ID NO: 17791 - DNA, 202 bp, Glycine max
  Clone ID: 701046260H1
tcacaatctcgtatcaaaagagatgaattacgcccgtctgatttccggcggaggatggcttctccggcgactgtgcacggcggctgagactcccgcgaaaaagccaaacctctatcgaatgttatcggcgctggacatcaccggaggcaccgtgtcgcaaacgttggaccaatatataatggaaggcaaagtcatcaaaaaa

SEQ ID NO: 17792 - DNA, 203 bp, Glycine max
  Clone ID: 701046261H1
cgagttgacaccgattccactcacccaaccatgagccgattcaggcgatttgagctcatcgaacagccacctttcttcccctcatgctactcttctcccttcctcgtccaagactcactttctctcgacctcgacctgttgccacttcccacccccttcgacgctttcgcagatctgctccacgcgccgtcgttggcttaccg

SEQ ID NO: 17793 - DNA, 200 bp, Glycine max
  Clone ID: 701046262H1
cacacttcttgtctcttgtctctctcactttctctctctataatttgggtttcattgttcggtgctgaagcaaatttgcggtgtagcagaggcaatggaggttcaaagtctcagctttgaggagaacactttgtgggttggctcttttgtggaggcttggtgcttgacactctccttgccactgccaaatctcttgctgc

SEQ ID NO: 17794 - DNA, 203 bp, Glycine max
  Clone ID: 701046263H1
tctcatcctcacaaatacaattatacaaacacatattcattctcctcacataccaaaaataaattatttttcttgttattttccctttgctaacggaaagccatgaaattcgggaagagcctgagcagccagatcgagaaaaccctgccagagtggcgcgacaagttcctctcctacaaggagctcaagaagaagctcaagca

SEQ ID NO: 17795 - DNA, 195 bp, Glycine max
  Clone ID: 701046264H1
cacttcccttctccaacatgccaaacgacagcgttctgagtcttttcttcttcgttaccctcttcacatgccttctctctgctacttcccacgatgaccatattttcctaccgagtcaactccatgacgatgactcagtgagttgcactgcaaccgacccaagccttaactacaagccggtgatcggaatcctga

SEQ ID NO: 17796 - DNA, 210 bp, Glycine max
  unsure (1)..(210): unsure at all n locations; Clone ID: 701046265H1
tagtgattgcttgacagttactgtttgatacatttttggngggtgaggctgctcccaccccatttcatacggtcatccccaattctttgtttctgccggtatatttaggtgaggaaatgtttgtgtaaatagaagacgactatagtttattagtataagttttctgggcattcgtctcatatccggaagtttggtatcgaggtggactga

SEQ ID NO: 17797 - DNA, 212 bp, Glycine max
  Clone ID: 701046266H1
tttttctctctcttcattacacaacaacaaagtagttgttaatagcctctgttttcttcttgccaccaaaatctcacaccttccattgcatcatcattcataaatggctcatcccacctcatcaggtcaatcccatgatctcaaaaaagaagattgcaaggaaacaagatcactggttgtttgctttggggaaatgttaatagactttgttc

SEQ ID NO: 17798 - DNA, 208 bp, Glycine max
  unsure (1)..(208): unsure at all n locations; Clone ID: 701046267H1
gcaaaattatcttccgtttcaggattagngtttcaccgttacagtgaaacatgggagaaccaaaacgaatctatctgcgtatctttgcgctgctcctcttcatttccgcctcttcgtttcagcttctccgcgctttcgatgacgcgatcttttacgagtcgttcgacgaggatttcgaagaccgttggattgtgtctcagaaagatga

SEQ ID NO: 17799 - DNA, 207 bp, Glycine max
  unsure (1)..(207): unsure at all n locations; Clone ID: 701046268H1
ctttccgcttcaggttcagcttcaacttcaaattctcagtgaanccaattcagctgagtccaaatcccaaatccgaatcaaaatccgaagtgagatttgcgatggagaggcttcagcgaatgtttgcaggtgcaggtggagcgctagggcaccctcccccagattccccaactctcgattcctccgagcaggtctacatctcctcac

SEQ ID NO: 17800 - DNA, 207 bp, Glycine max
  Clone ID: 701046269H1
caatttttctctcaaccggcccaatttagcataagcccagcatggccaccgcaacagcagcagccacctacgtccttcatggggacgcgcctcctggaggcccattccggggcggggcgggtgcaggcccggttcgggtttggcaagaagaaagccgccgccccgaagaaagtttccagggggtcgggctctagctccgataggccc

SEQ ID NO: 17801 - DNA, 149 bp, Glycine max
  Clone ID: 701046270H1
agcatagcagacatgggaagagctccttgctgtgacaaagccaacgtgaagaaaggtccatggtcacctgaagaagatgccaaactcaagtcttatattgagcagcatggcactggtggaaactggattgccttgccccagaaaatagg

SEQ ID NO: 17802 - DNA, 206 bp, Glycine max
  Clone ID: 701046271H1
ggcagcacacttacacactatcatgttcattgatgctataaacacacttgtgtgtgaagttatgattcctagaaaagaaatattactatccttttgaaaatcatttgaaatttttaactccatcttcctcacctctggatctgatcttcgcacggtgccatggatcgaatcctgaaagcggcgagagcctctggttctctcaacct

SEQ ID NO: 17803 - DNA, 204 bp, Glycine max
  Clone ID: 701046272H1
gtagctgaaggccatgctgacttggtatcctatggtcgacttttcatctccaatccagacttggttttaaggcttaagcttaatgcacctcttaccaagtataacaggaagacattttacacccaggatcctgttataggatacacagattatcctttcctaagcaaagaaagtgagacaaaggagccaagggcacgcctttaa

SEQ ID NO: 17804 - DNA, 179 bp, Glycine max
  unsure (1)..(179): unsure at all n locations; Clone ID: 701046273H1
aaggcctttttattccaaagcaaggaaggaagaaataaaccgaatgagagcattaacctcttcttcttccactttcattccaaagcgttatnnnnnnnnnnnnnnnnnnnnnnntctcttcgctcttcgatcctcgtccgggggctgctccgaataccaccaccaccacgcgccgatgg

SEQ ID NO: 17805 - DNA, 203 bp, Glycine max
  Clone ID: 701046274H1
ggatttgaattatgatgatttggcatctgggctaaaggcagctcttcaaaatgataaatctgcatttgatgctgatcgtctgcaaaagtacactggtccacaactgcgtgagcttttgaggtggcctagaccccttcctctggaagatgaacgagttaggttactacatgaggttgggattgaattagaaagaaactttgagg

SEQ ID NO: 17806 - DNA, 203 bp, Glycine max
  Clone ID: 701046275H1
gcaaagatgagtagtagcggcgccaagaggagcggtcccccaaagcaccagaacaagtacgcttggaaacccaacgctggtcgcaaaatcaacgaaactgaagttggaggaagattcagacccctctctgagatcactggggtgtgccctcgttgcaaggatcaaatcgaatggaaacgacgttatggaaagtacaagcctct

SEQ ID NO: 17807 - DNA, 80 bp, Glycine max
  unsure (1)..(80): unsure at all n locations; Clone ID: 701046276H1
ctttctcttgaatcatcangaccatgaaggactccatagttctatattcagctttgggaagaggacaccttgtttcaatg

SEQ ID NO: 17808 - DNA, 201 bp, Glycine max
  Clone ID: 701046277H1
ggaaggagccgtagcagcagcggaagctctagcttgggcagcgaatcacaatggcgagaggattgaagaagcatttgaagaggcttaatgccccaaagcattggatgcttgacaaactgggtggtgcatttgctcctaagccctcatctggaccacacaaatccagggaatgcctgccactcatactcattttgcgaaacc

SEQ ID NO: 17809 - DNA, 202 bp, Glycine max
  Clone ID: 701046278H1
gtgaagctcagtgcatcaagatctctctctctgtaatcgaaaatgagcaagggaccgggtctctttaccgatatcggcaaaaaatccaaagatcttttgactaaggactacaactccgatcagaaactcaccatttcctcatacagcatctccggagtggccctcacttcaacatctgtcaagaaaggaggactctccactg

SEQ ID NO: 17810 - DNA, 202 bp, Glycine max
  Clone ID: 701046279H1
ctcaaacattgtttgttgtaggaagaggaatcttgagaaatggcaggggacagcaagagcaagattctgttcatcggagggactggttacatcggaaaattcatcgtggaagccagcgccaaagctggccacccaactttccttttggtgagggagtccactctctccaaccccgcaaaatcacccctcatcgacaatttca

SEQ ID NO: 17811 - DNA, 202 bp, Glycine max
  Clone ID: 701046280H1
ggccttcgtctcatgttccaccttctgaagctgctgcagttattgccgttttgaaggacaagagtgttgatgagttgcggaagcttttatctgacaaagatgcgtatcaacagtttttgcattcacttgatcaggtcaagattcaaactaatctgaaagatgaactttgcaaggagaatttacagcttgcagaggaaaatct

SEQ ID NO: 17812 - DNA, 211 bp, Glycine max
  Clone ID: 701046281H1
gggttatcatatctccatttccatttcctctctctcagtttccaagaatcttaagctatgggaaagtcttacccaaccgtgagcgctgattaccagaaggccgttgagaaggcgaagaagaagctcagaggcttcatcgctgagaagagatgcgctcctctaatgctccgtttggcatggcactctgctggaacttacgacgtgagctcga

SEQ ID NO: 17813 - DNA, 205 bp, Glycine max
  Clone ID: 701046283H1
gtcgtttctttctctctcctcaaccggagacagcgtcgccttcttttctgaatctcgcggtgttgttagttctgcggcggttgtagttccggcggcgatgggacagcaatcgttgatctacagcttcgtcgctcgcggcaccgtgatcctagcggagtacaccgagttcaccggaaacttcaccagcgtggcggcgcatgcctcc

SEQ ID NO: 17814 - DNA, 206 bp, Glycine max
  Clone ID: 701046284H1
ggacactagcaatgatgctgcctgggtcccttgcactgcctgtgttggttgctcaacaaccacaccctttgctcctcccaagtccaccactttcaagaaagttggatgtggtgcttctcagtgcaaacaggtacggaatcccacttgcgacggaagcgcgtgtgcattcaacttcacctatggcacttcctctgtggcagctagcc

SEQ ID NO: 17815 - DNA, 134 bp, Glycine max
  Clone ID: 701046285H1
atttgcacttcacttctatttcttttctgttctgcgatggaacttgtcccttactctgaccctaactctgccaccaccaccccaccgtggcacgacatgttccgatccgcatccctccgaaaacccacctccga

SEQ ID NO: 17816 - DNA, 205 bp, Glycine max
  Clone ID: 701046286H1
ctctctcacatcacaatttcataaaaaacctctttttaagtttcttgcttctttctctctgaaagaaaattgaagtcctaaccagttggctcttttgttttatcgttctccatggctcagaaaaccgagaaagaagaaaccgacttcaaagttccggaaacgattacgctttgcgtcaacaactgcggcgtcaccggaaaccctg

SEQ ID NO: 17817 - DNA, 73 bp, Glycine max
  Clone ID: 701046287H1
aaggagactgtgttgagcgctccacctgcgtactactattatccaagagcatcagaagagcacgttcctctat

SEQ ID NO: 17818 - DNA, 204 bp, Glycine max
  Clone ID: 701046288H1
gttcggggcttgtgctgcttgttttcccaggttttagagctccaaaccttcagatccacctcattcgtctccagatcttccttccttgataacgttttcgggttcgagaaggcacttgtttgtttgtcgtacgaaatggagactaaaccgagttcggtgatggttacgctcagttacggcgcgttgacgtgcgccgcggaagtt

SEQ ID NO: 17819 - DNA, 202 bp, Glycine max
  Clone ID: 701046290H1
cgtgcctctagggttatcatatctccatttccatttcctctctctcagtttccaagaatcttaagctatgggaaagtcttacccaaccgtgagcgctgattaccagaaggccgttgagaaggcgaagaagaagctcagaggcttcatcgctgagaagagatgcgctcctctaatgctccgtttggcatggcactctgctgga

SEQ ID NO: 17820 - DNA, 202 bp, Glycine max
  Clone ID: 701046291H1
tgtcacaccaactcaataacagatcaaaccaaacccaaactgttaggtttcctttgtttggtgtgaagccatggctgattcttcttccaacctgaaatccgacgcgataatggagcagatgaagcaacacctcgccaccgacgctggcaaacaagtcaccaataaaattggactcgtttatcagtttcacattgctcctaag

SEQ ID NO: 17821 - DNA, 201 bp, Glycine max
  Clone ID: 701046292H1
ataagaacctacacaaagcagctactacttggactcgagtacttgcacaaaaatggaatcatgcacagagacattaagggggccaatattcttgtagataataaaggatgcataaaacttgcagactttggggcatccaaacaagtcgttgagctggcaaccatttctggtgccaagtccatgaagggtactccatattgg

SEQ ID NO: 17822 - DNA, 201 bp, Glycine max
  Clone ID: 701046293H1
cgaaagggatattcgatttgaacttctggctcggctttgcccaaattccactggagctgatataaggagtgtatgcacagaagctggtatgtatgctatccgtgcccggaggaagactgtaacagagaaagacttccttgatgcagtaaataaagtcatcaaaggataccagaagttcagtgcaactcccaagtatatggt

SEQ ID NO: 17823 - DNA, 201 bp, Glycine max
  Clone ID: 701046294H1
ctcgtttctggtccaaattcattgatgataaggtttttggtgctgcatggaaatccgttttcacagctgatgagaaagagcgtgagaagaatgttgaggaagcaattgaggctctgcagtttcttgagaatgagataaaggacaagaagttctttggaggagaggagattgggttggtagatattgctgctgtctacatag

SEQ ID NO: 17824 - DNA, 200 bp, Glycine max
  unsure (1)..(200): unsure at all n locations; Clone ID: 701046295H1
ctttctcaatttcgatttctcaattctcaattctcaatctcaaggtgaaatgatgcactcagtggcaataattacttttggatgctggagataaggcgtgatgggcgnnnnnnnnnnnnnnnnnnnnnnnaaggagactgtgttgagcgctccacctgcgtactactattatccaagagcatcagaagagcacgttcctc

SEQ ID NO: 17825 - DNA, 204 bp, Glycine max
  unsure (1)..(204): unsure at all n locations; Clone ID: 701046296H1
aattggcgtcggcacgattcagagatttggttcgctgcctgaaacctaatggctccgaaggccaaaccggcgccatcgcagcctgctcctcctcctgccctcgaagatctcttcaccacgctcaaccgcnanatccaggcttccgcatacgacaatgccgtcaagctcacagatcagattctncgccattgctcccggcgacga

SEQ ID NO: 17826 - DNA, 271 bp, Glycine max
  Clone ID: 701046301H1
atttgttcattttgttgttcgaagccaaaaccctagcagccggcgagaatggcagacgttgaggttgatgcggcggcagcggcaggggcagcgcaccgaagaagagaacgttcaagaaattcagcttcaggggcgtggatctggacgcgcttctggacatgtccaccgacgaactggtgaagatgttcagtgcgcgtgcacgtagaaggttccagagaggtctgacgaggaagcccatggccttgattaagaagctccgcaaagctaaaag

SEQ ID NO: 17827 - DNA, 268 bp, Glycine max
  unsure (1)..(268): unsure at all n locations; Clone ID: 701046303H1
cacagatccgcaaaatgatgggtttgggatgttgaagcggtggaggattcacaatttgcgatggaaagggaaaattggagagaacacatcaatagcaatgggaattattacgatgacgacggagtagaacgaagccctgcaaagccttcttcgctgtcttcatcgcctcccagacttgcttacatcgatcaccgtgtttccaaattcgatnnnttggccggtgtcgctatcaagtacggtgttgaggtggcagacataagaaagatga

SEQ ID NO: 17828 - DNA, 269 bp, Glycine max
  unsure (1)..(269): unsure at all n locations; Clone ID: 701046304H1
gaacctgtctcaatgatcttatgtactttcctacccgtaatgcatatggtctctnctagtgttgctggaaacatgggaaaaactagcagctttgcagaatgagtttgagaatgtgagaaacaaattggatgatggtaaggagaagatggtacggcttgagaagaaggtgatggttctcacgcaaggttatgagatgagagtaaagaaaagcctgtggccacaaattgaggccactttcaagcagatggatgtagctgcaactgagttag

SEQ ID NO: 17829 - DNA, 245 bp, Glycine max
  unsure (1)..(245): unsure at all n locations; Clone ID: 701046306H1
ggnaagccacatagagacacaataccgagtgagttgttganccttcgccacaactctctanccaacatgggtatctccagagattctatgcacaagaggcgtgccactggtggcaagaagaaggcctggaggaaaaagagaaagtatgagcttggtcgccagcctgctaacactaagctgtcaagcaacaagacagtcaggaggatccgtgttagaggtggaaatgtgaaatggagggcattgag

SEQ ID NO: 17830 - DNA, 263 bp, Glycine max
  Clone ID: 701046307H1
cctttccgcttcaggttcagcttcaacttcaaattctcagtgaaaccaattcagctgagtccaaatcccaaatccgaatcaaaatccgaagtgagatttgcgatggagaggcttcagcgaatgtttgcaggtgcaggtggagcgctagggcaccctcccccagattccccaactctcgattcctccgagcaggtctacatctcctcactcgctctcctcaagatgcttaagcacggaagggctggggttcccatggaggtgat

SEQ ID NO: 17831 - DNA, 261 bp, Glycine max
  Clone ID: 701046308H1
caataagcaatgggatggggagaaatgtattatcttgacttgcagctttactcctggttcttgttctttaactgcatataagctcactccatctggttacgaatgggggcgtgtaaataaggatacgggaagcaatccacatggttaccttcccacccattatgagaaggttcagatgctccttagtgatcgcttccttggtttctacatggttcctgataatggtccatggaattacaacttcatgggggtgagacacgc

SEQ ID NO: 17832 - DNA, 260 bp, Glycine max
  Clone ID: 701046309H1
gtcggcgacagcgaactacttccgtgtaatggcgacctccgtcgcagtcgccggcgctttgacggcgcatgatcgccggattctgacagcggtgaacgtcggagcgtcgagcctgtcgttggccggttccagcttcattgtagtgtgctacctcctcttcaaggagctccgcaagttctccttcaagctcgtcttctacctcgctctctctgatatgctttgcagtttcttcggcataataggggacccgtccaaagttt

SEQ ID NO: 17833 - DNA, 261 bp, Glycine max
  Clone ID: 701046310H1
cataaataaaggtggtagagagagatgaaaagcgaggaaggtgaagcggaaaaggaggaaaaattgggagaaaagtaaggcgaggggtattggtagggaaaagtaggggcccctttactccagtgccctcttggtcttggggctcacaacaaccatagcagcagcgttctttctctttctgctagaaagctcgccgcggctctctgggaattcaaccactctttcccactctttcaaatgcatcatcatcgttctgctaac

SEQ ID NO: 17834 - DNA, 259 bp, Glycine max
  Clone ID: 701046311H1
gagagagcagaggtttgcagctgcgtaagtgtaaccctaatcctaataagctgaaggttatgggggggtttggaggttgttctggagtggcagtgggtgtgagagaaagaaaaggaattggaagggttagggttcgggttcgggcgagttcttcgtcggacgaggcagtgagtgcgcagtcaaaagtgactcagaaagtattctttgacgtcagtattggaaatccagttggcgaagcttgtgggacgtattgtgattg

SEQ ID NO: 17835 - DNA, 258 bp, Glycine max
  unsure (1)..(258): unsure at all n locations; Clone ID: 701046312H1
tctcacttcgtcaaaaccaaccaaacccctccccaattctcaagccaaccatgtcttccttcaagagcaagtaccaagatgaactcattgccaatgctgcttacattggcaccccagggaagggtatccttgctgctgatgagtcaactggtacaattggcaagcgattggccagcattaatgtcgagaatgttgaagcaaataggcgtgctcttcgtgaatcctattcaccacacntggngtttgnggtgctcngng

SEQ ID NO: 17836 - DNA, 261 bp, Glycine max
  Clone ID: 701046313H1
cacgtatccttaaaaagcacttcaggggaaagccatattacgttgatcttcttgatttgtttaatgaggttgagttccagactgcttcaggacagatgatagatctgatcaccacactggaaggagaaaaagacctgtctaaatacacattaacactgcatcgacgtattgttcagtacaagactgcatattattccttttaccttccggttgcatgtgcattgctcatggcgggtgaggatcttgacaaccatgttgatg

SEQ ID NO: 17837 - DNA, 262 bp, Glycine max
  unsure (1)..(262): unsure at all n locations; Clone ID: 701046314H1
cgggtgaaggcgaaaaccaaatcaagatgctgagagtgggcgcaaagaggcttttgggaacgacgtcgttgggcgttanggttccggcgaggctgtaccacgagagggttgtggatcactacgacaacccccggaacgttggatcgttagacaagaacgacccgagcgtggggacgggtttggtgggggcgccggcgtgcggcgacgtgatgaagctccagattaaggtcgacgacaaaaccggaaaaatcgtcgatgctcg

SEQ ID NO: 17838 - DNA, 264 bp, Glycine max
  unsure (1)..(264): unsure at all n locations; Clone ID: 701046315H1
ttgagttcaaacactctcatcttcttattcttctgctttcactctctgactcaatcgttctaatccacaaaaaatgaccttaaattacaacattgccctcgccttctctgcggtgctcacnctgctcctctttcccctactgaccgtaggggagctcgtggaggagcagccactagtcctcaagtaccacaacggccagctcctgaagggccgcatcaccgtcaatctcatctggtacggcaccttcaccccgatccaacggtc

SEQ ID NO: 17839 - DNA, 143 bp, Glycine max
  unsure (1)..(143): unsure at all n locations; Clone ID: 701046316H1
gcgagggatatctatcttcattttcgtcgtcgttcatttttttattttttttttcngtnttccattcgcttcttctctcagaaaagctcgccaatcgatcttgctctcttctangcttttngaattccttccnttccattntg

SEQ ID NO: 17840 - DNA, 267 bp, Glycine max
  unsure (1)..(267): unsure at all n locations; Clone ID: 701046317H1
caattacctgttggcaatggtggaagcattgacaaatcaagtatgagcagtgcccaaatctcangctcagcaaatggaaggctagtctcaagctttgcttctaaacagcagaccagggcaactggtgctgtgtacccttctcaaagataggaagatggaagggcgtgttagattatcctgtctcaccaggatgcggatgaaaacatacaagattatttatcgggtttgtgggagaatgttttttgaagcttgacggagtaatcttgt

SEQ ID NO: 17841 - DNA, 267 bp, Glycine max
  unsure (1)..(267): unsure at all n locations; Clone ID: 701046318H1
gggtcctaaaactccccttcctgatcttgtcacaatccacactcctaaggaagaggaagaatatgcccgtcctgctgctgttttggcaaccaatattgaggtccctgttgcttcttaagtagaaatcatagcacctgagtacctagtatgcagtgttcattggcttagacgtggtcagatttttgtagtgtcttatcttttcaagaatttttatactccagtacaaggatccaagcntaantnatgttatattnccnccctncattc

SEQ ID NO: 17842 - DNA, 265 bp, Glycine max
  unsure (1)..(265): unsure at all n locations; Clone ID: 701046319H1
gttgtatactataatagcagaatcgtgagtaacagcagagcagaacaccgataaatcgctatgactgctcagacccaagaggagcttcttgcggccgaccttgagcaacaaaagatccatgatgatgagcctgtannnnnnnnnnnnnnnnnnnnnnnnnnnnnngacgacgatgaggatgacgacaatgttgaaggtgatgcatctggtaggtccaagcngaccagaagcgaaaagaagagtcgcaaggcaatgctcaacttgg

SEQ ID NO: 17843 - DNA, 264 bp, Glycine max
  Clone ID: 701046320H1
ttcaattttaatttcctctcaaaccctaaccctaaccctaaccctccccgtcacaaaagaaaaccctctttgtccgatcatcgtcgtcaagatgttggaactccgtctcgtgcaaggctccctcctgaagaaggttttggaatccgtcaaggagctcgtgaacgacgcgaacttcgactgctcctccaccgggttctccctccaggccatggactccagccacgtcgccctcgtcgctctcctcctccgatccgagggcttcga

SEQ ID NO: 17844 - DNA, 260 bp, Glycine max
  unsure (1)..(260): unsure at all n locations; Clone ID: 701046321H1
ctgatcttctgtgaagggttcgagtgagagcatacctgtcgggacccgaaagatggtgaactatgcctgagcggggcgaacnagaggaaactctggtggaggcccgcagcgatactgacgtgcaaatcgttcgtctgacttgggtataggggcgaaagactaatcgaaccgtctagtagctggttccctccgaagtttccctcaggatagctggagcccgcgggcgagttctatcgggtaaagccaatgattagaggcat

SEQ ID NO: 17845 - DNA, 259 bp, Glycine max
  unsure (1)..(259): unsure at all n locations; Clone ID: 701046322H1
ctttctagttcgtgttcttcgtcgcaaatccgaagtaggatctctcttgttttttctctaggtttttcgcgatggcgtcgaagcgaattttgaaggagcttaaggatttgcagaaggatcctccaacatcttgcagtgccggtatatttttatttttttgttttgatattcttttcctattttattgttgagaatttggttgtgtttgtttaaacnatttggatttaaattttggtaaggaagaagctgcgcgattctg

SEQ ID NO: 17846 - DNA, 260 bp, Glycine max
  Clone ID: 701046323H1
ctcacttttttcagcttctctaaattctctgtctacttcaccaagcacttttggttgcagctttggttaatttccaatatggtgtttcctctcctatctatctttgctttactcaatcttgcagtggtggcaacccatgcagaaaccttgccccctgaagtttactggaagtcgaagcttcccaccactccaatgccgaaagccattacagatatccttcacccagatttggcagaagacaaaagcacctctgtggccgt

SEQ ID NO: 17847 - DNA, 256 bp, Glycine max
  Clone ID: 701046324H1
ggtgatgctggttttgttaagatgattccgaccaaacccatggtggttgaaactttctctgagtaccccccacttggtcgctttgctgtcagggatatgcgtcaaactgttgctgtgggagtcatcaagaacgtggagaagaaggatcctactggagccaaggtcaccaaggctgcccagaagaagaagtgaatcgtgcggtttggttcatcaggggatgtcgtttcttatggttacaataaatgttggtttcttg

SEQ ID NO: 17848 - DNA, 257 bp, Glycine max
  Clone ID: 701046325H1
gcagcagcggcaagcaactccatccgcaatgggaatcgatttgaaggcaggaggtaagtccaagaagaccaaacgtacagcccccaaatccaatgatatttacctcaagctcctcgtcaagctgtaccgttttcttgttcggaggactggtagtaacttcaatgccgtcatcctcaaacgccttttcatgagcaaggtcaacaagcccccgctatccctctctagattgattcgttacaccaagggaaaggaggata

SEQ ID NO: 17849 - DNA, 237 bp, Glycine max
  unsure (1)..(237): unsure at all n locations; Clone ID: 701046326H1
ccttaaaccccgaccttcatatactgcagtgctagtctgncttatttcttcagctatgttantgtcaagaacacttggacgaacactatttgctgcagctgccagatcaaaacaatatnnnnnnnnnnnnnnnnnnnnnnnnngcagagaaggacacaacccccttcaggagttctttgaggcagacaggagccctgatgatgacaaacctgttgtttatggtcggagttggaaggc

SEQ ID NO: 17850 - DNA, 258 bp, Glycine max
  unsure (1)..(258): unsure at all n locations; Clone ID: 701046328H1
caacaacaacacacacactcctcacacaataatggaagaagggcaaagaaaaacaacaacactacttctatgctcccacattgtggttcttcttttactctccctagtggccgagactagtgccaaggtttcagcagtgatcgtcttcggcgactcctccgtcgacgccggcaacaacaacttcatccccaccattgcacggagcaattttcagccatatgggcgtgctttnaaggtggaaangccntgggnggtttt

SEQ ID NO: 17851 - DNA, 259 bp, Glycine max
  Clone ID: 701046329H1
aaaaggagctattttgattcccctctctcctcaaggcttttgcctaaccagccacaacactttggatggaactaccttcagatgggtttgggaagaaaaatagaccctgagccaggtaggtgtagaagaactgatggcaagaaatggagatgctcaaaagaagcatacccagattctaagtactgtgagaggcacatgcacagagggaagaatcgttcaagaaagcctgtggaagttttgaaaacaacaacaccatcat

SEQ ID NO: 17852 - DNA, 259 bp, Glycine max
  Clone ID: 701046330H1
gcctcaagagcagtgttattgttggctatgtgtgtgcttccggcgatggttgtggccattcgcccagcaaagaaccctttttgcgtgaagggtcgtgtctactgtgacccttgccgtgctggttttgagacctcagctaccacctacattgctggtgctgagattatgttgcaatgcaagagcagggttagcaacgaggttgtgtacacgaagaaggggtacaccgactcaaccggagcatacacaatgtacgtggatg

SEQ ID NO: 17853 - DNA, 266 bp, Glycine max
  Clone ID: 701046333H1
gtgccaatggcggatccaatcgcgaaggttctgatcgcgtttgcgctcttagcttccctcttgctgtgttcgcacgcttcctccgacgttcccttcatcgttgctcacaagaaggcctccctcaacagactcaagtccggcgccgaaagggtctccgtcaccatcgacatcttcaaccaaggaacctcgacggcctatgatgtaagcttatcagacgatagctggccaagtgatgcttttgatgtaatcagcggtagacttcaaag

SEQ ID NO: 17854 - DNA, 265 bp, Glycine max
  unsure (1)..(265): unsure at all n locations; Clone ID: 701046334H1
gggtgttttcacattcgaggatgaaatcaactcccctgtggctcctgctactctttacaaggccctagttacagatgccgacaacgtcatcccaaaggctcttgattccttcaagagtgttgaaaacgttgagggaaatggtggcccaggaaccatcaagaagatcactttcgttgaggatggagaaaccaagtttgtgctgcacaaaatagaaagcattgatgaggcgaacttgggatacagctacagcgtggttgggggtnct

SEQ ID NO: 17855 - DNA, 266 bp, Glycine max
  unsure (1)..(266): unsure at all n locations; Clone ID: 701046335H1
gcgcgttgttaacttcccttcactccaaacaccttccatctccaaacatgggtcgngaaacacgacgccgttttggtcagcgaaccagtcgccgaagaagttccctacagccccgagctcgattccgnnnnnnnnnnnnnnnnnnnnnnnnnnnnnnncaagaacaaagacaagcaccaaactgatagcagcnccaaacgaaagctcgacgaacaactcgaccctcaaaacggcaccgatcgnntangaagaaaaagnngcnccag

SEQ ID NO: 17856 - DNA, 262 bp, Glycine max
  unsure (1)..(262): unsure at all n locations; Clone ID: 701046336H1
ctctctttctttctccctgtcgatccgagttagcattccaaggnncgagtcactgactcgctagcacaggcggcgttttctcgtttcgccacgcatcattcgatttcgctctgtnctgctacgctccactccgcaccataacgaatcgnatcgaatatcccgaaacaatcacgtgatattcgatcatnatctattttctccgatcaatcacgagatattcgatctccttctcaatctccacagtttaactccngcttcaaac

SEQ ID NO: 17857 - DNA, 261 bp, Glycine max
  unsure (1)..(261): unsure at all n locations; Clone ID: 701046337H1
cactcctcttcctcttcgatcatcacctctccacaatgccgccgaagttcgacccctcccagatagtcgacgtcttcgtccgcgttaccggcggcgaagtcggcgcggcgagttccctggccccgaagatcggtcccctcggtctctcccccaagaagatcggagaagacatcgccaaagaaaccgccaaggactggaagggcctccgcgtcaccgtcaagctnnccgttcagaatcgtcaggcgaaggtcacggtggtcc

SEQ ID NO: 17858 - DNA, 259 bp, Glycine max
  unsure (1)..(259): unsure at all n locations; Clone ID: 701046338H1
cttgcagtgggggaacaggaagaggctgagatgtgtgagggtgaaggaccctcggatttcagcgagactcaacggtggaatcagaaggaaacttggttctgcactggatcatcatcgctctgggttcactgtgcccgagaaagaaatctctnnnnnnnnnnnnnnnnnnnnnnnnnctaatcgccttacaaggtgctgaaaataaacaacatcaactaaagggttttcttcatgattttctttcccctcttttgttacc

SEQ ID NO: 17859 - DNA, 256 bp, Glycine max
  unsure (1)..(256): unsure at all n locations; Clone ID: 701046340H1
gtcgacgatccgccggagaattgcctccacttctctgtcctctcggaggcgaacgagagcgacgtgccagaggtggagatccacccggacgacgcggtggcgatgccgttctcctccggcacgacgggtttacctaaaggagtgattctcacgcacaagagtttaaccacgagtgtggcgcacaagttgacggagagaaccctaacctctacctcaccaccgaggacgngctcctctgcgtgcttccgctctttca

SEQ ID NO: 17860 - DNA, 255 bp, Glycine max
  Clone ID: 701046341H1
ctctgtggggattgtcagtctcggaaactaatagtgttgccattggacgagaaggaggtgttgcacctctgattgcacttgcacggtctgaagcagaggatgttcatgaaactgccgcaggagcactatggaatctggctttcaatgctagcaatgctctaagaatagtagaggaaggtggagtatccgcacttgttgatctctgctcttcatcagtttcaaaaatggcacgattcatggctgcgttggcattgg

SEQ ID NO: 17861 - DNA, 243 bp, Glycine max
  unsure (1)..(243): unsure at all n locations; Clone ID: 701046342H1
ctcttctcactgcatcgcttcaggttcttctgaaaagatgtctcgcgtgtatgttggtaacttggattcacgagtcaccgagagagatctcgaagacgaattccgcgttttcggagttattcggagtgtttgggttgcacgtagaccacctggtncatgcttttattgactttgatgaccgcagagacgcacaggatgctatccgtgaattggatggcaagaatggttggagggttgagcttt

SEQ ID NO: 17862 - DNA, 255 bp, Glycine max
  Clone ID: 701046343H1
aatgttctccggctcccagttcgacgccaccaccgccttctccggcggcggtttcatgtcttctcagccgtctaccctcaacgattcctctcccgcgccgtcaaaaagccgcgaaactcagggtttggtgccagtgacagtgaagcagataagcgaggcctctcaatccggtgatgaaaagtcgaatttcgtgatcaacggtgtagatctgaacaatgtaacactgcttgggatggtgtttgagaaagttgagag

SEQ ID NO: 17863 - DNA, 257 bp, Glycine max
  Clone ID: 701046344H1
tgacgaccagactcttcctcttcgcagggactcttctactgcttctactctcacgcgccacgcacgtgtcatccgccaccttatgtccgccgtgcggcaacacgacggtgccgtttcccctgagcacaaccccaacatgcggcgacccgtcgtacaaaatccgatgcagcagctccaacaccctcgtcttcgacacgcttaacaactcctacccgatcgagtccatcgacccgaactcccagcgcttcgtgatccga

SEQ ID NO: 17864 - DNA, 257 bp, Glycine max
  Clone ID: 701046345H1
gggagattctttgtttgctaccttctctcggaaaaatggttacgttcaggtttcaccagtaccaggtggttgggagggctcttcccacggaagcagatcagcaccccaagatctaccgaatgaagctctgggccaccaacgaggttcgcgccaagtccaagttctggtattttctgaggaaactgaaaaaggtgaagaagagcaatggccaagtgcttgccatcaacgagatttttgagaagaacccaaccaaaatt

SEQ ID NO: 17865 - DNA, 258 bp, Glycine max
  unsure (1)..(258): unsure at all n locations; Clone ID: 701046346H1
cttgaaactcttccgccatacctcacctcagatctacgtcgtcgncgtcgatcttctgttcagaataataattttagatccctgatgcaacagaacaaggaatcttcttagattctttttctggaagaaagagaaaacagaagaagaaactcttcttctttagacccgtcttatatatttatatacagtctctgattgatcggttttttcggaacctctattttcactcaaatccacgcgcgctcttcgggcatggat

SEQ ID NO: 17866 - DNA, 259 bp, Glycine max
  Clone ID: 701046347H1
gccgtcgtttcggtgaataagtgtcgtttaaagatgcagagtctgcaacagaaggcttccgaatggagcggtgtttccatagacgacgctttcggcatcgacgacaccaatctcttccagaaactcggcctccaaaccttcattaacctctccaccaatttctacaacagggtttacgatgacgaggaagaatggtttcgttcaatattcgcgaattctgagaaggagaatgccattcaaaaccaatacgagttcttcg

SEQ ID NO: 17867 - DNA, 262 bp, Glycine max
  Clone ID: 701046348H1
catcaatctcgtttgttctcactaactattacttcatcatgtcgtcgagcacagttggtcaagtcatcaaatgcaaagctgcggtttcatgggaggcagggaagccacttgtgattgaagaagtagaggtggcaccaccacaagctggtgaagtgcgtttgaagatcctctacacctctctttgtcacactgatgtttacttctgggaagccaagggccaaactccattgtttcctcgtatatttggtccagaagctggagg

SEQ ID NO: 17868 - DNA, 263 bp, Glycine max
  unsure (1)..(263): unsure at all n locations; Clone ID: 701046349H1
gccgaaaccgtgtggaggtgtgtgcttgacttgagtattgaaattgttgattgttaattggaagtgaagaagaaggtaatgccaggtcctggtcctcaccttatgtatgccatgggttctggtttatgtctcacaagcatcagcaatgggaggtttagtccccaccacacactcttctacaccatcaacgccttctttggccctgatgtcggttctttcacggagtggcttggttcactctttggtggctctgctcanctttg

SEQ ID NO: 17869 - DNA, 218 bp, Glycine max
  unsure (1)..(218): unsure at all n locations; Clone ID: 701046350H1
tgaggagaactctggtgagaaatggcagtctctacactcgcaaccttcttcatcactccgccctcgcacttgccgcttcatctcgtcctcaattcagactcttttcctccaatgaaaaccccccaccggttccccaaatcgacgacgtgaacaacaaagagngaaaggcagatcgagacttanttcaagggcgacganaaggtgctcccgtngatnag

SEQ ID NO: 17870 - DNA, 261 bp, Glycine max
  Clone ID: 701046351H1
gagaattatcatacccttcaagatgaaaccgtacctacgtccaatattcctattattccttatccttctcgaccaatccatttcggcgagtgctgctataaatattaatggtctgagaaacaaaattagagaagttctaaacaagcacccgagcatcaatcttccggcagataaactgaagaaggtgaagagaccactgaaggcactggattatctgcttggcgaatgtaaggacaggccgcctcaagaatttcaagaatt

SEQ ID NO: 17871 - DNA, 259 bp, Glycine max
  Clone ID: 701046352H1
cttagatacttcttatgcaactatagtgaggctaagagttggtgcataattaatcaaaatgttggccatattccacaaagcttttgctcatccacctgaagagctgaacagtcctgcatcttacaaaggttccaagaagcctaaggttcctgaggaaactctcaaagatttcctttcccaccatcctcacaacacttgctccatgagctttggtgaagctgctgtgctagcttatgttcgtctgatcaatccttctctg

SEQ ID NO: 17872 - DNA, 257 bp, Glycine max
  Clone ID: 701046353H1
gttggtctcctacgctgcccggtcggaatcagcgctgggcggctggagccccatcaaggacgtaaacgacagccacgtggcggagatcgccaactacgcgctgagcgagtacgacaagcgttctggggccaagctcacccttgtcaaggtcgtcaagggcgagactcaggtcgtttccggcaccaactaccgtctcgtcctcaaagccaaggatggatccgccacggccagttacgaagccatcgtctgggagaagc

SEQ ID NO: 17873 - DNA, 256 bp, Glycine max
  Clone ID: 701046354H1
cgcattcaacctttctcttcctcctcactcaaacttcccctctctacgccgttcctcccaaatggatgcaccaatggagttttggggtgttgaggttaaggttggtcagaccgtgacagttgacccaatggatcctgtggattcatacatacacatatctcaggttgcgctcggagaggcgaaaaaggagaaacctaatgagtctgtggttttgtatttgaaagttggtgaacagaagattgtcttgggaaccctt

SEQ ID NO: 17874 - DNA, 256 bp, Glycine max
  unsure (1)..(256): unsure at all n locations; Clone ID: 701046355H1
ccaacgtcgcccgcactgccttcggcctgggcgcggcggccaccgcgtctcctcttccctctacaccgtcgacggcggccagcgcgccgtcctcttcgaccgcttccgcggcatcctggactccaccgtcggcgaagggacccacttcctcatcccctgggtccagaaaccctncatcttcgacatccgcactcgtccccacaccttctcctccgtctccggcaccaaggacctccagatggttaacctaaccctc

SEQ ID NO: 17875 - DNA, 255 bp, Glycine max
  Clone ID: 701046356H1
ggaaggcacactcccggtaccttcaccaatcagcttcagacttcgttcagtgagcctcgtctccttatcctcactgatccaagaacagatcaccagcctattaaggaagctgctcttgggaatattcccaccattgctttctgtgacactgattcgcctatgaggtatgtggacattggaattcctgccaacaacaagggaaaacacagcattggttgtctcttttggctccttgcaaggatggtattgcagatg

SEQ ID NO: 17876 - DNA, 206 bp, Glycine max
  unsure (1)..(206): unsure at all n locations; Clone ID: 701046357H1
cagtgacataattttgcatttgggtcacaatttgcccgaaatttaacgcgcatttncccgtagttgggtttgtcctacgttggtgtgtcccacaagtgcacagtgtccatcacttcctgttcctggtttctataaatactcaaacccattcttcctcattccttgcttattttaatttttctagctttgcttaggttctgttttgc

SEQ ID NO: 17877 - DNA, 254 bp, Glycine max
  unsure (1)..(254): unsure at all n locations; Clone ID: 701046358H1
ccctcttgatttgaaggttgttttgtgcttatagataaaagttcnnccaaatcaagaggggttttcagatcatannnnnnnnnnnnnnnntaaacaatggctaagttctttgctgctatgatcttggcactcattgccatttccatgcttcaaacagtggttatggctgctaatgagcaaggaggccacttgtatgacaacaagagcaaatatggaagtgggagtgtcaagagataccaatgcccatcacaatg

SEQ ID NO: 17878 - DNA, 253 bp, Glycine max
  unsure (1)..(253): unsure at all n locations; Clone ID: 701046359H1
ttttcagaggaacaatggcgggtagggtttcgacgtgcttcttcttcgtgtttgctctttctctccttcttccttttcagatctccgctgaggaatcatcggagaaagagttcgtactcacattggatcactctaactttcacgacactgtcagcaagcacgatttcatcgtcgtcgagttctacgctccatggtgtggccactgtaagaagcttgctcccgagtatganaaagctgcttctatcttgagtag

SEQ ID NO: 17879 - DNA, 257 bp, Glycine max
  Clone ID: 701046360H1
tgcttcttctaaaaaccccactctgttatctcaacctaaacctcccaaacaccccatccatggcgggagcaacaggcagaaccctcttcaccctctccctctcttcctcctcttccctcacgcgcctctctctcatccccaagcgcgtcccactccccaaacccctccccctcttccgccgcttccgccctctctgctccgtctccgccgccgcgccggaagctgccgacgcgaagcacttcaatactcctcgagag

SEQ ID NO: 17880 - DNA, 255 bp, Glycine max
  Clone ID: 701046362H1
gaaagaagaagctacttgttggctcgcaaatgaagttgtgtgagaactgagaagggtacttggtgtggtgggtctcctaatccattgaagataaattattaaaagatgaagtctgctcttatctaaatcacccttatttatccagattaagacagtctttagctgaacataggaagctgcaaagtttccctcttttggggcagagtcaattcatcaattaggagttggatgagagaatggaagccacaacagagc

SEQ ID NO: 17881 - DNA, 258 bp, Glycine max
  unsure (1)..(258): unsure at all n locations; Clone ID: 701046363H1
caagtacacaagacccagcatcagtatgtgttggtcaacacacacacagtttgagttagagttggatggacatggaatggtgcctataagaatcagagaaagagaaaggatccacaacattaggttgaagaggaaaaagttggaggacattccggaggaaaccgagcttcctattgatactaatccagcagagcttgaagaagcgagccttcagntggaaacagatttggaaatactgagccgagccatggatatggg

SEQ ID NO: 17882 - DNA, 258 bp, Glycine max
  unsure (1)..(258): unsure at all n locations; Clone ID: 701046364H1
gtggtgccttatcgctgtggttttcatcgtcttccttctcttatatttctttttntnttngnctncgccgcangccgaaacaatggccggaaaaggagagggncctgctatcgnaatcgatctcggaaccacctactcttgtgtcggtgtgtggnancatgaccgagttgaaatcatcgccaacgaccangggaacagaacgacgccgtcttangnnggnttcactgatacggaggnntcaccggtgatgcggcaaaa

SEQ ID NO: 17883 - DNA, 261 bp, Glycine max
  Clone ID: 701046365H1
actagttctagatcgcgagcgttgtaattgagttcgatcaaatagctcccagtactttaattgatttctgaatatcatcacttaatttgaaggaaagatggtgagcgtagtgagatccgccaggcacaaagggcagaaggcccagcaaccatccttgccattggaactgcaaacccaccaaactgtgttgatcagagcacctatcctgactactacttcagaatcaccaacagtgagcacatgaccgagctcaaagagaaa

SEQ ID NO: 17884 - DNA, 260 bp, Glycine max
  unsure (1)..(260): unsure at all n locations; Clone ID: 701046366H1
gtgatgactatgggaagagttttatcgaacagagaattagcaacaagaagttgaacaaattgatggtggacttcgaggcataatcgacttccatggtcatccttttggacggtgattagagcaatcacattggctgtctttctgcgggaaagtatttgtgtacaaaatgtagaaaaatttgtacctatacccccatattagtattatacattacaaatcaatgtattttaaatcaaataatcatttcattatttnttgcc

SEQ ID NO: 17885 - DNA, 258 bp, Glycine max
  Clone ID: 701046367H1
caagaatgagggagatattgcacgtgcaaggtgggcaatgcgggaaccaaatcggttccaagttctgggaagtgatatgcgacgaacacggcatcgaccccaccggaaagtacaccggcgacgaggcctccgatctccaactggagaggatcaacgtctactacaatgaggcctccggcggaaggtacgttccccgggccgtcctcatggatctggagcccggcaccatggacagcatcagatcggcccatacggcaa

SEQ ID NO: 17886 - DNA, 256 bp, Glycine max
  unsure (1)..(256): unsure at all n locations; Clone ID: 701046368H1
gagaattacgcnatggagattaagtagggaagggaangaggaaagggaaaagttgctgcttagatatcttgtttgttaatcntgtgcnaaaggcanactgccttaacgtttctgtagtactagtnactagtaagtaacatgatgcatgctttattnttcntgtgtaaagttctagtcataantgtcanggtcacaagttccttcccnttctgttctgtttctgtatgcacacttgttggccaagagggttatttgg

SEQ ID NO: 17887 - DNA, 251 bp, Glycine max
  Clone ID: 701046369H1
ggagttattttctgttcattggttcgcagttttgtttttgggacttttgatggttgaggtgcagtggcatcttggggtcttagtatagttgcagaagtcatattttagagaaagaaaaacagaagaattgaacaaatggtttcctactttatcatttgtaaaatctgtacctggaaatatattttctctccaatgcccacaattttgcctgatatatgtagcataaacttgtaagttttgataatgagaac

SEQ ID NO: 17888 - DNA, 253 bp, Glycine max
  Clone ID: 701046370H1
ttccagagccaaggtaggttaaacactcttcttcatcgtcgtcgcaatgggacgtgtgatccgtgcgcacgtaagggagcaggctcggtcttcaagtcccacacgcaccaccgcaagggccctgcccgcttccggagcctggatttcggagagcgcaacggctacctgaagggtgtcgtcactgacgtcatccacgatcctggccgtggcgcgcctctcgctaaggtcgccttccgccacccgttccgctaca

SEQ ID NO: 17889 - DNA, 253 bp, Glycine max
  unsure (1)..(253): unsure at all n locations; Clone ID: 701046371H1
ataggatgttataaaacagtcatttagtcatccaatgctctaactcaccaaagttaccaattctnagagttggaaagggaaccaagaatcaacaatcacttcaaactagccatgaaaaatacatgtaaaaaaagggattggcctaagaatggataattaagcagcagcagtgatgcattggattgcctgtttgcatataccagtcattgttgcctcaggtccataaacctcgataggaatgccaatctcctct

SEQ ID NO: 17890 - DNA, 253 bp, Glycine max
  unsure (1)..(253): unsure at all n locations; Clone ID: 701046372H1
ataggatgttataaaacagtcatttagtcatccaatgctctaactcaccaaagttaccaattctngagagttggaaagggaaccaagaatcaacaatcacttcaaactagccatgaaaaatacatgtaaaaaaagggattggcctaagaatggataattaagcagcagcagtgatgcattggattgcctgtttgcatataccagtcattgttgcctcaggtccataaacctcgataggaatgccaatctcctc

SEQ ID NO: 17891 - DNA, 249 bp, Glycine max
  Clone ID: 701046373H1
aagaagatggcaggaaagaaaatcccagatgtgttgctgaattcaggacacaaaatgccagttataggcatgggaacttcagtggagaatcgtccatcaaatgagacccttgcttctatctatgttgaagccattgaggtgggttaccgtcattttgacactgctgcagtgtatggaacagaggaagccataggcctagccgtggccaaagccatagacaaaggccttataaagagtagagatgaagtt

SEQ ID NO: 17892 - DNA, 250 bp, Glycine max
  Clone ID: 701046374H1
cttcttcccaaccactactactcactcactgcagatctcaattgcatcgctgtccatgggctaccatcgttagcatcaaggcccgccagatcttcgacagtcgtggcaatccaactgtcgaggtggatttgacttgctccgatggtacttttgccagagctgctgttccaagtggtgcatccactgggatttatgaggcccttgaattgagagatggaggatctgactaccttggaaagggtgtatcaaa

SEQ ID NO: 17893 - DNA, 251 bp, Glycine max
  Clone ID: 701046375H1
agaaggcctccctcaacagactcaagtccggcgccgaaagggtctccgtcaccatcgacatcttcaaccaaggaacctcgacggcctatgatgtaagcttatcagacgatagctggccaagtgatgcttttgatgtaatcagcggtagcacttcaaagtcatgggaaaggcttgatgctggtggcatcctttctcacacatttgagctggaggcaaaatcaaagggagtatttgccggtgaaccagctgtc

SEQ ID NO: 17894 - DNA, 251 bp, Glycine max
  unsure (1)..(251): unsure at all n locations; Clone ID: 701046376H1
tactactttctctctctttgtaacttgtaagcatggagtcctcaaagatctatgcttacctcttcctttgcatgctctttcctctcctccgcnactcccattctcggttgtggctactgtggcaaaccccccaaaaagcacaagcctggtaaaacaccaaagacacccacagtacccgttgttaagccaccagtcacaatccctcccattgttaatccaccagtcacaatccctcccattgttaatccacc

SEQ ID NO: 17895 - DNA, 253 bp, Glycine max
  unsure (1)..(253): unsure at all n locations; Clone ID: 701046377H1
gtgaaagtgaganaaaataaaaatcaaagagcataatgtcagggatcattcacaagattggggagacccttcatgtgggagggcacaagaaggaggaggagcataagggtgagcaccatgctggagaatacaaaggggagcaccatggtgaacacagtagtgagtacaaaggagagcatcatggtgaacacaaagctggagagtaccatggtgagcacaagccagagcacaaagaggggttcctagacaaagt

SEQ ID NO: 17896 - DNA, 253 bp, Glycine max
  Clone ID: 701046378H1
aacaattttgtctcactcccatgatttttaccgaggatctctggccactgctccagcaactcgttggaaaaactcctctcttctcatcttcatcatcagcttcgtcgtccttcttccagaaccttcgggaatcgatgacgaactcaagttgcggaggcgcggagttggagctatgccgagatgaatcagccgcattggttctcaagttcgtcgccatcgcttccattctcctctccggcatggccgggatcgc

SEQ ID NO: 17897 - DNA, 254 bp, Glycine max
  unsure (1)..(254): unsure at all n locations; Clone ID: 701046380H1
gccaaacaccatttcattaattcttgcagaatattgcttagttttgttttatctgaatttggaaacagcttttgaatggctttttcaagagttgcactgctaatatgcacggtcgggtattttgtgattgcctctgccggcaatttccaccaagattttgatatcacatggggagatggtcgggctaagatactcaacaatggagagcttctcactctgtcacttgacaangcctctggctcgggttnccaacc

SEQ ID NO: 17898 - DNA, 259 bp, Glycine max
  Clone ID: 701046381H1
aaccagtgactgacttttcgagaaagaaaaacaaaaatgagtttccgtcattccatcatgaacgctcttcccattctcctcttcttcctcttcgtttctgcattagtttctgcgaagaaaactggtgatgtgacggagctgcaaattggcgtgaagcataaaccagtatcatgtgaagttcaggcacacaaaggtgacagagtcaaagtacactataggggaaaactcactgatggaactgttttcgattctagctttg

SEQ ID NO: 17899 - DNA, 255 bp, Glycine max
  unsure (1)..(255): unsure at all n locations; Clone ID: 701046383H1
gcttaaacgtctctctctcttcgtcccttgctctgtagcttggaatctgcagttgtagatcggagactgggcaagaaggtcgcattagcttcttcatcgcgcaatggcccatccctctgctgtcgtctccgtcagaaggccaatcacccacgtcgtttttgacatggacggtctcttgctcgacactgagaggttctatactcaagtccaggaaatcatactcgctnggtacaacaaaacttgnatgggccccna

SEQ ID NO: 17900 - DNA, 257 bp, Glycine max
  unsure (1)..(257): unsure at all n locations; Clone ID: 701046384H1
catgacttccttaagctccttagtgctgctccttgcagctctaattctattccctncaagtnacttggctgactatgagaaggccccggtgtacaagcctcccattgagaagccaccactttacaagcccccaattgagaaacctcctgtttataaacctccagttgagaaaccccccatttataagcncccagtagagaagccaccagtgtncaagcctccagtagagaaacccccagtttacaagcccccagttg

SEQ ID NO: 17901 - DNA, 254 bp, Glycine max
  unsure (1)..(254): unsure at all n locations; Clone ID: 701046385H1
aaaatcactgataaaatcgcaggcgaangttcacagtcactccctctcctcacacgaaaaaagtatccccccaacccacnccaccccacccccaaccctcaacttagggttcttcnnnnnnnnnnnnnnnnnnnnnntaaccaaacaacaagaaaaaaaaatcacattccccaaaacacccttctcgctccgcatggcgaaaacgaggccaggcagaaaggacgtggactcgtacaccataagaggaaccagca

SEQ ID NO: 17902 - DNA, 252 bp, Glycine max
  Clone ID: 701046386H1
ctctctccatctctccctctctattagcagcagattctctaaaccactagttctctctaaccattatctaaaacatgaaacgcatagacatgttctgtgcttctcaagcctcaacagccatatgtctgagcatggaacaagcctcatgctcctcttccaacagcattctactaggaggccgaaccatggaccgccacaaccccattatcaatgactcaagaaggagcacttccaaatccctcactgctccat

SEQ ID NO: 17903 - DNA, 249 bp, Glycine max
  unsure (1)..(249): unsure at all n locations; Clone ID: 701046387H1
ggcattggaggtggaattggaaaaggtggaggttttggcggtggtgtcggtggtggatttggtggtggcgccggtggaggcggtggcggnnnnnnnnnnnnnnnnnnnnnnnnnnnnnntggcgggtttggcggaggcagcngganagcgggtttggtgcaggaggtggatttggcggtggtggaattggacaccactagagcgttgcgaacgttgcatgcatgacaaagttatattttaacgtccttt

SEQ ID NO: 17904 - DNA, 248 bp, Glycine max
  unsure (1)..(248): unsure at all n locations; Clone ID: 701046389H1
gttttcctcttctgaatccaccgccaccgcagcgtggacggaatcagagtnnnnnnnnnnnnnnnnnnnnnnnnnnnnnnnnnnnnntcattgaagtgctgctctagtttgaggcacaatgagattggagaaatgctggttttgctcttcaaccgtataccctggacatggaatccagtttgttcgtaatgatgcaaagatttttcggttttgtagatcaaaatgccacaagaactttaaaatgaaga

SEQ ID NO: 17905 - DNA, 249 bp, Glycine max
  Clone ID: 701046390H1
catttgtcttgcaaactttctgtcgcacaaataactctaaactaagcacttccatacacaaattttctctcccagaagaaatattttcatttcatttcgagtaaaagtaaaacacagttcctgatccatggcatctcgccgccgcatgttgttgaaggtcataatcctcggagacagcggggttggtaaaacatcactgatgaatcagtatgtgaatcgtaaatttagtaatcagtataaggcaaccat

SEQ ID NO: 17906 - DNA, 249 bp, Glycine max
  Clone ID: 701046391H1
gttcaaatctcacccctttccttttctactttaatattattattttccgttccctttgaaacaactcaaagcatttactcccaactagctagctagacctaacccaactcagattgcatcatttctaaacgcttccttttcattcttttctggaactccttcttctgtcatattctctactctcttatatatttgctctgtgcaaaaccaaaaacccactatttttggttcagggtggataagatctga

SEQ ID NO: 17907 - DNA, 249 bp, Glycine max
  Clone ID: 701046392H1
tactgattaacgagaatggacaaggaagtggagcttggttcccttgaaggtgaaatggccacccagcacatttcacaaccacagaagcgcaagggtggtcttgttaccatgcctttcatcattgcaaatgaggcacttgcgagggtggcaagtttgggccttttgcccaacatgatactgtatttgatggggacctacaggcttcaccttgcccaagcaacccagatacttctctggtcccatgctacc

SEQ ID NO: 17908 - DNA, 188 bp, Glycine max
  Clone ID: 701046393H1
tgttgaagagttcgttttgattgatgtagtctcttcaacaagttagtatttacctattaggtttctatttgacatcttaaatattatggttctatgttctcattattattctgctgtttctttgtgaaccgagaaatgtagtaaccagcagcctccacattgaaaaagatgggatgccattggagatg

SEQ ID NO: 17909 - DNA, 251 bp, Glycine max
  Clone ID: 701046394H1
gtctttcatagatctgatgcatggaggctcagatctactgtacagaggtgtgcgattcatgttcgtctctcttttggaatctgtttcgtagaaagtcgtttggtcttccatgtcgcatggctcttgaggtatttttttttgcagatactgtagataatcgatgagaagaacgcagatccagccgcttccgcttgttcgatcactacagacgcttgtatcggattattcatgattgattcataagcagcatg

SEQ ID NO: 17910 - DNA, 131 bp, Glycine max
  unsure (1)..(131): unsure at all n locations; Clone ID: 701046395H1
gggaagaagatggtgtcaggttctggaatctgcgcaaaacgagtggtggtggacgctcgccaccacatgttgggtcggctancgtccatcgtggcgaaagagcttctgaatggggcagaaggttgcggtgg

SEQ ID NO: 17911 - DNA, 253 bp, Glycine max
  Clone ID: 701046396H1
ttttggtaaatactttttttaagttttacttttttgttcccatttggtggggtggattggagcctgcagggaagtaggaggatacatggttatggacttggtttttatagcacacactctcagaaaagattgacctgatcctgactcacctccaagggggtctagtcatcaggtttatgaactagattgccttcaaatttttgttaggctgattctttagatgcaaagtccatcccttgttgtattccagtta

SEQ ID NO: 17912 - DNA, 284 bp, Glycine max
  unsure (1)..(284): unsure at all n locations; Clone ID: 701046401H1
antaaggntcgacgacacctacgtnagcgtctggaaactgtaacnactctttnattcgaaaacaacaacctcaaattaaatcccaggaacagctcccaatggctgctgcacctgcatcggtaaggtttgcatggtcgacatcatctgcttcctctccaaaccccaaaacctctcttcaccttcngccgctttctttccccaatctccgntctcctccanganaattccgcngtcctcgtccgcnacntcccacccaccgcngtttactggaggctatagatgtt

SEQ ID NO: 17913 - DNA, 277 bp, Glycine max
  Clone ID: 701046402H1
aggatctctctccgtcaaactttctttaccccgtcctcataacatatttcagatccgaaaaccagatcccgcgaactctgaagatctctattctctttccctcacctttccactcaaattcccctttccactttcccgagaaaattaactttttccgtcaattttccctccacctcttccttcttcctcacaatgggctctgagcttcaacaatcgaagaatccctctcgctcttcgcattttccttctgttctccttattcttcagcctctcaccg

SEQ ID NO: 17914 - DNA, 274 bp, Glycine max
  unsure (1)..(274): unsure at all n locations; Clone ID: 701046403H1
cctcttttncgttcannctgntntcatagtgnngnncttctgaaganntggcnnatcatcctttgacacactctcactctttccgcganangcttgaancnnagggnaanggnatcctgcaacatcaccaagtggttgcagagtttgaagaaatccctnnggagagcagagagaaactccaagntggtgtcnttggagaagntttgagatccacacangnagccanagtgctgccancanttgtagctcttgctgttcgaccaaggccnggtgt

SEQ ID NO: 17915 - DNA, 275 bp, Glycine max
  Clone ID: 701046405H1
caccactaccttatccatttccactcctcaccaagccacaccatggcctcaaccaacgccctgctcttcagcttccattctacgctctcccaaccgccagtctctgaccagaagagcgaaccacaacggaagagtaaattaccgtcaaccgaatagccgtttctccgtcaaagcctccgccaaagagattgcctttgaccagcattcccgctctgctatgcaggccggcattgacaagctcgccgacgccgtcgggctcactcttgggcccaggg

SEQ ID NO: 17916 - DNA, 268 bp, Glycine max
  unsure (1)..(268): unsure at all n locations; Clone ID: 701046406H1
tggtgtgtgggttntctttccttccaacgtaccctctcattgacaaataaacgtgcanacttatgtgtgcataattttcttatgtatgctaagttttgtaattggatgctatctagtttttcatatctaatagggtgttgtgtcagtttttatgtatagtattgtgctccatcatgttcacccgtatgtaagtctgatatcctgatctatgaatgtcaaatcaaatttcctatgtcaccaaaanananaagaaannaaaaaggggggc

SEQ ID NO: 17917 - DNA, 235 bp, Glycine max
  unsure (1)..(235): unsure at all n locations; Clone ID: 701046407H1
gattgccttcaaatcacacactctcttcaatttctagggttttgctattgctttgcctccgttccccctttctcacaaaaacaacgccttttctcttctccttcgtatctattctttgcgnttggtttttggttgattgaaggcattcacagcgtaattngttgctgcattttnatcgatttatctaaccaggactgaatgacctaatggagtctaaaggtgggaaaaagaagtc

SEQ ID NO: 17918 - DNA, 270 bp, Glycine max
  Clone ID: 701046408H1
gaagaacccttgctgattacaatattcagaaggagtctaccttacacttggttcttcgtttaagaggtggcatgcagattttcgtcaagactttgacgggaaagaccatcaccttggaggtggagagttcagataccatagacaatgtgaaagccaagattcaagataaggagggtatccccccagaccagcagaggcttatctttgctggtaaacagcttgaagatggacgaacccttgcagattataacatccagaaggaatctaccc

SEQ ID NO: 17919 - DNA, 270 bp, Glycine max
  unsure (1)..(270): unsure at all n locations; Clone ID: 701046409H1
acttctgctacttcctactccaaccgcacttctgctccgcaattatcatgggcaaggtcaagatcggaatcaacggatttggaagaattggccgtttggtagccagantggctctgcagagagacgntgnngaactcgttgccgttaacgaccctttcatcaccagccgattacatgncatacatgtttaaatacgacagngntcatgggnnctggaagcancangangtcaccgntanggacgagangacctnctnntnggnganangc

SEQ ID NO: 17920 - DNA, 270 bp, Glycine max
  unsure (1)..(270): unsure at all n locations; Clone ID: 701046410H1
aagcatcccaaaaccctagctcgcgttctgctttcgtcttttacatcaggatggagtctcaggtgaagcacgcacttgttgtcaaagttatgggtcgtactggatccagaggacaagtaacccaggttagagtgaaatttttggatgatcagaaccgtcacatcatgaggaatgtgaaaggacctgtgcgagaaggagacattctcaccctactcgagtctgaaagggaagcaagaagattgcgctagatggtttctttggctncctcca

SEQ ID NO: 17921 - DNA, 267 bp, Glycine max
  unsure (1)..(267): unsure at all n locations; Clone ID: 701046411H1
atcaatttgaatcccaaaaccctaacgtgaccaaccccagtttccggcacacacttcttgtctcttgtctctctcactttctctctctataatttgggtttcattgttcggtgctgaagcaaatttgcggtgtagcagaggcaatggaggttcaaagtctcagctttgaggagaacactttgtgggttggctcttttgtggaggcttggtgcttgacantntcctgccactgccaaatnctcttgcngcnttnnggcgngaanggat

SEQ ID NO: 17922 - DNA, 269 bp, Glycine max
  unsure (1)..(269): unsure at all n locations; Clone ID: 701046412H1
tgaggttgaaaggggatggtgagagtaagcaaagaggctctgcaaaaagcagccaaaaccctatccgaaatcctcgtgtgccctctctctaagcagcctttgaggtattgtgaggaatcaaattccttaatcagcgatgctattggcgttgccttccccataaaaaatgggataccatgcttggttccaagagatgggaagatacttgnggaagaagatgcctcaaaacctgataatgataccatttatctggcntaaatgnagagatc

SEQ ID NO: 17923 - DNA, 267 bp, Glycine max
  unsure (1)..(267): unsure at all n locations; Clone ID: 701046413H1
aacactcataacacaaagcacaaagcaaagctcatccttgagttaaaaaatggcagcagcttcttccatggctctctcatccccatccttggctggcaaggccgtgaagctgggcccatcagccccagaagtgggaagggtgagcatgaggaagaccgtcaccaagcaggtctctcaggaagcccatggtacggcccagaccgagtcaagtattgggcccttctctggcgagcccccgtcctactaaaccggtgattccgggggnnt

SEQ ID NO: 17924 - DNA, 276 bp, Glycine max
  Clone ID: 701046417H1
ctcacccctactcttcttccagtctctatctcaatctccatcaaatttaactatggctactgaagaggttttggttgatgaaatcacttaccctaccaagatcactactaccaagcccctatctttgcttggccatggaatcaccgacatggagattcacttcatccatgtgaaattctattcaatcggggtttatttggagccagaagtagtaggccacttggaccagttcaaaggaaaatctgcaaaggagctggaagataatgaagagttctt

SEQ ID NO: 17925 - DNA, 273 bp, Glycine max
  unsure (1)..(273): unsure at all n locations; Clone ID: 701046418H1
atantttgttgtnagctataagctagtttatcgtgaggngaatatgaagttgtttgttttctttgttgctgcagtagttttggtagcatggccatgccatgggcgcaggctaccaaaggttccctctccgaatgaaaactggctatggtgagcgttcttcggaggtaaaatgcgcaagttttaggcttgctgtggaagcacacaacatccgagcctttaaaaccattcctgaagagtgcgttgaaccaangnaggactacattaatggcgaac

SEQ ID NO: 17926 - DNA, 267 bp, Glycine max
  Clone ID: 701046419H1
atcagtttgttccactatggagcttgtaagatgtcaggatttcctcattggggaggggtaaggggttcgttcattcagccacagatggtatctaatataggaaatagttctcactgaagttcttaaaatgggtttattcaaggtgatctgacctttattgatgaatgacccttttgaaattcacggcttataggttgttgtccttatttttttctggaaccaaatattcagagcattatatataactgaggcatatatctgcgcatt

SEQ ID NO: 17927 - DNA, 269 bp, Glycine max
  Clone ID: 701046420H1
aacatttctatttcctcttcttcatcacttgaatccaccaagtccttctcctcacacacataaaaacaaatatcctccacttcttctacccccagcagtagaacaagaggtgccggagcaagtttcgtcacgccggaacgatgaccggcggcggatccacggggaggttgccgacgtggaaggagagagagaacaacaagaggagagagagaagacgaagagcgattgcagctaagatctacactggccttcgagcccaggggaactac

SEQ ID NO: 17928 - DNA, 204 bp, Glycine max
  Clone ID: 701046421H1
tcaaatccgaaaccatttccgctccaatttccaagagcaaatcctaaccccttctctctgtatgatactagatttcccctcctcaaaggcgtagtttttgtgtcgatttgtaaattcatcggtagcttaggttagaatttttgtgtcaagtttttagggttttgaatcggtgagatgaatcacaacaacagcaacaacaatagg

SEQ ID NO: 17929 - DNA, 269 bp, Glycine max
  unsure (1)..(269): unsure at all n locations; Clone ID: 701046422H1
taagaagagtcatggcttccaccttcgacgccttcaccgtcgacgacgaccacttcgccgccccctccgccgctgacaccttctccggctacggcgacttctctactttcccctccgacgatgtcaccgtcgaccacgccgccaccgcggcgttcgccggagatcttcggattcagcgatcccgatccaggctactccccgtctcccttcgagcaantgcacgagaatgggaacggaaatggaaccgtaaacggctacggcgaggcgtt

SEQ ID NO: 17930 - DNA, 267 bp, Glycine max
  Clone ID: 701046423H1
ccacttgctagattggttgtactgacactactagctcgcaggtttgtgttctgttctgctttgcattctccgccatcatcgtcatcatcatgcaagcgcttcattcccccaccctccgcacttctcccttggaccctcttcggggccccaacaatgccgccgccaagcgacgcgcctcctctgccaagcgcgtgttcttcgtgtccgccacggtggcgccgaagtgtccgccccgcagcggcagaaggactcgaagaagcgcgtggt

SEQ ID NO: 17931 - DNA, 171 bp, Glycine max
  unsure (1)..(171): unsure at all n locations; Clone ID: 701046424H1
acgaaattgagtttaagatctgattnggcggcgacgntatgganaanaacgacagtatcatatcgcggganaagatcgancaggcggccgtgtggctcggctccgggtctcttccgtttcttttccncttggaacgcttttcctgggtcaacgtcgacacctttgaccccg

SEQ ID NO: 17932 - DNA, 266 bp, Glycine max
  Clone ID: 701046425H1
acgcattgaagaaggcaacgctccttggcagctcaaatctgcaaattaggctttttttcccccaacagtgggttttgcttttctctgaaattttaagttttggggttttctttcaatcagggttcagtttattcaagttttacaatttcgcggctctgaaactattagatggggaattgtttgcgtaaggctcaagcggatgatgattctgatcataatgtggagtttgcttctgggaatgtgcaagttattactaccaaagatct

SEQ ID NO: 17933 - DNA, 267 bp, Glycine max
  unsure (1)..(267): unsure at all n locations; Clone ID: 701046426H1
attcttgccacagtggtggcctacttgaagaagctaaggagcagataggaganagcacaaagggagaggaggaacaatctagctctggctttggattttcaagttttctacatcggactgtggaagatgccattgagtctcgcggattccatatcccttcagcgttgcgccacaacagaggcagggatgatgatggtgatgaagctcaaaatagggatattgaacttccggatgggggctatgtaaagaacnggtctttnccccttt

SEQ ID NO: 17934 - DNA, 268 bp, Glycine max
  unsure (1)..(268): unsure at all n locations; Clone ID: 701046427H1
cttcagcagttaatagaagcagctaagtcaattggggaaactcaacttgaggcaaagtttgaagaagctgtgtccaagatcaagagggacattgtctttgctgcatccctgtatttgtagttccttctagaaattatttatttgcatacgcacagttatgagaagcaaatcatgtggaaggacaccgattacatgaaatcgcccttgtttctcacctggttttgatctccactaacacctacaaacatatagaacaattgtnctatta

SEQ ID NO: 17935 - DNA, 268 bp, Glycine max
  Clone ID: 701046428H1
tgctgctcatcctccgtaacctccgagctctgcaccgaagaacgaagccatggggaagacacatggaatgggatctgctcgcaagctcaagtcccaccgcaggaggcaaaggtgggctgacaagtcatacaagaaatcacatcttggaaatgaatggaagaaaccttttgctggttcatcccatgccaagggaattgtccttgaaaagataggtattgaggctaagcagcccaactctgccattcgtaagtgtgccagggttcaatta

SEQ ID NO: 17936 - DNA, 268 bp, Glycine max
  unsure (1)..(268): unsure at all n locations; Clone ID: 701046429H1
ctttgccttccttgcagatgtgttcatcggctatcaaagaatctnntgccagtgtttttggagacaagctagatggtttgacgaggaactttgaacaatctttttgtagcaccttgagtactcttcagttaatttatgaatcatccaagagcaatgaaggaaataaattaaataatacaaagatggaaattatgagttctaaattgactctcaataaagaggatgctcaggtgatattgttacagaggtcggtcatcaagacatgctg

SEQ ID NO: 17937 - DNA, 271 bp, Glycine max
  Clone ID: 701046430H1
ctagaagtattattattcttccatttccattaaaaagaaaatatcataaatgggtattttcacattcgaggacgaaatcacctcccctgtggctcctgctactctttacaaagctctagttacagatgccgacaacatcatcccaaaggctcttgattccttcaagagtgttgaaaacgttgagggaaatggtggccctggaacaatcaagaagataactttcgttgaggatggagaaaccaagtttgtactgcacaagatagaagcagtt

SEQ ID NO: 17938 - DNA, 273 bp, Glycine max
  unsure (1)..(273): unsure at all n locations; Clone ID: 701046431H1
anaagatataaccttacagcttactgnaaataatttcctttgtnatctttatactganctagttgntggcnttgctattcaccataatgcctgtnacattgttatcttacaaggtgncttccagtgnttgtacaaaactccnctgtnattttatntnnggntnaatacatagacttctgttagactttcgtcaaaggtccactgngcaacantacagtanttnattttggtancccntagtgtancanccggaatnttcgagcttanacagnc

SEQ ID NO: 17939 - DNA, 159 bp, Glycine max
  unsure (1)..(159): unsure at all n locations; Clone ID: 701046432H1
gctagtactgctccctctgcnacttcgtttcgtagagggattttngccgccnantaaacagtctcncnataaactccgaagtnccaacgctaaacgaancnaaaccncaaactcaaataccgttgttgtccgttntctctgtggtgtctataagcgcag

SEQ ID NO: 17940 - DNA, 265 bp, Glycine max
  unsure (1)..(265): unsure at all n locations; Clone ID: 701046433H1
cgtttcacctcctcaacctctgcagcgccttcgatccactaaaacatgactaagacnacaaagaaggctggcatgttggaaaatacggtacccgttatggcgccagtctgcgtaagcagatttaagaagatggaagttagtcaacacagcaagtttttctgtgaattttgtggaaagtatgctgtgaagaggaaagctgtgggaatatggggatgcaggactgtggtaaagtgaaagctggcggtgctacactttgaataccgca

SEQ ID NO: 17941 - DNA, 268 bp, Glycine max
  unsure (1)..(268): unsure at all n locations; Clone ID: 701046434H1
actctctctcaccaaagccttcctagaacgaaaaaaaaaaagaagagcaattttccctcaccaaagaagaagaagcaaacaatggccgatcaacttaccgatgaacagntctccgagttcaaggaagccttcagcttgttcgacaaggacggcgatggttgcatcacaaccaaggagcttggaactgttatgcgttcattggggcaaaacccaactgnggcagagctccaggatatgatcatgaagtggatgctgatgggaatggtac

SEQ ID NO: 17942 - DNA, 268 bp, Glycine max
  Clone ID: 701046435H1
gatacacaagatcactgtttttttagagagagattgagagaggatgtttggttcaaagaaaactcctctgagagatgctaaacctagttctgttggccatgcccataacccctttgattctgatgaagagacgaacgataaaaagtataattcctctaagaagactttgaccaacaccaacccctttgatgatgaagttgatgttgatgccactggccactcttcgtcgtcttcttatggcctttcgtcctcccatcgaaataggtat

SEQ ID NO: 17943 - DNA, 268 bp, Glycine max
  unsure (1)..(268): unsure at all n locations; Clone ID: 701046436H1
ctcacccctactcttcttccagtctctatnctcaatctccatcaaatttaactatggctactgaagaggttttggttgatgaaatcacttaccctaccaagatcactactaccaagcccctatctttgcttggccatggaatcaccgacatggagattcacttcatccatgtgaaattctattcaatcggggtttatttggagccagaagtagtaggccacttggaccagttcaaaggaaaatctgcaaaggagctggaagataatga

SEQ ID NO: 17944 - DNA, 264 bp, Glycine max
  Clone ID: 701046437H1
catatctattcttacaagttacatccattgagaaacatgaaggtctcccccttagcatttcaatccttttttgtcttcaccatagaactcttcattgggcattgcttcagcagcacaagaaccagtgcttgacacctcaggccagaagctgagaacaggtgtcaagtactacattctaccagtcttcagaggcagaggtggaggcctaacagtttcaagcagtggcaacaacacatgccccctctttgtggtgcaagagaagct

SEQ ID NO: 17945 - DNA, 265 bp, Glycine max
  Clone ID: 701046438H1
ggtagagagagcgagagaacaagaacataagggaaccacagcggcggtaacagaagaacaagcagagaatgggtcgagtgagaacgaagacggtgaagaaatcctctcggcaggtgatagagcgtcactactcgcgcatgaccctggacttccacacgaacaagaagcttctggaggaagtggcgataatcccgtcgaagaggctaaggaacaagatcgcggggttctcgacgcacctgatgaagcgcatccagaagggcctgtg

SEQ ID NO: 17946 - DNA, 264 bp, Glycine max
  unsure (1)..(264): unsure at all n locations; Clone ID: 701046439H1
tgcttacagttgctgcgtcgcaaggtaccggcggcgacggagaactatcttctcaattttcgatcactgcattggttctgttgtcaagggttttgttcttcctgacttgcatacttnatggcttcaaagttgcagaagttgcaggccacagcatctcaagcgtctcaatttgtatgcagtcgtggaactaactactacaagcaattgctggaacagaacaagcaacacattcaggagcctcctacagtagagaaatgcaacctg

SEQ ID NO: 17947 - DNA, 265 bp, Glycine max
  Clone ID: 701046440H1
cggatttgatccattgcatattgcagctagtcaaggccaccaccccattgttcaggttttgctagattatgactcaggattgagcaaaactattggtccctccaactccactccgcttataaccgcagcaacaagagggcacacggaagtggtgaatgagctgctgtcaaaggattgtagctgttagagattgctagatccaatggcaaaaatgcgttgcatttagcagctcgtcagggtcatgtggagattgtgaaagccttgc

SEQ ID NO: 17948 - DNA, 263 bp, Glycine max
  Clone ID: 701046442H1
ttgttgtagagagaagtaatggcgaacatagacatcgaagggatcttgaagcagcagcagccttatgatgggcgcgttccgaagacgaagatagtgtgtactttgggccctgcttctcgatccgtagaaatgaccgagaagctctgagggcagggatgaacgttgctcgtttcaatttctctcatggcacccacgactatcaccaggaaaccctcaacaatctcaagactgccatgcacaacactggcatactctgtgccgtc

SEQ ID NO: 17949 - DNA, 151 bp, Glycine max
  Clone ID: 701046443H1
ttggatttgatgatgtggaaggtgttgattctgcaaaagtagagctcgtggagatagtatcatgtctgcaaggggatataaattaccgaaagctaggggcaaagttacctagaggtgtgttgctggtgggtcctcctggaactgggaagac

SEQ ID NO: 17950 - DNA, 262 bp, Glycine max
  unsure (1)..(262): unsure at all n locations; Clone ID: 701046444H1
atttgaaaaattgttctctcaccgtgaaananagagagaggttaggctatggctgatgagagcgttgttgagtccccagtgaagaggcagagagatgatggtgaagaaaatggtgtctctgtttccatggacgcggagggtggcaaagaccctcttagtaacggtttatcatctgtgattcctgggtggttctctgaaatcagtgcaatgtggctggagaggctcatcctgnaggtggaaaanntttgtttcaaggaaannc

SEQ ID NO: 17951 - DNA, 266 bp, Glycine max
  unsure (1)..(266): unsure at all n locations; Clone ID: 701046445H1
gaaaacgtatcacgaagttattgatgagatctacaatcaagttgatcacgtggagccatggatgacggggaattgtcgtggtccttcaactgcattctgtcttctgtacaagttttttactatgaagctcaccgtcaagcaaatgcatgggctgttaaaacacctcgattctccttacataagagcggttggatttctctatctgagatattgtgctgatccaaagacactatggaattggtttgagccatatgtaaaagatgnnc

SEQ ID NO: 17952 - DNA, 265 bp, Glycine max
  unsure (1)..(265): unsure at all n locations; Clone ID: 701046446H1
atttatcaactcactcatcaatctcgtttgttctcactaactattacttcatcatgtcgtcgagcacagttggtcaagtcatcaaatgcaaagctgcggtttcatgggaggcagggaagccacttgtgattgaagaagtagangtggcaccacnacaagctggtgaagtgcgtttgaagatccnctacacctctctttgncacantgatgtttacttctgggangccaaggccaaactccctngantcctcgnnntttggtcatg

SEQ ID NO: 17953 - DNA, 269 bp, Glycine max
  unsure (1)..(269): unsure at all n locations; Clone ID: 701046447H1
ggcttcngnttntgttcccatggctttctcgctgagntctgttatcaacaacaacaagccttcatccgaagccttcttcaggccactacccctacggcaaccaaagaggaccctcttcaccacaaaggcagtgtcaaactccaaggctcaaatcaatgcatctttgaaggagaaggcagttgcaggactcacagcagctttctgtgacagcatctatggtggttccggagtggctcatgctgctggatatgagttctcccctttcctca

SEQ ID NO: 17954 - DNA, 165 bp, Glycine max
  unsure (1)..(165): unsure at all n locations; Clone ID: 701046448H1
caggcgcagacgcaaacgcaaacgcaaacgcaaacgcaanacgcattagcgtggttccattgacgaagatggtgcagcgttctgcancctancggnaagcggcnacagctatgccanncnagtnncaaccaanacanggtngtcaaaacctctggtgggaagctc

SEQ ID NO: 17955 - DNA, 264 bp, Glycine max
  unsure (1)..(264): unsure at all n locations; Clone ID: 701046449H1
aaaagaaaaaaaaaactaaaaggaataatcatatataaattttggatttcgcacgtagctagctacagaagacaaaggggccttgagtctcgagatcttgtcagatcggaacgcaaccgccaccgagatcgttttgtttgtggtgcttttctttcttcctcactttttctcatacctctgcaatgtgcctctcttattttcctatttcggagatctgttttgttcttatttcaatgcttatgtcagttttaagtnccgtttttg

SEQ ID NO: 17956 - DNA, 264 bp, Glycine max
  Clone ID: 701046451H1
tttgggcgggggcaatttcggcacaagagtaaaatcttaatactactatttatttaatttttttcggatgaatagaaaatttatttagaatagagcgtgaataaggttaaataaattctcgtagcagcgttttgttttcccaccaccgcgacccctttcgctctccctctgcgcaaacatgttgttcttctcgtacttcaaggatttggtggggagggaagtaatcgtggagctgaagaacgatttggccatcaaagggacgtt

SEQ ID NO: 17957 - DNA, 176 bp, Glycine max
  unsure (1)..(176): unsure at all n locations; Clone ID: 701046452H1
aaaaaaaaaaaaatccgcgattngactttctcttggaaaaantnaanccagangtacganacnaagagaagagcgntttagangtgagagaagatggggttgncgttcncgaagctnttcancnggttttttncgaananggaantggggnttctgatggtaggncncgatgctgc

SEQ ID NO: 17958 - DNA, 261 bp, Glycine max
  Clone ID: 701046453H1
tgtgtttggagcagaatcagatcgtgtgttccgtacgttcgttcgttcatttccagtgtcaaacatggcgtctcagatgagcaagaagagaaagtttgttgcggacggagtgttcttcgccgaactgaacgaggttctgacacgtgaattggcggaggacggttactccggcgtggaagttagggttacgccgatgcgcaccgagatcatcatcagagccaccagaacccaggctgttctaggtgagaagggaaggagatt

SEQ ID NO: 17959 - DNA, 261 bp, Glycine max
  unsure (1)..(261): unsure at all n locations; Clone ID: 701046454H1
aaaccttcatctcagaaccctagccgtgtaacccccttcatccctagccgcgtaacccccttcatctcagaaaaaggtcttcatctccgccgtcgtggcctcagtcgtggcaaaactatgttgtgggtcatatgcgtccaatcagaggttccatttctcttccttctttcgcaccgaagttccaatcgtccgttgttagggttttnnctcgtngttggagagagatgtgttggattcgtgatgacaaccctatccctngtt

SEQ ID NO: 17960 - DNA, 259 bp, Glycine max
  Clone ID: 701046455H1
ccttccattcctttcttccggatcacagggaaaataaaaaacaatggagttggacttgacaccaaagacagcagaagtgttgtttgagggagatggtggaggttactacacttggtggagttctaaagtgccactgctggccaagaccaatgttggtgctggtcggttagtgcttcagcctcagggctttgctattcctcattattcagatatatccaaagtaggttatgtgcttcaagggaacgatggcgtactggga

SEQ ID NO: 17961 - DNA, 263 bp, Glycine max
  Clone ID: 701046456H1
ctcgctatcatatcacagtatatatcttcttatttgtttaatttttatgtttcttaggtgaattactccaagagggctcgacaatcccacaaagtagaaaaagaggttatgttatggcgggcaaaggtgttagttcggtggctaaggcggtagcagaatatcagtatccttggcgtgagaagttggggaaatataaggatgagcttgccaagggtgtgtggggatactgggagctgggggcatggaagccgctgagtatcagt

SEQ ID NO: 17962 - DNA, 262 bp, Glycine max
  Clone ID: 701046457H1
attcacttgtcttgtatctctctttctttagtttcttattcaacccaccaacacaaaaccaaaacccatcttttttggttggtcaagtaagtggcaaccacgccaaagagaagagcttcctcacatgggtctctgcttctcttcctcttcccccaaccctcctcagcagtactcagggtctgcgagcactgacagcaagaacgtgggattctccgccaccacgagcagcgccgggaagagccattctcggagatcgcgagcg

SEQ ID NO: 17963 - DNA, 140 bp, Glycine max
  unsure (1)..(140): unsure at all n locations; Clone ID: 701046458H1
ggttggaaagagccatttaattacttttttnagtantgantggacattggnaccaaccaagcatggatacaatcaagtcccttcaagggctacggcaaagtagacgagttggagcagcaagcctatcagaagaagacacg

SEQ ID NO: 17964 - DNA, 256 bp, Glycine max
  unsure (1)..(256): unsure at all n locations; Clone ID: 701046459H1
cacagttaaagacgcacaagaaaacatctcgctcaacaccaccaacacttcggatctacgtttccactctccgaacatcaaaaaaggaaagaaaaaccgatttacagcgacaacaacgaacgaacgatttctcgaagcgctctcaaaatggcggtgcaccctttacttcattccccttcgtctcattacccttctctcaattctccactttcgcatgcagacctcaagcgtgacgttaaggcttgancgggntggg

SEQ ID NO: 17965 - DNA, 262 bp, Glycine max
  unsure (1)..(262): unsure at all n locations; Clone ID: 701046460H1
gaaacagagactgagagaaacaaaactgattgcgtggctctatagtggttttgttcttatttccacaaattgtcatttcttcctttaacaagttcgtaaaagaaactcactcacctacacatacagacagaccccatcaataatctgaacataaagtttcgttttttgtgaagattttggaggaagagggtggtggttgagtttaattcaaggtcttgcaatggcacccagttttgactttgcttctagcctcctttgcang

SEQ ID NO: 17966 - DNA, 265 bp, Glycine max
  Clone ID: 701046461H1
atcgtcttctgcttcaaggaaggagagcttgttattctctatcaacaaggaaaatgtcaggtgaagaggttgttgttgcagctgagccagctgctgccatcccaggcgagcctatggatatcatgactgccttgcaacttgtgctcagaaaatctctggcttatggtggtcttgcacgaggccttcacgaaggggcaaaagtgattgagaagcatgctgcacaactctgtgttctagcagaagactgtgacccagcctgactatg

SEQ ID NO: 17967 - DNA, 243 bp, Glycine max
  unsure (1)..(243): unsure at all n locations; Clone ID: 701046462H1
tcgcatcaatggagttggacggcnntctcctcggcatgtgacnaccctctcctncgacatctactgccgtcgtcgacgacgctttcttgcaaaaatacggtatcaagttgaacgatgcgattctcgccgaggataaacacaaacctatgtatgaagaattgggctaacaatcctaatgtggagtacattgctggaggtgtatcagaattcaatcagggttgctcatggatgttcaagcaccag

SEQ ID NO: 17968 - DNA, 268 bp, Glycine max
  unsure (1)..(268): unsure at all n locations; Clone ID: 701046464H1
gcagcaaacactcttctgagttctgagctagcgaggttgcaatggcgattatctccgatttcaacgaagaggagcagaaacccactncactctttcaccaccgcaaccccaatcctcttcctcttcctcttcctcttcgtcttcgttcagtgctgcttttgaccggtcaaaccctatcgttttctggagagagtcttccagttcgtctccgaacacaagcgatttctggcgacggagagcgccgagaangagataacgttgctggtgc

SEQ ID NO: 17969 - DNA, 267 bp, Glycine max
  unsure (1)..(267): unsure at all n locations; Clone ID: 701046465H1
angaagtctatgtaaaccatggtatgttttagttatactttagaaaaaataataataattagcttgcatatgttaacactcaacaataacaaaaaaaaacctcattcatggttcaagtttctcaagtatccagtgagcacaaggcaatgtgggcgggctgagtaatgctcatattcagtattcaggtttaataggtttggctctgcaacaagattgatgtattcgtgtttaaattcacaagtagttttgttttcctcatcacttaga

SEQ ID NO: 17970 - DNA, 263 bp, Glycine max
  unsure (1)..(263): unsure at all n locations; Clone ID: 701046466H1
tttttnntttgnggtttcnnnntnantccttcctcttatnanttttncggcggnacaagcccnaattcnattggtttnagngangaacntttcgaaccnaatgagggngataaagntgnagaagctcgtcttnantatctccgttggnnagattggagntcgtntnaccagagccgctaagggtttggaacagcttagtggccaaacccctgtgttttccaaagcaaggtacacggttcgttcctttgggattagaagaaatg

SEQ ID NO: 17971 - DNA, 259 bp, Glycine max
  unsure (1)..(259): unsure at all n locations; Clone ID: 701046467H1
gtcgatctagaaaatggcgaggataaaggtttacgagcttaggaacaagacgaaggcggagtgctgaaccagctgaaggatctcaaggcggagttgccctgctccgcgtcgccaaggtcaccggcggcgcccccaacaagctctccaaaatcaaggtggtgaggctttcgatagcgcaggttttgacggttatttcccaaaagcagaaagcggcgctgagagaggcttacaagaagaagaagtatttgccccangacct

SEQ ID NO: 17972 - DNA, 262 bp, Glycine max
  unsure (1)..(262): unsure at all n locations; Clone ID: 701046468H1
cctcaatcttttnaactcgtcaagtgcgtgcaacactgtacaataatcttcatcgtccttgaaattcccaatcccctgtagtggtagtaagttgctagcaatcgagaatgggaggncacggaggtctcaacattctcccccaaaagcgatggaacgtttacaatttcgacaacagagagaaggtccgtcgcgacgaagagcaagccgccagggaggagcagctcaagcgtgaagagacccggaagcgcgacgccgagctccg

SEQ ID NO: 17973 - DNA, 257 bp, Glycine max
  Clone ID: 701046469H1
acaagacgacatttttaacatgcttgacgacacggacaatgtgcccgagcgtgactcggtgcagggtcttgactcagtgatcaaaagcttcgaggatgagataaatgctccaggttcggattctggttccggtgacccggcccaggaacccgactccggggagctacaatctaacttgggctatcttctagaagcctccgacgacgagctcgggttgccgccgacggtgggtgacggcgaggaaatgggtcgggctg

SEQ ID NO: 17974 - DNA, 258 bp, Glycine max
  Clone ID: 701046470H1
gattcaaggaacatgatttagaaaactgccaagcccacccatattcattctctcaaaatttccaaccatgaactgaagcaccacacatacccacttcctccaaagacatcatttttattaccaatcttccaatttcagagaaaattctttgtgggcatctcttaattaaaaaaatgtcaagcttccccaacacggtggcggaaggccgcaggtccagcaaggcaccggaaaaatccactttttctcagacttgcagcc

SEQ ID NO: 17975 - DNA, 258 bp, Glycine max
  Clone ID: 701046471H1
aagttaatagcattccgcaaaatggctgccaccaccttagtctctgaagtcactctcccctcctcctccggccagcggaagatgccgctgatgggcctcggcaccgcgccggaagcaaccagcgcggttaccacaaaagatgctgttcttgaggccatcaagcagggctacaggcactttgatgctgcttctgcttatggtgtggaacagtctgtgggagaagccatagctgaagcacttaagcaaggactaattgca

SEQ ID NO: 17976 - DNA, 257 bp, Glycine max
  unsure (1)..(257): unsure at all n locations; Clone ID: 701046472H1
aagagaaaatnagtaggtgtgtatcttgtggtagcgggtctgcgctgattcacaataagaatttgttgatatcaccaattcataatgcattaaaggtgaggggcaacaatagaagttgtggcttgcgtgttcaggtttctatggtggactcttcctccgctgatttcaccagacgcatcgaacgagcttggtcaatttctaagcaaccaaggccaatcgtgtgttcgtcttgcgactcaaaagggcatattgaatgt

SEQ ID NO: 17977 - DNA, 258 bp, Glycine max
  unsure (1)..(258): unsure at all n locations; Clone ID: 701046473H1
ccagctgaatttcttggaaggccactagtaacgggaganaagacacttccagtgcgccctggcatgtttcttgagactgtctccaaggtcttgtctggtttatatgctggaacagattctggcatcactgcacaacatttggagtgggttcatcggaagacacttcaagtgcttcaggagatagcatatggctagttctctctccttttttcttatggtgaggttaagcacaatggccattttgtatccactgtttta

SEQ ID NO: 17978 - DNA, 260 bp, Glycine max
  unsure (1)..(260): unsure at all n locations; Clone ID: 701046474H1
gagaatttgagaatgttagtaggaccagcagataccctgcactatgctgtacntgggaanccgngattttgtttgacttctgcatggtattgtgtattcnatggtgtagatgaagggtacataattgctacttgaacatgtatagttctaatatagagagattccatttanattacnaatttggctaaaggtaactgaatccagaatttcagaaaataaangntatntatntcagcagttcagtancttagnangaagaa

SEQ ID NO: 17979 - DNA, 260 bp, Glycine max
  unsure (1)..(260): unsure at all n locations; Clone ID: 701046476H1
ttttctctctcgntacaaaaatacatagaaatgggcctcttctcttgcatcctcatcaactgttctctggatccttttctaaccattgcaactcttcatttgagttcagccaggaagttgtccgggtcagacccgcagttgcagtttcaataccacagaggccctctcctcaaaggcaaaatctcagtaaacctcatttggtacggtaaattcaaaccttctcaaaangccatcgttgctgatttccatcaccncgcccc

SEQ ID NO: 17980 - DNA, 260 bp, Glycine max
  unsure (1)..(260): unsure at all n locations; Clone ID: 701046477H1
gggatcgagagangtgttattttggcgcccctccaattcttttgaatcctcatcacccccactgccacccatgctcatctctcttcgatcttaaatattgaatctttgaggggtcagaatcagaatgtcggcaaccatggagcagcaacgccaccaaaaagcgccccaacaacaagacgaagccgaagagatacaacctggcctttacccgtcgagcaattcaggcatcgggcatagccgccacggacgttaagaagnta

SEQ ID NO: 17981 - DNA, 261 bp, Glycine max
  unsure (1)..(261): unsure at all n locations; Clone ID: 701046478H1
taaggnnntccnnttcngantcttagccgccgatctctnagggcttgnatcttctcaggtaagctgtgaagatgtaccacatcaaggaagaaaatccacaaggataaggatgctgaaccaactgaatttgaagagtcagttggacaggcattgtttgatctggaaaataccatcaggagcttaaaaagtgatctgaaggatttatacataaactcagccgtgcaagttgatgtttctggaaaccgcaaggctgttgttatc

SEQ ID NO: 17982 - DNA, 264 bp, Glycine max
  unsure (1)..(264): unsure at all n locations; Clone ID: 701046480H1
agatggcatcgttttgtgctgcaaggactttcaacattccggcgatgaacgccggcgttcttcgccgccgggcatcgtgggccgccggaatagtcggagcctcggtggccggcgctgcacttttgcgctcttgttcgtctaagcgctctgcgccattcgcttgcattagcctctctactgataccactttaaaggnagctgttcaaactgaaaaggccccagcggcattgggggcaatactctccaagcaatcaaagccaacaa

SEQ ID NO: 17983 - DNA, 254 bp, Glycine max
  unsure (1)..(254): unsure at all n locations; Clone ID: 701046481H1
atattactgaatncngnagcnctgtggttgatcgantcatncttcacttcgatnccacaatgtctanaacgcacagcntcancanttcactctcttcatcttcnactnaattntgagtcnctcttcttgaattccagatggcaggttcntgccgtnaagagcgtgagatttgcaaatgggtgccacacccgaagcngagacnggntacaaganaggggtcactcgnaatccnnatatggggaacttcnngctgg

SEQ ID NO: 17984 - DNA, 257 bp, Glycine max
  Clone ID: 701046482H1
tttccttggatggaaaatagaggtgagagtgccgatgctgagcttcaacttgacgctgattttgtgccggttcctgcccagacatgtactggaaatgaaaagagtaataaggcctcccggattcctcagtctagacgacctaatttatcctcactgcaaataccagcatggtcactagatattgcatatctacttttgcaaagactgatggtcctcggtttcacgatcaagtcctggttccacaagaggacttcccc

SEQ ID NO: 17985 - DNA, 256 bp, Glycine max
  Clone ID: 701046483H1
aagcatatctcatttgaatacattccttgtagtttatactgaaagatgggtttgaagatggcgttactgatcctaggcctttccctcatgctccttttggtctcctctgaggtggcatccacgaatacaaaagaggaggcaaatggagtggatgatgccaaatatcccggtggaagctatggagggggttacccaggtcatggcggtggcggttatcctggccatggcggtggcggttatcctggccatggcggtg

SEQ ID NO: 17986 - DNA, 258 bp, Glycine max
  unsure (1)..(258): unsure at all n locations; Clone ID: 701046484H1
aaaatgaaaacccaaagtgcttctctcctctgtctttttctctctcttgctatccttttggctagtncgcactgctgcaagtgcaactccaagaagcgcagtgccaagccaccatgtttcaacattcaacagaagcctttttccttccacttttctctttggaattggttcttctgcttaccaggcagaaggagcagcaagtgtagatgggagaggaccaagcatatgggacacctacactagacagcatactgaaaa

SEQ ID NO: 17987 - DNA, 256 bp, Glycine max
  unsure (1)..(256): unsure at all n locations; Clone ID: 701046485H1
cgcacgcaggaggaggagattgatcgagagaagagaagatgactacacgcttcaagaagaacaggaagaagagaggccacgtgagtnccggccatggccgcatcgggaagcaccggaagcaccctggaggacgcggtaatgccggaggatgcaccaccaccggatcctctttgacaagtaccaccctgggttcttcggcaaggtcggaatgcgctattttcacaagctccgcaacaaattctactctccgatcctc

SEQ ID NO: 17988 - DNA, 255 bp, Glycine max
  unsure (1)..(255): unsure at all n locations; Clone ID: 701046486H1
agatcctgaactcaacaacaacccaaagataaaaagcacaacacaagacactgaactcgcactncactgggttttcaaccatggatgcgatacggaagcagctcgatgtgttgatgggagccaaccgtaacggcgacgtccgtgaagtcaatcgcaagtactacgatcgcgacgtctgtcgtctctacctcgtcggtctctgccctcacgaactcttccagttaacgaaaatggatatgggcccttgccctaagg

SEQ ID NO: 17989 - DNA, 257 bp, Glycine max
  unsure (1)..(257): unsure at all n locations; Clone ID: 701046487H1
cacacccctctcatgggcatcttcttctggtagtttagacacctctgcaagtgcaaactccttcaccaacttcaccttctccacacaccctttcatgaccacttctttctctgaccttcttgcttctcccacagacaacaacaaaccaccacannnnnnnnnnnnnnnnttgtctgagagaactggctctggtgtccccaaattcaagtccacaccaccaccttctctgcctctctctccccctcccatttctcctt

SEQ ID NO: 17990 - DNA, 255 bp, Glycine max
  unsure (1)..(255): unsure at all n locations; Clone ID: 701046488H1
anaaaacatcaaaagagacatgggctgagcaaaccttcatcatgatcaagcctgatggcgtccaaagangcctattggcgagatcattagcagatttgagaagaaaggtttctacttgaaaggtttgaaacttgttactgtggaccgtcctttgctgagaagcactatgctgatttgtctgccaagcctttctttagtggtttggtggattacatatctctggccctgttgttgccatgatctgggagggcaaga

SEQ ID NO: 17991 - DNA, 252 bp, Glycine max
  unsure (1)..(252): unsure at all n locations; Clone ID: 701046489H1
anattgcaaagaaaatacacattacattactaagtctttgttcatttgagtagtagtgatggctagcctcaaggttgcatgtgtggttgctgtgatgtgcatggttgtggtggccatgagtgctgcacccatggcacaggccgcaatcacgtgcgggcaggtcgccggcgacatgtctccgtgctcagttntcttcgaagcggcggaaaaccgtcgcaggcctgctgcaacggatgaaatccctcagcagcg

SEQ ID NO: 17992 - DNA, 253 bp, Glycine max
  unsure (1)..(253): unsure at all n locations; Clone ID: 701046490H1
ccctaaacttgaanttcaacgtctattacttcgatccgaacatcgtcgctcacttgatctcctcctcccgtgcggcaggcgttggagcagcctctcaattacgcgagaaattacctcgttgaccttctggagagttgcgtggagagggtgatctacttggactccgatctggtggtagtggatgacgtggcgaaactgtggagcgcgagtctggactcacgcgccatcggggcccggagtatgcnacggaatt

SEQ ID NO: 17993 - DNA, 251 bp, Glycine max
  unsure (1)..(251): unsure at all n locations; Clone ID: 701046491H1
acattccttcattggaatattctgtggctctgtctctcactcatcctttgcaggagtagagtaatacattacaatacaaggggtgcattgcaaatggcttccgttgttgcaagcttgccgccaccattgctgctccctgctagaaaatcacatatgggcaacttcccaagttcccctgtttctctctttcaggganatggaatcgtgnttctttgttgtgaaggctctggagaaagttctgaatcttcaac

SEQ ID NO: 17994 - DNA, 252 bp, Glycine max
  unsure (1)..(252): unsure at all n locations; Clone ID: 701046492H1
cctatacttgatgcaacactggcatgatacgacatagatacagaggctggtgaaaagcggaaagaggaagagatgatagaacttgaggggcctctgggtaagagtgatgctgtcaatcatgaattggtttctttggagagagagttgtcaacacttcgcaagaatggcaaagttgatgctttggtttgtactatatggtcttgtgctcaaacagaaaggcagtgagaatctgcacgtacagttcttgnagac

SEQ ID NO: 17995 - DNA, 258 bp, Glycine max
  unsure (1)..(258): unsure at all n locations; Clone ID: 701046493H1
aaattacatggtcatagtgtacacctagttaggcaaacacaccaaacaccaaacaccaaactagttggctcaattctctttgaatggctttggaggctttgaattcaccaacagcagccaccactccgttccgtggctaccnnnnnnnnnnnnnnnnnnnnnnnnctgaccttcacttacgtgagccttgggctaaaaggaaacgctccaaacgaccgcgttttgagacggaggaagagtacctcgctctttgcctca

SEQ ID NO: 17996 - DNA, 258 bp, Glycine max
  unsure (1)..(258): unsure at all n locations; Clone ID: 701046494H1
gttcctcttcagntcaaacgcacacagttacgctcttnaaatcaatctcttctcagaaatgggtgtggctcaaaacattcccgatgcggaggagggaaccttggagattggaatggaatacagaactgtgtctggagttgctgggccattggtcattcttgataaagttaagggacctaagtttcaagagattgttaatattcgcttgggagatggnactactcggcgtggacaatgctagaagttgatgggtgaaaa

SEQ ID NO: 17997 - DNA, 256 bp, Glycine max
  unsure (1)..(256): unsure at all n locations; Clone ID: 701046495H1
ggcaacattagcnccacccgtaaaagggaagatgctcaagggactatgtgtttgttatcttgttcttatagttaccttctttagtgtatctgtatccggttattgggcatttggtaatgaatcagaaggcctcatcttaagcaacttcgtggacaatgggaagcctctggtgcccaagtggttcatttacatgaccaacattttcactataacacattatctgcggttggtgtggttatttgcaaccaacaaatga

SEQ ID NO: 17998 - DNA, 263 bp, Glycine max
  unsure (1)..(263): unsure at all n locations; Clone ID: 701046496H1
aagatacaacatagttggaaaacaaactatcaagcaattcagttggaaataatatnaataaaacttcaccacgttgtggctatgtaaactcaactcagcatacagtctgagcagaaaacattacatttnttaggaaaatcctgattggttcaaatacagtaatctanattctagactgtttgggnaagcttgaanccactcagtatggtnagaccccctctatgtcaancntttcatatgtatgagcaccaaagtagttntcg

SEQ ID NO: 17999 - DNA, 292 bp, Glycine max
  Clone ID: 701046501H1
aaaaagtacgggaagcaaagaaagctaatagagaggcaagggaagctcgaagaaaagccattcaagaaatgagtgaggaagctagagctgcatttgagaatatgagattttataagttctaccctgtgcaaagtccagatgcacctgatgtatctaatgttaaggtaggtgtttgggcattctaactgaactttttggagttccaattttcaaattatcttaacatcttagtacaacattaatgcatcatttctgtccttaaaaatggtaattcttccgtggaactttaaga

SEQ ID NO: 18000 - DNA, 277 bp, Glycine max
  unsure (1)..(277): unsure at all n locations; Clone ID: 701046502H1
tggaatcnncgangtaccaccaagagcaccannantacnncnnncatcaccgttgtgaacgttcttccttcgcagngncacagtttnnnntcttcanacagnagnantagcagcaccagcagcnacaacaatggactccaccactcccaattactgccacctctgactcctaccaccgtgtctgttcctccatctcctacatcaccctaccctccgaaatccgtgaccagatccgaatccggcaacccgtacccgacaaccttcgtccaagccgaca

SEQ ID NO: 18001 - DNA, 290 bp, Glycine max
  Clone ID: 701046503H1
aagaaacacccaaaatgggcatcctcagcctcgaccacgctgtcttctcccttcctggcgactagaattcccctcctcaaccaaacaacgctcttcaatctccatcagagcctcggtctccgagaaacccccgctaccggctgtgtcggtgacctccccggagcccagcaagcttccgatccgcaaaatccccggcgactgcgggttcccggtgatcggtcccttcaaggaccgccaagactatttctacaagcaagggcgcgacgagttcttcaagtcccgcatccaaa

SEQ ID NO: 18002 - DNA, 283 bp, Glycine max
  unsure (1)..(283): unsure at all n locations; Clone ID: 701046504H1
cttccttccttctcttctgcgttttcttcttcaacattccaatctaatccaaaacgctgcgttttatttcgtattcaatttaattcaatccctaaattcctcgccggagagagcgaatcttaataaccccaccactttccggcgaaacatggccgtcgccgtcgcnggccgnnagaagccgagctccgacgcgagcntcttcacgctctgccccttctggagctcgcgcaacgctactcaaaggtccaccaaaacggtgtcgtccgtcgccaggtcgtgctcc

SEQ ID NO: 18003 - DNA, 277 bp, Glycine max
  Clone ID: 701046505H1
tgcatgcatgaggttatatatggaactttgattatgggatcaaatatataattatgtcttaattagttgaccacatttggatatgtgcctcaagatgagtttttttatgtgatgattatcataaagtgttgtcgtaagtttaagcaaggtttttggaacagtcctattacaattactagattccatgttaattaataattagtgacactagtactatactatctccattgggagagtttgcaatcttcattgtaataacatgtttagtgttgttaac

SEQ ID NO: 18004 - DNA, 279 bp, Glycine max
  Clone ID: 701046506H1
gttaggttctgcacgctctgcttccagcgagtgttctttcttcgtttcaacaccttaatttgcacacgctgcttcttcagcttgagaaatggcacaagaaacctttctattcacatctgaatctgtaaacgagggtcaccccgacaagctgtgcgaccagatctctgatgcagtgctcgatgcgtgccttgaacaggaccctgacagcaaggttgcctgtgagacatgcaccaagaccaacatggtcatggtctttggagagatcacaaccaaggccag

SEQ ID NO: 18005 - DNA, 232 bp, Glycine max
  Clone ID: 701046507H1
ggagaaaaagaaggaggaacctgaagaagagagtgatgatgatatgggatttggcttgttcgattagggacattctcaatatgatttggttaaattttgtggttctttacctttaagtttactttatggatattgtaggttttatttttgtgctggttatttatatctgtataagacttgattttgtagttttatgaacttcggaatgtgggtttatgtccatttgagaatc

SEQ ID NO: 18006 - DNA, 278 bp, Glycine max
  unsure (1)..(278): unsure at all n locations; Clone ID: 701046508H1
ttccgctttctaaacatgtctcagttttccacctccaaccgctgancaaaaacanaaganaagaagcgnnnnnnnnnnnnnnnnnnnnngtatccacaccgtatattcccaaaatgcatcatcatcccaaaacgacaacaacagcaacaaaactccgccctctgttcctatgcttcttcttgaccctcgcctcttccgcgcccccaatgctcccctccgacgcggtttcgttgttgtcgtttaagcgtctagggaccaagacaacaagcttctctntc

SEQ ID NO: 18007 - DNA, 278 bp, Glycine max
  Clone ID: 701046510H1
ccaatggggagaagcacaagatcagctgtgcaatggatcacatcatagatgctcagatgaagggagaaatcagcgaagagaatgtgatctacatagtagaaaacatcaacgttgcagcaattgagacaacactatggtccatagagtgggcagtagcagagttggtgaaccatccaaccgtccaaagcaagattcgtgatgagatatcaaaagtgctaaaaggggagccagttacagaatccaacctacacgagctaccatacttacaagccacggtg

SEQ ID NO: 18008 - DNA, 276 bp, Glycine max
  Clone ID: 701046511H1
gtctctctctcactcgcgccctcccactccttccaaaacctagcctccttcaaatccaccatctccgccaaccccctccacgcccttctctccctcggcccctaccgccctcgtgactccttcaatgtcgccgccctctgccgtgccgcaatagcttggttccgcaacaacctatggctcgtcgaaaatgagcatccgtagaactgatgcaatggatgtattggatgcttgcagtctggtaaaaatcgaagaccagggagagatgacattgatttg

SEQ ID NO: 18009 - DNA, 277 bp, Glycine max
  unsure (1)..(277): unsure at all n locations; Clone ID: 701046512H1
cagacataccctttttcgaaacaacgccacacgccccaaaccgagtctgagananaggagggtcaacattgcacaactcaatttgacaatttccccttcccttttgcactgcccctcctctctctcgttgaaaatcttccattattatagggttagggttctcctgaatccgcaatggccgtttcaaccactttctccggtgccaaattggaggctctattgctcaaatgttcttcctcntcttcctcaccaccgccttcaaggtcatcattcacca

SEQ ID NO: 18010 - DNA, 277 bp, Glycine max
  unsure (1)..(277): unsure at all n locations; Clone ID: 701046513H1
atccactgctgcagaatccaatttgtgaccctaaatccaagttactatgactgctcagacccaagaggagcttcttgcgcaacacctcgaacagcaaaagatccatgatggtgaacctnnnnnnnnnnnnnnnnnnnnnnnnnnnnnnnnnnnnnnnnnnnnnnnnnnnnnnnnnnnnnnnnnngccgaaggactagaaggtgatgcatctggtaggtcgaagcagaccagaagtgaaaagaagagtcgcaaggcaatgcttaaacttggaatgaac

SEQ ID NO: 18011 - DNA, 278 bp, Glycine max
  unsure (1)..(278): unsure at all n locations; Clone ID: 701046514H1
gaagaggttaaagagacggcaacactttgctgtccgccttgaccgagcagagcttcgtcttggccctcgattttgccctaaagtactctcagtcacaacagacacnnnnnnnnnnnnnnnnnnnnnnaatggcaccgaagcagaccaaggctgagaagaagatcgcttacgatgcgaagtgtgcgacctaatggaggagtacggccagatcctcgttgtgaactccgataacgtgggatcgaaccagctccagaacattcgcaagggtctccgtggcg

SEQ ID NO: 18012 - DNA, 282 bp, Glycine max
  Clone ID: 701046515H1
aggaagggataattgagtgtgtggtgtgtagtgtggcagctccgtcagcgtgagatggacgccgcagcaacaggttcggagctgaacaagtccggaagcggaggttcggagcgaagtgaggacagcggaggagggatatttgagtactctggctgggtttatcacttgggagtgaattccattggccatgagtactgtcatctccgattcctcttcattaggggaaagtatgtctccatgtacaagcgtgatcctcacgataaccctggcctaaaacttatt

SEQ ID NO: 18013 - DNA, 244 bp, Glycine max
  Clone ID: 701046516H1
aaccctcgcaaagccctaaaactgagtttctcatctctcagattagattccgatagacacagaaatggcttttcgttcaggttctctgtctcgctccttaatgtctacagctagggcatcactccgaccggcggcgccgtcgtcaacccttccccgcctccgtccgccaccactcgccgcccctcgcgtccagtcccgccgcttttccatgcctgttccaggaatttggggcattagggtgcac

SEQ ID NO: 18014 - DNA, 288 bp, Glycine max
  unsure (1)..(288): unsure at all n locations; Clone ID: 701046517H1
gnnacgtgngcttanaccctagccgctcttctcttcattcttcactttggaaacaatcataatggcgttctgtaataaggttggaaatgtcttgaggcagggtgctgctcgcagcacacatgcccctgttgcgtccatgcttaattacatccgctgcatgtcttcaagcaagcttttcattggaggcctttcatatggagttgatgaccagtctcttaaggatgcattttctggctttggagatgtggttgatgcaaaagttataactgatagagacagtggaagatc

SEQ ID NO: 18015 - DNA, 286 bp, Glycine max
  Clone ID: 701046518H1
aaaaccttcctccttgcactcttccttttcaccactcaaatgctactactctcgcttgctcacaaaaccccttcaattttctcaggtataggaagaagcaattctgagcgaattgcaaccttcacgaattgaatttgtttctgttaatttttgtgcgtatttatcataagctacgaatttcgatagtgtgtaaatggcgacctgttatactccctcgaatgttagaaattcggcgggggtgctggctgttgttggaggcagaacaatttctgagaatcacggtatc

SEQ ID NO: 18016 - DNA, 283 bp, Glycine max
  Clone ID: 701046519H1
aaggaattgtctcatgctgatgaccaggggagaatgtcttacccttctgctgaagaagctttgaagcatcttttgtggttagctgactctgatgctgtatatgaagctgctttgggtctttatgatttaaatcttgcagctattgtggcattgaatgctcagaaagatccaaaagagtttcttcctttcttacaggaattggagcgtatgccaactctattaatgcaatataatattgaccttaggctgaaaaggtttgaaaaggctctcagacacattgctt

SEQ ID NO: 18017 - DNA, 280 bp, Glycine max
  unsure (1)..(280): unsure at all n locations; Clone ID: 701046520H1
aaaaaccctctctttctctctcttccaaaacctaattttcattttttctcttcaaacaaattttcaaaatgcgtgagatccttcacatccagggtggccaatgcggcaaccagatcggcgccaagttctgggaggtggtttgcgcggagcacgggatcgaccccactggaaggtacggtggggactcagagcttcagctcgagaggatcaatgtctactacaacgaagccagctgcggccggttcgtgccgcgcgggttctnanggacctnnaancgggc

SEQ ID NO: 18018 - DNA, 278 bp, Glycine max
  Clone ID: 701046521H1
accttagatgatggaatcaaaactttaaagacagagcgcagatcaaatagtcccattgatagaaatgaaggttctaccaaaaaccgacatcaatctaaaccagaacttcttattccttcagcgaatccaaaaatatcacaacctgtactgttgccaaagtctttttcaaaagcttcaataacttccagttctgaagccactcctggagtccatagttctcctatcacaggtggtagctctaggggaaaatctgacaagtctcatagtaataggctttc

SEQ ID NO: 18019 - DNA, 276 bp, Glycine max
  unsure (1)..(276): unsure at all n locations; Clone ID: 701046522H1
tctcttctccgccacttctnaatctattgaatcaacaatcatgtcggacgaagagcaccatttcgagtccaaggccgacgccggagcctccaaaacctaccctcagcaagccggtaccatccgcaagaacggctacatcgtcatcaaaggccgcccctgcaaggttgtggaagtttcgacttccaaaactggaaagcacggtcacgctaagtgtcactttgttggaattgatattttcactgccaagaaacttgaggatattgtgccctcttctca

SEQ ID NO: 18020 - DNA, 275 bp, Glycine max
  Clone ID: 701046523H1
gttttttctttttgaattaagagttgagaattcacgtgccccagttggttgatctaccttgcagcttgagatagtaaagttgcaaactttgaagcaattagtgtagaagatgagtacgttggatgcaacaagggctgaacttggtcttcttgttttatatttgggcaaggctgaagcaagggacaaaatatgcagggcaatacaatatggttccaaatttttgagtaacggggaacctggtactgctcagaatgtcgacaaaacaaccagcttgg

SEQ ID NO: 18021 - DNA, 275 bp, Glycine max
  Clone ID: 701046524H1
aaatcttctgttctgcttgacgttaagccttgggatgatgaaacagacatgaagaagctggaagaggctgttcgcagtgttgagatgcctggtctattgtggggagcatccaaactggttcctgttggttatgggatcaagaagttgcagatcatgttaactattgtcgatgaccttgtatctgtggacacccttgttgaggagactctcacagttgagcccatcaatgagtatgtccaaagctgtgacattgttgcattcaacaaaatctaagt

SEQ ID NO: 18022 - DNA, 273 bp, Glycine max
  unsure (1)..(273): unsure at all n locations; Clone ID: 701046525H1
aaaaacgaagntgttttgagccatggttatgaggatgtgaatgatgttntnagganaaatgaaganctggttgtgaagagtggcanaaaattgttgcngggacatcttgaatactcgagacttgtggatgcaaatattcaggatcctgctaatggtcccataaattcagtccagttccatcctaatgcacagttgtttnttgcagccggattggaccggaagcttagattctttcaaattgatggnaagcggaacaccaaaattnagagctct

SEQ ID NO: 18023 - DNA, 273 bp, Glycine max
  Clone ID: 701046526H1
gaaaaatggggtgtttccatctcacagtgactagtctgtgctttgtagtggttgtggttggagtgcttccactctccttagatgcacaactagatccctcgttttacagagacacgtgtcccaaggttcactccattgttcgcgaagtggtgaggaacgtttccaagaaagatccccgcatgcttgccagtctcattagacttcactttcatgactgttttgttcaaggatgtgacgcatcagttttgttgaacaacactgccaccatagaga

SEQ ID NO: 18024 - DNA, 212 bp, Glycine max
  unsure (1)..(212): unsure at all n locations; Clone ID: 701046530H1
tagtgcctccttgccagaagttaaaatggcccaagaaactttcctattcacatctgaatcagtgaacgaggggcaccctgacaagctctgtgaccagatctccgatgctgtgctcgatgcatgcttggagcaggaccctgacagcaaggttgcctgtgaaacctgcaccaagaccaacatggtgatggtttcgggngngatcanaacaaggg

SEQ ID NO: 18025 - DNA, 280 bp, Glycine max
  unsure (1)..(280): unsure at all n locations; Clone ID: 701046531H1
ggcgcgtccttgtcacgcgccgccacggtcttctctccttccatttctcggaagcgctggaggtagcctttgagaggctccacgtagtcctcgaagcccagagtggtcatcgcccagagcaggtcgtcgccgttgatcgtcttgcgcttctcgcgctggcacttgtcggaggcctcgccggtgatgaagctgatgaactctgacacgcactcctgcaccgtctccttcgcgtcttcgagatcttngcgttcncnggaagcgcnttctnnaggaggggccc

SEQ ID NO: 18026 - DNA, 59 bp, Glycine max
  unsure (1)..(59): unsure at all n locations; Clone ID: 701046532H1
ttcaaggaacttggtcgatcccggatagaagtgaacgttaaggtnagnagtnactttna

SEQ ID NO: 18027 - DNA, 282 bp, Glycine max
  unsure (1)..(282): unsure at all n locations; Clone ID: 701046534H1
ctctggacaattatatgcagtgtgctctttttgagaaaacagtaaggtggggactagcaactaggaacaactgatccaagccaaagagggtttggagggaacagttgcagtgagctttctgagatggacatgatgaacatggaaactaataataggaagtttctttctctgcctctnnnnnnnnnnnnnnnnnnntctggtaatgcccaaatgcgcagtagtagcgataatagangggtacctgtcactagcaatagcaatatcgctcaggaacatcactac

SEQ ID NO: 18028 - DNA, 282 bp, Glycine max
  Clone ID: 701046535H1
attccttctttcatttcattagcaaaagtgatcaattaagtgttaattaaccatcgatcatgatgaggagcaagaagcagagccagaacaagtttgttcgaatcatggcatcaccaatcagagcactgggaaaagcacgtgacatgtacgtgcggagcataacgaactgcggccagcacgtgagctactacggcggcgaccccacagaaggcgcgggaaggttctcgaggagccacagcgtggccacgtcgacgaggtccgaggttgtcagcgaggattatg

SEQ ID NO: 18029 - DNA, 279 bp, Glycine max
  unsure (1)..(279): unsure at all n locations; Clone ID: 701046536H1
gggtactaaccctaacccgcttcgaaccgtggcttcctcaggctcgcagaacctctctcgaagaaaacnnnnnnnnnnnnnnnnnnnnnnnnctcaacaaacacccgggtcgacccggatcgtttaccgagaatctcggatcccatcggaatccgatttcccgatctggcagcagaactggttcatcgcattgctcttcgtcatggctctcggattcttcgccctcgccattttcctcttcctcactctcgactctgacatcgctccttcttccaccgc

SEQ ID NO: 18030 - DNA, 275 bp, Glycine max
  Clone ID: 701046537H1
caagaatcggcgtacaatgagacatcgtttgctggtgaaccttgtgagttttaccattgtgtgctggaaagcaagtcatttcttgaaaagatgactgtccttgaacacacagttccatttttcctgccaatacgagaaatagaaaatgatctccattcatccaatgcaatgaaactcatagatcatgttggagatctattgcaggcttttgtggatagacgggaacaggtagattgcccatgtcagacttataaaggagctgtatggaaatcaga

SEQ ID NO: 18031 - DNA, 274 bp, Glycine max
  unsure (1)..(274): unsure at all n locations; Clone ID: 701046538H1
ggactgtagcatatacaaaccatactgttcttccggaggcattagagaaatggagcttggatcttatgcaaaaactgcttccacgccatattgagattatagaaatgattgatgaggagctgattcggaccataattgcagaatatggcacagagaattcagacttgctggagaaaaaattganggaaatgagaatactagaaaatgttgaattgcctgcagaatttgcagatatagtggttaagtccaaagaggccattgatattcctagtga

SEQ ID NO: 18032 - DNA, 272 bp, Glycine max
  Clone ID: 701046539H1
agctgctgttcttgcgcgtgaacaagcctcaggtaagccaaaaccatggttaagcataacaatgttatcccaaacggacacttccgtaagcactggcagaactatgtgaagacttggttcaatcagccagcacggaagacaaggagacgattggctcgtcagaagaaagctgtgaagatattccccagacctacggctggacctctcaggcccattgtacatggtcaaactttgaaatacaacatgaaagtgagaggtggaaggggttttct

SEQ ID NO: 18033 - DNA, 272 bp, Glycine max
  Clone ID: 701046540H1
tcgcattcaacctttctcttcctcctcactcaaacttcccctctctacgccgttcctcccaaatggatgcaccaatggagttttggggtgttgaggttaaggttggtcagaccgtgacagttgacccaatggatcctgtggattcatacatacacatatctcaggttgcgctcggagaggcgaaaaaggagaaacctaatgagtctgtggttttgtatttgaaagttggtgaacagaagattgtcttgggaaccctttctagggatggcatt

SEQ ID NO: 18034 - DNA, 108 bp, Glycine max
  Clone ID: 701046541H1
cttttgttttggttatgatgatatgttaattttgttaaatttgtaagacttgagtctacaagcttatccaagacattagggattacacctaattttgcatttctcttt

SEQ ID NO: 18035 - DNA, 234 bp, Glycine max
  unsure (1)..(234): unsure at all n locations; Clone ID: 701046542H1
catttactcatccaaagcactcannataaaganatcaatgcagcgctataaaaacttgaaatttataatacctaatgacactgggtcagcaatggtacacggntttgctggttattttgatgcaactctttacaaggatgtgcatcttggaattgaaccttcaactgcaacaccaaacatgttcagttggtttgcaatatttttcccattaaggacacccatttgtgtggatcc

SEQ ID NO: 18036 - DNA, 271 bp, Glycine max
  Clone ID: 701046543H1
cagatccaagcttgggagacagagaaagagaaagagaatggacgccattgattctgtgttcgatccgctgagagaattcgcaaaggacagcgtgaggctcgtgaagcgctgccacaaacccgatcgcaaagaattctccaaggttgccgtccgtactgcaattggtttcgtcgtgatgggattcgtcggtttcttcgtgaagatcattttcattccaattaacaacatcatcgtcggatctggttaggatgaagggaactacaattgcctc

SEQ ID NO: 18037 - DNA, 269 bp, Glycine max
  Clone ID: 701046544H1
aattacaaattacactctttgcctcgcaccttcaacttaaccttttctactcataatcttaacaacttgctagaagaagataaagaaagagaaaaagtgtgtgtgtgtgagagagagcaatggctggctcgtgggcacgccgttctctgattgttctggctatcatttccttcggatgtttatttgcaatttccattgctaaggaggaagccacaaaattggggacggtcatcgggattgatcttggaacgacctattcatgtgttggt

SEQ ID NO: 18038 - DNA, 277 bp, Glycine max
  Clone ID: 701046545H1
tggatgtcgatcctgaatctaatcctcattttgatgcaagcatgggtatcaacaaaacaaagctcctgcggcccaagaggatgaatttccaatttgtggaggaaggaaaatggtcaaaagatgctgaaacaataaaattgaagagtaaatttggagaagctcaagcaaaagagcacaaggccaaacaagcacagttggcaaaggcaaaggctgctcctgatataaatcctaacttaatagaaataacagagagagttgtaattaaagaaaagcccag

SEQ ID NO: 18039 - DNA, 152 bp, Glycine max
  unsure (1)..(152): unsure at all n locations; Clone ID: 701046546H1
ctctctctctttctctttctctctcatccagatcttgcaaaaaaaaaaaaacncantggnagcgagngctccnattccangngaaganttcgtgnanatggcgaattggnggagnaggccgagcgntacgnggaaatggnggnntncatgga

SEQ ID NO: 18040 - DNA, 276 bp, Glycine max
  unsure (1)..(276): unsure at all n locations; Clone ID: 701046547H1
tctatcttggagtgtgaaagtaacgcaactaacaccacacctatatattaatttaccgtgaactcgtttgaaagatttaacccaaagtggttgcttgcgaagttgcgttaatgctactactctccttcagcttcttaatcactctcacccaaccctnnnnnnnnnnnnnnnnnaccagcgtcaacaatgtcagatccgtaccagatttcgttcgctcaagccttcttgtgcagcgtttcgccgcgtgtttcgccgggtttggnacnatncnnggga

SEQ ID NO: 18041 - DNA, 281 bp, Glycine max
  unsure (1)..(281): unsure at all n locations; Clone ID: 701046548H1
gaattaattttgggaatcccgcgcaatctgtcggaagcaagcaagcaagcaattccttttgttttgttatgtttcttctctctcgcgcgccctaattctcgaatctctgtatcggtgttccgatggcggaggagaagagggcgncgtcgtcgttcgtgaagaaaggcgaccggcaaatgttcacggtggagctctggccaggtgagaccaccatagtttcgtggaagaagctgttgaaggacgctaacaagcacaanggatccattcggcgcnanaacact

SEQ ID NO: 18042 - DNA, 283 bp, Glycine max
  Clone ID: 701046549H1
attcattcatcttcgttctaagagccatgtctagcaccgttggccagaccatcaagtgcaaagctgcgattgcatgggaggctgggaagccgctggtgattgaagaagtggaggttgcgccaccgcaagccggtgaagtccgtttgaagatcctctacacctctctttgccacactgatgtttacttctgggatgcgaagggccagactccattgtttcctcgcatttttggccatgaagcttcggggattgtggagagcgtaggcgagggtgtgactcatct

SEQ ID NO: 18043 - DNA, 185 bp, Glycine max
  unsure (1)..(185): unsure at all n locations; Clone ID: 701046550H1
tcaatattgtatataaattttaacaganatgcagatacattcattttgtaataatttatatacaatattgatattgtttgcatcaaccaaaaacaacaaaccggtacatgatgcaaggcatgaaaaaccggtatnccttcaaaatatagangcaaacaatatcaatattgtatataaattattac

SEQ ID NO: 18044 - DNA, 275 bp, Glycine max
  Clone ID: 701046551H1
tcgctccgcaccagtttcaccgcacgaatatcttgttgtttggagcgatccgagaaaaactctgtaaacatgttggtttaccaggacctccttacaggtgatgagcttctctctgactccttccgttacaaggaaattgagaatggaatgctgtgggaagttgaggggaagtgggttgttaaaggagcagttgatgtagacattggtgcaaacccttctgctgagggtggaggagaagatgagggagttgatgatgcagctgttaaggttgttga

SEQ ID NO: 18045 - DNA, 274 bp, Glycine max
  unsure (1)..(274): unsure at all n locations; Clone ID: 701046552H1
ctgacactcagcacttgttcttgaatgaactgacaaaatataatcttggagaagactgccctgtatttgacaacttatttgaattttgtcagatttatgctggtggaactatagatgctgcacgtcgattaaacaatcaactgtgtgatattgctatcaactgggccggtggactacatcatgccnagaaatgcgaggcatctggattttgttacatcaatgacttggttttaggaatcttggagcttcttaaatatcatgctcgtgttttgta

SEQ ID NO: 18046 - DNA, 271 bp, Glycine max
  unsure (1)..(271): unsure at all n locations; Clone ID: 701046553H1
attattttctctttttcattttgtttgtgagcttagcaccacaccagacctcacctatggcaaatccaattctctcctttctcttgttggccctcctctgcatcctcgccttggctcacgccgattcccatttcgaaggctttgaagccgaagacgatgacgacctcgaagactcttccatngatcccgcctctctccgatcacngcccctctccgaccctantccctcaccanngatcccaccccccaacctcctgcttcagatctcccc

SEQ ID NO: 18047 - DNA, 271 bp, Glycine max
  unsure (1)..(271): unsure at all n locations; Clone ID: 701046554H1
ttattgcactccacccacccaccgtgcatcggtcgctggttcctgaatttcccttgtggttaggtttcctcgatggagtcagaggatgatatgcacgacgccaacgacatcgagtccctcgacgacgatttctacagtggcgagaccgaggacgctcctttggnnnnnnnnnnnnnnnnnnnnnnnnnnnnnnnnttcgacgacgccgagaggatcgagtctcgccgccctgagcaaaattttaccatattgaaggaatccgatatccgac

SEQ ID NO: 18048 - DNA, 268 bp, Glycine max
  unsure (1)..(268): unsure at all n locations; Clone ID: 701046557H1
caaattccaatgcttcttcttccttcttatttcaatttcaatcactactattattactctttcacgcttttgcttctcgatttttaaaccctaannnnnnnnnnnnnnnnnatagataagatagggcaaaaacaaaacaaaacaaaataaaaccctagccaaagaaagaccttgttgagcagcagcagcagagagagagaggcttatggaaggagtaccgcacccaatacccagaactgtcgaagaggttttcacngattttaagggc

SEQ ID NO: 18049 - DNA, 269 bp, Glycine max
  Clone ID: 701046559H1
tgttcttcttctttgtcttccatttccaattctctgtgtagaagccatgtctaagggtcctggtctctactctgacattggcaagaaagccagagatctcctgttcaaggactaccacagtgaccagaagtttaccatcactacctactcacccactggagttgctataacatcctcggggaccaagaaaggtgacctttttgtggcggatgttaacacccagttgaagaacaagaacatcaccactgatatcaaagtggacaccggtt

SEQ ID NO: 18050 - DNA, 269 bp, Glycine max
  unsure (1)..(269): unsure at all n locations; Clone ID: 701046560H1
tttcacactccctctcccaaactcatcatcctataatacaaagggtttggaatatatatcaaatatcaaaatacatcacaacatcaaaatggcctcaattgttactatggccaccattgtcacattagtcctcgcactagcatgttgtggcatgtctgccccgacctcagtgccgaaaaccactgcagcggccccggccccggagagcaatggctgcttgatggcactagcaaacatgtcagattgtctgacctatgttgaggntggga

SEQ ID NO: 18051 - DNA, 269 bp, Glycine max
  Clone ID: 701046561H1
cttgatggctccttgtcaaaacattaccgcagtttggaagggttagtgctacgcgacccacaccgtggtttcggcatcgaggtttggccttttttagtttgctgctttgagggtttcagcaccgttgttctaggcttcaacccattctgcaacattgaagtttctgttaatgtcctaaaaaatttggggaagctgtcagctttgtggtgttctaatctggaactaagttgtacactgttggcattgaagaacgaagagtctagttctgc

SEQ ID NO: 18052 - DNA, 272 bp, Glycine max
  unsure (1)..(272): unsure at all n locations; Clone ID: 701046562H1
gaagatggagatgtatcagatctggagcaggagaatagcgttgggagcgttcgcgtttgttctgcttttcctatcggcctcagcagacgacgtcgttgtgctctctgaagataacttcgagaaggaagttggtcaggacagaggagctctcgttgagttctatgctccttggtgtggacactgcaaaaagcttgctccagaatatgaaaagcttggtagcagcttcaagaaagccaaatctgttttaatcggcnangttgactgtgatgagc

SEQ ID NO: 18053 - DNA, 278 bp, Glycine max
  unsure (1)..(278): unsure at all n locations; Clone ID: 701046564H1
ctacaccaaatncnagancgatgtaatctctggtgtaggagggannttacatcggtcttgcatttggtgatgcttatgggctatcaggtttatgttccaagactggatgatcctggttcaggtacattcgananctgctctacggatacatttgagatatacggtccatgtacgtaccagacatgttatctgtatctatnccggagtggatacgacggttggatgcnagagnnagtgncgtatncngctattactaccaaccggttanntgtgacnca

SEQ ID NO: 18054 - DNA, 283 bp, Glycine max
  unsure (1)..(283): unsure at all n locations; Clone ID: 701046565H1
cttgttgagagaaatagaaaatgtggaggcgtgcaanccttttccntcgcgtcctggaacctcctatacacatcaacgcttcgctttcccaaacatttaccactggattccccttccacttccaggaaaaggatggcatttgccccaaaccgcttataacttttgttttaggaggccctggtagtggaaaaggtacacagtgtggaaaaattgttgaaacctttggatttaagcatctgagtgctggagatcttttgagaagggagatggtttctgatagtga

SEQ ID NO: 18055 - DNA, 276 bp, Glycine max
  Clone ID: 701046566H1
ggaagttacagaaatatcagaaaaacaggaaaccaaaagtcgccctgttggtctaaacacagtgaatcttctgaaggttgcttcaagtgctcttggatttgggcctcagatggctatgcaactagctgaacggttgtatactcaaggttttatcagctatccacgcacggaaagcacagcataccctccttcatttgactttcgtggtgtactctctgcacaaacaaataatccaacttggggtattatgtacaagggctacttaccaatggttat

SEQ ID NO: 18056 - DNA, 243 bp, Glycine max
  Clone ID: 701046567H1
cttgcactttgattcatattgattgagtcatctgacagtacatggttgcgaataggaattggcaagcactacaattgcaatccaaattagcttcattttatggtatccttttaccttctgaagtacgtaaaattatagtaccaaccaaaacaagaaaaaccagaacatacaatgtaggcatggcaatttttggtgatcttattgtgaaggtacaggactacaggcgtgttagaaattaagctt

SEQ ID NO: 18057 - DNA, 273 bp, Glycine max
  unsure (1)..(273): unsure at all n locations; Clone ID: 701046568H1
atgaatttgctgatggagagaatgttggatcactggattgtgggcatgagttccatagtggctgcatcaagcagtggctaatgcagaagaacctctgccctatttgcaaaacaaccgccttagctacttgatagggagaacctctatcctcttaagctggttctacctatagcttcttttattttttaaactttatgaacttctttgaactggacctctcatttgtcatgattggggacgataacatgtcccctaaanagaagtnaacnangg

SEQ ID NO: 18058 - DNA, 269 bp, Glycine max
  Clone ID: 701046569H1
gcgtgtccaactttgaacgcactttgatactgccactttctccaccacaaagagaaaaaagagagaagaaaagcgaatcccctgtgatctctcacacaattccaattcctctggatctcgtctcgatcgatagatctcgaacatgagcactggggagcttctcaacatcgaacctctcgaactcaagttcccctttgagctgaagaagcagatctcatgttctcttcaattgtccaataagaccgatagctatgtagccttcaaggtga

SEQ ID NO: 18059 - DNA, 269 bp, Glycine max
  unsure (1)..(269): unsure at all n locations; Clone ID: 701046570H1
ctcatttttcttcatctgtatctgaaccctaatcccttcggaattggaaagaataagaatcatcaatggagggagtgctgtccgcgaatgagcaacagagcatggtctcttctttcctggaggtcgctcagggccagaccgccgagactgcgcgccagttcctccaggccacaagttggaagcttgaggaggctcttnagctgtttctgatagggagtnaaggtggggccgtgccgttgccggtgccgccgcctccgttgttgcacact

SEQ ID NO: 18060 - DNA, 267 bp, Glycine max
  Clone ID: 701046571H1
ccacatgtgttgctggtgcttggattttgcatcagttaccttaccttaaccttaaccttagcatacttccttgttttgtgtcctctctcttcccttttcactcctttcttgcatgctttaaacaaacactcatatcccactctttgctttccaactaaccattattattcctactctcataacttgttgccaccatcatcattctcagactttgcctccccgatgggtcctgtgagaggattcaagaagaaaagaaagccagagaag

SEQ ID NO: 18061 - DNA, 268 bp, Glycine max
  unsure (1)..(268): unsure at all n locations; Clone ID: 701046572H1
gcctgtgccgtgtggtgttgtgtttttttttttgttncatctccatctttttcttcaaatttcccagaagagaaactcacaaagatgaggttatcattgaggcatgctttggtgtttgcgtnaattggggcgttgtggaacttgcagagggcaaagggtatccgatttgtgatagncagagacgagtgtttctccnatgacgnaaagtacnagggnganactgtcaaggncccttccgtggtnataanggctgatncccccgganaat

SEQ ID NO: 18062 - DNA, 264 bp, Glycine max
  unsure (1)..(264): unsure at all n locations; Clone ID: 701046573H1
ctcgttcttactttgacggtttctagagagagaaagtgatggccggagttaatccaaacggcgtcgccgattttgcggcggttccgacgcatggcggacagttcattcagtacaacatatttggaaacctcttcgaggttacgacgaataccgtcctccgatcatgcctatcggacgcggcgctacggaatcgtttgctcactgttgaataccgagacgaacgagctggtggctgtgaagaagatagcgaacntttcgacaatc

SEQ ID NO: 18063 - DNA, 265 bp, Glycine max
  Clone ID: 701046574H1
gcggcagagcgaagagaaggggcaaaagagaaagaagcgcttatcgaactcggacggaagcactgagttgactcggagggagtggaaagtgttgttgcgtaatgtctggtggtatcgctcgtggacgcctcaccgaggagcgcaagtcgtggcggaagaaccatccccatggttttgttgcgaaccggagacgctgcccgatggaaccgtgaatttgatggtgtggcattgcactattcccgggaagactgggactgattgggag

SEQ ID NO: 18064 - DNA, 266 bp, Glycine max
  Clone ID: 701046575H1
gtggaggagacttggaaccggagagatcaagtggttgatccgacggtgtacacgggactgttgggcaccgcctttacttgcttgcggtcctaccaggttaccggttgccggaacgacttaatattatccagcgaaatcattgacacgtgtgtcaccgctgcacgtgcctccctcaggcacgtgacttttttgtgtggtagaggaggcgtttatgccgcttggtgctgtcgttgccaattacatgggggaccttcaaaagcgtgact

SEQ ID NO: 18065 - DNA, 266 bp, Glycine max
  Clone ID: 701046576H1
gcttctctctctttcttatcacatatgccaaatccaattttgacccgcaatagactttcaatattctaatgctactttacttcatcacttgcatctccttcttcttgtttttaaagtccctccttctcaagcctctcccatcatgggcatctgagatgtggctgtttccccttttgttttctcaagagttttctatgagcacaatctccaagctgttcaggaaccggttttggattggttttctgtgtcaaattcccataggaatg

SEQ ID NO: 18066 - DNA, 267 bp, Glycine max
  Clone ID: 701046577H1
atccgcatccgctagctcgcgcaggcaccagcaggtgaggttattgtgatttgaatggagggaagtggaggtggcggtgcttcaccgtctgcaccgttgaagcaatacttacaggaattctcgaagctgtttcagtactatctggataaatccactccccatcccccctacaggtggattgggactttcgtcattgcatccatctacgttttgcgtgttgtttatgtgcaggggttttacattgtctcttatggcctcggaatctac

SEQ ID NO: 18067 - DNA, 269 bp, Glycine max
  unsure (1)..(269): unsure at all n locations; Clone ID: 701046578H1
atccctcttgatttgaaggttgttttgtgcttatagataaaagttctgccaaatcaagaggggttttcagatcatannnnnnnnnnnnnnnntaaacaatggctaagttctttgctgctatgatcttggnactcattgccatttccatgcttcaaacagtggttatggctgctaatgagcaaggaggccacttgtatgacaacaagagcaaatatggaagtgggagtgtcaagagataccaatgcccatcacaatgctcgaggaggtgt

SEQ ID NO: 18068 - DNA, 226 bp, Glycine max
  unsure (1)..(226): unsure at all n locations; Clone ID: 701046579H1
tcttagatctcttctttctctacgccgcacgccgaaaccatggccggaaaaggagagggtcctgctatcggaatcgatctcggaaccacctactcttgcgtcggtgtgtggcaacatgaccgcgttgaaatcatcgcnaacgaccaggggaacagaacnacgcngttcttaggggtttnnaggacangggcgnctcatgggtgaggggnaannatnagtcgnnncc

SEQ ID NO: 18069 - DNA, 293 bp, Glycine max
  Clone ID: 701046581H1
cttcttcaggctcgacatggaatccacagtctgtgacattcccccaaccggcttgaagatggcttcaacattcattggcaactctacctccattcaggagatgttccgtagagtgagtgagcaattcactgctatgttcaggaggaaggccttcttgcattggtataccggggaaggcatggacgagatggagttcactgaggctgagagcaacatgaacgatcttgtgtcagagtatcaacagtaccaggatgccactgctgatgaggatgagtatgaggaggaagaggagg

SEQ ID NO: 18070 - DNA, 275 bp, Glycine max
  Clone ID: 701046582H1
gctgtttggacggtcacacgcagttgtattgtagaactgaacaagggtttctctttctctttctctgtctgcttcttcactttctctcgtttcaatcgaaaaaaatcatgggcagaaaattcttcgtcggtggcaactggaaatgcaatgggaccactgaggaggtgaagaagattgttactactttaaatgaagctaaagtccctggagaagatgttgtagaagttgttgtgagccctccttttgtgttccttccttttgtaaaaagtttgctg

SEQ ID NO: 18071 - DNA, 274 bp, Glycine max
  Clone ID: 701046583H1
tgtgtctctccgcagcagccacacttcttcgccgtttcagctgaagagccatccgcaggtaagcaatggttaagcataataatgttatccccaatgggcacttccggaaacactggcaaaactatgtgaagacttggtttaatcaaccagcccgaaagaccagaagacggttggctcggcagaagaaggctgtcaagattttccccaggcctactgctggatctctcaggcctattgttcatggccagactctgaaatacaacatgaaagtcag

SEQ ID NO: 18072 - DNA, 268 bp, Glycine max
  Clone ID: 701046584H1
gcagcggcaacagaggagagaagatgaagttcaatccacgagtgtcgagcagccgccgcaagagccgaaaggtcacttcacggcgccgtcgagcgtgcggagggtgctgatgagcgcccctctgtcggcggagtccggtcgaagtacaacgtgcggtcgatcccagtccgcaaggaggacgaggtgcaggtggtgcgcggaacatacaagggtcgcgaggggaaggtgacgcaggtgtaccgtcgcaagtgggtcatccacatcgagc

SEQ ID NO: 18073 - DNA, 267 bp, Glycine max
  Clone ID: 701046585H1
gtcagggactcagaagagagagatcacaaatatcacgtacctactactcctagcaaaaaaatcacacaactcgtgctggggttcagaaagactgaaactttctccttaaaaacttggtgggtattaatgatctttgcctccctgagtcattacatgaagattctctacttgggtgttcaaaatgttggttactgaggacaagtctcatgtcgttgttgccatagacaatgatggctgttgtcaccggagctctgccggcggcgaggg

SEQ ID NO: 18074 - DNA, 264 bp, Glycine max
  Clone ID: 701046586H1
gagactttcaatgtgcctgccatgtatgttgcaattcaggctgtcttgtctctgtatgccagtggaagaactacaggtattgtgcttgattctggtgatggtgtgagccacacagttcccatatatgaagggtatgctcttcctcatgcaattcttcggttggaccttgctggccgtgatttaacggagtacttggtgaaaatccttactgagagaggatactccttcagcacctctgctgaaaaggaaattgtccgtgatgtg

SEQ ID NO: 18075 - DNA, 265 bp, Glycine max
  unsure (1)..(265): unsure at all n locations; Clone ID: 701046587H1
gagacagcaaagcagaggcgactcttgctcctccttcctcagtctctcattttctctatctctgaagccaaagatgaaccaaatcgacgacggtcgaaccctctcccctctgccggaccaggtcctggagaacgtcctggaaagcgtgctccacttcctcacctcccggcgcgaccgcaacgccgcctcactggtctgcaagtcctggtaccgcgccgaggccctnacccgcaccgagctcttcatcggaaatgctncgccgtgt

SEQ ID NO: 18076 - DNA, 268 bp, Glycine max
  unsure (1)..(268): unsure at all n locations; Clone ID: 701046588H1
gttgctccttcgccacaactctctgccaacatgggtatctccagagattctatgcacaagaggcgtgccactggtggcaagaagaaggcctggaggaaaaagagaaagtatgagcttggtcgccagcctgctaacactaagctgtcaagcaacaagacagtcaggnggatccgtgttagaggtggaaatgtgaaatggagggcattgagattggatactggaaattactcctggggaagtgaagctgtaactcgcaagactcgtgtat

SEQ ID NO: 18077 - DNA, 265 bp, Glycine max
  unsure (1)..(265): unsure at all n locations; Clone ID: 701046589H1
gttcttaggatcnncaaaatgctttcatntgctggagntgataggcttcagactggnatgnnaggtgcatttnnanagccacagggancatgtgctanagtngccattggtcangttcttctttctgnccgctgcanggacagcancagtcatcatgcacangagcgctcttcgtcgtgctaagtttaagttccctggtcgncagaagatcntagttagccggaaatggggtttcaccaagtttagccgtgcngattatctcnag

SEQ ID NO: 18078 - DNA, 263 bp, Glycine max
  Clone ID: 701046590H1
cacgagttgtagtctcagacgctgttattgagtcaagatgggttctttggcaaagaagggactcaacaattacgtcaaacagctccagcaacaccctttgagaaccaaggtaatcactgcaggggtactatcagcgatcagcgatgttgtgtctcagaaacttaccgggatacagaaaattcaactcaaacgacttcttttcaaagtgatttttggagccgcttatcttggaccctttggacacttttttcattaatactgga

SEQ ID NO: 18079 - DNA, 263 bp, Glycine max
  unsure (1)..(263): unsure at all n locations; Clone ID: 701046591H1
actcaaattacatggtcatagtgtacacctagttaggcaaacacaccaaacaccaaacaccaaactagttggctcaattctctttgaatggctttggaggctttgaattcaccaacagcagccaccactccgttccgtggctaccnnnnnnnnnnnnnnnnnnnnnnnnctgaccttcacttacgtgagccttgggctaaaaggaaacgctccaaacgaccgcgttttgagacggaggaagagtacctcgctctttgcctcat

SEQ ID NO: 18080 - DNA, 264 bp, Glycine max
  Clone ID: 701046592H1
ggatagagggatcttttggggaggagcggtgcaacaacacgactgatttaattggttgagcaagatgtcgacctcgacgaacgtggtagtcctggacaacggcggcgggctgatcaaggcgggcatcggcggcgagcgcgacccctccgccatagtcccgaactgcctctaccgccccccgtcgtcgaagaagtggctccacctccactccggcgacgaggacctcacctccgccgccgtgcgccgccccatggaccgcggcta

SEQ ID NO: 18081 - DNA, 266 bp, Glycine max
  Clone ID: 701046593H1
ccttggcttaactcaattcaactcagctattctctcttctctataagttcctctcctccattgtttttccctcccattcttccatttctgttttctcccatccctctcgcgcgctctctctcccatggaatcctccgctgccattcgatcttttcactatcccataggcactatgtcccatgtgcgagcctcccttgagaagcaggctgtagttcccattcataatgccggatggaactctaaaagtaggcttttcatccagcatt

SEQ ID NO: 18082 - DNA, 269 bp, Glycine max
  Clone ID: 701046594H1
attcatcttatccctcggaaaagtggtgattttgagaagaatgatgagatatatgatgcaatggatgagaaggagaaggaattgaaacaaaagcttgacttggacaaggagaggaaagacagaagccttgaagagatgagtcaagaggcagatgaatacagaaaacttttcttatagcatgtttgctaacagtagaaagtgaattctgtgtgcattgtgcgaccagattttctgagtgtagacaatcttaatgccttccttgtagccac

SEQ ID NO: 18083 - DNA, 273 bp, Glycine max
  unsure (1)..(273): unsure at all n locations; Clone ID: 701046595H1
cctaaacaggttggtaaccggaagctgctggaggaaaatggcataaatatttctacagaagtcgaaaattttgtagtagagcttgaagaaagtgcaaagacagggatactagttgcatatgatgatatattaattggagtcttagggattgcagacccactaaagagagaagctgctgttgttatagagggcctacagaaaatgggagtcatacctgtgatggttacaggagataactggngaacagctcgagctgtagccaaaggggttgnc

SEQ ID NO: 18084 - DNA, 135 bp, Glycine max
  unsure (1)..(135): unsure at all n locations; Clone ID: 701046596H1
ctccccggtatattccgcagccaaaatcccanagtccagacattggcggagtttacnacaaaacccttcanaccccncatccanatcgtcgtaaagtttgaaccntngataccacatntcgatncagacctatat

SEQ ID NO: 18085 - DNA, 271 bp, Glycine max
  Clone ID: 701046601H1
tcacatttagcaacttcacagaagctcaagctgagtgtctagttcagagggcacctgtgaggggatttcatgtggagagaaagccttcatcacttgttctatgctggcaaaggaaagaactcatctcagtttctacttggagatgctgaggagcagcagcagaagctaattaccttatatttttaaaggtgcatggtaacttacattgcagtttatgtaattgtttgtgtaatttttaggcttattgatgagatccacacccaaatgtttt

SEQ ID NO: 18086 - DNA, 268 bp, Glycine max
  Clone ID: 701046602H1
gagaaaacaggtttaaatcacctctgaatttctgctatggcttcaaccagatcagtctttcttcttcttttcattcaattgtgcttctcacttctacccttgtcattcgctcaatcccccgccaccgggtctaccgaaggttacaccatttatggtcgagtgaagatccccagtgtgggaacaaaagattatattcttcctggaaaaatttcaaatgtcaaagtcatactcaatggtggtcaaagagttacttttctgaggcctgatg

SEQ ID NO: 18087 - DNA, 266 bp, Glycine max
  Clone ID: 701046603H1
ggatagcacaaagaaaagtaaacactgccacagcaagagtgttcaaatgggagagggaaaaggaagaatttgtgtcactggaggcacaggattccttggttcatggataatcaagagcctccttgaacatggatatgctgttaataccactataagatctgacccaggacgcaagagagatgttagcttcctcacaaacctacctggtgcatcagaaaagcttaaaattttcaacgctgatctcagcgacccagagagttttggtc

SEQ ID NO: 18088 - DNA, 265 bp, Glycine max
  unsure (1)..(265): unsure at all n locations; Clone ID: 701046604H1
ctctttcttctcataactctgccgccgcaacagccccaaatccaatggcttcagagaagaaactttcgaacccaatgagggagataaaggtgcagaagctcgtcctcaatatctccgttggcgagagtggagatcgtctcaccagagccgctaaggttttggaacagcttagtggccaaacccctgtgttttccaaagcaaggtacacggttcgttcctttngggattagaagaaatgagaagattgcatgctatgtcactgtca

SEQ ID NO: 18089 - DNA, 265 bp, Glycine max
  Clone ID: 701046605H1
ggaaggagccgtagcagcagcggaagctactagcttgggcagcgaatcacaatggcgagaggattgaagaagcatttgaagaggcttaatgccccaaagcattggatgcttgacaaactgggtggtgcatttgctcctaagccctcatctggaccacacaaatccagggaatgcctgccactcatactcattttgcgaaaccggctgaagtatgctctgacataccgtgaagtcattgctattctgatgcagcgacatgtccttt

SEQ ID NO: 18090 - DNA, 264 bp, Glycine max
  Clone ID: 701046606H1
ctacaacaagaattcatctattcatttcagcccatcagcatggcgaaggagaagaaaaacttgtccaacaagaacaagaagccaagcaatgcagacgaggttcacttccgcggagtccggaagcgcccctggggccgctatgccgccgagatccgcgaccctggaaagaagacccgcgtctggctcggcaccttcgacaccgccgaggatgccgcccgcgcctacgacgtcgccgcccgaaattccgtggccccaaagccaaaa

SEQ ID NO: 18091 - DNA, 264 bp, Glycine max
  unsure (1)..(264): unsure at all n locations; Clone ID: 701046608H1
catgctcctctcattcanttttcttcttggatgggtggagatcgtgatggnaatccaagagtaaactacctgaagtgaccagagatgtttgcttattggctagantgatggctgctaacttgtactactcccanatagaggatcttntgtttgagctgtcaatgtggcgctgcaatgccganctacgtgtccgtgcagatgaacttaacaggtcttccaagaaaaattcagtcgcaaaacactacatagattttggaaagccat

SEQ ID NO: 18092 - DNA, 264 bp, Glycine max
  unsure (1)..(264): unsure at all n locations; Clone ID: 701046609H1
ccgtgattttgattcatctgtacttgtagagcctttttctactgcaaagggatggatgacaagtgctaactaagcactnnnnnnnnnnnnnnnnnnnnnccttcatcgccaaacacaatgaaggaattgggcgtggttgcaatcctcttttcaatagagttcttggacgttatcgtctacactgtaagcaaagcagccatgaagaagggcatgaatgactttgtctttgtcatgtactccaatgccttcgcaacttgcctcctc

SEQ ID NO: 18093 - DNA, 260 bp, Glycine max
  unsure (1)..(260): unsure at all n locations; Clone ID: 701046610H1
ctttcgttcacttccgtttccctctcactcacacacttctccccaaaacccaaaaccctaactctctttcgcgctcnntctctcgctcgctgcaaccatgaattgctccatctccggcgaagttccggaagatcccgtcgtgtcccggaactccggtctcctcttcgagaagcgtttgattgagcgacacatctcggattatgggaagtgtccaattactggagnaccacttactatggatgacattgtaccaatcaaga

SEQ ID NO: 18094 - DNA, 260 bp, Glycine max
  Clone ID: 701046611H1
attggcgtcggcacgattcagagatttggttcgctgcctgaaacctaatggctccgaaggccaaaccggcgccatcgcagcctgctcctcctcctgccctcgaagatctcttcaccacgctcaaccgccacatccaggcttccgcatacgacaatgccgtcaagctcacagatcagattctcgccattgctcccggcgacgaggacgcgctccgatgcaaggtcgtcgcgctgataaaaaatgaccgcgtcgaggacgcg

SEQ ID NO: 18095 - DNA, 262 bp, Glycine max
  unsure (1)..(262): unsure at all n locations; Clone ID: 701046612H1
gtctcttcctcctctctccgcatagctgcgttttccgaatcgaaaggtgacgttagtanagtaacaatggtggagaaggccaagggtaggaaggaggaggttgtcactcgagagtacaccatcaacctccacaaacgcttgcatggctgcacatttaagaagaaggctcctaaagcaattaaggagataaggaagtttgctcagaaagcgatggggacgaatgatgtaagagtggatgtgaagctcaacaaggctgtgtgga

SEQ ID NO: 18096 - DNA, 262 bp, Glycine max
  unsure (1)..(262): unsure at all n locations; Clone ID: 701046613H1
taccttcaaaatttgaagaaatttttaacaagcatgcacatacacatccaaatgctttgacatatgatgagttaacggagatgataaaggcncatagagagcctaaagatttctcaggaaggattggtagtgtggttgaatggaaaattctttacaaacttgctaaagataagagtggattactgcagaaagaaacaatccgaggtgtttacgatggaagtttatttgaacaactgaaaaaacaacactcttcaggcaaaga

SEQ ID NO: 18097 - DNA, 246 bp, Glycine max
  unsure (1)..(246): unsure at all n locations; Clone ID: 701046614H1
tcaacaaaatgagattgatttaaccggcgacggggaagagaggtcaaactctctcttagcgaacacgcncngcngcttctnctnnccctgcnncnttngttcccngtgccnctcggtcagcgtcgggttcgcgtggtgggagcgcgtgcgagccacgtcgtcatggtcggagacaagccctcactctgaggcgcaaccagcaaccgggagttccagtgggagttggtggtctggcggcgtgagggc

SEQ ID NO: 18098 - DNA, 265 bp, Glycine max
  unsure (1)..(265): unsure at all n locations; Clone ID: 701046615H1
cgcattttccctcttctttctctctcacgttttccgcttcagttttctcgggaaaatcatggtgaaaggtccaggcctctactctgacattggcaagagagctcgcgatcttctgttcaaggattatcagaatgaccacaagttcaccatcaccacttacacttccaccggagtggaaatcacttcaactggagtcaggaaaggtgagatatatttggccgatgtccagcctaaggtgagaccaggacntcaaactgntttcaag

SEQ ID NO: 18099 - DNA, 265 bp, Glycine max
  Clone ID: 701046616H1
tagcccaagccctatacaaccaaaccctaacacacacccatttgattcagtttccatggctagcctcaaggttgcatttttggctgcagtgctctgcatggttgtggtgagtgcacccatggcacatgcagctatcacgtgcgggcaggtgacgagtagcctggccaattgcatcggttacctccagaagggaggaacgccgtcgtcgggatgctgcaacggagtgaagagcctcaatgccgccgccaagaccaccgccgaccgc

SEQ ID NO: 18100 - DNA, 264 bp, Glycine max
  unsure (1)..(264): unsure at all n locations; Clone ID: 701046618H1
caaatctgaatcatgtcgtggcaagcgtatgtcgacgatcaccttctgtgtgacatcgaaggtaaccacctcactcacgctgctatcatcggccaagacggcagcgtttgggctcagagtaccgacttccctcagttcaaacctgaggagataactnccatcatgaatgactttaatgagcctggatcacttgctccaactggattgtatctcggtggcaccaaatatatggtcatccagggtgaacccggtgctgtcattcga

SEQ ID NO: 18101 - DNA, 266 bp, Glycine max
  unsure (1)..(266): unsure at all n locations; Clone ID: 701046619H1
ctcacactctncanacnctagcngcactacanactagttctatcnctntctnaccaagntgtcgcncgtcgntccccgagcncagagnngtggtggangcacccgccgttggnnacgncaaggacacngnngctcacgtagntctagtngtccaaatncgaccgaggttgctgtcaccacngnngaggaggncgaagatgnactcctggatctccaatcgaagctttaccggtctcgataaggacgggaaccagtngcaggagcgt

SEQ ID NO: 18102 - DNA, 261 bp, Glycine max
  unsure (1)..(261): unsure at all n locations; Clone ID: 701046620H1
gctaatgtgttcttcacctctccaaaacttgtagctgaggatattattactcagcaaaaattcatggaagttccaatcaagtatccggcaaaactcacccttagggtggttcttacttgtatcatggcggccaccggtgggttgatttttggctatgaccatggtgtttcaggtggagtgacctccatggattccttcctgaagaagttcttcccatctgtatatgaaaaggngtctaacgtgaagccttcttcaaaccag

SEQ ID NO: 18103 - DNA, 261 bp, Glycine max
  Clone ID: 701046621H1
cccaattccaaattcaagaaattttttaaacttgacatatctgctatcaccttttccgtttcttgcgattcgacgatggccgatcaaaagctttcagaaccggcgcttaaacgtgagcagcttgatgaattcgtgagtagtctatattttgaacaacgaattcttgaactccgacttcttcaagacctcgagaacaatgatgaatgtaggaaaaatgggagcctgaaaaggttaaatgaccagagtgatgtctgtggattt

SEQ ID NO: 18104 - DNA, 262 bp, Glycine max
  unsure (1)..(262): unsure at all n locations; Clone ID: 701046623H1
gtttcagttatggcttccgaccaagcagcaacaacagtccctttggattgttgggaggacaacgagaaaaaacgtgtagtcttggcggaagcaagtggagacttcatagatgttctctttagtttcctcactcttccatngggaactatcgtccggcttgggatcaattttcaactatcagtagagatgggtagcatcaagaaactgtacgagagtgtgcaaaatttgggatctgatgttttctggaacgacatctgcaagc

SEQ ID NO: 18105 - DNA, 263 bp, Glycine max
  Clone ID: 701046624H1
gtcaaatttccatgtgagaaaatcaggtccaagaaaaaggcaacacagaagcatcccactttttctcatctgccatctcatcactcaaatcgtcttgaagcttcccaggatgctagtaaaaaattggtattttgtggatctgctctatcaaatgaagaaaaggtatttttgatcaattatgcaagcaaggttggtgctactgtgaccaagttctggacctcaaatgtcacccatgtaattgcagcaactgatgcacatggagc

SEQ ID NO: 18106 - DNA, 258 bp, Glycine max
  unsure (1)..(258): unsure at all n locations; Clone ID: 701046625H1
gangttgctggttcttcaggttggttgcggtaagcgtgcanaancttntctatttnttaatactatattagnatagtagtaattcatgtactagtatttgcttatcattatcgatcttttgctgtttcaagtgccctataacctgatccttatctactcgtgtttttttctactatttcttttccatttatttctgatactgaaagcgtgactttttatagtactttccttgatggtgttttgaacacgaaatccaaa

SEQ ID NO: 18107 - DNA, 258 bp, Glycine max
  Clone ID: 701046626H1
ccaaatccccttaaaattttggcagtctgtgtgatctaagaaccagaaaccatcctacactaacccattttgtgttgtggaataagcatgtgtgagagacctgtccgtcgtatccctcatgaattcatccctcgcattataaaacctcgccgtgtcacggcctctgagctgtggcctaacttactgcgtgatcctatcattcataacttcatccctactcatataactacacccacaagtgcctctctttttgcctcc

SEQ ID NO: 18108 - DNA, 260 bp, Glycine max
  unsure (1)..(260): unsure at all n locations; Clone ID: 701046627H1
ggatgacgatcaagttaccacaccgaatacattggccgagagacacaggtcctggaacaatgagaaccatgtgtcacaacataatactnaagctcagccatcatatgctaccggcaataggcagtcaagtgaagttgtgcatgtagagaaacggcaaaagttgatggaagaagaagcaacactggaagctttcccaccaaacaatttgaagcaattgctgattgcatgtgccaaagccctgtctgaaaacaacatgaatg

SEQ ID NO: 18109 - DNA, 258 bp, Glycine max
  unsure (1)..(258): unsure at all n locations; Clone ID: 701046628H1
gggaagaagancttagctacaagctaaggaaggatcaaagagaatggctcaagcaatggcatcaatgactagcttacgtggttcctctcaggctgtgttggaaggtagccttggctccacacgcttgaatgtggggagtggaagcagggtggcctcagtcacacgtgcagggttcacagttagagcacagcaacaacaagtgaatggtggtgaggtacaaagtagccgtaggcagtgctttcacttgttgctgctggt

SEQ ID NO: 18110 - DNA, 261 bp, Glycine max
  unsure (1)..(261): unsure at all n locations; Clone ID: 701046629H1
ctagatagctagcctgtaagatatatntatagatatttcatatatatcctatggtccgtgagtgcccttgttctgtaccaaccctttcttccacatgttgagtttcagcatcgtcctctcttgagtccccatatcaaatacccaccgaattcaaccccccatataacaaatctcctcccatcccatttttcagcaccaaagtttgaaacttttctcaattgggttgaggagagtttgactcaaatttttatttttctaacg

SEQ ID NO: 18111 - DNA, 266 bp, Glycine max
  unsure (1)..(266): unsure at all n locations; Clone ID: 701046630H1
ggaacaatggcgggtagggtttcgacgtgcttcttcttcgtgtttgctctttctctccttcttccttttcagatctccgctgaggaatcatcggagaaagagttcgtactcacattggatcactctaactttcacgacactgtcagcaagcacgatttcatcgtcgtcgagttctacgctccatggtgtggccactgtaagaagcttgctcccgagtatgagaaagctgcttctatcttgagtagtcatgatcctccggtngnttt

SEQ ID NO: 18112 - DNA, 265 bp, Glycine max
  unsure (1)..(265): unsure at all n locations; Clone ID: 701046631H1
ctataatactattgttcttcataactctgtaggcggcgatctcctttgtctccgttccatcgtcaaccctacctttacgatctgcgtttggcgttcaggtttgangtccgaaggaganagaagagatttctgacagcgtaatcatgtttggtgtcgtaaggcgaagggttgcttctggcagcccgtctccttggttgcttggtcagtcagttcagaacattcggtctggcccatcagtttctgctagagcttcttccattgcggg

SEQ ID NO: 18113 - DNA, 265 bp, Glycine max
  Clone ID: 701046633H1
gcttccggcgccatatcgcgtatctttctctgttctattcctacgatggagttttggggtgccgaggttaaggttggtgagtctgttaaggtagatccagccgaattcgaggcatgcatacacctttctcaggctgctcttggtgaggcaaagaaagacaaatcaaatgaaccagttgttctctacttgaaagttggtcaacagaaatttgtcttgggaaccctttccagggagaaattcctcaaatacctctggaattggtttt

SEQ ID NO: 18114 - DNA, 241 bp, Glycine max
  unsure (1)..(241): unsure at all n locations; Clone ID: 701046634H1
tgtgtttacgttgtgtcgtgtgncgtgttcagtgaggtacgggaaactcgtccccatcgaagagcttacttgacctcgcaccacggaatcgttccctactaattcaactcaacaacactatcgtctccattcactagttagaaacgtgcgttccaatgtctgatcctgccgaagaggctgctttcatcgagaagctctacgaatacggcgagcaactcaacaatgccaaggacaagtcgca

SEQ ID NO: 18115 - DNA, 263 bp, Glycine max
  unsure (1)..(263): unsure at all n locations; Clone ID: 701046635H1
tttagttttctcatttctggcaccagcaacaagagtctctacttgtgagattttcttttcattttccgtcgtagttcaatcccctttcgttcctcacttttagggtttccaatttctccgatggcgcccgatcctaatcgcgccggcactagcgccagngccaacgccgccaaagacgacgccgtcgccaaanagaaggtcgaaaacgaagatctgtccgatgaggatttggcgctgaagcagcaattggagttgtacgtggt

SEQ ID NO: 18116 - DNA, 257 bp, Glycine max
  unsure (1)..(257): unsure at all n locations; Clone ID: 701046636H1
cttctttgcctgccgaattggggggccttgctagcttagttgaccttgatcttagtgagaattcttncgttggtggtggattgcctcctgatttcacccgattgaggaacttgaggaggatgatacttgccaacagcatgctcactggagctctgccggggagattgtttagtgattcgttgcagttcctagtgctgaggcaaaacaactttagtggttctctgcctgttgagttgtggtctctgccaagattgagc

SEQ ID NO: 18117 - DNA, 259 bp, Glycine max
  Clone ID: 701046637H1
ctcttctctcttccttttcagatcacacgcacacagttacgctcttcaaatctatctcttctcagcgattcttgcttcaagttccagaaatgggtgtggctcaaaacattcccgatgcggaggagggaaccttggagattggaatggaatacagaactgtttctggagttgctgggccattggtcattcttgataaagttaagggacccaagtttcaagagattgttaacattcgcttaggagatggtactactcggcg

SEQ ID NO: 18118 - DNA, 259 bp, Glycine max
  Clone ID: 701046638H1
acacaaagaagagtgacccttcttcttgttattccacttgcgttagttgttgtgggattcaggtattggtgtgattgtttgtaccatccggtggtggagcttgttggaaattggagatgagtcagaggggtttaatatatagctttgttgccaaaggaactgttgttttagcagagcacacgcaatataccgggaatttcagtaccattgccgttcagtgcctgcagaagctgccatcaaatagcagcaaatacacgta

SEQ ID NO: 18119 - DNA, 259 bp, Glycine max
  Clone ID: 701046639H1
cgtcgctccgcaccagtttcaccgcacgaatatcttgttgtttggagcgatccgagaaaaactctgtaaacatgttggtttaccaggacctccttacaggtgatgagcttctctctgactccttccgttacaaggaaattgagaatggaatgctgtgggaagttgaggggaagtgggttgttaaaggagcagttgatgtagacattggtgcaaacccttctgctgagggtggaggagaagatgagggagttgatgatgc

SEQ ID NO: 18120 - DNA, 260 bp, Glycine max
  unsure (1)..(260): unsure at all n locations; Clone ID: 701046640H1
gtggaagagttcaagaaagggcatgtggatgcagttaatgtccttaacattccatacatgttgaatacacccaagggtaagaaacttttttaatccctattaattactcaaactagttttcgatccatacacatctctatatttattatttagcacatgacagtatcagtatgttgtgttacaaattttctatggttaanatttaagatgcttgtgattttggagagcaggcaaggtaaagaatccagactttctgaagg

SEQ ID NO: 18121 - DNA, 258 bp, Glycine max
  Clone ID: 701046641H1
gaaacgcaggagagacagacagagaagagaatggacgctattgattctgtgttcgatccgctcagggaattcgccaaggacagcgtcaggctcgtcaagcgatgccacaagcccgatcgcaaagaattctccaaggttgctgtgcgtaccgcgatcggtttcgttgtgatgggattcgtgggttttttcgttaagctcatcttcattccaattaacaacatcatcgtcggatctggttaggatgaggggaatcgcaat

SEQ ID NO: 18122 - DNA, 254 bp, Glycine max
  Clone ID: 701046642H1
tgaattagagaaaccaaacctgaatgccgcaccgttcaataatccattcttgaaacaatggctgaggaacatcttcgccctactacgctacttctttttctcgatcttcttccataatcaatcatctcatcctccgcagcattgtcatcgttgttccgctttcgcgttgttgcggttggttgcgatgggcgaggtggggaagatactgtacatagtggtggtcgaggactccgaaaagaaagagtcctttcgct

SEQ ID NO: 18123 - DNA, 256 bp, Glycine max
  unsure (1)..(256): unsure at all n locations; Clone ID: 701046643H1
ctcagtctcaatgctttcggcaaacgaaaaaactcttacctcgctctctttctcgagaccgtttgtngcagccatactaacttgggtnatggggcagcgatatttggaaacatccaagattatgcctgctggtcttgttgctggaatcagtgctctcatgactctgttttatctctacaaattagcaactggtggcaaccatctccccaccaaggctgagtgatgatataatgatatatcatatatttgcttacta

SEQ ID NO: 18124 - DNA, 256 bp, Glycine max
  Clone ID: 701046644H1
aacgctgctgccgaaacccttccggaaccctaaggtaagtgagtaatcagtggttgagaatggtggagaaggcgaagggtagaaaggaggaggtggttacccgtgagtacaccattaacctccacaagcgcctccatggctgcacatttaagaagaaagctcctaaagctattaaggagataaggaaatttgcccaaaaggccatggggaccaatgatgtgagggtggatgtgaagttgaacaagtttgtctggag

SEQ ID NO: 18125 - DNA, 261 bp, Glycine max
  unsure (1)..(261): unsure at all n locations; Clone ID: 701046645H1
ctagggtttacagagaagcgaagaggacgcaccgtaagncagtaactcgtggaattgctagcaatggcgaggatcaaggtttacgagctgaggcagaagacgaaggctgatctgttgaatcagctgaaggacctcaaggccgagcttgccttgcttcgtgttgctaaggtcaccggcggtgcacctaacaagctctctaagatcaaggtggtgaggttgaacattgcccaggttttgacggtgatttctcagaagcagaag

SEQ ID NO: 18126 - DNA, 261 bp, Glycine max
  unsure (1)..(261): unsure at all n locations; Clone ID: 701046646H1
gatttttggcatgctgtttggccaaacactcccattccaagttcattgcgagatcttctaaagcctggccctgcaagtgttgaaatcgatgatcaccctatgcaaattgaagaaacacagtacccgaaaaccttcttctataaagaagaccttcatccaggcaaaacaatgaangtncanttcngcaagcctccctttcaacanccatggggtgttggtncatggttaanggaattaaggacactnctaaggagggttntg

SEQ ID NO: 18127 - DNA, 265 bp, Glycine max
  Clone ID: 701046647H1
gcggccttgtggccgcgacaggaagtgaacagccccttcgagtattgcgacattgtgaccaccaccacgcataagagcttgcggggtacacgggcggggatgatcttttaccggaagggcccgaagccgccgaagaaggggcagccggagaacgcggtttatgatttcgaggacaagatcaactttgcggtgttcccttcgctgcagggtgggccccacaaccaccagatcggggctcttgccgtggcgctgaagcaggccgcgt

SEQ ID NO: 18128 - DNA, 260 bp, Glycine max
  unsure (1)..(260): unsure at all n locations; Clone ID: 701046648H1
gtttgtgagancaaganaaagaggcgcaagatgagtggtagggtttctgggaaggtgaagtggttcaatgatcagaaggggtttggattcataagccctgacgatggcagcgacgatctcttcgttcaccaatctcagatcaaatctgacggtttccgaagcctcgccgaaggagagtccgncgagttcgccattgaatctgaatctgacggacgcgcgaaggctgttgatgtcatggccccgacggcgccacgtccagg

SEQ ID NO: 18129 - DNA, 261 bp, Glycine max
  Clone ID: 701046649H1
ttacaaattacactctttgcctcgcaccttcaacttaaccttttctactcataatcttaacaacttgctagaagaagatacagaaagagaaaaagtgtgtgtgtgtgagagagagcaatggctggctcgtgggcacgccgttctctgattgttctggctatcatttccttcggatgtttatttgcaatttccattgctaaggaggaagccacaaaattggggacggtcatcgggattgatcttggaacgacctattcatgt

SEQ ID NO: 18130 - DNA, 259 bp, Glycine max
  unsure (1)..(259): unsure at all n locations; Clone ID: 701046650H1
ggatgtcagangctttatcaagcgcgatgagtttgagcaactgagtcttccaattttggaacgggtgaagggacctttggagaaggcacttgcagaggcaggtcttacagttgagaatgtacacatggttgaggtggttggttctggatctcgtgtgccagctataaacaaaattttgacagagttctttaaaaaggagcctaggcggacaatgaatgctagtgagtgtgttgccaggggctgtgcattgcagtgtgca

SEQ ID NO: 18131 - DNA, 257 bp, Glycine max
  Clone ID: 701046651H1
cctttgtatggctgcagaaaatatgagcgaggtggaagaggagcatggatatgtcttcaaagaagagatccatctcacggtgttcaaaacttctctgttcttcgcgggcgatggcttcaccgtctacgattgcaaaggtcaacttgtgttcagagttgactcttatgggcccgacacccgcgacagagacgaactcgttctcatggatcctaacggacgttgtctcctcaccgttcgtcgaaagaggccgagtttgc

SEQ ID NO: 18132 - DNA, 159 bp, Glycine max
  unsure (1)..(159): unsure at all n locations; Clone ID: 701046652H1
cttttacaattcacttttttgcataattggtaatattaaatttgtnatttgtataggagttaaaatattcaggaactaataatgttttaatccctatttaactgacactcgtccacttgacgaccatgacaatgcttacaaaataatgcaatttttaac

SEQ ID NO: 18133 - DNA, 257 bp, Glycine max
  Clone ID: 701046653H1
ccaaaatctaccatagcggttccattttctgaatttctcgagcgaacttcgcccagttctagggttccccactgccatgtaccaggccgaattaacctccgaacaggttctgaggagggacatcccatgggagacctacatgtccaccaagctcatctcagggacgagccttcagctcttaaggcgctacgatcaccgaccagaaagtcacagagcacagttgctcgatgatgatggtccctcttatgttcgcgtgt

SEQ ID NO: 18134 - DNA, 258 bp, Glycine max
  Clone ID: 701046654H1
ggaaaacaatggtctggcctttgcaaaaaccttgtttgattcttaatgattttttatcccattgcttggctgtcttcaattatccatgccccttgccattatcacgtttttcagctattctcttgagggtcgaattatcccaagacataaggttctagtggagaatcagattaatattaagctaagatacatcatgttgactagcactgacgaagaattcaacaaaatggtcaagggcataattagaaagcgcctcag

SEQ ID NO: 18135 - DNA, 259 bp, Glycine max
  Clone ID: 701046655H1
tcacccaagagagaacctaagacacacaacacagactcacacaaagagttacaagagaaattcatcatggcatcagcagcatctgggtttgtgttgtcacttaatgttgcagctgccaccacaaactcaagggtggtcatgttcaacaccaagaacaacacttctaggtttgttgtaaaggcttcagatgagcctgcagcggcggcacccgccaccgccacacccccagctgaagctgaagctaaaccaaagccaccac

SEQ ID NO: 18136 - DNA, 258 bp, Glycine max
  Clone ID: 701046656H1
atatctttcgcgttgccactgaggttgttatctttcttccaaaatggcgacggtgatgcagaagatcaaagatatcgaagatgagatggcaaagacccaaaaaaacaaggctactgctcatcatctgggcttgctgaaggctaaattagcaaagttgcggagggaactccttacaccttcatcaaaaggagctggaggtgctggtgaaggttttgatgttactaaaagtggggattcaagagttggtcttgtgggctt

SEQ ID NO: 18137 - DNA, 255 bp, Glycine max
  Clone ID: 701046657H1
acaatacagtcacagaaacagagaaaaaacaaagaaaatggatgcagaaacggagtctccggcgccggaaacatcgccggcggtgatccacccggcagtggcaccaatctcctaccttctgggcacatggagaggccaaggagaaggaggcttccccactatcaattccttctcctatggcgaagagcttcacttctcacattcccccaacaagcccgtgatagggtacactcagaagacatggaaactcagctc

SEQ ID NO: 18138 - DNA, 252 bp, Glycine max
  Clone ID: 701046658H1
ttaatttaatcaccaatggctcgttctatcgctaacgccaagactttctccgctctcgtgctagacggattctccagacgtggctactctcaaagcgcaacaaggggaggagtggcctccatagcacccaaatcaggggaagacaaaggtgtctcatcatacaaggtttcctgggtgccagatcccgtcaccggttactacaaaccggaaaacatcaaggaggttgatgttgccgatttgcgtgctaccctt

SEQ ID NO: 18139 - DNA, 255 bp, Glycine max
  Clone ID: 701046659H1
caacgtcaagattcaaacccctcccacgggggctgacaccgatatgccggattctccatcgccctctgcggcagcgtactgagaggaagagagctgcggaagccgagcctgctaagcagcccgagcctgaacctgagcccgagcccgtgcccatggaattgacgggggaggagaaggacgcagagcagaagaaggctgaggctctgaaggaaaaggaagcgggcaatgcagcgtataagaagaaggattttgata

SEQ ID NO: 18140 - DNA, 255 bp, Glycine max
  Clone ID: 701046660H1
aaaacagatagtgtgggagagagaagagcggaagagaaaatgacgaccaggttcaagaagaacaggaagaagagaggtcacgtcagcgccggacacggccgtatcggaaagcaccgcaagcatcccggaggtcgcggtaacgccggtggcatgcatcaccaccgtatcctcttcgacaagtaccatcctggtttcttcgggaaggtaggcatgcgctacttccacaaacttcgcaacaaattctacaatccgatc

SEQ ID NO: 18141 - DNA, 258 bp, Glycine max
  Clone ID: 701046661H1
cttataatttgtgaggggtaagaaaatcagagaagttaaaatatggtttctgtccttccgaagaggataatactgatgcggcatggggagtcacaggggaacctaaatacagcggcttacactaccacacccgatcacagcattcagttaacggcgcagggcatgacccaggcccgccacgccggcgagcagctccgccgcgtgatgggcggcgatgggtgttctcctgactggcgggtacaattctatgtgtctccc

SEQ ID NO: 18142 - DNA, 174 bp, Glycine max
  Clone ID: 701046662H1
cttttaagttcttgatctatggtagaacagggtggattgggggtttgcttgggaaattgtgtgaaaagcaaggaattccatacgaatatggaaagggtcgcctagaggaccgctcctcactcatggctgatcttcagaatgtgaagccgacacatgtttttaatgctgcaggag

SEQ ID NO: 18143 - DNA, 259 bp, Glycine max
  Clone ID: 701046663H1
aaatttcctccaatctcttcagagttctgcagacattcatccactttccctctataaaaccattcacaatcccaatccaacttgcaaaaccaaaacctagggttcccaaatcctaattgcactaaaacccagaatgaaagcctctttgaagttccgcgaggaacagcaaaaacccctcttgagagcaaaagtcccactcggcatcctcggcatgcccttccaatccggcatagtcgctggcgaatccaaagaactcatc

SEQ ID NO: 18144 - DNA, 259 bp, Glycine max
  unsure (1)..(259): unsure at all n locations; Clone ID: 701046664H1
gtcactggttgatgtcagtggaaaaatggatttggcatctgttcttttgctattgactagcttatgctcttcttctgcactgcatgagcttnattcacaagaagatgcattgtatgctttgaaggtatcattgaatgtttctgccaaccagcttacaaactggaataaaaatctagtaaacccttgtacttggtccaatgttgaatgtgaccagnntagcaacgttgttcgaatttcactagaatttatgggattcaca

SEQ ID NO: 18145 - DNA, 212 bp, Glycine max
  unsure (1)..(212): unsure at all n locations; Clone ID: 701046665H1
ttaactctntanttctcataactctgccgccnccaacagccancnatccaatggcttcagagaagaaactttcgaacccaatgagggagctanaggtgcagaagctcgtcctcaatatctccgttggcganagtggngatcgtcttaccagagccgctaaggtgttggaacagcttagtggccaancccctgtgttttccaaagcaaggtac

SEQ ID NO: 18146 - DNA, 256 bp, Glycine max
  Clone ID: 701046666H1
attaagggagggtgaaggcggccgagtgaactcagtgggttttggattgggttgtggttcgtttatctactctcctcttgttcgtttcatctctctcgcactacaatcaaagaaagccatgagagcattttgttgatagaataatttggtctttctattggattagggtttgtttttccatcgctctccattcaaagatgattcccgcactgtctcaattcaaggttaaccatgtgggtgtggggttcaattcgcc

SEQ ID NO: 18147 - DNA, 212 bp, Glycine max
  unsure (1)..(212): unsure at all n locations; Clone ID: 701046667H1
atctgtgacgagcatcatgggcctcgagagcagtgctattgttggctatgtgtgtgcttccggccatggttgtggccattcgcccagcaaagaaccctttttgcgtgaagggtcgcgtctactgtgacccttgccgtgctggttttgagacctcagcaaccacctacattgccggtgctgagattatgttgccatgcaagagcagggttanc

SEQ ID NO: 18148 - DNA, 256 bp, Glycine max
  Clone ID: 701046668H1
cacacacacaaacatatgctacaaactccacttcttcaacacaaaaatccgaaatttgtgctccaacacaaaaaaatgaaacctacaatcaccattctcttgttgtctctactacttctcataacttcaccctccttggcaacccgacccgcatccaaccctgatcaagtcaagcacaacaaaaacaacaaccaaggtggtggtgctggtgctggtgctggcgggttctttggccctggaggagggttcagcatac

SEQ ID NO: 18149 - DNA, 254 bp, Glycine max
  Clone ID: 701046669H1
gcagaagttgcttgagtggaactcgagcttggttggataatatattcttttaaagttcagacatcgtgtttccatttttcttaaatttgagtattttgaatttttaggaggatggttttgctcgcatcctcctcttgctgaaaactttgtaggtaggaatgatataattttgcatgctaggttctctacatgccattgtcaaacgggaatactcatttgttttcttgtctgtgcataagcacagacgcatttgc

SEQ ID NO: 18150 - DNA, 257 bp, Glycine max
  Clone ID: 701046670H1
ggctgcaccaacaccgattcagaaaactgaagaggagtggaaggtcattctctcccccgagcagtttcggatccttcgccagaaaggaactgaattgaagggtacaggagaatataacaagttttatgaagaaggaatttacaactgtgctggctgtgggactcctctttacaagtcttcaaccaagtttgattctggttgtggttggcctgctttctttgagggttttcccggtgccatcgatcgatcccctgacc

SEQ ID NO: 18151 - DNA, 255 bp, Glycine max
  Clone ID: 701046671H1
gaacgtcataagcaacaactccagtccatcagtgcatccctggcatcactgactagagaaactggaccgaatctggtgaagggagacccagctcggaagtcagatacccagaaggttactcacgtgcaccaccatcatgtcagtactcccaccattgctgtcagcgacagtgctttgaaatttactcatgtcctctacaatctctccccagctgaactttatgaacaggcgattaagtatgagaaaggatcgttc

SEQ ID NO: 18152 - DNA, 256 bp, Glycine max
  Clone ID: 701046672H1
gcgaagagaatggctcccaagggtttaatctttttggctgtgttatgcttctcagcactgtcactgagtcgttgtcttgcggaggataatggacttgttatgaacttctacaaggaatcatgccctcaggctgaagacatcatcaaagaacaagtcaagcttctctacaagcgccacaagaacactgctttctcctggctcagaaacatcttccatgactgtgctgttcagagttgtgatgcttcactgttgctgg

SEQ ID NO: 18153 - DNA, 254 bp, Glycine max
  unsure (1)..(254): unsure at all n locations; Clone ID: 701046673H1
caaaaaaccctctctttctctctcttccaaaacctaattttcattttttctcttcaaacaaattttcaaaatncgtgagatccttcacatccagggtggccaatgcggcaaccanatcggcgccaagttctgggaggtggtttgcgcggagcacgggatcgaccccactggaaggtacggtggggactcagagcttcagctcgagaggatcaatgtctactacaacgaagccagctgcggccggttcgtgccgc

SEQ ID NO: 18154 - DNA, 251 bp, Glycine max
  Clone ID: 701046674H1
cacacgcataagcagagggaaaatttcagtttaggctacacagcctcaacatcattgacatttgataatggcaatgcctctgtttgcttctgtatgattcttctcagcagataatcgatcgcgctctgttgattcgatcgaaatcgaagaagaaggcgagcttcaaccctagcgtttgcacaatctattctgatgatatatttgcgttggtgtttgcctgaggttttggggcgattccaagtgatacatat

SEQ ID NO: 18155 - DNA, 204 bp, Glycine max
  unsure (1)..(204): unsure at all n locations; Clone ID: 701046676H1
ccccngtttccaccttctccattttccaacacngttctatcatggcacaccactcctcanannntnggaatcnngcagctccagantctaaccctanaaccccaaactcaaacccagatctcattcaaacatataaaccctctttctnggtaaaacacttgacaaaccttaacctgngtcaaacacacaaaaccngtccacccc

SEQ ID NO: 18156 - DNA, 254 bp, Glycine max
  Clone ID: 701046677H1
ctcgtcttcaatcctttcgttattctcttattcatccttctcttctgaataatccagatctctttctgcccttttctccgtcacgcttttcgtgaccggatctgtatggatttgatccagatctacacgccgatggtggttttggccgggtctttcatagatctggtgcgtagaggctcagatctacggtaccgaggtacaacagagaatcgatgacaagaacgcagatccgacggtagatccagccgattccg

SEQ ID NO: 18157 - DNA, 257 bp, Glycine max
  unsure (1)..(257): unsure at all n locations; Clone ID: 701046678H1
caagattctaagagagattttgctgctctttgaagaagggtgtttgcttgattttggagatgtcgctgctctcagatctcatcaaccttaacctctcagacactactgagaaggtgatcgcagagtacatatggatcggtggatcaggaatggacctgaggagcaaagcaaggactctcccaggaccagttagcgacccttcaaagcttcccangtggnatatgatggttccagcacaggccaagctcctggagaag

SEQ ID NO: 18158 - DNA, 257 bp, Glycine max
  Clone ID: 701046680H1
gggcaccagagcaaaataatctacaaagaaaggaacctgtctgtcagtctcttcagttcagcttgatgggacctaagctttttgtcagtccagatcaggtaacagttggacgcaagcctgtcactggacttaggcttagcctagagggcagcaaacagaatcgacttgctattcatttgcagcatttagtctccctcccgaagaaccttcaacctcactgggacacacacatggccataggtgctcccaagtggcat

SEQ ID NO: 18159 - DNA, 258 bp, Glycine max
  Clone ID: 701046681H1
gcaaagagagatgggaaccgttagtaacattggcttcccttcagtattcagagttcctctagattcacaacaagcactatcaaagcagatgaagaataaatcatcgtgttgtttcatggttcctcctaatcataactattctattaggcctagtcccaatacgttgtaataaactatcagaaagtgggattgaggagaaccccacgaccacaagcacgagcaagaggccctctaagaacaaggacaggatggaggagt

SEQ ID NO: 18160 - DNA, 255 bp, Glycine max
  unsure (1)..(255): unsure at all n locations; Clone ID: 701046682H1
cccaccgctgttctgaagctggcattgcattgccagggttgcctagacaggattggcaaaactgtgttgaaaaccaaaggttagttaatnnnnnnnnnnnnnnnnnnnntagtttgtctcttggtttggctaattgggcatgaacttggacatgatgatgcaggagtgcaagaaatggccattgacaaggaaaaggaaatggtgactgtgaaagggacaatggatgttaaggctctggcagagaatctcatggag

SEQ ID NO: 18161 - DNA, 253 bp, Glycine max
  Clone ID: 701046683H1
cacaaacacctcgtccctcacaatgcagctagcaatggcggccaacgctgtcgtttcaccgtcgccgttccgacctcagccctttctccggtcatccttctccggcgtctccgtcaagctcactccccaatccataacgctttcacgctccaagcccctcaccgtcttcgccgccaccaagaaggccgtcgccgtcctcaaggggacctccgccgtcgaaggcgtcgccactctcatccaagaagacgatggc

SEQ ID NO: 18162 - DNA, 252 bp, Glycine max
  Clone ID: 701046684H1
cgcttcagcacaatgggtgcctacaagtatgtttcggagctatggcgcaagaagcagtctgatgttatgagattcttgcagcgggtgaggtgctgggagtatcgccagcaaccttctattgtccgtttgacaaggtctactcgcccagataaggctcgtcgcttgggtttcaaggctaagcagggttacgtgatttaccgtgttcgcgtacgaaggggtggccgtaagagaccagttccaaagggtattgtt

SEQ ID NO: 18163 - DNA, 224 bp, Glycine max
  unsure (1)..(224): unsure at all n locations; Clone ID: 701046685H1
caacacaacaanaaaagacnacacagagagangcgncttaataaacgctcttctctgaaaaacctgatttcttctcttcttctcttctctttcgtttcgatcttcgatctctgaaaatgagagagtgcatttcaatccacatcggtcaggccggtattcaggtcggaaacgcctgctgggagctctatgcctcgaacacggcatcagcctgatgggcagatgcc

SEQ ID NO: 18164 - DNA, 252 bp, Glycine max
  unsure (1)..(252): unsure at all n locations; Clone ID: 701046686H1
ccaaaaacccattcacttttccacaagccttagttctncctcanttattctcttttncaaaatagntttcacgctcgctaancttccagttctcactaaacctcgngaanctcgtgatggacaccaagataggttcactagacgcgcccaagcccaacagcnacgacgtcgtatcatgcaacctcncgagcngcgccgccatccagccctgcttgccggcgacggtgatcaaggcgccggctgtagtgatcc

SEQ ID NO: 18165 - DNA, 254 bp, Glycine max
  unsure (1)..(254): unsure at all n locations; Clone ID: 701046687H1
cttctcgctacaattggttctctttccgtcccggcaacaacagtcacactcgtcagangcattcccgtgcctatatagacttcaagtgtcccgatgacgttttcgagttcgccgagttctttgatggacacgtttttgttaacgagcgaggtgcccagcataaagttatagttgagtacgctccttctcagcgtgttccaaagcctagtgccaaanaggatggacgtgaagggactatatacaaagatccagac

SEQ ID NO: 18166 - DNA, 254 bp, Glycine max
  Clone ID: 701046688H1
gtggcttccatctctcaaaagctcaaccacttgccatggcagcagcagcgtcaatgtgtatgagcttcaacctggcaacagcattcaagggtctctctttttcttcttcctcatcgttcttcgctggaagtggtagttattctctccgcgcgggtcccacctcggtggtgtcgctgccccggcgctgcccgctgaccatagagaacgcccacaagaagggggcgggcagcaccaagaacggccgcgactcgcag

SEQ ID NO: 18167 - DNA, 249 bp, Glycine max
  Clone ID: 701046689H1
gttgaaattgttgtttcttcctctgagttccaactttcacctcagccaaatacacaacaaaatggggtttcagaagataagggtgggcaaccccatcgtcgaaatggatggggatgaaatgacccgagtgatttggaaactgataaaagataagcttattttcccttatttggagctggatattaagtattttgaccttggccttcctcatcgcgatgccactaatgatagagttactattgaaagcgc

SEQ ID NO: 18168 - DNA, 247 bp, Glycine max
  unsure (1)..(247): unsure at all n locations; Clone ID: 701046690H1
gtggtcatggaagcttttcaaacaactccaaattgaacagtgttgttggacatctgctgcattcttcaattctagtgccatatcatggatggagaatcagtcataggactcatcaccaacatcatggtcatgctgaaaatgatgaatcatggcatccgttgcctganaaattgttcagaagcttggacactgtaactcgtatgttaagattcacagcaccttttccattcttgcatttcctgtgtac

SEQ ID NO: 18169 - DNA, 248 bp, Glycine max
  Clone ID: 701046691H1
gtttttttctcaattctcaaccatggagaagcagaagacagtgatgggtttgattctgttgctgctgttatttgcttcggatgtgagtgcttggactggtgaaatccatggaagagttgtttgtgatgtttgtggggattcttctctcggacctgaagaccatgttctcgaaggtgctgaggttgctgttctttgcatcaccaaatctggggaggttctaaattatcaggcattcactgatgctaagg

SEQ ID NO: 18170 - DNA, 252 bp, Glycine max
  Clone ID: 701046692H1
ctcactgcctgaccgaagtgtctcttgaagccttcagagattgtgctcttcaggatattgacctgggtgaatatgttggagttaacgatgattgaagatttgctgttcatttctcgttcttcttctggcatcacacttacaccactcttcttcccttttcattttctctgcgaattcctattcccacacacatctcaaatgggtattaagggtttaacaaagcttttagcggacaatgccccgaagtccatg

SEQ ID NO: 18171 - DNA, 254 bp, Glycine max
  Clone ID: 701046693H1
ttagcccactaggctcctcatggaattaaaacagtttaaaacttccaattaaccaaacaattctgttcttgaaaaagagaaggatcacaatcaatcttgcccaaaagccattagtctgattgccaaaataactttacatgagaattgttgagagaaaagaacttctttaagacttttacaatcaccaccataccgggcctattctttgtttgaagaagagccttgttggtcttgacaactgttaaggctgtagt

SEQ ID NO: 18172 - DNA, 255 bp, Glycine max
  unsure (1)..(255): unsure at all n locations; Clone ID: 701046694H1
tataatctctgtttcaactttctatcttcctatgatggctagctccaccgtcttgtttacactagtcgccgcattgttcgtaacctccgtcgtggctcagtccccggcgtcctccccagccctgtctccaaagcgcacccccgtgctggccacgccgcagaagtctccttcgccggcgatttctccttccgcggtgtcacggtaatcctctcttntgctcggagggtaaangnncggtnncttnggtaactnggg

SEQ ID NO: 18173 - DNA, 254 bp, Glycine max
  unsure (1)..(254): unsure at all n locations; Clone ID: 701046695H1
tttggctaagatcaagtgtagtatctgttcttatcagtttaatatctgatatgtgggccattggtccacacgatattaaatgtattttttgagggggatggttcaccgcagtggcttgctactggaatcatcaagtgtcgcctaagcgttgcactatagcttgggcctggcactcctcagcanaacagttttcaggttttggctttcattgttcactgcattttgtttatataggttaaggttttttgattaag

SEQ ID NO: 18174 - DNA, 252 bp, Glycine max
  Clone ID: 701046696H1
agaccgtactacaacactttctatatttattgtccattctctctcacgcactccataattgccttcttgctttgatcgattcattcggtgatcggtgatcggtgatcagtggtttggtgttgttgatagaaaaatgcattccagccctttgcttcttgaggaacccattaggatggcatccattcttgagccatccaagcctactttctttccagctatgacaaaaatgttggcacattggtctaaagtcag

SEQ ID NO: 18175 - DNA, 242 bp, Glycine max
  Clone ID: 701046701H1
tagtgcctccttgccagaagttaaaatggcccaagaaactttcctattcacatctgaatcagtgaacgaggggcaccctgacaagctctgtgaccagatctccgatgctgtgtcgatgcatgcttggagcaggaccctgacagcaaggttgctgtgaaacctgcaccaagaccaacatggtgatggttttcggagagatcacaaccaaggccaacgtggactatgagaagattgtgcgtgac

SEQ ID NO: 18176 - DNA, 300 bp, Glycine max
  unsure (1)..(300): unsure at all n locations; Clone ID: 701046702H1
gagggaataactcttgttttgctaatcatacatacattcttcccattgttataacgaaggatccccacacatattgggaaaaatactattaatcaattgaaggttttctctctattagtgcttgttgctgatgtgctgctctatgcccttttcttgtctccactggcttttgattttctacctttcagaattgcaccttatatcagagttgttctttttgttctgaatattagggagctacgagaaaccatcactatcttggttgggatgcttgacacatacttnaatgtctggcttgtg

SEQ ID NO: 18177 - DNA, 301 bp, Glycine max
  unsure (1)..(301): unsure at all n locations; Clone ID: 701046704H1
gaaccaacaaaggactacattaatggcgaacaatttagatcagactccaaaaccagttaacccancaagctttcctttatgctagtgaacgcgaagtccatcacaacgacatatttatattcggcatagataacaccgtactctctaatatcccatactatgaaaaacatggatatggggtggaggatttaatgaaaccttatatgatgaatgggttaacaagggcgacgcaccggcattgccagagactcttaaaattacaacaagctgttgtctcttggcttcaagattgtattcttgt

SEQ ID NO: 18178 - DNA, 302 bp, Glycine max
  unsure (1)..(302): unsure at all n locations; Clone ID: 701046705H1
gaaaaactcaacacaacacccccctctccaacctctttttccttttaatttctcatcttatctattaatcttatatacatatatataaagacatagataatagtcatatagatataattatttcgttatattttccttgcatgggctgttaagatgtctcgcacgtgctcacgtgcggnaacaacggccacaattnanggacnngnaccgacggtggcgccgcgggtctccgagggagaacgggcatcatgctgttcggcgtaagagtcatgacggaagctaatcctccttcaggaagagcg

SEQ ID NO: 18179 - DNA, 303 bp, Glycine max
  Clone ID: 701046708H1
gaacccgtttcgctttcaatcgaagggaagaacaaacattcaattcatgggcagctgcaaagcttcaagctttatggaatcacccagctgggcctaaaaccattcacttctgggcacctacctttaagtggggcatcagcattgccaacattgctgatttctcaaaaccacccgagaaactttcctatcctcagcaaatagcggtcacagctactggaattatctggtctcgttacagcactgtaatcaccccaaaaaattggaacctgtttagtgtaacattgcaaggcagggacaggttat

SEQ ID NO: 18180 - DNA, 158 bp, Glycine max
  unsure (1)..(158): unsure at all n locations; Clone ID: 701046710H1
gtcaattttgctgaaaaccttaagtgggtatcctgaaaacactagattttcgattcgtttggnaagcggattttaaggtttgattaataacgtttntctgtancttgttggatatggaggtttcggtgattggaagctctcaagncgaatcgggagcg

SEQ ID NO: 18181 - DNA, 305 bp, Glycine max
  unsure (1)..(305): unsure at all n locations; Clone ID: 701046711H1
cgagangagangagagagagagaagaggagaaagcttttggnggtttnaatctatnagaattaggacgccacacccaaattgaaagaagattcgatccgatcganacgatggctctggtcngagntgaagtgaagcatgcggcggagggcgcaccggaggagaattgctccgccaacccaccaagcagggcgagggcctccgccactactattctcacaactccacgannatnagctccttctccgtcaaaagacgcataacctcaaccgtcttgaggctcagagaaacgagctcattcnaggtg

SEQ ID NO: 18182 - DNA, 169 bp, Glycine max
  unsure (1)..(169): unsure at all n locations; Clone ID: 701046712H1
gagatggcttctcctcttcttactccttacaagatgggcaaattcaatctgtcccatagagttgtttgggcacggnggaccagacagaggtcttacgacaacgtcccacaaccccatgccatcctctactactcccagagaacttccaacggaggccttctcattactg

SEQ ID NO: 18183 - DNA, 158 bp, Glycine max
  unsure (1)..(158): unsure at all n locations; Clone ID: 701046713H1
gtagcagtggcggggttagctacagtgaatccatgggccatggcggctgcatttgcaactacaactgcaaacacntgagactgccaatgttggagaaagcaaaagtttgcagctccgtaagtgtaaccctaatcccaataagcttaaggttatgcggg

SEQ ID NO: 18184 - DNA, 294 bp, Glycine max
  unsure (1)..(294): unsure at all n locations; Clone ID: 701046714H1
ctctaggcctgccctctctccctagggtttgtttcacttatgccttcccaactcctcagcctcagtctttcagaagttgaatgtagatgatacggaaggagagaagttgccctgtcctgtcggtggctctgatctctgtaaatgctcaatgctctccatcttgcatttttgtttggtagaatagtttgtttctgaaagtaaggtgataaagcatggagtttttgaaaatcaaaaagttcagaaaatctcagaaagcanatggagaaaaggnttgggcagacaaggcagtgcctg

SEQ ID NO: 18185 - DNA, 154 bp, Glycine max
  unsure (1)..(154): unsure at all n locations; Clone ID: 701046715H1
ctctctcccgaattattgttcgttcgacccttttacttagtattccctgtttccggtattcgctcccgttcnttctgcattcggttntacttagatctctgtcccgcaccagatctggtgcagggtgagagggttgggttcatnaattttgtat

SEQ ID NO: 18186 - DNA, 299 bp, Glycine max
  unsure (1)..(299): unsure at all n locations; Clone ID: 701046716H1
gcagagagaggcagagatgcaaggaagcgcagtgacggtgaagccttggatttcgagcctgaggacgattgantgantggaccgaggacggcgcccccgacgccgacgcttctccgcctcaacctaagctcaaatnnnnnnnnnnnnnnnnnnnnnnnnnncaaaagaccaagggtcgcggattccggcaggacaccgacgccaaccgcgacactcgctctccggctccgacttcgactctcttcaccaccgagggcggccctggcccttcaaagatccattgaaggatggatcattct

SEQ ID NO: 18187 - DNA, 171 bp, Glycine max
  Clone ID: 701046717H1
ttcttctctggttgattcggatctagagtcttcagtttctcctcgttgttcttcggttttccctgttttcaatttcgattctttcgttaatttaataagatgtttgggagggcaccgaagaagagcgataatacgaggtactacgaaatcctcggcgtctccaagaagctt

SEQ ID NO: 18188 - DNA, 296 bp, Glycine max
  unsure (1)..(296): unsure at all n locations; Clone ID: 701046718H1
attttcacatctcatttttctaaattcttttttacanannctccattnaattaattacattccccataattgtaattaattctaggtacgttagccatgaagagacagagagatttcnaggggtttgagagcatagatttggcaaattgtctaatgatgctctctcatcccaacaaaataagaaactacttcaaacaaaaattgaggctgtgaaatttgagtgcaagacatgcaaccgcaattctcttccttcaagcntgggtggccatagggctagccacaaaaggtcgaacttg

SEQ ID NO: 18189 - DNA, 300 bp, Glycine max
  unsure (1)..(300): unsure at all n locations; Clone ID: 701046720H1
gtggaaagtagacacagaaagaaatgccatcaacagngaggggntcacgggattgttcgaaggatggcaagtcttcctcgaagcataatgggagggatttcaagagcaatgggggatggaatgggctttnnnnnnnnnnnnnnnnnnnnnnattagcacacaaatattcctttgcagcctcaagaccatcatgttccacaaccacatggtcaagtagtagttcaagatgaatggagttttctagagagttttgagtagcaatttggcaccaaacacccttcttctatgctttccgtttcg

SEQ ID NO: 18190 - DNA, 304 bp, Glycine max
  unsure (1)..(304): unsure at all n locations; Clone ID: 701046722H1
ccaatataactctttcttgtaactaaagccaaacgcgatattctcnaacgccttccattgaattgattcgatattatcccaatttccacaaaccccaacctcgctttctctgtcatccaattcacaccgccatggatcccaaccccggaaccttccctctcctctcctacatcatgtcgcgctcccttccctcactccnagaccggggggcccnggaaccctccgattccgacnantcggacatcgaacagccaccggagatgtgggccaaatgccgnaacctggcggacccggaggtggtngg

SEQ ID NO: 18191 - DNA, 286 bp, Glycine max
  unsure (1)..(286): unsure at all n locations; Clone ID: 701046724H1
gtccaagcagcctccaattcgtgccactctcttcaaaatggccgttacctttcncnaantctccacacagaatncaggtctcaagtccctcgacgacttcctctctgggaaggtctacgtttctggggatcagttcacaaaggacgacatcaaagtgtatggtgctgttttggagaagccaggtgactcttttcccaatgctgccaagtggtacgaggttgtctcatctcagcttgctgcaagtttccccgggnaatgctccaaggggtgaagnttcangggcnaa

SEQ ID NO: 18192 - DNA, 293 bp, Glycine max
  unsure (1)..(293): unsure at all n locations; Clone ID: 701046725H1
gcagaagacgtatcttccgcccgcaatcttgagtttnccgccgcgaccgtgcatggcggcggccagggangaagcngaaccangncatgtttggagcaattgaccagctgctggcaaagactggtgtgaaggctaaggatattgggatcttggtggtcaattgcagcttgttcaaccccacaccttcactctctgccatgattgtcaatcactacaagttgagagggaatgttttcagttataatcttggtggcatgggttgcagtgctggccttatctctatngacctgcca

SEQ ID NO: 18193 - DNA, 152 bp, Glycine max
  unsure (1)..(152): unsure at all n locations; Clone ID: 701046726H1
gtcaatttcattgtctctgacataggtcagtttttaaaacnantattganttntnttaaaagaatggacntannagntacccnctataaagttntancctncattggggggcaaatcttaaagccactncactaagagtatttttattnaca

SEQ ID NO: 18194 - DNA, 169 bp, Glycine max
  unsure (1)..(169): unsure at all n locations; Clone ID: 701046727H1
aattggagggttcttgactcattgtggatggaattcaactatagaaagtgtttgcnctgggggtgncnatggataacatggcctttgtttgctgagcaatttttgaatgaaaaatgcattgttgaagttttgaagattggagtcaggataggggtcgaggtaccagtaa

SEQ ID NO: 18195 - DNA, 291 bp, Glycine max
  unsure (1)..(291): unsure at all n locations; Clone ID: 701046728H1
cgantaacaacaatggtggcgggaactgcaaccttgaagcttagcctctccgcttttncttctccaatgtccaanttagcgcttcctcttcatncccctctcgtntcccaatgcgaaccccttcttcttctaaacctcgatttctcaggatttacgcctgaccagcaacgacatcaaggtcgggnancaacctcgaagtcgatggtgctccttgggcgtgtgttagagtttcttcacgttaagccgggaaaaggcgcggcgtttnatnaagacaagnatgaagantanatt

SEQ ID NO: 18196 - DNA, 270 bp, Glycine max
  unsure (1)..(270): unsure at all n locations; Clone ID: 701046729H1
gtaatttcactttttaattttcaantccattttctttactatgcttttactttactgtcnatnctccttcgtaactgccgcaaaaatcctgttcttcggattcgcgttgcgattcggtctagggtttcagttcaacgcgcacgaatccgattgcggaatttccagctctgtatttcggttgttacgtgtcgtttgaaaaatgcatgtccctgtagatccatggcgagcttctttactctctgaaatggcgaggtacaccggttagatggt

SEQ ID NO: 18197 - DNA, 288 bp, Glycine max
  Clone ID: 701046730H1
attttaggtcggtaaagctggtggtgacaaatggaaatcgctgtctgatgctgtgagtattaagattttgagaattcttttttcattattagtttttgcgtatggttctatatgatttaatttattgaccatatctacttatttgtaacctagtttgcgtcatttaatgtttcaggaaaaggcccccttcgttgccacggccgaaaagaagaaacaagagtatgagaaaactattttggctacaataagaaattggtgaatacttttaccctatactacttactctta

SEQ ID NO: 18198 - DNA, 235 bp, Glycine max
  unsure (1)..(235): unsure at all n locations; Clone ID: 701046731H1
gaccatgacgaagggactagaaggtgattgctctggtaaggtcgaagcagaccagaagtgaaaagaagagtcgcaaggcaatgcttaaacttggaatgaaaccngtcacaggtgtcagtccgagtgacagttcaagaagagccaagaatatcctgttcgtaatctcaaaaccagacgttttcaagagtccaacatctgacacgtacttatattnggggaanccaagattgangcc

SEQ ID NO: 18199 - DNA, 228 bp, Glycine max
  Clone ID: 701046732H1
gagaaaggaaagatggcaaagttataaaattctttgagttgaacacaggggccaagattccttctgttgggttaggcacttggcaagctgagcctggtgttgtagccaaagctgtcaccacagccattctggttggatacaggcatattgattgtgctcaagcgtataacaatcaagcagagattggttctgctcttaagaagctttttgatgatggtgtggtgaagc

SEQ ID NO: 18200 - DNA, 294 bp, Glycine max
  unsure (1)..(294): unsure at all n locations; Clone ID: 701046733H1
ggcagtattcacggaatgtgagtcaaacacgctggatcattgatgatgaaagaatgggagaagcatcagttgaggaaataattggtggaaacatcctccaagcctgccaaggtccggatgttgggtccaggcaggccatttcttgttgaggtgcaaaatggaaacatatcccgtctgaactgtttgtaaaagatatagagaaaacgataaataaaatggagaataaactggttacggtgaaaaatctgaaacttgttggtagtgatggatggnaccttatgcgtgaaggtgaag

SEQ ID NO: 18201 - DNA, 294 bp, Glycine max
  Clone ID: 701046734H1
gcgaacgtggtgaagtgtcacgagatgtacgatcagaacagcgaaatccaggtgctgctgggagttcatggacggaggttctctggaggggaaacacatcacgcaggagcagcagctggcagatctgtctcggcagattcttagggggctggcgtacctgcacggcggcacatcgtccacagggacatcaagccgtcgaatctgcttataaactcgcggaagcaggtgaagatcgctgacttcggggtgggtcggatactgaatcagacgatggatccgtgcaattcgtcggtg

SEQ ID NO: 18202 - DNA, 297 bp, Glycine max
  Clone ID: 701046736H1
accaccacgagtttctctatctgctttcttcacaaagagtaactcagtctttctaaaaaattttctcaaaaccattattattctctaatctttcgtttcttcaattaattaattggtttcttgctatggctgtggactctgcgatttcgtccccattgggtcccccgcctgtgagaaggacgcaaaggcgttgcggttcatcgaagaaatgactcgcaacgccgacgccgtccaggagagagtcctggaggagattctcacacgcaacgcccagacagagtaccttaaacgcttcga

SEQ ID NO: 18203 - DNA, 295 bp, Glycine max
  unsure (1)..(295): unsure at all n locations; Clone ID: 701046738H1
cattctttggttgttctctatttgcgttttctcatttttctttctttccgttctcttccgtggaacgagtagtagaaacttgaaatcaaaaggcagcgggggaaaaagaaaagagagaagtagggttcgaaaatggcagcagaatctcagagggcgaagaagaaaccaagttaagcggangtaaccaattgctcatagttgacgatgactaacggaaatgggaaagaaagccgcttgggagcgtgantcctgcaaacccgntaacggcggttcctctctncgtgacgacnattcc

SEQ ID NO: 18204 - DNA, 155 bp, Glycine max
  unsure (1)..(155): unsure at all n locations; Clone ID: 701046741H1
ctctgaaaaacctgatttcttctcttcttctcttctctttcgtttcgatcttcgatctctgaaaatgagagagnggatttncaatccacatcggtnaggccggtattcaggtcggaaacgcctgctgggagctctactgcctcgaacacggnatt

SEQ ID NO: 18205 - DNA, 291 bp, Glycine max
  Clone ID: 701046743H1
cttcagcgcaactgaggaagacgatcacggagtgatagttagtgagttaccgagttaaggtttccaattccaactcactgagtcaatcttacattttaaattttttattttctctttttcaccggagaaaactctgctccgatcccttctttcattgttttcgattttccggcgagtttttacgtattccggtgacactaggggaacataaatcgattctttgattacgtgactcggttttgacttcaaaagtctttactgaaattttctacttgctagattggcttgaat

SEQ ID NO: 18206 - DNA, 153 bp, Glycine max
  Clone ID: 701046744H1
gtttccactacttttcttcccttctttccagaacaacaccacaacacaaacagagcaaaaaagctccaccaatgggcgggttacagagcggacgacgactaggactacctcttcaaggtggtcctgatcggcgattccggcgtgggcaagtcc

SEQ ID NO: 18207 - DNA, 252 bp, Glycine max
  Clone ID: 701046745H1
gaaggatatgggatgctgtctactctgagaactgccccaaatatccgtctcaggagttatgccaagaggaaaaggattttgtataaattgatatctggtcttcactcctccatatcaattcatatagcttctgattatctacttgaggaagctacaaattgtggggacaaaatcttactttgatgtatgaccgagtcctaagataccctgatcgtgtcagaaatttgtatttcactttctcttgttctgcgg

SEQ ID NO: 18208 - DNA, 289 bp, Glycine max
  unsure (1)..(289): unsure at all n locations; Clone ID: 701046746H1
anaattttcaaaggctttcaaagagttggttgccacctgcttagtaaaagacccaaaaaagcgtccaagttcagaaaagcttttaaaacaccacttctttaaacaagcacgtgccagcaaatatttagctcgcaccattttagaaggccttgctcctttggagatcgttttagaatgctgaaggctaaagaggcggatttattggtgcagaacaaggctctttatgaagataaagatcaattatctcagaaagaatatnttcgaggnattcagtgcctggattttaacc

SEQ ID NO: 18209 - DNA, 289 bp, Glycine max
  unsure (1)..(289): unsure at all n locations; Clone ID: 701046747H1
ttgccacatgcaatggtggtcctgctgagatcattgtgcatggaaaatctggttaccacattgatcctttacccatggtgaccatgctgctgagatccttgttgagttctttgagaagagcaaggctgatccatctcactgggacaaaatctcccagggtgactcaagcgtattcatgagaagtacacatggcaaatttactcggacaggctcttgacactcactggtgtgtatggcttctggaagcacgtgaccantcttgaacgccgtgagagcaaacgttacttcg

SEQ ID NO: 18210 - DNA, 288 bp, Glycine max
  unsure (1)..(288): unsure at all n locations; Clone ID: 701046748H1
agatgatgccttcttcgattccccagtatgtgactnangccttcactgggcccatgncggacccaccgggcctnagctcaaganggangggctcaaggtgaagcaccctgtggtttttgtgccagggattgtcactggtgggcttgaacactgggaggtcaccagtgtgctgaagggttgttcaggaaacgcttgtggggtggtacttttggagaagtctataaaagaccttcatgctgggtgggatcacatgtcactggacaatgaaacaggattggatccaccagg

SEQ ID NO: 18211 - DNA, 228 bp, Glycine max
  Clone ID: 701046749H1
atctgtgacgagcatcatggcctcgagagcagtgctattgttggctatgtgtgtgcttccggccatggttgtggccattcgcccagcaaagaacccttttgcgtgaagggtcgcgtctactgtgacccttgccgtgctggttttgagacctcagcaaccacctacattgccggtgctgagattatgttgcatgcaagagcagggttagcaaacgaggttgtgtacacc

SEQ ID NO: 18212 - DNA, 290 bp, Glycine max
  Clone ID: 701046750H1
aagaaactggacccaaagtaactgcatgaggcttagagatgaacccattttaaagaatcctacctaccaacctaagagactggacccaaggccttagctttaggtcagttagatgatatgtttgcatcatgttatccgtagcttcaactttctgtaacttctgtataggcaaaggtttcaaaccttcaatctatccttctcttgctttgccaaaatgttatggtgaatagggaaggaaaaagatggaaaaaaatgtgactgtttcatgtactgatattgtaaaagctgct

SEQ ID NO: 18213 - DNA, 292 bp, Glycine max
  unsure (1)..(292): unsure at all n locations; Clone ID: 701046752H1
gtagaatggctcgttatcttgcaaacaaatgctcnattgnnnnnnnggnttnactgcttttctgaaaagggtactactgtttttgggcagaaactccgtgagcaagttgaggaacgacttgacttttatgacaagggagttgcccctcgcaagaacatagattcatgcaggctgctattgaaagtgctgaaaacaaagatacagagatggaaacagaagcacctgctgaagtttcaggcaagaaaaccaaaaagaagaaacaaaaagctgctgatgctgaagatgacgtggc

SEQ ID NO: 18214 - DNA, 291 bp, Glycine max
  Clone ID: 701046754H1
gcgagcaaaggctcaagctgctgggcgtggagctgcacctggaaggggtgtaccaccagttgcggaggtgatcaccattcatataatttgtattctccctgtctgttggacatgtttatgtgacaaagaaattcgaacagaaactgagtaaagacattacagatactctttatggatagtacttgatcccaaatttgttctcatcatctctagtattttgatctgcactgtgtactacttggctaggaggatttgtagaaggaatatttgttaaaatggtacaagatagta

SEQ ID NO: 18215 - DNA, 296 bp, Glycine max
  unsure (1)..(296): unsure at all n locations; Clone ID: 701046755H1
gttactacaaatgcgtagcccgggttgtccagtgagaaaacatgttgagagagctttcacctgacangnaaagcggtgattacgacttatgangggaaacatatccatgatgtaccattaggacgaggaaactcaagctatagcatgaacagaaattctctaaacaacacctccaacaacaccaacaccagcaatgtaacagctcctgctcctataaggccctcagcactgactaactattctaactcagcaagtttcacaaactcacttcatgacacaaagcaaccaacatctgc

SEQ ID NO: 18216 - DNA, 289 bp, Glycine max
  unsure (1)..(289): unsure at all n locations; Clone ID: 701046757H1
cgganacctctcttcaggtcgccatctagactgcaatcatgggctgatggaccacagcatccatcagtgttcaagaagcntagctggacagtccttacctggtgtccaggctaagccccaactttaactctgggaattattcctcgactggttcttacttcaatggaggactgcactcttctgggttggctgttgtgtcgcctggatctccagttactgtgcatgctccagcagagaaaggagtgagtggatttctagtggattttctgatgggtggagtgtctgctgc

SEQ ID NO: 18217 - DNA, 153 bp, Glycine max
  unsure (1)..(153): unsure at all n locations; Clone ID: 701046758H1
ggagggagccgtagcagcggaagctctagcttgggtagcgaatcacaatggcgagagngattaaaggaagctctggaagaggcttaatgccccaaagcattggatgcttgacaaactgggtggtgcatttgctcctaagccctcatctggacc

SEQ ID NO: 18218 - DNA, 251 bp, Glycine max
  unsure (1)..(251): unsure at all n locations; Clone ID: 701046760H1
catgatgactgttgaagagaagccagatgtaacatataatgatgttggcggttgtaaggagcagattgaaaagtgcngagaagttgttgaacttccccangcttcatccagagaaatttgtcaagcttgggattgatcctccaaagggtgttctttgtatggccccccaggaactgggaaaacacttttagccagggctgtggctaataggactgatgcttgttttataagggttattggaattgantaat

SEQ ID NO: 18219 - DNA, 284 bp, Glycine max
  Clone ID: 701046761H1
tgtgaatcgacgacgtattttggtgcgtgcaggtcccggtgttagaattggggtttccgtttcgattgtacctaccgggccaacttagggtgcagtcactctcgatctcaccgatcaccaacgtgccttcttctcctcaggttcccttagtcaacttcggttttttgattgttgaggatggtgctggttttagccctgggggatttgcacataccccacagggcacctgatcttcctgcaaagttcaaatccatgcttgtccccggcaagatccaacacattat

SEQ ID NO: 18220 - DNA, 285 bp, Glycine max
  unsure (1)..(285): unsure at all n locations; Clone ID: 701046762H1
aagagatcagtggtagtgtggtacattgtgttgatcaaggatggaacaaaagaagtttgtggcactattaannnnnnnnnnnnnnnnnncttcttctatgtggaaaggatccaaaggtcttagtctctgtaacatggatgaagatggattggaggttgcaagccctcagtgactcagccaaacccagttgatccatcccctgattgctgcaaggctctggatggtgctgacttgaagtgcctttgctcttanagnacccatcagagttgcccttctaggaattgg

SEQ ID NO: 18221 - DNA, 287 bp, Glycine max
  unsure (1)..(287): unsure at all n locations; Clone ID: 701046763H1
acagaaacctcacatacggttttcttcccgaaaaccaaatcccagacaacatgactaaggtgttcagagattcctttgcgaggtgggcccaagcttcggggactttgagtctcacggagacaacctacgacaacgccgacatccaggtagggttctacaacttcactgccttgagaattgaagtggaggtgtatggtggcagccttatatttttgcaaccggattctagtaagaaaggggtggtncttatggacggtaacatgggctggttacttccaagtgaaaag

SEQ ID NO: 18222 - DNA, 292 bp, Glycine max
  Clone ID: 701046765H1
tctctctctctttatcataacatgatgatgctgattcatgtgaatttatgcaggtatctctcgtgattccatgcacaagaggcgcgccaccggcggcaagaagaaagcttggaggaagaagagaaagtatgagcttgggaggcagccagcaaacacaagctatcaagcaaccaagacggttaggaggatttagggttcacggtgggaacgtgaagtggcgcgctttgagggcttgatactgggaactactcttgggggagtgaggctgcaacccgcaagacaaggattcttg

SEQ ID NO: 18223 - DNA, 287 bp, Glycine max
  unsure (1)..(287): unsure at all n locations; Clone ID: 701046766H1
aaatggtaatgcctggacaccgtgagtcaaacttgcagaaagagctgaaccgtacattncccacggccgcagcatttggaggcatctgtatcggtgctctgacagtgttggcagacttcatgggggccatcggttcaggaaccggaatattgcttgcgtaacaatcatctatcagtactttgagacatttgagaaggagagagctagtgagcttggcttcttcggtttctaagttctgccaagcaaataatgttggttggtgactccaacgagctctcccacacccc

SEQ ID NO: 18224 - DNA, 291 bp, Glycine max
  unsure (1)..(291): unsure at all n locations; Clone ID: 701046768H1
cacgagactcatacattgtgctgccaatttatagtaatcntctatttctcctttccatctctcaagttctgaagaagaaacatgtgtggaggtgctatcatctcagacttcattggtgtgaagcgtggccgcaacctcgccgcgcaggaactatggtctgagcttgaccctttctctgacttccttggcttcgataccaccaattccaaaaaccaaccacccctgcagaaaattccagacaaaaaagtggtgtcatcatgtgagaagaagaagaaaagcgtggtgggtgca

SEQ ID NO: 18225 - DNA, 295 bp, Glycine max
  unsure (1)..(295): unsure at all n locations; Clone ID: 701046770H1
anaaccctaaagtgagtgagtgatggaactttcagacccctttgttgcgctcttccctctcaaccacttcacttttccaatcatcgtattctatcagtgagtaaaccttaaccgacaccttcgaatcaatttttctttgttaccattctaacccttctctgaaattcccgattactattcaccaactcgttaatgttatattcgcagtcaccagcggttggaaaccaagcntcccattaacaaancaaanttcatagatttcggttcggaaacccctcaaaatgtttaaaatggg

SEQ ID NO: 18226 - DNA, 290 bp, Glycine max
  Clone ID: 701046771H1
atcgattctctcccttctctttctctctgcgacaccagatgatggagacgacggcgaacgaaaccgctgtcgttgcgccaatcgcggcgttgttgttggtggtgctactcgcggcgagtgtggtggtggaggctcaggagaactcggacgtgaagacgctgtgaagcacatgcacgggaagaagtactgcgacaaaggatgggaatgtaagggctggtcaatttactgttgtaacctcactattactgattatttccagacctaccagttcgagaatctcttctccaagc

SEQ ID NO: 18227 - DNA, 163 bp, Glycine max
  unsure (1)..(163): unsure at all n locations; Clone ID: 701046773H1
ggcatctggaacttcacaaatcctggggccgtgagccacaatgagattcttgagatgtacagggattacattcgnttccaagcttcaatggggctancttcaatcttgaagagcaagccaaggtgataattgctgcacggagcaacaacgagatggatgcatc

SEQ ID NO: 18228 - DNA, 151 bp, Glycine max
  Clone ID: 701046774H1
ctagttattgaggatggtgaagtagttcatctcaagggatggtggggtttctattttgaaatatgagaatggcctggggagaacatggcgcttcctcctttccagagctttctcagtgcgacgtgcattatctgttctagagatggaggtt

SEQ ID NO: 18229 - DNA, 141 bp, Glycine max
  unsure (1)..(141): unsure at all n locations; Clone ID: 701046776H1
ggggagatcaatggtctggttgantatgtctctgggggtccccaacctggaggcatgttcttnccanntgactcatgggaattccatgctgtnaagcttggnaatgatgcctcaatctcccaaagcatcaaggtcaaaccc

SEQ ID NO: 18230 - DNA, 285 bp, Glycine max
  unsure (1)..(285): unsure at all n locations; Clone ID: 701046778H1
ctcatatccttatcctgtttctttcaatggaagtcatttctgcttctagcttgaatcccaacggctccgatgttcgtggccactcgcctatcggacggtggaggatttctccgaccagtggtggaacctcgttcactcctccccctggttccgcgactactggctccgcgagtgcttccaagatccccagttccaaaacgacgacgctttcgacttcgactttgacctagatctccaagatgaagatgaaaaggancgaaaggaagggaaggaggtggtgtcttg

SEQ ID NO: 18231 - DNA, 151 bp, Glycine max
  Clone ID: 701046781H1
gtgagggtggggagaggaaaagaggcgcacgttttatgctgcgtgtgcaagaaatcaagaagcttcggtgaagaggccgaaaaccctagagcagatatgcagggagtgcttctacgatgcttttgagtctgagatccatcaggtaattctt

SEQ ID NO: 18232 - DNA, 285 bp, Glycine max
  unsure (1)..(285): unsure at all n locations; Clone ID: 701046782H1
tagcatgtgatcaacatgttcagacggatactctgttggacgatgaatntccaggagacaagaagccctgggatggtatcggaatcttcgaaggcaaaggttgcaaaactggtggatggataccttgctgagattgcacgtgatccaaatttaccctttcaaaatttgttaatcttgctgaattagtatcaagctttccaagagcatttcatgatggcctttatcgtgcgattgacatgtatttaaaggagcaccctggaatcagcaaaagcgaaaagaaaagat

SEQ ID NO: 18233 - DNA, 162 bp, Glycine max
  unsure (1)..(162): unsure at all n locations; Clone ID: 701046784H1
cataaaccctacttctacttccctttgttctcaaacctntancccttatcctcccaaaaccanaccatgtctacctccgcagcttctctcgcactcccaaccctcactctccgaactcgacaacctctctgttctccccaatgcttctcctcgtcccttccc

SEQ ID NO: 18234 - DNA, 284 bp, Glycine max
  unsure (1)..(284): unsure at all n locations; Clone ID: 701046786H1
gtggtcctcgcgctcggtggctttccgtcgcctccacgcactttatctcttcctctctccaaacctcaanaactacaacaactaacatcatcttcatcctcttcctcttcctcctcggcctggggccccaccgtaccgcagatgattcgatcgaaacgctacgtttggggaaagacgaggttcacctctctctttcgctcctctctattcgctactacgagaagatgaatttcaataacagaaccaccagatgatgatcatcttcttccataatccatccacca

SEQ ID NO: 18235 - DNA, 164 bp, Glycine max
  unsure (1)..(164): unsure at all n locations; Clone ID: 701046787H1
accaatttccctctttcttttgtgtgtaatgtgtaaaaccacgtcgntttgcaaaaacaaattttggaaactcataanantgggtaaggttaccctctgaagtctgaactgaacacgatccagagagaacccctgctccttaacgacgccgtttcgcaagcatc

SEQ ID NO: 18236 - DNA, 152 bp, Glycine max
  unsure (1)..(152): unsure at all n locations; Clone ID: 701046788H1
ctcataacacaaagcacaaagcaaagctcatccttgagttaaaaaatggcagcagntttnttcnatggnctctcatccccatccttggctggcaaggccgtgaagctgggcccatcagccccagaagtgggaagggtgagcatgaggaagac

SEQ ID NO: 18237 - DNA, 280 bp, Glycine max
  unsure (1)..(280): unsure at all n locations; Clone ID: 701046793H1
caacactttccacttgtctccgaattagttatcttgagaaacattattcccattgctatatatatggctagcatgaanggttacatgggtggttgtgatcatgtgcatggccgtggtgggtgcaccgatgatggcgcaagccatggacatgcaatgatgtgacggtgaacatggcacagtgcctatcctacctgatgcagggaggaacaccttcaacactttgctgcagcggagtcaagaacattcttggctctgctgtcaccaccgttgacaaacaaat

SEQ ID NO: 18238 - DNA, 167 bp, Glycine max
  Clone ID: 701046794H1
gtttgttttgtgctttagataaaagttctgccaaatcaagaggggttttaagatcatagtgtgtgttttgcaaccaatggctaagttctttgctgctatgatcttggcactctttgccatttccatacttcaaacagtggtaatggctgctatgaacaaggaggcca

SEQ ID NO: 18239 - DNA, 155 bp, Glycine max
  unsure (1)..(155): unsure at all n locations; Clone ID: 701046801H1
aagattcctgtgcatattcaggggaaaaagcctggtctaatatgcctgtaacaattccanttccttcagcccaaggggcgctaaaaggaaaaggactggaagagggacttcatctttctctaaacaattatttggtggatgcacatgtttacaac

SEQ ID NO: 18240 - DNA, 280 bp, Glycine max
  unsure (1)..(280): unsure at all n locations; Clone ID: 701046803H1
ttccactatcattatttgcccattaaanatcaatttttagntctcattttcatttttttgcaattcctcncacacncaccatccaattcccgtctttgatattttgatcacagagagagaagagggtttgtttntgggttttggaaatttcagcccccatcaaagaagaagccccataatcttcgaatcgaaggcatttgattgaaaggtcgaaactttagcatctgggatcgcgnattggggttttttttggtnaaaagggtntcttncgggaattcag

SEQ ID NO: 18241 - DNA, 275 bp, Glycine max
  unsure (1)..(275): unsure at all n locations; Clone ID: 701046804H1
atcctcttctttcatctttctccctaacggtatcgagggaaaaatatggcggaagaacacagatgccaggcaccgcgcttctgcgccaacaattgcggtttctttggcagccctgccacgcagaatatgtgctccaagtgctaccgcgatttccagctcaaggagcagcaatcttccaacgccaagatggttctcaatcagtcgctggttccttcaccgccaccggggtgatttctnagccgtcgtcttcttcttcggccgcggtagatccgtca

SEQ ID NO: 18242 - DNA, 286 bp, Glycine max
  unsure (1)..(286): unsure at all n locations; Clone ID: 701046805H1
ccaaatcccagataccacancacaacactacactttggtcgtgtttcatcttnttcnccgagaaagagncacccccacgtttcactttcactttttattttctggctttgggaaatgatgccattgtngtcccttngcaaagcaaaaccccatcatcagagncnagtccnattnctggcntnccnctnccgccccttntgngcncgtaagagtcctccggattctgaccccggggcacgtgacgggtgttccaaagggttnggnnnttttgggcnatgggnaaaag

SEQ ID NO: 18243 - DNA, 183 bp, Glycine max
  unsure (1)..(183): unsure at all n locations; Clone ID: 701046806H1
aatcagaaaaaaaaaaccctagtaatgccgccgatggggangaagcgnaaggtagcacccaaatcttctctatcccacccgngccacctctccaagcagcaacaaccaaaacccgaaaatccccctcaagaatacgaagaagtcgaagaggaagttgaggaagaagaggtagaggaagaggtc

SEQ ID NO: 18244 - DNA, 277 bp, Glycine max
  unsure (1)..(277): unsure at all n locations; Clone ID: 701046807H1
gcccaagcnaagcccactccgaaaaatgtttgcngtggcgtccatngcngccggcatacagtttnnggtgggctctncagctctctcttctaaccccctacgttcagcttttaggagtcccccacgcggcggcntccttnatctggctctgcgggcccatttccgggctcgtggtacagcccattgtgggaaatacagngacaactgtacctccngnttggtccaagngccccttaattaccgggggccnttnanaannccggtnannttttttnca

SEQ ID NO: 18245 - DNA, 282 bp, Glycine max
  unsure (1)..(282): unsure at all n locations; Clone ID: 701046808H1
cttctcttgcggctagggttttagcgcacttcttctagatnnaaggaagatgggtaaggaaaangttcacatnagtattgtggttattggccatgttgactctgggaagtccactnccactgggncacctgatctncaagcttggaggnattganaagcgtgttatngnnaaatttgananggaantctgctgnaaatgannacgaggtctttcnaggtanccntggggtgcnngaaaagncttagggcctgaccgtgnaaagnggtnntcacantttnttt

SEQ ID NO: 18246 - DNA, 274 bp, Glycine max
  unsure (1)..(274): unsure at all n locations; Clone ID: 701046809H1
gaacaatatacacttccaaaactctatgtgaagatgcagtactgtgtttcctgtgctatccactctcatgttgtgagggttcgatcccgcaccgacaggaggaagcgtgagcctccacagagattcatcaggcgcagggatgatgcaccaagacctggtcagcccggtcaaggacctcgtctgcgggcacagcagcagcacctgtccgaaccnanaagcaagtcctaaggaataagcttgatgttatgctggaccaaatttatnatataacttt

SEQ ID NO: 18247 - DNA, 276 bp, Glycine max
  unsure (1)..(276): unsure at all n locations; Clone ID: 701046810H1
gcagcatctcttggctgctgctgatctctataatcttgatcggctcaaactgctttgtgaatcaaaattatgtgaagaaatcaatactgacaatgtggccacaacacttgcgctggcagagcaacaccactgtccacagcttaaggcaatctgtttaaaatttattgcaaatcctgcaaacttgggagctgtaatgcagtcggaagcttttgtgcatttgaaagagagctgcccctcaatgctgttggantgctggagacattgcatcagtgggat

SEQ ID NO: 18248 - DNA, 157 bp, Glycine max
  unsure (1)..(157): unsure at all n locations; Clone ID: 701046811H1
gtttggnttgattttagggtatgatgngnatctacatccacatttngttggccgatgtgggagctntcgaangtgtngtcgtgggccagggangttggcgtcgtacataagtcctcggtggtccccacggaggttactaaggtggtcggggatgatc

SEQ ID NO: 18249 - DNA, 274 bp, Glycine max
  unsure (1)..(274): unsure at all n locations; Clone ID: 701046812H1
gaagacgtgaaaatcctggtgaacatgaggntatgcgtaaaatgaagaatgaattcatggntanttgggatggtttgagaacacaagataaagagcgtatacttgttnttgntgctacaantagaccttttgatcttgatgaggcngttattaggagacttccacgaagattgatggttatttgcnagatgctccaatagaggaaaattgtcagagttnttttngcaaagaagatttggcacntgatgttgattttggaagcntngcaaatgng

SEQ ID NO: 18250 - DNA, 284 bp, Glycine max
  unsure (1)..(284): unsure at all n locations; Clone ID: 701046813H1
acctcttcttcttactctcttacgttaattcttcgttgtctatgatggcattggatatgattgatgttgttccccaggacgaggatggaagaagaaaatatagcaatacaagaagcagcttccgctgggttaaagagcatggagcatctcattcgtctcctttctccttcttcttctcttcacaacaaccttantaatctcaatctcaaccacctccgactgctccgaaatcaccggcttcactgtctccaagttcaaacaagtcatcaaccttctcaaccgca

SEQ ID NO: 18251 - DNA, 286 bp, Glycine max
  unsure (1)..(286): unsure at all n locations; Clone ID: 701046814H1
ttngcagccgtttttnctgttggtgtntgaaggtggtgnagngagaagangnaggagagtggtganggaccaggatatnagcgaaaggggtggagtctctgctgcgtcactctgacccatactccataactacggttaacggtgtcgttcagcagctggaggccaaactagggttagacctctctcacaaggccagtttcnccngggaccagatcgaccatcntctccggtcacagcccacgggctttgttccnnnaccctcctccacttcgcnagactgttttgc

SEQ ID NO: 18252 - DNA, 285 bp, Glycine max
  unsure (1)..(285): unsure at all n locations; Clone ID: 701046815H1
ctccctccatggaactacaatcttgtggggcttgctcaaagctattgaccgagagatcaacatggagcaaccagaagtttattgccaacagtgtcctctcagttgttgctgtactagtctgtggtcattcatatcatgcagaatgtttagaggctatgacatcagaggcagataggtatgatccagcatgtccaatttgtatggttggagataagaattgtcaaagttgttnnccanaaaaggtcttcgggctgaatcagagatganggccangnccccacaagt

SEQ ID NO: 18253 - DNA, 286 bp, Glycine max
  unsure (1)..(286): unsure at all n locations; Clone ID: 701046816H1
ggtgaatggtgtatagtgcgggagacagtagcaaatagaaccaagccaacaatgggtaccgacaagccaaacngggtcgggtngtttatatacatcactgatccgattcgtgttttcntctccggngcgtcgaaagacgcgactctntccgacgagcttcgacgaacatcctccgatctgctcctccaatcggatgtaccctacgcgcancttcgcgctgtgtggatggnntctgatccatccaccagacccgacttgacccgactcttttcgggcanncgcttca

SEQ ID NO: 18254 - DNA, 280 bp, Glycine max
  unsure (1)..(280): unsure at all n locations; Clone ID: 701046817H1
atccggngctgctagaggatgggaactagtgaatggcatatcgagcgaagatctagcttcgggcactgaatcccccttagcaagagangcaggaaatgtgcctgaaactgggtcactctctattgttgtgcttggcgcttctggggatcttgctaagaagaagactttcntgcacttttccatctataccggcagggattcttnccaggcagatgaagttcacnttttggntatgccaaggaccaaaatatctgatgatgantgagaaaccggtngcgtg

SEQ ID NO: 18255 - DNA, 270 bp, Glycine max
  unsure (1)..(270): unsure at all n locations; Clone ID: 701046818H1
gcttgtgcattgntctcaaaaacatgggattgaagtctntggttcatctgctagagatgttgccaagcagctgaaggtacgaactggcntcttntgcatgccatttccctattgacgatatatttntaagtaaagcagcagaatattagntaggnttgggttttagcnatctttagaagcagtatgctgtgtntaancagntgttgttttgngcntcgacccgctctttttgtnagctntaanccancttanttttaatggcntttgggg

SEQ ID NO: 18256 - DNA, 277 bp, Glycine max
  unsure (1)..(277): unsure at all n locations; Clone ID: 701046819H1
ttccgctttcgtttctcctccgaaaanccctantttnccnttcgctcttccccatganncacggcgtnnatcntttnncccactccgaaaatgtcgntccagggcngcgccagcggnnancggcaccgtggcggnggcgtcgacggcgagcctgaggntgcggctgaaccctaacaaggngcacaagcccgatggctacgaggacatgcattggatttnagccctgncttttcagctcgctggagaggtacatccctccgggcatgctccaacgtgg

SEQ ID NO: 18257 - DNA, 269 bp, Glycine max
  unsure (1)..(269): unsure at all n locations; Clone ID: 701046820H1
gntgtatcaacaagatacaaggagtcaatttccaagagcacaagagggtggaaggagagatggttctctcggaacaanantatgtctgacnttggatctgaagttaggcgagaagttaatgnagggattgnaactgtgtcacgnangatggancgcctggagaccagngacatnantggnggnatggcanttctgncccccagtaaatgtggagganggttcattcggganaaagtggncaanttncacacaagganagggggggcnnt

SEQ ID NO: 18258 - DNA, 272 bp, Glycine max
  unsure (1)..(272): unsure at all n locations; Clone ID: 701046821H1
gtggattccaatcctaaggaaaatatgttggtacttggttctagcgccctatgatccaatgcagtcaagccttctncaattccaccttggaggataagaatatatctgagattccaaacttcaagttacttttgaaacagctggttaccatggaggttatccaatggaccactctatgggatacatataagagtgattttgagaatgagaaggcctctgggaaatctttgggtgaaaaagcagcagaagatctggggcaaagataattgacc

SEQ ID NO: 18259 - DNA, 103 bp, Glycine max
  unsure (1)..(103): unsure at all n locations; Clone ID: 701046824H1
ggttcatgaacttctctgaggctgatgagctcttaaaacttgcagcagctncgcccagcaggtgcaagcttcatnttgtttaagctgccgaagacnattnagt

SEQ ID NO: 18260 - DNA, 274 bp, Glycine max
  unsure (1)..(274): unsure at all n locations; Clone ID: 701046825H1
gattatcctaagtctttgggaatagtgctgcaatggcttcaagtcaggaggaggtgacccttttgggagctactggaagcccatttgtgtgcagggttcatattgccctcaagttgaagggagttcaatacaaatatgtcgaagaaaatttgaggancaagagtgaactgcttctcaaatccaacccagttcacaagaaggttccagtgtttattcacaatgagaancccatngcnggttctcttgtgnttgttgatacattgatgaggccang

SEQ ID NO: 18261 - DNA, 277 bp, Glycine max
  Clone ID: 701046826H1
cacactgtcggcaacgcccacgttacgctccaaccgcgacggcgcgccacccatttcgcctccctacacaatgcagctccaccgtgtctccgccgcatcgaaactgagcctcacgtgcttcagcttcgccttgaaattcgtgctgttgtacgctgcggaggcacagcttcagcaccgcggccccgacctacattggtaccccggaaccgccacctggtacggcgaccccgaaggagacggcagcaccggtggggcatgtgggtatggaacaatggtg

SEQ ID NO: 18262 - DNA, 275 bp, Glycine max
  unsure (1)..(275): unsure at all n locations; Clone ID: 701046827H1
tttcacaattcacttcttttccagagagttagggaagaggaatagagaaagagaaagagaaagagcgtgaganagagaaacagcacaaggatggagctttctcaacttggttttctggatgagctacttgctccaagaaaagacactacttggagtaatgctttgtcaactgggttgaatgagttactactccctagtggttggagctttgactctttgatgagaaccaaggtttagctactttgaatccctcatttgctgcattttccactcca

SEQ ID NO: 18263 - DNA, 282 bp, Glycine max
  unsure (1)..(282): unsure at all n locations; Clone ID: 701046828H1
gcctgctatcctttcttgttactcattccacagagtgtatatttcttgggctactcaacaagtcaacaaaggctacaagtgcctttcttctgatgggaggctataaatttccaagaatgttttattcaatgaaatcctgtctattcctctatccctgactttatccccaaccatcttccacttcctcatctcttccttttccaccatttcttctcattctcacattgttctgcctccctnttcttccactggcctcttctgattgtcaggatgtcctcaaca

SEQ ID NO: 18264 - DNA, 279 bp, Glycine max
  unsure (1)..(279): unsure at all n locations; Clone ID: 701046829H1
cttcaatttccctttggatttcattcattaggtgagtacgtacgattacgatggattcgagttcggggcatcaagaattcgattatttgtttaagttgttgatgattggagactctggggttggcaagagtagtcttcttctcagtttcacctccgatgcttttgaagatctctcccccactattggtgtngattttaaggtcaaatatgtgacgatggggggtaaaaagctgaagcttgcaattgggatactgctggccaggagaggttcagaacact

SEQ ID NO: 18265 - DNA, 203 bp, Glycine max
  unsure (1)..(203): unsure at all n locations; Clone ID: 701046830H1
agctcattcccttccaaactgttcattctctttcattggcacacacaaatccaatgcnatccttttcccanaaccccacatcccaaataacatcaaggcctatagcataagtgatggaatcccagagggtcacgtcctaggcaaaaacccaactgaaaaattgaatctttttctccaaactggtcctgagaacttcacaaagg

SEQ ID NO: 18266 - DNA, 286 bp, Glycine max
  unsure (1)..(286): unsure at all n locations; Clone ID: 701046831H1
gaacaagatggaaagcactgtcacatttgagactgatctcaacctcaaggcaaccgagctttagattggggtntccaggaacagaagaaattgttgaaaaaccacttcctgcaagtgctagaattaccaacaaaaggcctttgtctgaaacctctgaggagtgtgcttcaaagggttctagtgctccacatgtggaaactgaagcagcccctcctgccaaggctaagatagtggggtggccaccanttcagatcctacagaaagaacagccttcaggagaatgatg

SEQ ID NO: 18267 - DNA, 284 bp, Glycine max
  unsure (1)..(284): unsure at all n locations; Clone ID: 701046832H1
ttcaatccctaatgcgccttctgcgttcaattctcagagctacgttggtctcagagcgccactgaggaccttcaacttttcttctcctcaagctgcnaaaattcctcgctcccaacgcctttncgtcgtcagagcctccgattcggagttcgaagccgccgttgtcgccggtaaggttcngcnggcgcctcccgtnccgcccagaccggcggctccggttggaacaccggtggttccntcacttccattcaccggcgtcctcgtcggaaccggaagtngccggc

SEQ ID NO: 18268 - DNA, 240 bp, Glycine max
  unsure (1)..(240): unsure at all n locations; Clone ID: 701046833H1
agaagagaatagggttagggttagggtttgattgaggatgccgaagaacaagggaaagggaggtaagaacaggaagaggggaaagaacgaggcggacgacgagaagcgggagctggtgttcaaggaggacgggcaggagtacgcgcaggtgctccggatgctggggaacgggcgntgcgaggcgatgtgcatcgacgggacgaanaggctctgcaacatccgcgggaatncccanaagng

SEQ ID NO: 18269 - DNA, 148 bp, Glycine max
  unsure (1)..(148): unsure at all n locations; Clone ID: 701046834H1
cccaccgcccaaatctgatatgaacagtggattttactttaacaattccatggtttttctttgnagctccaaatccaatggcaaccgttcgntcnaactcgnttaccgtcttcttcgtggcattcattatcctcnnaacagcaccatc

SEQ ID NO: 18270 - DNA, 271 bp, Glycine max
  unsure (1)..(271): unsure at all n locations; Clone ID: 701046837H1
ttcagcctttccctactgttctgcctcacgcactgtttctttttctttgcttcgctatttcaaacattcactccagtnnnnnnnnnnnnnnntgtttgtttcttctggaacagaatggcggtggtacttaaagacatgtgtttcttcaacaacaaggacattctggttataaagcctcagaagaaatcaccactgttgttaaggatgtcggtgttgatcttctcaatggtgtgtggtgttttcattgttccgtgtgtctaaagcagataag

SEQ ID NO: 18271 - DNA, 278 bp, Glycine max
  unsure (1)..(278): unsure at all n locations; Clone ID: 701046838H1
acatgtnaacgacaccatacgcngnttaagcctcaccgttcgaggacgaanaggntgttgtgtgcaagcgttgncacctncactgtcctgaaaccntcgtcaccatgtcaagggcttcttgcttgtggaaacattagaaggtttacacgttctgttcacaagacaggctgcttggnagtnttttcatccaatggggtccccttactcaagcatacaattttctctcgcactatagacatgtacacaaagaacaatttctattcatgtnatttaantca

SEQ ID NO: 18272 - DNA, 98 bp, Glycine max
  Clone ID: 701046839H1
gtacttgaagggttagtgaaactcgaattggaacttgaagtacaggtggtgaagggttagtgacaccccgaattccctccgacatgattgagttgcac

SEQ ID NO: 18273 - DNA, 97 bp, Glycine max
  unsure (1)..(97): unsure at all n locations; Clone ID: 701046840H1
gtcgctgcgaatctgtttacattccgagggatgagtcatttggtcacttgaagtcatcagatttccttgcttntatactcaaatctgcatctccaaa

SEQ ID NO: 18274 - DNA, 199 bp, Glycine max
  unsure (1)..(199): unsure at all n locations; Clone ID: 701046841H1
cttttgttctatgtctctgtgaagaagctcaaagcgttaaactnncttcttcttctttcaatggcggcagaattcatctcgcagtagcgctaaaacgcccctttatggaagaagaacgacgacgaattctccaaaaagccatcagcaaaaagggttaggtttccaaaggganagaaagtgaagccaggagatgaagtgg

SEQ ID NO: 18275 - DNA, 272 bp, Glycine max
  unsure (1)..(272): unsure at all n locations; Clone ID: 701046842H1
attcctaaaacagtgcagtgaaaatcacgtatttgcnatggagattctgtattcgaagctctacgacaagtacaccaaactcaagtctaaaaaactctccgatttggatcacataaacaaagaacaagaagttaaattcgtgaattacttgacggctgcggaagagttgatagagcacttgaagagcgaaaaggaaggacttcttgaacaagtcaatgagttgagaatgaattggcttcacttagggctgccaaagagaaagaggttgcggt

SEQ ID NO: 18276 - DNA, 273 bp, Glycine max
  unsure (1)..(273): unsure at all n locations; Clone ID: 701046844H1
tgnttgggcacacctttgaccaaangcggttggagnaaccactttacngtcacccgtgggaggatgttctctacacgaagtganganagttttgtgcgnctgtnagaanttggnatgcttcgnttggcatcttttgggaaatcatgcacatctgaaatctgctggngtggttttgtagctgttnagnntagtgttgtncganntnttggtgaaagnacanctnccnttgtnncttgttngaatttccatgagggggggganttggtcttttta

SEQ ID NO: 18277 - DNA, 276 bp, Glycine max
  unsure (1)..(276): unsure at all n locations; Clone ID: 701046845H1
anctctctttgccacactgatgtttacttctgggatgcgaagggccagactccattgtttcctcgcatttttggccatgaagcttcggggattgtggagagcgtaggcgagggtgtgactcatctgaaaccaggtgaccatgccctccctgtgttcacaggagagtgtggagattgcgcccattgcaagtcagaggagagcaacatgtgtgagctactcaggatcaacaccgataggggtgtcatgatccatgatggccatcaaggttctctaaga

SEQ ID NO: 18278 - DNA, 286 bp, Glycine max
  unsure (1)..(286): unsure at all n locations; Clone ID: 701046846H1
atcggggagaagtaatcgagcttcagcaatggtgtacgtcaaggctcagaaattcaaaagcctacttcaagagatatcaagtccaagttcaagagaagaagagagggaaaaaccgattaccgtgccaggattcggttgattaatcaggacaagaacaaatataacactccgaaataccgatttgtggttcgctttagcaacaaggacattgttgcacaaataatatctggctagcattgccggcgatttagttcttgctanagcatattcacatgagctgccacga

SEQ ID NO: 18279 - DNA, 281 bp, Glycine max
  unsure (1)..(281): unsure at all n locations; Clone ID: 701046847H1
agaatttccattgcatgcaaagcaaatacgcattatattactagttttaatttgttttgtcgtttgctttcttctttgattaatgatgactagctttaaggttgcatgtgtggttgcgatgatgtgcatggttgtngccatgagtgttacacccatggcacaggccgcaatcacgtgcgggcaggtcgccggcgacgtgtctccgtgcctcagttatcttcgaagcggcggaaaaccgtcgggacgcctgntgcaaagggatgaagtcgctcagcggcggg

SEQ ID NO: 18280 - DNA, 281 bp, Glycine max
  unsure (1)..(281): unsure at all n locations; Clone ID: 701046848H1
cnggcacaaaatggaaaagaatgtggggattctcgncattgacatcnacntccntcnngttgcnttcagcaggaagcattggagantcatgatggtgccagtaaagggaagtataccattggacttggccaagactgcatgtnattctgtaccgaagtagaagatgtcatctcaatgagtttgacagtggttacttctcttcttgagaagtatgggntgatcctaaaacaaatcggtcgtctggaagttggaagcgagaccgtgatagacaaaagcaaatc

SEQ ID NO: 18281 - DNA, 274 bp, Glycine max
  unsure (1)..(274): unsure at all n locations; Clone ID: 701046850H1
ccgtggacacacttatccacctactttcatttgagccactcttctcagtccaaaacagtttctcgttttctcatctgaaaaatgaggagcatctttgtccttctccttgttctgggtttgtttaagtatgcatttgctgaagaagggttttgctctgctccttcggaatcgaaatcaaagcctctttatnggaaagtggataaccccantctctcacntanccnccttgnaagttcgcctggattcacacgnntgtttaanangantaancctg

SEQ ID NO: 18282 - DNA, 209 bp, Glycine max
  unsure (1)..(209): unsure at all n locations; Clone ID: 701046851H1
tgttagggcaatacaacatttattacgcatactcaaagtagcttcgaagttcgtatttttattggcatatcatggagaataataatcagtcgttttggnaattcagtgaccagctgaggttacaggcatctaatttggcgaacctttctctaaacgattcgatttggagcaacagttacatctccaagaggcgtgatgaaaggattaat

SEQ ID NO: 18283 - DNA, 270 bp, Glycine max
  unsure (1)..(270): unsure at all n locations; Clone ID: 701046853H1
ggcttcanctcctccgtnggctncgccaccttcnanttnctcttcngtctcatctcngacaaaggccnctccgnaaccatngtcggntccgacggccncagcntggtccaaacctggctggnagntcagctggctcntctggccactctaggcttacccaggatcttcaactacgtggaggatttcttgatcaggtcaatcccctttccagcatggactgtcaaatccagctacaagaaactctacgaaggtctctcganagaaggtatg

SEQ ID NO: 18284 - DNA, 64 bp, Glycine max
  unsure (1)..(64): unsure at all n locations; Clone ID: 701046854H1
tctgaatccacctttntttctttctacaacnnacgcgcgcgtcnaacctngcgatttcatttna

SEQ ID NO: 18285 - DNA, 266 bp, Glycine max
  unsure (1)..(266): unsure at all n locations; Clone ID: 701046856H1
angaggtttaccgaaatgtcgtacaaggggctattgaagtaaaaaatgctggcagaccatacttaggagctggtaacatgagcgtggacgaattaattgtagggtccatgtttgctttagganagctggattacttatgggtaactactctaatgcagagtgcnatttganacaggcattaagtagggnagaggaagnntatggagactctaaacatcctacggtgggggttgccttaacaagcattgctcttttgtatcggcgta

SEQ ID NO: 18286 - DNA, 268 bp, Glycine max
  unsure (1)..(268): unsure at all n locations; Clone ID: 701046857H1
gccgtacaaagtgatgacgggtaaggntatgaacttnagccattncnaancggtggttttggtctgggntcctctncgctttctgcttcttcaccttgttccaantggccctctncnnctctcacagctccttcgtcancttctttagattctccggttacaaacacggggcaaagatcanagttgtatgacaagatggggagagatctggatgagcatggagctgctttccnggnacatggtgaaacctctcagtcttgtcatcttc

SEQ ID NO: 18287 - DNA, 98 bp, Glycine max
  unsure (1)..(98): unsure at all n locations; Clone ID: 701046858H1
gaaaaaaganatgggattttnttttctttcaacgccaccccaagttcccagctttgaagtttgagctcaaggtccagacattccaaanacttggcatg

SEQ ID NO: 18288 - DNA, 274 bp, Glycine max
  Clone ID: 701046860H1
cgactgcgcttcagcacaatgggtgcctacaagtatgtttcggagctatggcgcaagaagcagtctgatgttatgagattcttgcagcgggtgaggtgctgggagtatcgccagcaaccttctattgtccgtttgacaaggtctactcgcccagataaggctcgtcgcttgggtttcaaggctaagcagggttacgtgatttaccgtgttcgcgtacgaaggggtggccgtaagagaccagttccaaagggtattgtttatggtaagcccacca

SEQ ID NO: 18289 - DNA, 277 bp, Glycine max
  Clone ID: 701046861H1
agaggctacgtacgatcaaattaattaagatggcggaagtgaggaacaaacaagtggttctgagggactatgtgagtggttttcctaaggaatccgacatgaacatagttgaaggaaccacaatattgaagcttccacaaggttccaatgatgtgcttctaaaaaatctctacctttcctgtgacccttacatgagaatgctcatgaccaaggtggaaggcctcgacgtgtttggcacctatacacctggctctccattaacagggtatggagtgtc

SEQ ID NO: 18290 - DNA, 281 bp, Glycine max
  unsure (1)..(281): unsure at all n locations; Clone ID: 701046862H1
ggagaattaggtttttagggtttacaccgagcagccacacctcccgcagcagccatggttctcaaaactgaactatgccgattccagtggtgccaagatctacccaggaaagggcatcagatttgttcgtngtgattctnaggttttcctgtttgcaaactcaaaatgtaagaggtatttccacaatcgcctgaagccttcaaagctcacctggactgcaatgtacagaaagcaacacaaaaaggacattgctcaagaagctgtgaggaagaggagacgtg

SEQ ID NO: 18291 - DNA, 278 bp, Glycine max
  unsure (1)..(278): unsure at all n locations; Clone ID: 701046863H1
aacattctcaaaggctatatttcttggaaatggtcttgttgctattttgtctgggctgtttggaaatgtacttgttgatacattggctcttggacctgtggccccctttgatgctgcttcatgttttcttgctattggtatggccatcatactatcttcatggtcagagaatttcggggatccttcagagaacaaggacttgcttacccaatttaggggtgctgctgtggncattgcttctgatgaaaagatagccttgctgggtgccatacagtctc

SEQ ID NO: 18292 - DNA, 272 bp, Glycine max
  unsure (1)..(272): unsure at all n locations; Clone ID: 701046866H1
atgaatatgattatgagatggaagggagtaccttctttggcttcttcctaagtcctaaccttgacgaggccaattccattcatttngatgtgtctctggttttcaacaaacgttcacaacaacacatttcgccgtttcaaatcactacttaacaccggggcacatagagagagagagacatcatggtctcttcnaatggnctanctangagtncngccattttntctttnggatggattcctgangccnaatatgcgnacanncctgggggg

SEQ ID NO: 18293 - DNA, 269 bp, Glycine max
  unsure (1)..(269): unsure at all n locations; Clone ID: 701046867H1
tccaatattgattagccttagccacaaaacaatgntttccccnagagnatgccttntccatcctcnatcttttctggctacgnctccatganagcctccatcatgntcctacgttcnatggccaacgacctcgttccccaaccaatncgtggctacctttacagcacgttccnntacctcatanagcctngctccccaaccctnnncctcatcatcgaagagtccacnggcatagcccgtaaccaagtctnngacgntgcggaagngta

SEQ ID NO: 18294 - DNA, 97 bp, Glycine max
  unsure (1)..(97): unsure at all n locations; Clone ID: 701046868H1
tcaggctttcagtgcatcagactttagtcatttgaatctgttnccccaggagaactttcaacggctgtgaaagnacctgttagggttgtgtatactg

SEQ ID NO: 18295 - DNA, 266 bp, Glycine max
  unsure (1)..(266): unsure at all n locations; Clone ID: 701046869H1
aaaaacatcacaattattgctttcagaggtcaaggacgaaaatataaagttacacggggagcagctcggtactgtgttatctgacaaattacagaaaaacctcaatgcagagttcaagagccttgctatgntatttaagaacacagcatatacggaagggttccatgctggtactcattacaggcccccgctcatgtgaagcacaggatgatttacgatttgctggccaggaaagtaaaagaggaaccaaattttaactctagttg

SEQ ID NO: 18296 - DNA, 267 bp, Glycine max
  unsure (1)..(267): unsure at all n locations; Clone ID: 701046870H1
tacaantttcccactctcactttcattccggcacgaacaaaaccctaacccgatggagaaccgaaccacccaggttcggtgcccggagaaccaggagctggccacctacgtgtggaacaagtggaaggaaatggcgcagcaacccaaaggcatttctgacaacatcgacatgaccctttccaaggcccactttaatctctgtaactccaaaacccccattcgaaccatcaaagtttctctcaagtcaagggtgtggggaaatgattt

SEQ ID NO: 18297 - DNA, 269 bp, Glycine max
  unsure (1)..(269): unsure at all n locations; Clone ID: 701046872H1
ttacaaacactctgcagcaggagcgtacgcataactccccgccgtccggacatttcttggttcctgattcaccatggcaacttatgagaggctgtaatccgatttgaaggatgaaccactggacttgtctatantttttgaaggaggaaagggttgtaacagcagatttttgttccatcatcatattatctgaacttctggtagaaatgggangcngaagngataggaatcttgtcggaaacctggaaancctgnntccaaggggggtg

SEQ ID NO: 18298 - DNA, 268 bp, Glycine max
  unsure (1)..(268): unsure at all n locations; Clone ID: 701046873H1
agaattagcagtgttattggtgggtttaggaagtactaacaggaaatggctgtgatcccgtgtcactgttaccgttccgtcggatccgacaaaccctacctctctggtcagagtctccgccgttgcgctccttcccccgccgtctccgtttcatttcgacgccgaatatcatgcgtcgcctcttccgctgtcgctcagaaagttgggctgaaagattttcttcanttggatgattttgataaggatactattttggaagatgttggac

SEQ ID NO: 18299 - DNA, 108 bp, Glycine max
  unsure (1)..(108): unsure at all n locations; Clone ID: 701046874H1
gcctgtgaatgagaggtgttgcattactacattgtaatcgtcatctgctngagttgttgattgncccaatccntggtgggcattacagctggaaaatccatagctgtg

SEQ ID NO: 18300 - DNA, 270 bp, Glycine max
  unsure (1)..(270): unsure at all n locations; Clone ID: 701046875H1
attcccacatctctcgtatacccttttgtctttcttcactaaggtatcttattgagagtcnagactagtcctttgatacgttgaatttctttcaagtattgagattcatttaaaaaatcaattttttgatatcttatacatacatctattgggatgtctagaaccgtggagatcacagttttgtcggcagagaacctccaaatgaacaaaaaacccattagagggaacgcatntnncgacggttcaatccgacgctagcaacgacacaag

SEQ ID NO: 18301 - DNA, 271 bp, Glycine max
  Clone ID: 701046876H1
gcagctttggttaatttccaatatggtgtttcctctcctatctatctttgctttactcaatcttgcagtggtggcaacccatgcagaaaccttgccccctgaagtttactggaagtcgaagcttcccaccactccaatgccgaaagccattacagatatccttcacccagatttgggcagaagacaaaagcacctctgtggccgtaggaaaggggggcgtaaacgttaacgcagggaaaacaaagccaggaggcacatcagtgaacgtagg

SEQ ID NO: 18302 - DNA, 102 bp, Glycine max
  unsure (1)..(102): unsure at all n locations; Clone ID: 701046878H1
ctcnctctcgctcgtggctgnagntgggcnnccgcgatgtgncnttgccnaggttcgaggncgccgtcnaagccctgaagattcgttgncaggggttgcngc

SEQ ID NO: 18303 - DNA, 268 bp, Glycine max
  unsure (1)..(268): unsure at all n locations; Clone ID: 701046879H1
tcgaaaaatgcagagngcggntttcactttctntcnntctctccctctcngaaanccttcccctaactattggaggagaccttctctntccctccgtctctnggcnaaacacggcaacagcaacagcgatgacgtgaactccaatggcgtttcttcaactttcttcactcgccgatcttggactcttcctccttcctcttncttcaagttcaggccttccatcnnngngccgccgaaagcgccgttcccgaaantgcgnccgtcgaaa

SEQ ID NO: 18304 - DNA, 276 bp, Glycine max
  unsure (1)..(276): unsure at all n locations; Clone ID: 701046880H1
tcaccgttgagcaggctatccagagcaagaagttgttcatcttagatcaccatgactatctcattccatatttgaggaaaataaatgcaactaccacaaagacttacgctacaagaaccatatttttcttgaaaagtgatggaaccttgacgccattggccattgagttaagtaagccgcatcctcagggtgaaggatatggtcctgttagcgaagtctacgtgccntcgagcgagggagttgaagcttacatttggttactggcaaaggctatgt

SEQ ID NO: 18305 - DNA, 286 bp, Glycine max
  unsure (1)..(286): unsure at all n locations; Clone ID: 701046882H1
tnttcgggntcgngctagnagcaagcaaagcnccagctgcttctcaaaganncagnagaaaccttttcttttcgatttccgacaatgcgtccaccgngtaaganggtggatttcgcgcgcgacgacaagntggagattctgnggcaacgaggatggcttcctcnggtcctnctaccaanccanggtcgtgtcgcgccncggcaanggnctntncgtcgtacgctnngacangcncctcgaagacgaggcttnanaacnaacccctttaccggaaacctttttccnc

SEQ ID NO: 18306 - DNA, 266 bp, Glycine max
  unsure (1)..(266): unsure at all n locations; Clone ID: 701046883H1
cttctttttactctctctctgtctctctctacgctttctcgttcnagatccctcaagggatccactaactgaaggagaaatggggttgacattcaccaagcttttcagccggcttttcgccaagaaggaaatgcgaattctgatggtgggtctcgatgcagctggtaagaccaccatcctgtacaagctcaaacttggagagatcgtttaccacaattcccaccattgggttcaatgtggagactgtggaatacaagaacnttntt

SEQ ID NO: 18307 - DNA, 266 bp, Glycine max
  unsure (1)..(266): unsure at all n locations; Clone ID: 701046885H1
cnaacgcacnctgaattcagaaacatcgaaaganagangnatggccgagcaaaccttccatcatggttcangncagatggcgttccaaagaggcctattggcgagattattngcagatttgagaggaagggtttttacttgaaagggttgaancncgttantgtggaccgtccntntgctgcgaaanantgtgctggtttgnntggnaggcntttcnttggtggatangggggannnanntgtctcnggncnagtngttgccaagc

SEQ ID NO: 18308 - DNA, 262 bp, Glycine max
  unsure (1)..(262): unsure at all n locations; Clone ID: 701046887H1
gtgataaagctcgatacagcttacgttgacattggaaaaccagttggtgactaccagccagattggggttcgatgagctttctaattgattttctgcgacccactgtctccgaaggaccttcatggtacagtctgttaaagaaagctggaggtggctgcaatgacctcctatacagtggccacatgnttgttgcgtgctcaaagccatggnnttggacgnagcatntgggggattnagtccggccctgganggctccttggg

SEQ ID NO: 18309 - DNA, 266 bp, Glycine max
  unsure (1)..(266): unsure at all n locations; Clone ID: 701046888H1
cacccatcaatggcaggngtttctntcaagtgcggtgactncagtgctctgctgagaaccgtagangaagcgcaagagcangtgaactnanctcccantccaanttctccgaatccaccgaaccggttctcaacctcatctgcaccgntgctccaaaccctgccgatcccaaaacgagagtgnnttggcacacgaaaaggaaccggccataccgagttcgttgnacaaganttncgnnggncgnttaaaccgnttntttgggnggc

SEQ ID NO: 18310 - DNA, 265 bp, Glycine max
  unsure (1)..(265): unsure at all n locations; Clone ID: 701046889H1
ggtcattcatttatggggtgctgtcgtctccttactcncatttttcctatgtcgagtacccancaccacacccaatgacgaactttgtattgtggggtttgctatcagcttttagctgttaattttgtactttatattgggttcaccaatttttgaagctgctgcatctctacatgagaaaaacaagtgggctagcttanagtctgtaactatatcaactgcattcatcggttgtctctcatgtctgtcattanctttgctacag

SEQ ID NO: 18311 - DNA, 98 bp, Glycine max
  Clone ID: 701046890H1
gtggtttgatgtaccatcttcatctgcaattaggacagctgttgatagagtcaaacctaagcttatgtcgtcatcttcagttcccttcttgcgtctgt

SEQ ID NO: 18312 - DNA, 268 bp, Glycine max
  unsure (1)..(268): unsure at all n locations; Clone ID: 701046891H1
atcngtatcggtccgcaacgcaattgagtgagagtnangacnttatttntctcttctccgncacattctggttgggttggntntcttccncttccaacgnatgnctctttttggaattttccagataccctcatttatggacataatcantgacntcgncatgtnnatactccgntatggatngcggttancgtcggancgtcnatggggatgggcgtnggaagcnaaatgggcctttaacnccnaangangctnttcntcaaatttc

SEQ ID NO: 18313 - DNA, 269 bp, Glycine max
  Clone ID: 701046892H1
gagaatttcctcgagcgccgccttcagacgctcgtcttcaaatccgggatggccaagtccattcaccacgacagggttctcatcaagcagagacatatcagggttgggaggcaagtggtgaacatcccatctttcttggtgagggttgactcacagaagcacattgacttctcacttacaagtccccttggtggcggacgccctggaagagtgaagagaagaaaccaaagggctgctgctaagaaggccgcagtggagacggagacgag

SEQ ID NO: 18314 - DNA, 272 bp, Glycine max
  unsure (1)..(272): unsure at all n locations; Clone ID: 701046893H1
acaaaaaagcaacatggcttcaattcgcgccttcttcacagccattgcttttgtggctcaatcatttcaaaactacatgatccagagtctgcacaaactttacaagcattatggatatgctgctgaagtgaaggacaatgaagagaaagaaagtgattattgttctgtgtgtctaagccaaatttgtaaaggggaaaaagctaagtctcttcccgtgtgcaaccacagataccatgttgattgtattggtncttggttgaagatcataccac

SEQ ID NO: 18315 - DNA, 275 bp, Glycine max
  unsure (1)..(275): unsure at all n locations; Clone ID: 701046894H1
ttntctccttgaatgctgtnttnccttttctgagccatgnccttnatcntcctcttccntntgcttctntgtacacttggatcccataggcagtaatcatcttcaaggtcntgtaagactggatagccatgtgggtactatgttccccaaaccctncacctcttggttctccacaaccctttcttcctcttgnaccttcacctttggntccattcaccaatnccatatcccaangttatngggnatttgcactttgganttttatantgcggaaa

SEQ ID NO: 18316 - DNA, 276 bp, Glycine max
  unsure (1)..(276): unsure at all n locations; Clone ID: 701046895H1
tgtaaacgaaggtcaccccgacaagctgtgcgaccagatctctgatgcagtgctcgatgngtgcnttgaacaggaccctgacagcaaggttgcntgtgagacatgcaccaagaccaacatggtcatggtctttggagagatcacaaccaaggccaacgtagactatgagaagattgtccgtgacacatgccgcgaaattgggattcatctctggtggtgttggtcttgatnctgacaatgcaaggtgntggtcaaacattgagcagcagagccctg

SEQ ID NO: 18317 - DNA, 276 bp, Glycine max
  unsure (1)..(276): unsure at all n locations; Clone ID: 701046896H1
aananggcgtcttcataaacgcctttcttctccgtttccgtttcctcgttcgaattcgctttttgatctgcgaaaatgagagagtgcatctcgatccacattggtcaggctggtatccaggtcggaaatgcttgctgggagctctactgcctcgagcacggcatcgggcccgatgggcaaatgccaagtgacaagacagttggcggtggtgatgatgctttcaatactttcttcagcgagactggtgctggaaagcacgtgccacgtgcagtgttt

SEQ ID NO: 18318 - DNA, 289 bp, Glycine max
  unsure (1)..(289): unsure at all n locations; Clone ID: 701046901H1
gagagaattgtatcgtgcagcttctcttgcttttttacaaaaggaacgggaaaccggatggtggtgcggcattgcttccataaccctggttatttttctaatctttcagaaagcagtagttctggttgacatagttcctgaacaagtctgcagaataagagggttggtgattcaaggcacgttggcgctgcatctgtatgccctnnnnnnnnnnnnnnnnnnnnnnntcttttttaccttttcacaagtgtgggaaaagagcagaaacttatttgttaacttttaggag

SEQ ID NO: 18319 - DNA, 283 bp, Glycine max
  Clone ID: 701046903H1
atttctcgttataacaaagtggtcatgctgtttggaatgttgaccactttggatgaacttctgcctatttcaattgagatggcaaagcgaaacttgaggggcatctggaacttcacaaatcctggggccgtgagccacaatgagattcttgagatgtacagggattacatcgatccaagcttcaagtgggctaacttcaatcttgaagagcaagccaaggtgataattgctgcacggagcaacaacgagatggatgcatccaaactgaagaacgagttccctg

SEQ ID NO: 18320 - DNA, 105 bp, Glycine max
  Clone ID: 701046904H1
tccgaggtaaccgcccccacttttttctaatgcagaatatttccctctctctctttccctctttatcttcctctttcagattcaccctcgttttccctctttcgc

SEQ ID NO: 18321 - DNA, 278 bp, Glycine max
  Clone ID: 701046905H1
ggaaaaatggtttcgctgaaactgcagaagcggctcgccgcgagcgtgctcaagtgtggcagaggaaaggtttggcttgaccccaatgaagtcaacgaaatctccatggccaattctcgccaaaacataaggaagctggttaaggatgggtttatcatcaggaagcccaccaagattcactctcgctcacgtgctcgtcgaatgaaggaagccaagaggaaaggacgtcactctggatacggtaagcgtaagggtacaagggaggcaagcttcccata

SEQ ID NO: 18322 - DNA, 267 bp, Glycine max
  unsure (1)..(267): unsure at all n locations; Clone ID: 701046906H1
aagaatgaatgagaactaattataaattttcctgtttatctgagacggtaaatggtcaccggacacaagtagaggagaccatgaacattgttagagaggagatgaacctcttggttgaagcagatcaaccagggaatcagctggatgattacataacaagactaaatgccattctttctcagaaggctgctggcatcctgcagttgcaaacccgtttggctcattttcagaaacgtttaaaggaacataatgttttggtttcacnac

SEQ ID NO: 18323 - DNA, 278 bp, Glycine max
  unsure (1)..(278): unsure at all n locations; Clone ID: 701046907H1
atcggcggcgacagtcactctccgacaacaacacttccgcggcgaaaaatgtctctggtggcgaacgaggatttccagcacattctgcgtgtgctgaacaccaacgtggatgggaagcagaagataatgttcgctatgacctccatcaagggtattggaaggagattcgccaacatcgcttgcaagaaggccgatgttgacatgaacaaaagggctggtnagttgagtgctgcagagttggatagtgtgatgactgtggtggcgaaccctaggcaatt

SEQ ID NO: 18324 - DNA, 279 bp, Glycine max
  Clone ID: 701046908H1
ctgcgctttattcgactcattgtcgttcactcgctacttcctcttcctcgtcgtcgttgcaaccctctcctctgttcgtctaacctcgcttaccttcaacgcctcaccttctcacagcgctttctcccctccaaggtttctctcaaatctcaaccccaaacttatcagattcccgttctcacccagcagcaggaaggtacagtagcagctgctgtgacccctgttgaaaacggcacttctcacaagcagttgaagcctgacttattgtctgttaagtcc

SEQ ID NO: 18325 - DNA, 274 bp, Glycine max
  Clone ID: 701046909H1
aattattatcatgtactactaattaaagggcagcaactgggagttcaatgaacctggctagaacactgggtccagcaattgctgcacacaactacaagggcatgtggatctatctcacagctccaatacttggatctctatgtggggcaggtgcctacactgtgctcaagctgcctgatcacatcaggaagagtgatagcaacactgcaagagtgatagcaagactttacccagaatgagtgatttttgcacatgcacttatcatgcatgcatc

SEQ ID NO: 18326 - DNA, 273 bp, Glycine max
  unsure (1)..(273): unsure at all n locations; Clone ID: 701046910H1
atctctcacatcatttcccactcccgcgtttcctttatcatattcttattccgccatgtcccagttgaacggagcctactatggcccctccatcccgccgccgaaaacctcctaccaccgcccagggcnnnnnnnnnnnnnnnnnnnnnnnnnnnnnnnnagcctcatcttcaagctcatcttaaccgtgataatcatcgttggcatcgccgggttcgtgttctggctcatagtccgtccgaacgtggtgaaattccacgtgaccgacgccac

SEQ ID NO: 18327 - DNA, 273 bp, Glycine max
  Clone ID: 701046911H1
ctggtgtctatgacatccactccccaagaataccaccaactgaagaaattgctgacagaatcaacaagatgctggcagtgctcgagaagaacatcttgtgggtgaaccctgactgtgggctcaagacccgtaagtacactgaggtgaagccagccctcacaaacatggttgccgcagcaaaactcatccgcaacgaacttgccaagtgaatggtataagaaagtagaatcttccaagtcatttggttctgctttatattataatacaccaaag

SEQ ID NO: 18328 - DNA, 271 bp, Glycine max
  Clone ID: 701046912H1
attgcttctcttgtttttgtcaatagatcttcacaaacgcagacaaagtccacgcggctaaggcgcttagcaggcttggattagaagactgctttgaaggaatcatatgctttgagacccttaatcctatccacaagagcactgtttctgatgatgaagatgatattgagtttgtgggttcaaggaccaccaatcctaccacttgtaatggttcaggcacctctcaaatcttgacattatagggcatttgctcagcccaatcccggtgcag

SEQ ID NO: 18329 - DNA, 273 bp, Glycine max
  Clone ID: 701046913H1
gacagacagaggcggcagcaaataagaatggcttcaaatcccaaacctttgacttttgaggaggtggctaatcacaacaacaaaaaggattgctggattattatcaatggaaaggtgtatgatatcacgccatttctggatgagcatcctggaggagatgaagttttggtaacgtcaacagggaaggatgccaccattgattttgaagatgtgggccacagtgattctgccatagaaatgatggaaaaatacttcgtcgggaagttgacactt

SEQ ID NO: 18330 - DNA, 256 bp, Glycine max
  Clone ID: 701046914H1
atccacacgaatcacactctccacagtgcgattcattcaccaatggatcgcaacggcgttctctctctcgcattcatctgcattgtagtcgccggcgtcggaggacagtctcccgccgcagcgccgtcaaacactccggcaactcccgccgcagccactcccgcccaagcaccttccacagtaccgaaatcaccagctcccgttgcttctcccaaatcatctccaccagctgcaacccctgcatctactccggcgg

SEQ ID NO: 18331 - DNA, 276 bp, Glycine max
  unsure (1)..(276): unsure at all n locations; Clone ID: 701046915H1
ttttattcattttccgatggcttctgcagatgttgagtaccgttgctttgtcggtgggctcgcttggnccactgacgaccatgccctcgagagagccttctctcagtacggcgaaatcgttgaaacgaagattatcaacgatcgtgagactggcagatccaggggttttggatttgtgancttcgcctcggagcagtccatgaaagatgcgatcggagcgatgaatggacagaacttggacggccgtaacatcactgtcaatgaagctcagtcccg

SEQ ID NO: 18332 - DNA, 275 bp, Glycine max
  unsure (1)..(275): unsure at all n locations; Clone ID: 701046916H1
ctcattcgttcactgtcactttacccaatcctaacactttcttctctctgtnttccttcttccttcgcatcaatggagttggacggcgttctcctcggcatgtgcaaccctctcctcgacatctctgccgtcgtcgacgacgctttcttgcaaaaatacggtatcaagttgaacgatgcgattctcgccgaggataaacacaaacctatgtatgaagaattggctaacaatcctaatgtggagtacattgctggagtgctactcagaattcaatc

SEQ ID NO: 18333 - DNA, 282 bp, Glycine max
  unsure (1)..(282): unsure at all n locations; Clone ID: 701046918H1
gtccaacacaacaatgtttgttggacnttaaccccttgcatgatatcatcaatcagcatgagtacaaggagaagtactttaaaagcttaattcctctcggccttaaatatgctgagctttttccatggggagggaagctcacaagtgagtccataaattttttttcaccaattgtcatctggacaaagtttacctcaaacccagaaaaatatgatattctgtattccgcatttagggaatattacaaggtatggttgaaattgatatgcaaagcagataaag

SEQ ID NO: 18334 - DNA, 278 bp, Glycine max
  unsure (1)..(278): unsure at all n locations; Clone ID: 701046920H1
taacactcgatccagcacattaacaatggaaacgcagctttacgtgttctctctctagactctgntctcaaacgccgtcgttttggaactctttttcttttccctttgattcttctctgtctttgtaaccgaaagaggggaaaatataattaataccgatttcgcaaccaattcttctcttgcgttgaattgggacaacgagaaattttggatctcagtttttggcaggaaaaaaaattgcatttgagtaaaaataacagagtgtagtgtagggtctt

SEQ ID NO: 18335 - DNA, 278 bp, Glycine max
  Clone ID: 701046921H1
gtgtctctctttgacggtggtgctgtcagcattgacctcagcttgagcagtaaaacatcatcagcactactacggtaccatggctgtgctgcaatctttcgtttcggtccacccagattctcacttccccatacagaacctcccttacggagtcttcaagccccaatccgcttcgcctcctcgtcccggcgtcgccatcggcgactttcgtcctcgacctctccgaaatatcttccgctggtctcttcgacggtcctctcctcaaaaatccgatgctt

SEQ ID NO: 18336 - DNA, 267 bp, Glycine max
  Clone ID: 701046922H1
gtaattttgtttgttcatcttgtgttgttcactgttctttcccagacccacctcaaagttgaaagcagccatgggttttttcttgaaatgggtcaacttgtttgtcttttttcatttccttgctgcaacacccatcttctcagattcctcctccagctcaaatgcaatcgccaccaccaagttccttgatttagccaaggatcctcgggtttttgattggatggttggtatcaggaggaagattcatgagaatccagaactgggtta

SEQ ID NO: 18337 - DNA, 276 bp, Glycine max
  unsure (1)..(276): unsure at all n locations; Clone ID: 701046923H1
caagaagtaccatatacctatattggccatgacagctgatgtgattcacgcaacatacgatgagtgcgtgaaatgtgggatggacggatatgtctcaaagccttttgaggaagagaatctgtatcaagcagttgcaaagtttttcaaccccaagcctacctcaatacaacanaatgccagaactggaaaagcaacttaatgttaattgcaaagtttttcactctctcactactgccatttttcctagttggctgctaaatggtaatttcaatgtgc

SEQ ID NO: 18338 - DNA, 274 bp, Glycine max
  unsure (1)..(274): unsure at all n locations; Clone ID: 701046924H1
attttacagtactttgaaacatacattttaatctgtttaggagataaacggcggtggagcannnnnnnnnnnnnnnnnnnnnnnaggtttggaagaatcgcgatggagggtgaggaaggaggaggcataaggctgagcaagcgaatcgcaaacggagaggttgactacaagacgaaatccggcaccgcctggagccactcctatctcaaccagaagccatggcaccctctttcttaccccaaccaacgccgcaagtggatcgccgaacagaccc

SEQ ID NO: 18339 - DNA, 269 bp, Glycine max
  Clone ID: 701046925H1
ctgcacccaccattactcagcactgccactcttcaatcacactaatggctgtcaccttctcagatcctcacaccgaagagggcatcaaatccctcgatcaattcctttctgggaaaacctatatctctggggatcaattgacaaaggatgatatcaaagtgtatgcagctgttgtggaaaagccaggagactcttttcctaatgctgctaagtggtacgatgccgtctcttctcaacttgctccaagcttccctgggcacgctcaaggg

SEQ ID NO: 18340 - DNA, 269 bp, Glycine max
  Clone ID: 701046926H1
tgcaggggctcaattatggagaaagcaattcaaagacagagagttctgcttgaacatcttcaacccatttcttcaagttcaaatttttcctctcaaacccatcaatctacggatctctcagcttcattatgttttgctgggaattcttcgcatggtcaaacaggtggatcagatgatgacgtggtgattgtagctgcatatcgtactgccatctgcaaagcaaagcgtgggggctttaaggatacccttccagatgaccttcttgccac

SEQ ID NO: 18341 - DNA, 271 bp, Glycine max
  unsure (1)..(271): unsure at all n locations; Clone ID: 701046927H1
antttagctacctacccatgggaaagattgcnctagccaatgtcctcttggtccttctcttgnacttgagcactttgctcaatgttcttgcttgtccctattgcccttacccatctcccaagcntcctccaaaaaagcctcccattgtgaaaccaccagttcacaaacaaccaaaaccatgtccaccacccaagtcatntccaaaaccaccccatgtacacccancctntgtcccaaaacctcctcactaccctanaccaccagttcatnc

SEQ ID NO: 18342 - DNA, 272 bp, Glycine max
  Clone ID: 701046928H1
gtgaagctcagtgcatcaagatctctctctctgtaatcgaaaatgagcaagggaccgggtctctttaccgatatcggcaaaaaatccaaagatcttttgactaaggactacaactccgatcagaaactcaccatttcctcatacagcatctccggagtggccctcacttcaacatctgtcaagaaaggaggactctccactggggatgtggcagcactgtacaagtataagaacactattattgatgttaaactggacaccgcatcaactat

SEQ ID NO: 18343 - DNA, 272 bp, Glycine max
  Clone ID: 701046929H1
ctaagtatctagtctagtacaaagatggagatccctgtgatagattttagtaagctcaatggggacaagaggggtgacacaatggccctattgcacgaagcttgtgaaaaatggggctgctttatggttgagaaccatgaaattgacacacaactgatggggaaggtgaagcagttgatcaatgcatactatgaggaaaacctgaaggaaagcttctaccagtctgagatagccaagaggttggagaaacagcagaacacctctgatataga

SEQ ID NO: 18344 - DNA, 274 bp, Glycine max
  Clone ID: 701046930H1
cttacaaggcattttcttctctctctccctctcatcttctggggacctcaaaatatagtaggtaccacaacacaacaccatattatgggttccaaagtcaggaccctggttttgctctctttgttttgcttagctctatttgtgtccttgcaccaagcaagggcagcaaagtcacataataatgataataatcataatgtggctcgcttgaaggggagaaaggagttgaatagatgtaatttgttcattggaagttgggttatgacccttcttc

SEQ ID NO: 18345 - DNA, 278 bp, Glycine max
  unsure (1)..(278): unsure at all n locations; Clone ID: 701046931H1
ctctctttctctctcatcaaacaacctcttctccggcggccatacctccgcgcgctgcctncgcggttctcccccgaatattctgttgaggtcttgaattcacnnataangganagttgatatnntcagtaaatctntgctgtantaaaagttttggaagtttttgcaatgggtgcaacngnagatcttgtgaacagcacacagggtgcagcagaatgttcaggaaaaccgcaccacaggtcttcagaaaatccataaaggacaacaccagtagtatt

SEQ ID NO: 18346 - DNA, 283 bp, Glycine max
  Clone ID: 701046932H1
ggagacgccaaatggaaagccaaagaataagcgtcctcttcctcaggaggatcctgtaattgatcctgttgctgctctagacaaaagcaggctgaggaaggtcactgaacgtgttatgccccccagagcaccaaaggaagatggaagagaatcactgttagaaatgataagatcgaagtcattcaacttgaggcctgctgcggttcaacgaccacccaggattcagggtccaaaaacgaacttgagggtcgtgccatcctggaaaaagcaaatgcaatccgcc

SEQ ID NO: 18347 - DNA, 280 bp, Glycine max
  Clone ID: 701046933H1
atgattccgatgatgaatcggatgatgatcttgctggtgaagatgaatctggaagttccgatgagatggatgatgatagcaatagtgaagaggagagtgatggagatgatgaagagacccctgctaagaaggtggatcagggcaagaagagacccaatgaatctgcagcaaaaactcctatttctgccaagaaagctaaaactgctactcctgaaaagactgatggtaagaaaagtgtactgtagctactcctcatcctcgaaaaagggtgggaaactcc

SEQ ID NO: 18348 - DNA, 282 bp, Glycine max
  Clone ID: 701046934H1
gttcagttgaggcaatgtacaatgagatggcttctcgccacagggtcaggagcccatgcatccaaattatcaagactgcaaccatcccagctaagctttgcaagagggagagcaccaagcaattccacaactccaaaatcaagttcccattggtcttccagaaagttagaccacctaccaggaagctgaagaccacatacaaggccaaaaagcccaatttgtttatgtaatgtggttgatgaatgtatcagaaatacttaagggtgtcttccaggcgttttc

SEQ ID NO: 18349 - DNA, 278 bp, Glycine max
  unsure (1)..(278): unsure at all n locations; Clone ID: 701046935H1
gatgattcagtaagcaataatatctcaacaaatcaatncggaggaatcagcgaatgctcggaaagacgagatgcctagttctttcaggttttgggtgatattcttgtgggcattttctggagtaggtttcttggttgttatttttgtggtgtattcaggtcatagaagaagaggaacaaggttaaaacacggtagaaggagaagaagcttgcatacaggattcatggaaacgaatagccgtgaccggcatagccgtggtgtcgatgttcctctgtaga

SEQ ID NO: 18350 - DNA, 274 bp, Glycine max
  unsure (1)..(274): unsure at all n locations; Clone ID: 701046936H1
cgtgtttcgctgtctctcccatcctttcgcattctcaatacccttttgatttgtgaaaggaaagcaaacatggttgancaggtccaacaccctacaatcatggacaangttnctggtnancncccatctncgnncntggncantnatctngtatnagangttatganggagcctaccgccacccagctatgtaccanagaccctcttttggganttantcgaagcngcatgcagtatcctncgatgcccacatgcaannctaccatggattgtc

SEQ ID NO: 18351 - DNA, 274 bp, Glycine max
  Clone ID: 701046937H1
tgtcaactgtgaaggtttccccccattgcatgtttcaaacagcaagcaaaaatccatccactgttgccaccacaatgaagtgcccttcttcttttgggtctgtgaagagcatttccagatcttttggcttgaagtcatcctcttcatttagagtcactgccatggcttcttacaaggttaagctgattggccgtagaaacgtgaaccagaaccagaatggatcttcaacaacgaccactgaaacttcactttattccttacctgtcaccggggc

SEQ ID NO: 18352 - DNA, 273 bp, Glycine max
  Clone ID: 701046938H1
gtttgttgttgtaactcgttcttcttcttttgttgttctgtgtttgtgtttgttttttctctcacctgaaaatgtcttgctgcggtggtaactgtggttgcggaagctcctgcaagtgcggcaacggctgcggaggctgcaagatgtacccagacttgagctacactgagtcaaccaccaccgagaccttggtcatgggagtggcacctgttaaggctcaatttgagggtgctgaaatgggtgtgcccgctgagaacgatggctgcaaatgtg

SEQ ID NO: 18353 - DNA, 273 bp, Glycine max
  unsure (1)..(273): unsure at all n locations; Clone ID: 701046939H1
caactttactgaagttgagggtcgggttttacaattgcgtanaattnatggttctgaaccaatgctacgcaattgtggaatctctataagccccaactttactgaagttgagggtcgggttttacaagctccacggttgaaatttggtaatggggaggacttnaatcctagaaatnggaggtggaacttcaataacaagaaaattgtcaagccaactaaaatagaaagatgggctgtggttaacttctctgcacgctgtgatatacgagggct

SEQ ID NO: 18354 - DNA, 271 bp, Glycine max
  Clone ID: 701046940H1
gtaacccagagctccttcgcctcatcgatagtttcaagtctcgttttgacaatggtgagggttagtgtgttgaatgatgctctgaagagcatgtacaacgccgagaagcgcgggaagcgccaggtcatgattaggccatcctccaaggtcatcataaaattcctattggtcatgcagaagcacggtattgatttgttatgtaatatgaatttggccttgaattgaatataataggaattgttttagtgttgttggcatgttttgttatggt

SEQ ID NO: 18355 - DNA, 267 bp, Glycine max
  Clone ID: 701046943H1
ggaaaaagtggcatgaagatggttgttctattcatgagattgctaactttccaggtagatcggctcctataaaagaacaaagtgttgctgaatatctgctggaagctgctcaagaaggattaccttttgattgggctagatttagcgagatgataggactgacacaagggatcatatcagaaattcagggtgctatttcaaaagttggatctacagataagctgaaacctataaaaaatgaattgccagaagagataagttatcagc

SEQ ID NO: 18356 - DNA, 268 bp, Glycine max
  Clone ID: 701046944H1
tttctttcttgtaacttcaacaaacggcagcttcttcaattcaaaacaaaactctctggggtgttggtgttggtgagggatctgaggcaaaggtgttgatgatatgggagcgtgtgtttcaactccacaagggtgcgtgggagggaggttgagctcttccaagaagaaaaccagaaagagaaggagagagggactcagaagaagagttacttctcggttgtgtaaggaatcatcggagaaagttgatgtggcagggttgcctgattgt

SEQ ID NO: 18357 - DNA, 269 bp, Glycine max
  Clone ID: 701046945H1
ggctaaataaagagagtgaagaagaagagagggtttgggttttggtgtttgttgttgaatcgtgaaaatgttcagaaaccagtacgacacggacgtgaccacatggagccctgcggggaggctgttccaggtggagtacgctatggaggcggtgaagcagggctcggcggcgatagggctccgatcgaagacccacgtggtcctcgcatgcgtcaacaaggccaactccgaactctcctcgcaccagaagaagatcttcaaggtcgaca

SEQ ID NO: 18358 - DNA, 271 bp, Glycine max
  Clone ID: 701046946H1
agattatcctaagtctttgggaatagtgctgcaatggcttcaagtcaggaggaggtgacccttttgggagctactggaagcccatttgtgtgcagggttcatattgccctcaagttgaagggagttcaatacaaatatgtcgaagaaaatttgaggaacaagagtgaactgcttctcaaatccaacccagttcacaagaaggttccagtgtttattcacaatgagaagcccatagcagagtctcttgtgatgttgaatacattgatgagac

SEQ ID NO: 18359 - DNA, 273 bp, Glycine max
  unsure (1)..(273): unsure at all n locations; Clone ID: 701046947H1
gagaaaaagcatatggtctcccgtcacagatccaagaagtggtttcaaccgggaatccagaactttccacagcctcaagccccctctncgtntccctccccccaacgccgcngtctccgcagncgnnttcgccctcttnctccgcngcaantcgnagttcccggactcctccaccgcntttatcgactctgccaccggccacngcctctcctacggcgagctcctccaccgcgccanaacctagnatcgaatctcgnacaatcctcaaatcac

SEQ ID NO: 18360 - DNA, 278 bp, Glycine max
  unsure (1)..(278): unsure at all n locations; Clone ID: 701046948H1
gtttctgnctaagttagtctgcaagtattttaaaganacanactaangctagttttannccctaaaccctnatncaaaactgctttctccaccaagcttcagattcttagggtttgaaattttattaatgattactcatcacttctgcttctgttccctgtatgtgcatgcgaaaattggggatacttcagatttgaagacacagttgtattgttgtgtctttattgttgaaaccnatgttnaccttggtaatttctggcntnggacgaaagtanttc

SEQ ID NO: 18361 - DNA, 279 bp, Glycine max
  Clone ID: 701046949H1
agacattgtttggtttggttacttgctcgaatttcctcgaatcgcttaatttgtatttgattagttaaaccgcaacgcgaatctcttttctcgaactggctaactctcaggcaagtggttcggacgctgattccagcaacaagcggctggtgctcgcactgtatgacgccctaaactccggcgactccgacgccgtcgtcaagatcgtcgccgccgacctcgagtggtggttccatggtccgccctcacaccagtttttgatgcgcatgctcaccggcg

SEQ ID NO: 18362 - DNA, 276 bp, Glycine max
  Clone ID: 701046950H1
caacaatgtcgaagcgaggtcgcggaggatcggcagggaacaagttccgcatgtcactgggtctgccggtggcggcgacggtgaactgcgccgacaacaccggcgcgaagaatctctacatcatatcagtgaaggggatcaagggaaggctgaaccggttgccgtcagcttgcgtgggtgacatggttatggccaccgtcaagaagggaaagcctgatctccgtaaaaaggtgctccccgctgtcatcgtccgtcagcgcaaccgtggcgccgaaa

SEQ ID NO: 18363 - DNA, 276 bp, Glycine max
  unsure (1)..(276): unsure at all n locations; Clone ID: 701046951H1
gttctagatggcaaaaccaactactataaagatctgcacatggcttctagtcctaccattagctgaacttggcggnnnnnnnnnnnnnnnnnnnnnnnntaattcctgaaaagcaagtagctaaggaaaacaaaaacatcatcacagaaactcacaaaggnnnnnnnnnnnnnnnnnnnnnatgtcttctccaagcaagcggcgagaaatggacttgatgaaactgatgatgagtgactacaaggtggagatgattaatgatggaatgcaagagtt

SEQ ID NO: 18364 - DNA, 272 bp, Glycine max
  Clone ID: 701046952H1
gcggctgaagatctcgattagccgaaaattgcaagaacggcttcaggctcttgcgatcaacaaacgcagcgttttgatctcagatttgagggggagaggtaccgtcgttgcataatggcaacaacagtgagaagtctgaagataaagacaagtacgtgcaaacgtatagtgaaggagctgcattcttatgagaaggaagttgagagagaagctgccaaaacagctgatatgaaggaaaaaggagccgatccctatgatctcaagcaacagga

SEQ ID NO: 18365 - DNA, 274 bp, Glycine max
  Clone ID: 701046953H1
caagaagatgccttctgcagaagcttcctccgaaaccatttgtgtcaccggcgctggtggcttcatgcgcctcttggatggtcaaactcctcttggaaaaaggctacactgtccgaggaaccctcagaaatccagatgatcccaagaacgggcacttgaaggagtttgaaggagcctccgagaggttaactctgcataaggttgacctccttcatcttgactccgttagatcagttattaacggttgccatggtgtctttcacactgcttctcc

SEQ ID NO: 18366 - DNA, 272 bp, Glycine max
  unsure (1)..(272): unsure at all n locations; Clone ID: 701046954H1
ttacattttttctctcggagcaaaggttttgaatttcagttatngccttttgctgtcttttgttttttattcttttgaaatttggatattttttcagggtattggagtggttaaacaaccgatggaaggttcaaagnnnnnnnnnnnnnnnnnctcctcctatgttggagagaagggcaaggcctcaaaaggatcaagctttgaactgcccaaggtgcaattcaacaaacaccaaattctgctactacaacaactatagcctctctcagcca

SEQ ID NO: 18367 - DNA, 260 bp, Glycine max
  unsure (1)..(260): unsure at all n locations; Clone ID: 701046955H1
tcagtctaaaccgctccaagaccgagttgcaatcgtcaccggctcgtcccgcngaatcngccgagaaatcgcgcttcacctcgcctcactcggcgcgcgactcgtcgtcaactacacctccaactcggcccaagccgactcagtcgcggcgcagatcaacgccggttccgccaccacgacaccgcgcgccgtcgtggtccaagccgacgtgtccgatccggctcaggtgaagtcgtcttcgactcggccgagcgcgcttc

SEQ ID NO: 18368 - DNA, 268 bp, Glycine max
  unsure (1)..(268): unsure at all n locations; Clone ID: 701046956H1
gtctctctaacctctgcaaaagtccaaggttgcacggttttaactgcttaggcttttgtcttcaaaattaaaactgtgcaactttggttgcagagtcataagtgttaagttgtgtatgcatgaaagtgggcttgagttaattgtgcctcttgtatgatggaatccctttggaaacngttgtacttgctagagcctgcgcctgtcacacttatcattacagctgtggctgtgacatttggcgcanatttcgagctctaaactatgggaa

SEQ ID NO: 18369 - DNA, 266 bp, Glycine max
  Clone ID: 701046957H1
caggcaagccccactcaaccaccacacctctcctcgttcacgctacccctttctgctcttcttctacctttcaagttttaaaagtataaagatggcagagacattcctatttacctcagagtcggtgaacgagggacaccctgacaagctctgcgaccaaatctccgatgctgtcctcgacgcttgcctcgagcaggacccagacagcaaagttgcctgcgaaacatgcaacaaaaccaattggtcatggtcttcggagaaatcac

SEQ ID NO: 18370 - DNA, 264 bp, Glycine max
  unsure (1)..(264): unsure at all n locations; Clone ID: 701046958H1
gtggtgctgcaccctatcacaagtcctccctcagaatttgagcattcggaaaaaggggatgccttgtatgccatggnactagctctttctttggagaagttgacaaatgagaaacttctgcatgttcacagtgtggcagatcgtaacaatgatcctcaactagcagacttcattgagagcgagttctgtatgagcaggttaaatcaattaaaaagattgcagagtatgtgactcaactgagattagttggaaagggtcatggtg

SEQ ID NO: 18371 - DNA, 266 bp, Glycine max
  unsure (1)..(266): unsure at all n locations; Clone ID: 701046959H1
agacactcctctgtagcattttcttgaagaaaggaaaggaaacggcatcagttcagagagatcagagatgtgtgggagagcacgttgtactctgagagcggatgatgtcccaagggcttgtcaccgcagcacttcccctactcgnactcttcatatcgaccggccagcgtataatgtgtcaccnggattncnangtgccagttcttcgtanagatgacgcgtctngnggtgaaggctatgttctcaatgcatganatggggttaat

SEQ ID NO: 18372 - DNA, 267 bp, Glycine max
  Clone ID: 701046960H1
atggcttctagttcagaatctcaatctcagtctaaaccgctccaagaccgagttgcaatcgtcaccggctcgtcccgcggaatcggccgagaaatcgcgcttcacctcgcctcactcggcgcgcgactcgtcgtcaactacacctccaactcggcccaagccgactcagtcgcggcgcagatcaacgccggttccgccaccacgacaccgcgcgccgtcgtggtccaagccgacgtgtccgatccggcttcaggtgaagtcgtcttc

SEQ ID NO: 18373 - DNA, 269 bp, Glycine max
  unsure (1)..(269): unsure at all n locations; Clone ID: 701046961H1
gcttcttccatcctcagagcttgcngtcaacaacgattcctttcggttttctgtttctctggattcattttcatttttacggctaccagaatgtccagctcatcggaatattcggcattttccggnccccgcccggccaagtcgccggccgagaagtccactttctctcaganttgtagtctattgagccaatacatcaagganaaaggtgccttcggagaccttaccctcgggatgantcgcacccccggtacttacggntcccctga

SEQ ID NO: 18374 - DNA, 270 bp, Glycine max
  unsure (1)..(270): unsure at all n locations; Clone ID: 701046962H1
ttctctcggtttcctggtcccagatctggacctggacctcgtggcaagaggtgagctggtctactgaagacatttaggttttatgctggtcttccattatcaggggtnngaaatattcatgaatcagtgttcacatgcaaatttagtctctccctcccagtcctggctacaatcctagttgtagagctcgcgangtgcacatagtatttttacaggctaatntcaaactacaattgcattatgagcaaaatctaacatggagatttttgg

SEQ ID NO: 18375 - DNA, 181 bp, Glycine max
  unsure (1)..(181): unsure at all n locations; Clone ID: 701046963H1
tctcctttttactagaaaagatttgttttctntttttttgaaacnaaatagagtaaagtagagttgtagtttatgatacaattgttattggtttttcgcaatgagacccaacactgcctctatgtttcccatgttatgagtggaattattgatgttagaaattggtctcaagctaaaaaaa

SEQ ID NO: 18376 - DNA, 280 bp, Glycine max
  unsure (1)..(280): unsure at all n locations; Clone ID: 701046964H1
attcattttaatcctaattttgcacttcttgatcattcgatttttctcctgcaagatgcanntattcgtaaaaactttgaccggcaagaccatcacccttgaggtggaatcctccgacaccattgacaacgtaaaagctaagattcaagacaaggaagggatcccacctgaccagcagagacttatctttgcgggtaaacaacttgaggatggtcgcacccttgccgattacaacatccaaaaggaatcaaccctccatctcgtgcttcgcctcangggt

SEQ ID NO: 18377 - DNA, 277 bp, Glycine max
  Clone ID: 701046965H1
acactaagttatcctcataaatacactctaattaggtggcaagataagtgtctaaccttagtaacattgccacatattgtgttcattttggaattgtgccactaaaattctattcaattcatctatggctgcctcttcttatgctatgcaatcaatcctggcaaaccctttgatccgcatttccagcgggtctagggtgaaccaatttggcgttcctgctttgcacatgagaaggaatgttggcctgagagttaggtccatggctaaggaagaacaa

SEQ ID NO: 18378 - DNA, 277 bp, Glycine max
  unsure (1)..(277): unsure at all n locations; Clone ID: 701046966H1
aaagatcttcctgggaaagaggattttnttttccantaagccttatttacccggggatacacctgctgganttagattattgagggngaaagagctgagaaatcttagaggtgatggcaaaggagttagaaacttatctgacagaatatatgactatgatntatacaatgatttggggaatccagntaaaggaattgaacttgccagaccaantcttggaggatcagatatgtatccatacccaagacggtgtcgtactggccgcgaaccaagtgat

SEQ ID NO: 18379 - DNA, 272 bp, Glycine max
  Clone ID: 701046967H1
acatatcttcataccagcccccaaccaggtttgggtcgcattgctggaattttgtctcttcaagtggacgatggtcaaactcaactccaagctcttcaacgtgttggatccgaattggctatgcatgtagtcgcagcaaagccattgtttttaactaaggaacttgtaccttcagatgccttagaaaatgagcgcgaaattcttaaatctcaggcagaagcctctggtaagcctaagatggccatagagaaaatggttgaaggacgtctccg

SEQ ID NO: 18380 - DNA, 271 bp, Glycine max
  unsure (1)..(271): unsure at all n locations; Clone ID: 701046968H1
attattttgggtgagaaacaggattttgctccaagatgtattttacattctatgctaacatcctcagttctactgtaaaatttgatatactggtgatttcaaactattaaatatgtcacatactttaaagtttgtatgctcacctattgtttgtttctgtgaatagaaaggctaactatcatattcaaaattcggtactaagttagcatctgtatatcttcatcaatatcactttcatanatttaattggtactccaggaacaatgttgtt

SEQ ID NO: 18381 - DNA, 270 bp, Glycine max
  Clone ID: 701046969H1
ttcaattcaatactcacacacaaagttccctcctctccaaacatggcggcaattttctcttcttcactcttcgcttcctcgcctcttcccaaaccactttcttcctcctattctcgaatccataccgctccacaacttttcagggctcgatcttctctccttcaggataacgagaaaaaagtgatcgtgcatgattccttcccctccaaaacctctcctcttcacaccgctgataaatcaactggtggaaactcaattaacacctctgcg

SEQ ID NO: 18382 - DNA, 270 bp, Glycine max
  Clone ID: 701046970H1
ggggaatcttgccataagaggaagggagccactgtttactccttgtactccaaagggctgtattgagttattgatcagatcaggagtcgagattatgggaaaaaaagccgtagtgattggaacaagtaatattgtgggtttgccagcatccttgttattgcagagacaccatgcaacagtcactgtcatacatgccttcacacaaaaccctgaacagatcacctcagaagctgatattgtagtttcagctgctggagtgcctaatttggt

SEQ ID NO: 18383 - DNA, 269 bp, Glycine max
  Clone ID: 701046971H1
atcggccagcaccaacagcatcggcggcgacagtcactctccgacaacaacacttccgcggcgaaaaatgtctctggtggcgaacgaggatttccagcacattctgcgtgtgctgaacaccaacgtggatgggaagcagaagataatgttcgctatgacctccatcaagggtattggaaggagattcgccaacatcgcttgcaagaaggccgatgttgacatgaacaaaagggctggtgagttgagtgctgcagagttggatagtgtga

SEQ ID NO: 18384 - DNA, 265 bp, Glycine max
  unsure (1)..(265): unsure at all n locations; Clone ID: 701046972H1
gggtttctctcgctaaccaagaaggaactagggttttacagaatacaagnnnnnnnnnnnnnnngtgcggttttcgtcaatcaaatccaatccaatatcaaatatgagtcgtcatcccgaggttaagtgggctcagaggcttgacaaggtctatatcacggtgcaattggctgattcaaaaaatgcaaaagtggatctacgccagatggtatttttacctctccggtagtgctggtgctgaagaccatcantntgaggtaaaacc

SEQ ID NO: 18385 - DNA, 262 bp, Glycine max
  unsure (1)..(262): unsure at all n locations; Clone ID: 701046973H1
tcctagaatataaattcacgagagaaacacgaaaatctttcgnttccggcgagaaaaaaacttggacggtgaaattggaaggttttccgggatcccaaggccgaatcttggttcaatttacgaaaagagaagagagaggaacaacaacacccgttgttgaatcttcaagctgaatcaaatcatatagagagagaaagagagagacccggatagggaaatagcgtttagagagagaaaggtgaagtgaggttgtttaaagttg

SEQ ID NO: 18386 - DNA, 263 bp, Glycine max
  Clone ID: 701046974H1
gaaagtggaagaaggtgttagggaaaatgttgagagatccaggatgaatgagcaagaagcaactcctagttggcatccatctcaagaaaaacagaagtttccgccgagggacaacttgtttccagataatagatttccatttagtgcatcagacaattatttgagcccaaatcattctttgaattcaacccgtgcagatggaatggctactcttcgtaaccaacatatgtacaaaggatatacttccacacttttgagccatc

SEQ ID NO: 18387 - DNA, 172 bp, Glycine max
  unsure (1)..(172): unsure at all n locations; Clone ID: 701046975H1
gtgattcatgtgaatctccaactgttccgcggaactcggggttggaaatgggttggtcgtggccggtttcatctaagcggttgtagacactgatccagcggtcgtaattgttgtagctggtggaggngcacgacggcgaggaactctctccgacgcttccaagtccatttgc

SEQ ID NO: 18388 - DNA, 262 bp, Glycine max
  Clone ID: 701046976H1
agtttttgtgtgctcttggattggttgttagaatggagggtcagagtaagggtagttttaatgtgatggaagggagtgagggcaaaggaagggagtttgtggtggaaaagtctgcatcatcaatagtgggaacttgtgatttggttctaaggattttggcctttttactaacccttgtggctgctgtagttattgggacagataagcaaactgccattgttccaatcaagcttgtggattctatgccaactttgtacgttcc

SEQ ID NO: 18389 - DNA, 261 bp, Glycine max
  Clone ID: 701046977H1
actctcttcgacctcgcatcgcaccttcaacttaacctattccacttgtaatcgtaaacgctttgctagaagaagagacaaagtgtgtctgtgtgtgtgagagagagagcaatggctggctcgtgggcacgccgttctctgattgttctagccatcatttccttcggatgtctatttgcgatttccattgctaaggaggaagccaccaagttagggacggtcatcggcattgatcttggaacaacctatcagtgtcggtgt

SEQ ID NO: 18390 - DNA, 270 bp, Glycine max
  unsure (1)..(270): unsure at all n locations; Clone ID: 701046978H1
gccaaacccaaacacaacaacacaaagaaaaaaagagcacaaacagaccaattccaacggttgaattttttggctgaagacaccccaccgacgttagtcaaataaaacatgtcttgctccgtcgcggtttcnaattcgccggtgttctctccttcttcttccctcttctgctcgaagccctccatcatctcttcttcgccggaatccctctcgctctntntctcgcatntcaaaccttccaactcntctacgacgtcgtcttgttcttca

SEQ ID NO: 18391 - DNA, 275 bp, Glycine max
  unsure (1)..(275): unsure at all n locations; Clone ID: 701046980H1
caatgagcagaaacagcgatgaacctgcgatgactgaagaagcaccaaccaaacagtccctagcgaacatcttctctttgttccgcaaaatcanttttcaactccctttcctcccacccaaacctgaagaaccgaagcttgaggctcaggctcagcaggagggtccgaagcctggccgtgtacagtttccgaaaagccaagtggcgctgattgcttcttcgcctctgcaagctgaacctgatgctgaccactctcccgctgccaagacaaccatc

SEQ ID NO: 18392 - DNA, 255 bp, Glycine max
  unsure (1)..(255): unsure at all n locations; Clone ID: 701046981H1
gcagttgcgaaaccgcaacacaaantgcgatagcgccgcccngcaccggggcgatagcggacgcgacggccgctccttcaatcctccccgcagcagaggtcattgtcgcggcaaggggccgctccgctccggcgcgatacttagatttgcattagcatcaaatgaatgcgtacaggagtgatttacatattgcatatttaacctacttttctgtgtattcaactaataatcattgtcacatttcattgcaggaat

SEQ ID NO: 18393 - DNA, 175 bp, Glycine max
  unsure (1)..(175): unsure at all n locations; Clone ID: 701046983H1
tctccctccntccctctntctctctgtgcttccattttcgttgtnattattctctctctctctgaattttcttttctntctcttcgcgtntagggtttcgtttcctttacttcanaatcaaaagctcagcttcaccggattaagtgtaggtagcggtgataccttcaattggaaa

SEQ ID NO: 18394 - DNA, 268 bp, Glycine max
  Clone ID: 701046984H1
gaggagcaggaggcatcaccgttaccaaacatggtgaaagggcgacaaggagagcgtgttagactttacgtcaggggttcaatacttggatacaagaggtccaagtcaaatcaatacccaaacacctcattaatccagattgagaatgtaaacactaaggaagaagttgcgtggtactgtgggaagcgtatggcttacatttacaaagccaaggtaaagaaggacggaagccactatcgctgcatttggggtaaggtcaccaggcctc

SEQ ID NO: 18395 - DNA, 268 bp, Glycine max
  Clone ID: 701046985H1
ctaactacgcacgcattcgtgagaaaactcaatattcgtcgctcatggcactctcttctcgtctcttttccaaatccaaattgatctatggcagtcaaatacttctacaaaaggagcatgctattccagttcgtcactttgctaaagagtctgcccctcctgcccttaagggagacgagatgctgaagaacatttttgtggaggtgaagaacaaatttgagaccgccataggaatattaaagaaggagaaaatcaccattgacccaga

SEQ ID NO: 18396 - DNA, 269 bp, Glycine max
  Clone ID: 701046986H1
caaaacccaaacccaaacccaaacattccattatattacactttacatgcaatggcgagtgcgtgggtgaaatcgtggcagtgcaagtcaagagctttcgaagacgtgtaccacccacaccccaaaatcctgagtgcaagctgcagaaagaccatggaaagcataaaagaaatggtggaaatacccaagcccaggcccaggcccaagccaaagacacccttggagaaacatccgagctccaaatacccatcatcagccaccaaacctga

SEQ ID NO: 18397 - DNA, 238 bp, Glycine max
  Clone ID: 701046987H1
accgaagaataacttgactttcccgaactccacctgagaaaaagatacccttaattcgcaggcgcgtcttgtgttggacaacaaccacaagatgattaacttcgaagaaaccgagttgcgactcggcctccctgggcaacgactcagcactcaagggaagtgctgccaagagaggcttctctgaaactgcttctgttgatttgaagcttaatctttcttcttgcattaacgactctgc

SEQ ID NO: 18398 - DNA, 266 bp, Glycine max
  Clone ID: 701046988H1
gagagatcgaaaatggcgttggctttcgacgagttcggaaggccgttcataatcctgaaggagcaggagcagaagagcagactccgaggattggacgctcagaaagccaacatctccgccggcaaagccgtggctcgcatcctccgaacctccctcggccccaaaggcatggacaagatgctccagagccccgacggcgacgtcaccatcacgaacgatggagccacgatccttgaccagatggacgtggacaaccaaatcgcgaa

SEQ ID NO: 18399 - DNA, 262 bp, Glycine max
  Clone ID: 701046989H1
attttggcatcgaggttgaatctcatcggagagagaaaaaccataaccatgtctggaagaggaaagggaggcaagggtctcggaaagggaggagcgaaacgacaccgtaaggttctgagggataacattcagggcataacgaagcccgcaattcgccgtctcgcgagacgtggcggcgtgaagcgtatcagtggtctcatctacgaagaaacccgcggtgttctcaagatcttcctcgagaacgtcattcgcgacgctgtca

SEQ ID NO: 18400 - DNA, 262 bp, Glycine max
  unsure (1)..(262): unsure at all n locations; Clone ID: 701046991H1
ggcggtaggctcatccgagaccggaagcagcaatggggatcgatctcaaggccggangtaaaagcaagaaaaaccanaagaacagcacccaagtccaatgatatctatcttaagcttcttggtcaagctttatcgttccttgttcggagaactggcagaaattcaatgccgttatactcaagagattgttcatgagcaaggttaacaagcccccattgtctttgtcaaggttgattaagtataccaaggggaaggangtaat

SEQ ID NO: 18401 - DNA, 262 bp, Glycine max
  Clone ID: 701046992H1
cagatctgtgtcgtattattaagcagaacaagcaagggtgcaaagtgggggtgtttttttcgctggatgagtggtagctgacactcacttatggcgtctgaaacggcgtcgtcggcggatgaagaaaccgttgttgttgtttcggctgctgcgggtgcaggaggaactgataagagaggcaagcaccggattcttgccgaactgaagcgtctcgaccaagaatccaagtttcttcaggaagaattggaagagcttgagaaaa

SEQ ID NO: 18402 - DNA, 264 bp, Glycine max
  unsure (1)..(264): unsure at all n locations; Clone ID: 701046993H1
tgctacctaaaccctagtctccatacatcaacttgggaggttaaagagacggcaacgttgtgctgtccgccttgaccgagccagagcttcgtcttggccctcgattttgccctgtaaaactaatcccagtaacaacagaaataatcaatggcaccgaaacagaccaaggctgagaagaagatcgcttacgatgcgaantgtgcgacctaatggaggagtacggccaaatcctcgttgtaaactccgacaacgtgggatcgaacc

SEQ ID NO: 18403 - DNA, 268 bp, Glycine max
  Clone ID: 701046994H1
aatttctcaaatcggaacctcacactccaccgccccaaccccaacccctaattccgatcaacgctctccccagttggttagcggaaactcagttattctgttttattgacgaagtgataacaaatggatgattgggaggatgagcatattgcccctattgatctaacattgaaagatccagttaaaactaattgggacgatgaagatgtggatgaaaatgatgtgaaggaatcatgggaggatgaagatgagcctgctccggcacctg

SEQ ID NO: 18404 - DNA, 279 bp, Glycine max
  Clone ID: 701047001H1
cggcacacacagacacacacatttcgtcggaatgggaagggtgattcgcgcacagcgtaagggtgcggggtcggtgttcaagtcccacacccaccaccgcaagggtccggcgaggttccgcagcctcgacttcggcgagcgcaacggctacctcaaaggggtcgtcaccgatatcatccacgaccctggtcgcggtgctcctctagccaaggtggcgttccgccacccctccgctacaagaagcagatggagtcttcgtcgccgccgagggcttctaca

SEQ ID NO: 18405 - DNA, 139 bp, Glycine max
  unsure (1)..(139): unsure at all n locations; Clone ID: 701047002H1
tcaatcccttatctttccttccttccccatacccatttcatatcacntccntcaaacttttcaacttcactcttcaattcagttcaatttcaaacatgctttgcgtcaacactgccttcacctctttcttgcccagaaa

SEQ ID NO: 18406 - DNA, 274 bp, Glycine max
  Clone ID: 701047003H1
ctttccattctcttcaacctaacgcagcatcgctatactcttcattccatggctttgcccaatcagcaaaccgtggattaccctagtttcaaactcgttatcgtcggtgatggtggcacaggaaagacaacctttgtgaaaaggcatctcaccggagaattcgagaagaaatatgagccaaccatcggtgtggaggttcacccattggattttttcacaactgtggaaagattcgattctactgctgggatactgctggacaggagatttttgg

SEQ ID NO: 18407 - DNA, 277 bp, Glycine max
  Clone ID: 701047004H1
aaagaatattaaaaagcggaagaaagcagagcagagagggaggtggaaaaagaaaaaggaagaaggaatgagtgcaacagtgactctaactctaaacctatgccgttcttccatcgtcgcttcttgtccacattatagccacaaaccaaaccctaatttcaatgccttttttagcttctctttgtctctgtctctgtctcaccacagacgcatcgttatctacaagaaaccattcccctctagacggatgtggctttatggatatatgaatagagat

SEQ ID NO: 18408 - DNA, 137 bp, Glycine max
  unsure (1)..(137): unsure at all n locations; Clone ID: 701047006H1
acccttcaagatgaaaccgtacctacgtccaatattcctattatnccttatccttctcgaccaatccatttcggcgagtgctgctataaatattaatggtctgagaaacaaaattagagaagttctaaacaagcacc

SEQ ID NO: 18409 - DNA, 273 bp, Glycine max
  Clone ID: 701047007H1
gcgagatcttcattcgccgattttaaaagatgagtaagcttcagagtgatgctttgcgtgaagccatttcaggaatcatggccgattccaaggagaagaatcgcaaatttgtggagaccatcgaactccaaatcgggttgaaaaactacgatccacagaaggacaagcgtttcagtggctctgtcaagctgccccacatccctcgccccaagatgaaaatttgcatgcttggtgatgctcagcatgttgaagaggcggagaagataggactgg

SEQ ID NO: 18410 - DNA, 261 bp, Glycine max
  unsure (1)..(261): unsure at all n locations; Clone ID: 701047008H1
ctcattcgttcactgtcactttacccaatcctaacactttcttctctctgntttccttcttcctcgcatcaatggagttggacggcgttctcctcggcatgtgcaaccctctcctcgacatctctgccgtcgtcgacgacgctttcttgcaaaaatacggtatcaagttgaacgatgcgattctcgccgaggataaacacaaacctatgtataagaattggctaacaatcctaatgtggagtacattgctggaggtgctac

SEQ ID NO: 18411 - DNA, 267 bp, Glycine max
  Clone ID: 701047010H1
cctcatgcacttttgcactgttatttattgctaaactaaatatcaatatcaattatcttcttcctctttaagtcaaaccataactattccatttctttccaccccacagtttctgaattctgggtgttgagtttcattttctccatttttttttctctcccttggatgtgttattttcaatccaaaagatcatgcaaaaaactatatttgagaatctgaaagagtgactaggtggtctatttgagcttgtgaagtttgtgtttgtgt

SEQ ID NO: 18412 - DNA, 265 bp, Glycine max
  unsure (1)..(265): unsure at all n locations; Clone ID: 701047011H1
gttgttctgtttttttttgttattgttaatggacctttgccatgtcaggtgcgcttgcatggcgggtccgaaaagcgctaataaaaattaatattgttttttgttttggggagggaaggtttcgggggtgtttttttttctttttggccccgattctcttctctctctatggtgttgttgtgtttttncctttcctttcttttcctnnctctcttctatgtcctgtgaatttttctatactctagttcgcgtcgtaagggctcaa

SEQ ID NO: 18413 - DNA, 266 bp, Glycine max
  Clone ID: 701047012H1
cacaatgtgaaggatttggaactgctcatgatgcacaacaggacttactgtgctgagattgcccacaatatatccacaagaaagagaaaagatatagtcgagagagccgcgcagttgatgttgttgtgacaaataaaacggccagattacgtagccaggaggatgaatagtctaaatgactgaaatttacttatttgtagtgaacctggtgacactagtgtgacattgtattttgatcatcttttattctcgtataaattgtagga

SEQ ID NO: 18414 - DNA, 270 bp, Glycine max
  unsure (1)..(270): unsure at all n locations; Clone ID: 701047013H1
cgcttgttgtttctcaaacccaacagaagaagaaagaaaccctcactttactttacttccattgcattcacattcacattcttcagctcgccggtgacaccttcatcgttttccgccatgtcctcctattccgaacaaccttagattgccgtcaatctctctcacctttttcccttctttcaacagaaaaagagagagagtgtgtgtgtgattttttttttgnaaaaaacggntangnanggnnggnggtgcntccaccccngggttggg

SEQ ID NO: 18415 - DNA, 269 bp, Glycine max
  unsure (1)..(269): unsure at all n locations; Clone ID: 701047014H1
ccaaaacaaaagaaaacgaaaatccccaatcctgcgttgtgttgcgacttgcgagccatgagaggggtcgtgaaagcgtttgcggggaatctgttgttccatggaagaaagactcagactcagtgcattcgctcctacagtctgatcccaatggtgatagagcactcttcccgaggtgagagggcatacgacatcttctcgcgccttctgaaggagcgcatatctgcatcaacggacccatctccgangacnntgcccacgtcgtcgtt

SEQ ID NO: 18416 - DNA, 124 bp, Glycine max
  Clone ID: 701047015H1
atgtatgcttccaaatcataggaaggagcatgcatggcatttttttttcttatcttattggcattagtctcactctttatgtactctggaaaaagttttaaagatatacaccatttcgtgagtt

SEQ ID NO: 18417 - DNA, 276 bp, Glycine max
  Clone ID: 701047017H1
tggaagcagcataaataggccaccaatgcacatttttcttcctccatgactgctaccatgtctggccctattcctaatgatcactggctccatttctatcaacaaaaccaattcccctcttccgtttccgacgccacaaccgtgacaaccaccgccgcgccggccaagctaagcccagaaggcggagtctcaaagcccattagacggcgttcacgggcctcaaggagaactcccaccactctgctgaacacggacaccagcaatttccgggccatg

SEQ ID NO: 18418 - DNA, 274 bp, Glycine max
  unsure (1)..(274): unsure at all n locations; Clone ID: 701047019H1
gcagcagggagctctgccgcctccaacaaaacagagttcagaacacaaaccctcgaaccgaacgtttttgagggttgatagagcacgatggttcagtacaattttaagaagattaccgtggtgccaaatgggaaggatgtggtcgacattatcctctctcgcacccagcgtcagacaccaaccgttgtgcacaaaggatatgcgatttcacggctgcgccaatttacatgcgcaaagtgaagtatactcagcagantttcacgacaagctctcc

SEQ ID NO: 18419 - DNA, 212 bp, Glycine max
  Clone ID: 701047020H1
tcgctttccagaaaatggtgaaccctagatgcttcctcgacatcaccatcggcggcgagttagaaggcaggatcgtcgtcgagctcttccacgacgttgttcccaaaaccgccgagaatttccgcgccctctgcaccggcgaaaagggcatcggccccaacacggcgtccccctccactacaagggcatgtgtttccaccgcgtgatcaaag

SEQ ID NO: 18420 - DNA, 270 bp, Glycine max
  unsure (1)..(270): unsure at all n locations; Clone ID: 701047021H1
ctactcctatttacacccctcaaatctgctttcaactttcacacncacaccaccaccatgacccttcctcaatcatttggctgtggacttgtgcaagcacccttggtgacaagctctggtcttcttactaaagtttggagtgttatctcttctcgtgatgaagacatagtttcatactcaggaaataatggactgtcctngaaagtttctgaggattcgggttgacggttgttgcgtttgaggtcaacccggatttngatcttcaatcta

SEQ ID NO: 18421 - DNA, 268 bp, Glycine max
  Clone ID: 701047022H1
gggttttctgctgggaaatctatccttgtgcttggaggtgctggtggagttggaacccatgttattcagcttgccaagcatgtttatggagcatccaaggtagcagctactgctagcactaggaaactggaactattaaggaatttgggagctgactggcctattgattatacaaaggagaattttgaagacctgtctgaaaagtttgatgtggtgtatatacagtagggcaaactgaacaggcattcaaggttttgaaagaaggagg

SEQ ID NO: 18422 - DNA, 267 bp, Glycine max
  Clone ID: 701047023H1
taataatagtactacattatctagtgttcgagagagagagagttcatagttcaatgctcagttcttcttcggcttcgtttttgaggcagttaagtgcaaaaaaggagggttggaaagagagatactataatagtggtagtggtggctggggaatgagctttggagggtgtgaggcaagtgtgaaactaatggaagggtttaacatgcaggggaatgtgggaggaagagggtgatggtggtggttgatgacacctcacattccaagca

SEQ ID NO: 18423 - DNA, 268 bp, Glycine max
  Clone ID: 701047024H1
ctctctttctctagtcctgttatttctcagcgcgtaaagcatggctttgttggtggagaaaaccacgagtggtcgcgagtacaaggtcaaggacctttcccaggccgacttcggccgcctcgagatcgagctggccgaggtcgagatgcccggcctcatggcctgtcggaccgagttcggcccctcccagcccttcaagggggcccgcatcaccggctcctccacatgaccatccagaccgccgttctcattgagaccctcaccgccc

SEQ ID NO: 18424 - DNA, 266 bp, Glycine max
  unsure (1)..(266): unsure at all n locations; Clone ID: 701047025H1
gacactcacacacacagcacaacaaaagcgttttatcttccgttccatgtctatacactgaaatggcgtccatgtctacgtgcatcactgtgatccccacttgtgggctaccgcggcggctactttccttcaccccgaagcagccaatatcactcccttncgtgattggaggagtcccgaaaagagtatgggattctagggttttggtggcgaggccggggggcgcagtggaaagcgacaagttgccttcggatgtgagaaagcga
